United States Patent Application Publication US 2007/0067865 A1 - sequence listing, part 56

SEQ ID NO: 356557 - DNA, 244 bp, Zea mays
cccacgcgtccgccaggctgcacagcagcagcagcgaccgcccgcaggcatgcaacagcagcagcggcacggggagaaaaaggtgggccaaaccgggcacgaaaccgaagcgctcaccgtccctcacccaaatcgccgaccgtgaggagagaagccgagctgcagagagggagggcagcaggcggcagcgcggaggggaaatggggaatgcgcgaccagtgtgagcctctcacccccgcgaaat

SEQ ID NO: 356558 - DNA, 137 bp, Zea mays
ctgcttcttgctcctctcccacccagaaccagaaccaggaagcatcgcgagccaccggcgagccctcgtcgccgccaggacgtgcaccgacgaccgggtctctgccggccgctggcctttctccaggtcttcgccgt

SEQ ID NO: 356559 - DNA, 309 bp, Zea mays
gtcctctgttccagcgtttgccgccgctctgcacaagccctgcctaccgatgtccgtcgcgtccgtggccgccctccggacggccggctccggccgccgccgcggcgcgggttcccagcagaccggccttaacgggggcaggttcctgatgatgcagaggagggagctggtgaccaaggccgggatcccgctcgccgtctcctgctcgatggctacctcaccggcttcagccaacggcgctgctcaagggctggagattttgccgttcaaagctgacgggtacaacttctggacgtggcggggtcgccg

SEQ ID NO: 356560 - DNA, 135 bp, Zea mays
ctttcacacttgacttgatgggttgctggcgctcgtcactgcgctcagggccccacgctgcggagaagccgccccgccaccgccaccgcccgccaccgccaccgacgaacggccccacctcctccctgaacgcgc

SEQ ID NO: 356561 - DNA, 318 bp, Zea mays
cccacgcgtccgcctccttccgttttccagccggcgccgcagggtgcatccgccctcactgcttggccccactggcggcccccacaacgctctctttggcggccacgcagcggtacctcgccggctcctcctcccagtggcggccggcatttgggacctgatctccggcggagctggcgccgccgccgctgcgtccctcgccgtccggcgaggtatgcagcttttccggcagggagatgtagctggctcgttggcagaatttgacaaggcgatcgagatggacccgcgacagaagcaatatctttggcaacggggcct

SEQ ID NO: 356562 - DNA, 313 bp, Zea mays
ctagatcgcgagccgccgcccttttttttttttttttgtaagaagtacaatgtaggccctgctgtattcagaatttcagatgagtatgtgcaacaactttaaaaagtggcatttttatgctatacaaataaccaatgttgtcaaaaacctacagagtacagggcgttttgcatatcaacaccgcttctcacagcagatcaatcttcagaactggtgtccaccgcattttctccttgtagctcgttttcttctcgtagatcatactcaacaactagcccaagattatcaacaaacttatggtacacctggcacc

SEQ ID NO: 356563 - DNA, 303 bp, Zea mays
cccacgcgtccgccaaaaccgccgcgcacgctgccaccaccggtacccaacgaacatggcggcggcgcgtcctccctcgcctcctcgtcgcatatcccccgccgcgccacagccacggccccagcacagtcgcactcgcctccgttgccgcagcagctccgccccgccaggtccttcaaacgcggggcgctcgcgcagcacgtccggtacagctttgccggcagggaggcatcgaggcggcgcacaccaggtgcttgcttcgtggtctcatccagccagccaggccttgctgccatcgatgtg

SEQ ID NO: 356564 - DNA, 298 bp, Zea mays
ctgcctttgcgccggggtccgggggatgccagtgtatgtatgcatatggattgaatcccaagcaaggacgagtcatgcactcatgtacaagcattacttctgtgcacagacgaccatacagattatatgagatctcactcacaccttttttttttgcatttggtttagccagcgaccggtaattgcttgtcactgcagcgtcctgtttcgacatgtctgtcgtggcaagctagagtattaggctgtccgcagccgttcccccaaaaaaaaaaaaaaaaaaaaaaaagggcggccgctc

SEQ ID NO: 356565 - DNA, 296 bp, Zea mays
gcctagagtcaaagcaacctcaagaccctcttaccacatcatatacatgtaatggcagttctagtctgactccaagttcgaaggaggctttgctaaagaacatatcatcaggcaagaagggcggtagtgctggcaaagtaacaaacaaggataacagactacacaaattggtctttaatgttttgcttgatggcacagaagtagcttactatgttgatgggcagagaaaggttgacgggtatattaaggatcaaagaatctactgtaatcactgcaacaaagtggttagcccatca

SEQ ID NO: 356566 - DNA, 299 bp, Zea mays
attcgatctccgccctgcccatcacccctacgcgcgctctgcttcctcgtgcggctttctgctcgcctggccacgccctgcttccatggtcgcgtgcccatcttcctccctctctgcttgccgcgtgcgcagtccctggcgcgtcttcttccctattggtgcccgcccagccgctccctcctctctccccttggctcacctccctcaatttcccgcgccgtccatcgcgcccggctttagctcgtcggacctccgcgcagatgctcgctccatggagcccgaccgagctcctccctcgc

SEQ ID NO: 356567 - DNA, 256 bp, Zea mays
cacacgcatccgtagacagaacgcaccctccagtaaagtccccatggctgctttctggttgctgctgctgttcgtcgccagcgcagtccttgtttttcgtacatggagagctcaaagcttcgtcaacaaggcgcggcaggcagggccgaggtacccgccggggctggagccgtacccgctgatcgggcacctgccacagttcttggctaaccggcaccgcgtgctcgactggatgaccgaagcgctcgcacgccag

SEQ ID NO: 356568 - DNA, 315 bp, Zea mays
gtttctttggatccgaggcggaggagtgatgggagtttcaagaatggttacacttcagtacttgaagctcgcctcgctgaaaagctacctgattcaaaaatttctgcaactcctcatatcgagtcaaggttaagatacttcaagacaaagtattctgctttggagcagatgttgaacaagagtgggttcacatgggatccgaccaagaagatgattcagtgcgagacacaacaatatgagacacattgcaagaataatccagatgcaaaagggttgtatggagtgtcctttccttactatgatgaactttcaatg

SEQ ID NO: 356569 - DNA, 312 bp, Zea mays
gttctagatcgcgagcggccgcccttttttttttttttttttttttcaacaatccacacccaacacaggcggtggacacaacccatccaataatctttcatgagtacagtgtcggagtcatcggccaatttcttcaaaattatcattaatttatgatgttcatgtaactatagtcgtaggataaggcagggccggtttggtttcatcacgcggatgggagcaccttcttgacgatctcatcactgagcgaggcgatctgggcgtcgagcgccttaacagcctcctccttctgcgcctcgaggttggcgagcg

SEQ ID NO: 356570 - DNA, 119 bp, Zea mays
gaccgttccagcatattcactgtcatagttagagacaatatctcgaactatgaccgttccagcatattcactgtcaatgaggtggccatttgttacaccattgacagtgaatatgctgg

SEQ ID NO: 356571 - DNA, 321 bp, Zea mays
cccacgcgtccgcttattggtagaataatgtgccccgtcgaggcacactgtactgtagctgtattcatgatagagcacgcagggtcagggagtggtgttgctgtgctcctgctccctcgatctgtgtattaaatatcactagctagcccgtgcattaccactaagtggttgacacgtcgtttagttttattcggatgaaagccaattaaaactggcggcgtctcattaattactgagaataaaagagttgtatcaatgatatcaacttcagagtttggaaaggtagcatttgttgcgattggagcaaccatggtaggaagc

SEQ ID NO: 356572 - DNA, 319 bp, Zea mays
agcaccctctccagcaccgccgggtcaagaagggccatcgactcatcgacgaggtgaggatacaattcgcgcatctcatctaaagtcttggccttgtgccccagcgcgtcattgatggattgatgcccggcgttcttcacttgggcggcgcccttgctagattgctcgccgccgccggcgcagcagggcgcggcgagggtctctgggacgcgagcctcgtcgtcggggcggcaccgcgcccgaatagcacgagcttcttcttggatgacggctctgtggcatccgaggccttggctggcgttgactcgggcggcggcgt

SEQ ID NO: 356573 - DNA, 314 bp, Zea mays
atcaaacagcggtaggcaaaagaaaagaaaaaatgatgggccaaccgaaaaaaacagtagcataattacgtcatccaaggatgaatctgtcttctatgacgaggccagggaacatctaacagagattctcaaggacaaaagacaaacaaccaagcagcacccgacacttgagatctcaaggtccttggtgaggatgctttccctccctcagtccagcacatcatcacctaggagtagccctagggcaaaagactgcatttacctctcacctgaagaggcaagcattcgtgacatatacaagtcaaataaagatc

SEQ ID NO: 356574 - DNA, 163 bp, Zea mays
atggagtactcttacgtaaggggagtgaaagttattctcctatagatcacatattgttgctggtttgaagtagttgaataacctgctgcacttgccatactccttttcttgtggaagtcttgtaatatgtgttgcttatatatcttaaaattacctactaatc

SEQ ID NO: 356575 - DNA, 312 bp, Zea mays
aaaagatactattctgaacctactccgttggattttcaaggaatgagggctcttattattgatggaaggagtgcacgtgcagaggttactatgtaccatcttcgtagacttggaatacagtgcagtcttgttgccacatctgaatctgaatctgcatcttcagctttgatgaaagcctgcacctcaagcaaaaacaatccggacatggtccttgttgatacagaagcttggggtaaaggttcaggtttggcattctatcatcgttttgtagattgtcaactaaagggcgcacacaagttttctcagcccatg

SEQ ID NO: 356576 - DNA, 308 bp, Zea mays
cacctagctaggcttagctaagctatatagccagccaatcaaacggcggcctctcatcactaggctgcaaccatcgctcatcggccatctaagcccctcctcctcctctcgagtctcctccccctgccctctaggcgaacgcgcggtggcgccatggacattaggctgctggtatccgccgacgccaacctcgccgccgctctgtcgcgctcccgctcttccaagtccgcgttccagcgccaggttgtcccgggcagccgggcgtcgtcgtgcaggtctgtccgcgcgcgctccgccgcagccgcggg

SEQ ID NO: 356577 - DNA, 283 bp, Zea mays
  unsure (1)..(283): unsure at all n locations
atggaaagagacttggtgggaccatcatggttctgtcctcccattcttgcccagctgcagggntacccattctcgccagtatcttctccactctccctataccaagtgcttccatcttcatttattccagactccttgacggcttcgtccagctagttgattccccattccttctcactagcaataccagtgtctctcttgggtggggaatcacaggattgaggagccgggcccctcggcttgcaccgtgggtagaagtcctgctgcttgaactgtcttctag

SEQ ID NO: 356578 - DNA, 304 bp, Zea mays
tggaccgtggtccgcagtcgccatggcgctcgccgtcgccgtgctcgtggccggcacgccccggtacaggtaccgccgcccgcatgagcccgctgacggcggtcggccgggtgctcgccgcggcgtggaggaagcgccggctgccgctgcccgccgacgccgccgagctccacgggttcgccgcggccaaggtcgcccacactgacaggctcaggtggcttgacaaggccgcgatcgtggaggccgagctggcggggaatcagcgggcgagcgcggcggcagcgtcgacggtgacggaggtcga

SEQ ID NO: 356579 - DNA, 301 bp, Zea mays
cccacgcgtccgtaaactgaacaacctatgcaatggagaatgtactgaaattgatactggttcttgatactttgataggtgatgtattatctggaacaacatcaggcgatgttcatcatcgtggtatattggagggctggtttggagctcatttgtggaattctcgtgccattgttcttcttgccacagctcttttggtgttcgctccgttggtgagctttaagcgcttggattcattaagatacacatctgcgctatcagttgccctggcagtagtttttgtcgtaattactgctgggat

SEQ ID NO: 356580 - DNA, 300 bp, Zea mays
cggacggtgggcaaaaagaggcatctgatcttgttaaagtttgcacctctgttttggagtttgaagcatccagagatggactttacttcgttcctgaggataacgcttccgaacaatcttcggacaaaggcagggcctggcatcaaactttcttgaatctcctggcacgtctagatgcggcatttcattcttttacatgtgcagaacaagaatggaaacttggccagctcagtctggaagctgctggaaaaggcctgttttcagctaataaccaggtttcagtagtctctgtgaaagcaa

SEQ ID NO: 356581 - DNA, 303 bp, Zea mays
gggcgcgccattccggaccctccactccagctccactctcccatggcttcctccgccctgccttccagaaccttgcaccgccgcgcgctcccctcgtctaccccgtgccaccctgcgacggagaccttcgcccccggcgccgtctcccggcggcgagcagccgtgcggctcctctccgcggggttcctgaccgccgtcgcgccgccgccgtcgctcgccgcgaggaggggacgcgttgtcgtgcctccggaggactacgccactgcacccgatggtctcaagtactacgatcttgtcgaaggg

SEQ ID NO: 356582 - DNA, 307 bp, Zea mays
  unsure (1)..(307): unsure at all n locations
cggacgcgtgggcgctggtggggcaatggatttctcggggttggatacagttgcgatagagtcagcaatacatagtgtctctgggggcgctgtgataaaaggccgngaagcaatggcagtcactagcctgatgatgtttgttgaatccttgcaagtaaacattaaagctgccatgaagctggatgaaggctcatgtagtcgattaacaacacttacagaaacaattttagatgctgtcattaacaagtcactagtgaaatccatacaagatattgttgatgatgatggctctgttaaagacactgca

SEQ ID NO: 356583 - DNA, 295 bp, Zea mays
gagtcagggagggcacggccaagacaacgcgagagtatgtgggagaaccgggtccacgatcacgactccgacggggccgagacggcggtacccgcgccggtgtcggtggtcgagattgaggcggaggacaagcaggaggaggcaggggcggactccaacgacagaataatggtcaacaagaggaggtcggcggcctccgcttgctgagactatttgacttctggctgtactttctcagctacatgttcagcggcactctgggtctggtcttcctcaacaacctgggacagatcgc

SEQ ID NO: 356584 - DNA, 100 bp, Zea mays
cccacgcgtccgcgcacatatggcgtcgacgatcatggccgccacctctcgcatcgtcgcggccaagacgccgtttcttggccagggtcgcgacgccgcc

SEQ ID NO: 356585 - DNA, 200 bp, Zea mays
cccagatctcatctgcgacgacctcctccctcccgatcccgctccgtctccccccaccgtcaccgctgccgctgccgcctcccccaccgaggtcttgtcttcggcgatccagccggagcccgcggcggcgacgatgtacgggtgggagatgctgtcgttcaacatacacgatgggttcctggaggccatcgtgcggggca

SEQ ID NO: 356586 - DNA, 305 bp, Zea mays
gatgattcctcatggctttgtgacgcaaaccaaactccatggataggctcagatgattcctcgtggcttcgtgacgcaaaccaaacagcctgatgctctagccaaaggcatgatcgccctcgttctgaaacaaaagaaaatgctgcattaaaccatgtgtattcctttcagtgagcagcctttgcatgctgcatgagatcaagcaagccgccgactggcaatgctccacctgccattcagttcgttggtgaggtattaatcaccagccatgttggcgcttggcggcatgcagatggagcagaaca

SEQ ID NO: 356587 - DNA, 296 bp, Zea mays
tcttgcggtcctgcccctttcgtctcttcgcctccgcccccgcgcggcctccgcccccgcgcggcgggtgaatgccgatggttgccgcctcgccagagaagctccactgcggcgaggcggggtcaggtgacaaagaaaaggaggtggcggggagggatgatgccgaggttatgtcgccgcagctctcggatgagccgctgcgggataaggcgcaacgcatccaggtcatgctcaccggatgcatgtccgaacgcctccctgaccgcggcaagaagctgctcgccacactcgatgcc

SEQ ID NO: 356588 - DNA, 303 bp, Zea mays
cggacgcgtgggtacaagcatgcattcatgttctttgggttgtaaaactaggtttttataaaatgtattcacaaatattttaaaagactccccccccccccatttgttgttgaaacataatgtacagctatcctccacaattctgatttctgaccatataactgaacatgggtctgcacagtatttcaaactcaatagtgtaccgcagcaaactttttaaaaagaccaagtggatgtgagtgtaatcatataaattgcacttagctatgcctaaaactgatccatgaaactaaacataagtcc

SEQ ID NO: 356589 - DNA, 296 bp, Zea mays
cggacgcgtgggcaacacatccactacaacacatggttttatgtgttgtaagaaattagtgagcaacacttaatatgcgttgcaagcatcatcctttaagttactagagtggtggcaacatttaatatgtgttgcaagcaccattcgatgtttaaataggatgcaacaacacttaatatgtgttgctagtggaatttattgattaattaggatgtggcaacaagtaatgtgttgttagtaacatttaatattagaacacagattagttctaatatattttattagttcgttacgat

SEQ ID NO: 356590 - DNA, 328 bp, Zea mays
ccgcaccgcaacgtgcatcgcggaatggcgtaccttacgttcgcttatccttcgtttttccgctagctgatgatgaatccttgctgcaggtcctgagctccccttacatgcgcgctcctccggccgctggcgctgcgcctgaggtgagcttccgccgtgtccctcgtctccactgatgagttcttgatgcaagcctgtagaaccctaaacctcgtctccatacatacatacaccatctactatttggtgcaagaaagaaacctactagcatagcagcacgagatggttgtgtaacacgccgcgtacatcctgtttggcatgcatgtat

SEQ ID NO: 356591 - DNA, 126 bp, Zea mays
ataaccttaggagtcagagtgttgccccgcctcaatggacaatgcgtaacattgatgacagaaatcgtctacttttttgtattctgaatatgtgcaaggagatactcagttatcttccaaaagttg

SEQ ID NO: 356592 - DNA, 127 bp, Zea mays
caaggagcaaaggaggcgttcaatttctcaggcacttgctgcctctgctccatctgttcagcaaagaacttcagataagtctgatactgagcatttgaagtaccttgaagtgcttgagaagttacca

SEQ ID NO: 356593 - DNA, 322 bp, Zea mays
  unsure (1)..(322): unsure at all n locations
cccacgcgtccgacaatatgtgaggagtaaaatacaattaacatagttctttgtgagcgatgtagtataatttataacacgagggataagcttagaatttaattaattagctgataagctatgtttaggctaattgtattaaatgtgtataatttgttgtctcgtgatgtttgccttaggttcggttaatctagagaagcgtaattattgcgcttagtcgtatgtcgataactagtattttcgtataacattgtacagcgcctcgccgctaggtatttaattcgctatcgcgtaganctatttaggctcgtggtattcctat

SEQ ID NO: 356594 - DNA, 203 bp, Zea mays
cgaaaatgtgcagcgccacaagtgcattccggccccgtgagtaatcgtaacagaggatcgctagctagtgtgctaccctgtacggcgcaggcgcagcatcgagcaacagcggcatgtggcggaggaggacgaggtccgtagccccttcgccggccacctcttctccgtcgtctcctggcctccgagaagcgcagccgttccgg

SEQ ID NO: 356595 - DNA, 248 bp, Zea mays
ctagcttgtggccaagtgttcgagatagcattgccggccggggggagcaagagatatgggtagcttgggagagtttgatgatggcaaggagatgttccatggccatggccatggccattctgaccctgtcgtcgacgagctcaaccgtctgcagaatctcctcagagaaaaggaaagagagctaggacatgcatacagtgaaatcaaaggcttgaaggtgacggaagctctcaaggacaaggctattg

SEQ ID NO: 356596 - DNA, 305 bp, Zea mays
cacacgcgtccgcggacggtgggtatcgcagcttgcaaaaaacaatctctatataaacgagaagaaagagagaggagaacacaaaggtagtggtgtggtggagcagtcaattgcgtgtcgggccatgacacgcaacttcccttggtgccttcgttacttgtcaaaccagcaacactagttgtacatatcagaatttcgtgcttatctggacttctgatgccaggcttagaggattctttatttgtgcgcgtacttctagtttcgtccgagatatatgttgatttgttctttgcttgcaattgtgt

SEQ ID NO: 356597 - DNA, 142 bp, Zea mays
cttgccgatttgctcccactcggccgctggaacgcacctgctccctacgcctccatccgccctccatcgcctccatcgcagccatatagcccgtcgtccgccgcacctagcgccttcggctccggtcataggccccgccgga

SEQ ID NO: 356598 - DNA, 326 bp, Zea mays
caaactcatgttgtcacttcattcataaaaagatcaaagcagtggtaacttcaccaaaatgagaaatagtgatcaaaccaaagtgagtgcagccttccaaacacagagttcagcactgacatatgcagtccaagccagtggcggacccagaaagtttcaaaagcctgggcaaagattacaaaagctgaggcttgcccaattgttatacttcggagtccccttaggttttggccataactacatcacacatcacaccacatgagccggaaagtcattgaaaccctcttattaaaaaaaactgaagcaatgttgccaccaccgccatg

SEQ ID NO: 356599 - DNA, 244 bp, Zea mays
cccacgcgtccgcttacgacgacgacatcctcggcgggttcgggagcgcgctgcgcagacaggccgaggaaaggaagaagccggtggctgtcgacgaccaagaactgctcggggcgttcgggaggagcccgtcagagggaaagagggaaccggctcctgcgcaagcggaccgagtggggagcacggggttcgatgatcaaaatcctggaatcgcggggagcagccccccgaatgagtaggaagt

SEQ ID NO: 356600 - DNA, 316 bp, Zea mays
caacgcgctgcacgaggaggcccgcgcgctgctcgaccagatgaaggccacgggggtcgcgcccaccgccgccacctacaacaccgtgctcgccgcctgcgcccgcgccaccgacccacccgtccccttcgacatgctcctcggcctgttcgctcgaatgcggcacgacgcgtccccctccgtgcgccccgaccttaccacctacaacaccctccttgccgccgccgccgtgcgctctctggctgatcagtctgaaatgctgctgcacactatgcttgaggccggcgtctccccggacactgtttcttatcgtcac

SEQ ID NO: 356601 - DNA, 324 bp, Zea mays
gttgtttcttgtgtgcgcactgtggtgatggtgcggtaaaagaaggctgctccatcgctccaacaaaaaaaaaaggtcgagatcgcacgcggcaggcgacaagcagtttccaaagagaagggaagcctagaggaagggagctagagatgggggagggcagagcaggagacggcctcatcaagctgttcgggaagaccatccccgtgccggagacggccgccgtcggcgaggctgccaaggttcgtctcgtttctcttctcccttcgcctaacatctctctttcccaagcccaacccacgtttgaattggagcgaacggtagggg

SEQ ID NO: 356602 - DNA, 308 bp, Zea mays
  unsure (1)..(308): unsure at all n locations
agtccgtccagaccccacccgccgccgcccacctccgcgctgctgcgtccgccagcacgccaccgctcctcgcgcgtaggctggccggttctcgtccagctcccgcctccgccggaacaatcagatgcagccgatgctaacgctacagtccgtccagcccccacccgccgctgcccacctccgcgccgctgcgtccgccaagacgccactgctcctcccgcgcagagcggccggtcctcctccagcttccgcctccgtctccgcctcggctgagntaccaggatccgttccagacagcgctcagatgg

SEQ ID NO: 356603 - DNA, 276 bp, Zea mays
atcaggactcaggagagcgagcaaagaagaagaaggcaacacgtacgacaggcacagtagccatctttcccatcctctctggctagctctttcctaagcttaggctagctagaggtagctctccatcctttgggaattaatagtaagtgtttgggacttcgtagatggagaggcgtcatgtacctgatcccaagaatcgtaagctctggggagaggacactggatctctccatggctatggatgcagcaggctatctggacaagtgctgcggactc

SEQ ID NO: 356604 - DNA, 302 bp, Zea mays
gacaccctgaggctgacatgatttatgaaatgatgcacacgttaataggttggatgaagggatgcagccatctgagcaatttaaatccaatgtatctggcagaattctcataagttttcaaattgtgctacacaattggttacacaagcacatggattggcagtagcccataagttagaatggtgcatctgaagataaagttaagctcacaccatcatgaccagcaataaaatttggtcctggcaacaaattttcgccaaatatcagagttcctgcggccagtgctccagctccgagcccca

SEQ ID NO: 356605 - DNA, 305 bp, Zea mays
cggacgcgtgggtctgacgcgtggggtctagtattgcctctttctgctagttgcgccgttgtgtacactagtaacactacatcctaatcatcggcatgcaccggcactacaagagatcaggtctctgtaaaagttgccctcaacgatcctgcaccaggagacgacgaataagctctatgatactgctcatctgccttctcgtcgtctttaacctcatcactatggctcatctgccttcttgtcgtgttggtgctatcggcaacaacaaggcggtgctgagtgtcggcgttgccttctctattcta

SEQ ID NO: 356606 - DNA, 305 bp, Zea mays
  unsure (1)..(305): unsure at all n locations
acctcccctcctccctctagcggcgactcccttcctccctgtcctctgtggcggctgaggggaaggaggatgctggctgggaagattaggttaagaagtgggctgggccaggaaacagcaggccggtggcccatatgtctttaatctcttttattttttttcttctctttttacttctctactanaccagtaaatcaattagttatgtattcattgtttcctaatcttctactactatgtattagttatgttagattttaagtgtattatgttggtttatgttgaagttgtcatcctatttggtg

SEQ ID NO: 356607 - DNA, 197 bp, Zea mays
atccagtgttgacaccaagagcagcaggcactgagggttcattgattggtatccaagcaggatctaatcaggctggaaacaatttaactctgaaaggctggccgctcacgggacttgatcattttcgctctggaattctgcagcagaagccatttatgcaatctccacagcaatttcagcagctccagtttctgacc

SEQ ID NO: 356608 - DNA, 246 bp, Zea mays
gagtgagttctgaccatgcctttgagacttcaagtgggcaacgtttctcgcctcacagcgcaaaaagatagatcctctgctctaccggcctaccacgttcgtctcccgcgccggccacccaccgctgccaccgagggttttttcctttttgcagctccgtcgtccaccaacctcctccgatccggccgccgcagcgtagccgaattgtcccctcgctagcttctccggccggctagaggctgtttc

SEQ ID NO: 356609 - DNA, 306 bp, Zea mays
caaaataccagagcatggacatctaagttggactgactaggggaccgtatggtgaaatctgaactatactacttgcaacagagaagtgagcgagggcctgggaacatattggaacacattagaaaagttggaaaggtcagatatgcaatatgatgttctaggagctaagtttgagtgaaattcagtgaaagggttgagaaggtctaaaatatgaagaactatgactcggtgtggttggatggactaaggataagtttatctaagtcatataagtgctcaagagtatatacaaatgaagagaacata

SEQ ID NO: 356610 - DNA, 237 bp, Zea mays
ctcaacaaccattcgccgtcctccccctgtcgtgtgtctgccgtctcaacggctcaacggacgccgcgacttgagttcgtgtctgcgcgggcgccggctcgccgtacgtgcggcaagcctgccgaagcacgagagacagcggccggcggttcgggagttcggccatgcgcgcgtcagagtggcaggaccggtggaatcgggacccggaagcagcgaggtccaaaggggtgtggccgt

SEQ ID NO: 356611 - DNA, 294 bp, Zea mays
gccacgcgtccgctagtgcagagaatgcttataattcttcacagtgtgactcattgttgatcggggataatgcggctggtaacacctatcgcaccattcaggtgggtggaatagtgggccgggttgagcatgaggcaaccgttccaaaatctgggagggtcaggtattttatttgcagcaaagaggggtagctaatgaaaaggcagtttgcgccatgattcgtggattctgcaaatgtgtcttcgggaagcttccctatggattgtaccgggggttgactcactcatgaaactg

SEQ ID NO: 356612 - DNA, 301 bp, Zea mays
atccttcgtctccccgtctgctcctcgctcccgacctatctccgctgtcgccaacgtctcattctctgtcatgaacccatgtctccgttaagcccacatgtgaattcaggatcgaaatatgtgaaatttgtgggcacagatcctattagggcctgttcgtttcgatccatatggattggttgaacggtattagcctcaaggctgcaatgcaagaacctgtcatccctacagagccctctgaacgtgactgctacttgcgcttctttcgccgagaagaggtcggctcctgtccatgccacgg

SEQ ID NO: 356613 - DNA, 305 bp, Zea mays
gcagctcagagcacgcgcccgcctcgcctcgcctggagctcacgcagccgcctcgcctggagctcgcgcaccgcctctatcctcgcctggagctcgcgctagggttcctctcgcagccgccgctgttgaggtgctacttgcaaaagcgtgtactgaacagctcaaaaggccctgctatatgtgcactgcgtgctcagcctgataagagagagtatgcaatagagatgaagaacagtgtggaaaggtcagtgtatactaagttgctaactttacttggatttataatcttgtctggcacctccata

SEQ ID NO: 356614 - DNA, 297 bp, Zea mays
cagacatacagaagtgtcgatactttgctgaaggagctactaaagattgttagtgcctctgagcacacaactcttgttaacaatgactatcagaaggaagtgattgtaccagttgatattgatataagagacaagaaacagctgaaaccagatgtcatcgacaagatgggcatcttagacttgaagagtactttaaaagcagtcctgaaacataagagatatatagttgtgttagatgatgtatggaatcgttgtgttcacgatggaataagcgatgtgtttgaagattgtgggaag

SEQ ID NO: 356615 - DNA, 293 bp, Zea mays
ccgtggagcattccaggctgccgaagcatcaaggggtcgcggcgcaacactggaatgctccacggattgcccagtgcacgtggttcacgtggtcgacggcggtggacccgtgtttccctcgacgagcacaatgtgcatgcggctgaggcgagagaggagtcgggaggtcgacggagaagtgtagaggggcgcagagggcactaatttatcccccgcggaccctggcacgggatggtggaaaggcgcccacgcccgcgaggatcacagtggctggtacgccatctgcgcaccca

SEQ ID NO: 356616 - DNA, 307 bp, Zea mays
cccacgcgtccgttttttttttttgaatcggccagagcagttaacagctgctctgaagaaatcactaggatacaagtttccattcaaaaacaccgggggtgaataaatgggaaacaaaaacatactactgctgtgctgctgctactactaagtggcatagtaggcgagttcatcagcctcgctcccaaataccgaagtaactatagcaatctccataagttaatcgtagcacttcagtggataaagcaccaccatatacattgtctgtctgtctcacaacggaaattcgtctacggcttcttcatgc

SEQ ID NO: 356617 - DNA, 312 bp, Zea mays
atgattagaatctactattacaaactaagagtgagaaatgatggttatgttggcatttgcccacggagctggaaagtatatgttttgtgaggataactgttggctatatacatcgagagaatctgatatttgccattacaacaaaacatgttctgctaccaccagaccccacatttcatagacacagatggaccccacaattgatagacgcagatggaccccacaattcatagacataggtgtaattataacaaggtggcaacgttttaagtggcaaaatttcaattatttcatatacatagtgatgcaagt

SEQ ID NO: 356618 - DNA, 312 bp, Zea mays
gcccctgctgcccgccggtgcttgccgcgcgcgcttagtctccctagcgctcgaagcccagtcaaccagcccaggcgtgtttctctcctgctctgctcgtcagccgcgtgcatctcgagctcagctcctgcgtgtacacagccgatcggcttcccgcgcgctgctctctgcgctcgcccctggctcccatggcgcgctctactctctgcgcgcagtgaggctcctgcgcgtcgcgatctcccaagctcgccatggctgccggacgagtctctcccctctgtgctcgtcttcttcgagcttggttcctgtgag

SEQ ID NO: 356619 - DNA, 266 bp, Zea mays
gcgctcccctttgctcgccgacgccgggagtcctccaccgctacgggcccagcgctggaggactccagcccccgcattgtcgaaggcaaggccgtggtccgccgccgcgcccgttaatctccccaggggctcgtcctccaccagctcgacatgtgctgccgcaacgccgacctgaccagctcgctcctcctctactacgactccctctccccgtacaatcccatcccgctctcggtgcagcactacaactggctgctctagctctg

SEQ ID NO: 356620 - DNA, 235 bp, Zea mays
gtagggttgtgtactgctctgcgccgtgcggacggcgtacggccaaggagatggatcgcgtgcgcgagtcgacgcggagcatgaggaagtacgcgtcagatggcggcggcctggtcggtgcacggcagggcccccacggccggtcgctgacgacgcacacggcgcacagcatgtccacgacggctgtgggcgccaagtccaagtcggccgcgtgggtgggtcacagtgtgccctt

SEQ ID NO: 356621 - DNA, 310 bp, Zea mays
atcgagttcgccaacgctctgttgccgattcgaccgtcgtcgctgctgcgtgtctcgttgcgtgttcgtcgggtgtcatttgttgtaccccagcgcttgtgcctactcctggctcgcgttggcgctcgcgcgcctgctcgttgtctctgcggtgcacccgctctcatccatcaggtttcgcgcatgctcgcgtctgccgtcgagccgttgaacctgttctcccttgctcgacctcgtctttacccttctggtggccattgtcattatggtgttggactacgttccatcatctagtcgcactggctattga

SEQ ID NO: 356622 - DNA, 294 bp, Zea mays
acacacacgtccgcccacgcgtccgcccactcgtccgcccacgcgtccgggacgctggcgacgtggcatgcttaaccagctatacagctcgataagcgagcaaagcaatgctaagattgaagagctgcttcaagaggaccatactgctaagcgcagaagggagaagtaccaaaaacaatcatctctcctgtcaaaacttactcgtcaactcagtatccatgataacagggcatctgtttcctcttattctaatgacaccactgaagccgagagccctcgaacaccaagccgctc

SEQ ID NO: 356623 - DNA, 242 bp, Zea mays
ggggccgcgcggcaggccgcagcagggacgacagcccgaaaccagtgggcaaacaaaggcttggacatgatcctgtcgggtgggcagcaggaccgtggcgccgcggacgagcccgacggcgaggaggacgacgactacaagcacatgacggacgcgatgtgccgtgtgtatagcaacgcgcccagggaattcaccatcatcgacaggggcaggaggaactccgttttctttcacacgaaagg

SEQ ID NO: 356624 - DNA, 299 bp, Zea mays
cccacgcgtccgaacgtcgccccaacccccatcaccgacagggaacccacctctcacgtcgacaccgccagaggaggagatggtggagatacgggcgttgcgatccgaggcagcacgctagagcgacgagagcgtggcgacgtggagatcatgggagtcctgcgcacgtcgcggcgaggcgcccgtcggggaggcagcgggcacggagagagcggagagtgacggcgacaacgggtcccgcctgtcgcgcgaaccagggaaatatctacatctcgtctgcgccgccgctgggatttatt

SEQ ID NO: 356625 - DNA, 292 bp, Zea mays
cctggctcggacccagctcggcgccatcccatcaccctgccatgccgcgcgcttcctccctgctcggccagaccatcggtctccctctgcttggagctcgtcgccatggccgttgccttctgcctgctcggatcccagcgcgcggagcttttcccctagccgagcccctccatcgcaccgtgctcgtccggcgagtcgcgccctggccgcgtcgagctcccttgtcgtggtttgcttctccccctaccatggctgccgagttctttccccagccatggaactccctgcgcgc

SEQ ID NO: 356626 - DNA, 156 bp, Zea mays
agttcaacagagggagacgcgagacagctgacaataatcgagtgccatcaatggctctggcgctggcgcctctcaagtggttcgtcacgagcagcagaccggtcgtatgcctggggacgtcggcgaatatgaggtcgacgacgtcgtcgacgatct

SEQ ID NO: 356627 - DNA, 143 bp, Zea mays
gttttaaatttgataaatctagtctatattgatatgaatattcatgttttaaaatcatatttgtaagattaaagatattctagatcttttaagcttttaaaataagataatgtctagaaaagcaagggcactactaggttcta

SEQ ID NO: 356628 - DNA, 184 bp, Zea mays
gctgaagctgaatggtgagctgctggagagtggagacgtggagtggtggccggtgggcgcctgggcggtggctgccggctggtgcagactgtgcacttgtgcagtgcagtggcgctaatatatggtgtgatatgctatatacagtatcttccatctattcatcgtatatacattaattattgat

SEQ ID NO: 356629 - DNA, 307 bp, Zea mays
gccgtttgagagccgtcagtagcattcatcatccatgaaggtggtgtaaataagcactgtagctttcatggcgatcagaagatcaccctggcagtaatcagtagactagtgtttctccttcgatgttctgatggagacttggtaataacttatcatgacgtcggagacgccctcgcacgctccacatgcgtgcgctcccctgttacctacctagaccttgacgatggtcgctttcccgttcttcttcttcttgaccttgaggcggatcttacgggcgccgccgtcgtccgctgggccagcggcggcg

SEQ ID NO: 356630 - DNA, 265 bp, Zea mays
gttaacaacatggcagattgaagaacagatcaatccacaggacacaaatctaagtggtgttgagcattctttggtacattacagtactttactcactgtatcttgttacaagatagaacacccctataaataaaccccaaaaatgtagagaagaaaaaacagtctcgctatatgaagttatgcaacagggtgagttttacattgtttgcgcagtcagcagtaccacaaggcatgagtactggacaagtcaaaacaggaatcggaa

SEQ ID NO: 356631 - DNA, 318 bp, Zea mays
gttccttctcccttcaccatcccactccacctaacaattgggagaagttttagcccagctaagcggctgtggatgggaggatcctaagagcaccctggaaatccaaaaccatctcgtctccgcagcggagcccaggcttcgtatgacggcggccattgtcgatggccactacgcgcgcctacaagcttcgtatcccgtgaattgctggtttggggattttgaatttgaacttgaagtcggattgctcttgactgctttgtttgaactggtgcagttaagttgggctgggttggggttgattcacccgcgatgatcgaa

SEQ ID NO: 356632 - DNA, 317 bp, Zea mays
gttcctgtccgatgtgtttcttcgtgaagtatacgatggacggcttgtcgtcaggctgaagaaaggcataaaccttcctgcaatggatccatggggtactagtgatccttatgtaattctacaactgaatggccaaactgcaaaaagccaaattaaatgggcgacaaaggagccaacatggaatgaagatttcacgtttaacattagaaaatctcgtgaaaatcttctgcaggttgcagcttgggatgcaaaccttgttaccccacacaaacgcatgggaaatgctggattataccttgaatcattttgtgatggta

SEQ ID NO: 356633 - DNA, 321 bp, Zea mays
cgtccgcccccgccactcccacacgcacaagcctcccgtccgcctccgcctctgcgtcctccggccatgccctccagcaacccgacccagcacccccactccagttccccggtgaggctgagcggtgcaccaccaccacggcaacgacgacgacggctaggagccaccgcgcgcacggtggcagcaggtttgttctctgagcccttctcgtagagtccgagctaggaagaaagaaggaggcctttcttgctgctgctgtttgatcgagcaaggaagtgtgagcgaggaagactgtagcttttattgcagaccgttcgtctt

SEQ ID NO: 356634 - DNA, 168 bp, Zea mays
cacgttatcgtcatcctcgctcggtcctcatcgccagcgcctcgtcctcgtggttcttcttccccaccggtgccgacatggctgcgcaagatgagaagaccgctgttgctgttgctgctgccgatgtcgcgacagaggagtctgcgccggcggcggagcagcaacctc

SEQ ID NO: 356635 - DNA, 301 bp, Zea mays
  unsure (1)..(301): unsure at all n locations
gtctatccgtccatgactgcctcatcctcctcctctcgccgcattccttctcctcgagtccgtgtagagtgagcgaagacgacaaagagagaaacgagagggttgtgacttgtgagatctttttgagctagtagctaggactagcaaggggtggacaggcctttctggatggcggatatggagaggagngaggagaaggagaagaagccggtggttgggcgtcacaagcaaggagacacgtgatagggagtggctccaccccctcctcgcctcctcctccaacggctgccgcttgatatag

SEQ ID NO: 356636 - DNA, 104 bp, Zea mays
ggggccgtgggggaggagcagcaggtgcaccaaaatgatggcagcgccaggctccctgcgacttgtggaggccgcgtccttcgctgcggccaagtgccagccgg

SEQ ID NO: 356637 - DNA, 104 bp, Zea mays
gctttcttttcaagggaaacaggacgggagtgcagtgcacccccgcacatactgcatgttactaatacaagcaagttatttacagaatcaacagaagaaggttc

SEQ ID NO: 356638 - DNA, 202 bp, Zea mays
gatctaggtaacagaacagcatgccaacaagtccacgatgacaccacgaggtggacgcggcaacacacgacccaacgcgcaaagagggagcgacggctagcgagctgggcgagcgcggaccttccaaggaacggcgtcacgagcccccgacgagggagaagtggaaggaggcaagaagagagggacgctggcgagctaggaa

SEQ ID NO: 356639 - DNA, 300 bp, Zea mays
gcggcgttctacggccgtagcgacgacgcgccgttcggaggcgacgtcgccgccgcgtcgccggagctgaggttcggctctggcctgaacgtggcgggaagcggcgcgttgcagccgcagccgcacaagtccacgggatcctccaacgccaattggttctactgactgactgctgcagaatcatggatggaatggagctttgttagttttagtcagtcctgtactacttatttaagctttgtaagcctgcaaatgtccagccataaaccacttcgttcttaatgggaacttccgtcttgc

SEQ ID NO: 356640 - DNA, 299 bp, Zea mays
ctgaggcgtacacggaacccgagctggtgttgctggaggccctcctcggcatccagggccgcggccgcgccgtcgctccgcgccagctccaggaagtggagagcgctgtgcaggctctcgagacccagggaggcattcctgatccgacaagttcaagtttaatcgaaggtagctggcggctcatcttcactacgagaccagggacagcatcgcccattcagaggacatttgttggagttgactctttccgtatcttccaggaagtttatcttcgaacagatgatccaagggtggtcaat

SEQ ID NO: 356641 - DNA, 123 bp, Zea mays
tggaggccatgcccaggccaagtgtagctccctcgttgcagttgcaggcccgtccgtgcccgaagtggccgcgccggaagcactgcccaccgtcctccgtggcaagccggagggttgcttgct

SEQ ID NO: 356642 - DNA, 308 bp, Zea mays
gtttccctgcgtcgcgcgcgagctcgacgctcatctccctacttcttcagttcgagctccacccatggccgccttctccagctcgctctggacacgcagttcctttcgtcgcgcccgaccgtcatccccatgcatgactgcaacgtcgtccttccctgcttggccatgtccagtagctcggtctttagcctcttgccatagccacagtttcctctccctgtctgccaaatcgccgcgcctcgctaacgctcctcgacatcggttgtcgatctccctcggcgttgtctcctccagccgccaagtcactt

SEQ ID NO: 356643 - DNA, 103 bp, Zea mays
gtagccacggcccttggttcccctccgtgtattcggcctcacctcagcttgccgaccagccatggctgccgtgaccgccgcagccatctctctgtcctcctcc

SEQ ID NO: 356644 - DNA, 305 bp, Zea mays
cccacgcgtccgcggacgcgtggtttttttttttttggtccatcaatacctaccactaccgtaggaatgccgatgcgtggaccggcccaaagtctcagaacaggtgaacaagaccagcttcaaggattttcttggcctaggcatacaattagttactcacacatatgtaccagcacaaacacatccaaacaaatccctacagtaatattgatacagaaactgtgcacgctaggagctgccgagagatctaactgacgacacggactgcgctgacacggaggctgtggggctgttcacctccctgt

SEQ ID NO: 356645 - DNA, 303 bp, Zea mays
cccacgcgtccgcccacgcgtccgggcgggtccattccaggagtgaacacggaccagatgaagctgcagatcaagctcggagtgcctaggtcgacgcagcacttgctgggtgctgagagagtcagggcggtcttcccctatggcaagatagtcagcgttgaggtcgttgacggtggcatgatctgttcaagcggcgtgtgcctggaagcaatggggggtaggaacgatgactgctgcatagtcaacgctgcagtgtatgtcggctactgatgtactgtagtacctggagtggaacagtagaga

SEQ ID NO: 356646 - DNA, 317 bp, Zea mays
ggttgcacttggcttcttgttattttacctcatttcacttagtcttatttcttctgcaatgattatcctaaagtcacttcaaatcatcatttatatcgagatctctttgctgtcatttacttcccaacatcttatgttaccaatcctttatctcattatctgcatactgattgatctcttgtagaatgggcctagatttgaacttcaaatgcaggatgtaactggatgagtgcaccacatttatgataaaaatcaccccatagtttgcttccgtgacactgcttttttatgtactactttgctgagtatgtttttgg

SEQ ID NO: 356647 - DNA, 204 bp, Zea mays
cggacgcgtggggggccccggaagttccgacatgagatcggcttcaccattagggacattgatctcaggctcagggaagtagaggaggaaatgcctaggcttccacctggatcagctcactctgatgatgcaaaaagggattggttcagtcgtgacgtctgtaagaactgctcagacgcgatgaagccccaggcagttgggtcg

SEQ ID NO: 356648 - DNA, 312 bp, Zea mays
cggaccgtgggcggacgcgtgggctgccatggcacgcctgctccctagctcgccgctcgcctagcccagccacccctcctctcttctccctcgcggtacctcactgttggcggacgttttcccagccgtggatctccttgtgtgccgcgctcgtgcgtgtcccagcttttccctttcctggcgctcgtgcactgctaactgcatcggctctagctcgttcctatggagccggtcgccccttcctgctcgcctaagccaagctcccatggcgccgttcttccctgagctcactcacgtcgcgcccctggctcg

SEQ ID NO: 356649 - DNA, 159 bp, Zea mays
atcaccaaacgggagggcgaggggcaacaggacacacacactgacctagcaccagctcgatctcacaggatggttacgctatgccatccgattcggatccgagcaagcgggagcaccgcgagctggcggaggagaaatgcagcggcggcggcgaaggtc

SEQ ID NO: 356650 - DNA, 316 bp, Zea mays
cacacgcgtccgcggaccgtgggttcagaaatgcggcccatgacgaacccgcccctgctctcaccgtccccgttccctcttctcctccgcctcctccacctctcgcgcgcacctcaccgccggaaccataccaccgggcgggcacctacttgtacttcccgcaaccgcctcccgctcctcctctccgctgccatgtcctccgcttccaacaccgccccccactccgtcgtcgccgaccccactactcttgcccgcaaagtcgcagacatccgtgccgccggactcaccaaactccaggttatcgccgacttcgatg

SEQ ID NO: 356651 - DNA, 317 bp, Zea mays
atacgcacacgcgtccgcggacgcgtgggcggaccgtgggttttttttttacacaagaaaaatatttcatgtacaacgattgttatatatgctatactcagtatttgactgtgaactgtatggtcaggttcagtggcttggatatacaaaatgttggttgcctgatcagtgtaaaagaatgctgcaaatgcttgtgatcgataatatcagctctcttcgggggctatggatggcaatacaaggcgttctctgccctgtacaagcttggcagaacgaattttatctccggccttaatctgtgacagaacatctctccc

SEQ ID NO: 356652 - DNA, 122 bp, Zea mays
gttggaaatatattttgggctagaaggaggatggccagactatgtactctactactctgcttggccagactatgtactctactactctgcttcttccttttcagtaaactccctttagatac

SEQ ID NO: 356653 - DNA, 107 bp, Zea mays
atcatctatgcccattgtgcttatcattctaaaatgacattgaatgttttctttttggaaacccacaagtagttatttatgcaactagccatttatatagttttatg

SEQ ID NO: 356654 - DNA, 270 bp, Zea mays
cgccctggcgctggggccggagggcccctggtggaggagttctgggacaacatgcggcgttacgcgctgtacgtggtgacggtgagcacaggggtggcgtatacggtgctgcagcccatagtggagctgctcaagaaccccatcacggcgctgctcatcgtggccgtcctcgccggcagcggcttcctcgtctcgcaggtgctcaatgccatggtcggcaactccgacttcatctacatgtacgagtaggtagagcaggccggccagggg

SEQ ID NO: 356655 - DNA, 134 bp, Zea mays
gcccagtccgcggggctccgcaccgtcgtcttcctaccgtgcaagggcggcgtcctcgagctcggctccgccgtgcccgtccgcgagactcccgagacgctgcgcgcgctccagaccgcgctcgctgtcgcacg

SEQ ID NO: 356656 - DNA, 321 bp, Zea mays
gcagtggttgcctccgaccatcgtggacacaactcaagatccaaagctctggcccccaaatgcttaggggcagctaccttggaatgttgactcattgtgccttttcatgcatttggtgggcaaatcagtgtcagttaggtccctggagactggagaggaatcaagttcgcaactcgcgccatgtttatgctgtaacagctggtttccagcactacttatgaacttactttgttctactgaagggtggtgcctgtaattaatatatggatcttaaccctctagttggcatgtatatcatttgttctattcgagagctgaatt

SEQ ID NO: 356657 - DNA, 315 bp, Zea mays
ccacgcccggcttcttgctccacccatagtcgaagctccttccggttgccgtcgctcgccgtcgtctcttcgtgctggccgactagtttaccgtggtcgcgcgtagttccctgctcggctaggatagtcgcgccgtcgattccgcttgagccccttcgcgttcgtcgatgccctctggctcgactctgcccagttcgcgtcctgctcgtctttgcgtcgcgcgcgtacgttattgttgttcctgcgcgtgctgccgcgaagctctctgttcagttcacctctgtcgtgttgtcgtacgcgcgaaactgctcgtgg

SEQ ID NO: 356658 - DNA, 309 bp, Zea mays
cattttctgatgccctactggttcatgaagtgtctgagtatgatgatttcttctccttgggtggtaactcaattactgcagcacatgtggcccacaaattggagattgacatgagattactttatatttataccaccccttctaaactttttcatgctttacttggggaacgcagtcatgtaattcctccaactcctgattttcacaacagaaagaggttgagaaaatatgcaagcatatcagattcctttggcccagtttctgaatatttggacagtaactttcatgaccaagggcagataagtaaag

SEQ ID NO: 356659 - DNA, 309 bp, Zea mays
cccacgcgtccgcctcctcctccccggtccggcggtccccaccggtccaccacggcaccaccgtctccccgccccccgcgtccgatcaccgcaccggcgaactcagcgagccgctcgtcgctgcacgctaagctgggaatggccgctgcgctcgccagctcaccgcttgttcacctaaccacctcccgcctccgcctccccaggccccgggcctccgcctccagtcccgctccaggctgctctatcggcgtgtgcttgggatggaggctgaaggtcgggtggagggctctgaggtggtgcgaccggctt

SEQ ID NO: 356660 - DNA, 307 bp, Zea mays
gtgctgcgatggtaccggttttcctggctctcatgctagctaaaaggactaccgaaccagaaaggataagcttgctccagaagtggaagaccagttgggttgcggtgagagagaggcgtttcaaagatagcagtacagttgatgtggattgcggctacgctgttgtttcaagtatatctgaacagtaaattgtcatgcatctaattaacatgcacgttgtttcaagtattagcatgcatgctgcgcatgtgtatgagagaagatccctgtgaagtattaagaaaccaacctacctagttgagtttgc

SEQ ID NO: 356661 - DNA, 296 bp, Zea mays
gttgaagttttaaatttaaatgaaatgtacaaccaaaatctccaagacaaaaaaaagtataattccatttatttatttatgattttaatcatttaagcaaatacacacataaataagagtttctaatgcatatcctttatgcataaatattttagtgaacgtttctaaatatatataattctatagagggaaattttaatttatatatttttttaatcttttattagatgcacatttattttaggagaagtagtttcaaatgtaagagaattctgattagaatatattttatttga

SEQ ID NO: 356662 - DNA, 306 bp, Zea mays
gttctagatcgcgagcggccgcccttttttttttttttttttttatagaaattatttttcctcagatctcgccgtcaagcatacatgcattatctcagacttcgcagtggcgagctcgatcgatatatatgatgactagcatcagtactaaaatagtattgtatcagggacacacgtacggcatcgaccagagcaccatgcatggtccatggatcatatcatcattatcatggcttcatgggatgggaatggatcggagtacgtgcttaaccatgatcagtacacacgtatctctcggaggggcgg

SEQ ID NO: 356663 - DNA, 316 bp, Zea mays
tcttcctcgcagcgccgccgctccatcttccgctctctcacttattactcgcgttcggcacgcgggcgacggcggcggcgctcaggctctcagcgacggcgcacaggctcgggctctccgcgacggcgtcaacggcttcccctcccgcctctcgccagccgcctcgctccctcgtctccggtcctccgcacactgtccgttgatcctgcctcttctggttagatagatggaggtgccaatgaactctacgcaatctggtcctcacttccctgtgcagcatcggtccctctcattagacatcaagggaaataaaaca

SEQ ID NO: 356664 - DNA, 323 bp, Zea mays
cccacgcgtccgggcagcgggtcaagagatgctcctgggcgtgatctgcttgctcggcttaaggagagggtcaacacatcaaggaaacgatcgttgaacagggagaacagcccgcagtcgccgagtggactcagtgtctgtgccagttccccgagcaacagtcggtcagtctcaaggccgtcgcaccggacagcttcgaggataagagaagctgacgaaggcgcgaatgcaggagctgacagtgtagtgcgcagaaatgctgctaggaggggttcagagaggagtgacgatgacttgctgctggtcgagcaggtaacaagaaa

SEQ ID NO: 356665 - DNA, 320 bp, Zea mays
gtctacctctctctctctctctcatcacagcacagctccagctctaggctgtagagggtggaagaagcgatgtcgagtcacagaggcctgcagcaaccgtctgcgctgagcatcgaggccgcgctctgcagtctgctgtctgctctccctcgataagccgggttccaagctagctctgcagagtgtgagctctgactgaacacgaagtgattggaggcttctcatcgatcgatggttgtgttgtgctggccatctgagcgatgaaccagttcgtccctgattggagcaacatgggagacacctccaggccgctcggcgaa

SEQ ID NO: 356666 - DNA, 136 bp, Zea mays
gaattatcccagatgtttaggtacagatcagtatcatgctgtgcacgtagttgttttgttaattagggtctcaatggtccgtacaggcattcatgtcaatctgctagttgcgccggcttaattttatagttttgct

SEQ ID NO: 356667 - DNA, 316 bp, Zea mays
ctctccgcctcccgtcaccacctcgcggctcgcgctctccgatcccgcgcatattctccaccccgtcgtctgctccgccccatcagtacatcaccgcgcactactaggacgccgcgccgcagccccgccatctccgggaccgagttctgatcgccgccggaaccggtacacggaaagccgtaaaccaatggcgctcctcgcgccgagcccgctcgcgctctgcgtgcggggaggccgctgcggcgtcgccgcaccctgcactcgggtggctaccgccgcctgctcgaccgttggcggcggtgtggctgggcgggcg

SEQ ID NO: 356668 - DNA, 303 bp, Zea mays
aaacaaatgagccattatctgatgggacttgcagttgtccatcaagtgattccaggttgcaagttttattggacacctctggactaaccattgaagctagctcagtagaaaccaaatcaattggcatctcagatctgtcaccagagaaactggctgtgaaattagaatttactctaccagcatcatcttatgctacaatggccataagggagttgacgaaaacttcaacttcggttgcttgccagaaaacattaaacggctgaccaagccttgcagtgtaaaatgctttcttcgcaagctggt

SEQ ID NO: 356669 - DNA, 244 bp, Zea mays
cgcacgcgtccgccacactagaccccaaacccaaacacagaaaaaaagggaagcaggtgctggcgatagatcgatcgatcatggcggccgtggggaagatcggcatggagtggctccaagacgctctgagctgggtggtcctgggcacggtgtgcttggtggtcctgcagcagctgcgacgtcggcggggcaaagcgccgctgccgcccgggcctcaggcgctgccgatcgggggcaacatggg

SEQ ID NO: 356670 - DNA, 307 bp, Zea mays
aaaaacgaagataggttcagagacaaggacaggaaaaagaaggacgagaagcatagggacttcggtgcaagagaaggcgatagaaatgatcgtcggaccggtgtaccacttggcagtagtggtgttgagcgaagagaaatgcaaagggaagatagggatgctgagaaatgggacagggaaagaaaagattccctgcgagacaaggaaggcaatgatagggagaaggattctgctaggaaagattcatctgtagtaattgcaaaggataaccctatactagaaaaagcttcatctgatggagctgtta

SEQ ID NO: 356671 - DNA, 307 bp, Zea mays
ttccaaaacagtccaggtcccacaccggaggtacgctagggttccacctgagctcttccttcttccccctctgctcgtctccccatttgattcctcgccgcctgtggcttcttccccgttgtcatggagtcgggcaaaggtcctgtggtcgcggacgattaagcgatttgctcgctgcagccaggcgtgcaagggtcgttgctcgcaaagccgccttcgttgctagtgcgacggctttggagatgattgttcaagctgagaaggcgaacaccgaggctgccaagaaagctcctagacctctgcgtcg

SEQ ID NO: 356672 - DNA, 302 bp, Zea mays
ccgaacacgtcgccaggtctccttccgccagagcacgccacctcgaatccccctccctgctcaagtgctcggcgactcggcacctccgccccacgtctttctccaccgaccacctgccccgacccctcctcgaccggcgtcgagtggggatccatcaggactggttgggaaggatcggcatgctctacagagaagtgttgcagagcgttaaaagcagtttgggaagactacagaaatacccaaaaagatcgccccctagcttctgaatccttcaattctctagcctgtaaaagaacaagcca

SEQ ID NO: 356673 - DNA, 306 bp, Zea mays
ctctactatttctggccggcaacagcagtccttctcctcgatttgtgcttatgtgcccaccagccgttcatcgctgccgcaagctcgcatctgctctccaccacggcgagctccccatcgccgtccagctcgccggctttagctacagggcgccatcaaccacaagctccgacctggaacgctcgtgctcagcctccggtggaccttcctcgtcgactcctgctgcgctcacctgcgtttcctcctgcgccggccatccagcagcttgccccacctcactcgcgagttttctgaatcgcgctgtcc

SEQ ID NO: 356674 - DNA, 297 bp, Zea mays
tgctcgcttcttcacgcgtgcagcttcctgcagcccaccgcccacgcttcctcatctttcttctaccagcgctcggcttttagccaccgaagttggccgatcgtcgaccctgcctggacctccacctccggccactgtcttggtctttccctgctctggatccatggcaactagatccgcccagctgagttcgtcggacctctggtctttgcctccccacgcgccatggttgttggaagctccatcagccatcccgccgaatgtgcgacctcttcagctcgccggtgctccctctgc

SEQ ID NO: 356675 - DNA, 317 bp, Zea mays
gctcgctcggcctccagcgctgcccgctgccatctgctgtagcgtcacaccgctgctgtggagggaccgagggagcagagcaccggagtagccaccgccggctggggaatttccatcgcctggagtagccgtacagacaagcaacgatggtgtgcagcagcgcgtggtggaggccctccgacctccgatttgaccgtcgctccaagccctctgcacaccggcgcgcccctctggctcggttttgcccagcgatgtgcatcctcctctgcgcagactgctcatctccctcctctgctcggcgcgtccctggctctagc

SEQ ID NO: 356676 - DNA, 315 bp, Zea mays
gactcggatctttccaagatgctagctgcaggctcttcatctgccatgatagggataatgcaatatctgcagtgccgctctgtgttagtttcgattctgccaattgagacagaagaaaatggagcacgaaggaaaaggaggaacggttctgcgtacacctcatgtgcccggttgatgtctcctttatcattgtgtcattacctggcctgccttgtagctaggcactgctgatgtcgatcttgttgccaaaaaggctgtatggatcatacattcacacaaagtgcaattccattccaagagacagcgaaatcttca

SEQ ID NO: 356677 - DNA, 317 bp, Zea mays
cggactcgcgcacccggtacaagcagctccttgcctatgccgcgcgcctgccgcccatggatccggcgctcaagacctacgccaaccgcgtccggggttgcgtctcacaggtctgggtccactccgatcccgacgagggcgacgccggccgccgcagcgtcaggttccacgccgactccgacgcttactcatctcgtgcttcgtcgcgctgctcgtgctagttctctttggcgcagcctccgcggtacgtggccagggcgttcgttgacttcatcgacctgctcttcattaggcacagctctctccctccaggaaca

SEQ ID NO: 356678 - DNA, 318 bp, Zea mays
gaaagtcatcatgttgaacttcttggtgtctcaactgtgtctgaggataaagagtcaaaggaagaggctgatagcataagaaagatccagtattcatttggggttgtatctgttcccacattgagtgtgggtgattcctggtcatgcaaattagaaatcaaatggcatcgagcaaaatcagtcatgctttatgtttcacttggttactccctaggctcaagtgaagaagaagcattgcaccggcttaacgtccatagaagcttgcagattgaagggcagatccccttattagttagtcatcagtttttgagatcattt

SEQ ID NO: 356679 - DNA, 161 bp, Zea mays
gagcaatattacggtagtgaatttatagggtggattgcgagatcgagaaatgaaggtaaatatataagagattcgaagatttagacaggttcgaaccatataacaccctatgtccttttggtgttcatgtctatatacaatgtgatcagatgatttgtcct

SEQ ID NO: 356680 - DNA, 324 bp, Zea mays
gaaggacgtgccaattggagccatcagaccaaaagcagatgaagaagacgtgcagaatatcgacatggcttattcatcaaatgtatcgcatgatgatgaaaaagatgagaggcatgcaaatgaagatacatttgtctcatgaacaagcaagggtacaagttgaagatgttgatgctccaagatcttcttcccaagtggttgacaagaggaactcgtcgctactccaagcacatccataagatctaatcattgggagtccatcacaaggggttatcactcgttctcaaagacatgcttcatttattgaacatcactcttttgttt

SEQ ID NO: 356681 - DNA, 255 bp, Zea mays
atcgcgagcagccgccctttttttttttttttttttttttttttttttttttttttgactgataaaacggcccacaagggcgcttaaatgctcatgacgtcttcacctaaaatgatgtacaagtacatggttcttctgtccaaaaaacgtatagttatcactattatacactttttttcctttcaagaatgcgtacgataatccatacatctgattcatgaattgagggtactttagttctcctgaactgattac

SEQ ID NO: 356682 - DNA, 274 bp, Zea mays
atgcggatatgtttcttatctagcctgcaggtccataccattgtcctcctctctctctcactcgagtcgttgcactccacaccatacgcaaactgcagatggaggagcatggcagggctgcagagatcgtcgcagacattcgtgaagttcggctcatcaagcttggtctcggtcaagaggctcacgatgccatacatcgtccatagcaggccatacgacgcggatgcagccacagctttataagagctgaggcattcccgcagcgtttgctccg

SEQ ID NO: 356683 - DNA, 297 bp, Zea mays
ggcggggcttgaaggatatcggcttttattgctgtccattttgagcatggatcttcagctccttgggtcaagtggtttcaatgatattcttctttttatttgccttttctttttagttccaactcctgacaatgtcacactagagaagcaaaaataaatataacattgtcttgatttttatgattattccttgagacctgaatgcctaaattgttgaattttactatcaatccaacctatttgagggtttaggacactattataccttacattttcgtaagaaaagagttataatca

SEQ ID NO: 356684 - DNA, 284 bp, Zea mays
  unsure (1)..(284): unsure at all n locations
cccagaggtcggtttttggttgcatttagatccctcgacatatatttgatgattatgttcatcgaatttcgttgtttacgtgtgttcatgcanaatcaataggcaatttcgtgtagactatgaagttggtaaatgaggtaacttctgctgtatttcactatgtctttttatacgtcctggacgatttgccacgctgtttgcatatgtagagatggagtactggangtcactggagggaccattgtatctgctcgagaggtcttcgctttgtctccggcacccaa

SEQ ID NO: 356685 - DNA, 311 bp, Zea mays
  unsure (1)..(311): unsure at all n locations
acccacgcgtccggggaaggtgagaacaaacggggcacagcactcgtgtgcctaaccataacaatctctgaccgctgtctatatatacatgtactattttgctgcagggagcacagatgaggcgagattcatttacgatcagctgactgaactgggaaccaagcctgacgattcggcggtcgctactctgatcgtccagtatggccaggcaaagcagttagagcgagcacaagaactattcgattcagcgtcacgtgcacgtncgttcccagatagggcgcttgtctgcaacgccatggtcgatgcgttct

SEQ ID NO: 356686 - DNA, 319 bp, Zea mays
cgctcccgcactgcgcttggccgcttgccctctccccgcaccttctccaccttccccagtactacagcgacgtcggacattccgtctcaaagacgagcactagtaggacaaaaacgagggaggcaagccaggcgggacagcaacgcgacgcgcttgtcattcactcgaggagctcatgcaaggcgtaaatcttattgcaagaagggcagctgtgcatgttaagtctcaaatatagactcacttgataacactgcatgagaggttgaaaacttgaggtacagttgatattctggttcagagtatgggttcaaggtttgca

SEQ ID NO: 356687 - DNA, 311 bp, Zea mays
gtccgtcctccggtaacgcgctcgcctgctccgcttggctcatggattttcctccagggagcctccaatcgtggggtccaggtcgatgaggcggccctctccgctgaatctggcgatggtccgcggcggcagtcgccgatcaaacaccgtcaaaactttgcaggcccctggggcgtccacttccggtgccgagagcagcgccgtggagatgggcaccgagaagtccgaagtgtacagcactaacatgacgcaggctatgggagcagcgttgacatatagacatgaactcgggatgaactacgatttcatac

SEQ ID NO: 356688 - DNA, 238 bp, Zea mays
gccacgcgtccggcagtccgtccccgccgacgccgagcagtgggcgcagcgtgcggtcgccgcgcaccgcgacccggccacgggccgcatgtagacgcgcacgcgacaggacgacaagtggctgcccgtccagtacgtggaggcgatgcggggcctggaggccgcgggggttcggatgggcacggagcatggaggtgtcggttggggcggacgaggaggtgcgtggcggggatgggtt

SEQ ID NO: 356689 - DNA, 318 bp, Zea mays
tcgtgctcatcgatgtgcatcgtgcatctcatgaggtacgctagttgatcacgtggtgagaaggacaagagctagattaatctcaaggtgatgcaaatgatgaacctaaatatggataatcggaacaaatgcgaagacaaaagatggtcgccaagtggacgtcacctaacaaacactaacgtagtgttcttccaggcaagccccggtgcatttgccacctccttgctattttaaaatctttatcaccttgtttgatgcattaggtgataggagttgtgtgcaaaacgattgatgcatttccttccttagaaaattgat

SEQ ID NO: 356690 - DNA, 309 bp, Zea mays
ctttcctctccttctcctcttcgtcctgctcctcgcctccccttccatggccgcctatagcttctcaagctagtctcctcccggcctatctcgccacctcctgctagctacccttctgagcttgcaaactttttgttgcacgcacgccttgagagctgcatgcagctagagatcgatcggagttctatttttgcataggcacgcgaacatatgtagctcttctgctagatctcactgccagtcgtcagctctcagcgaaggttgtctggggtaccttgtcgatcgctagatctgttgttggtcgtgttg

SEQ ID NO: 356691 - DNA, 147 bp, Zea mays
atatttaggcgtgggctctgcagacaatgggcaacctcaacgaatcaggaaaagacgaggctttactcagaagtatgtggtatgcactccgatacaggacttcatctcccgatcgacactctgttcgacgccgatacgatggaggga

SEQ ID NO: 356692 - DNA, 300 bp, Zea mays
caatttttgaactcccggtccggcaaccctccccagccagcgttccactcactccggcatcgcttcgaatctccgcgcggcggcgggaccgcgtgaccgacgcgcggcgctgccccttcagaaagccgcatggacgccgccgaccccctctgcgccatctcctcgactgcgcgactccttccgcggacccttggccccgccatcgggccttccccctcgaacccccgcgacgcgctcctcgaggccatcgcactcgcccggtctctgaaacggtctgaggagctggttaagcaggctaca

SEQ ID NO: 356693 - DNA, 296 bp, Zea mays
tgagtcagactggtttcttgtagttgaaatggcaacgagaatacgtccattcaagaaatcagtttgagttcgtggctactaccattggagtgcttttgtggacttgtgtgcactgccagtatatgtaggtgctttaactgtgacgtgttcacaaagcaaaattggatgttgaactaatgcgtgcatgtagcatgtgtttggcgtttaccttccatcttcatgttttcagttttgtaactgaggagagaagtcactttgaatttctggtcactcgttatgcggtgcatcttgtgtct

SEQ ID NO: 356694 - DNA, 298 bp, Zea mays
cccacgcgtccgcttcctcactgttcggtcctcccgcccctcccacggcctcacctctcctcgccgacggaatcgaaagcaggggcttctgattggtcgtactcatggcaatgttggtgcctgatcttagtttctcggcatcgatctctagtgtgaagctcccaaggtacggggcatcaaagagtgagacattctttgttaagaagcccccaacattccgtgcagaagctaggccagcggaatctggcaaatatggtactaataatggccgggcaacaaagatggtaccgacaactga

SEQ ID NO: 356695 - DNA, 323 bp, Zea mays
cggacgcgtgggtgcgcgcgaagtcaatcccttcctccgcgccgcccctgcgtactcctctctggcgctgttcagctcaaaaaaaatctctcagccgctcatcactatctgttcagccagcacaagattttcctatgtcagtcgttctcatcctctccgcagccactgtacctgactgcgtgatatttttgccgccgccctgttcgttttatatgcgcgcagctcgccggccgtacgctcgccggagcccttcccctgctcggcctctgaggtttcccagtagcggcgcctagcatcttctccgcgcgcacgttgcttcctcc

SEQ ID NO: 356696 - DNA, 112 bp, Zea mays
gcttgcttcagtttagccagcagcaagatggtggatttggacttagaaatagaaggcaatctctacttggtcagcaggcagaatcactgcagttggatgatccactaggtgc

SEQ ID NO: 356697 - DNA, 310 bp, Zea mays
gcccctgtcctgggcgagcacgacagcgtggccccagatctgcgcggtctcgccggcgatggcgtgcattaagagcgcgcatcgggcggcgctaacggcgctggcgccggacgcgccgtacctcgccgcgggcaccatgaccggcgcgttcgacttgagcttctccgcatccgccaacatcgagatcttccgcctcgacttccagtccgactccacggacttgccgatgctcgcctccgcggcctccccggaccgcttcaaccggctctcctggtcgctggcaggcgccgtcgagggcgactccttcgcg

SEQ ID NO: 356698 - DNA, 302 bp, Zea mays
atcagtacatatactcaggtagcgcaacctggcctggcccggcccggcccagagaggagcgcgcccatatcgcttccctgaggccgagagcgaagttagcgatgcaactggacgagaggcatggccatggcgcgggcggagtccgcaccgtgaccgtgcgctcttccccgcttccgcgctgcgtcctctcccggctgctgccgttgctcctctcagtctcagccatcggcgctgcgtctgcggcgccactaaagttcgggatcaactacgggcagattgcgaacaacctcccgcagccgacg

SEQ ID NO: 356699 - DNA, 301 bp, Zea mays
cggaccgtgggcggcccccggtttctccccgttgctgctgtcccgccggcgtccagtctcgactctcgagagaaggcagcgccgcagcggcggggtgcgtccactgctctagctgggctcgcgctgtgacctgggagctctggaggcgctgcaggcggtcagacgggtgatggggtgggcttcctgctgcaagcagtcggacggggctgaacctggcaggacgaggatgaggaggaagaagaaggacacggcgtggcggatcttctcactcaaggagctccagtcagcgacgaacaatttc

SEQ ID NO: 356700 - DNA, 301 bp, Zea mays
ctcatcccttccctcctcctgcatcctacctccctggtacccgtcacgttcaccacgttcgcccgctcattcaccggcggcgtcgcccagctcggcctcccgccgcccacggaggccaggtccccgggccgcccgctcggtccgccacagaggcaaggcatggtggcgtctttagacaatgtgaggggcttgactttagccatgtcatctagtgcattcattggttctagctttgtgatcaagaaagttggattgaagaaggctggggataatggggtgcgtgcagcttctgaagcttctc

SEQ ID NO: 356701 - DNA, 304 bp, Zea mays
cccacgcgtccgcccacgcgtccgagcggaccagcagccggacggccgtataaaacataccaaggccgcctcgctcgctcagcatacggaggcagccgccggtaagccgcgcgcgcgtgcagtcacccatccgtccgtccgtccgtccgtcgtccgccgtccaccgccagcacgcgctcgccaccgcacccagctagcagcacaagaaaagtctggtggcgtcggcggcggcggcggcggccggcttgccacagtccaatccttggaccggccaaaaagcagttgaaggcgcgagcgagcaagc

SEQ ID NO: 356702 - DNA, 301 bp, Zea mays
cccacacgtccgcccacgcgtccggacatgtttgatgttggtgtggttttgtctcccttgcagccttctcctaaacgttgttctgtagtcaattgaataaaaaacaagttatttgttatgaaaattgatctacaatttctcctgataccggaccatgaaaagttaatcttgttagaggatgatatttccttttcagctgttgatatctacttaagggcaaccttctctttcaatatggttcctgtataagaaaaaaatgcagtcactattaatttatgtatgtactcataacacctgaaca

SEQ ID NO: 356703 - DNA, 306 bp, Zea mays
gcccgggaacgcttcatcaggccgagccagggcaagctgcgatacgtggagatccaaggcgcccccagccgtatgcgtactagcaactaccaccccccgtcgaacccccaggtccgcatgttcacgctcgtcagccaagagggccagcatcactgggtacacgagtacacggcgaccttcctcgacatttggagccaccgcagctacgccgaggccggtctgccccagggcgtggtgccttggctcgccctcatcgaccccaacaacgccaacactctctagttcttccggggcacgacgctcttc

SEQ ID NO: 356704 - DNA, 115 bp, Zea mays
agcgtgtttgcccctgcagaacccgcccagcctgcatttttcgccagcccggatgtccgtgctcggcttgctggtccggcgccgcggttttctggtcggttggccggccatggtg

SEQ ID NO: 356705 - DNA, 307 bp, Zea mays
gatgatgtctatcaaactttgtggaaaccatggagcgatgttccccctggagataggagccgtttggttgtagcaccaatttacgctgcacgatagacggaatgtagtaagttgactaatgtagttggattgaatgtttgtcgttcgagatatgcacctcttgtgttcaggtgagacacttcggaagacaactcgagttctgctagggtctatattgtagtcgatccacctagcccaggtcttcagtgctccatcgaaggcttcctcacttgccatctgcaccgtctttccgccccactcgagatga

SEQ ID NO: 356706 - DNA, 301 bp, Zea mays
gttcagtttcggcggtaacaagatcaactgccgtcgccagtcgattctgtgagctcgccagccggggccggcgggattcgtgtcctgtaggagttacgctataaggcgcaaactggtgacggcgatgcctccgatccttgctagcttccagcctgcatgtcctcggtacccaagctttcaagacgcaaatggcaaaagacgaaatgttccttgttatcagagacaacaaaccccgcaggtagaagccaggtcgatggaggaggtatatgacgctttgggtgaacaccttctttcggtcttg

SEQ ID NO: 356707 - DNA, 292 bp, Zea mays
caggaactccattgcagtatttccaccccaagaccacagcacagagtcgggtccgaatccacaggagacgcagaagcacaactcactccccactccctccacccatcagctagccatgggcaaggagtgcggcaaacacggcgacgacgacctgcggcggtcgtgcaggcggctggtagccaccatcgtggtgctcgcggtgaccgtcggcgtcgtcgcggtgatcgtctagctggtgctccggcccacggagccgggggttctacgtgcaggacgcgtcggtgcggcaggt

SEQ ID NO: 356708 - DNA, 310 bp, Zea mays
cccacgcgtccgggtaagaccatgtcctgccccgcgcctgacactgccgcagccggcgccggcatgtcggtgccgtgcccgtgcagcaggttccagttacgccacggggatctggagtctggtcctgaggccaccgggtcggccggcaccggcgctcacgtcgccagcagcgccagctagcaccagtcgttcgacgtcggcaagctcccgggcccgggctcggtgccagtaccggcgtcgtcgaacgccgcccggcgcttcgtcgggtgtgtctccgcgagctaggtcgagcagtcggaggactacaccc

SEQ ID NO: 356709 - DNA, 306 bp, Zea mays
cggacgcgtggtaggattgtaccggtctcggtctccgtgtctcactctcaagttgcagctgccagcagccagtcatttcgttggcaaccagtgcagaactagatatgcgtggataagagctgcactgtggctgctgagatatcaagaacgtaacgtacggtggaagacaaggccccgttctcgattagcccaagccaaaggtccgttccggttacatcagtttttttttcttcaaaatatatgtgtgaacgaacaatagtttgcagtacacgaccgatacgcaatatttcatcggttccttccttg

SEQ ID NO: 356710 - DNA, 108 bp, Zea mays
ctctgtgcctgcgcacaggaccgcgccgtcgcctacctgctctccaacgccgatcgagtcgctgagtggcccgatctgctgcagatggccgttgtggatcttatccgc

SEQ ID NO: 356711 - DNA, 285 bp, Zea mays
cccacgcgtccgcatagccgtatgcccgtatccgtcctctgcttctctcttccattgccccaagccgccaccaatggcgacctgcgatctgctgatgctgcgggaagcatctccgtgggcgctggccggcgcggtggcgtccgtgtcgctgttgtggctggtggcctggacgctggagtgggcctggtggacgccttggcggctcgatcgggccctgcgggcccagggcctcaagggcaccaggtaccgcctcttcaccggcgacctgagggaaaccgcccgggt

SEQ ID NO: 356712 - DNA, 241 bp, Zea mays
cggacgcgtgggttctttccctttccctttcccttccccagtcagccgcgagcctcgtaccggcgcacatggcggaggagcccgccatcgtcgtcgccgcctcctccagctgcgaggtcgacctcggcaacctcatggcgtacgacccgtgtcaccacgtcgcagccgccgcctccgcctccagggaggagctgaggcaggagtgcctgcggaaggggacggagctggcgcaggcggtggc

SEQ ID NO: 356713 - DNA, 316 bp, Zea mays
gcctcaggttccacgcgcgccttagcccctaagcgacgctaaggcggcgcttcaaggacgccttgataagcatgattgggaggttatctatgcttatagcttctgctctggggtgaaaacatggattacgactttggtggcacctcacccgatccctatgggggtggaagcatccatctagtgtgtgatcattgcggtaccagtgacaactacaccactgacgacgcagatgatggccaattcacgtgccgtacatgctctgccgtgcacactacacaggcaactgctgctgaccctcatgacttccccgccactg

SEQ ID NO: 356714 - DNA, 275 bp, Zea mays
cttcgaagaggcgcgcctggccggccgtctcgcggcgctgttcggtgcagggttcctcctgggcccgctcctcgacggaatccactcccgcgtcggcctccaggtgtacgggaacggcgccctcgaagccggggcccttcgcacccacgtcctggtgccgcccctgctcggcgcgttctacctcaccgtcggcctgctccacctgttcctggacgagagggcgcccccgaaatccagggccaccgggaccgcgcggaggacggcgacgtcgctgc

SEQ ID NO: 356715 - DNA, 133 bp, Zea mays
cccacgcgtccgagccgccgcgtaaaatccgcggaaccagatgcccttatccgccctctgatcgaatccggccagaaagcccggttctttgtcgtcgtcctcggcatcgccgacgaccttgatggcactggag

SEQ ID NO: 356716 - DNA, 317 bp, Zea mays
accacgcgtccgcggacggtgggcagcagctctgagagctcctcagacgatgaaccttccaaaaaaccagttgccggttcaaaaaagcctcctgccagtagcagcagcagtgccgatagcagtgacagtgatgatagcagctctgatgaggaaccagcaaagaagcccacggtcctttcaaagaagcccactgtcctttcaaagaagcccactgtcctttcaaaaaaacctgtcacagcagtcagtaatggttcaaaacaggttaaacctgatagcagcagctctgacagtagctcagatgaggatgaaaaacctgc

SEQ ID NO: 356717 - DNA, 266 bp, Zea mays
ctgctcgcgccgctgcttctctctgaagctctctcacacgcgcgcgactgccttctctgcacctccctatgctcggaccacgaaactctttggcgctctcccatggcggcgcgcccatcccccaagctccttgccatggccgccatctctcattgaagttgcatccagccgagctcccagcgctgcagccttcccccaattcctctctgctcgcgtactccctctgcctgcttcccatagcgctcgtccctacctgctcggcctct

SEQ ID NO: 356718 - DNA, 264 bp, Zea mays
gcaggagcaggagccgagggcggcgacagagaatagaggtcgaggagatcgccgccgccaccgcgcaccgccgccccccgccctctccgtccccgtcgcgccgccgccgcacaagggcgtgcccatgccgatggaggcgccgctcgctaagcccgccttcgtcgctatgacgaaggaggtgccgcagcacaagggcatggctatgtcggagccggtgccggcgaaggcggcgcccgccaaagccggggtgatggccatggacat

SEQ ID NO: 356719 - DNA, 263 bp, Zea mays
agacgcccctgcagagtccctagccaactcgcgcccagccccatgtccctggattgctcgtgggtgtggccggagtcgctcacctcgatctctctcgctcttcgtctatcggatttcgcgcgtgctcgcatttgctgttgagtcgtcgaacccgtcatcccctgctcaaccccacctcaccagctcgctccaaacacgatctcgtcatcgtttcgtgtgtcgtcaagaaatcccaagcgtcggatgaagacgtagccaacagc

SEQ ID NO: 356720 - DNA, 105 bp, Zea mays
ctctgaaagactgaaactcacggccatggccatcctgggtgccctcaagctcgcgccgtctccacccgccctcgcaggctccgcgccaccggctacgtcgccgta

SEQ ID NO: 356721 - DNA, 123 bp, Zea mays
cacagcgcaaggcccagacgcccagaaccagacgagcacggacggacctccgcagccgcatccctccacgtgcacgagttccgaggcgccccttcgatacgcccggcccggccctctccaccg

SEQ ID NO: 356722 - DNA, 280 bp, Zea mays
atcgggtgtttgcagctatggcttcgaaggcaatgccccaaattctcccagaaacgccaggcatcccaggcacgaagcagtgctctaagggtgcttccccgttggagcttccccagacgaacaattcctgtgcttcagcgctgacagcgttaccaggaacaacaactgacctgagcaaatcgagccataaacctgagctgaacgagcagaaaccagaccaccgcctcaaggaacctgtcgacgccgcgtcggtcaagttccccgtagaaccgagcaagaa

SEQ ID NO: 356723 - DNA, 308 bp, Zea mays
cagctgatgagctctgctgcagcttctatgcttctgcttggccctctcactgcatgtcccttatcatgccaattctctctccttcagctacagcttcttcaaccctgatgacttcaggccggaggacgacgcgcaggtcgtcgatggcaggatcgagctgctcggcgacgagttcagagggcgtgccagggggcgggtgtggcacaagcagccggtgcagctatgggacggcaccaccggcgaggctgccagcttcaccgcgaacttcagcttcagcatcgagtcagtggctggcaagggcgcggcaa

SEQ ID NO: 356724 - DNA, 304 bp, Zea mays
gatctcatagcctcctccatcagcctgttctccacgcggcaccagatgcacgattcgtctctgcttccctcgtcggccaagctctctctcccgctgccttctctgtgccgcctcctcgccatgctgtgcgctgccagccgcgccggtgagctcgcccaggtccggcgacctgctccggctcgactttgtccacgtctgcatcttgcccaactctgctactcctgactcgccggcgacctgcagctcggacttcagcatcggccttttgtgtgctccgctgcgccagatcgccgtgttaccgtgg

SEQ ID NO: 356725 - DNA, 273 bp, Zea mays
gttcaacgactcgttcatggaacagtacgagggctactccaggctgtgagcaggaagagaaacaagagattacagatctgaagaagagattattgattggaagcttattagttattgtaactcccttgaaaagcaggttgtgcggggattattgtttattgaataaaaagtccgccatttgattaaaaaaaaataaaaaaaaataaaaaaaaaaaaaaaaaaaataaaataaaagataccaaaaaaaaaaataaaaatggggggccgccctaa

SEQ ID NO: 356726 - DNA, 287 bp, Zea mays
cacgtcgcgcccctccactgcaccagcgtcatggcggtggcctggacgtcgccgctgtccgccaagcccgccacgagccgttctccgcgcggtcccggatgcggggtgctggctgtcggcgttcggcgcgccgccggcactgccgggtggaggaggctccgcgtggaggcgatcaggacgcagcggacggaggtgcccgtggaggagtccgccaccggcaggtacgccagcgctggcgcgcccctggacgcgaacggagccggagcgaacgggtccgtggttcgttg

SEQ ID NO: 356727 - DNA, 305 bp, Zea mays
cccacgcgtccggttgaggcggtgaaacatgaaatttgcaagatcgaaaggtcaagagcacaaagaacaccgatgagctacgtccttcgaaagacaaatgctatgacatatccttagcatgagtcaagaaattaaaggacatatttgctagggttggggcatattcttctgagcaaaaattcatccacgacgaccctgatggagttgtccagtggatcagcgtggaagccgaagcttttgacgaaatattaagcgaacgaggacatttctgatcctttgctggagcacggggtgccacgtcgatc

SEQ ID NO: 356728 - DNA, 290 bp, Zea mays
ccgaattcccaggcaggcaggacgcgcgaggagggcagagaagaccgatagaccgatctcgagcgggaggctcgggacgggaacgtgataggacctcaaaatctcatatccgtcctgtgcgcccgcccgtgccctacgatgcttcgatcgtgccggccgttcccctcctccgcgctctcctcctccagggggttcggatacgccacaggctgcgcgacggtgctgcgggtcgacggctactgatccctcatcttgaaccctggcgtcgacttcgacgtcaaaatcctcgg

SEQ ID NO: 356729 - DNA, 239 bp, Zea mays
cccaagccaaaggtccgttttctctccgagaccgtttacatcagttttttctgttttcttcagaatatatgcgtgaacgaacaatagtttgcagtacacgaccgacacacaatatttcatcgattccttccttgtcttctcacctccgacgatcccgttcccgaaactctgctcccgcaaaactggcccatggccacggaacctcgcacggccagactcagacggcgagagagagagag

SEQ ID NO: 356730 - DNA, 297 bp, Zea mays
ctggagttctgcatgcccatggaaaactcagttcgccgcgtgagatgcccgagatgccacagcgttctcgaggagcccagcgcgccggtgtaccagtgcggcggatgcggcactagccttcgaggcacctggacgccagcgacgtcgcgagcaccagcaggtccagcaccccgacccctcctcgtgtcgggagcaccagcaggtctggcaccccgacccctcctgacgtcgggaccagctggcaccgagacaccgacgcgacaggcacccggcatggttccggtgatctcgctctcg

SEQ ID NO: 356731 - DNA, 293 bp, Zea mays
tcaatccctcgcctgcaactggctctctgtccccttctgctccccccacggttccccagagcccgagccaaatctaggggcttccttcatccgagcgtggtttcaattctaggggtagtcacctcacctgaattccgcccaaataaattcgtcgctgccttgtgatccttggggtttccttggttcttgagttgcgatcttctgctggttcgtgtcccccaatccgtaatcaatccggcgtctaggaaaccaattgctgctcagttctcttatttgctcctcgccttccttcc

SEQ ID NO: 356732 - DNA, 294 bp, Zea mays
ggccacgactgggcgactgcctccgccgcatttcgctaggcgccacacggcccttggccggcgacgagcacccacagaaaaagtgttgctcctacgactagttctttttatgtgtaaccttcaatgaaggattctcaggatattcagagcacgacagagttgcagtcaccagtgcaaggtactaatgaagtgcaaagtcagcaaccaaactcaatggccgctgatgctcctgctggaaattcgggttccttgtctgtagctagtaatgacaataagaaggtgtctcgcgaagat

SEQ ID NO: 356733 - DNA, 293 bp, Zea mays
accaagtgttgaagaattcaatctgatccttgagaattaatgtacaaacttacaaaactacgtcagctatctgttttatggctcagtttgttcatccgatgaatgaaggaactcttcttatctgtatcatcgaaaggatatcaaaacaggaagattttccttgtctttcctcatcggcatatgcaaacgaagtcaatggaattccaatgacatgctcctgggtgaaagtctccatggcttggagaaggtctatctgcaaatctgctttgatgctaggagacttctcttagcct

SEQ ID NO: 356734 - DNA, 290 bp, Zea mays
gtacacccccggtggtctctgtgtcaagtctcaactctcaagtggacagggcgaccgccgaccccgacgcctacactacaccctacccttctacaggccggcgaactcaagtctcaagtgcggcagggcgaccgccgacgcgggcactctacgcaagccttcttctctagggcgtcgtttgccggcgacgagcaccacgaggtactttgtgctaggatagcagtgctatgtcaaaagctccagatgatcatttacaagcaactgagcaggaaggaagtgtccatccaagt

SEQ ID NO: 356735 - DNA, 106 bp, Zea mays
cccacgcgtccgcagattttagccatagctcactacttgagtgtgcaacccttgtgttcctgctagtattcaccctctccccggacccaagatcgagcttatccag

SEQ ID NO: 356736 - DNA, 168 bp, Zea mays
ccctcctctcaaccccaacaatctctgtctctccatctcctctcaacaaggcggcctcaacaaagtcccaccgcacctttctttaatggagcgagggtgagcctaacaaacactctcgacacacaggaggaggtgctgcccgcttctccccctccctcagtctcactc

SEQ ID NO: 356737 - DNA, 219 bp, Zea mays
atctcactacatattggtgcctctggttgaacatgtccaagccaactcaaccaatgttggataagctttttccaattggtgctacccctagcatttcacgtatatcatcattttaaactcaatttcttcttgtatagccataaatctaacacgacatacatatttctacaacacttatttggtatttgctgaatatgtcatctttttataggccaacat

SEQ ID NO: 356738 - DNA, 130 bp, Zea mays
gacgatcaccaccaaccaaccaaccaccatgtccagcgacacggcgccgcacgtcgtggaggacttcttcggggccatccagctccttagcgacggcaccgtcgtccgctgcgacgaggcggcgctgctg

SEQ ID NO: 356739 - DNA, 107 bp, Zea mays
ctcagatttcataagaggagacgatcttgatgacctattatcgaagcttatcaagagtgtggagatctgccaaggcttcaacgggaggcttaccagaagagatatgg

SEQ ID NO: 356740 - DNA, 212 bp, Zea mays
gcggtggccaccgcgcatgcgagatccggaggcgaagagagagagagagagggagaaggagggactagggagtggctcggttgcgcggtccctcgctctcctctgctggtggttcggcagcttttcgtcgccttcgtgggctgcggttgctgcgccgtggtgagctgtgacgaagaagctaggctagctaccgtatgtggtcgagatcgcga

SEQ ID NO: 356741 - DNA, 160 bp, Zea mays
cggacgcgtggcaagctataaaggggggaaacgacagcaagaacatcatgagttatagcataaccatcatctatttggtttctatgttcgaagctacatatacatattaagatttatagattataggaagttatcttaaggaccaaaaaaaagaaagaaa

SEQ ID NO: 356742 - DNA, 290 bp, Zea mays
ctttcatcaccgcaactccaaaacctcctatcgtcttcttccatcaccgaacgacgactgggcccgctgtccctgccgtcctacttcgccaccttcgccggcgacgggcaccaccagtgtggactgtaatgtttgatgatgatgatgatgatggagtggacccacaaattgaggatgtcaacggatactactttgaggatggtgaagagaaaccagtttgtttcagtatcttgcctttccagtttggtgaggacgatagcgaggcagatttcctcagaaaggatgttttc

SEQ ID NO: 356743 - DNA, 293 bp, Zea mays
cccacgcgtccgctcaactcaatcctctgctcaaatacggcagctgcatttgggtgctcatcttcccagccgagattttcccagcgcccatctccctaccgtgcagctcgagctcccgcgcccgagctcctcccagccatggagctcgtcaacctgcagctcgcccagccccagccctcaagccggcgcacggagtctcgctcgtccaagctcgcacgcgagctcctcccctctgctgcgcgctagatttttctccccgcgcgcgcgtctttcgccatggccgccgtcaagcc

SEQ ID NO: 356744 - DNA, 284 bp, Zea mays
ggcgcctgggcaccagctgctcccaacaccgcccctgccctgcgatttttccttggccgtcgctcactgccggtggagatatttgtttcaggccgccgtcgtcatccaaacgccgctcaagccgccgctgttcctcgccgttatccgctccgccggccggatacaaatccagcagcccccagccccagtcgtgctttgcttcttctccgtggccggcgtcctctaccccatccatggccagagcttcctgtccgatgcccagccgaagtctctttcctggccgc

SEQ ID NO: 356745 - DNA, 285 bp, Zea mays
gaatgtctttatacgtgtataaatgcactcgtgctggataagcagcctctggtccaagaaaaaaaaggttccagctggttctcaggcagaggcagaggtcaccttctgctgctcaacgcaacactgcacatacatacatacagatgggttccgaggggccttctcccgtcaccaccaccgtccacgtcactgggttcaagaagttccacggagtcgccgacaaccccaccgagaagatcgtgcgcaacctcgcgtcgttcatggacaccagagggctgcccaagg

SEQ ID NO: 356746 - DNA, 296 bp, Zea mays
atttgggctctagattatataatctggttgtttgtttgctagctagattatttacactggattatataatctggctagattataatcccaaacaaacatgctcataatctactattggcagttgccactcaaaaaatttaaccgactttaaatgaacgctgacaaaattgattgtttctattactggcatcaattaatactagaaaactaacatcaaaatttgagttgcatacaagttcattttctctacgttaggttacgctgaaagccctaagattctggatgctccggtgtct

SEQ ID NO: 356747 - DNA, 298 bp, Zea mays
gacttggatggttactgctgtgtgctgggtctccgactggcaaacacattttactgtagttctgtgtgaagcaactggatccacggacgaaatagagaccatagctaatttctatgagggtgctattggactggttgccaaagcaaatggtttggagtctgtgctgctcgccacttcttggattctcagtcagatgattgtgacggtctttgtgtggagtcaaaaagccctccatgccttccactgcacacacatttctattgttgcaaaccaggaaccccaaaggtaacaaataagt

SEQ ID NO: 356748 - DNA, 296 bp, Zea mays
atgtgctcctcgcctcctccagtcccaccttctccgctgtatgtgagtctgtccctctcgtgtgtcgcccaaatccatcaccccccacgtctctcccattcaagcgtgaggttgttgcaatagcatcaaatgcattggagaccttcaaaaacgacgccaaaaagatggtcgttgcgcttgttgatatggaacgtgcttttgttcctccccaacatttcatccgcttagtacaaagaagaatggaaagacagcgtcgggaggatgagttgagaaatcgatcttctaagaaaacacaa

SEQ ID NO: 356749 - DNA, 306 bp, Zea mays
cccacgcgtccggcgccatcggtgcttgagttcctccaccggcaatccgagaaggcacccaccgatgacgacggggttcccctcgacgagcgcaaccgcagaatcctccggtgcctactgagctgggtccgcgtgaggtgcttctcagagacgccggcagcctcgcttgccaggcacccacttctcacttttgcgttcaactcgctgcaggtgtccttctcgtttgaggtggccatagaggttatgactgagcttgtcagccagcaccaagaattacctgaggcctttctgagtaagacaccttat

SEQ ID NO: 356750 - DNA, 147 bp, Zea mays
cccacgcgtccggtttcagtcaatgggacagtacaaccagggagaactcaaaaagattgctgaaacaatgatcaagaatggtaagctgctatcgaaacacccagtggttcaatctgatgttcaggctatgaaagaaaaaaggagact

SEQ ID NO: 356751 - DNA, 291 bp, Zea mays
  unsure (1)..(291): unsure at all n locations
gtccgttcgtcctggtggttttgtgaggtcgaaagcggcggacgaattagaagatgctggacaagctgtgggacgacgtggtggccgggcctcgcccggggactggcctcgggaagctccgcaaggccagcaccgcccgctcgctcgtcatgaacaaagacgcgggcggcggcagtacaagcgggcgcagtcgacgccgtctatgccgacgacgccggtgacgccgtcgtcgtcgacgacgccgcgcagcgncgggaacgtgtggcgcacgtgcttgcgcccggggagcaa

SEQ ID NO: 356752 - DNA, 192 bp, Zea mays
cccacgcgtccgctgcgtgccacagtcgcccagctttgttgccgcgcccagccgttctcagctgctcaccgtggccggctcctgcttggccaccatctcccatggcgatggccgccgagctcccttgtcgtgggctgtcgcgtccctgcggccagcctttaactcaatccgtaagcacgcgagctaactggt

SEQ ID NO: 356753 - DNA, 172 bp, Zea mays
cggacgcgtgggtggaaaagttccagtgtctaaactcacatcaatgaagcgtctatcagctgcagcttggcagaaattattttcaaaatatggaggggggccctacattgagcggtgatgatttttgcatggtgtgtcttaaagatggggcgaaaaatgcagtatctgctga

SEQ ID NO: 356754 - DNA, 311 bp, Zea mays
cccacgcgtccgatggtagtggtccaaaggatcctgcaattaaagggtttcagccaatggcagcaccaactaagccagatttgggccgtcagcaatttgttcaacctgagaagagacgtctcaatcccaactcgattccatcaattccttatgtggcatcatctcctttgcctgttgcagtgccacaactgaagtcagacatgcggcatgtggcaggaactaatgaggttaaaagttcgatgcccaatggaagcttgcgagagtcggtaattgtaatgcagcgtcctcaatctgcaggtaccaagcaaagc

SEQ ID NO: 356755 - DNA, 302 bp, Zea mays
gcggctctggtgctccgtcctccactcctcctcctccttcatccattcctccggtgcaaggtttgttactttctttatctcggcgcctcacgacctcgacaataccggctctggttctccgactttgaaaggtccgtctctggtgtaccgcgccgtcctgttcggcggcctcagcaacgacgtcatctcggccggagccctggggatcacgaccgcacagctggtgcgcatcaacgacctccacagccggacggtgcaccaggagaacgccctgtcgaaccgactcgccaccctgcaggaag

SEQ ID NO: 356756 - DNA, 301 bp, Zea mays
ctccctcgccgcgtaaaccccccccggctcgttcgactgccgactcggccgcgctcgcctctgttcaatcaccggcgacggaggacgccgaggaggctcttcgccgccgagtccatttctgcgagatccccgccgagcaagaagcgcacatccgcgtctgcctgcaccagcgggtggccggccgcgtctccttccgagtcccgagcgcctgccgccaaacttctgacgagtgtcagtgacatcgggtcgggttcgctggagaactgaggggggcttgccgccgacgcgatgaacgcctccg

SEQ ID NO: 356757 - DNA, 99 bp, Zea mays
gtttaggcacttggctctcggctgcagtatgttgctgttaaggagttgaaacttctgttatcattactgaactggtttataatgtgacgtcaatttact

SEQ ID NO: 356758 - DNA, 286 bp, Zea mays
tttttatttttttttttttttttttttttttttttttttttgaacctgaaaaaagaatccaatccagagttctcaatacttgtctcgtgagtttgtccgctaacatattcaccttcttgatccttaacatatttggcatgtggctgacaagcacaattgcatattttcctttacatttggacagtactcatacacacaatgtatctgcacggcaaatggtcaggtacgagggcaagctaagctaacaatcgcctcacttgtttccgagtccgaacaaggacttgat

SEQ ID NO: 356759 - DNA, 125 bp, Zea mays
cagagactagtccaaagcaccataacgagagagatataaaaaaacactcggaaacgatccgcgaactagtccaccggcgatttgttgtgttgttcttcagtgcgtcgccaaccttaactgctacg

SEQ ID NO: 356760 - DNA, 274 bp, Zea mays
atgaacaaaaaatttaagagaagttcttaagcgaatttaaagaatgtgaagttatgaacaaggaaggatcatatggcaatggcagctaactgaatccgcaaatactattccattgggattctgcacagatgggagtgtagactaacagttcagctcacagagcaacagtttggagtgtacactatcaaaatgcagtcgtcgttcggctgggcttcttttggctgggctgctgctgcagcacacagtagccagaggcagccgaacggcaaggtct

SEQ ID NO: 356761 - DNA, 271 bp, Zea mays
cccacgcgtccgtgcatagtttattaatttctaatgtttaatttaagtctagttaagttaagaaaaacattaatgttgtacttagtggtatattaatatcttgtattgtttgagtgttgtaatgtctcgccactaaatatttaatcctctttggtgtagcaataattagtcatgtgctattcctatttatattcattcatgtgcattatacagcttattaggtgcgctagttgatcgcgtaatacggaagacgagccaagtcgatcccaag

SEQ ID NO: 356762 - DNA, 304 bp, Zea mays
ggtgtaagttggtttgtttcactagtgactctaatactgtttggtattttcgttctttacactttttgctgaacaatcactttgaatatcaccaacataaactggacatctggtgtctacctcggcatgcatgtatgtttaaccctgtagaaaatcttgaggcccacttgcttctcatgtgaatggactcttgccttgtggtattgattgagaaacagcaacttagatttcaaaagcacctgcccacattcggtgtaacaagtcgttgttttgatgtgttgcggtgtattgtgcattatatttt

SEQ ID NO: 356763 - DNA, 182 bp, Zea mays
atggaatctgttgcactggagcacattgggcgatggtgtccgtaagtttctttggtgataatatgctatattgaaattccttgcttcagttagcattcctagacatttactctcctttttatgagcagttctttaatgtcaacttgatgtgctgtgagtaaactaaacataattttggactt

SEQ ID NO: 356764 - DNA, 186 bp, Zea mays
tgaatttcacaaataagtatgctctgttccaaagtaaagttcaataaatgcaccatcaaggcatatttcatgagaatttaatgaagactgattttatgttgtagatgttggtgcattttttttctagaaaacttggtcaaagttaaagaagcctgatttagaacaaataaagtgagatgtatttgg

SEQ ID NO: 356765 - DNA, 199 bp, Zea mays
cttaaggagtgggaatctagggaaagagagagagaatatcagaggtatagtgaaaaggagaaagaaagagatagagatcataaccgcagaagggagatcctgaagcaggaagatgagagcgatgacgaggataataggaaaaggaaacgaaggagtattagctcacttgaagataggaagaggaggaggcaacgcgaaa

SEQ ID NO: 356766 - DNA, 146 bp, Zea mays
ctcaactcttcctctcctctctcttctgcaccatctggtgtgcgtgcgcgttactcgccgcgtggatcgaagaaagaggcgcacggcagcgagctacgcgaacaacggccatggcgaagggcgggctggccaagcttcggtgcatg

SEQ ID NO: 356767 - DNA, 165 bp, Zea mays
cagagaaaccaacaaatggtggatatgatggtttctctgaaccttccagcagtatactataaggttcagagaaaccatcatatccacatttgttgaatttcctagtacatgggatacctcattgtggaatgatacctgaaataacgctgcatcgacgattgacac

SEQ ID NO: 356768 - DNA, 280 bp, Zea mays
cccacgcgtccggcaacgaagggatgattgaatgtgttgctgcatcttgctgcagcaaggcggcaattgaggcgaacaaagccacagcaaggattttggtcaggatgctgatggagggatccgatagtgcaaaaccgattgcagctagggaaatccggttgctggcaaagaccgggaagccaaacagggcattcattggcgagttgggtgcgataccaatgccaagtaagactgctgcagtcgtcagactggaaggcgccagagaacacagtgacggcgc

SEQ ID NO: 356769 - DNA, 303 bp, Zea mays
cgcctccctccgcaatcggctgctgaagctccaccgcgcgcctctccctggagctgcgctctccatgcgcgtgtggctcctcctcgccgacgctcgagtcccagccatggtggctccctctaccggtccccatcttcctgctcggatgtcgtccagctcggcgctccgactgctccactgcgccgaactgctcatctccctgcttgtcgcgtctccctctatttccctcgcgtcttcttcttcctactgcggttttccgacgcccttgctccctgcacacgctggtcgactacgtcgtcgatt

SEQ ID NO: 356770 - DNA, 312 bp, Zea mays
caacatattaatagtctggttgacgtttgcacaatttggatatgagaactgcgagaggaaattttcacacccctagcagcactgacccaatatgtggagtgacttacttcccacatgcatttcacaactactgccaggatataaatgagtatggttttatacatataacatacaagtactacggtagaaaggctgtgaattgttgaccgaaaaaaaggtaacttgtttgtgcagtccaagttattatctaaacagtcaattctgcatcactaggtctttaggtacattttcaggtcagcgatatatctattt

SEQ ID NO: 356771 - DNA, 320 bp, Zea mays
cggacgcgtgggcgcgcacagggacagaaacagagacagagccagccatgtcgaccaccagcctgcagctggttccgtggccgccggagccggcgcgcgccgccgttgcgtcttgttgcggcggtcgtctgcctgtgggtgcttctgtcacgcaggcgggccgccggagggagcaaggacaaggagcgggcggcccggctcccgcccggcagcttcgggtggccgctggtgggcgagacgctggacttcgtgtcctgcgcctagtcctcccgcccggaggccttcgtcgacaagcgccgcctgctgcacgggagcgcggt

SEQ ID NO: 356772 - DNA, 296 bp, Zea mays
accacgcgtccgcggacgcgtgggcccgtccgcccagaactatctcgctcgtccgcgttcagctcagctactccaatttcgcaacaagttgcaagcaataaccgaccaaggacgacgatcgggtcgatgggcacgctctgctcctgcagccgcctgagtagcggcaccggcgccggtctactggaagaccagcagcggcctcccgccctcgccgggcgaggggctgaccctgttctacaacccggcggcgacgaagatggccccgaacgaggtgttcggcgtggcgttcaacggcg

SEQ ID NO: 356773 - DNA, 303 bp, Zea mays
acaggtaagacggcttccgaccctttacttcttcagtccagaccaaaacaaagatgccatacgcaccgaggggctaattcctatggatatgatcagaaacatcattgacaacgagttatgacagctgatagatcactgtattaggaacataggcaatgttttatctttgtagcagaaaattttttgtcatgaggctaagcattaccgctaggtgctagtttgtgtgcttgatgttttcttttgctccaatggtaggtttcatctgtgcaaatccattctgctgtttctgtatcgtgttgttta

SEQ ID NO: 356774 - DNA, 304 bp, Zea mays
aaaggcttcaattttcctcgggaatggaaatcttgcaaaaacagtactttgggaagatgcgaacaaactgtgacagtgcttctactgttggctgttatctactaccacttatttacatgtggttacaccttcatcacagcgatggcaaagcttttgtcactaactgctctgttcttattcattcatggcatgctgccatcaaatctgttcggtcacaaggttgagaaactcgaggcctctaattttcacatcacccaggcacaggctcatcatattgctcattccattagttcgaattggaact

SEQ ID NO: 356775 - DNA, 135 bp, Zea mays
caaaagaaaaacaccaaaaaaccaagcagagactagggttgtgtatacctgagcatgggatgagaaataaactagttgccaaaccctagcccgccgatgtcgcgcgttctgtctccggcgcccggctactcctct

SEQ ID NO: 356776 - DNA, 101 bp, Zea mays
tgagtgatagaaggtcctcgaccgtcgtcttgctgcttgccggtcgcggtctcattcatcgagcatttgcagcttatggcggcaggtcctccgatgaggca

SEQ ID NO: 356777 - DNA, 271 bp, Zea mays
caggtttctcccctgcttcctccatcctctcgcgtctctcgtactcgcttcgtttcctctcctccttctgccctgtggacttacgatcctgcccctgcgtgggtcccaccatctcagttcgtactttgtgttcggtctctcgttttcttttctttgttttccttcaactgctccgcagcgagaccaaaggagggatcagaaagaaaaagctctgtgcctctccgtatgtcctgtcggacggctcagctccgcgctggcgtgtctgtaggcg

SEQ ID NO: 356778 - DNA, 233 bp, Zea mays
aaacaaatcggagtaactgacaggcactcgctgaagttgtggacctcatgccttgcctttctatgctccaatgaggcaaacgttcatagggaattgcatacactgggaccttgtgtgtatcagtgcatgcaatgtctgtataaaattaagagccattgttgtgatacggataatatcggtgaatatgaacaactgaatcacctggctgctgaaacaatgtatgacgacaggac

SEQ ID NO: 356779 - DNA, 212 bp, Zea mays
cgctccgcgccgacaaatctcgcccgcggaagagaaagaactggtggcgtgctggcctttggcaccttccagaagattcctctatctgcctccgctccgctcatggcgtccggggcgaagaacaaggtgcccaaccttggggccttttctgggaaggcccttctcttaagccccccgcggggcccgccttgcggcggccgattattgagctc

SEQ ID NO: 356780 - DNA, 209 bp, Zea mays
cgcttcgctatggcgctctcgctcgcgcgcagcccaaccccgccgcggcgctccccgccccgcgtgttccccactttgcccttcctctcctcacgctccgctagcctcgccggcaagaacaagcaacgcttcggggtcgcagcatcttggcccccggaggcgcaggttgcccccgtggcggaggatgagcagggggagaagcggcggaa

SEQ ID NO: 356781 - DNA, 192 bp, Zea mays
aaaaaaatgaggagaagcttgatcttggttctgtttctgggtcatcacattcagaaggagagtcttcaggagaaaagtcccaactgacaacaagttcaggagctgaaggtggtgactttgaatcggtgatagtgccgagcttgaggtaggaatgttggatcatcccatttctgttgctgctgcttcagaaga

SEQ ID NO: 356782 - DNA, 134 bp, Zea mays
cacaccagtcgctgcagcttccccggccgccgcgccgaagccccaactgcctcgatcgctcgagagcgaggacgaccactccaccagcagggcagagctggagggtggccgcagtcgcagcgatgaaggctctc

SEQ ID NO: 356783 - DNA, 199 bp, Zea mays
tatcgcatcggcgtcggggaggcacctgtgcgtccactccatctgccactggagcgacttcgccgccaaagtcgccgagctctaccccgactacaaagtgcccaagttccccatggacacccagcctgggctggtgagacatgaagtggggtccaagaagctcaccgggctgggggtttaaattacccccatggagaag

SEQ ID NO: 356784 - DNA, 239 bp, Zea mays
ggtccgtggcagtgcacccagcatgaagccaaaggtggagccgccgttggaggcttcacacgactgggaggtgaccccgctgtccggcgacaaccccttcttcaccagcgtcatgcgcaagaggcaagtccagaacccctttcagctggtcatcccggttcgcttccaccggcacctcccggaggcgcgcacgcacgcggtgctcctctggcgggaacggtcgttgacggtgaactacg

SEQ ID NO: 356785 - DNA, 165 bp, Zea mays
gcacaatgggcgccgccggcggacggccgggactggcgcgcgggccggtggtgggagcacggcttcgtccggcgggtggagctgccagatgacgcggagtcgaggaaagtggaggcatgcttcgacgacagcgaagggtccctggagatcaaggttcccaagacc

SEQ ID NO: 356786 - DNA, 166 bp, Zea mays
agtcctcatcggcctcctctctctcggtctccgccagaactccccacggaaccctacccgagcatcagccatggcaatcacagcgcgcgcactgcaccgcctcccgcatcacctctccccctcgaactcccgctctttctgcgcagtttccccggccgccgcctcg

SEQ ID NO: 356787 - DNA, 141 bp, Zea mays
  unsure (1)..(141): unsure at all n locations
cancgccgcccgtccctagcccaagctcccagccgtaacgccaccgctcgtccctaggccctggctagcggctagctcgcgcgtcctgctctgtgctctctcggtctctcccagccccaagctcgcagcggcagccgcctg

SEQ ID NO: 356788 - DNA, 231 bp, Zea mays
atgctacagacagagagaactcacattgcggttgcggacctcagcttgcccactacagagctaaccaaaagagatgaaagggagcctttcccacgagctcgagacggggctcccagccgccgacgtgtgggaggtctacggaggcctccttgttggggacttgattcgccagctgcttccccaagttttctcaagggttgaatcgtagagggagacggtggagttggaacg

SEQ ID NO: 356789 - DNA, 147 bp, Zea mays
ccagcaacgccaacgccagcgcagcccaaccctaacccggtgtcaccgaggacacacagacaccagaccagccggggctcaccaggtacgaccagtgtcggcgccgcggatgagggcttgctgcgggagtagcgtgtcggcgaggag

SEQ ID NO: 356790 - DNA, 215 bp, Zea mays
ccgggaggctcgacgcgcgccgacccgcgtcgtcgccgagcccctcgccgtcccccaagagggtgtccccggcgtcgtccttgtccagggagacgctggccaaggcaagcgaggaggagtactacgccaaggccaagaggaggagcccgtacaggtgctcttccatctcctcctcgccgccggcgccgcacccggatccgcctccgttcctcgtc

SEQ ID NO: 356791 - DNA, 239 bp, Zea mays
aagggagaagaggaggagatgctgatggccattcgggttgccattgtctgcctctcggactcgccaaccgaccggccatccagcgacgagctcgtcgccatgctaacgcagctccacagcttatgattaatcaccatatatcgcaaatttcttgagcggctgccgctgcgcatgggcctaaaaacaatgggggggcgttcaagttgattcgttgctcccggtttaaaagcaagaacggg

SEQ ID NO: 356792 - DNA, 155 bp, Zea mays
gttctagatcgcgagcagccgcccttttttttttttttttggacacaacccatccaataatctttcatgagtgacagtgtcggagtcatcggccaatttcttcaaaattatcagtaatttatgatgtgtcatgtaactatagtcgtaggataagg

SEQ ID NO: 356793 - DNA, 245 bp, Zea mays
actagttctagatcgcgagcagccgccctttttttttttttttttgtctcgggaaattggaattgaaagcatgcaaatgtacacacacgagctgagctcgtaaaaggtgctacaccatcggcccagccacgggagcactctactactctctgctgcccaaggcgaaccggagtatttacacgctacaacgacagcggggaaacaacaagacttgggggaaacgcaaacccaaaacgagaaaggga

SEQ ID NO: 356794 - DNA, 145 bp, Zea mays
agcttccctccccctaaaaaactctcacacatcaccgcgagagaggaggctgagccgcggaggagcagcggcgcatcgcaacactaaccaaaggtgccgagccagggtgactgttccgaggagcgtggcgtggacccattgggaa

SEQ ID NO: 356795 - DNA, 141 bp, Zea mays
gttctagatcgcgagccggccgcccttttttttttgtttgtcatcggccaatttcttgaggattatcagtaaactatgatgttcatgtagctatagtcataggataatgcagcgccggtttggtttcatcacgcggatggg

SEQ ID NO: 356796 - DNA, 254 bp, Zea mays
cgacgacgacgacggcgacgtggttcctgttccccagcaggtcaacagcttcggctaccagtggaccggccaagcgttccacatgtgcgctggatgggtaaaccccgaagaagacatgaacgaggaactcgagtgaagatcactagcaactagcaaggttccagcaacaggatgaacattaaaaaaaatactacaacgtggttgtatgtccacgactaggatcatgtgtgtgagtgtgtctgtgtgtgttcatg

SEQ ID NO: 356797 - DNA, 250 bp, Zea mays
atcagttgctaatgtcgcagtcagcagtaccgatgatgtaacgctaagcatatctctcgcccgcttcgttggttcttatccgttaagctaagagcaggttgcgtggatattaaacagattcatgcgttcgtctgcttagggttgggttgggacttgggaggcatggctttgtttgcgttgcgttgcgtgtcttatgtgaagattggtcaccaaccataacggtcttgctgaatttctgttcagacagtca

SEQ ID NO: 356798 - DNA, 247 bp, Zea mays
cggcaacatgggcaattggtccgttggtaaggtgtcgtcatctcccgtccactgccgccggcgtggctcggagactcaacacgtcgccagactacacgcgccatggccaagaacagctatgtggttaatgtcctagtgctgctcgtcgcgggctacacggcggggctagcctcggccacgacgacgacgttcatcggtcggtgacgaccagggctggatgctacggctggactacgtcgcttgggtg

SEQ ID NO: 356799 - DNA, 247 bp, Zea mays
ctgtcgtcgtctgcaaataagtggtgtggccttgttgcaaccgtaccgatgatgatgaaggatttttttttttggccatgaccgtccgtccataatacgtgtatgtatagtagttgcagaaagtcgatcagtcagtgtatatatagtgtacatgaatcaaacaaacaaagctctcaaaaaaaatataaaaaaaaaaaaaaaggggcgggccccccgcgttttaaaaagtttttaattcggggggggc

SEQ ID NO: 356800 - DNA, 252 bp, Zea mays
cgtagtccattcccagaattccatcttcctctagcgccggtcgctgctttccccaacctccatggcgtccctccttgctccactcgggtcctccttgatccggccatggggctcgcccagccgcgtgcacaggaccacgcgagtggatcctctgctcgccatggtcgcggccatcctgctcccttgccggcgtttctcccagcgtcgcgtcccccctcttctccttgctccagctcggctccttccccatct

SEQ ID NO: 356801 - DNA, 252 bp, Zea mays
gggcgcggaaggcctcgacgtttcccatcttggcagcagccattatgggcgagcatccgtccgaatcctgctcgtccacgtccacgtctggttgagaaagcagcacttccatcgcggtcgcgtcgccgcacagcgcgccgaacatcagcggggagaacacgctccgttcgctggagcgtgccacggccccgcaccgaatcgcgccaataacagcccgttcgaagccggtcttccatcccccagaggaagcga

SEQ ID NO: 356802 - DNA, 253 bp, Zea mays
cagcaatggatttagagaaaaattggagtacaggaattcgaggaactatgcttgaatactcagatgattacaaggctccagtaatcaccagtgtcgttcatcataccttgtctttgctaattgatcgtgcccgtcccatccctagcatcacacttagggcagaattcattagtatgtctgctgtccccatcatatcagaattccttggttacatgcttcggaggtgtcaagaagcagaggggctgactgctct

SEQ ID NO: 356803 - DNA, 249 bp, Zea mays
cacatatacacatcacacatcacaatgtctggacctggtgtcggcttcgagtaccctgctcagtcagtttcttggctgaagcgcgacctcttgctcttcgccaactccattggagccaccgccgatgagcttcacttcctttacgaacttcaccccaactttgccgcctttcctacctaccctctcatcctacctttcaagggcgatacacaagaagtgattgacttctacgccgccaacaagaagacc

SEQ ID NO: 356804 - DNA, 250 bp, Zea mays
aaccaatcctaacactttatttttactggaacattcattattttttcgaaaactacaaattttaaaataaaataaaaaatgggtttgttagatggcaaagtgatattgattactggatcgacatctggaattggtgcttctactgctattgaggctgcgaaagaaggtgcttctgtagtcgtcagtggaagacgtcaagacaaaggagacgaggttgtcaagaagattaccgatgctggaggcaaagcaa

SEQ ID NO: 356805 - DNA, 249 bp, Zea mays
gccgcccgacagctgtgcttctacagggctcaaggcacttctccgacggccacattagctcgtgtacagggcttaaggcgcttctccgccagccacgttagcacatagctacaccccattgtacagctgggcatctccttgtatctataaaaggggatgaccagggccttccgaaggcaggtacacgcaccagacgtccaggtagagatacgttcacgttgacacacgttcaggtggacatacgtggac

SEQ ID NO: 356806 - DNA, 249 bp, Zea mays
actaaatcttcatcctcaaaattcgtcaaacgatggtattattccatgaagcctctttcgcaggggcagttctactgtccagcctcatcaccatgtactgcttcaagccgcccaacgacgttccacgcgacggctggaagcaagacagtcttggaacatacgccagcccagccgcagcacgaccccgacgaattcttgccgtcagcgttggcattttccatgccctaatttccatgggctacggtgatt

SEQ ID NO: 356807 - DNA, 244 bp, Zea mays
ctgttaaaaagcagtagaagcaatttctataaacagagtaggcatgtgcaactaaatattttataaatcaaaaccgaaaatactatgtttcttcttctacagggtacccttgcacgatttacacctacccgagaggggtactcagcttcgttgtatcgataagtgcatataaccaatccgtttcagctttagcttgatacgctgggtatttacaaactatacgctggcaaaacaagaaggtata

SEQ ID NO: 356808 - DNA, 251 bp, Zea mays
ggtatgtaatttttttagcattagtacagtacgtagaaccagggaattcctgatcccttgctgggtgattggtgacattccatgcctgaaccttgtgatctaaagagaacatatcagtctaaatcagattggacactagatcctaatctgaagcaaatttgtcgaagcaattactctcaccctagtaacggctgtgaattactcgcacgagttcgtcgaagcaattactctcaccctagtaacggctgtga

SEQ ID NO: 356809 - DNA, 267 bp, Zea mays
caaatcaccggcactgatcactccaattcaatcacgcatgtggtataagccgtccgcgtgcagtacgcgattaatagaaggccattgatgctttcataagtactccaacgactcaaaatgatgccacggcatcactccaagggattttacaatggatatcagcgcgccgacacattcgagagttccccgcatagattccaatcgagagctaacgtccctcttcacaaaaagcgtatgacgactgcgatccgtatcggtatcgtggtg

SEQ ID NO: 356810 - DNA, 268 bp, Zea mays
aaaaagaagaggcggaaggatgatgaggacaatgatgccgatgcttctattcctgcgaagaagatcaaggttgaggaagctgctgaagcagtggaaggggagaagagtgagaaaagaaaaagaaaggcaagggggaatcaagatcagctaaagctgtggaggtcaaggaggaggttgatgcagctgatgagaaggggagtgaaaagaagaagaagaagaagagcaaggaaggaagtgatgctgatccagagagtgctcagaatggaga

SEQ ID NO: 356811 - DNA, 260 bp, Zea mays
gcaggtccgcgaggacttgcataaccagatcttccagacgggcggcgcacgagggtggcgactccatcgagagcggggagaagcagcggtggacggacttttttaccagctcgacaaggctatcaagggcgagcgcgagtttacccttgtgctctcggatccattggccatgagctatgtttagagcctggcggacgacccgggtcagccggacgaccagatggaggtggtggagtacgagcggacagccgacgaggagg

SEQ ID NO: 356812 - DNA, 262 bp, Zea mays
cttgatgcagagatgttgggaagcagatccatccgaccggcctgatttctcggacattttagccgaactggaggatcttttggcacaagctcaggtatttacaagctccatgcacatttgacgcttcaggaacatcgggaaagacggtccaagatccatcaaactcgaacgcgaaagattaacccccatacctgacattttttctcaatccagtgatttgccacatctaggattcgagttgccaattatgaggaaatttgtt

SEQ ID NO: 356813 - DNA, 263 bp, Zea mays
gcggcaagcccaagatcctgaagaagtgcaacctgccgctcaccgcccagggctgcgtgaaccgcatcatcaccgagatggccgtgttcgatgtggacaagagcgggctacgctgatcgaggtggccgagggcgtcaccgtggacgacgtcaagaagtacaccgaacccgagttcaaggtgtcccccaacctcaagaagatcgcctacgcctaaggcaaaaaagccagcgagggccctcgctgcaaatcatgatttgcgtctg

SEQ ID NO: 356814 - DNA, 262 bp, Zea mays
aaaatgtcgtgtaagcaggcctgtagctataataactctctcacgataaaaactgcacatttaatacttcgtcaaactctttcttttatagagtctagctactagtgagaatctgattttctctctctttatttctctttctttcacatcattataatttggtatatcatcccttgcagctaatatacatcatcttcttatatttgttcttagactatctctaacagattttctatactttgcaaacaatgtaatctacagt

SEQ ID NO: 356815 - DNA, 265 bp, Zea mays
  unsure (1)..(265): unsure at all n locations
cagcaggccacggggagcactacggcctcaacgtttccagccttttgacccttgcgagagaggcggctgcgcgtcgaggcgaagtggactgcgcgcggcctgcagccataggagcaggagcacgcagagagagagagagacagcatacagcggggcgcagaaacatgccatgccgcgacggcagataggctgcccgnctgatgcctcccctctcagtttttgattcgacggaacgagacacatggcgaaaagcggcagagcagca

SEQ ID NO: 356816 - DNA, 262 bp, Zea mays
acaaaatgagggccgtccaaatcctaggagacgtttcgtcccctcaaaccgtaaccaccgactccataccggagcccaagcctcaaggatctgagatgctgatccaggccacgccgccggaatcacaggcgacgaagtccactggcccgagctctacaactcccctacacgcattccagggcacgagatatccggagtaatcgtcgccttcggaccagagtacgatggtccactgatgataggccaagaaatttttgccttc

SEQ ID NO: 356817 - DNA, 261 bp, Zea mays
cttgtttcgattaattacgtttctactaatttgaaaactaaactaaaattaagttcggtgatcaataatattttctattatggttcatttaaaggcaggacacggtcagctcaacgagttggtaatatgcgtgtaaaacaacataaacgtacactttctagagatggaaatcaccgaaattcagaatcagatgaatttgacgaacttagcacttctccaaagcaacaactagttgtttctggagctgttacaaagggagac

SEQ ID NO: 356818 - DNA, 260 bp, Zea mays
ataacggataaactaaaaaatattgatatcgacatgttagtagacgataccgaatttgattccgataaatatgatgaaaaaatggctgctttatttaatgatgaatttatcaagaatatgaagatgatgaaaagcctcaatttgaatacgattctgaaattgacgatcaagaatttgaccaatttggagaccaaggtttaattgcggatggtcgagagtatgaaggagaagttttaagttcagacaatgattcaaatgag

SEQ ID NO: 356819 - DNA, 264 bp, Zea mays
cgctccgcctcatctcccagcaggccggcggagcgagcagggtgcacgccgtggtactaatcaacgaggcgctcgacgagccgccgtcagcggcgacaggaaacgacaaatcccaggcgtcgatcggtgctacgagtacgaggccctcctcctcagcagcagcagaggcggcgatccagactttctgatccggtggccggacgatgagaacgagccgatcgcgctgaactacacgtcggggacgacgtcgcggcccaagggcgt

SEQ ID NO: 356820 - DNA, 278 bp, Zea mays
tggaggacttgctccatcgcttgagactggtgatgcactgggtaatactcatctgatactcggaagtccttctggtctctattgcacagttccctctacgtttactgtttggatgagtattgctcttgcccgtatacttcatttagtgaacaatcgggaatggatagatagaaatcagggcgacttatgctaacttttgagttcctttactgtgatccaattatcgctgattaatctgtctctgtatatgcactccaccagccagtctgtactcagaa

SEQ ID NO: 356821 - DNA, 251 bp, Zea mays
gtccgttgatcagccgatcgtaacgccggcgctgcagaggttcgcgcgggaagtgagcttggacgccgtgttccgccgcgtcggctaggagggcccgagccggacgtcgcgtactacaccaccatcaccatcgctgggcacgtgttcagggagtcctctatgacgtcggcccacagtggcagtggacacggctgctcggatacggacggacggtgaagagtagggcgcgtcacacggcggcggactgctgg

SEQ ID NO: 356822 - DNA, 290 bp, Zea mays
ggacgcagcagccgccgccgccgctcacccacgacgacaaccgcagcttccttcggatgctgcgtgacatgaaagagaagtgattagttgtgtaattgtgttgaacatatcgagtagtatcatgcatatgcatgcatgcatgcatcaatctgttgttatatactgcactcaacggtagcgagcagcaaagtcctgacgcatgtcggtgtatatgtcatgcatgcatggtatgtgtggtatgatggactggcatggtggagagcaggctgggcgtggacgcgcccaaggtg

SEQ ID NO: 356823 - DNA, 288 bp, Zea mays
gatggatggatggattcccgattcccgatcgtccatagtatgttttaccattcattagctgccggcggcgcgccttgattcgtagccgtcgtcggtacatttttttttgtttctaaaattctaattctcccatataaatggaacatcatgcatttgtcgtgtttgcttgcaaaaaaaaaaaaaaaaaaaaaaaggggcggcccccgattattgccctcttcgccccgggatttatttcgggccgggtacttgagggggtaccattttccccaaaagggagtcgtttaa

SEQ ID NO: 356824 - DNA, 287 bp, Zea mays
gtgtattttgccgatttacatctacatcattaggactatttctgatatattgacatatctgatatggggcaaatctgtcaggagaatcggtattgaagctaatgaagagctaaggtccatattcaagagagatgtccatctaattctccaagttagagttgcgaaaaagagaagtgcctgaacagacagagtatgtttcacatttcatttactgctctgttacagtactctatcctgccagcatattaccagcttcgctataaatgcttaaaaatccttaaacaaat

SEQ ID NO: 356825 - DNA, 287 bp, Zea mays
atgaaattgagaaaggtgatgattgggagcacgaggagatcttcactgatgatgatgaggttgtggatgttgatatagagcaaagacctgagttagctgatcctgaggctgctcctcctgaaattaaacaggatgacaacgaggatgaactaggctgcagtgacaacttgagcaagtccggccaggagctaaagaggctgctccgccgagctgctggggaaaatgagtctgatgttgacgacaaaagcacatatgaagatgacctaccctcgccaatacctgctcca

SEQ ID NO: 356826 - DNA, 191 bp, Zea mays
atctccagcggcataaataaatggaggggaccaattattaaatgcattataatttatttgttgaataaaacagccggagaaataatgataatgtaaagtatatatgataaacaccggttaggatttaaggtgtttaactttagttgcatggtataatatgatattgttgtagcaataaaaaaaaaaataaa

SEQ ID NO: 356827 - DNA, 283 bp, Zea mays
gtctttgaccgaggggtagtttgcactactgttgacttgtaatgttttttatcttgatcaatggcttgctgcatggtttctttctttcaaaaaaaaaaaaaaaattaaaaaaaaaaaaaaggggcgccccccaattagtgaccccttcgccccgggattaattccgggacgggaacctgaaggggtaccagtttccccaaaagggagccgtataaaactttggggaaatcagggcaaaagcttttcccgggggaaaatttttacccgccaaaattcccacaaa

SEQ ID NO: 356828 - DNA, 283 bp, Zea mays
gttccttctcgccgtggccgtcctgctctccgcgtgcgcgcaacagtgctcgggcacgacagacagccaggacacttccgtgctccgggcgttgatggatcagtggcagaacgcgccgccgtcctggggccagtccgacgatccctgcggagagtcgccgtgggagggcgtgacgtgcggcggcgacaaagtgatctccataaaactttccaccatgggcatccaaggaagtctagctgctgacataggccagctcagtgacctgcaatccatggacctgtca

SEQ ID NO: 356829 - DNA, 270 bp, Zea mays
ggtttggaaaaggctgaatatatagtgggaaatttagtagcgattctaactaagaactgatgctaaagatgttttgagcgtgagagtgaaagttctaggcggaaactagaatatctttagtattaattgtttctataaaaaaatcggtacaaaccctttatttttagtaccggttctttttaagaacgagtactagagtatttgagacgcggaggtaaaacttctagcaataatgaaaaatagcaccggtactaaaggctctctattttg

SEQ ID NO: 356830 - DNA, 268 bp, Zea mays
aagctgtcaagggcaaacacctagctactaccatcctctaatctctccctagcatccagcagcagaaaactagctgacaatgtttcggcgcaccaagaccaccatggccgcgccacgccaccacctactgacggcgaggtgaggattcagaaagttgacaagatcgagctcgtctacaacatcctttccaacacgaaactgtacaaggcgactgcgggaaccgggaagcatcctgccgctggacatgatcaggcatcgggctggaaga

SEQ ID NO: 356831 - DNA, 158 bp, Zea mays
agagtcggtgtaggcgcccaggcccgcagctgtctccgcgacgactgctccgagtgctccgctggccgcctcaactactgccccaagatggtcagcacctacggctccgtctaccccgacgacattggcaagtcctacggcggctacgcagactacaa

SEQ ID NO: 356832 - DNA, 268 bp, Zea mays
ctgaaagcacaaaaagacaaaaatgtctgacagcgatgatgagcccatcaccctctcggcacatgccctcgcggcgctcaagtcgtttgaggcagagagagacgagcaccaggcaaagttccagaaactgaaggacgaggcggagagcaacagcttgctgtccatagatacttttcaagaggactggaatgagtctcagttttggtattctgaagaaactgccaatactttggcaacggagctgcttagagatgcgacaagtgacatg

SEQ ID NO: 356833 - DNA, 260 bp, Zea mays
  unsure (1)..(260): unsure at all n locations
accgcggcggcgtggggtgcgcggggccgccgcgccgaggactctttgggtgggtgacgattgacgaagcagccgggatcggacgacgaaggcgcgccgcgcnggtgtgtatggatggatggaacccacggagccggggccgggaccgcggcgcgacgcgcgtcggcgggccaaaagtactagacgagacaataacanctggctcaccgctcacggctgcacctgcaccagcacgcccggtccccggcctccgtgcaccc

SEQ ID NO: 356834 - DNA, 154 bp, Zea mays
attctattggcagatttacagtcatgccagcattcttctctgatgtgtacgtttgcatttcacctcaattagtgttgtagttggtttatacaagatatttttcatctgtctgtgaattttatctctgacttggactctcagttgtatggttttg

SEQ ID NO: 356835 - DNA, 153 bp, Zea mays
cacagaactaggctggcctttgggttgctgcggaatttcatccaaacttttgtccacccaatgatttggtctgaactctgaacccgatcgctgctgaattgacatgtgtatgctttacaaaaaaaaaaaaaaaaaaaaaacaaaagggaaagg

SEQ ID NO: 356836 - DNA, 275 bp, Zea mays
cgatttgttcaggacagcggtgctcttttacatacccttatgcaacagactcatgtcattgagcaacatgatatgtccattgatgaatactattcagcctttgatcgtcttatgaatgctttgacctctatggtgcctgcttgtacaactgtgccttgcccagcccacaagttcattgagaagtttttcacatacagatttgttatgggagttcgatctgaatttgattctcttcgtgcaaggttgcttcacagttctgatactctcactatggc

SEQ ID NO: 356837 - DNA, 273 bp, Zea mays
cctgaacatgccgtccaccaactcgaaactcttgaccgtttcgttctcgcgatctggtgatccaaccgtcgactacctgacaaagaaaaaggcagagaaacaggaagacgatggggctgttcctttccttctagttctaggcaatcgcgtccttttgtgtctgtctgtatacaccggacaccagctatccgattacctgattacgcgtttgcatcgagtccaaatatcgtcctccagccgtaaatggttcaggatattgccggtggtctgaga

SEQ ID NO: 356838 - DNA, 272 bp, Zea mays
gtcttctgcttgcttattatgtgctacatcataggacaggtttgttttgagaatctggatgtgaggataatgtgagtatcgtgaggattacgtgatgaggaaaataaatgagtccatgaggtttagatctagaaaatgatgattttttattatctaacgactcggacaattttgtatccacgtgtgcttttggatggtttttatcaaaacgattctcaaaaaaaaaaaaaaaaaaaaaaaagggggccccccgattatggacctcttcgccc

SEQ ID NO: 356839 - DNA, 276 bp, Zea mays
caaaactgattgacggtggatacctctcttccccaacggtgcgaccagcacgaggagcagagctcacccggcggcgtacccgccggagaggaaccgtgccgtaccccccgcaccccagatgccccccaattctacccaaggtgaccatatgcaagcaggcgaccgaggcgagtgcggaggatgacccctacgcttgcgttgcgaggataggaccccagttgcggaggcaccagggccgaggcatcgagctcccagagcgtcggtcgcatctccaat

SEQ ID NO: 356840 - DNA, 273 bp, Zea mays
atcccctttaacgttatcagtgcgggactcaagcccgtgttgagaaaggtgttggacaccttcttgggtgaagaagactcggcgaggattgagattgtggcgaatgaggcttctatcaacgaagatggatcggaatggaaacccatctggcgccatgacactgaggtcggacacgacaaggctctgagcgtcaacgaggctcgcattcaggcccgcgacaactgcggagatgacgaatcccgctcatcgtcttcatcggtgatggtgtgtccg

SEQ ID NO: 356841 - DNA, 272 bp, Zea mays
tgacgacacaacattgcctctagcaactctgcatcttcctcatccataacacttggcagaacatgaggtctatcatgttcatttcctcgagcgtaaccatgatcagtaacattttgcactacatgttcgctctgtggaagaggttggtgtgtctcgtgaacgaactgaaatctgtcgtcgatgttctcaggccgtccagtggtataaggcgaagagctaccctctccatgctttgtccaaattgtgtaatccttcataaatcctcgacatac

SEQ ID NO: 356842 - DNA, 272 bp, Zea mays
gcgtcactgacaccgagaaaaggtggagacgggcagggcagctgggtgcctcggcttcggctgcaagttgatgagcgagcgagcacgatggatgatcatacgcacgcagcaatggtgtggtgtggtgtggggtggcaaataaaggtggtgtttttttttactccctgaatttggccaaagttgatatggagaaggcggcggcgatgggatggtggcggaggaggaggaggaaggaaggaaagaaagggactgcatgtccatgaagcacaaca

SEQ ID NO: 356843 - DNA, 274 bp, Zea mays
ggaccagagccatccctgacgatgacgtacgtataccggcgcgccgtcgaccgtcgtcgtcgtaccaaatgtttggagagagagagagagaggctggtcgagaaaagatatattgtagagtaagatctcgaagatagatacgtagttcgcgtcgcatgcatcatcgtacgtggattaaattgtacccttgcttccttgtcggtcgtagctaggctctcgtagtggttggttagttgtagcacgcagcagcactagcatgtatacttggaggaga

SEQ ID NO: 356844 - DNA, 100 bp, Zea mays
gaccatacctgtaaaatattccgtggctcctctatctactgtatgattattgtggcgctgtcttttcttgtaggctgttttaacctgaatgacggcctct

SEQ ID NO: 356845 - DNA, 175 bp, Zea mays
tgtagttgtagttagtggattttttttaagagagagacagagtgtgtggaaaatgcatgtttctcattgtttgaagatagaaaagtaaactgctactgctcttatattttattgacttaagctatagtaacccaagtgtatctgatatgacatggagctataagaagatttgcac

SEQ ID NO: 356846 - DNA, 273 bp, Zea mays
gttgggtggtggggtcgcaggacttctagtagcggcttcaccggttcagatagtactgggaagcttcaattctggaggcggaaaggagccacaaaagcaggctccttcagaacctacatcggctccaccgagggttgctccgacagctgggatgggaggacccagcagcccttcttcaaaagcgcacacttgagcgagtcatccggtggcgctggaagcccaccgccaatgcatcgagccatggctgctagtgctagcaatagtaaccagcca

SEQ ID NO: 356847 - DNA, 271 bp, Zea mays
atcgattcgatggagttgcggtctcatggcggctcttcgtcgcaggcgggttgtggtagcagtcgtagtcggcgctctagcatggaggacgctttgagggagcagcaagaaaggtttcgtgaagagttgcggcaacaataaatgacaatcctccaatagcaatcagggtacatggctgcttacaatgcacaggcggaacaagcaatgaactcttggtttccagagcaggcacaacagcaaccatttgtttttcctcaattttagccactga

SEQ ID NO: 356848 - DNA, 266 bp, Zea mays
ggcggatctatcgtttctatcaactgcgggactatggactattaagtaatgcctctcagctaactaccccgacgagtgatcacggtgcttgtatcccattgtgatgttcgaccaaatcctcattctcggggacggcggtcgctcgctgtccttcatcacccccagccaacaagctctcaattacctgtggccggatgatatcgcgccgaaacgattcttcctgcaagagtcgaagcgctcgcagtgtcgcaccaggatgtgttagg

SEQ ID NO: 356849 - DNA, 261 bp, Zea mays
cggctcgaggttttctccatcggcaacttaacggcagcgcgtcgtcttcatatatatctatcttgtttcttcgatcgctagctagcttcgtcgtcgcagccggcccagactgtgcagtgcgctctagctagcagtggaggcagacagagagcccagagccctcaggcgtgcgtacgtcgccgtccaccttgcgtgcattggcatgccaggcggactgggctgcctgcgcgggcatctcgtgcctttgaccgtgacgccgtc

SEQ ID NO: 356850 - DNA, 259 bp, Zea mays
actccctgtaccggttggccagcagtcttgaacaaaggcactgtggaggattgggatcctcgggttcaaatagtttcaggtgctgaatttgttgatagtgttacgcatggcaggttcgcgtcgggcggcggcggatttgccgagacgcaggcggaccccatggatcggtcagtggcacggctccttctgcagttaccctcctaccggaagactgccccgccgcaccggagaccttagctagtcgcctcttgcatcagtg

SEQ ID NO: 356851 - DNA, 272 bp, Zea mays
cttgtcctgataagctgtgagtggcttccggagactatacacaagcataaggttcccgaaatggacaccaaagcattcaaagccctgtcgtcaaaagagggctattgcgatccacctcgcaagaagaagagcttgctccagaacaggccttggatatcaaccctgctaccttactgctttttcagtcttcatgacacagcatatagtgagatactttccttatgggctgtgagcgaccggaagtatggcggccttagcttctcgactgaaga

SEQ ID NO: 356852 - DNA, 266 bp, Zea mays
tgttattcttggagctcctccaagtttaactatcgttaatgccacctacaactctgacatatcagttacttgcttgacacctgcttatgtggcaggaagacttcccttcctctatgtatctgtttcgaacgatggtgctaattatttctcgaatgagcttatgcttacttatggagtggttccatgcatctgtgaaatttcttttgttgcaaatttcctgttttctttggcagactttttgctttctctcgtccccctctgtcctg

SEQ ID NO: 356853 - DNA, 264 bp, Zea mays
tgcatgccggccatatatatattctcctcctcaggtgccgttcggtactgctgccgcactactattctgctcaacatcaagcctgagagtccagagggcctcgagctcacacacatccacaagacctgggtccaagggcactctgcagggccagggagtgcgctcgtcttctagactaaatctgtcaaacgcgaagagcatgtcttgttaattaatttccagagagaaagaatccatccaaatgtacgacagacagacagacag

SEQ ID NO: 356854 - DNA, 256 bp, Zea mays
agaaaatgggaggagacggacatcacgaagatcctggacgagttactcctaaacgagtttggacaccctgcggaggacaaggtaactatgtggctcaatggcgtcaaagatcagcagtaggagcaggagtggtttttttcctttcttttttggctgttaatttaatcggcaagcatgctgagaggcgctccccgccgtccatccctgtgccaagtcagagatggtgtacccatactctcgatgactctcccaacta

SEQ ID NO: 356855 - DNA, 257 bp, Zea mays
aatatacaggcgcatcgctctattatgatgcatcgaccatggcgccgctgaattctatctctttggccgccctcaacagattccgagcatacaagccccccgcgttcccgctatgggacaagttaccggcgcgcaaggagccgccgtcctggtgctgctgtttgcggatcgatggggttccctcagagtcgtcgttactatgcgcgcggccagtctgcgcacttctcgggccatgcagcgctgccgggcggcaaagc

SEQ ID NO: 356856 - DNA, 253 bp, Zea mays
gagcccgcatccgcggccaagtacccatgacgacgaggctgacagcgacgttgttgctctccagaaacctcgtccgcggcgtaaacttggggaacccggaaacccttgggccttttgggtttggaacattcggaaggatcccccgctcctggtccagaaggggcttcttggacggcttgggaatttcggggcaaggaccggcaacgggcattgattcggctatcaaggtggtttctcacctggggggcggacg

SEQ ID NO: 356857 - DNA, 254 bp, Zea mays
ctgagaccccagatcatgtccatcatgcaggcgcggctggccgccgacggagctgctaggcgtggtcggcgcggcggcgccgtttccggcggaggcgacctacttgggctgttgctagaggcgtggacgccgcagccgcagcagcacgggaacggcggcgagacgctgacaaccgacgactccctcgacgagtgcaagaccttcttcgccgcggggcaggaaaccacagctaccctcctggtctgggccatgtt

SEQ ID NO: 356858 - DNA, 256 bp, Zea mays
caccgttgttcatgagcgtctctgaggatgaaaaaagtttggtcaatctggaatatcatcctcctgatggccacacacacctacagttatgcaatggaaggaagatattctctgttagatgctctcctgagagcttcattgttcaagttggagaggcagcagacatcttgtcccaagggatcttgaaatctacacttcatgctgtgagtagaccttcgagttccacagacatcagccgtgagacttttgttgtctt

SEQ ID NO: 356859 - DNA, 265 bp, Zea mays
caactacgcctgctggacacaagcctaaaccgagcagtgcgtgcttatcgttcaagtagagcacggagctagagagtgtagctagcacgcacagaagcaaaccaaaactgccatgctctcatacctacaccaggtgttgtagtaagcctgtgaagtgaggtgacacaggccgggagaagcgcgcgccacagagacgagaaaagatacacagatagctagatcgacatgccgcctgagctggagcaccatgagcagcagacagccg

SEQ ID NO: 356860 - DNA, 264 bp, Zea mays
gctaccgccgcttgatgaccttgggcggatctaggtacatccggccaagacggttccgctccgaccttccacctctaagctcagacgcccctagtctggagaatgatgctgcagcgcaaccacctgcacccgaagaacctgtccatgataccgtggaggagaacaaggtggctgccgagggtccagttgtgggtctctcagaggacgatggaacagagcatggtaagagtaccgcaatgttcgagtgtaatatctgttttgaaa

SEQ ID NO: 356861 - DNA, 253 bp, Zea mays
cagctgacggccccgatcagcatgtcgcggcagccgctgacgtgtacgtccttcagcttcggggcactggatcagcagccgctctggatgacagttcgtgcacgcgttgaggttcagatcaaccagctccgggcagttcacgtacaaggcgtcgatcgctgaacagccccacaggctgagctgcttcatggagccgtgctttatgatcagcttctggcaagcagcctgctgctgctggttcttttggacaggt

SEQ ID NO: 356862 - DNA, 264 bp, Zea mays
gctgtagcaactagccaaggctccttcttgtctgtggatcagatcatctacaatggaatcggatttatagttgcagcagcttctactgccacgatcactatttatgcaaagaaagcacttcaaaggctccaagcagaggaggagatcattgtgagcgcatgaggtccaagcccaggatcaaaacccataacgctagtttcctttcaggtgtattatacatgaagggcttgtttggcagcaaggggggaggggaatctagcccct

SEQ ID NO: 356863 - DNA, 260 bp, Zea mays
cggctcgagatctcctccatgcatgtgcgacagagccgctgccccttcgcgtcgagtgtgccgacacggatctactcagtcccgacgcgatgttgtcaaacttcgccccttgtcgtcgtcacgccccgcacatctctcctcggcaaagagccccaaaccgatggcacgcatgcgcaactcgaatccgagtttgtcaggaccgagagatgacgatcatgcaagtgatgtggtgccaaccacaagatgccgttggtggacga

SEQ ID NO: 356864 - DNA, 176 bp, Zea mays
atgcacctcacctttcccttgctgctgttggaggaagtgtgctgcaggtggaagacgagagggtcgaagctggttcccctctccatatctctgctccccagctccctccccctctcatagatcgatcacatagcctgcaggcacagacaagagttaggctgttctacctgatcata

SEQ ID NO: 356865 - DNA, 258 bp, Zea mays
ggcagagctcaccaggtacccgtcgccgctgacggcggcatacccaccaccgcctgcctcgtgtgcagcctgcccggcgcctccgccgccggcacagtacaccagttacccgccgccaccgtcgaccaactacccaccggcgccgccgagtgggtatccaccactagcactaggtccactaccggcgtccaatttggcccctccgaccagcacgtacccgccaccgccggagtcaggctcggcctactcagtttatcc

SEQ ID NO: 356866 - DNA, 269 bp, Zea mays
gatccagagaaccacccacagctatcgtcgatagctatggagctagccatgaacgtgaacgggttgctccttgtagcgaatacgctcgccgacttgctgaggaagaaccaaaccgtcaggttctggttccatatgctgaagaggttcaggcagtcagtggagcgcaatttctccaggttcggtgagcatccaaagcaacttgttgagagggaccatccgactgacataacaatgctggtccagccttcttctgctgtacttcgtctcat

SEQ ID NO: 356867 - DNA, 270 bp, Zea mays
tttgcattgaaacaactaaaaaacttattagcaagtttgaaaatctttaaagtaaaccttcaaaatggattcttcagatgaatataaaacagtgattgataacaatactaaaataactatggctgaacctgaatctcccactccatcaagatcaagacctcgaacacgatcagaatctacaaacactcgtgaatctccatcaaactccccaaagcctcaacgtcgtcgacgagtttctagatctaaatcgagatccgcatcgaaatctag

SEQ ID NO: 356868 - DNA, 277 bp, Zea mays
cgatactccgcacgcggcattgtttctgttttgcgttttggcccctcgctttcccccctctatactcgggaatcattctctttttcccacctacctggagggatgtgggaagcactttgggcggctcgcttatctcaatgcgaccctagcttatgttgggctttggatgaaactctcaaaagaggaggcgaaaatggacaggctgatctcagtggtgatcgctgatggattttccctccctcacttttgacaactaatgccccgtcatgcatgtcga

SEQ ID NO: 356869 - DNA, 256 bp, Zea mays
aacttatataatagtcttctacttgcttcgctataacatatatgtagtatataactatatctctcatatgatttaggataatatacaaatatattacatatatagttatattagttgagttagttttgtctcaattataattattaaaatggaattcaattccaacgaaataaatgtggcctaagcgttttcctgtagtgtgtagttatggccgacgttctttaaacgttttcgtggatagttgtttagatcactg

SEQ ID NO: 356870 - DNA, 266 bp, Zea mays
ttaagacacttcattttccccgaaaaccaccattatgagccttatccaaccccagctctcacgcctcccgcgagaacttcttcacaacctttcccgatgaattcaagatcccaattggagccgctctattagctctctccaaattcgatcgttccactgctatcaaggtccgagacaagctccccgaattcaccctcccagatgccgtagagaaggagcaatccagcgccgagctcctctcacgcggtcctctcgtgatagccttt

SEQ ID NO: 356871 - DNA, 258 bp, Zea mays
gtttcctggcagccctcagctgtatccatcagatctctctgtatttgcatctgccagaggaaattacagggagaccatgttctctgccataagtgccgggtttccatcaattcagcaaattcttcatgcgaccaacggaaggaatcctatgatgcacgtctccacctcatatcacgccactaatgatcgcataaggagcgcagatgatggaaatgctgcccagtctgaaaacaagaagcagtttgagctggaccttga

SEQ ID NO: 356872 - DNA, 158 bp, Zea mays
  unsure (1)..(158): unsure at all n locations
agtatactagtgcgctgtgactcgggancttcaaattcaattgtccggtttttcgtccctttcacgcttatccgacaatcgaaaaacgtccatccatagacccgggtttccggccgtttatcgcgcatcgtcgcctatatcttgatattcaacataat

SEQ ID NO: 356873 - DNA, 184 bp, Zea mays
gttcatccaggaggaggtcgcgttcgcgcagaacgacgcggagaacgaggacgacgcggcgccgccgcggccgcccaggcggtccacgggctccgtcgtgcacagcgaggaggcgatccagtcgagggggagcacgcactcgggccggatcaccttccacgccagccagacggcggaggaggag

SEQ ID NO: 356874 - DNA, 275 bp, Zea mays
acgctggacaccaggctctcggcgccgtccagagggatcagggtgttggaggggctcccaatgcccggcgtgaacgacgacggcggggagaggccgctgggggcgctcgcagccggcgtgccgcctcctgccatggagctgcatgccaaaaagagaagacgttacgtgctaccacttgcacgtttctgaattctgactgacagtgactgagtgacatgtatagtggcgcttctgtgacctcaagacgctcaccttcctgtgaagacgcactgccc

SEQ ID NO: 356875 - DNA, 168 bp, Zea mays
ctcaacgaaggactcccggatcagcaattcgtcttgtcaagagacacccgctgaattcaccattccggaattattgatcaagcggtaaccgccaacgccgatcaagatgcctaccgaagctggtcacagattatacgtcaagggtcgccactcagataccagcgtaca

SEQ ID NO: 356876 - DNA, 224 bp, Zea mays
tattttctatctgctagctgtattcgttgcaaatgcacacggtctgctgtttgtacgagtgtctggtaggcacctctacgcttaattaggttttgtccaatttttatttagtaattacattaaaaaatcgaagatcgaagttaatactaggtgtaatttatgggggtcttaatatgatcgaacagattatgggttgataagggttaggtacaaaaaaaagaaaa

SEQ ID NO: 356877 - DNA, 275 bp, Zea mays
gcgaaggatgcacccaagtcattgctaagcccactggtggtaaatgcaaattggaagtcggtacatcatacagaatcaagactgagtaccaaactaagtaagcagattacacagaattcatcaacataagcacgcttcaagagggagcagtttccctttttgaagcgagaatgtgaagaagatcaattgtgagctaaaactctatgctaaggtttcggctcgagaaaaaaaaaaaaaaaaaaaaaaaaaaaaaaaaaggggggccccccattttt

SEQ ID NO: 356878 - DNA, 220 bp, Zea mays
gccggttttgagggattccttccgtactgtcgggatgacaatcttaaggaacgtggtgcctagctggagctccagtcgcccgtcagcccgaatgtgattgaggcggagaacctgattactgcgcagagctggccctctgcccagaagtttgtccagaagattgctgaaaagttcaagaaccagttatccaggaaatattaaagaacagaatacatagccc

SEQ ID NO: 356879 - DNA, 272 bp, Zea mays
ggccgccctttttttttttttttaaaccgaacgaagccacaggtagtagattagtaaacaataatctgttatttacatgtacaactaaattaaatgaatgaatgaatcaactggccaatatgccaacaaattagtactgtgagtctagaacaatgtgcaggctgacgagtgacgacagacaagcaaagtcttgctctgctactgtactagctagtagccagtaggtagtctactctagagtacgaaggccggcgatggcctggcctctctct

SEQ ID NO: 356880 - DNA, 269 bp, Zea mays
ccgagggcttcgccaagatggccaagcgtgctggctaccaggtcgttggtcttcccaactacgttgtctggcacatcgacacggaagagaagccacggaacctgggagatcgcaaggcctactaaaggcaatatgttgcatctcgtatagccgatcgccattcgggtcaaagttgatcttttctccccgatctgtcctctcgaccatcctccctctttcctcatcgaccatccggagccgcacgaggttccgttcatactcggtcatca

SEQ ID NO: 356881 - DNA, 266 bp, Zea mays
aaatcactgtccttgccggtgtcgacaagctcccccatccaaagcaagcaccttgacacgtcactggtggcactcatggtgacgatgccgctcaagttggcataagcgtacgcggtgcaggagcagttgcggtcgcactcggcagcgcactcctcaaagcttctgttcctgacgtacaggaacttgtcgggcaccttcatccccggcaaggccaggaaataatgcctcctcccgccgccaccttcgccgccgccgccgcacgcctg

SEQ ID NO: 356882 - DNA, 240 bp, Zea mays
ggcccgccgtcgctcctgcccgcgcgcttcggcgccgcctccgtcgcgctgctcgccgtcgcctgctcctcctctctaacgcgtccgtcaggtgcatacgatccgctcgatccgaacgggaacataacaatcaagtgggacgtgatacagtggactgcggatggctatgtggccgtcgtttcgctatacaactaccagcagtaccgccacatccaggcgccgccggggtggaggctaggc

SEQ ID NO: 356883 - DNA, 264 bp, Zea mays
gtcgcacagcacagaccggaagcacagcgcccagtcgcccacccacccgctgcgtcccgctcaccaagtcaccagccttgctgcgcgcgtcctcccacccgccgcccgtagccatgtcggtgacgctgcacacgaacctgggcgacatcaagtgcgaggtgttctgcgaccaggtgccccgcacggcggagaacttactggccctctgcgccacggctactacgacggcaccgtgttccaccgaaacatcaagggcttcatgat

SEQ ID NO: 356884 - DNA, 270 bp, Zea mays
ctaagagaggcctcgcactcgcttatcttaacgttctgcttatcgctgcagtagctaccgtcgtagtagtaaacactggcaactactctagggtagacaagcgagtggaatttagggactcctgggacctatcctgtaccgtcggagaggtaagtgcggcgatcaaggtgattgtttgcccgtcagcgtccaggacactactgggcctcacatttgcatttgcgccgatggatggaccaattttgacggcatttgtgattaccaacgaaa

SEQ ID NO: 356885 - DNA, 222 bp, Zea mays
gatttcttcaaagttatatttacatctaagctactataggacttcagatctgttaatgaagcacttcattgcaagatctgaagtcctatagtagcttagatgtaaatataactttgaagaaatcaattatgtggatgcttcgctatcaagacgaatcctcttggtaccaaccatgtcgctagtcggcacccggttgtccttcgattccacgttctagatcgc

SEQ ID NO: 356886 - DNA, 234 bp, Zea mays
tcgagattcgaatgtctagattggtttcttgtgatgaactcctgcgttctccggagactccatctatgtcgtcaagtgttggatgtgtccttgagggcgtgttggaatactgagtatagtgggaagaagggcagcagctgccgcttgatagggtgaagatgtggtgttgtgtacttgttgtatgtcagtgatgtggtttctgtgtggtaatagatgtcgctttgacttgtcatg

SEQ ID NO: 356887 - DNA, 271 bp, Zea mays
gcgtcacgctctgccgccgcgtcaagtgataaaaagaaagaaaaaaaaaacacacataccctgcgttcctgctgcccccggctccgtctggcccccaccgccaccgacggcggcgcgcaccccccgttccaatcatatcgtagacgacgcgcacattaaattatcaatcaccggctctggctcttttccggccctgtactgtactactatactaatgtcccttcttgtgtttttttcttgggaattgtcgccgtttcagtatacgtaaaat

SEQ ID NO: 356888 - DNA, 151 bp, Zea mays
gtgcttctttgatccgtttgcttatgtcgcctgacgtcaatacatcagctaaggtgccctttaccggttgtggatcggggttcaggaatcaggatatattcattctttctccaaaaactatagaattcattcagtgtcggacggaccttga

SEQ ID NO: 356889 - DNA, 153 bp, Zea mays
aacatgtacatttcccccttttttcatgatagtttcagaacacaatattctaagcagctgcgccattccatttcgcgcaacggctttctctcggatcctgagacccattcatgtagtgaaaggagaagtcaaacgagaagaacaaatctgaaa

SEQ ID NO: 356890 - DNA, 269 bp, Zea mays
gtatgatctctgtctcttcatagtggaagttgttacaccagatgaaaaagaatatcggatgggaatcctcacgagcttgagttctctgcaagtttccagattggccggtatctcactgctaatgagcaatgttctggttcgagcttttcttttcttttcttttcttttcttttttttgatgggaaggacgagctgtcctattggcagcaaatgcggacgtttgtcgttggtaaggcctgctgctgctgcagtggcgctattgtttgatg

SEQ ID NO: 356891 - DNA, 266 bp, Zea mays
atcttcatacacataaacaacacaaacacatactatatatatacaccttgctctcctctcgaacttctcatcaaccacttacaccccatctcatctctcaacatgtccctctcctccaaagtcatcctcgtcaccggctccgccagcggtctcggccgctgcatcgccgaaaccctcctctcccgcggcgcctccgtcaccatcagcgacatcaacccggaccgcctcgccgcaacagcctccgagctctcggcaaccttctctcc

SEQ ID NO: 356892 - DNA, 264 bp, Zea mays
  unsure (1)..(264): unsure at all n locations
ctctgggaagcgactcatagtgagcgaatgattttgaaggctaagcttctcggcgagcagatccgtaaggaaaacggggtcgccaccgccattcaagcaatctatcgcgacctagaatacgcaacaaccctaacccgccaacgcgcttctctatccaccacaccacgtacagattcagaagattgcanaccagccgatgagggtgaagaagccgatgacatggaaggcgaagaatcatggacttttgtggacgactacgccgat

SEQ ID NO: 356893 - DNA, 265 bp, Zea mays
tgagttttcattgcctttggacataagacttagaacacaggcggtgaccgagtgctgtaatgcaaaggaaggcggccagttttctggtgcggttttgaaagtgctggttgtgttatcacactttgaaaactgatcttattattttcttgtttatggatatcgttccctttttgtgagaggcaattcaaagtttgtgtgactatggtctaattaatccaggtgtacgtattgatttgcctattcggaagctgagaagctatagctt

SEQ ID NO: 356894 - DNA, 267 bp, Zea mays
ggagcgaggagcaggccgcctgcgtaatgtcgaagtactcgatcagcagcttctcttctcgacgtggcgcctccgccaccctcctccccgcgcgagtacctctggtctgggctccagcacgctgaattagtgcatcaaggttcatgactcagactgcatatggcactatcaaaacctgtttacacgaaacacggtgttatgaagtcaagttacaaatggagcatgttagcccaaataggaaaagaaagctaagtaagtgatctcgca

SEQ ID NO: 356895 - DNA, 156 bp, Zea mays
ctcaaattgacgaacaaaacatagaacatgttgacaagagtagtaccgttttcttttttttttgttcttttgaataggtacaagctgctggtactttattccccataatagactgctcattcattgtaacgcttctgcagcgtgtagtgcagcata

SEQ ID NO: 356896 - DNA, 154 bp, Zea mays
catgatcgccgaaaaacacgtcggtgcggcccatcttgaccatcgacgtggcgaagtccgcgtagtactcgtcgggcgacgacgccttgaccaccttctcgacgtaccctctggtgacggggtcgtgcaggaggctgccgtcggactggaagag

SEQ ID NO: 356897 - DNA, 156 bp, Zea mays
aagattgttggtcaatttatagatatattttctgtatagaatgacactgcatcatgagcaattcagatactatcctgcagctgtcgacccccgctcatatccaagcggagtcgatcgcgtatcgacgctttgtaaggagactgtcaattactttgg

SEQ ID NO: 356898 - DNA, 249 bp, Zea mays
ggaagtcggagacagcacgaggggaagcacaaggacagaacactgggtggtttcttttcagctctgagggggcggacattgagacacggttgaagacttgaaatgtacatggcctcggtccatcctggaaagacctgaactacaaccagctcctgttccccgcacatagcgacagtacacagaaatagcgacatgctgcagccggagttgactaagtggcaattttttagcggcagccatcgcttttcg

SEQ ID NO: 356899 - DNA, 267 bp, Zea mays
ggcatatcatcattgcagtttgtcctcccggtgacatggtcatatgggcgaaagtatggcattactctgaatcagctagcctcatgcaggagcgaaaggccagccaaacttgcaggccaaaagaataagaatatttcagcgtatttaggaaagcaactttctggtaaggtcctgtcgacttttgtgagaggaaatcttgtgtttgctgaagacaagcatgcaaatgctgcttgtggtgttcctatcctcgctaagtaacatacaggt

SEQ ID NO: 356900 - DNA, 256 bp, Zea mays
aaaaaataattttcatttttacattttctaaataacccaaacttaatcatcatgcaagctttgatcttattcgctgctttgatcggctgtgccgtcgccatcccatctggtttgtacccagctccagctttggctgccgtaccagtggtatcacacgctaaagttggtgccattgcccacactccactccataccgttcaccaggttcatcataccgtgcatccagtgtccatcccagttcatcatccagcagtca

SEQ ID NO: 356901 - DNA, 264 bp, Zea mays
ggcgttatccactagtttcctaggaacacagctcatctgttttcttatgccattttttctctgtttctgaagtcacggctccctgtagatgttcagctcgtctgcgcttggtctttgccggtagccgagctgctccctgtgctcgagctcccagcgccctgcatcagctcgccggtagccaagctctatgccacaaggcctctaagccctgctccttctccaaccgtgccaatgctcgccagctccgttagcccaccggccctg

SEQ ID NO: 356902 - DNA, 262 bp, Zea mays
  unsure (1)..(262): unsure at all n locations
agcatgaccaatcctctgatcatgctcctccttaccatcatctccgccactttggggctaaccgctggtgcgccgcaacccctaggcggcatcgtctgcatcccatctgagagggctgctttgctgtccttcaagaagggtatcacaagggacaagaccaatcgcctcggctcatggcacggccaagattacaaacctacaagangtgtcacctgcagcaaccgaaccggcaacgtcctcatgctcaatcttgcctacccga

SEQ ID NO: 356903 - DNA, 263 bp, Zea mays
  unsure (1)..(263): unsure at all n locations
gttgtggaagcgtgatgacgcaaaggtcttgaacgctgagataaatacccttgggaagatacgccatcggaacattttgaaactcaatgcatttctgaccggagcatcaaattttctggtttatgagtatgtggtgaacggcaatctgtatgacgctattcgccgtgagttcaaagctggacacccgtgaaatgcactangacaanangtgccggattncggttnnggttgcaaaggccatcatgtaccttcaccacgactgg

SEQ ID NO: 356904 - DNA, 185 bp, Zea mays
gctgttcacgtcgctagcggtggtggtggtccagataacgcaggtcacgggcgagaccaaggcggcgggcgggtggtggagatcatcaacaagctcatgtagctagcgtcggtgcacacgacggtcgcgatcatctcgtcgtcctacatcgtggtagggcgccacttcaagtaggcggcgctcct

SEQ ID NO: 356905 - DNA, 258 bp, Zea mays
ccggggaacggtggcgtctccctcaccctcggcctccaccagaacaacagagtctgcatagccgagccactcccggcgtccgtccctcccaacctcgctcaccgttttgggttggaggaggtcagcgacccctacatgatgggctctttcgggtaccaggaccggcatttcggcaaggagattggcggccattttgagcatgattttgttggctgacatggcagctgctgctgcattgttgcttctggtcagctcatc

SEQ ID NO: 356906 - DNA, 276 bp, Zea mays
ttctccgagagcttcatgcagaaggaaggctcagaagaggaccaatatgagaaacctacatggtggcaacagtctcagaaacttgtgcatcttatggaggagctttgcaggggacactggcgtccccatactcaggagtcgtagttgctagtgtaccatcacgcccctctattattcattatgacccaatcgtcatgagctcataaggattttatgagatcaaccaaatcggttaaatccgtgcggggtgacgtagtttcgtcgacgtcgacgccg

SEQ ID NO: 356907 - DNA, 266 bp, Zea mays
gcgcagtatgcagatctggacatctcttgttgccgccttccttggcttcgctgccattgtctccgccaaagaggacgataagtgccaccgtcgccgtcaccaccatcacaagtgcagctctagcagctcgagtgatgctgatgtccatgttcatttgaagcccgacgttggtttctatgccttcagatttggtgacagccagacacccgtctggaccaatttctacttcaagagccgaaacgttaccgccgtcaccattactgatg

SEQ ID NO: 356908 - DNA, 183 bp, Zea mays
gcttgttattggtactgccgcgaaaagaagatgtcccagagtagttcatctagctcgttatagtaacccatacgatctcgcagagtggaaggaacatgcgaatatggtgtactatgagagtccaggtgttgaaccctctgcgaaaattgcagcttttggcttcaacaagagtttagccacaac

SEQ ID NO: 356909 - DNA, 270 bp, Zea mays
  unsure (1)..(270): unsure at all n locations
caaagtctgcttattgtttcattttttgtttaattttgtgaaacaccagttaatttaatttcaaaatgatttcaattcgtttggttttcgtagccaccattgttctatttgcttctgctgctttcgcacaggagtttgatagcgaatttgatccatcggccggtcaattgccagcttcaggtctagcatcatatgcagttcaantcggagtcagtccatactagactgctctttagaaaattgttgtgagttgtgactcttgtgtactct

SEQ ID NO: 356910 - DNA, 280 bp, Zea mays
acgtcagctcgagcattcggactcgctggttcgagcgctacaccaagaagtccctgtaccgctgttattatgcgccgcatcccatcgcaccccatactaccttccgtgcgacctcacctcgcacagacggcaatggcgtcccccgagcccgccgtggatcccagcctcgcgcaagagacccccaccactctcacacgcaccacggcgcactcgaccgcggcggagcaagaagggtcgccgcagtcgcaagagcctgccccagtagcggatgtggagactg

SEQ ID NO: 356911 - DNA, 256 bp, Zea mays
aacgaggaccaggaaatgccaggaaaccagaagatcagggttcttcagacgaaggacaactctgccctgctgtatgatgaagttggtgtcgattttgtggactctctcttcggcttattaagtcttccactgggatcggcaattaagttatattgccagtgctcggcaaaaggctgcctcggtaatgcttccaggagcatagatggtagtgtcaaagaattcgtcagagaggagtgccagagtctccttctggacc

SEQ ID NO: 356912 - DNA, 263 bp, Zea mays
tgttgtccaactgacagtaaaatttgtacaatgtggtatgtttccttttccttttgtattgtgatataacagtacaatattgcctttttttcatgtgcaatgcagttgaagtgagaactgagttgttctttctgttttctcatgaatatattgtctgttctgttacataaaatgactaatatttctaattcatttcacttaactctggggtgctgcaagaaatttacttcaaaagaatgtcatctgttagtagaattagtggt

SEQ ID NO: 356913 - DNA, 258 bp, Zea mays
atcagcagcgtcatatacttttaaatgcttcacacaaaatgtacaacactggaatttgaaagtatggtctccatcagagttatttggtatggcgatgttgtttccttggccagcaattctatacacaggcatattgtcaacttccctttgtttatgggcagaggttagttttgttgtcatcagatcggctattctcgtggatgaggtcgtttttgttggcactatatttctttccttttctttcaggtggccgctatg

SEQ ID NO: 356914 - DNA, 248 bp, Zea mays
gccttcacggcgtcgctcggcacgccgccgcagccgctccccgtgctgctcgacaccggcagccacctcacgtgggtgccatgcacctcgaactacgagtgccgcaactgctcctccccatccgcctccgccgtcccggtcttccaccccaagaactcctcctcctcccgcctcgtgggctgccgcatcccctcctgtttgcttcaaaaaaaaacaaaaaaacaaaaaaaaagggggggcgccccact

SEQ ID NO: 356915 - DNA, 255 bp, Zea mays
aggccacagcggcggcggcggcggtcaaggaggtgctggccaagccggagaagcccttcaacaagcgccgccgcatcctggccaactggtccaggagagcctcctgcagctcgctggccacggccacctacctgcctcagctcttgggccccgaccacgccgtggccgaaggggacgagggcgaggaacacgactccgacgacgacgtggagtacagccaggtgccgcaccacggcaagaacgtcagggacgcgc

SEQ ID NO: 356916 - DNA, 258 bp, Zea mays
atccaaccatcatcagaatctctccttcagcccacgatgcttgccacgagagtgctacgagccgccgcgggcggtcccaagcccaacatcaccggcttcaacatgcgggcgttccaagcatcaaccggccagcctcgatacgatccctgggagcgaaacgaggcctggcgataccagggtccctatagccgctggaaccgtctcaagggcggtttccccggtctcggtatcgcgacagtcgctttcaccgcttactgc

SEQ ID NO: 356917 - DNA, 156 bp, Zea mays
tggcgttatccactagtctcctaggaacacagatcatctgtcttcttatgccattaattctctgtgtctgaagacacggatccctgtagatgttcagcacgtctgcgcttagtctatgccggtagacgaactgctacctgtgctcgagctcccagc

SEQ ID NO: 356918 - DNA, 260 bp, Zea mays
atttctccaacctaaatcttgaccgcttctcccatgtgcagtgattctccgtttgcaaatgtacttggaggtgcacatgggggaaggactgtaaatctccccgcttgtcctgccctgcaatgcaacccaagcgtctctggtctggcacagatggcatgaataatttccagtggcctgttgtattttcgatccactccctgctccctacctccctgagcccactgttttctgaaacctagagagagagagagagcaattca

SEQ ID NO: 356919 - DNA, 264 bp, Zea mays
aggaaggcctcgctgcggcgcttcctcgccaagcgcaaggacaggtcctcctccgcctacgaggacgacgagccgcccgcgcccaagaagggcaagatggcggcggctagcgaggagcattcctcttcttggctcgcgctcggcagcctgtgctccatgcacggccgctgagatcgccggacgacgttcgtgtctgtcgaccagaccattggaggcgtcgtaggcttgtactgtagcagcaatttacttacgcttgtgctacct

SEQ ID NO: 356920 - DNA, 250 bp, Zea mays
ctactgtttgttcaacaactcaagggaagttaattgcaggcccgttactttccgcagtgcatatatggggtcatccaagagatgagagcaactcctgtaaacacactcaacccacaaagaacagcaatgatcgtggctgattttatcaaggtttggtatctctgatctattaacgcaacctttttatctcgtccagctacgacagtaacatttgtctattatttactataccaataaacgtggcatcagc

SEQ ID NO: 356921 - DNA, 253 bp, Zea mays
gccgatcgagagcaaatggccaatgataaccgcagccgggcttccgttccagtcggcaaccctcctgccactccagctgctgctacggaggttaagcctccggcggctgctccaggtagcgaccctccagctacgactccaggcagtgattgtccggctgctccaccgcaaggtaagggatgcaattagtaagtgtcccttattacctacaagtcgtcttagaccgccaatcagccgaggactatgatgttcg

SEQ ID NO: 356922 - DNA, 149 bp, Zea mays
gtcggagtagaaaacgcggctatctgcacacgacactgctctgccaacacatattcctgccgtccggtccaatctcaagccattgccgtcggatcttgtacgtcattcatctaggtatcccagcattgcggttccaacccaatccgttt

SEQ ID NO: 356923 - DNA, 144 bp, Zea mays
gcttattacacgacagcgggacttcgatctagcttgccttgctaatgatgatgatgtcatgcttcttgattgggggttggtggtcaattttgcctatgtaaccgttaaaagacttgataatcatttgaaccaatgacaaagagc

SEQ ID NO: 356924 - DNA, 262 bp, Zea mays
gtcacggatttgaatcaacctctctgtatttgtgggggaaagtcttgcctcgatttatccctttcttagacctcactcagtggcagatggcctaatatggctaagtatggcccgagccataccttggcccagctcattaccccagaagcctcttcttcgcggctctttcgatctcgactcttcgtcgcagctgctcgcttctccagcttctgcagccgcaggtcgccgtcgccctctctccaattctctgtactctccagca

SEQ ID NO: 356925 - DNA, 253 bp, Zea mays
ggtgtttgttgctatatggttcgtgcaagtttattactcggggaaaaaaaacatgggctggaaatgtgctggactagtagtagcggcagtacgcgtccggtacggcgtacccaactttggactgttgcgatcgagcacctgtctatctgcaggctgctgcgtgtgctgctgtagtcaagctagacgtgcctgcaggcgtgttcttcctttcacttgcgttgtgtcaggcaggcctctgctcttcctccgcggc

SEQ ID NO: 356926 - DNA, 255 bp, Zea mays
cggctcgagccaaggcggaagagcagcaatattgacattgaagattcacctcctgggagaagaaccaaggacagagccggggttagtacctacagaaggcaaagaagttctaatgacgatgatgaaacccttctcaagaggaaaagcagccgagacgggctagaagaatcacaaactcggaggagcgcaagatcatccattaccaaggaggacaacaggtacagcagtcagaggaagtccaaggaacatgacaaa

SEQ ID NO: 356927 - DNA, 247 bp, Zea mays
atttgttttatgtacatatatgttatgataatcttactttatttttgaattaaaataaaactaaatgttttattttttccaacaagaaccgtactgatgaacaacaattcttagtgggagataaagttctgatatgactcatccatatacatcgtcttcggtcgccaatcgcctctttcctaaactcttctaaaagttctttggcccacacaagagtatggataaactcggagcagtttcttacagc

SEQ ID NO: 356928 - DNA, 250 bp, Zea mays
gcaaaacttccagcgtgacatcctcctcgcgttgccgtccttcggggtgttcgtgaggtacccaaggatcggcaggttcctctaccggtcacggtggcacaggctcctcgctctccggcgacagcaagaagagtccttcctccctctcgtcgccgccatcacgaaccggcgggaggcgagccgcggtaacactccgttgacgacttacgtggagtccctcctcgatctacgtatccatgaagatggtggc

SEQ ID NO: 356929 - DNA, 252 bp, Zea mays
ggaagccaaatataaaataatagaaggagaaatagctgctaatataggaatataaatgaaaagaaacaacataatcaaagatgagatcaaaaatgcatttgaattaaaagatggaaatgcttcaatggaggcacataataagaaaaatgcgattgaagaagaggatggacatataatacacagcgtagagtttcagtacatcaagatagtttcacagctgagcagtatgggagccactttagtgatgaccat

SEQ ID NO: 356930 - DNA, 255 bp, Zea mays
gatagatattagtatgaaagataaaactagaatgctatgtctgtcaaaggagctttcttcagtttcagaacacacctctccatctttcggtgctaggtggatcaccgtctaaacaatccaccaccagaaccgccctaccccaagatagtttttcagttggagaaaacatttaatacaatattttcttctttgttctccatatggggcttgttccacgccacttgaaggaagaagggaatggtggtgttaagttcg

SEQ ID NO: 356931 - DNA, 247 bp, Zea mays
gaaaaataaaacttgtacacgtgtatgtctccagattgtgccgccgtcgttctcgtcgttgacttttcgttgtattggtcgatccatatgtgtgtgcgtgtgtggcgttgttctttcttctttgtgtagctgccctgccaccgcctgcaatgcgcatgccatggcaggtagcgctgtttatgatcctatactgttgtattttggggtgaactacatcttacgtgatcaatttcttcttctaagtatc

SEQ ID NO: 356932 - DNA, 253 bp, Zea mays
gaagctgcttcgctatgccatcgcatcacccattgcccggcatatccttcagcttcccagtaggggaagccactgctcgtccatcaggccttggccagtggcgacacctgagtcattgccggcagcattcaagcttgcgggagaagaccaaattttcatacatatacatatttgacgtgtcttttgcgatgcagcagaactactgctctgaggactttccattgttcaaggtaactgggcgcgaggccagcag

SEQ ID NO: 356933 - DNA, 213 bp, Zea mays
ctgcgcccattgggggatcgtctaacggtaggaccccagactctgactctggttgtctaggttcgaatcctagtcccccagccacttaagggtgactagatataaaacaacaaaaggtggcacagaaaaaaaataaaaggagaaaaaaaaagttgtcggacaaataaaaaaaaaacagagaaagtaaatcgaggcaaaagaaaaaggtaagag

SEQ ID NO: 356934 - DNA, 265 bp, Zea mays
gccccgcaatggaatgagacatcaacgtcgaaaaaacgaacggtggatgtcggagatgatgattcatctggtagagagtaaaagaccataagatacaaatatttccttgtgtaaatgtgattcactgtgttcgtttgactacttccaaaaagaatcataaatatacttgcaaactggcataaatggatgtgtagtttgtcataagctttaacagtaatgcagcagtctgactgtacatgtacttagcataaatgtatgtgaaaac

SEQ ID NO: 356935 - DNA, 252 bp, Zea mays
cttggatcttttccctactgatgacgatgatgattgatctggttcgggtccgctgcaaattctccaaattgcaactttggattaattgagctttggagtatacataaatttactacaaattgtcattcgatcttcttactagttgtgtgcttcggtactcgcattagcagtttggtacgtcgtgtggcacgtatagaactgtgctatgtacatgcgcaacaaaacaagttacgacatggtaaaaacagatgg

SEQ ID NO: 356936 - DNA, 259 bp, Zea mays
gttcaaatacttatattaaaatcatcgagagttttatttttaataaaagaagaaaaactgccctaagatggaactagacgattaccatttcaagcttaagattgttcttattggtgacaagagtgttggtaaaacaaccttccttgatgctattacaagcaactttggaaagattgctgaatctgaacaatcaaatgaacttaatactagagttgtcggatatgtcgatgataatacactatttcagatccattattgg

SEQ ID NO: 356937 - DNA, 251 bp, Zea mays
  unsure (1)..(251): unsure at all n locations
aaagaatccctataataatagtcccttcagtgcggtcttggtcagagaagggaaaatgggcgttgtactaactaacatgccttctttttgttttgttttgttggcgaagtgccttaagcaccttcctttttgtccgctgctctggttcgttccattccagctgttgattcttattcggagttcacacacactgcaaattcantagtgcatctataaagttatcagggttcagtagaaatgcaattcatggc

SEQ ID NO: 356938 - DNA, 258 bp, Zea mays
caaccatcacacacaaatcacacacacctacacttccccaacccccaaccagcatcatggacagcaccaagggcaacgaccgccagtctcctccccccgagacccagtctgacaggcaaaccggccagcctgcttcgggtcaaggaacagacaacgcctctcacaaggagcaaaccaacaagtccggccttgagaaccttacctccaaccccacgggacccatggacaaggctgtcgaggagaagtttgccaagacgc

SEQ ID NO: 356939 - DNA, 251 bp, Zea mays
gctggacatcatacatctctatatgcatgattcttgttctgttattgttaaatcgtgattacaatacttgtaattgtaaagaagtgtgtgggcacgggagtatatcactgtagttttaatttgcttgtaaagaaaagaagggttttttttaaaaaaaaaaaaaaaaaaaataaaaaaaaaaataaaaaaagaaaaccaaaaaaaaaaaaaaaaaaaaaaagggggggcccccccaaaaagacccctccccc

SEQ ID NO: 356940 - DNA, 266 bp, Zea mays
gcgagtgaagcgtcgggggtgcaaatggctactgcccataccgccgaagatagcaaccatgtcccctggagtggcacacgttagcctgacaaaaaggcggggaaaaaaaaaggagaggaactacggtgtgtttcggttgtgggcttgttcgctgcggctttaatccgactgcggctgcggcttctacatcattttctctctcgggattgcagctgcaacagtattttgcagctgcaacagtggtttttgtagtgcagccgaacgcg

SEQ ID NO: 356941 - DNA, 262 bp, Zea mays
gaagcattgagaagggtgtcgccttcgccagcaaacagcaggaggctgctgcatctgtttgaagtgaagcaagtgaattggatgtccacaagagaataaagggacaatggtcttgaatggcttttaagttttgcagcctagagttttttgttttgttttggtgtcaacgtgtaggaggaagacgcagagatggttgctgttgctgttagtttctaattactacgcggggactggacatccatgcccccccaagttatcgcat

SEQ ID NO: 356942 - DNA, 257 bp, Zea mays
  unsure (1)..(257): unsure at all n locations
cgcggttccagagttcagtgcaaggggggctggaggggatcaggatcaggacccgcccgctgctgcatccgaggtccagtctgactcgcgtcagacaccggacgagaagaagagcaagggctgccaatcatgccgtgacccattctgttcatgcagcggcggcacgcaccactcggaactgttcccacgacatcccgccatcatgatgatcttggagttcctcatcgcgagcctcacgaanncgacaagaacccaca

SEQ ID NO: 356943 - DNA, 257 bp, Zea mays
tggatttcagatctgtgcaaaaacgctggtgcatggcttgtggttgacaatacctatgagtaagtcaatactgtaaagcaataatttttcaaaagcagtaatatagtatttcgtggtacctgttagaaagaactgagaagagccgtgaattacggttgtagtagggacagatcatataagccattagagctctactccctcctcttgaaacagtatcaaaatgaaagccactctggtggcgtacacaggtaggagtt

SEQ ID NO: 356944 - DNA, 255 bp, Zea mays
ggagatcgtacaacatctatcagtaaagtgaacgcacttgctatgccttgtgaacaatgcaatcttccttgtcaaagggttagatactctcttttcgttttcaagaactccagtttggtttgttttacaaagcttaatatgaagaagctactgtggtttcatatgcttttgagcttggtgcaggatatagacatatttatttcaggttagggagcctccttgttcacatccttgccctttgccatgtcatctgaa

SEQ ID NO: 356945 - DNA, 146 bp, Zea mays
gaagtgtcttgcctcctcctccttgcttgggctgctatagggctgggctgtagcggtgctggcgtccctctcgcagtctcagacaccacagcccagcagccatgcactcatctgcagctctctcctctcctagttctagcttccct

SEQ ID NO: 356946 - DNA, 261 bp, Zea mays
tccaaatctagaggcctaccaaaatgagataacaagccaactaatctgctgggaaataggtaacaagtctctaacaagatcttaagcttattctgagatgatgtcgagaccgatgccttttgttacgtcgtgccgtgcctcttgttgccatgctggtaagttgctgcctcttgatgagggctcgctgcttatcaaggcgggatgaagtgttatggacgcaggcatgggtgctgctagcttggcatccagggttccaggata

SEQ ID NO: 356947 - DNA, 125 bp, Zea mays
  unsure (1)..(125): unsure at all n locations
gtgcaagtgctgcagacagatgctacgagagtctcagcacagttgagaatgctgtanagggactcagttggactgggtactcagaacaacgagttgaaaattgttctgcaagcatggagcaagaa

SEQ ID NO: 356948 - DNA, 137 bp, Zea mays
ggattgtcctgtgtttatatcgttgtgaaacacttcgctctgtgaaatagatggcttttcagaagcgatagacttgccgctttaatagccatggttaattgtcataaacagttacaactctatcgcttctgaaaagg

SEQ ID NO: 356949 - DNA, 249 bp, Zea mays
agcccaggtaagctgtaagagcaccctttgcattttggttgtcccagcaaatgctagttacacatgcgcaaaggaggctcttttgtttactcaaccacagttctacaattctattcggttcatggatgctccagaagagttgcttttgtggaatatgttgtttctgaataacatagaggtcgatcaatcctccagaagagctgttttgtgaacaatacagacatttatgtgaacatggatccaagtttt

SEQ ID NO: 356950 - DNA, 245 bp, Zea mays
gagacgatggatcccgcatatatgcgcaagccaaactatcccaaatcctccagagcacgctcaattcagtagctttccgcgactttttcccagctgcgcgtgcagttttgttcgacgaaaggcgggcggcggcgggagagacaccatcgtcgttggaggaatgcattcttcacaggcgcggcgttggtgacttcttcaagggcgggtgcggtgcgacctgtaggtcgtcaccggcgcggcgttgg

SEQ ID NO: 356951 - DNA, 266 bp, Zea mays
tcgagctttcttcctcttctatctccttctatcgcagcgtcataaaagttgcaccggcttagaaaaaatgccagagctcttggactttgataagcaacagaggcaactggaagatgatcttagcaagctgcagaatgccctgaagcattggcagacctggcatgttgagtatgagatgctcaaagaagaggtcgaagccgtttgcaagaatagcgagacggagcttaaggctattcctggcgtctccgaaggagagctgctgaaag

SEQ ID NO: 356952 - DNA, 171 bp, Zea mays
gccttgagggtgtatgttcgataaaataaaactatatatatctatctagactctaaagttgcatggcaaactgagacttgtactatcatctctgtttgccatgtgccttgagggtgtatgttcgataaaataaaactatatatatctatctagactctaaagttgcaagag

SEQ ID NO: 356953 - DNA, 101 bp, Zea mays
gcgcggatcccggcggagacctgaatcccgcaccgccgccatcggctcagcaggctacagttgaggatgccgcggttggcggcgatgtggagcaggaggag

SEQ ID NO: 356954 - DNA, 263 bp, Zea mays
cgactggttcgacatcaagcaggtagctagacgagaggtttccgttcatcaattctgtgctagaccaccgagtatttatcatcagatttaagacagaaacaatggcatctgcaccagacgcgaccgccaacgcccctgctcttgacaaggaggctaccaacatggacactgctggcagtgcccccaatggcggcaccacccaccctcagatgtcgcacgaggagcatgaggtcgctcgcgctgctgcgcgctttggatacggt

SEQ ID NO: 356955 - DNA, 265 bp, Zea mays
gcgctggacaaggggccgatggcttcggcggctgcagcggtgatcccggacggccggcgatggagcaaaggtccgggctcctcgtcgtcgccggtgacaacggccattttcctcttcttcttcgttgtcgtggtcggcgtcctcgtgtccgcccgctggatcaccaccacgactagcatctgtcgtccaccaatctggatcagtggagctcaaagctggtaggtaagctccggccctttatttccaaacaaaaatttcttcaatc

SEQ ID NO: 356956 - DNA, 271 bp, Zea mays
attccacccctccatatcgtcctcactttagtacttatataaacacaaaccccccaccaaaacccctcaacccttcatcaacacacctacaaaccaacacctaaactacaaaccacaaaccacaaaccacttttcaaaatggctgccccctctgctgttgtcgaaatcaagtccaaggctcagttcgacgagctcgtcaagaacactccctacgtcgctctccaagcccacgcctcatggtgcggtccctgcaaggccatctcccccattt

SEQ ID NO: 356957 - DNA, 264 bp, Zea mays
gccagtattcgctcgagaggagaagcaaccgaatcgggttccggttccagtggtattgcgacgaccgagatccgagtcacgcaattgttttcgacgcgacggcgattcaaacgctcccgcaggaagtgtgcacggtgcctgtcgacgggggtagcgtgaagcaggaatgtactctaggggcggacgttggggacgtgtcgttggccgtcgagaacatttcgtggcaggcgacgtcagggccgatggaccgaggtccgacactgc

SEQ ID NO: 356958 - DNA, 115 bp, Zea mays
gtcaggattcagcagctagcctcgtacctgctcatggcaatctgcggctcattgccatgcgcatcagcagcggagcactagatggtcatggcagcagacgtcgctctcgctcact

SEQ ID NO: 356959 - DNA, 171 bp, Zea mays
atcacgcatcagtgagccgttcctagctctcagcgcgtcttcgtcctagtccaggcctcggatccttgttaacctcgatctcgtgcagtcgtgcagccagtcagtcatcaggctgcaatggagcgtccgtgcccgcggccggagccggcggcgatcgacatcacctgggtg

SEQ ID NO: 356960 - DNA, 266 bp, Zea mays
ggaagtaaaagagaaagtgtttaggcaggccgagtctaggagacatgttctagaacacactgaataggagtctagttgaggaagatctaagccaggtagtccattcccaaggcatatcggcgtcctgaagagcgaggatccaagtaggggatctcgccaacgccacagactcggttacagaagagctggccaccggtaataccaccatagtcgtaggtagcgctgtggtacacagcggggttgtcccagatgacaaggtcatcctg

SEQ ID NO: 356961 - DNA, 258 bp, Zea mays
cggctcgaggacgacgacgacggcggccagcactccgcccgcggaggctggggaacccacttctactacggtggcccgggacacaacccggcatgcccctgatggccggtgatctgtcctctgatgaagttgtgacgatgagcgcgcgcgtggcccctgaccggccgtacgtaccatggatggcatgcattaatttggcctaacttccgcctatatatgtgtacgtggccaaattttgacgtacgttcgcacgtgcct

SEQ ID NO: 356962 - DNA, 204 bp, Zea mays
tgcaatttaccattatcttgtatattagcctgagttcgtgatctgctttagttcagtttaccattagcttgtatattattagcctcagtttgtatcacttagttgtttggcagcatattagcagaatttcgggcagtatatgagcagaatttcgctgcctggtccaatttcccatatacaagtctgcaggcaaaattcattgtc

SEQ ID NO: 356963 - DNA, 261 bp, Zea mays
gccattttatcaattagttctcaacgtgccatcttccaaaaatggtcgctgtctaccgtcaacaacatcggtagaactcaggtgtttgacctcggttccactccgagcggtctatcctgtccttctcccatccttggtaactaccaaactgggtggagtacggatggacagtgttctgtcaggctgtgtggtttgacggacccttgcgagagcagagctcaattattccacaatgcacctaccaatggttttgatggagag

SEQ ID NO: 356964 - DNA, 179 bp, Zea mays
cggctcgaggctcttctgtcacgatgtctggcgttagtaaagcttgttgcgctattccacctgacatttcagacggatatgaagcgaagggcgagtataagaccattggtggattaaagacttatgtcaccggtcccgccgatgctactcgtgccattttggtcatctacgatatcttt

SEQ ID NO: 356965 - DNA, 252 bp, Zea mays
ccccgggcgaccaggagggatggaagcagttttgtggttgttcaatcccacatctttgggcttgggtacgtggctggctgcttatgttgtgcacaccgctgctaaatccgttcttgagcacctccttctatttgtaatcaagcttttgggtactcctgtcctgccctccagagtgaaagaggtctccccttttctggtcaaaatggttacacttgattatgtgtttctgtttacaaacagctggattgaatt

SEQ ID NO: 356966 - DNA, 261 bp, Zea mays
caacaaaataccctagtattcaggggataaacatccagtcgtattatacaagtgtacaactattgtcagaagagtaatgataatggattagatcagatatttttatttggttctctattttgtttattctctctcgttttcttttctttttgaggttctctctagagcattttttgtagctatgtatgataaatcctggatatgtataagataagaagaattttggcaataagcatgttgcctgtcagtttgtcgcaaaaa

SEQ ID NO: 356967 - DNA, 162 bp, Zea mays
atgaaatcttccaaggattgaaagtcatatgccatccttcagtattcctggatgggtccccgttggggctgcattgctaacaattctggcgactcgaatacacattttttggtgcggagccattcgcagttatacaatatgcaactgcatatttcatccgaa

SEQ ID NO: 356968 - DNA, 158 bp, Zea mays
taagaagcagcggaaggtggactccagaacacctgatgcaaaggaaaaaactgagggcacgccctctgatgtagcagaggaaactgagagcccactctctggtgcaacaggaccaggaaccatgaggtcttgctgtgctggaaagaagcgcaaatctg

SEQ ID NO: 356969 - DNA, 112 bp, Zea mays
atcacttattgtgtatccaggtggttctgccgaaatctttaccactgatcctaaatcgaccgatacgacattggttgtacggaaaggattcattaagttagccatacaacat

SEQ ID NO: 356970 - DNA, 162 bp, Zea mays
agcacgccaacacctacagatggttcaacgccaacaccaacatcgggtcagccgtctgatcccacttctactggtgatcctagtactgcaacaccgtctccgccttcggatcccaacgcgacgccgactcccccaccagatggttccaccaacactggacca

SEQ ID NO: 356971 - DNA, 162 bp, Zea mays
cttcgaccgggtgtagaaagccgagagggagacgagagatcgccgttggcaatgatacatggatgcgtcgctaaagcggccttcatacttggtccagggagtaacccagatcccatggaagatgtacgcatgaagctatgggcgcacttactgttcggcggg

SEQ ID NO: 356972 - DNA, 161 bp, Zea mays
cgtgctctctgcagaggcacggatggtctgcggccagggccgaatgatccgccgcagggatggttcctgtctgacgggctggctggtcgaacagtccgctcgtgcacaggggcggtgaattttgtcggcggcgccgggatctaactcccggaaaagatccc

SEQ ID NO: 356973 - DNA, 160 bp, Zea mays
gggatgatgatgagcccgccgaggctcagccccgacacctccgacgagtcgcccgactcgtccgaggccggggagagcctctggagctaccgtgacccgtagattgttgcacacctagctagctaggccatggcagcaccagcagtgtggtaataacaca

SEQ ID NO: 356974 - DNA, 159 bp, Zea mays
cgcaggcaacttaagaaaacagagagggttttagtgtttgcccatttaggacttcagtttctcttacgaaacaaacatcttagccgtcggtgctcacttcactttccagtgacgaaacttcgtcagcagttttctcttacgaaacaaacatcaaccgtc

SEQ ID NO: 356975 - DNA, 154 bp, Zea mays
caggcctgcacctacaacaccgcgccaatggtcgccgtcttcgccaagctgcaccgcctggcgcgcgacggcggcgctgccggaggggtgccggagagggacgacgcccgatgagctaggcggactgtagataaaaaatggtggcggcggtggt

SEQ ID NO: 356976 - DNA, 160 bp, Zea mays
cttctacaccgtgaacctggatagtatctccatcggcgccgtcaagacgcccggaactgggagacacggcataatcttcgactccggcaccacgctgacgttcctggcggagccggcctatacgctggccgaggcggggctcctgtcgcagacgacgaac

SEQ ID NO: 356977 - DNA, 161 bp, Zea mays
ctagagcctgcattctacagacagcaaggcagagtaattgaataaataatttatatggaaaacacgcctagatcattcctgatagctcgaaaactttctgaaatccactacgtgatgcccttaacctgttatttgaagccaccgaaacgtcggaattagaa

SEQ ID NO: 356978 - DNA, 136 bp, Zea mays
caaaacgagcacactctcgcctccgtgtggtccagacgtccagtcctctaaccgtaccaggaagcatcacaccaggcaacagaagctcacgctgggatcggctaccaacaataatatcgttcctcgcctccctcac

SEQ ID NO: 356979 - DNA, 147 bp, Zea mays
aatcggctcacggctcgagttttttctcaatccagactttctggaatgctcaaacatttcttcatcaaggtgattcacagtcatgaattcaattattgcaactcagaacaatgcaacagcaaaaaggtttcccactgaggaaactgt

SEQ ID NO: 356980 - DNA, 157 bp, Zea mays
caagatttgcagcagatggattgtgatcctaatcaggcaagtaatggtggctgcatgcatgcagcagaaccatccagaaagcaagacattggcattttgagaatcgttccatcagatgccgacgctgatgctgattactggcttccttctggcgttg

SEQ ID NO: 356981 - DNA, 152 bp, Zea mays
gatcgagcttgatattgattagatacattgcgcttgaagggactgtctaaaccaagtaaagagaaggttgtacttgagaagatggtcttagaaggttttgtgaaggatatatcagcagatgaagcatttgaacaggcttcaagcatacgatc

SEQ ID NO: 356982 - DNA, 161 bp, Zea mays
gttcttctagccgtctggctgtcacgcactcccgctggcctcgcgttaacttcgtttttttaccttaattttctggttaattttttcttgactaaaataacatgtaatttgtggggaaagctgagatgagagagagagagagagagcactgtggaagaaga

SEQ ID NO: 356983 - DNA, 161 bp, Zea mays
gtcacgtggccacaacaactgcatgatcccaatcccattcggatttcctcacgacgaattaatgaagaagggcgtgtgagtgtgagggagaaagttatacttgtatgtattttttcagttttattttgtcgtttcgttttcctttctttttcccagtaggt

SEQ ID NO: 356984 - DNA, 159 bp, Zea mays
gcaccatgtggctgagagacttggtctaaagccgtatcatgtatatcatgtcactgtgatgccctgctacgacaagaagctagaggccgtccgggatgatttcactttctcagtagatggtaaagaagttacagaggtggattcagtactgacaactgg

SEQ ID NO: 356985 - DNA, 158 bp, Zea mays
gttctatgatagtatgttcttggaacaagctggccaggaaggtattgcttttcctaccaaccaagcgtactacatgatgggaatggaatcctatgctcttccaaccaacttgaacggaactctgaatgctgaattgcagtcagaccaggaaaataaca

SEQ ID NO: 356986 - DNA, 157 bp, Zea mays
catccgtgtcgacctgcttcggcggtgatgagcacggtcgcgggaagcccggcgccgacgggcgcgaggtctcctcggaggaggacggcggctcccctccgaggggctcggtgaggatcacgaggcttaagaggaaccggagcctccccagcgtcac

SEQ ID NO: 356987 - DNA, 154 bp, Zea mays
ccaattatcaacccagatataaatgttgcatgtgtgttcaatgagcatctagacagcttcagaagggagattcaggagctccttgtttgctactcctgccctgttccgcttggtaattttgagagtttatatgagcaacggtataagaagatca

SEQ ID NO: 356988 - DNA, 152 bp, Zea mays
cctgaacagtatcagtctacttctcaaacatgtggcttagtacaatgttcagcatctcagtggcaaaatatgtcaagttctggattgcctttactggattgtcgcaaaagtattggtgagcccacttcaataattagcctggggggaaatgg

SEQ ID NO: 356989 - DNA, 148 bp, Zea mays
cactggttcgcttctccctctcctgtgcttggctgctgcttgcccgttgagcacagcagggaggcgatgagggactgggcgccgtcgatcatcgccacggcgctgttcgcgctcctgtgcccgggcggcgtgctgcagatgcccggcc

SEQ ID NO: 356990 - DNA, 142 bp, Zea mays
cgcgcgagccgtgggcggcggcgagttccctttccccgggggcccgcagcgaggtgtcttggacagcccaacctctccccaggtcaccgaccaggcagggaggtgtcgttgcgattgcgaggacgcacgaaaaatggaagaa

SEQ ID NO: 356991 - DNA, 270 bp, Zea mays
  unsure (1)..(270): unsure at all n locations
gactgaggctgtgacctcgcgccagatgcaggcctttacgagagcagtcctgggctttcctatttgctgaatcgccactatatccgtgctgcatctcgtaaagaggaggagtgcattttctgttttgtatgcatttaatgctgtttggatatacgaccgcgggctctcaatctgctagccagccatgcaccgtatcccctcgcagtacncnaatatcatatcatgcaccagatcattgtgcattagattccatttntcgatagctggcta

SEQ ID NO: 356992 - DNA, 278 bp, Zea mays
gtatggccgaggcagcgaacgaggaggacgccaagaggacaggactggaaggcactggcctgccgctgcaaggcggctcccacggcaaccttcgtagcgctggcagcgaccagcagttgaggcagatgctcgattcgctcaaatcctcaaagtccccggctgtgatcaactatggtgcctcatggtgccgtgtctgcagtcagattcttccatccttctgcaagtgcagtgataagttcaagaaacttactttcatctatgtggacattgacgagtgc

SEQ ID NO: 356993 - DNA, 280 bp, Zea mays
gattagccaactattttgatcactttcctgtttaagcatactttatttgcattcttatgtacgttttatacataatagtctctgcttttttcattgtatcggttgtatttaatcagctgacagtccgattcaatacttctcatttgccctaccgttatgctcattatttcgttcattactcactttctcttttgacattaacattgtcttgctctcgtgtttggttgcgttttgacaagttaacatttgttttggcacacaaactctacacaaactttat

SEQ ID NO: 356994 - DNA, 125 bp, Zea mays
gtcgccatggcctcctccttgctccgctccggccaccgcctctttctccgacgccaccgcctacccgcggcattctccaccgctacggccgagaagctaatcgacgtacgcaagcttcccacaca

SEQ ID NO: 356995 - DNA, 274 bp, Zea mays
  unsure (1)..(274): unsure at all n locations
aagaaggaatccaacgcccccaagcgcggtctctctgcttacatgttcttcgccaatgagaatcgtgagcgcgtcgtttacgantacccaggcattgccttggtgcccttggtcgtaagctcggtgagctgtggaagggattgagcgacgccgagcgcaagccatacgaagacaaggccgccgccgagaagaagcgttacgaggaccagaaggccacttacttggctggtggagatgacgatgaagaatcttcctaaatatctttttcaatatt

SEQ ID NO: 356996 - DNA, 273 bp, Zea mays
  unsure (1)..(273): unsure at all n locations
ggttaagcaagtaaatgagaaggcagtagccatgtcagtcatgagtcctcgtgctactgtagttatacagctgcgagtcacagcgnttaattacgtgagtcaactctgtgtcgttactgcaggcccgcaccatttccctccgctgatgcagccgccgacgtcgtcgttcttcgagttatacatcggnccatcgcctatgtagatggcgtccgaaggaggcacgggtcagcagatggctggcatggcgccgacaagcagcccgccggtgagttc

SEQ ID NO: 356997 - DNA, 273 bp, Zea mays
cgccgcagacggcgtttcagatgccgccgccgccgcagccgtcgcacgtggtgctcacggcggccggcaccgactacctgttcggcctcgacaacggcttcgttcctcccccggcggtgaaggtcaaggacccggcgggcgatcctccgacggtcagggagaatgtgcccgtggaaatacctgccaaaaacgacgaccgccatcccaaccccgcgggcgaccacgtggctgtctcccctgtcgtctctcctgcggagtaccagcgccagatcc

SEQ ID NO: 356998 - DNA, 270 bp, Zea mays
gagttccacaattgcatactgcacttgaacatatatagtactcatgaagttgttctacatcatattggatttcaaggcttttttatcagtgacacttttctcttttttggacaatttctgcatgggatacactacatggatttgttatattgcattttttacacctgaaagagtctgcttcctggttgtgaagctattcatacaagcctattcttttcacaaggctggtagccctctgtgatttgcatactctagttcttgttttggtca

SEQ ID NO: 356999 - DNA, 270 bp, Zea mays
ggaatgtaaagtgttgtattgataatagatggggttacaatatatagagacacaggaaccctaaccctaatgagccggcagcccaacaatggtgccgacccacacacactcacacacacatagtctaacagcatggagttttttttgtcttactaatctaacaaaaaatgaggaatacaccatagcccaagataacatccatagttaacctcaatctgagcaaagtgctctgtataacatgttaactcttaaacatgtcagatgtgcgac

SEQ ID NO: 357000 - DNA, 267 bp, Zea mays
  unsure (1)..(267): unsure at all n locations
ataaatacatgcattgaatacattcaacgtaggctgatatatacctataatatatcgacactatggctcagcgtaaccgnaacgctcagcctaaacgcggtcaaggaggacctaaaactacaactggaggatttgataaaacaactgctgtcagagttgtcgagacgccggtagcatccggcggggtgttctcgctccccgaggatgtgactcgtgctgaaagagtatgggtggaatggattccgtctgctgtactggaagggaaaa

SEQ ID NO: 357001 - DNA, 272 bp, Zea mays
ggcattcggagggcgttcgagtcgcggatagctaagccacctcagtatgggtacagcacagaagctcttgttgggcgacggcaaatgctgcagattgcccatgatactctcacaaaccagagctcgcgcaccgactacgaccgtgcgctttccgaggaccgtgatgcggcactcaccatggatgttgcctgtgataaggttccaggtgtgctgtgtgcccttcaggaggctggggaggcacaactggtgttagcaactggagagcacttgct

SEQ ID NO: 357002 - DNA, 271 bp, Zea mays
ctaagatcgaatcttcgataaagaagcggctcgtgaaggactgtgataaggagagcgaggcggtgaagactatgcagggtaaactgctgctgaagcggatgtcagtggtgcaggacgtggcggatgccgtcatggctctgggagacgtcaccgatggcaagggtttgctcgggagctccacgctgatggcagcagctggactgctctcggcgttgatcagcacgcataagaattggaattcttgttgaagcctggaggtacatgttataga

SEQ ID NO: 357003 - DNA, 268 bp, Zea mays
caccaatcgcccaattgatactcccaactatgcttcctcaacgcaacatgcagcgcctcggcctccgtttggccaagcaggcccgtccttctcctgctcgcaacgtccagcgccgtttcaacagcaccgagaacaagccggactggattgtcgacaacgcgttcaaccgtgagcgtgagaacgtcaaacatcacgccgcttctaccagcactctctggttgagactttccatcttgtatgtacccgatcgacaaatcgtatgacattg

SEQ ID NO: 357004 - DNA, 166 bp, Zea mays
aatcccctcccttctccccggggccgggcttgtcttcttcctcccgattcgttttccttttcttttcttccgctgctgcaaaatctcgcgctggcgcggcccgaggccagaggactccgatccttatccctcacgcatctcccgcctcgcctccgccacacaatat

SEQ ID NO: 357005 - DNA, 217 bp, Zea mays
gtcccgacctccccggctccagcccccgcgcacgaccagctctgacgaccccgctcctgcctcccacctcctccggtggcctcgcgcctgactccctcctccggcacccaggccagccgcgccccgcctctcgcacaggacggaaatgatgccttctcctttttgttagctgattctgatcaaactggttagttcgatagagaatatcagtactatc

SEQ ID NO: 357006 - DNA, 263 bp, Zea mays
aagatgtggttgctggtagtgtctacagctcttttgctttcagtcagcctaggagacttctcatgcgaggcgtttacttggcaaggcgacatttactttcgatcttactacaacggccaaggtctcttcgattacaccatcggtgcaggaggagacattttctccatgcgtgataatcttcgtaactacgctctgctgttatctcctccctacatccccggtcttgaaacagacagggtgatccaattagtatggtgggatgg

SEQ ID NO: 357007 - DNA, 260 bp, Zea mays
ctgcgcaggttgggtaggcattttgtcagccgccgtcgtaggatggaggaagacagcgggtcccccgccgtgattagcgccattgggagggttgaggaagggcctaggcgtaacaccgatgatgtccgctgctcaatcggggggaaaatggatgatcgggtggtttgggaattgctcacccgcgcataacctcgccatggtcccgcacttcatcgaggacagcactgcagtcgccaccgtttgaggtcaagaacaggtac

SEQ ID NO: 357008 - DNA, 264 bp, Zea mays
tgcaaatcggcgacacaatctttgcatacggcggttccgggtttgtcatttcaaaccctgccatgcgcaaaatcgtgcagtatctggacgaacagcctcaaaacgagatcgatgactacaccgcgacgcaatgggcgggcgactgtgtgctgggtaaagtgtttgctgatgccggcgtgggtttaaattggtcttggcctatgttgcaggacaacaggccgtgggaagtagattattttgcaactgtgggcgataaacgtgcgt

SEQ ID NO: 357009 - DNA, 267 bp, Zea mays
atctaagctgcgcacaacttgttctacaaacaccacttcaatttgcacggttgatataactggggattggcttgttagcgaagaaccgaagataccatgggttcttatgcaaatcacagttctcctagttctttctatcgttctgattgtccgttgcgatgtttggtgtacctagtagtatcttaattatataccttacactgtttacctttccaatggaattcttggtctagctaacattgtgagattatgtcacttttctcgttc

SEQ ID NO: 357010 - DNA, 263 bp, Zea mays
atgaatgtatgatggtacaataggatggtgcactgccctcgttctccccagcgatgctgcctgatgccctatttgcaacaatgaaaagacgcgttctgtaccaaggagcttcttaactagtcgctggacgatgatttcgaaagttgtgcaggcagtcctatactagtctcattgctactatttacatgtggatgacttttagttagtgtgccatccaagaaagcagatgttgcaaacattgtaacttgtgtattaacattggt

SEQ ID NO: 357011 - DNA, 260 bp, Zea mays
cgcagagagagacgggtacgtagcgtacgttcctcgacgacgactggtcggtcgagactgcgcgcgcgccacggccagcagaatggcgaccaagctcatcatcatcggcagcgcgcgggcgccggcggctggagtcgtcgtcggccttctgctcttgacgacgtgcctgttgctcgcggcgaccgtctcgagtgccagcaggccgctgaaggtatcgtcagagggcgatgatggtggtgcgcacagcatacggtggagga

SEQ ID NO: 357012 - DNA, 259 bp, Zea mays
ccagaaccagagtcagaaccagttgttgaggctaccccagaaccagagccagaaccagttgttgaggctaccccagaaccagagccagaaccagttgttgaggctactccagagccagaaccagttgttgaagctaatccaaataaaattgctgagccaactaaagttgttccagttgttgttactaaaaccgaaactcaaattactagaccatcctccaaatttgacttatttacttggtttccttcactcaaaaatt

SEQ ID NO: 357013 - DNA, 241 bp, Zea mays
accactcctatctctgaaagtacatctacttgattactaaatagtactttcaggattctagaatgtggatagttatattttttcttgattctatgctatggactttaaaattagtgaacctgtttagagaaccatctagaatgcctagcacgtagttggaggacttgagaaaattaggctcttcattgcgcaatgagacacaggtctggtacgacatacaattggtccatgtgtgatgact

SEQ ID NO: 357014 - DNA, 255 bp, Zea mays
gaaagagcagagccagcaggtgaaatctgagccctccgagaatgaagctgtgaatgtatctggccttagccactcttctacaaatccttgcaaaggtttattttcatatagcttgaaattttcaatggatttaaattacacgccttctttgcagtattcaattttttgtttgatcgcaggcggcgaacctatcgaagaggatgtggacatctgtggcaattcctcacctatcatgctagacaaagatgcacaaat

SEQ ID NO: 357015 - DNA, 256 bp, Zea mays
catttccctcagggtccctacctacccacaacatactaccactttaggctgtgaccagacgaccaccatgttgatcacacgcggcatctcactagtcaacttcacggtcgcctcgtcggctctggcattccaagtcttcgtcttatatccatggcacaataagctagacgatgaattcaaagctctgaagcaggagcatcttcgcgtcttgcaacagatcaatcagaaaaaggttgcttaaaatctatcgcgaacc

SEQ ID NO: 357016 - DNA, 260 bp, Zea mays
gatgactctcatccaagggtgattcaacaacagcatctagccgacatctttgacgctgcaccagcatttgctgcgcctccgatcgaggatttgttttacaaggttacgggcctgctcgcgacaaagcctctttcagcattatgaagggaagaaatccgcatataataaggcatgtttaaaaagctagaatgttttttgttacagaggagtatgtataaatcaaaactagacagtcatggtctagtcgcatgtggtcttgg

SEQ ID NO: 357017 - DNA, 254 bp, Zea mays
ctttaaactctcgttttttgagtgaacgttttaacatcaatctccacaacgtaaatacagttaacttaaccaagtttgttaaacaccaacgtttgcggtatgacattactacgaattctcttcttgtaacatgggtcatcttaattatcaactaactcacctgcaataattgtgttaattttaccatcttaccatatctacttaatgaaaacctgtcatcaatacttgttttctttctaaagatgcgattttta

SEQ ID NO: 357018 - DNA, 243 bp, Zea mays
acagtcgtgtgaaattgtattacaggagtgcacatgtatctgctgaagtttttagaagttgatagttttatatacttgattgttatgacaaaattgttttattcataaagaaatctgttggtgtattgctaccaaaatccgctattaagtttgagagatctgatggatgaggtgagatctttcaggcgctactatatgtttctgtaattgttaattttagtaggatatagtctcaccacattg

SEQ ID NO: 357019 - DNA, 131 bp, Zea mays
gaagccgcggttcaacgaacgtcggcggccattcacagccggccggcacctgcccccctgccccacggttcaacgaaagtcggcaggttcttccctccaggcaagataatagtagcacctttgagcactgc

SEQ ID NO: 357020 - DNA, 255 bp, Zea mays
ctgtcacacaagtggaggaggtggaggccgtggtcatgcgtgccgtggaaaatcatgccaaccgtccaaccataaaaatggatcgagtatatgaacaaaatatcctatccgacgaagagcgggaggctctggtgaggctgttctctttgaatatgtttgtgtacttcaattctcagcttcagcgtcacattgaaaaggattgctgcgtgcgcacgatgaaggataaatctgatgctttcttcatcagccagctgc

SEQ ID NO: 357021 - DNA, 259 bp, Zea mays
cccaaaatcgcctctgcactcaatacgcttctgtacgtcttcgtgactacgtcaacaccacaaattactttcccccaagttcacctcccagaaatcaatcaaaatgcccaaggctgctgctggtaagcgcggtaaggccgagaagaccaagcgcggcaagaaggaccccaacgcccccaagcgtggcctctccgtcgacatgttcttcgccaacgagcagcgtgagaacgtccgtgaggagaaccctggtatctctttc

SEQ ID NO: 357022 - DNA, 204 bp, Zea mays
cagcaaaaatctcacctatttttttcttaccctcttcaatcaaatcaacaaggtaaaaaatctcatctctctaccggcttgctatgcttgtttttctctgtccagacgccgctgatgctcgcggcgatgcacggcaagaccgactgcgtgctgaagctcctgcaggccggcgccaatgtgagcggaaatctcctcctcctcttc

SEQ ID NO: 357023 - DNA, 255 bp, Zea mays
ccgaccccggcgcgacgcggaatctacacccacgtgctcgcggccgtccatgggctggccgccgagcagcgcgtggggcgaccggcgacggaacgtgtccgccgcggcgacgctcttcctccacctgctgctactcttctccgcccccgggacgtgcacgccacctctccctgctgcgcacacgctggtaccggtgcactggtgcatctctcactcactggatctatctagctcgtcaggctaaggcagcagcgg

SEQ ID NO: 357024 - DNA, 228 bp, Zea mays
gcgaaaggcatatgcatagcgttggaataaatgtttgggaaaaaaaaagaagtttgccggaaaacagattgcatgcgacttctttaattggatagaaagatggccccattttacagagaagtattttctctgtttcaagcgattttttgcttgataattggtttcgttctgttgtatatatatttataatgttgccgtttggctttaggaattgatagactgggcttt

SEQ ID NO: 357025 - DNA, 251 bp, Zea mays
ccagccgtgagccatgatgcatgggggcgaacaggggcgacacggcgttctgcagcgacgagtgcaggagcgcgcagatggcggcggacgaggcggcggcggcgaaggccaaggccaaggccaaggccagggcggtgtcacgtggggccctgctgaccgccagggaagcggaaggcccgcagaggcgcggcaaggtccgggccggctccgtcctggccctgtgaccccgaggggggtctctcactcaggga

SEQ ID NO: 357026 - DNA, 259 bp, Zea mays
aggaaatactgctaaaagatgaagggatgaaggccatatacatacactccttcaggtgctttgttggatgcgcgcaacattttcgtccaagagtacatacacctgcgaggtctggcacaaagttaaacatctggccatgtactccttcagccatgaaattttcctcaaagtttttgcaagagtttcaggggcctatttctttgttccgagggtgtacatatcaaagaagttgtccatagcgttacaatcctctcaaatt

SEQ ID NO: 357027 - DNA, 253 bp, Zea mays
ctctattaccggttgtcacttcgaggtctttctgaaaccttcctagaggacgagactcagtaatcttgccttcctgtattgcgttgttgctgattcaaaggattttaccctctgtatttttttcgtttaccctttgtgggcctttttggtggtttgaaggtggggtagtggttagtagactctttctatattccgattcatgctcatgtttatgtgactactataatggtatatacaatattgtattatctac

SEQ ID NO: 357028 - DNA, 177 bp, Zea mays
  unsure (1)..(177): unsure at all n locations
gagagcctgaccgaccatccacaagcagctagcgtccangcgatggccaccgaactccagtcgccgctgctccctccgccaccgctgccgccgcagcgacgactaagcccgcgggcagccgcatgggcggcgctcgccgtctcggcgacggtcctgctcctccccttcctgatcggc

SEQ ID NO: 357029 - DNA, 247 bp, Zea mays
ggtgagttcacttttgagttaattatgcactatttgtcatgtcctttttatgattaaaattatcttcaatatcattgtgtaaggtggtggtgatgatgaagatggtgaccctagtggtccaagttctgcagctaggccaccaactcataatggtcctggtcaagatgaacaaccagccgctctccgtccaagatcaaaaaggcagaagaagctctctatcaagggcttgtacatgcttgagaagtga

SEQ ID NO: 357030 - DNA, 212 bp, Zea mays
attaattcctaaggttaattccctgagctgagtggaaataaggccgactcggtggagagctgtcgacttctcaataaataattgctcatgaaaaccacgatggtttatgttattcaaagtcttatatatatataatggattagtaaaaaagaaatgtgttgtgagcaactgttgaattttgcagcgtacattttgaataaatccattgcaac

SEQ ID NO: 357031 - DNA, 252 bp, Zea mays
cggctcgagtttagtttcagatcgtatctagctctgggattggcccaagaaactgaaaaccgagattcgcagctcaaaaccatgcatcgcaacaccatcgccgtgcttgctggcgcccagcttgctgctgctggcctctaccccggcatcacagctgacaatcacacgtgtctattggacgagcctgcattgtcttgctccaaaggcgctgtccccggaaaggtggacacttgctgctcggagactcttgga

SEQ ID NO: 357032 - DNA, 189 bp, Zea mays
gcgtcgtcgtagtcggtgcgcgcgtgtatgagtgtgatggttacggatgtcttgcgagtagtaatcgcgctgggaaagtcccaggccccagcctttgtcgcgggaaaaatcttgtagccgtgacatgtgcagcgagaaaaacgctttgagactagaacgataaggatccacattcaaaaaaaaaaagaa

SEQ ID NO: 357033 - DNA, 252 bp, Zea mays
cgctgatggatgtggccaggcttgtgccactgattgctcttgcactgcttactcatatgctagcactactggtggtggtggtggtgggtgctctatctggcgtggagaattgcttaacaccgcaacagcaagtaccaccggcgacactctctaccttcgcctctctgccaaggatctgcagacgctaagagagaaccaaagatcaggccgcccatcaataaggcgacagttgttactgctgcaagcattgcg

SEQ ID NO: 357034 - DNA, 257 bp, Zea mays
ctgctgctttactcttccctggtgtttgtactgacctttttaggaaatcttgcagaactgatattcaatgtaaaatattcagtgtgatagaaaaaagaagattagtcgagtatgatctttatttcaatctgccaatgctcttgcgtgtcaatggatgtttgcaaagacaacagatgccaaagcagactggcttcttcctaacaacaaacctcaaaagccaagagagacgacaattggcgacgtaggaaaaaagacgc

SEQ ID NO: 357035 - DNA, 117 bp, Zea mays
gatgattgaagggggtggagaccgcttgtttgtgacaagagaagagatgcaaggtgtgcaagtgtggggagactcccaccttgctggttctacttctctctcgtagctttattctct

SEQ ID NO: 357036 - DNA, 266 bp, Zea mays
atcacgacacttcaacggctgcacaccaacacaaatcaaatccctccaccaaccttgaacacacaaagcttccagcgcgccaacccgtcaacatgtctcttcactatcttccccccgtcaagccctcggccatcgccctggcaccgtcttcaaccacgccaccgagctcgcgatcctcacgccgctcttcggtaagacctaccagcgcgccaaggaggctcacaccaaggaggagttcctccgctccaaggaggccaccagtgccg

SEQ ID NO: 357037 - DNA, 269 bp, Zea mays
gcaagatcgtcagaccgatccagcctgacagctttggggagcgagttggagcctgtaccttgcttcgattcagtccctggcgccatgcctgcgtgcacctttccagatacaccagtagtaactctggacctaaactcgaatctatatctgccgtggattatgcgtagaagctactcataattttagtagtatctagttacagcattgttattaatctattgatgtgtggaggcattatgcagcttgcattgaagagtccaaggcgatgc

SEQ ID NO: 357038 - DNA, 140 bp, Zea mays
cggctcgagtgccacacttatggtcacaatgttaagggatgtggagtgccacttagagctgattgggagcctaggaagggagctaagtacacgagggcctcaattggtgttcctacttcatctcagccagacccccgaca

SEQ ID NO: 357039 - DNA, 268 bp, Zea mays
cagccaacaaacaaactcacttcacacctacactccataaaccacaaacaaccatcaacatgtcgtccgagaacacctccaccgtcaagtccatgatcgactcggtcaccggcaccgcccagaacgtcgccggcacctctttggcacctccggcgaccaagtcgagggtcaagccaagaagcacaacccgcaggccgagtacgacgcctcgcacgcgaccatcaagcttcccggcgcgacggccactgccgatggcgtgacgcgcgac

SEQ ID NO: 357040 - DNA, 140 bp, Zea mays
gttttataaagacatatttagaaatcgtagaatttttttcttggttcaatacaagcctctgtaactgtatctagagaggacagtgcatttcctcatgttgttggcatccagctcatgtagaaaggagtgtctctctctac

SEQ ID NO: 357041 - DNA, 265 bp, Zea mays
gcggcggcgaagggtggcgagctacaaggcctactcggtggagggcaaggtgaaggcgtcgctgcggcgcgggctccggtggttcaagggcaagtgctccgagatcttccaccatggatggtaacctccgaggctggctggctggctggctggccggctctccttcttggacggtggcagggcccccccaagaaaggaaccaaacttctgaatatgttcgcgatttacttttcctttttgaaaataatgatgctcatgctccaga

SEQ ID NO: 357042 - DNA, 104 bp, Zea mays
atggagtactactgtacttgtgtctacttgagtactacagaaacagaatacaacttccttctttagatacagaatgatttaatattgagttgaaccacttgtgc

SEQ ID NO: 357043 - DNA, 256 bp, Zea mays
cgcgcgacaccgctcggccggatgagtctgctgggagcagtagcgacgacggagccggtgccgcgcgcgtggacgctgcggatgagcgggccgctgtgtctgctgctgctgctgctgctgctaccactagcacgccggggttcgtccgagaagacgcccttttgtccatcctagtcgattgcttcggccagtaggtagatcctatcttctgaacatcagtaggtcgcagtgctacagtacatatgtgctagacaat

SEQ ID NO: 357044 - DNA, 260 bp, Zea mays
ggtcggcccccgtaatcctggctccgcccctgatccgcccattccgcccgccgcgttctctgctcctgcggcggctcaccctcggcggctcggcgtctctaaacaagggtgcagtttgcgcggcggccgtcggcctaccagtagtcctgccggtggtgcacgtgatggccgatgggcacgctttcgttggtagccaggaagcgatgatgcctacctgatgtcctctgctcaaccacaattggtacgcttccgtttctttc

SEQ ID NO: 357045 - DNA, 258 bp, Zea mays
ctattgccgcgatctgttcctgggagaattccttccacggcatcaagcagcagcagcagcatgaagctcgtagctacactctacatagcgaccatggatccactcaagccgatacgctaagctatcctttcccgttcgacaagacaagagtagaggttattcatccatctgcgatggaggctgcaaagatggtgcaggatgagacacgagcttgatataggaaagtacgtggagctgctggacatgggcgtgcgcatc

SEQ ID NO: 357046 - DNA, 265 bp, Zea mays
gtctaaagaaatcgaaaggcctggggcaattgtgtctaatcatgtatcttatgtggatattctttatcacatgtcagcctcttttcctagttttgttgctaagagatcagtggctagattgcctctagttggtctcataagcaaatgtcttggatgcatttttgttcagcgggagtacaaaaacaggatttcaaaggtgtttaaggtgtggtatgtgaaagattccatcgtgctcatcaagagaaaaatgcaccaatgatgctac

SEQ ID NO: 357047 - DNA, 254 bp, Zea mays
cttagatcgcgatctgcctctcttttttggcagcttccttaacacatggctgaatcctgctgtttctattttagtagttttttgagtctggctttattggactctttcacttataggaggtactggcctccgtaatgagcttattgtttgtaacctggtactattttagacctttttcctcttcttaatatattttaaggcgcagttcccctgcgctttcgagataatctaattgatctgcttaccgcatgctt

SEQ ID NO: 357048 - DNA, 267 bp, Zea mays
cagacatctacaaatgacgactcaatatgggactaggaaagacttgaaattaggagctaaaccgcaatcgaaatcaatcaacctcggcggcgagtagtaggactcttcccagccggtctgggtgagacaccagaagcttgagcagccgcaggggagtttgcgactgcctttttgttttgctttgctggaacggcagacttctttgcgggactgttccagtagtacaccatctggattgcgagaacagcattgagaacaaaggcagcc

SEQ ID NO: 357049 - DNA, 217 bp, Zea mays
gctttgttccttcaacactctgctgaaattttttttgaactcaagacgtggagaattgttcagatccttagctgttcgcctgttcttgcgtgtaattcgttccttcagggagtggcgtctctatgtaaccgaagatgcttgaatcatttgttcgttcctagatgcgtcaaggtgtaaataagaggcatcgcaatcgcatttcgcagtagtttgtgtg

SEQ ID NO: 357050 - DNA, 264 bp, Zea mays
gtctacttctaccaatcaaatcaatctataccctaccaaataaaacaaaatgacactctcaggccactgcctctgcggcgccgttacctactccatcgccgtcgacaagcccctcatcacgggctacgaccactgcgacgactgccagcgccagaccggatctgcctactcattggtagcagtcgtccccaaagcggccctgacgctcaacggccccaccaaatcatgggctggcacaggctcaagcgggaaagccgtgcatcg

SEQ ID NO: 357051 - DNA, 270 bp, Zea mays
cgccttcgcaggtgattgccccctcctcgtcgtcacactccctagctgctaaggggtcacgtggtggtgtgctgcccgattggaattgggtgaatcggatgcccaaggggctcacctgggggattcgttctgaacttaacacaggttgatttgctggattgaaggtcccggattattctccctggcttctcatgtgtttgcatcagtgcagatgcaagttagtccttattaacagaggattatacatttatactcacctctctctctctc

SEQ ID NO: 357052 - DNA, 266 bp, Zea mays
cgcgcgaggcgtcaaccacgacgtacacacggagcatgtcgtgcccgcctaagctcgacgacgcggaggacgccggcggggtgacgagctcgctgggactggagatggtcgaagccactgctgccatggagaggtcggccacgtaccaccccatgaggccaccgctgcctccactgatgaatgaccgacgacaagattaggactataaagcatacactccaccttggtaatcgaactgcatagtacctgtgttgcagctgtgtact

SEQ ID NO: 357053 - DNA, 216 bp, Zea mays
ctcttaactacttttctggcgttcctgacaaacaggatggcgctgttatgtagatgggccttttccctggtcctggggcttcctgcttgcttgataaaaggttggtatcacccgaccacggtccacgtggacgatattacaagatgttcattgttcttggcaagaggggtcatgaatgccgtccaaatctgttggagtccgtcgctagtgccactg

SEQ ID NO: 357054 - DNA, 247 bp, Zea mays
cgggagagtgacttggccgtggcccgtgggggggagagtgagtgctgccaaggatcgaatcaaaggaagctaggagatcttccagccgccggcaagatattaggcagcagcagtacgtcgagaaagatgtgcaactgcatggaccgagctgccgtgccggtgaagagggtctggctcggcatcgccgtccgcctcggcctccgccgaaagaccggtacgtacgtacgtacgtctgctatattagctg

SEQ ID NO: 357055 - DNA, 249 bp, Zea mays
tgtaaatccaattgaagaagtggaaggagctactaaagcgggaagggagatcaggttttataattcagaggtcagttttcttcaatcgatcgcatatgatttcttgtgccaatattttttttttgattcagcctgtgctgccctttgtcctagcatgcagaagtttatcttaacgccatgattaacagcttttatgactccgtccgtagtaaccccgagtctgtgtttcatttcatcatttgtgatatg

SEQ ID NO: 357056 - DNA, 253 bp, Zea mays
cggctcgaggcaagggctcgccgcggttgtttgcatccttctccacctcctctcctccctcctcctctctcctcaaagatgtctggtctcgctgcgaaggtgtggtcgacgattgtgcactggcagacgggacgcgatgccacggacggctacacgcgcagcaactacgagaaccacatcaacaaggtcaactcgcacttcgaccgcaacctgaccaagtcgaagggtgacaagtacgacgagcagcgtgatg

SEQ ID NO: 357057 - DNA, 250 bp, Zea mays
gggatacaactatgcttgacggtggtggtcttgaagatcctctgattaacacacaacagggcataaattccttggtgggtttggaagaggagagggcatatatagcgactggtttgagaaaattggaacagaagctccaattctactccaacaacagtgtttccgttgagttacccagtcctgatgttaaggatgacctctccgacaaagtatatgtcacagaagacttctcgttacactgccaggaaag

SEQ ID NO: 357058 - DNA, 247 bp, Zea mays
gagagaactaaaagcagccaccaaaggaatcggacacaccgtcaccagggtcccgggcgccggctctggagatcgaacctgtgccatggaggatctcgccggagttcgtctactccgcaaacgctgcttgtactgtgggtagcaacatcgacgccatcatttcgggaaagcctgggcctggccaccatcgaatcgtgcaggtacctccccctccgtcgagattcgtaaaggtcaggagtagttatgt

SEQ ID NO: 357059 - DNA, 258 bp, Zea mays
agacgcagaacaggacgccgagcagggagcccgcggagctcgcgcgcaggggcgaacgccatgggggacgagctggagcacggcatgggaaagcaggggcgtgcccagggatacaaacgcctgccatggaaggacccaagggcacggcgaggaagaagcatgcgtggggaacagggacttccggcgagagccgaagatggacatcgcggtgggattttcatcagggtagccgagcggatgagaacaaggcaacggcgg

SEQ ID NO: 357060 - DNA, 143 bp, Zea mays
tagtaaccctgtgtctctgactggtgcgcctgtcacggcttcatcgaagaaacgtggcataccaccagaatcaccaatcaccgagtagtcagctgagccgcttgaaaaaccttcccagcctgaagctgaagagatagtagacc

SEQ ID NO: 357061 - DNA, 266 bp, Zea mays
caataaacccgccttccccaccactggtcatcagtctccactccacgcccgacagagcaggaggactcagaaatggcaatcccagtgcgatcggctgccgcgccccgccgcctcgttccgtcgatacctccgtcgagctctggacatgttcgaggactggcgtgcttcggtacccgaaccgggcctcgcggtgcaagaggcttgtcaatggtggtcgccgactccaccagccgtcgggccaagcaagcggacggcggggacggcgt

SEQ ID NO: 357062 - DNA, 140 bp, Zea mays
agagtcgctttcgtttctgtcggcttcgtctgtttctgtacgccgcctgtcagctttctttggccgccgttctactttccctcttctccctctctgtatgtagtcttgaatttcacctgccggactattactcggccgcc

SEQ ID NO: 357063 - DNA, 266 bp, Zea mays
tatcacctctgccctccagttgatcatggtcatgctctcttggatcctcacgacatacctcgctcgacgcaccatctatgtctatggtcaactcatcaactgtgcattcttggtcgcgctcggtattgcagcttcagttggcggtggcaatgcggctagcaatgcgcaagatcacttggcttgatcgtctccgtcctgttctgcttgggacccgcccctgcctcatgggtcatcatcggcgagacatcctccgttcgtctcaggcc

SEQ ID NO: 357064 - DNA, 264 bp, Zea mays
tcacatctcatcagcacatcatggctttctctcatatcgcacaggatttccgccttgacggctctttgctcattgccaccgtagccacagacgctggtgaatgggttgagagcgtgcttgacattaacgaatatgtcggcaacaatgacggattctttgagtttggaggcagcggcatctttgacactatcgacatagactcgtggagactggagggaccactgctcatcactgcgatgtacagactggatggctccttggcgg

SEQ ID NO: 357065 - DNA, 268 bp, Zea mays
cgacactctaccattgattccatagcagacttcatcaaagaaccagtcgttattctgtcaagatgcatttcacaaactccatcgctcaagccattctctgcctctcagttacaattctccctgtcgcacagtcttcaatcgctatcgggaatcaaattcgtgaaggagggacccattttaatgtctcctgggttgaaggagtgaatccctgccagtccgacgtcgagattgcgccggaaagctccagagaatgtgaccaaaacttttc

SEQ ID NO: 357066 - DNA, 141 bp, Zea mays
ctcagcccattgctgcggcggcaagtcagcaaccccttacccgtccccacgaactgctcgccagcaccgccacctccgattcgcgtgctgcgaccgtcgattgcgaacccgaggcgagccatcgcgctgcacatccagacg

SEQ ID NO: 357067 - DNA, 263 bp, Zea mays
attttccaaaatccgtcctaccttatttataaaaactacatgaacgccaaaactttgatcgttgtcttcggattacttgccttggttgctgctgatggaaacagcactaccaacgatactaaatgcttcaaatatacctgcaacagcaccttaaatggatctaactgtggttacaactttaaagattaacatgcagtttaacttaaagcttgcaatgaaacttaaatgtgcatcaatgtttaccccggagctgaaactgctga

SEQ ID NO: 357068 - DNA, 134 bp, Zea mays
catcatagttctgtcctcggctctctgcgttgctagcaccgcagccgccgttcgtttgatcttcaacaatgctaggatctaccacttcttcgccgacatgtagcgagcgagtagtagtgggattgacatgtgta

SEQ ID NO: 357069 - DNA, 124 bp, Zea mays
caccagaggctgatggagcagaggtcgtaggcacaaataggtggaggccatggatcgcgcatacgagacgtgaattagtggagcggaaggggctagagtgacttgatgaggcagcaggacttgc

SEQ ID NO: 357070 - DNA, 265 bp, Zea mays
ctagagtggtcatggctttatgttagtaaagtcggttctaaaactaaatattttgagcatggtaaacatcttaagaatctggataggaatgtaactctttcgagtagaaatactttgtggaatgtttagatggttgtcacttgccatgaatcgaacttttaccagttttatggacgactatattttcatttttatgtttaagcaaatttgagaaagtttctataacaaaaaatagataaattttctatcggacacatcatttatt

SEQ ID NO: 357071 - DNA, 189 bp, Zea mays
tggtcggtccacccaatctcgctgcggcgggcgtctgtagtgtagagcctgcgttacgtgtacggcgcgtgtacgtatacggccgtagcgtacatgctcgccttcgcactcagatgcacaatataacacacacacacacgctgtatacactggatcctaggtgttttttttagcttagctaggaatgca

SEQ ID NO: 357072 - DNA, 263 bp, Zea mays
cgttgacttccagctcccaattgctcctccgcaacctctattcaagatgattgccgcctccgctacccgtgccagattggccaacgcttttgtcactcgccttgctttctctactactcgcgcacaacttgccagtccctaccactacgctgagggtcctcgctccaacattcccttcaaccccaagaccaagtacttcttcttccgttactgggcattcatgatcaccggttttggtgctccattcgccattgccgtctggc

SEQ ID NO: 357073 - DNA, 265 bp, Zea mays
cggctcgagcagctaatttgagcacattatttaatgatttaccatctcttattgatagatattctgccattttgaaatgttcatataaatttgaatcgatcgaatgccaagcaccttataaacatactttacaagagtggaaacatgctcttgattcgaattcgaaaataaatttgccaaaatgggatctaatcaatagtccagctgtttttgatgtgtttgatcaattgcctagtgagcagcaatacaatcaccttgtcttaaa

SEQ ID NO: 357074 - DNA, 266 bp, Zea mays
ccagaaggcggaggcgctctccgtcgcaacgctagggattctgcggtaccgcaccgtgaaagaggggttccacatactgccggcgcatttcaagaccatcctcgccttcaacctggcggagaaactgcccaagggggacaagattctggaggcactgtatggccagctcaagcagcactgcccgaggttcagaggaggccaggatcttggccagagcagttccgaggaactgatgcttgctgaccccttcccgctctctgcgtata

SEQ ID NO: 357075 - DNA, 258 bp, Zea mays
caaacatcgggacgtggaggagaaccgtgagggacaggctggaggaagctgtacccagatgcctcaagaagctgttcgagctgccgccggaggaagacgacgaggacatgaggtggaaactggagaagaggcgcaagctcctgctcctgcttgccatcctcgcagccagcctcacctaccaggcaggcttgaacccaccgggcggcttctggcaagagaacagcacaggccacgtcgtcggcaaccctgtgctcaacg

SEQ ID NO: 357076 - DNA, 187 bp, Zea mays
cggccctggagagctcgggggtcatctgatgagttgggattggagcttctgtccgaatgtatactagcaagaagtattaggctgctgcctgcttttagttgagtgcatctcttctccatgaggatgacatgcatggttccttctattctagtcagttaaggaggtgacagtgttaattacttattcc

SEQ ID NO: 357077 - DNA, 257 bp, Zea mays
  unsure (1)..(257): unsure at all n locations
gggacaactacaaacgcgacgagagagtggattatctcctgatcgacgaccgtaccggtgaagatgagggtctcatcgctgttcagcgcccaaagtttccttgcggagaatatattcagcatcccttggcaccactgggcacgaagcctcacgttgagcagggtacagttcatgctcagattgtaattttcagcggagattggtcttcgggaatcttgacggagcactgnctacagaatgcatattcggagatcatc

SEQ ID NO: 357078 - DNA, 275 bp, Zea mays
aacagttcatcctccactttcgcccgttgctgtagctgtaattgatcgactgataacgccctcaaaacgaccaattccttcccttataactgttgtttatttcccatcgttgttcaaaggccatggccatcatcaagccaaccgccagcactctcgtctcgccccatcgcacctctcatcacatctcacattgcgcctgatccgcctctggcttgcctctatgcgatcgattgcagccacgacgatacgccacggtaaacgagttcaacgataag

SEQ ID NO: 357079 - DNA, 264 bp, Zea mays
gcagttttctgaatgcaaatcaaaacttatttgaaatcaaattcatttataaaaatttaattttactttaattttgtgtttcagcttgtttctacatttgataagaactcatttgcatattcaatcatgactactgtgaatccaaaaattttcggtttttacgaacgtactggcgacctgtggtggtccgactttcgaacccatttctaccaaacttggaatcaaattcgagttccatactttgtgcgttctattgctggtgaa

SEQ ID NO: 357080 - DNA, 275 bp, Zea mays
ctcagtcttcaccaacatctctccgaaacttcttctttcctaccaacaattcacaatggcaatccaatccgttcaagtgcgacctcagaaggctaccaacgccgacgaaattgagacttatatcgagtctctgattggccgaaccgtttctaccacagcctctatggtgcctgttttctctttccagacaacagaagtgaatgtgcagaagatcaaggagaagttcggtgaccagatcatcgttgacattgtttaaaatcacatacagaattcgg

SEQ ID NO: 357081 - DNA, 265 bp, Zea mays
acggctcgaggttgaaacatagatcgatatcaaacgaccaaagctcgaaaatggcggaattgactcgcacgttgcccgcatcatggtatcgtagcccacctctgtatcagttggaaagacgagctgtatttctgaagtcatggtacctgatcggaccggtcgttagatttttgaatgtggatgacaaagtcagctccgaaatcgcgcagagcaaatctatgctgtacgaatttctgcaaccacagaatttccggggaatgatgaa

SEQ ID NO: 357082 - DNA, 268 bp, Zea mays
tgcctcggagagcctccacgacgtcctggacccgcgggtcgccgtgcttcccagggagagggacgacatgctcaaggtgctcaagatcgccgtgctttgcaccgcaaagctgccggcgggcaggccgaccatgagggacgtggtgaagatgctcaccgacgccggcacggggccctgcagcccgcgcggacagccgccgtcaagggtctgcagcaacaagagctgctgctgaatttgtggagcaggctctgcgtctagccaccgacac

SEQ ID NO: 357083 - DNA, 278 bp, Zea mays
cccacccgggcctgctaatcttatgggtgtccttgtattgtatctcttgtgcaggggtgacatcccgttctgtaccgaggagtgcaggacggagcagatcgaaatggacgaggagatggagcggaaggagagcacccagaagaagaagttggcgccgagagctccccctccccgaaaccaagagagctcagaacccccatgataccaccacctggaactaccgctacagttgcgtatatgggtttgtgtttttttgtttacagcccttgcgccattgg

SEQ ID NO: 357084 - DNA, 264 bp, Zea mays
atttccctctcgcgcgccacggtgagcaggccaccataaaaatatccaggccgcggtgaactcaatcctaatccaaaattcgttataagctcagtcggggtctataaattggaggcaccccctgcttcgcctacttgttacgcgcccagcacaccgcttctcgcctcaaatcatccactgtagcgcccttatttggatttttccccaaatctgtcatctgcgccgccatgaggcaccgcgccgtggccagccacccacagaaaa

SEQ ID NO: 357085 - DNA, 260 bp, Zea mays
ttctcccccaagttcatcttgtgcagttgtgctaacacgcggcgccccatgccctccggcgccgcccacctccaccgcctggaatccaggacatccggcgccgcccacctccgtcccctgtctgctgcctcgactcaactgttttgctgcgatgaggttattcaggggcaagcttcactctcttggtgggactcaatgtggtgtctatatagctcagaactacaacgttccgaacgtcaagacgctatgcaacacatctg

SEQ ID NO: 357086 - DNA, 269 bp, Zea mays
atcaagttctaaaatcaaattttacaactttttttttaatcaaacttgtttaaatttaattaaaaaaatgaataccttcgtacctttaattgttttgtttgcaatcgtggccatgttctcatcaggttgtttcgccaacccgttagatgctccaaacccttcttttgatattccaaatgttccaaatatgccaaaacccgatcaatttacggaacctctcaaagattcttttaatcgtttaaaagacaatacacaagactactttaatc

SEQ ID NO: 357087 - DNA, 258 bp, Zea mays
ctagttctagatcgcgagctgccgctcgcgatctagaagttcggtcccggatcagcgatcagatcaaacgaaaaccacgacccatggcttcatgttatttttgcttttgaacaatggcaggatacacgcctacgatgcgtgcacgacgacctgtttgcgtcgacggagaggcgatgcaagcggagagaagacgcaaagaagactgggtttccgccgcagatagcagcggtctaagagcagcacaagcaacgacgacgt

SEQ ID NO: 357088 - DNA, 260 bp, Zea mays
cagcctgaactatctgaacctaattcacctgtctgccttgtttcaccatgtacaggctgttcaccaaacacaaccgaagaggacgacaaaagcaccataccatgttcagaaattaacactgacaagaacattgcaactaaaaatggtggttcaagcctgaggtcagatttggagccatgccttctgagttctgaacaagagtttatttccaaagaagtgcagtctagcaagcatgagaagagcaacatcacattccaaag

SEQ ID NO: 357089 - DNA, 270 bp, Zea mays
cttttgatagctgaacacagctgggttggaattcgacgctccagcaagcagagcgttgcatagcagaaaagttgagcactattgcctccagaagaagccgcccgtctgccatgcggcttcctcctccctcgagcatcatcgcgcatcgcggcacgcggcccctccatggagctcctccagccatgccgacgagctacaccagcgggtgagcgtcaccacccccggtggagcgtctcctacaacccggcctcagcagcaccgatggcgtgc

SEQ ID NO: 357090 - DNA, 269 bp, Zea mays
cttgatgcttttgattcaggctgccgttgctggcacttttaccttgatttctgacagcaagcccttgtatattgtctggtatatgatttcaatgagttgccaaggaggcactttgaccatgcaacccaccattaccgctaaagtctttggcccaaagaaatcaagtatgatttatccctttgtgtacttgggattctgtatttcaacattagcagcttcttcttaacaagatttggtcaagaaactattggatggaattctatgttttg

SEQ ID NO: 357091 - DNA, 154 bp, Zea mays
atctgaatcaattgaaaatccctccaaatgaaatccaggccgaatgacgcaaagaagccctcaaaatacacttgacgaagagcttctatctcctctttgccttatgcagtgtctcctttactcttcctactcctcagcccgctccggtggacga

SEQ ID NO: 357092 - DNA, 258 bp, Zea mays
gtcacgaccaattcagtttttaatgtactcttatattttagtggttgttttatgtccatcttttgtactggactttgttttccttgaaatatatcagttgtgaggcactattttgagtgtctttataaaaaacacagttatgtgtcatgtgtttctgtgatctacctaaccatattcagaggattgttttatgaaatgcactatttcataagtcatcgtctttgtggagtcactgcaaaagcatggttgctgcttcct

SEQ ID NO: 357093 - DNA, 262 bp, Zea mays
tcggcaggcagatccacataagaagggcaggagaacgagggacatggcggagaaggaagcaccacggtcctttctcgctcgccttcctcctctagatcgttcagcggacattggaaatgaagagcagcagcgctgcgtcgtcatcacgcatcatgcagatccagtcctcacagccccgctgctgatccatgatccagagcagagcaaagttcggaagaaggcactgaagtgtgcagcccaactcaccttgtcgctggtctct

SEQ ID NO: 357094 - DNA, 256 bp, Zea mays
gctgcctgtgctttctttctcttcctgttattactacctctctagtctgtacttgtttatttattttatttatgtttcttctgttttgtttatttattttattattagggttccatattgccatttgtacacagtttttctctcttcttattattgactacgattactctgattagtgtatatattgtttccatcagatgaaggcttgataatcgctctcaagtctcaagttaaatcgacaaaaaaataaaataaa

SEQ ID NO: 357095 - DNA, 186 bp, Zea mays
catcaatgcatcaaatgagttcaacactaatttccaaaaatctttggcatcggaaagtaagcagaagtccttacaggatcaagcatcatccagtacagaggctgccaatgtgaatccgcaggatttacatactcagaagtcatcacagtgtcatgcagcatccagcaccagcaccgaggttccaaa

SEQ ID NO: 357096 - DNA, 274 bp, Zea mays
gtttacatgaccactattcaaataaattgtttgtcaaactaacctctcctgtagtagctccctcccttgcataagctcctcctggtgctggtatcactggtggtggcgtgttgtggccctgatccctacaaaatcaagtttagtcaagatttgaaagtttaatacaaacgacaagtcttaactaaattgaagcacctgaggtggaggtggcggagatgtaacccccactgaggcatcggcgactgacattgagggaaaacaaatggttattgtt

SEQ ID NO: 357097 - DNA, 272 bp, Zea mays
ctccagtcatgcaacaacgcgttgccgacacttttgcagtagtgtaccgagctataggctgccacatggcgtgatacagccagagccaggcacatacggcacatggctcttgatatatatgacggctatggatctggaactgaagattaaacgggggaacatccatgtcaaggcactcgcctgtcggggtccaatgtgctaacagcgagcacctaaacatattatatatagagatccaaatatgtcacccgctaaaaaggcattttttatgt

SEQ ID NO: 357098 - DNA, 279 bp, Zea mays
cggctcgaggaggcttcaccaccagaagaaggtatctttcttgtcttccctttggtcgtggctggcttatctttgaagccgttatgcatacacagtaaaggtttgattgcattgcatacatgattctcatcatccattgcaagttaagttgttgcttgtagaaggaagctaacaggggtggtgatgatgcctttttgcagcccccatcgatggcagcagcagcagctgggctagcaagagcactcgcaaggggggaagagggagggggagtagccgagt

SEQ ID NO: 357099 - DNA, 288 bp, Zea mays
actcgagcggctcgagcggctcgaggacgaacgatacagttggatcattttgcaaagatgtcacggaagactcgctcaaaagacatgcagagctctaaaactagaagcagcaggagacaaaagattgcagatctagtggatggttcaacggaccatgacaaggagaacatactagtcgatagtaattttacttccaatacaaaacgtggaaataacagcatgagttccaaatccaacacaaagacattacaaagtagcaaagctgtgcttgatgagagtagtgtgatc

SEQ ID NO: 357100 - DNA, 278 bp, Zea mays
aggcaacttgtcttggtgatgccatctcagctttagggtgctaatttcgtggtgtcagttcagctcagggaagtagtggtagtgatcagctatggtttgtgtgatgcatcgtattctttgatattatatttggttgtcgttggacattttgtcagcttgaatgcaaggggttatccttcaattgagttatgactgctagtataaagttgtattccatcctttctaaattataggtcacttataggctttttttccaatgccaattttctcttatcttg

SEQ ID NO: 357101 - DNA, 109 bp, Zea mays
tggtatgccatctccgtcctcgcggtatattggaataactgtggctgtggtgtcctaatgtctgtatatgcatatatcatatatgttgacctcaaaagaggtttagatc

SEQ ID NO: 357102 - DNA, 114 bp, Zea mays
cggctcgagacaagttccgcacggtcttccgccagctctcccgctatgacgtcatctaagtgaacaacgaccgcgaggtgcactgcttcccgcggatcatcatcggctccacct

SEQ ID NO: 357103 - DNA, 274 bp, Zea mays
cggctcgaagccattctagaccggtgatgcccaacatgacctctctgcatggtctagaattagtggtgatgcccaacatgacctctctgcatggtcggattggctatgcttgtacagattaaatacattgttaaaaatagtaacttccctatatgtcagtttcccagtagattttctgaaccgcagagagtgtatgcaatcgagaagaaaataaacatggagcaagaagtaatccagaaaaagttagaagccatctcactagcctcagctccat

SEQ ID NO: 357104 - DNA, 266 bp, Zea mays
cagaaatctcagccttgtctaagagctcatcaatcacaaccaaccgaacacacacacaaagcacctccatcacctactacaacacctctacaaatattcacaatgggcggtattatgtcttgcatccggtcatgcctccagacaattggggatgtcatcatggctatcatcagtggaattggtagaatcttgaccgccatcgtcaacggagtggtcagcttctgcgctattctggtccgattcttgacctgcggctattgcggttc

SEQ ID NO: 357105 - DNA, 266 bp, Zea mays
caaaccaaaaataatgcgtagatggatctcaccaaagaaggaatctgacgctacctctgtgcgcagaccatctcaccctccatctagatactacagttcaccagctgcactaggtattcgatccatatctacagatggtaaaatcagcgttgtgaatgatgcacctttattatcactaaaacaaccatatggcagcaacttgacacgagaagcaacatctgcacagtctgctccatcgcctccacaaaaatccttgttactaggtg

SEQ ID NO: 357106 - DNA, 271 bp, Zea mays
agatgagcaagaagagtatcatgaggtaaatgagtactacgaaaaagatactgggcttgaaggactgcaacacgagttcgcatcgatgggagattgaccagatgaagcatgacttgaactgaagacctagaatgaccgccgaagatacgcctaatacattggttttggaaagtatcaagtggatggataaatttagttgtgagaggactaatcgcaagaccataatctaattgagcacggaccatttggctgtaaaaaggacatgctatta

SEQ ID NO: 357107 - DNA, 100 bp, Zea mays
cgtgaataagcgcgtgtggacaggtgacaaaccacggcatcccggcggaggtcgtggagggcatgctgcgcgtggacgcggaactcttccacatgacgta

SEQ ID NO: 357108 - DNA, 268 bp, Zea mays
gttcgacgggaatgtcggggcgtgcttcaaccctgtcatatcctacgacattcggcaggtgctgactgccgtgccgcttgccggagggctcgtcggcacgctgctcttcgccaccttcccgtccacacggcacgggatcggattcccgatccacgcttcctgagatacgcatatcgttgttgctacgaactagcagctgatttctttgggttgcgtgtcttcatgttcttagagctaggtttgttgtgccggtgtcgtattgggaggg

SEQ ID NO: 357109 - DNA, 118 bp, Zea mays
tggagggcggaggaatcgctctcagttccccccagtagccgccctcaggtactaagcagctccggtctgcgtcgagtcgtcgcgatggctcagtcatgtgagtcttctatagactagg

SEQ ID NO: 357110 - DNA, 244 bp, Zea mays
gtgattcagatgctgctttatcctagcaaaaggcccacaacaagactgcttactactcaaagcttgcaactttctcatttcgtcagaacaatgacaaagtacacgattgatatcacttcggacactgtgtgcccgtggtgctacataggtgtatcccgcctcgaccgcgccatcaaagagcacaccaaactccacccgggcgacacattcgacctaaaatggcacgcattctacctcatgcccg

SEQ ID NO: 357111 - DNA, 281 bp, Zea mays
caaggcgctcgaccaggcgtgggccatcagcaaggccgacacggcgccgtactggcacaaggagctagaagtacacgtacgacacgagcgaggcgctgtttggcgcgggggcgcaatagagtaagacagggaaaccaagaacagaagatgtacactcaaaggaaaccagaacctgacccccggctcgaaccggacagtgactgcaccaaacaagagaagaaagaccccaaagcaccgtcatactcgaatcgctccgagtcccaagtctatgtctaagtcta

SEQ ID NO: 357112 - DNA, 272 bp, Zea mays
ctcggttttaacgtttattacctcacgtacgttttctggtaaggttgtagatgctgccgcagtcttcactaacagctatagaagatgagagaactcgagccattggaggcccgatcggagccgtcacaggatcgacactagtggcgcggaagtgattagggatcaggtccaactacctcaatgatgatcgtcgtatcttcgactcagaccacttctttcttactcttttttgttggaggaggggaatttagcttctcgctgggaggtggacc

SEQ ID NO: 357113 - DNA, 273 bp, Zea mays
gttgttccaaattactccttcatcccactgagtgcagaaagacgaacatcatggatttccaggttgcaggcacagctcctattgctcttcttgaggtcaagggcagaaggcattcttaaagaatattatcctacaagaactgaacgggtggacaagccacttctggaccagattaaggtttccttgacaaataaattcagtcatatgatcctggtgctgcaaaagtccttgagagtgtattcaacttcaatctttcaattcctcttaacttct

SEQ ID NO: 357114 - DNA, 277 bp, Zea mays
cattcttaataagcagtttaagagatgttctaataacttgcctcagactcattcaaacatcttattgttgaaaaatctttggcttcctattatttaaatctttattcacatttctagattttagattccccaataattctccagaaatcataaattgcacttttctcagcaaatacacctaattcaataataaataaaatttaataacattatgatgaatctgtgaaaatctaagcctaaacctatcaagaatatttactaaaataattcaaatttc

SEQ ID NO: 357115 - DNA, 272 bp, Zea mays
  unsure (1)..(272): unsure at all n locations
ccnatgaagaagtgagatgctcaacagtaccaagaccttcaagaagcatagcattttcaactcttaacctgcaatccagtagcatgaaacagaaaaattattgtgaaaatgcatgtgcttgaaaagagaagttcgtgttactagtttaatatgccatcacatctagcagttagaaaagggccaaacagagttctttgacaatgcttaaccaccaagttactggtaacattttgctatgcatctacatgttccaatcgttgtatttgtaactg

SEQ ID NO: 357116 - DNA, 263 bp, Zea mays
gcagtttagcttgtttcagaaggaatgtagggctaggagtcctcaactataggatcaacttaccatatgagaagacacacgaactcatatccaagcaggactggaacgaattgtttgggaaagaccagatgtgatctctagaatgtgctttgtaagcggctacatcaaaggaaaggaaatctttatgaagaccagagaactctagcagggtgtctgaagacaaatgtgctagctgaaatgactggcctaagacctgtaaattg

SEQ ID NO: 357117 - DNA, 175 bp, Zea mays
ccatcattaggaaagatcttgggcaaggcgaaaagtatatcgtggacaacggccaccttgtggcgtggaacacaagctatgtcatggaacgcgtcgcgtcaggtggcatcatctccggcttgtcttctggagaaggccttgtttgcaagtttacgggccccggtaccgtcttcat

SEQ ID NO: 357118 - DNA, 165 bp, Zea mays
tcggctcgagcgccccgccatcctagcccctgagcccgcaatccccttccattggtggcatcacccatgcgttgcgtccccgccgtcgtcctcgccccattacgagtggaaggaggacgtccacatgaccacaccaggcaaggccatgcccctgcccgacgccac

SEQ ID NO: 357119 - DNA, 256 bp, Zea mays
cactgtcaaaaaccttgtagtcccctccatgttggcgagatcgagcttgagagtcttagctggacgtaccacaaggatacgatactcaacaatggcgactcctttcaagattcagctggaaccccagaactcggggcttctagggatgaagcttggtcagagtgaggcctcgaaggcaactgacctgctgcagtaggatctagagaaccaccacgtcttcttcaacgagtctggctttcacgagcatattgttcat

SEQ ID NO: 357120 - DNA, 256 bp, Zea mays
attgcttttcgtctcctgtccatcccttgtgcgctaccgctcctctcccttggcaacgacgactggcgccgccgctgccagacttcgctgggcatctcgccggcgacgagctcccaccaggattagagaaggtgatggcgaggagtgacagctgcctggcgcgcgtgggtgccggagttgcgatcggtggcgcggtcggcggagccgtcgggatcttctggagctagctactactgatccctggtgcttgttatgg

SEQ ID NO: 357121 - DNA, 257 bp, Zea mays
ggacggcaaggaaagatctttcgacgcacatctttggcaaactcaatccattaaaggtctgcgcaccggttatcgtcgaggagtttgccaagctggcacatcgactcaactttatgtatgcttatccgttgattgaaagcaataagcgcatccgattgacccaattcttgtcatcgacttactccactggaggcgccctccgagactctggtttcgacactcaggaggagagctttcatcaactggacccgtacttc

SEQ ID NO: 357122 - DNA, 261 bp, Zea mays
gtcaaggcctgatagtggtctttctgctcttacagagctggaccctggttcatataacaggatcagtaagagttaatggcccagtgacggattcaaggtatcctgctcaccgacagatcccacaagcatacggttaccgccaaatgcctgcaaggttggacagtaccaacccatcacaggccatgggaggttacacgctgcagtcacagaaggaaacattatttgaagagttgccattttgaagagttactcgaatccaat

SEQ ID NO: 357123 - DNA, 271 bp, Zea mays
gccaatccgacccgacacaatggcttccatgatcacccgccgtttcttctccacgactgtccgtcgtctgcagacttcctccaagcaggagctgcaggccgagtccaagcgagaccccgagatctatatcctcggtggtgtcatgaccctcgctctgggcggtgccggcctctacttcggccgatcccccactggagccacctccgagtcccccgtcaacgtcgaaagatggcctgggagagcggctctggaggcaagtactcctaccacc

SEQ ID NO: 357124 - DNA, 266 bp, Zea mays
atcgacgccatcgctctcctacgactacgaggaggctgcagctgctccctcgtcgagccgcctgcctgagctgaccctgcaggaggcgaggaagacgtatcacaggttcgccgagatggtggagccgccgagggaagggtacgtcctgacgctcaagctcaacttctccggcctcacccggcccaaagatcgcgtcaaggccattaaccaggtgtcgctgctgcaatcgtggtgctgagctcgcagctgaagcacatgctggggag

SEQ ID NO: 357125 - DNA, 273 bp, Zea mays
caaagcaacaccattatgaatatgaagtgtcccactgccaaggcgctttctgtggccaccctctcagctctgctcatcctcctcttctttgtcctgcgatgtggctcttctgcgtcgccatcgccgcagttgtctattgcgaggaggagcagaaggcttctgtggacgccatgccgtgatgccaatctcttgctcgacgcctgtgagcgggttcaggcagttcttcaggcgccagcgacagtgttcgagagcttgatgaagatgcccaagagc

SEQ ID NO: 357126 - DNA, 273 bp, Zea mays
aaatctctaaaaaaactaccttcttctctcaatgaaaaactcttcaattctcttactattctgcttcgctttcttttgatcaaacttttgccactcaccttgtaatcgttggtcagcttgcctattacgaaggaacagaagaagaatgggtctggtggtctcatgcagctgaagaggcagctgatgaagctcttgaatggaacactgaggagctagaagaagatggcgggtcgatgtagacttagatgttgcagcttccgatcctcaaataca

SEQ ID NO: 357127 - DNA, 202 bp, Zea mays
gcaagcgaaatgataaagatgcgttgcctggtatagcaaagctatatcgtcattaatctctgtttatgaagaaagttcagcagatgtatccaaatgggcacggtagtgtacatttggatacttctgctgatgctactgtcctttttggaacgaattttgctactgtggattgtctgcactaattatactgtttgaacctgag

SEQ ID NO: 357128 - DNA, 270 bp, Zea mays
ctcggacttgttttgtatagagtttttggttggagattatcacagcattttgcttcttttctttctttctttttttttttaaaaaaaaggagctggcgcgaggaatcatttagcactcactcgaacggacctgatcttcccttcctcagaaaacaccacagtggagcaaaaaaacgatgaggtggtctggcaggtgttgtgctacaatggattagcatagataacaaccagcaaaaaaaaaaaaaaaaaaaaaaaaaggggcgcccccca

SEQ ID NO: 357129 - DNA, 270 bp, Zea mays
ttcatgatctacaactactgcaccgacgccaagcggttcccgcagggccggggcgtgcccgctgaatgcaggctccggcgataaaggtggctggatgagcgaacgcgaagccacctgcgtgcgtgcacgacgatcgatcccctcgtcgtcgttcacttcagaccagagatcggtggtctggcgacgaatgtttgggttttttttttgccatgggcgatggcaagtaaatgtagcacgtgacgcacgtcgcagtgatattctttcatctgt

SEQ ID NO: 357130 - DNA, 280 bp, Zea mays
gcttgagccaggaactgaggttgacgagacgggaaggaagtggaccaagagagcgagcctctcctctttctttccctgctacaccatcgactgtgccaaggaaatttttgtcggtagaagcgtggactctctcaaggatcgactggaagaagttcgcagagatagcagcatgcaaccgggcttcatcaaggaggtggatactgtcccgaaaaaagactttgcctgggccttaaccgctccttacaggtcgcgaacgtgcggctacgtcttaggagcctgt

SEQ ID NO: 357131 - DNA, 148 bp, Zea mays
gtcagagcataagctcagcgtactcaaaatcccaatctagcgagccttcttgacgaacttgccaatgtgggctaagcttactcgtgaggctatttatagtgtcgtcgaaggattctgcaagtagtccaacaatcgttgttcttcatgg

SEQ ID NO: 357132 - DNA, 174 bp, Zea mays
  unsure (1)..(174): unsure at all n locations
ctcgagccgctcgagccgtttcggctcgagcgctgcggactcttcgtccatcaaggttttctcactcagatcccgccangtcacttgatcctcttctccgtaccaccgatggtgtacgcggattcctggtacgagttcgtgtgagctgtccgtgcagctcttccgtggagaccc

SEQ ID NO: 357133 - DNA, 267 bp, Zea mays
agaattcccggttcggaccaatcagatccccagagagatcccagcaaggaagtatccatcgtggcttcttgtccttggtgcaggaacactgccatttggtaccctgtttattgagctcttcttcattctatcgttcatatggcttggaaggttctactatgtgtttggtttcctgctgattgtcgtgctgctgcttgttgctgtctgtgccgaggtgtccgtgtacttgcatacatgaacctctgtgtggaggactggaggtggtgg

SEQ ID NO: 357134 - DNA, 144 bp, Zea mays
gaaaagagccgaagagaaagctgctcgagaggctgaagagcaggctgctttagaagctgaacgactggcccgagaagccgaggaaaaagcagctgagatcgcaaaggaagacgaagaaattgctcagttgattgacaaacagcc

SEQ ID NO: 357135 - DNA, 267 bp, Zea mays
gcaagcaccagtagtgcaaacaaacagctaggatccagccatagagagagaagggattcatggctgggggagcgagacacggtagcgaggacgatgccgagacgacgacgacgaacgagggacgccgcagcagcgaccacgagccggggccacgaccaactattcggagcacaagcagctggtgccgttccttgacatgctccaagtatgccgaccgcacggacgccgcgcttatggcggtcggcacggtggccgcggtggccaacg

SEQ ID NO: 357136 - DNA, 146 bp, Zea mays
  unsure (1)..(146): unsure at all n locations
ttttcgtgtagccatcattcttctcatcgccancaatggccacggtatgggtctggacctcggcagtggccattggtggcgatgagaaggctgatggctacacgaaggacgtgagcgcggctatgttagagcctagtagctaagag

SEQ ID NO: 357137 - DNA, 259 bp, Zea mays
cggctcgagggctgaaggaggccctatacctgcaggagcagtagtattcgttcctggcgaacgctctctgatgattcttcgaatattgccccggtatacttgctagttcactctagtgagactggcgagtgtccagtggacagtgtgttatctatgggagcgtctctatacccggtcaagatggccaacgtcttctggaggcagcggtcgattgtttacttgaaacattttctgatgtaacgggcaaacccttcgttct

SEQ ID NO: 357138 - DNA, 139 bp, Zea mays
gccgctctagctctctctcctcttgcatggcggctacaggagaccccctatgcccgcatagtttgccgctctagctctctctccccttgcatgccgctctagctctctctccctccagttctggcgtgtcactgttatg

SEQ ID NO: 357139 - DNA, 261 bp, Zea mays
gcaccttctgcttagtaaaagccggcgccgtccatcctctggtccagacactggaaggcgaagagcgcggagctgatggagcggcgctggaagcgttgggcacccttatggaggacgaggtctgggagaacgggagcgggtgatagaaagggcgccaggcatccatgctctgctgaggatcgccgaagccggagagccgagctcccaggacaaggcgatatggatgctggagaggatgttccggctcgaagcccacaggga

SEQ ID NO: 357140 - DNA, 264 bp, Zea mays
gccttttctgatgctgttgctagcagggaaggcatcccatcccaattggattgtactcctagtagggctagtcagttcagttggtatatggtggtaggactgatttgcagtagcatcttctcctaacctatgttttatgactttatttatgtcgtgtgaatggtggcggtgcagcaggctaatgcagtgaagttgctgggttttggtagtgcgggtgtctgcattgtgttcacttgttaattccaattttattttttgtgatta

SEQ ID NO: 357141 - DNA, 140 bp, Zea mays
gttggaggggtttggtgcaacatgtcgcctcggccatcgtcaagcgtctctccgagaagacggccgctccatgaacgcaccccatcacagacaaactcggcggaagtctcgcccggtcgaagaggaaaaagaagagacga

SEQ ID NO: 357142 - DNA, 265 bp, Zea mays
gtaacctacgtcctatgaatgaatatatcatcggggatggaacgaggagaggacattattgaggagaagcaaggtatgtccgcatgcgttttatctgcaaagcttcaattaccaccatgtctccgccctgtgagctgacctctgcattgcgttgcgatcgagatttgttcgtaacgaataattaatgtcagtgatgatctctcgtacgtagctggtggagctgctacgagtgatgagagatcgtcatcccaaaaggtcgccgatg

SEQ ID NO: 357143 - DNA, 143 bp, Zea mays
cgcactgaactatctaattaaccgccgctctagctagcacacaacctacaaaaagaataagctgcctgaaatatttgcttggcagagttgacatttacattcgatctctcggttactagtgtagtagtagtgtaggatcggca

SEQ ID NO: 357144 - DNA, 265 bp, Zea mays
attgggatgctcacggtggccggcacggtggaactggaactcgccaccataataaagaagctgaaaaaatcttccatacaggcgctaccatgggatgtaaggtcaccgacggtctccttggctcgtactagcgtggaggaggcggcgcctatcccaaacagcacgctcaggaggagtctgattatcagcatctgggatcgaatttgttctctgcagctgcgtgtgcaagattgttttcatccaagcatgccgtgactaattcgtc

SEQ ID NO: 357145 - DNA, 252 bp, Zea mays
aaaacatttaacataaaaacaaatagaaaaaattcaaaatgttcaaatacagtttgcttttgttaattagcagtttagcgttggcctctgcaggttacagtcaatggatgtcggcaaatgtaactaatttaagttctaaacctgttatgctttctgctgaaacgaaatggggtaaactacatcctaatggaaatccggaaaaagagttggaatttgtgcggcatgtgctagaaccacatcattcaaccacag

SEQ ID NO: 357146 - DNA, 291 bp, Zea mays
tgcagagcgcacactgttggatgtttggattctgtccgtttttaaaattaagggcgcaattacaaggaactatcgtggagttgctcatagtaacatccaggactttagcagcctccacccttgaacaatttgcagctaattagtaatagtcaggactttagcagccgccctcccctcacccttatgtatcaggctatcagcttgcttgcaatacaatacgaagaggagcagagcagcaggtctctccatggatgcaagccaggatttgtgggactgggactgggaggtggt

SEQ ID NO: 357147 - DNA, 288 bp, Zea mays
ttatacctgtaaccactttgagagctggcgtgaacttatccttgggccggcaaccgttccgctggcggggatccccgtcggttcccggacggcacttgcagattttggtttcatcactgggtaaggcaaacaggcaggcagcatagcaaatgggacgtgcatatcaatggactacctacctctgcatccaccgtccagcagccgaagacttcttttctgctatgcttgattgagagggttgtgcatgcacccagttctgcctgtggcttgagctagtatatttttcct

SEQ ID NO: 357148 - DNA, 279 bp, Zea mays
tcagaaccaactgcaaaaaatggaggaagtgtgggtcatctctcgtgtgctaaagatatcacaacctagctattacctaccagtttcttatttgatacgatgggaaggtttctcgagccagtacgatagttggcatacggaaggagaattagaagaaatggaagtcgaaaacctacatctcttgtacgtcagacctaagaaacccgcaaaaccacccaaagaagggccgcctaaatcgaaaggaaccaccacgtcgacgactgtaccttcgatgcctca

SEQ ID NO: 357149 - DNA, 279 bp, Zea mays
tgaggtcatgggcaagattctgtttcagagctatgtcatttggatcatgccgtcgacgctaattctggtgctgtgcgcgctcgaggtggtggagtgggcgaagtgaggtggttgtggtctcgtgttgcgacacaagactgtcgttccttttctctttggtctttttctctctatgtccactgcatcgttggccattcctaccaacctgaactggccacggcggcgtttgtgttttatgcatctgtatcataaggtcatggttgggaaggctctagcatt

SEQ ID NO: 357150 - DNA, 279 bp, Zea mays
caactgcttactttttaaacaacataattctcaaacagactttctctctcgaaagatcaaaatgtctcattcctcctgccccaagtgcggtgctgctgtccaaggcgagaacaaggcgtgcggctcttgcggcgctacctgccccgtctaaatccaactctggtacaatatctgtgagccagcacgaatgacttggaattacaagtgagcggaacgctcagcatcgataagggttggattaggatcgaccttcagactgcttctagtacatacatgctc

SEQ ID NO: 357151 - DNA, 274 bp, Zea mays
gtggaattctgctgatcaggggcccggggcgaatgggcgatgggtttgccggattcgaccccacggagagcaacctcgactgtgtgggacttgggagccaagcagaccaccgacagaagaaacccgaaggtgatgtgcgctgctgcacgcgcggcgggcctgtccccaagttgacgacgctgtgcctcgtgtgggacactgacgcatcgccctgtggcttatccggtggcgcagtgccgcgtctcgctctcccacagaccacgaccacgagacg

SEQ ID NO: 357152 - DNA, 275 bp, Zea mays
accggcaccgcccagtgggggaatgacgacgggaggcaggcgggggattaacgtcggagggtaggccagcagggtcccttgtcccatcaagccggcagtggcgccgtgcctctgtgctagtctcgagtgtataaggcatggatgacgggagggtggagaggaagtgggtcgaaatggttcgttcgtctctaaggaatccctagaacccacattttcaagaagtattttgacccagaaccaacctaacccacgagcattttgaaccaaacgtgggt

SEQ ID NO: 357153 - DNA, 271 bp, Zea mays
cggctcgaggccagcctcctggcccaaggtggagaagatgggcgtgacagcgttgtttcaacacgagggtgaagggagcaacaatattgggtttgtcgtcaaccttcggcttaattcgctgacggagttcgggacgccgccagttcatcgcgggcaaacttctgcaagcagagaagaaaaaggatgttctcactgggagagagatcaggtcatggcggcctggcagtgtatgaaattgagtacacactggatagcactaggtgagggatga

SEQ ID NO: 357154 - DNA, 264 bp, Zea mays
gcgagagccatgatagcctttcggtttacatgatctcacatgaagtctgagttgcaggaaatggggttctgtgagaaccaatgatagcctttcgatttacatgatctcagatgggagcaagggaaacattctacagagtacaacagaatgctggagaattgtaaataatagttccttatgcatgcgatgtccaaatagatctctttctcgagatcagtttcttacatgtactgagatggttatctatcttactaaattcatgct

SEQ ID NO: 357155 - DNA, 269 bp, Zea mays
cggagacgacctccatagcgccacatgtgaaactacagatcatccagacgagtatctttgaggttgcgctacgtatcgtcgactatttcaagccggagaatgttgccgataaaattgccgcggctgaggcagagcaggatttcctgttgcacgatttgtcgcgtaccgtgcatggtgccgtccgccatatgaagggcaaacatgatttgtcgaccatcctatctggaccgctagccgtccttacgattcctagtgtctcgccggagcat

SEQ ID NO: 357156 - DNA, 272 bp, Zea mays
caacccctccttctcctccgctccccccgcgcggcgcggaagagagaccaaaggggacggcagccaggaaggaagaggaggcttcgagatttttgcggaacccccacgccaccccccactgcacaccaccacaaccttctcctcatagcctgcctctcgcgtagggtttgcgcgcgccaccgtccccactccaatcccagcaccacccgtcctaccgccgccgcattcggagctctgcatctgcctgcagcccgattcgccaatcgccaccg

SEQ ID NO: 357157 - DNA, 269 bp, Zea mays
gcggacgtggcggttctacaggggcgacatctacgcccggttccgggatggcgacgggcgcctgccggtggaccggcagcaggaggaggagagggagaaggcgacagcggccaacggtaggtaggaagggatgatgaggcagaggagagagcgggagtggaggaggccagctcgcattgttgccttggtcagccgccaatgcggtgtcttgattccactggcgggtttgactggtgtctcagttttctacggctatcgcagctggcgtg

SEQ ID NO: 357158 - DNA, 266 bp, Zea mays
gaacaagctaaaaattgctcttcaacttttttagcctgctcatcaacacttccaatgtctcatttaatctttgggtcaaatggccatttggtgaaaatagttctcttctacatctgattagcccatgccatctgccagtcaattcgtagaacgcaatcaccatctgcaatgacgcatcaatttttccattgtcttgcatcggtctccttttccctagcatggatttgttttgccaggtttctcttattcttcttccaattcatagg

SEQ ID NO: 357159 - DNA, 258 bp, Zea mays
cgtcgccgccggccggaagcaggactgagttcggcgaccgtcgtgtggccacttagctataagctagctcttcctcggtagtacactattctttaattctttggtttgatcgatccatgtgtgtcggtttggtttggtttggtttggttgtattcaagtatagcttccaaatttcatggaagtttgatttgcgcatcttgtgctgagcctgtacctgcatcatcgttggtctttcaaatcgtttttatacgctgtgga

SEQ ID NO: 357160 - DNA, 261 bp, Zea mays
gacaaagccatctaccacatgaagcaatcctccaacgaatccgcgggcgcagacgtttcccgtgcgcaatcggtgaagagccgcatcgccaggagcaacgacgcgcgcaggctcaagaactggatcacggtgctccaggaagcgcaggccgccgtggccgacggcgccgactgtgctccgcaggtgatggcgttgcaagccgaggcgttgctgaggctgcaacggcacgacgaagccgactcgcttctcagcggcgccggc

SEQ ID NO: 357161 - DNA, 254 bp, Zea mays
ctcgtgacaacgataacgacaactcttatggctctggcaacaacaacaacagcagcagctacggctcatctggccgcgacaacagcgattcgtatggctctagcaacaacgattcatacggatccagcaacaatgactcttatggctcaagccgtcgtgacaatgataacgacaactcttgcggctcgtccggtaactctggtctgagcggcggcaatgacagctacggctccagccgtcgtgacaatgacaac

SEQ ID NO: 357162 - DNA, 266 bp, Zea mays
gtgcatttccgcttaaaagcttgttaataagtgattacatatttagctaaagttaatttttgttaaatttgtttttaagttatttatcagcttgacaaagaaaaatgtctgctaaaattggtcgtgtattacaaactcgtcagtttgcccaagctgctactaaacatgcagaacgaaatgcttatgtgcgtcctgagagtacgcgcactacaaaattaccgaacggtctttctatcgtatcaatagaaaactactctccaatttct

SEQ ID NO: 357163 - DNA, 263 bp, Zea mays
cggctcgagcgcgtttcacgcgtcttcctcctgtcgttgagctggaccgaaaccgtctcctgaaccctgcaggtcctgctggtgctgctgaacctcgagaacaacctgttggcgccccagttcgagcctgtggtaagacacagagcgctcttctggttctctggctgaacctgaagcttccttttagctcactctgcttgctccgatcttcatcttctctcgacagagaaggctgctgtcgacgtatgatccgacaagagccc

SEQ ID NO: 357164 - DNA, 269 bp, Zea mays
gttgcccctcccgttttagaatcgttctctctggtctctcaagtcccgtctctcctccctctgtctctggcatttcatcgccgccgccgcgccatgcttcaatagccctggtgacgaagatgcagttcatgctatcgcctaagcccaccctacctagtctcggtggcatggagctcgccggcattgtctctggtcaccaagattcacttcgtgctaatatgccacccttgaaaagacgttgtgagtttcccaatgttgagctctccccc

SEQ ID NO: 357165 - DNA, 261 bp, Zea mays
accacatcaaggacaacaagtttcattcaaggaattggcttgctactgtataagttggcagtaaaaaggtgtcccaaacttctctgccagagtgggtgcagtgctgtttcagttcactgaaactgaacttttttgtgattttgctctattttgtggcatcataacttttgattagtatggtttcagtctggggatgctatgccaaagtagtagagctatgtctagagaataacttgagtaaatgagttgtgtttgttgttg

SEQ ID NO: 357166 - DNA, 113 bp, Zea mays
cattacttcataacaaccagactgcacttttttaaacaacttgcaaacgctttgaatccccagacgtgctggtataatcggtacgctgccgacacaaagatctatcttccaca

SEQ ID NO: 357167 - DNA, 171 bp, Zea mays
ctccatcgccgtcctgtctctgttcttggctcctggcctgcagctgcaccagctgacaccggcgtcgttggctcggcagatgcggcgttccgatccgagatggggggccagcagaacgcgctccaccagctcgtgtccttcatcctcggggcgtccgccgccgccgtcctg

SEQ ID NO: 357168 - DNA, 247 bp, Zea mays
ggcagacgttaataattttttgaaggggacgccgttcgcgagctttttgaatggctcaaggagatgacatcgctagctgatgtatatagggctatagtgtgctgcccttttgacgctttggtaccccattctaaggttaacagcgttagcacagtaggcaaaataaatttgacatcatgatctaataagtttggttcagtgagagaattagtcaggatgcgagagtagatatgcttgatccaggtta

SEQ ID NO: 357169 - DNA, 261 bp, Zea mays
gcggttgtagctatgacttctgtgccacatattctcgaagtgacgaagttgtttctacctatgatgttcttcaaactgctgttgcgacggaggaaaagctaagtgtgcattcaatcacgcttgtgccgccgtcgtgtgtggtgaggaggcgttggcatcccccagtaaggtttgcattcagctacttcttacctgaagcagtgaatatctcctgtgtacagcgttgtaatatgtacatttgttactgtctgaaaagcttga

SEQ ID NO: 357170 - DNA, 264 bp, Zea mays
cgaaaaaggaaaaaagaaaactcaagagcccaggcttatctagaaacctcgctaaccctcgaggcctcgagtagctatgaagcagcgaggcgacgacggtgccgacggcgcagctgctttcgccggctgcctggattgcaggtcctccgaccattgctttttgcgggaggcaacgccgccgccgccgccgacagtgacgacgctgctgccgccttcggtttataactccttcgatcatcgcttttctgtgttgtctgtgttttg

SEQ ID NO: 357171 - DNA, 263 bp, Zea mays
tcttgaaaacgtgattgcaaatatatttccgaagaggggaaaatgtcatttcctgtcagcagctagatacgaaaggggggaaaagtctatttactgcttatcctgtttaatttctcttattgagcagtcacgataccttcgattccgtgactgtcctgtggaatggggatggtgcaggcctctgcaatcctttatttttatatttagaagccataatagttcttgagcgtcctgaatatggttatgcaacatacttctttgag

SEQ ID NO: 357172 - DNA, 171 bp, Zea mays
gtttcctagaaagacaaaggtcaagtaaataatgttcgacactcgttccctcctccttactctggccaccctccagggtgcccaagcctggggtattctcggccacgccactgtcgcttacatcgcccaaaactacctaaacgacgataccgcaacctgggcccagggcgt

SEQ ID NO: 357173 - DNA, 264 bp, Zea mays
gtggctagctggtgatccatttccttcaagtggtttgtccattgccatggtgcaaccaatcactgaagagcagaaagggcattcagtattaagcttaattggaggccgataactgctagatgttatgcagagtctggttttataaggaagacaagtgaggagagaatttcgaatcgttagaacaaacactcaagcctggaccaatcctggcagcaactgaaaagagggaaacggaaagtgggtagacgattccgatgggctgtg

SEQ ID NO: 357174 - DNA, 264 bp, Zea mays
gagccccgcatccgcggccaagtacccatgacgacgaggctgacagcgacgttgttgctctccagaaccctcgtccgccgcgtaacctcgcgaacctcgacacccctcggccctttcggtctcgaaccatccgcaggaatccccatctcctggtccagacgcgcctcctcgaccgcctcgggagatcggcgccaggaaccgccaccggccatggattcgcctatcaaggtggtttctcacctggggggcggacgaggaggagga

SEQ ID NO: 357175 - DNA, 169 bp, Zea mays
cggctcgaggttatttgggacatcatgcgctgctgggtgaagaaccatcctatcaaggaacaggcacgtgactcacctggcacggtgatcctttcaaaatcgccaaagctagaagcagacttttccagagcagttgctgccctcggcaaatctggggcaaagaagacga

SEQ ID NO: 357176 - DNA, 261 bp, Zea mays
tgcctgcctccggagaccatggcggcgctgctccacgacgccgagtttatgcactacgtgtcgtgcccgtcgcatctgttgtgatgtactgcagccgtgcgggcgggcgcgagtgggccatcggccgtgacatgccatcaggcacctgttggattgctcggtcgtccactcgtccttgccttccgggtttcaggaatactagctagttggtgtcaagacattgtatctgtctcgctttttcggagtgctgcgtgtaatcgt

SEQ ID NO: 357177 - DNA, 261 bp, Zea mays
agtttcatcaatgatgttagctcccattcatggctttggtttctggtttgaggtggagttcaacgagcctatagagtcctctcataattttccttccagtttggatccacttgagattatacagaagaaaaggagacgatcctcagaagatatagttctgtccacagccccagaggatgtcacaacccactggcaacagaccattttgtatttcccggatcctatagaggtgaagcaggaccaaattatagaaggttctgt

SEQ ID NO: 357178 - DNA, 260 bp, Zea mays
tgatggaatggaagtttttttttcaataaaaagtcactggctacatttccagcaatacaaatatgtggatacagcaacaaaccaattgtggaacctactgcaaccagcttcacattattgatggacccactcaagttgtcccagagggtattgaacatatcagttccttttccagtggtatgtatctctattgcatcaacatcatctcttttcaataattcagcagtcatagtagggtctcgaacataggacacagctcc

SEQ ID NO: 357179 - DNA, 291 bp, Zea mays
cccgaccgggatacaaacctcgtcccttcggtgtggaaagaaccctcgcctctcgttggcggcgcgcgaggcagctgcagcgagcttcgagacggaggcgctccggcagctgcagcgggcttcgagacaggcgctccggcagctatggcgacgtagacggaggagctccgcaagctcgtacggtacaaaggcgactacgacacggtctggcggtggcttcttcacctgctgaacagcgtctcgtggatcccttcggtggctacttctcgccgatcgttggtaagatgatgg

SEQ ID NO: 357180 - DNA, 292 bp, Zea mays
aagattgaaggcaacacttcagtacagttacaaacgttttgtgcaatacatttatagcaatcacgattatcaacatatgcagcaagcggtggctcaggagcctatgtccaataacgatttcgaaaatacttatggagaaacagaaaccttgacgggagtgtattcagaagacaagaagtctagtggcaagggttgcaacttgtgttggctgaaaacgaatgataaaggttcgtttttggtgagctatagtccatttgaacagtatgcccagtttgatggcaaggaagtcatc

SEQ ID NO: 357181 - DNA, 284 bp, Zea mays
gcgtgcctgtttctacagggcttcccgtactgacactgatacctgcctggatattattagtaggatatagtatatattatggtctcaagggctgctaccgattggagggtcaggtcttcattcgcaaaacacagacatttgacttgcgctctccctttctctctctctctctctgtgtattcgtgtctgtctcaggttctcagcagagagcagggaggataagcttggaatgccttggcagtgagagctgcaactgcaacatagcaaccggcgtccatggtgga

SEQ ID NO: 357182 - DNA, 287 bp, Zea mays
cggacatactatttggccagaacaccggctgcaagaccctccttgttttgtctggttgcactgccttaccagaagtgcaggatgctcgtaacaatatccatccagatctctacacaaacagcgtgtatgatctagttgggttactgcagaagtaattctccttggccgcgttgcagcgcaatctcagcacgctttggatagcgcctatcagcaatttattacgtggattacttgcatgaagccatgtgttcttgaaacaacaattttgaactttctttggggtaact

SEQ ID NO: 357183 - DNA, 291 bp, Zea mays
atcacaaattcaatattccaggtgaaatgcaaacaagaagatcgaagtatttttttttcaagagaaaaaacgtgtaactaactaactaactgatggctgatggtgctatagcctatagtagcactgagaaggaagtacaccattagattaggggatagattagtaggtgagtttcaactgatatcttggccgggcgaggaatcttttccttttcctacggattttactaaccatggaacatgcaaaggttccttcttctcatcactcttctgttctccctccatctgactg

SEQ ID NO: 357184 - DNA, 285 bp, Zea mays
caccggcggtgctagacggcgggcggcaagctcccgctcctgttccctcgcccgtggtcctgcagcacatcgtccggtccgagctgctggaggtggtggccggcgtcgtccaaggcgagctgaccatcaacgaaagagctcgtgccgcagacgtgttgcagctcaggtgggaggagttcgcagcgtgccaccagttctggggcggcggccatgacctgatgagcggcctgggagaaggaggtgggcggcatggtgagcagcctcagggccggggtggcggcctac

SEQ ID NO: 357185 - DNA, 258 bp, Zea mays
gccgagcgccgccgccctccggcaggtcttcttcccggccacgaccacccacgccaggtcttcccggccccgaacgcgaacacccagccctcctccaggtcttcccggcgacgagcgcgtagaagaggggacctagcacaatggagaagagcacagggcgtcgcaagcatccggatctggaacacgaccgaaagaccaccggccgtggcagactcacgtctgtcgcgactccggagctgctgtcggcgatgctcacgc

SEQ ID NO: 357186 - DNA, 283 bp, Zea mays
gaagaagaaaaagagaaagcgtcaattggccccttcaaaatctgtttctactcaaataacgacagaaccatcgcctggggcagccccagcagacttatcaagatccacaggcgacgaagcatataatgttgaattgaatggcaaagatgaaactatagtcaaagaatctggctgtcgtctttcatcatcagaacttaatgatgcaaaccaggggggcaaaagtgttcagtttgtgagcgatgctctggcatctatagatctaatctgtaaacaagagaagttt

SEQ ID NO: 357187 - DNA, 283 bp, Zea mays
cggctcgagtgtgctccttgcttccttgccccgtaccccgccggcgcgccctgagccaaatcgctggctgccattgtgccatggacgaaggtgcgacgacgagcgactcgtccgctgccgagacatttgatccgcaggacctgattcacgccatcttcaagctggtgtggaggcggcgtgcggggaagggggccggcggcggcggtggcattgaggacatcgatgcggacgtgctccagagacatcgaggagaaatcggagcacaactgccaatgcgactgct

SEQ ID NO: 357188 - DNA, 285 bp, Zea mays
gctatgttgatatgacatattgacataatgtaacattatctggtcctgagtcctctctaaccatcatagtcaattggctatattaaaggcaattaggaagtgaggtgttccagataggcctgcagtatgaatgtttagagtattctagagagaaaatgactgccatagctttccttggtttcctgtgctgatgttaggttgaggtcatacatggagttgtgcattttagtcccagggatttcctcgcaacatcatggcagtggtagcccagaacagggtcaattt

SEQ ID NO: 357189 - DNA, 298 bp, Zea mays
ctgctggatatcgatgggaacgctttcagtggacgctaccatgccttcttacgcagcaacagcttgatttacaaaatggctctattccgcgaatggcaagatgaatggattgatgcatgggttcattatgttcccttggggatgaagggtacggacactgtggagagtgttcgttattttgcagaagaagaagaaggcatgattcaggcgccgcggttggccaaacaaggcaaagaatgggcacaaaaggtgcttcggaacgaagatcttgaagtttggttctttaggctgttattag

SEQ ID NO: 357190 - DNA, 283 bp, Zea mays
caagccagaagcaccagccgccgcacgcatcttcgccagaaagcagaaagctcctgtccttctcctcgtcggcatacggcgtcgagctgccgtcctgccgccccagccacctgtcgctgccgcactgccgccccagccacctgccgcactgccctgctcctcgtcggcgtacaactgccgaagtgccgaccctgctcctcgtcggcgtccgacgtcccttgctttgagcagtagcagcactgctgcacgcctgagcagccagcaagcagtagcaatattattg

SEQ ID NO: 357191 - DNA, 292 bp, Zea mays
gttttcatcctccttgaagcgaaaacgatcgagcttactgtatcgcaggcatttcggtacactacgttctccggctgtgtagagctgcgcagatgggtgccgagttgggagaagcgggtgtccctgcccgggacatggtggacgcgctggaaggcgtgcgctccatcctgctgaaaccgtcggatcgcctcgacgacaagcgcttcacgaggatcgccggcgccgacttcgacgacgccggcctcggcctcgccgggttgctcggctcgctcgcgtccacggggttccaggc

SEQ ID NO: 357192 - DNA, 292 bp, Zea mays
gtcggcggtgacgacggcgaagagcagggcgtggacctgctgggggcccgcgtcgtgaaagagctggaggaagggtggggtggggcggagctggtgcggaaggtcacatacaaggccttcatcctggcaggcaccccggggcccatggctgatgagtaatcaatgaggacctgtttggaaatatagttttctcgttctacagtatttcaatactatagtatgtcgtatgttataacataaaactgtagttttagcaaaactaaagtaaaatcaaagtagttcttcatacata

SEQ ID NO: 357193 - DNA, 293 bp, Zea mays
agaagcctcagcaagccacccttctcaacgccgctccattctatcgccagctttgcctccgttcagcgcgtccatcacccgccacactcgctgcctggtcatttatcctacctttaaaccggaccatcaccttcgccgactcgacaccatggaggaagagcgcctttggaagtttaggaaacccgagtggttaaacagcatgtgggctcggaacgctggcgtctacggcgccggagctctgttctccatcgccttttacgttatgctcgactccgccgtctggtccaagtcgg

SEQ ID NO: 357194 - DNA, 276 bp, Zea mays
gagccacaagataacgcagccaagaacaagagacaccgccgagcgagcgaggcggggagaagcaggtccaggaccaggagaaaggaaaggaagcccagctctctctagcctggagccgagaagccgagggagcgagggagcagcaaggcatggaggagcccgttccggctgatccccccaggattttctggaagtcaatgagatcaggttcagccaatggccggagcctgcaacaagagcctgacaaagacgctaccgaggaaactaacgagcagg

SEQ ID NO: 357195 - DNA, 290 bp, Zea mays
ctgaggccatggccatcgctgctgccccaagaccgcagctgatggtaactttttcacagcagaaccggcgagacgtgggccggggacgttgacgtggacatggtcgtctcgtcccacccaaaaaagcgtgccagcctgacagcgacatgctttcccaatcccgaattcctggcacgtcgacggggggtctacctccatgccttttagcagcggaagaagcaggcaccaaagaactgcttatcaacagtattgtaccacacgtacgacgggtctagaagccacagaaacgt

SEQ ID NO: 357196 - DNA, 267 bp, Zea mays
gcggcatctatcgacaccaagaacgacctccgcatggaagcaggattggtgaggagtggccgagaagagaggggcatgtcgtcgcctgaagcagtactccaggattcggaatctgcccaaaccatcccaaggacaaatacccgaaggagatccccagctggcaaagccttgattgcgttggcctgcttgctgtcttctgggcgccggtgtaacatccattggaggcgctactctattctgccctggacatctccgccatagtgatgt

SEQ ID NO: 357197 - DNA, 285 bp, Zea mays
ggcaaagctgaacgagaagaagttcttggcgccaagcagccccgctagctccctgctgtcgcaacacaggctgcgcataatcattgaaaacgcacgtgagttgctgaaggtcatcgacgagttcggatcgttcgacagctactgctggagcttcctgagcaacaagccaacggtcggcagatcccggcacacgcgggaggtgccgctgcggacggccaaggccgacgccatcagccaggacctgatgcggcgggggttcctcggcgtcgggccgacggtggtcta

SEQ ID NO: 357198 - DNA, 279 bp, Zea mays
gttcggcggcacatcgggtctttggtgtgtacttgatggatcatcccccagcttgtgtccaagcgagggcgagcatggtccccctcccccagcttgtgtggctgcacctgcacctgaacctgcggtaagcttgagtacgtactgctgatgattgttgtatgtgcatctgtctgttcagccatcgctgccagccagtgtcatttaccgatattagctagctagtggtccagtatccagatcacagaggaaagtgccgttccttccgtttctaccaaagaa

SEQ ID NO: 357199 - DNA, 261 bp, Zea mays
aataagctcaccctaaaattcatatatttaaagaaataaaaatggtgggggcatggtttttgtacacatgatgaagtgtggccgtcgtccctagtgctactttgttgccgtgcaataatcagatgtcgttggtctcatcatcagcttcgattcatgtgctgttgcatctttcattcaatattgtttgacaactttgcattgtgtgttcttaaattaaatctctcttgtttaaaaaaaaaacaaaaaacaaaaaaaacgaac

SEQ ID NO: 357200 - DNA, 285 bp, Zea mays
tccagctgctgggaaatccaaagttgttccggtggtggttattcggtagatgagatcttcagttaatgttgttttacaggcccgatttaatggtcccatctgccagccattcacctaaataatagctaaactaatgttttggcatcagctaaatgagtgtctttgatagatgctgatgagaagcagtgttagttgctgccgttggtgtattgaatcaaatagcttgctgtgaccgtatctgcactgctaagcatggacagcatcccgtgcggaagtaggacggcg

SEQ ID NO: 357201 - DNA, 212 bp, Zea mays
ggttctcccccgaagaagaaccaccaccattggcttttcgtagaggaggacgacgaacagagcaacttcagtgtcgaatcgaaggtgatcacgttcatgggaacctcccccaaattccaccttctgccacaatcgaaggccaaagacgcacacaccaaacgcaactgcaactgcacgagcacgccacagcagaaaccaacagttccacacaa

SEQ ID NO: 357202 - DNA, 274 bp, Zea mays
tgccgaagaaaacaagtcttagtttcacccccttcagctatggttcagacacgctgcaaggggcgaaaccatagctgaaggtggaactgtactagatcaaatcggccatagttaactgaaattcgtatcagttgtcagaagcacaataaggcattccagccaagttgtaaaattatcgatattagcagaatatgtagcgtgagttgtcatttcctttctgccattgttgtgcactgtttcagctgtggtagtgccttgtagtaggtataggtgc

SEQ ID NO: 357203 - DNA, 270 bp, Zea mays
cacgccacgtcaatcatcgaccagcagcagccaaccaaaatgttctgcgagtgcggcacgggcagcttcaatcacgtcgacgaggacccggaggatctcggctgcacgggcggatcgcccagggagaggaggaagcacggcggcaaggtcaaccccttcgcggagccgggctggacaggttctccatcgtgctctcggagctcgagacacggcgagccaagatcctgcgccgcgtcggctccgacgacaccaccggcctcgtcttcgtcc

SEQ ID NO: 357204 - DNA, 269 bp, Zea mays
cgcttccgtctcttctctgctgctccaagtcagcacacatggaatcgacttacacgctgaggtcaacctacatgatgtcatcgcctactctgccgccagagctgcttctcctcattgtcgacgcggttgtgccgccaaacccgcatctgctcttccccgcatcgaactccacgtaccggacgctattgtcgttgacaaaggtatcgcgggcggacacatgcgcaggcgacgcggctgctgcggaagcggtgcatgtatgttgattcgag

SEQ ID NO: 357205 - DNA, 268 bp, Zea mays
tgaaaagcttcgtttgttgtttgctccttttattctccctctacgggtctctcaacgcttttgttgtaaaccaccaaaaagcttcttgcccatctgggggtaaaataggccccgatggcaagtgctacgtcttttatggcaccggagacgtctgtaactataattggggacagtcttcggacttttgcaaaaaacaaggcggacatttacctattataagagatgcgttcacaaacgcgttccttcggaacttgacgcagacttcgag

SEQ ID NO: 357206 - DNA, 291 bp, Zea mays
gacgttccgagaattaggatcgtgccgggcttgggcacccgcgcatggtgttcgacggaatgccttgccgggacgctgtggcgtggaacgccgtgattggtgggtatgcgcgcgcggggcacctgtctgaggctgtggagctgtttggcatgatgaggtctgcggttggagcgtgcccaactgaggccacgcttgagacgttggtttctggttatgccgtgttcggttcttggaagggccatggcatgatgcacgccgctgtgattaagtctggcttccagcgcagctctt

SEQ ID NO: 357207 - DNA, 260 bp, Zea mays
cacatatctagtcacttttgcatcttatagcaactattagttgtcatggtaaccttttttcttcattttttatctgagctaaattattctccaaacatctaaacacttaaacattctaagaaaatgcttatgtatttttttcattgatgtgcctaaaccctcgatcttttgtgactcagtggtacaccatgttatcatgagcaagtaggtattaagaaaaaacatactagcaagcatgagcacaagcatatgatggccat

SEQ ID NO: 357208 - DNA, 270 bp, Zea mays
cgatagttcatgaagttgtacattcttgaactactatgtacaacttcatgaactatcaactccagatgaagttgtacattcttgaactactatgtacttttcgcggcattttgttaacacatttgtaactcaactgagcttccacggggttttgctgccccctaccccccatccccactcgagaaatcaatctacttgtatgtaccatctgttgtattttcatcgctgtatgtccattcgagaaactgaacatgtagattgtaagagttg

SEQ ID NO: 357209 - DNA, 236 bp, Zea mays
gtggtggccctcgtggtgctcccggtgactttggtggcgataagagtggagctcctgctgagttccagccatctttcaggagttctggcgcaaggcctggctttggccgtggtggtggcagcggcttggcgctggccgacctttccatggatgaaagtgaagtgccctagttggaaacgagttcctccgtgagcgttcatttgaggaggtatagtatagtatgtttcggtcgctat

SEQ ID NO: 357210 - DNA, 269 bp, Zea mays
ctcaaccaaaacttgctcctaaaatggaaatcaatctttcgggcgcctacgcacgtgtgtgatgatgggaacggagtgtcagacgctacactactgcttgggccctttgggtgtttgatggcctccttttaacctcacctgcatagagaaagttagctagttcagtaaagcaaaaggatctcataacttagcttgtcagcaagacattacaattcttttatatatatatggtccgtttatctggatgcaataataattagatagtttta

SEQ ID NO: 357211 - DNA, 267 bp, Zea mays
tagcggtgggcgacctacagtactggatggacgaaaactatcttcacagctgcttcggctctagcggcgaggttccttctctttcacagagcctgctcctcctctgatccggcattatccgtactggatctctcgaatccagctaggtttattccatggcttagtgttgattcgtctatactctgctgtaacaggcttagtggcgtagttttgcggcaaatcctggtttggtaacgaaaaaggaatatgtgatattattctgttgaa

SEQ ID NO: 357212 - DNA, 266 bp, Zea mays
ttgctgctctctagtctgtacataggtcttttgcttgtagttgcagaatagactcccaagatctgcatgcggtctagtttggacagcgccctcctcaattgccttgcctgtgccaatatgttggccggccaaactttggctgcccaagaaacgtccaactttggcagggaaaatgaactagcaatttgttcacgatgccaaactttggcaggcagccaaccatccaaacatacaggatgccaatagtcaacgcacttttattaaaa

SEQ ID NO: 357213 - DNA, 254 bp, Zea mays
ctcgtcgcaggaagtggtacagagatgccgagcttgtcgaagttgatgaaaatggagttgtacccgaaataaccaccaaatctcaagatgacgctgccagtattaaatcaacagcttcagcggatccccaaggtagcgtgcgaaagcgtcgatggttcagtaactccaaagatctaagcagaaatgcccctccatcgccttccaacgcatccacgttctcgttcagcaaccaagacgttgataacgcttcagaa

SEQ ID NO: 357214 - DNA, 255 bp, Zea mays
tttggaacaaaaatgagtgtattggtggcattcgactcctggataggagccatatcaaatggatcggtagaaatagttatttacggccctttttcattaaaaagggaggagctagagccattttgaaaaactcttgagccttatcaaatggttcggtagaaatagttatttacggccctttttaattaaaaagggaggagctagagccattttgaaaaaactcttgagggcctgtttggccctttttcattaaaa

SEQ ID NO: 357215 - DNA, 178 bp, Zea mays
ctgggaacgcacaatgtgctcgcaagtccaaggagtccaaaaagtgtcaggcttgtccttcattaccaaatttcagaagatgatgttcaatatgcactgacgtgttttaagaaagctgctgaacagctactaatgggcagtactgaactcgagcatttggctgaacagctactgatgg

SEQ ID NO: 357216 - DNA, 248 bp, Zea mays
gcgaacggttgaagcatccagtgtaggaacatgtgtcgactgcaaatggttgagatttgttctgttgtgcttgccgctactgtaacctcgctttgttgtcgccgacaagcgtacgatgtgccagcgtcaggaatccggcgcacaacaaagcgaggttacagtagcggcacatcgtacgcttgtcggcgacaactttatggaccacacacattttgatgatttaaagaattctctataaaatgtcttct

SEQ ID NO: 357217 - DNA, 171 bp, Zea mays
gccgccgcttcggcctccgccgccgcggctcctgctcaacaacgtctcgtgcatgcggaacgcgcagacggtgctccgcgacatcaacctcagcgtccacgacgccacacgcctcgtcctgaccggtgcgaacggctccggcaagaccaccctcctccgcatgctggcggg

SEQ ID NO: 357218 - DNA, 252 bp, Zea mays
ggtcgagctccctaagcctcctgcgcacggcctaaaactccctgctctcgcatgttcgccttgctctgcttagcatcgctgcatcgtttcgcacggacgccgcacagccatggctgccagtagaaccttgacggctgccgctggttcccctaccccaagctccagcgcgcatagccgatgggacctcccacgtttcccctcctcaacgcgctccatgctgagctcccgcaggccacaactgatctccgtcgc

SEQ ID NO: 357219 - DNA, 279 bp, Zea mays
cagcactaaacatgtccaagattaccgacatcaaggccaaaatcgccgagctatacaaagaaaactgcaccaaagccgaaatcgagcccaacaaggcccttctccgtttcctcagcgagcccgaaaccaagtccgaacgccttaacattgtcttcaggggcaataacaagctcaacttcagctgcagactaggcgatgaagacgtgatcctcttgtgttctgctttggagccctttgcggaccttatagcccatgtggacctttcctataaccacataa

SEQ ID NO: 357220 - DNA, 149 bp, Zea mays
caacgcaagagtatcaagaacagtacgatgcatgacctatgttcttggcttcgttttactttctatagtgtattattagggtttgtgaaatctgtatttgtgctcatacgccctttaactcctggtttgttaaagtattgcttttcaag

SEQ ID NO: 357221 - DNA, 275 bp, Zea mays
acagcactggcccagccccaaccaccccatttgctcctctcggaactgctgccctaaccatcttccagccagctttcactggtgccgccaaccgcgccgtcattggctccgccgctggccttgctggtctcctcggcctcgctgcttacattttgtaagcggtgaattcatttcgcacctgggtcacgatgcacgatttcttttctaccggacaacatcctgaactgtagtcggcacgcgatctcagttcatgacgtggtttagggagcgggtgg

SEQ ID NO: 357222 - DNA, 268 bp, Zea mays
aatcttcggtgtttttttattccgaatgcatatccgaaccaatttcacattgcttggttcggatatgcattcggaaccaaggaatgtgaaattggtttccgctttttgaggatctatgtagcataatggataagtcggtgtttcgtaccctatctagggatgcttgaagcaagaaacatcttcatgggttgtccaataaaagaaaaattctctttattatatttgatcaattcttttgccttaaaacgtataataagttctatactgg

SEQ ID NO: 357223 - DNA, 269 bp, Zea mays
cggctcgaggtaccgtggactgggaggcaaagtcggggaggtcgatgcggtcattgacaccgttgggggcgatgttctgtcaagaagctggcgggctatcaaggctgatggggcagttgttacagttgcggacccccctccacgatgggcgctggagaagggtgtggtgcccaaggaattggcggctaagcctcacgtgagatatatgtacttcgttctctctgttgacgctgcggccttgtccaaggttgcggcgttcattgacgagg

SEQ ID NO: 357224 - DNA, 270 bp, Zea mays
ccgagactggctggcccgtcagcggtgacaaggagaacttagccgttgcctcgaccaacaacgcaaagacctactgggacgaggttggctgtggcatgcttttcgacaaggtcaacacttactggtacatcctccaggatgctggaaagaccacgcccagccccagtttcggtcttgtcggttctgagctctccaccactcctctctacaacttgacctgcccggctgtttccgcctctacttctgctactagctctgctgcttcgactg

SEQ ID NO: 357225 - DNA, 268 bp, Zea mays
  unsure (1)..(268): unsure at all n locations
ggcttgtatgatgacaatgtcagttgcagaattgagtctgttttgagcagatatttgtggaagaaacaaatacataaactattgtatggtggtaaaaagtcatcgattcaagaagtactgtgccttgatgaagagggttcacatttagagatatgtgatcaagatttcttcaagttggagattagtatttttanaggtaaccagcctgcagtggctggctaaagccgaggaggttgcatgtgattctggtgagctgcactggatcttg

SEQ ID NO: 357226 - DNA, 265 bp, Zea mays
ggaggatggaacgggtactagcctgctagggttcgtgtccggcggcggcggctgcagctggaacgccggcgacgcagctcagtggacgctcccatcgaccattcccagtgccttttatatctaattttagaggagcagactgttcaaccaaagatggctggtggtcgtgtacttgatccattttgtactcgccttgaccctaccatggtagaagcacgggtctgcaccaaagattggataactggagcaagaaaaggttatatag

SEQ ID NO: 357227 - DNA, 229 bp, Zea mays
  unsure (1)..(229): unsure at all n locations
agagaacatgtcctggctttctatttggtggcaacaatttgttgatgcttcaatgcttgtgcagcattttgatcaaccactgtccaaaggaaagattgaggccatcaagaacctgctggaaaaagggaagcagttgaagaagaaggtcaggggcaccaaagtcgcgccactgttctggcttgcccattagngctggtctaatggtggagctggctcagtagggtcgtct

SEQ ID NO: 357228 - DNA, 144 bp, Zea mays
caaggatcccttgttcaagcggatgggagcttctcgtttagctcgttatgaagtggatgaccaaagaagaatgaaggtggtagagatagggggagatcaggaactgcttaatgtattggaaggtgctaaagatgataaaacacg

SEQ ID NO: 357229 - DNA, 229 bp, Zea mays
ggccaaacaccagactgaacttcaatgtaagaatcacatgttgcttagcacttactgatgcactaggaactggtgtttcttgttcaagaacagaagtaaattgcattaatatctgttacgtgttatcagatttctgattttgagaaagaaattgaggttatgaagaccatgtcccaagatgaatttgtgccccacataaggagacaaagcagttgtttctcaagaggta

SEQ ID NO: 357230 - DNA, 228 bp, Zea mays
gacccgtgtaagacttgcacttttaattttcatcgttttgctcagtatcacttttaacatggcggactcacgtcctttagttgaagttaacaaacgaggtgatgaccgtgtcgttggcgtcaatttgccctggatttacactatggatttgttaacaggcaaaaaaggaaccggccttggcatcacccgtttaagtggatttctgcgagtcgatgtggacactcgcaa

SEQ ID NO: 357231 - DNA, 224 bp, Zea mays
ctccattccactgcacaaacagcctcccactttcccaattcccgtcgcgtggcctcctgctaggtcctgcatcactttgtgcgtcctgtagcgaaggggtgatcggcgatggactagggggacaggaccaaggccgccgacgccgctgcggaagctgacgaaacggccgcgggaggggaagggctccgaggatacgtcaaggtcatgaccgacgaacagataga

SEQ ID NO: 357232 - DNA, 222 bp, Zea mays
attatatttgtgtatacgttttcgtaattctaacctaaccagatttaactattactataatccttcatcacttacaacaacagtctaaaggatgcattttgccttaaaagttactttggtgcttgtatgtgctgtatatttggcacactcttatgacggcggccatagttcgacttatcgtagtccagatgaaaacgggaactactcgtttggataccatat

SEQ ID NO: 357233 - DNA, 233 bp, Zea mays
ccaaaatctaggcaaagttgttggaaataatagggataaaatttctacctttttggaacaacacagcaaataaatctcagtcattgttcgttttaaatatttgtttttgcattgcatctaaacaaattttatgtcttttttaattgtttgaagttactttgaattcacattttagaaagcattttttaaaaagttgcattcttaaataattgtattttttgttttaatacaat

SEQ ID NO: 357234 - DNA, 222 bp, Zea mays
atgaatgtatgttcacatcatacaacaagaaatggaaggattcacatgatgcagtttccatggaaccttattctgaggtggccgaagagttcaaggtcaagtatattttcactcatattgcggcgatggaacacaaggagggagctgtagctttgtggttgcattcattgaaccacagctattacctagatttccgttacatggaaactgctgagcacaatg

SEQ ID NO: 357235 - DNA, 222 bp, Zea mays
cagacgcggcggggatgggcagcggggtccgggcgctgatgcgccggaagcaggtagactccgagcggacgcgcgccgccggcagcgcccaccagctccgcaaggagtctccgtcacccagctcgtcgccatcggtgttgggtcgacgattggagctggcgtctacgtccttgttggcacagttacgcgggagcattccgggccggcattgacgctttcatt

SEQ ID NO: 357236 - DNA, 148 bp, Zea mays
gttttatgtcattaccttcgctttgaaacggggcataaaccaaatacttttattgacaagtacatacatgtcagacatatagcgtttcccattattgtcttaagcaattctttagtttcgtattcatatatacatgcgtatggatatc

SEQ ID NO: 357237 - DNA, 267 bp, Zea mays
caaaacatcagttcaaaacaaattttctttgtgattatcgtttaagttttaaaacacaaattaattaaaataattacgtttactttgattactgtattcagagagctaaatcaataaaattacaaacaaaatgaccaggtatcttagcactcgtccaactgtgtatctagaagttactccggcagaaaaaattccctatgatatcattactcctgctcgtcagttgtgggttcaagttggatttgaagtgtacggaactttgtctgg

SEQ ID NO: 357238 - DNA, 164 bp, Zea mays
tgttggcaccagtcagcagatatttttctacatcacacagttttcaccatattccaataacaacacttccaaatgggataagagtagtcactgaatcaaaaccaagacaaacagcagccattggagtttttgtcaacacaggaagtgcccacgaaacagaacat

SEQ ID NO: 357239 - DNA, 162 bp, Zea mays
cagaggtcctcggcccggccgtgcgtggcagcaagttcacgttgaccaccggagctcaaacgcaacagccgcccatcatcagtcagccgagccatcatcaggagagttcaggtggtgcaagagctgcggggaaaacaaaaggcatcgatccatccgtcggtc

SEQ ID NO: 357240 - DNA, 148 bp, Zea mays
cgagtcccaacggcggagcagatcatgaaggcgcggcgagcgacgcatccccggatcacgaaggagaggagagcgacggcctagacgcttcgcccgcatgagaggaccagcaagagcgacccagctccgcacagccgtcgccgccgcc

SEQ ID NO: 357241 - DNA, 269 bp, Zea mays
cggcggccacgcccacggccgcgccgcggtcagccaggggcagatgaggccgacggttgtgcccggcgcctcctcctcctcctcctcgacagcaagctcggacgcgccagcgacggctgggtttgtactgttgcttgcaattggagctgcgctcatgacctgatgcgatggttcgctaaataacgtcggcgcactggagtgtcttggtgaatcttattagctgctatttaattattagtatctgtctgttactaaatcgatgtgttctg

SEQ ID NO: 357242 - DNA, 265 bp, Zea mays
  unsure (1)..(265): unsure at all n locations
ggcgtcggctccggcgatctcgggcagcgccactaagtaaccgcatcagtttacgttactcgagcacagtgattagtagttgtatatgtagtggtaggttacagtaggttacaggggccgattaaccgcgttcgtttctcctctggtctctggtgttcgtccaggtgggtgaaaatcctgcttttggggttngttattatggagatttggtgtttcgctcgtccatcatggcttgccatggttctcggcggatcagtgaaaaatg

SEQ ID NO: 357243 - DNA, 267 bp, Zea mays
accgttctcagctggctacaatgtccagagcttcaccaagagacggaacgccattctggcgctcaacaacttggccatccatggctacggcctcgccgagcccccggccgttaaggctagcatcgcccgcaaccttggccttgaccgcatcaaggagttgaagatcgaggagggcggctcctttggccgccgcgccatcgacccctttgactcggggcgacgtggtcgcagcttcggggattctggctttggtgaccggaaagtcgt

SEQ ID NO: 357244 - DNA, 160 bp, Zea mays
cccgcacatgggtatcatccagcatggcgggcggctgcggcggcggcgtgccgggcctgggattctaccagggacatgccaacggcggcggatgcggcggcatgcattctggcgcggagatacttcaggccgccgcggcgtccgggaactccatggcgca

SEQ ID NO: 357245 - DNA, 154 bp, Zea mays
tttctttgaaaaaacgagctcttgatatcacaaacaagctgttccgacgaatcgaaatgcttacaccaaacatgagttcacatcacacgcgaccaataaagtaacaaattgtgcacactgcgactatgagtctttctgctgcgccttcctctgc

SEQ ID NO: 357246 - DNA, 257 bp, Zea mays
caggatcctaatctacaaggtttatgtagatgggagtaccaccatgtcgacgcacgagaggcaagcgagcctcagggagttttatgctgttatctttccctccctgatgcaactgcccaaggggatcagcgacgtggacgaccggaggcagaaggcggcgtgcacggagaggtaccggaggagggacgaggacgagggcaagaggccggtttcggaggccgacatcgaaagggaggcagagtgcggcatctgcatgg

SEQ ID NO: 357247 - DNA, 114 bp, Zea mays
cttctagtatgtttaacaagaacacagcacgtccggcgtggcggtcagcatccacctccattgtttaaagagaacagcggagacgtccatcaatcacaattcagtccagacaac

SEQ ID NO: 357248 - DNA, 248 bp, Zea mays
cggctcgatcatttatgctggacattcagcttattgtgatcctaatgtcaaattcactcctgaaatcattgatatccccggtggtggattctcggaatgcattggggaacttatatcgataaatgaaatgtcgatgaaaagaaagctgttatgattgtcttaactggtatgactgattctgatagacaaacttatgttaagaatattgtcagtgaagctatggagaatggatacgaagtagttgttta

SEQ ID NO: 357249 - DNA, 253 bp, Zea mays
cgccacctcgtcctcatcaatcaagtaccctaacgtgaccgggtatttcctgcaggatgagacctccacggacccgtcgacccttgactacactgcagtcaactttggcctcatcgaccgtacctaccctgccgatcaggtgctcaagaaccagggcaaggacctcactcagtgggagcgcttccagcaccaggtccagaagatgaacacggagtctggcaaggatgtcgagtacaaggtgctcttcctcggc

SEQ ID NO: 357250 - DNA, 118 bp, Zea mays
cgcatctagttgttgtcattgattaactgacaagatcagtaagctgtttgtctcagacaattacatgctgtagatcatacttgtcagaaacctgatatgttgctttgatagtgtcaaa

SEQ ID NO: 357251 - DNA, 262 bp, Zea mays
gtgtagttacgttgccaatttcggttggttctcataaactcttttcgaattttatattcaaactcttctttcttttcgacctttctagttaaaatgtcaaacaacaaacaatctgttcttgagacgggggaggggctttctagctccacaaatggaatgttgcgcggggcaacgacgggaggtggcgtaattcaccagccgatgcggttggggttcgatagtaggaagttttcctacgatctgaacaccgcaagagcgtcca

SEQ ID NO: 357252 - DNA, 261 bp, Zea mays
ctggctgtctacgagagagtctttggaccaggcaagatcaaggatctctttgaaggcgaagagaagccagaagatcagcaacagcaccaagttgaacaaggaggagaacctggagccgagccaggaacgcagcagccaatgcaaccaggcagatcggatacagtcaacctggcacaagatgtcatgaaccagaataccaaccaattagacaccgaaagggaaatggagagacatgaggatgagaaggaagacaaggagaag

SEQ ID NO: 357253 - DNA, 259 bp, Zea mays
ctgccgcccaagtataccagccgcggagtggctgcggtgcccatcgatcttcggggagtgtctgccatcgccggcgtgcagaccatggactcggcgcgaagaaggagcggcctgctgtcgcacgggtctggcaaggcctcctcgcggccggggtcgcggacgctgggatccccggaggaccaagcgctgctacccgaccgccgggaagtcgtcgtgaaggtcgatgggaacgggaacgggcacgcgccgttttccttcc

SEQ ID NO: 357254 - DNA, 153 bp, Zea mays
caaatccaacacggcgtgctctctcgccattaaaggcacggtctttctctctccttcgctcctttctgtttctctctccagagtggagtggttggtgctctcagtcccaggacccagggtggccgtggcctctgccaataaggccgggccggg

SEQ ID NO: 357255 - DNA, 255 bp, Zea mays
ctcctacttgggttgaactgaagctgaagcaggttttttgtctctatgtctgtttttggaaccaaggataggggctctgtcattcatatcaggaagaagagaacacaccttccactcgggaaacatgttgtgaaaactgccagaggcatccagatcttggaggtcaccatcgcgagaattgagcaagcgcacaagcaaccacaggtgttttgtagcctcagaaccaattcagccattgattattttgagaccttg

SEQ ID NO: 357256 - DNA, 206 bp, Zea mays
cgcgctcgagctgcgcgccgtcaggttctgtcactcataggacgactcgcgcctagcttgcccacgcggctacgcggccatacgcctctactcgtgccagccgtttctccctgcaagcttcggctccctgcgcgtctgctccagctcggccatggccgtcgcagccaagtccctttcccccagccggtttttctgcgcgcgaagtt

SEQ ID NO: 357257 - DNA, 181 bp, Zea mays
caagtacgttgtcagctaacgacgtcgccaagtctccatcgcaaggacatcacaatctttcgtcggcttctcaccccattggtttgtatgtccttgatcaccctttcaccgagtcattgcgagcagagtttcatcagatgttttcagctaatttaaaggaagtgttacagcttctcaagga

SEQ ID NO: 357258 - DNA, 276 bp, Zea mays
caagaccaccagcaggactcgcgagtagagcgcgcccggaaagaaaaaaataaccctagccccgccctggcctccgcctcgcgatgtcttgcacggtggccatcccgagctcgccagtcttctcgccctcacgccgcccactctcctgcaaggctgaggccaaggagagttgcagcaatgtgcctgatgtgctgcaggacggtgctatgacaattgatcggcagtatgcattgtcaaatttacagattcgagtatttgtctctgttcccgggagtt

SEQ ID NO: 357259 - DNA, 265 bp, Zea mays
  unsure (1)..(265): unsure at all n locations
gtgggagatgagttcgtagagacggagtactacaaggacctcggcggcgtcggcgagcagcaccacacgaccggaacgggcttcataaagatggacaaagctaaaggcgccaccttcaaactgtctgaagatcccaatgcagaggagcgaaatgtttcttgaggggaaacctggtaccaaggagtgaacacntaattggaaggtggcaccgggtagaaagcagacgaactgagcagaagcgacagctgaaggggactgtatatct

SEQ ID NO: 357260 - DNA, 248 bp, Zea mays
  unsure (1)..(248): unsure at all n locations
cataaaaaacatatctcaacacaactttctaattttatngnctttgaaatacatttctgatttaaagtttagagttatatcatgctgatctcttagctgtttttatactgaaaaagccaaccaagaacctagacttatacatgtccttattgagagattcagaccagacggtcctttattgaaatccgacaattgcgtacgctgccgaaaggtttcagagtcgcagtccacgcgcgcgtagacagagc

SEQ ID NO: 357261 - DNA, 181 bp, Zea mays
cgacaatcgacaacccttttctcgcccaacctccgttctccacgagaaaaccaatatttcagaaaaatggcgaaggaacgttccggtctcgttgtcggcttgaataagggtcacaaaaccacccctatcgagaccaaggctcgcatcagccgcaccaagggccgtctctcccgccgcaccg

SEQ ID NO: 357262 - DNA, 184 bp, Zea mays
gctccagaacagttccaacctgtgatctacttaacctgtatgccttggaagagttttggagaccaagcaaacaggcacagatccaagatattcaacaacagataagagatggttcgtttcggcgtccatgcagggtgtggaatggatccagtttgtcccagttcggaaatcggaatcggaatag

SEQ ID NO: 357263 - DNA, 180 bp, Zea mays
gccgagtgaactggacaagataccgagtagaataggttagcgaagaagaaggatagcttattggaatgagttttgaacatcatttgactatttttactgatgctcatcaatttagctaatttcttggagttgctcgattgtcaattctctgaatgccaagtttcctttttgttcccagga

SEQ ID NO: 357264 - DNA, 259 bp, Zea mays
cgattgctttatgattgatgcacccgactaaagatgtaaaatggtttagaaattatccgtccgaatccggattggaagaagatgaacacaggttcagatgcaatatgtattttttttggatattcagacgttttatcagataacagatacgaatacgtatataaaaaaaaaaaaaaaaaaaaaaaaaaaaaaaaaaacgagaaaaaaaaaaaaaaaaaaaaaaaaaaaaaaaaggggggggccccccttttttttcccc

SEQ ID NO: 357265 - DNA, 119 bp, Zea mays
tcgagcaaagggcttctatacaagacaggaagaacgctatcaagaagaaggatgaaaacatgcggaaagccacatataaactttccatgtgcgtgtcagttacaattatcctcccaatt

SEQ ID NO: 357266 - DNA, 251 bp, Zea mays
ggcggcgtcgacaaggagcagcagcacccggggagggttcacgtcgactccggcgtgttcgccggagggccgcccgtgcctgtcgggacccagaggctgctcaggtttgtggacacgtctcaggtcaccatggggccgcaggacagtcctgggtactggctggtcactggcaccacctggacgctgagaaggggaagatctcactccgcgtcaagttctcgctgctcgctccagtttcttgacacgctagt

SEQ ID NO: 357267 - DNA, 261 bp, Zea mays
tggaccgcgatgatccggtgatggtagcacgagggtcgttatggttatggaagctgaagttgaagacgatcagtgagccagaatggctggccacctggcagaagacatcagctgtggaagtatcaagtaccaatccacatatgggcttcttcatcagctcaaataactcagcactttttttttctgaaacaggcagcattgtatcaccttaacatacgttacaaaggaggttctggatttcatctggggcctcatcagacc

SEQ ID NO: 357268 - DNA, 261 bp, Zea mays
gaaaaaatctcttcaggatcccaaataacaataacactctacatattactcttagggatggctgcggcagcaaaaaggcttgtcttgattactggtgccagtggtggcattggctttgagctcgcagcacagctcctagcaaaagggacgtatcatgtatttctgggagctcgatcgttcgaaaagggtaattctgccctgcaacagttgcgctctcgcaacttgcccgacagcgtagagatgctcttactcgatgtcacc

SEQ ID NO: 357269 - DNA, 258 bp, Zea mays
atccgtgcgcattccgtttacaccctttcaaccgcggcaatgtctcatcttcagtttttatagttggcaaccagaatactagagcctcctttgaggaatttttagtaataagattatagtttcgttttcgtagcactaaaacattcagatattatgaatttcctagcaatttttatattacccaagaagttcaggaaattaagattgccctgcagacgtttgtctgccaatcattagcagagcttcgtcctagccttg

SEQ ID NO: 357270 - DNA, 240 bp, Zea mays
caaaagcctccggatcatgtaagtttcgccaccatcatctttgctcgccgcccagctaaaaaaacaaaaaaaaaataagaaacccagcagcatgcatcgtcattagtagccatcagtcgtagcctatcgatcgtcctgggagccatcccagcattatcgtagcattacctcagcaaaaaccatcaaatcatgtaattagtgtgctcccgcgtgctatttctgctgcactgccggcagtcg

SEQ ID NO: 357271 - DNA, 258 bp, Zea mays
aaaaactcttatctaccactcgtcatcgaacgtcatcacgatttcgacaagcaattgactttatctcgaaccttgcgacttccaccacttgcaccgatcctttgcgagcaatcctaaaacaactaccatgtctcaccaagttaatggcgacgtgagcgctgctcagtattctgccttcgtccagtatctcctcaactaccctgtcatcagcgacggcgtccacaccttcaagtccaacgaattcggccagcgctccat

SEQ ID NO: 357272 - DNA, 254 bp, Zea mays
  unsure (1)..(254): unsure at all n locations
gacaaaaaaaagtgtggatagcggatgtacaaggatcctccacatttgccggctactgtaaaggtccgctattttaccggacgtgttcaagactcttgctggagggcttgcgtacgctcaaaaacntctaatttaaggtaccggactttatacatgtcgttgttggagacagcctaagtctagactcctattaaactcatacaaccacataaatgagtcgtatcttaagagtatcaagtgaataaggtatcaga

SEQ ID NO: 357273 - DNA, 252 bp, Zea mays
cagaagccaatgttgctaccaaggcactagctgcctcggacaatacaaaatcatctgctgcctcatcggggaccagcaacggagtgcaggaagaggcatcccctactaaggaagtactcgatgttacatcgtttcggcagcgtgctgaggctctcgaagggcttctggagctttcagcagagctgctggagactcaaaggctggaggagctagccattgttctcaagccgtttgggaagaacaaggtgtccc

SEQ ID NO: 357274 - DNA, 252 bp, Zea mays
caacaacaaaaatatatatggtgctgcgtatgcccattgtaacagttgatgagatctgtgactccccgtgtgtcccgtgagttgctgatgatttcgttcccccgttttttttaatctttcccccttattatggggtcccaaattgatgcggagatctcgagcgactctgcaaatttcagatgagtggtcaaaaaaaaaaaaaaaaaaaaaaaaggggggccccccgattattgacctcgtcgcccggggatt

SEQ ID NO: 357275 - DNA, 251 bp, Zea mays
ctgtctcatatgtccttcctctgcaactcaccaacctacacatgcaaagagcttcagccacaacagagccctattgtaaataatccttgataataagcagcgtacgttattagctctcccatccaccgactccaagatgaggatgcgcaaggccccggagctgctgaagaaggcggcgactgtgttcaggagcaagactgacaccctaagaacaaagctcttcatcctggcctcgctccgccgcaagatag

SEQ ID NO: 357276 - DNA, 257 bp, Zea mays
cgcgaccctgggctattcactcaagccttccaatttctccttgcaacttcggcgcaaaacattgtgccgctgcacacggtggcgtgtttcgtcgactaggacccttagtgcctgtcagtgaagctttgcgaggtcacctccaacgtgtccgtggctgtgccgggtggaatttgcaagcagtggtgggggaattgctcatcaatgattgaggtcgccgggcgctcgctctccatcaagttcagtccacccccgccatc

SEQ ID NO: 357277 - DNA, 254 bp, Zea mays
ctggaacgtgctacgtcacaatgtgctgttcaaatccgacgcggccctgctgacgtcgacggagacggcgaggatggtgctcgagaacgccggcatccgaggaaggtttgagaggaagttcgccagcgcgatgctcaagatgtcgctcatcgaggtcaagaccgctgccaccggcgagatcaggaagaactgccacgtcgtcaattagttttgtttgatttgattcttcgttgttggattaatggattaacgcg

SEQ ID NO: 357278 - DNA, 251 bp, Zea mays
tgaccattagatcttgatctagtggatatgagatgtgtgtgttttgtgtttgcaaaacacacagattttcctttaaaagaaatctgcgtgttttttcagctaaaaacacacgtgtgttttttgggcaaaaattgcccatgtgctgtatagacaacccctataagttttactttgtgttcttgcaagatcttttgcgcttattcaaactactaattaaggtccggcaaaaaaaaaaaaaaaaaaaaaaacaa

SEQ ID NO: 357279 - DNA, 180 bp, Zea mays
tacggccgaattctgctactatttgctgttgcaagtgaatcctcaaaatttctgtccatctttaaggtagcagcaaagccatttaagggaaagctattatttgtctttgtggagcgagacaatgatgaagttggtgaaccagttgccaactactttggtcttactggacaagagaccaca

SEQ ID NO: 357280 - DNA, 156 bp, Zea mays
attgtgcagaattgatgtctcgtgatcacctcttcgtgaatcatgctggcaaaacgggctgggaacatatcactttcgggagacttgatttacattgtatcgctgttgaatcatgcacacgtcaaccagattcagtcaatacagccgattcagtga

SEQ ID NO: 357281 - DNA, 258 bp, Zea mays
atcgacgtggaggtgtgcctcgcgccagacaccatggcgcatctcctcctcgacaaggagttcttgcagtacgtgtcctcccctgcaccgtgaggcggtgacagagtgaatgtgtggcttgttgctgcgcactacatatagtaactggatttgtaccctttcagcagatatcaagtgcttgccaaaacaaacaaaaaaaaaaaaaggggggccccccgattagtgacctcttcacccggggattaattccgggccggg

SEQ ID NO: 357282 - DNA, 264 bp, Zea mays
  unsure (1)..(264): unsure at all n locations
ctcaatggctcggtcttccgtgaacgcggcgtggagcctacatggacgcctcactcccttgatgagcagatgcaatggttcaagaagcttctcacatccattgcaccgttggagacaggatcttataaatcttggagcaaagaagttagttgttccagggaacttcccaatagggtgcgtcncatcatatctaggcatctttcagagccaaaaagaggattactatgagggacaaacaggctgcataagtggctcatgattttg

SEQ ID NO: 357283 - DNA, 273 bp, Zea mays
cagctacgtccgatccgcacaagggcagtgctcaccggatctataagcggaacaagcccgagctcgccgaggctgaggagcagaaggttgccgcctgctcccaatggcgccggtggcatcagtactacgggcagtgctattggtggtggccggcggagaaccgctgctaggaggagcttcgccgtcgtgacggcgtcggcagatccgctcagggatttcaaggagagcatcgtgcagatgatcgtcgagaacgacatgagcgcgccggaggat

SEQ ID NO: 357284 - DNA, 255 bp, Zea mays
aacgaggcactaggtcttgttatcgataagggcccgatacacatcacatgaccacaaagccactgcgggtcaaccagggcactacagttgctggcaggcaggggcgaggcaacaatactgtagatgaaggcgttgctgttgactgactggatggtgcctatgtgcagttttgtcgctgccctcgctgttagaatattgtattaggctcctatagatgtggggccaagctgtcatatgcgcatgtacaagcccgac

SEQ ID NO: 357285 - DNA, 121 bp, Zea mays
gttttaggagcatgaactcttatatcgtgcttgtgcttaccgtgtactctttaatttggagcaaaaccatttttgttgcttattacaaagcatttaataaccacagcgtacccgtcgggat

SEQ ID NO: 357286 - DNA, 255 bp, Zea mays
gcaaccttgatgctacgctgatcttgcaaaaaccaaaaattagcccattcaaggagacaatccgatcgaatttgtgcgacctacttggggcagatccatctgtggtcaatctcaaggccaagacgcacgagaaagttgacagtctaggggagaacaggagcatagctgctcatactgtagttctcctgatgcgaaagtagaaagaacaaatggcagctaattgtatcatgctacacggaaaaggttgttatctta

SEQ ID NO: 357287 - DNA, 244 bp, Zea mays
ctttctttcttcctgtgaatatacaccactacttgtagcctcttgctggaaacgagtcagaagagaaattaaattgccagactggatagacttcagcggctatgatatgacagggacgtgaaaagtttagcttaaaaaaaaaaaaaaaaaaaaaaaaaaaaaaaaaaggggggccgcccccgattaagccaactatttctaaatcggggggggccgccaaatagtgaccccttcaacccgggaa

SEQ ID NO: 357288 - DNA, 247 bp, Zea mays
caaagacacaattatgccaatatttatcagccatttatttacaatccaagacaggcagacgggctttatatatttcagttgatcacgcctttaatcctcaaagattttttgaatttttggggcaagataacagttcaaattcatctcaagaaattgggcaaagattgttagtacatctcgacaataaacctaatgttttacactcgtttataattgagcgcttaggcgaagtcattctaacagaaaa

SEQ ID NO: 357289 - DNA, 218 bp, Zea mays
gctctcgcaggcactcggtactgacatgagtgatctcatgctcttgataccttggtactcttacatcaccccttcttcaccttcttcttgttcttgctcatccctcctctccggccctctcttcctcctggctctctctagctaggacgatcttcaacaaccctctccccctctaattctcattccctatatagagagaataaaggagagagagaggc

SEQ ID NO: 357290 - DNA, 303 bp, Zea mays
gttgttttgaccgaacaattgttctgactgaagttgcctataaatatcgtggacgagggctatttcactggtttacatgtgttcggatgacgttgttgttctcgatctatgtgttgtgaagcttattgagaagttttttcttcttgtttggttggtttgttgattgtgttcataatgcctggatgataacttgtctttgccacttttgtaggttctgatgtagatcttgttgatgttgaggttttagaatctagactggttgataatgatataaggtctctcaaatcttgtgtatacctaatg

SEQ ID NO: 357291 - DNA, 187 bp, Zea mays
cttgtactgtttgtgtaataatggtcatcacttattcagtatgacattgacattattggtatacataataagtgatgaccattattacacaaacagcacaagtgcacaaaacaaagagatataccatcacttattatgtataccaataatgtcaattccatactgaaccaagaaaatatagctccaa

SEQ ID NO: 357292 - DNA, 263 bp, Zea mays
ggctgcccccgcgccactcaggctgcagcactgctgcctgtccgaggatgacgccggggccggatgcagcgcccagcagcagctcgctgcatgaatgaaagaaacctaagcccatcgatcgacgactcatccggtggcttgggcgcaggagttgtaagccggtgcaaatttttccaaattattagatgttttgtcttttctagattataaagctttcgatatatacacacatctataaaaaaaaaaaaaaagggcggccgccg

SEQ ID NO: 357293 - DNA, 236 bp, Zea mays
ccgttcaccgccttcccttctcttctccggttcctccctcgcgcgttcgctcgctctcgtggcgcaactcgtagaccgccgccgcctccgctctacgccaggtgcctaggtctagcttcgtcggtcccttcgccaacgacgagcacccacccgattgcgagatctgacgcaagaagttcagctaggagtgcatcttgtttacctgttagctaatcatggacagctctcaggatcaa

SEQ ID NO: 357294 - DNA, 290 bp, Zea mays
cggcgaggcatgtgtccttctgaacgatggctgtcactaccttcgcggccttggtttaataacagccactgccactaccgcagcggcaaagcctacctctacttgccctgctgctgggaaggccaatgctgcaggcgatacaagctgtgaccctgctaaggattatcccggcgaggcatgtgtccttctgaacgatggctgtcactaccttcgcggccttggcttggatacagccactgccactaccgcagcggcaaagcctacctctacttgccctgctgctgggaaga

SEQ ID NO: 357295 - DNA, 284 bp, Zea mays
ggaacggaaaggaaaggaagaaggaatggcggacgttctggggatgaattcgatggggaactacgcggggagcacgcctccgagtgcgtctcagatgcccaagtgggagagtaaagttgactgtcgctcggagaggttcaaaaccaactacgccgagatgtcgaagctggtgtccgtccttcactagcgtctacagctgagtctcaatcagggtccagaggctcacgtcaagaaacacctccaagctggtcatctcttagcgagagagcgtttggagttgttgt

SEQ ID NO: 357296 - DNA, 281 bp, Zea mays
cgatggcgaggtgtggcaactggaatgggacatgggcggtatgacactcgcatcaaccggaggagatggcatggttaagctatggcaggctaatttggatggagtttggcatgagcaggctgttcttgactgcagtggatcacatgtctagtgtctacgtgtttcagaaaacattttttttttgttcccagcactagaagtggcggctctggcggcagatttatcaggaacttctttcgcttatccgcccaactattgctgtctcctgtgtggctggttgg

SEQ ID NO: 357297 - DNA, 279 bp, Zea mays
ggggaacgcctctgaaattctcgcgctcgcttcccgctcaaccgccgcctcttccaatttcaagggtgtggacagttcacattgctctgttgatgctattgaagctgcaaaagcgttggcactgtccagcagtgctgttgtcgcggtatctggagctgttgatttcgtcactgatgggaagcaggttttcagcgtgagcaacggtgtgcccatgatgcagaagatcaccgcaacagggtgcgctgtgactgctcttattgctgcatttgttgccatgga

SEQ ID NO: 357298 - DNA, 278 bp, Zea mays
  unsure (1)..(278): unsure at all n locations
ccgccaacccctcctcgccctccgccccggtttccacctcctcacgcgacccggccccttccgcccctttggcagatgcgaggccggggagatcacggagcctgtcggcgagggcgcggagggcgacaactcggagggcagcgagaccgaggtggaggggttcatgctggacttgtcatctgacaacttgtctcgncacnacgacggtgacggcgacggcgacgaggaaggcacagaagagggagggaaatagcgaggcgggatttcgctgtggggag

SEQ ID NO: 357299 - DNA, 173 bp, Zea mays
cgcggtaatccacgttatggtttcctgcatatctcgttcaacgtggcattaccttcccaacggttccagccagtttatgcctcatccctaatgtgggccgaatcaatgcgtaaacttgtcttcatcaatactgcagccagggtgaagctgtgacctcagcttgtgcacggatt

SEQ ID NO: 357300 - DNA, 277 bp, Zea mays
ccggaggtgcggcaaccttgtgcagttcggccacgaatatactagggaagatcgcgaccaatcaatcgatgaccgagttcaattgttcagcattctttattagttttggtgggtggatacttcaatcggtgagccgaacagacagttgttttgagtatgaattgctctgcatctgcaaagttgtctttcgtcatccgtcgtctcaataaggcgaggggaagagatgcgtgcgttccttcccttgctcctcgtcatggtgcatttctccttactagga

SEQ ID NO: 357301 - DNA, 276 bp, Zea mays
gccggccggccaagcttttgagagctcttcgtcgacaagaaattctggggtcaacttgcagaggttccagcaaactcaggcttggcgtatgtcggcacgagctcggctatctgttctcctccagcggcccctgaaatgcagtgcccagtggtgctggataacaaggcgtacaagcaagtggcccgcatgcgtgctgtgcctcctggtttcaagtgacatgggtattattcccggaattctcagatctggcagacttggtctctgtggatattcttg

SEQ ID NO: 357302 - DNA, 277 bp, Zea mays
cagtgggattcattcatgttatgttaaccgctccctaccgccttatagttagagaaaggtgagcgagatctgagtcgttggatcttatgttagcgatttaattaaacaagggggtacacttccttgtaattgtgatgctcatctctagctagatcatcagccacacgtcttccttccacctcccaacacccagcagcttcgacgaacaacaactcattatgcccagagcacggtgaaacaatcaagggtggtcttaccgaggatcaaggcggcaatg

SEQ ID NO: 357303 - DNA, 276 bp, Zea mays
atcggtcccacgtcgagagttctgcggtggggaagaggaacaggagctacggcggtcccacacggatggagcagggctggcatgcggggcccggcccaccagtcagccaaacacatgcggccagcggaggaatgagcgatggcccacatgccagtgtctgatgtccatgccgtggaggatggcgcaggtgttgagtggccgacacggtggatcccaaagaccagtggtcggacccaggatggtaacgcggatggaagatgggccacgcgggagaag

SEQ ID NO: 357304 - DNA, 274 bp, Zea mays
cggcactggtggatggggtcccggtgccgcttgcttttgatcaggacggagaagaaggcagcaggaaagataaggataatttgggtgatcccaaagggaaggccgatcgaaacaagaatgggccagagaacagttcggaggagaaaaatgagaatggcagcaaggccgatggcggtcaggtccagcaggaggatgttaacggtggggctgatggtggtaaccacaacctggttgtcagccatgagacacacacggccagtgagctacaggcgtt

SEQ ID NO: 357305 - DNA, 274 bp, Zea mays
ggaacccgatgcagccgcggtacggagaagcacgacaaccgctgccggggcggtacgcgctgtaccacttcggcaccagccgcgccgccgtcgccgccgccaccgccgtgacccatccgttcgatgttatcaaagtcaggcttcaaatgcagcttgctgggcaaagaggaaacttctcttcgactgggtacaatatttacacaaatggttgacagggaagggactcggtcactctacctgggacttgcaccagcgttggcgagagctgttgtct

SEQ ID NO: 357306 - DNA, 273 bp, Zea mays
ctagatgcaaaaaaaaaaatgtacttaaaaaagttaggacttatagtttggaacgggagagtagcataaaatctatggtcttctaagtgcatcgatgggcaactctcaattttctcgtctcgaaacttgaccataaaagtttaatcatgtgtacaattcttagttcttacctaggaccattaaagtctcacaatctggcaatatacttctcagtttttccagtgaagtgtcttttagtcatgaagttaccaaataatgtgcttaactaccaaa

SEQ ID NO: 357307 - DNA, 275 bp, Zea mays
gggagtccatcggcagccggtgcaagcatgcggacgagtacctggatgcactgcacactggcattcgggtggccgcggagctaagcgtagctaacctcttcccgtcgtctaggctgttgcagagtcttagcaccgcgcgacgcaaggcggtaatggcccgcgacgagatggcgcgcatcctcgggcagatcatccgcgagaccaaggaagccatggactggggtgacaaggcttcaaacgagagcatgatctccgtcctgctgaagctgcagaaa

SEQ ID NO: 357308 - DNA, 259 bp, Zea mays
gtcccgacctctcgtatctctcgctcgcctccctcgtccgcggtccgccgccgctccagatccagccgtgggagcggggacggggcagggcttgagcacgctctctgcagcttcaggctctgctcgtcggggtggaaggtgcaatcgagtgctcccaggctctcaacctccacacactgaaccgctggtacccgaggtacggccacgctgattttgccgattcctttctttccgtttgcagccttggcatcgtcctcct

SEQ ID NO: 357309 - DNA, 192 bp, Zea mays
gtggatgcccccatccctccattcaaggttggtggcgggtgcgccggtgtctctctcagcccccctcgtcaaccggatggtcacactgccacgccatcgctacacgcagtagtaactgcactggcatagcgacacggcaggcacacgcttcttccccgtgcttgcagtcgcagtgcagctgtttccacacaa

SEQ ID NO: 357310 - DNA, 279 bp, Zea mays
gcaagaactgaccgacacctgcccatcgcggtgcagtgctatctggatggatgtgaaggcatcaaataattgcaacctgtccctgcaagcaccattcattgcttgaagctgccataagtgcgttgtggacgatgtttccccgaattcttttggaagcagattcatccttcagacacttgtgctctggtcatcacacaagaacctcatcgtccttactctgacgaccttctggacttcttttttccacctgctgttgtactcgtttcctggaggtgagat

SEQ ID NO: 357311 - DNA, 278 bp, Zea mays
acgggacagagattcaacctctttggaagacaggttcgtgcggatatcagcccatcccaaggcaaatttctgcgtggaaacgcatccggcctctggaccgtcgggcgactttccacttctcgagcatgtcgcgtctcctctcgcctctcgctcagagtcgctcgagcacgccgccgccccgcttccgctcgcctgagcacgctgccactagagtcgcccgacgttgccgtctccgtcgactgccgttgctcgagcacgcccccgctcctctcgcctgg

SEQ ID NO: 357312 - DNA, 276 bp, Zea mays
  unsure (1)..(276): unsure at all n locations
cgccgactgcagattaataaagccgactgtttcgactgctacaattacaattctagagataaaaatatcctataaacagtagaagctagaataaagaggcgtcttgttgtggcaaactgacacgagggttaagtgatacgtacttccaatagctctcatgcactgcaactcacagttactaaaaactgacaacccctacgtttccancttcgatatcaactcctnaagngagnaggagnaancgagtgagncttcatgtttaggaaaagtctggta

SEQ ID NO: 357313 - DNA, 274 bp, Zea mays
cgaggccgagatcgcaccactgaaggtgaaggcaaccgccctggaaagcgacaaagcatggacaggaggaatggtggtggcggtcgtcgacgcggccgtggtggtcgggaaggcggtcgcgatggcggcgcgagaacaggagaagacgtctaccagaagtggtatccttgatgacccaacagagagggccaaggcagagaagcgtgctgctaggtttgctgggaactagtagttctcttcataaccagtacgacatgaaatttggcaagtaaaa

SEQ ID NO: 357314 - DNA, 164 bp, Zea mays
tgtggcctttcctgtcgagctcaccaatgcgaatttaacagatgggagatgagtcatgtttagcttcatacattgtttacagcacaaaatgtatgaagctaaacatgactcatacattttgtgctgtaaacaatgtacaatgtgtcataatgatttgtactgtg

SEQ ID NO: 357315 - DNA, 278 bp, Zea mays
cttgctcagagaagatacatcgcagaatcaatggctgctgaatcggaagttatgagtattcgaaaggagtcttcaaaaaagtcgagttttactagtttcaatccctatttacgaaataaacgagttcgaacaacttgggacttggacagtcttcaagaggaattgaacaatgttgttcctaaaacaaaaactcgatcatcacgccgaaattatagacctacaccaaaagtattttccaacgccactttagacttgagactagaattagagaacatacg

SEQ ID NO: 357316 - DNA, 108 bp, Zea mays
ttcggctcgagcgctaccgctacctcctcccagccgagccaccaccatcactcctggtcatcctcctccccgccaccgtgccctctccactggccgtcgcgtacgcca

SEQ ID NO: 357317 - DNA, 276 bp, Zea mays
tggctcttcccctggcggtagtactcctggtggctcctctcctggtggttctacccctggtggctcttcccctggcagtggttcccctagcggtagttccccaggtggtggttcatctaacggtggtgctcccggcggcggtgtctcgggtagttcgccctccggcgataacacctctcctggcggtctcgtccccaatgttggcggtacttcgacgactttgggtacaacaggctcgggcactgagactggaagttcagttcccatttacactgg

SEQ ID NO: 357318 - DNA, 275 bp, Zea mays
ggatcggtccgcagctcctgggcatgcacatcgtttgttggaatgcgagacatggcggatacaagacgttgctacgcgggcccttcctcctgcagctcgccgcgctgggcgccatctctagcgccccccctctctgctctcagacccgacgccctgcagcctctagcacctatcctccctcgaatccaagagcacctggatccatggcatcttcttcctcttcatggccggcagcgacgcataccgcaagtccttcgtcgggtcggccgtcgagc

SEQ ID NO: 357319 - DNA, 256 bp, Zea mays
gggcatgggatactagcaagtggagaggatgcggagagaataggcgaacatttatgacagcatggcggtaaaagaggatgctgtagatatatggtgcgatgaagatgtcattatccaatgatgagccagtttgaactattatgagtaggtcttagcaacataggattccttatcaaaactgatcaacctgtgtgcacttactttggacgctatggcttctgcaagtatgggccagcctgcatgttcaaccacccct

SEQ ID NO: 357320 - DNA, 244 bp, Zea mays
gaaaggtccaagaagcaggaagccctttcgagatctgagctgtcaatagaatataatgatgctgatcaagtttctgccgcacatactggaactgaggatcaagtcggccctaacaactctgatagtgaagatgtggatgatgaagaagaggaagaggaattggagggttatgattcttcttctatggcagatgatattcatgagttcaccttaggtgattcctatgactagttctagatcgcga

SEQ ID NO: 357321 - DNA, 273 bp, Zea mays
  unsure (1)..(273): unsure at all n locations
tgatgtgtttcccactgatatgcgtggcagaaggtgatgtcatgtccccctaacggcagattgttgctgtgcatggttgttaagcttctgatggaactgaatcaaagtgatagtgtttctttcaagtagagtatgctagctcttaaatcttagatagtacacttatctctgatcagtaatcttgatttntcttttgcagttctcgcccctccaacccttcatgatgcttagataatatacagtgctgggttttagcnactgtttgagttttta

SEQ ID NO: 357322 - DNA, 258 bp, Zea mays
ctggagcagatggtggcctgatccaccggccctcactggctcatatcatctagctgaccaaagttatttccttgaatcattttttcccctcctttctttgcttaattcgattcgtacgacatgtttttttactagtacatagatagggctgtttcacaataacatttgctcatcaacaagaagcatgtataaaatcaaaatggccggctgggctactgtttttgccgagtgtgggaactgagcttagatgcagggtca

SEQ ID NO: 357323 - DNA, 265 bp, Zea mays
gggtttttacttctgcgcacagctcatactggcgttgtccctgagtggcaggtcagagactttagctgtcaatgaacaaggattccattgcattttgtagttgtcaatacaaccaggattccgcagtgttttgtccgtgtcataagctttgtgctttgtcacaggttgtggtatgcgggatcctgctgatcgcgatggcaatcggtaactttgcaaacacagtggacaccctggtaaccaagtcccggttcaaggcgaagatgaa

SEQ ID NO: 357324 - DNA, 114 bp, Zea mays
ctgatttggcacatatatatataagccgagacagtgggagaggagagctggacaacaggcaacgaattgtaattgaatcttctgaatactaaaggaaagcggtcacatcccatt

SEQ ID NO: 357325 - DNA, 102 bp, Zea mays
gctgcaggaggcttcatcatcttcaaccatagctggaaagatgttattccagttggcaatactggaagctttgacatgatgtacagctgtttgataagagaa

SEQ ID NO: 357326 - DNA, 278 bp, Zea mays
tcggtggccatcccccctctcctggcaagaaagttctgacagctgaattacttgttagatcatactgtatgatctgagcaacttagggggtgtttggtttgagaaatcattccatctaagatgagatggtgcatcacgaatcaattcctcaaatttggtggaatgacctcattcctcatgttattactaactaatcaactattaagaatgaggtggtgattgatcaaaaaaaaaaaaaaaaaaaaaaaaaaaaaaaaaaaaaaaaaagggggggggcc

SEQ ID NO: 357327 - DNA, 276 bp, Zea mays
gcgcaccctctgaggatcttcatggtggtgagggacttcctgtccatgctggaccatgtatgcaaggaggtcggccagcaggacaggacggttgttgttggatccgcaaggtccttccgcatgtcagcgaccacggcaatggcgaacctcaaagtgtacggccagcacgcaagagacaacgacgacgacgaagatcgttggtcgctgtaggaaatcggggtcagggaccacggagccaaacgaacagaaccaaccacaagaaccctatatagatga

SEQ ID NO: 357328 - DNA, 165 bp, Zea mays
ctcacctcttctctctcttttttctttcttcagacactgcctgtctggtggcggtggtaccgctggctctgcccagtcgcctggccactctccggcttggttgcctccccgttcggcgacctcccgcatccgctggcggcctcaccgcccggcccgccggtggcg

SEQ ID NO: 357329 - DNA, 270 bp, Zea mays
atcagagtcacttgccgcgctggtatcccaggtgagctgcatgatgccgttccgcttgctctcggtggtcagtagctgccggctgctggtggcaacagatagatccgatccgtgcgtgcgtaaacaaaacggaagcttagggcaagacgtacgatggtgtggtggtgcagggactgctcgagcaggattcggtggacgcctacgacgccccgttctacgcgccgagcgcacgggagatcgaggaggaggtgagcaaggagggctccttca

SEQ ID NO: 357330 - DNA, 269 bp, Zea mays
cctgttgcatatccagcacgaacatcctgcaggtcagccgtttgcccgagaagttactgagcacagtcaagagtccaggcctcaccttgactcaccggtgagcacaagcaaccaaataaccgctgactcgcgacaactctgcaaatcagcagacaacgcccgtcatccgactgtcctccccattgcgcgattattgcaattagccagcacctgattagcgactgagataaaatggcccctccccctcacaggccggagagccatctcca

SEQ ID NO: 357331 - DNA, 282 bp, Zea mays
cttgcttactccggccgactatctctgctatttgtccccttgggagggcgtgctgccgtcggtcggtgctccagcgactgtccctatcggcggcatgatcggatggtaagatgatggctagatgtggctagagttgctgaaagagctaagagtacttgccatcgccagattgttgaaacgcgactggaaactagtggtccggccttcaacaacggtagcgtggcaattcagcatggtggtggcgtgtctctatctgtcctcaaatcgcggtgcaaaggaggt

SEQ ID NO: 357332 - DNA, 277 bp, Zea mays
cacaaggttagggcaatcaatctctcagaatgaagtcactttaaaggagcagaaaggaaagcaacaacttgatcagcagtcggttatgcagtccgcacgagacagcttcgtgctaccagatctcaatctccccccacaggactctgccgatgtttcaacagttcattgatcactccagattgctgcgactttgttaaccgaataacaagtgtacatagaggaagcagggtaccaatctacggtggcggcaccaccacgtcatccttctgagaatgac

SEQ ID NO: 357333 - DNA, 277 bp, Zea mays
actagttctagatcgcgagccgccgtcctttttttttttttttgagtaaattgacgtcacattataaaccagtccagtaaggataacagaagtttcaaccccttaacagcaacatactgcagccgagacccaagggcctaaacagcataacataaatctatcgccagtaacaaactgggcaataactagcagcaaccataactcctcaacctttcatagctttcgaaataaaaaaaaaggtaatattttcgagacccataattcgtcacattgggcc

SEQ ID NO: 357334 - DNA, 266 bp, Zea mays
ccaagatgcaggccagcgcgcgcgccgaggagctgagcgactcggacgtgctgagaggcctcgtcgcgccggtggagactgagctggagaccgaggaccacgccgagcacacgctgacgcagcagagatacgagcaggccgtcgccgctgcgcccaacaattcgctcatccttcccaacttcgcgcagttcctctacctcgtgcagaacgaccacgaccgggcggagcactacttcgagagggccgtgcgcgcggagcggcggact

SEQ ID NO: 357335 - DNA, 266 bp, Zea mays
aaaaatttatcgcctttgcaatggcagcaagcaactatcttgaattttctcccttgagaatcattacctacgtgttttcttttgttcaacgtcttttattttgccaatatcaacgtgctttcgctttagctcgttcagtcctcaacaattgccttgacattcctcttcataacaacgaagacctttcattcccttcaaatttcctcaagaagctttcaggtagcgtctcttcaaaatccgagacctcccaacttcccatctctcaa

SEQ ID NO: 357336 - DNA, 269 bp, Zea mays
cagaaacatcagtttactggaaacttcacagaatttgtcatttaccatcctagtttatctactttgctctatgtttttatctttcatattaaatttatgttttgccctgctgctttcagtgaggatgataattaggcacagtggtaacagcaacttatttgttctttctgttctgttctggaattcgaacgaacctcatattcttatggcagtttagttctgtaaatccaaataaacatggttgatatttattgattaatccagcacat

SEQ ID NO: 357337 - DNA, 272 bp, Zea mays
catcgatcagcaccgactttatattgtggtttggtactgcgacgaaatctacattacaaaaatacagggatcggagtgcgccatagttattttctgaatgatggttccatggaacgacagagtgtaaagccagctgtgacaagcttggttgctcaacgatctgtttaactttcgtttggagaagcatctaggcacatcatgagatgttacatatatcgtacgtattctattaatatatatgtacccaccatccaggtgtaggatatatgtat

SEQ ID NO: 357338 - DNA, 267 bp, Zea mays
ctcgcgtgcacccggcacactccctcgtttctgccgtgctcctcgcgtgcactcccgtctgtctctgtgggggtcggcgacgcttggcagcctccatacgccaggtgcccaaatctctaccttcggtaccttcgccggcgacgagcatcaccaggtttcctgttgatcatggcacagcgttcgatctgcttgcttcggcgctccatagggtttacagtgccaccagcacagagagccctgagtacaactgccacaccagcagcggag

SEQ ID NO: 357339 - DNA, 276 bp, Zea mays
ctatctcaaaggaattcccagcccagcaagttcagcaacactcacccaccatacccaccaaaatgccctctcaaatgatcgtcctcgttaccggtgccaacaagggcatcggctacgaaatcgtcaaggccctcctcgcttcccccaagtcctaccatgtactcttgggaagtcgctccctcgaaagcggccacgaagcggctgcaaagcttcgcaacgagctccccgatactaccaactcggtcgagcccatccagctcgacctcaactcagaca

SEQ ID NO: 357340 - DNA, 270 bp, Zea mays
cgctgctgctacgggcagctgcagaagcagcaggaggaggagcagcagccgtcgctggggcaggaggaccagtgggacgacgagtcggcgcggcacctgctgatgtacgacgatgaccaagaactaacaccgtccaacctggaagccatggaaagtacagctcactccctcctttttatgggaccaaatcaccatacatgacgaaaaagctagcttattattggtgtgcatgcgcatctatccccctctcttcttgatctgatctgctac

SEQ ID NO: 357341 - DNA, 281 bp, Zea mays
ctcaacctccatgagaatgccaccatacctgctgatccttctcctgatgcaagacaagatcgtgagttcttcgacaccattgctattggttctagtgattcccacgaccaatatgcctttgaggctgatgtgttcacccattgtgatgagaggtttctgtgccaagagagtgctaacctggcggctctccaagatgagctcatggaggagaacagcttgagtgatctccttctcactgttgcagatgcggttgaggctggagattcaagccttgccttggc

SEQ ID NO: 357342 - DNA, 276 bp, Zea mays
gaccgaccaagcagctaccccgactcaacctgcagcgccctccatagatctttccactttaaccccggaacaagccgagtacttccagaaatttggtcgtcttccaaagcctaacttgataaagcaacacaagaaaggatttgattcagcggattggcaattagccaacaaacaaaaggcacgtggtcctggtgcgaacgtagaaggaactacaccaaccaagaaaccattcgttatgaccaagcaataattatgaatgtgtttgtgtttattttc

SEQ ID NO: 357343 - DNA, 271 bp, Zea mays
tttatagtccccaatgtcgtttcaaggcaaagtttgtttggtttctctgttttcctaaacactggcttctcaattgcattctcaatgtgcatctgtactagtttgacatctgtggctattgtgattcttcctggaatatcatctgtccatcacctttaaagcataacattaccctgatggccatgtgatctgtaggtccctagaaaggaaaatcgtgatttggaaaggaaattcatcaacaaacctgagtcggaaggatgcttaggaagcg

SEQ ID NO: 357344 - DNA, 268 bp, Zea mays
gtttacacttcaatttcgctatgaagagaccagggtcccccgtggaagaaatgtcaccaagtaaactcgccaaagtcgaacacgaataccttttctatgcagtttgtaacaagaagcacagatttttcgtaccacaccaacagtgtacgtttggaggactggtgatatcgaaggtaatgatagattctggctgcaacactctcctccttccactcgagcgtgaaggaatggtaccggacctgaagcttctatttccttttgagacgca

SEQ ID NO: 357345 - DNA, 274 bp, Zea mays
tgattttcccactttccaactcaaacacgactccgacagtgtcttacaactcttcgcagtcttgaagagtatcggattttcgactgctgagcccattcatcacatctgcgccccgtagtgggtctttttatctgacttttgtctttcacaagcatcatgaagttcgcttttggtacctggtggcgctgaaaaaagacaacaaacgactgatcatattccataaacacaactcctgagccttttcatttctggtgccttacagacaaagtgtatc

SEQ ID NO: 357346 - DNA, 268 bp, Zea mays
ccaggcgcaccgcacacctcactgccgctcccttctcgtctcgtctcctctcctctcctcggcggatccggcaccgacccaccgcccctctgctcgttccttccgccggaatcgctgctcctctctgtgtgctgtcgatttgtgcggcgactgttagtttggttcggtcccatccttctgttggtaatcgatcctaccttgccctgagaggaagaggtgcttttgccttttgctttttagttttagattagagttgtttcatttcagt

SEQ ID NO: 357347 - DNA, 261 bp, Zea mays
ggccaaaatgttcttcattgcctttcaaatgctcgacatctagagctgttaggtcattctggagaggtcattatgaggagagaatcgttaaattgtccaacttttagcaacctgaagactttggccctgggagaatggtgtatcagtacggttgctgacttcgacatattacttgtcttgcttcagcattcacctagtctggagaagctttatcttcagcttgaaatgaaccgtgacatcaagaaggcattggtaagaggt

SEQ ID NO: 357348 - DNA, 246 bp, Zea mays
cggaagctcataagaggagaccgagtgaaatgttccgctctactggtggctggacaccgacgggcttcttgtggtctctgacgagcgcgaactcgtggaagagtgcctgtcggaaatcctgtgccccgttccccaaaggagaaaaagaaaatatacgaacagaagtgtttctcgtcagtcttgagtctgctactcgccgctcgctactggacgcctggctggcgtttcgacttggatgtcgctcga

SEQ ID NO: 357349 - DNA, 134 bp, Zea mays
tgctggtgcgggaggctttgcagtacttatcgcgtcgagatgcctttttccaaggggccgacggctactggacatcaaatagagtgcgatgacaaaagcctattcttcggcgtttggagggcggtggagcagtg

SEQ ID NO: 357350 - DNA, 156 bp, Zea mays
ggaacgaatgccctgcatgatgttgtcaagggaagttaagagcccgtggagtagatggtggtacctgtgcattagtcgaggtggctcgggagaacggaattagcccagctcgaggcctaccgagaggtacagcagatggtttgcaaaaccagccag

SEQ ID NO: 357351 - DNA, 163 bp, Zea mays
attgccatgtctgtctcgagtgagatgtgccccagctgctattggcaggaagagcgagtctgcggcttgctgtgtttctgcttcttcttgctgtcctgcccgtctggatttcgtttccgtttgatcggagctggctctcagcttccgtttttcatttgtgtgg

SEQ ID NO: 357352 - DNA, 262 bp, Zea mays
ggcctgccaggaggtccaggacgagatcaagctcgcgaaggagaggaatggagagcttggtggtggctgggaatggagtcatgttgtcggatgaaggacggtctgaggttgcaaattggggaagtgtgtgctcagatgccaagggatgagctcgagactaggctggagcagatgaaagaggatggcggtgggggagtgggggagggtagaggaggagaaggaatggatcctggcccagatggccgagctgaggaagatgact

SEQ ID NO: 357353 - DNA, 299 bp, Zea mays
  unsure (1)..(299): unsure at all n locations
gacctgcctgcagggacgcgggcaagctgggatgcgtggaaggaagttgcaagaagcccaagggagggacgaggtgcgagagccaggagagcctgctgtgcttgctgcggcagggtggcacgatggaaggctgggttgngacgagggggtggctggacggatggccgcaggatgcaggcagcgaggcagctgtgcagtggtggcaagggctcgggctgcgagcaagatgcggtcctggggtagatagggaaggatccacgagggagggcttgcatttggtgtgtgtgtcccgctggttg

SEQ ID NO: 357354 - DNA, 256 bp, Zea mays
accggcgaagagcggtgttggatcgcgatggtaggcgagctcgaggtagccgtgatgtgactgttgtggaatcccggagtcagccttctagctcgaagggaagggaggagtcctcgagttcgtcgagaggcgggtcaaggagaagcggcagatggtcatcgtggtgggcgagggtgctggggcaggagctgatcgggagaagtaggaatttcgtggagagccaagacgcttgtggaaacaagtggttctggatgtc

SEQ ID NO: 357355 - DNA, 276 bp, Zea mays
caagtctgcagtcatcaagtcatgaccccgtgtggtgctggcatggactgagtcgcctgtgttgggttgtggtgtgctgaactgtgggcagcactgttggcctgaactgtttctgtgctaagggttagtgttttcaatgtgcgaagggactgaagcttagggcaaagtgtgggcagatgttaggcaccgaagcaaagcaggcccctgaggattgcatgcagcggtggagcctgttgggagcgaaagctctgggagagacgtgaggctagtgctgct

SEQ ID NO: 357356 - DNA, 239 bp, Zea mays
  unsure (1)..(239): unsure at all n locations
aaggatgtggattgaggggtatgtgggtgtatgaaggccttgttcggttatttccaatagcatatgggagtgggatgaggattggaaaagaaatgtggagagaggaagttgtgagcttggggtgaggatgtgcaaagtgcatgctaatgctgcagtgcaagtccagcatgngatgtggaggaggctagagccgatgcaagggcgtgaagggtaaatgtgtggagctagtgtgtgggatg

SEQ ID NO: 357357 - DNA, 190 bp, Zea mays
gaggcggacggaagctcgggaattgcggctgcgagtgcggaggacggagggcgatctcatttgggcaagccgagcacgaacatcgtcatccagagggggcgggggacgagtgccgacgtgctcggggcgtaggcttcggcagcgaggatggtcagggagggcatgatgctaacgtggctgcgtgccgtgg

SEQ ID NO: 357358 - DNA, 262 bp, Zea mays
ctacgagacgacggtcccgacgcaggacaccaagcaggcgtaccacgagataagctgcggacggctacgctgcgcgttgatgcggggaggtacgtgggtggggatcgggccgtggaaggacacgctggtgcctccggacccgagagagaagcgcctggtagcgcccggcgagctcgtcgggcgagcgcacgctctggctctcgaggtggagccgtacagcttcaggaacgagaagcagtagctgcagttcgacttccggcag

SEQ ID NO: 357359 - DNA, 184 bp, Zea mays
gagatggtgggcggagaattaggggatgacggctgcggcaccaagggaaggtatggccggcccctgggtggcagcccctgggaggtgcgcgcgcgatgggcaagcaagaaggctccccctgccaggctcctgggtgggccaagctgggctatgggctgacggtggagtgatcgattgccctgcc

SEQ ID NO: 357360 - DNA, 273 bp, Zea mays
gctcggagccaagattggtgaaggcaatgctaggattttgtagatggcatgaggcttgtgatctgagggcaagtgcagaatggatttagaaacttgggaagagagggaatatttagaaaatagagaatgcaggagatatgtatgtgtccaaataggagaaaattggagattgtgttttgcttattggcctgggggcattctagtgagagtggtagattaacttcataaaaattgctaatgaaaaaggcagcggaaccttcaatgtgtgaaaag

SEQ ID NO: 357361 - DNA, 239 bp, Zea mays
ctgtgctagatgagggaacaccatggcaatggcggcgtagaagagttctttagacattgtggatgtctgccgctcgtggtgtgagtttggtggtagggagggaaatgggcagtggcagcgcgtgcaagccggttgccagggagcagcagtgtgtctcggcatggcgagtgttgggcatgaatggtggtgttcctgtgttgtggcggtgcgaggatagggtggctagcacagagatggca

SEQ ID NO: 357362 - DNA, 225 bp, Zea mays
cgcaattggagaggcgactcgagatgccggctcgcggcaggatccattccagtggataacgagaagactttgatctcacgagaccaaagacaacgaacgaagaactgatgggtgccgcaggaggagggggaggcgtcgagattagtgcttggatgttgttttccagtgcttgtgtttagtgttgagaatgatgaggagtcaggtgggggatgtaaactctgtggg

SEQ ID NO: 357363 - DNA, 259 bp, Zea mays
cgcaggaatctgagaagagggccctgcatagagaaaagcttgaaagatgagaaggaactggcgactcgggagcaggaggtgcttgatggaaagtggaagaagtacgagatgctgggaagctcgagtgcagaagggagagatgagtaagcttggtcaagaagatacggtgaacttgaacgactggatgagtcatgtcgtgtctttttcccccttccccttggagcgatggcggaactggtgtgatgatggatggaatagg

SEQ ID NO: 357364 - DNA, 236 bp, Zea mays
ctacagttgtttcaagatgatgaaatggtaggagtagcattcagtgaatggaatcggcttgacttttttgtcccagaaaaagggggggaaaaaaaaagggcggcccccgattagtgggccctgcgccccgggatttattccggggcggtgcgctgaaggggtacaagtttccccaaaggggggcggtttaaggggtggggaaaacacgggggaagcgggttcccgggggaaatttg

SEQ ID NO: 357365 - DNA, 120 bp, Zea mays
ctcgagcagattggacgcgcgtgttcaaaggataggaaattcaaggcggtttgcgtcatcgtttggcaggacgtggcaaatcaaccaaacggtggaaatgccatgtgctcacgatttggg

SEQ ID NO: 357366 - DNA, 188 bp, Zea mays
  unsure (1)..(188): unsure at all n locations
gaatgtgtgtgtgtgaatgatgggaactggagctgagctagcgggtgtatgtcctgcctgggggcgtgagggaggcgtgtctagcctgggctttttgtttaggagggtatgcttgccctgcaggtggctgcgctgtgtgaatgtttgtgggaagccctggtgatggagctgaatgcgnagggagggag

SEQ ID NO: 357367 - DNA, 273 bp, Zea mays
  unsure (1)..(273): unsure at all n locations
cgggtcgagaagaaatgcggcggctgaagcttgggcttgtgtgaagcaggttgctaaggaggaacccttcgataggggagaagctgcttcggttgttgtgcctgacagagggccgagaaagcagcgaaggcgcagtgatgcgggaggaaagcaggctggctgngagtgtgggcgagaggtgtgcatgactggagaatgcagtgggggcacgagtggtcagcgtgcaggaggatggtgtgcgtggagaggcatgctggtgctgcaggctcgtgg

SEQ ID NO: 357368 - DNA, 268 bp, Zea mays
attaattaattaatcgattaagcatcaaattgttctttcgtttgcctgcagggattttctaaattcttatcatccacgcgttttttactgcacaaaaaacattatccaatcgaatgtgtcatcaaatatcctcttataaagtcataattagcttcttcaaaagtgctacttaagttttgtcgttcttaattattgcttttgaacaaaatatgaaatggacgctcattacaatttcatgtggtcctgacagttccaggcctagaagtac

SEQ ID NO: 357369 - DNA, 143 bp, Zea mays
tgaaatattgattgtcaaggacgctggtggagcaccagatgtcttaaccagagtagagggggcacaaccgagtccaagtgatggcacagcagatgcagtgatatcagaatatggaagctaaatggctgattactaaatgtaac

SEQ ID NO: 357370 - DNA, 271 bp, Zea mays
ctcggacagcaactcctcaacgcaccacagaagttcagtgtcgcgcaatatagattctaacaagatggcgatgtctgaagaggaggtccatataagtacaacacaggaaattatggatcttggcgaaaggttaggcaagactactatagctgcatgggcaagcaaggaggagaaagctgctgcacgttctacggatactgcagccgataatgctgttgatgtcaacagggagaatcgagcggcagattggcaggaggcagagaaggcaaat

SEQ ID NO: 357371 - DNA, 176 bp, Zea mays
ctacactaaagcttacatctcactctgcagtctgtactaggtaacgtggtatccacggaccatagtagcttcgacctatgcgttgttgcaaactactccgttttgtttcaaattacaagacattttatcttttttagatacattgcctttactatatatctagacagagtatatct

SEQ ID NO: 357372 - DNA, 261 bp, Zea mays
ccgggcccgatgaatcggccaataaagcatcgtcttgatggcctccttaaccacaccgtcatactctccagcctgctaaacaacgtagctagccgccatcaccaatccacaagctagcagtgatgggttgtgcggaggagatcaatctggccgaaccgtggcgggatccttcggcgtgcgtgaacaaaaatttggagagcaaccgggactagtagactggcgggcatcgcatcgaccgccggggttggacaccaccgtgag

SEQ ID NO: 357373 - DNA, 264 bp, Zea mays
cagggctcctcgtcggaggttggcgtggtgccagagcccttcggcggcagcggcagcgacggcgggagctttgagctcgacttcacaaggcccaagcctcaggcctacatgccatacaccgggactccccagagccacagcgtaggaccccaaccaagctcccaactttcgggacgcacatccgttagacactccatgtgctcgtcctgacgtatcgttgcggactcgatcggttccgtatgcaggtgccatccgcggacgtgg

SEQ ID NO: 357374 - DNA, 255 bp, Zea mays
gaccttcacttccatttttctgacagcgacttactctaaccaaagaagaacaaccttcagagcccaaaagcttacgaggtaacagcaatggagaattcgtcgtccgctgcagcatgccactgtttggttctccaagagccatgcggcatcaacctcttcctcaaattcctcacctggtccgtctcagtgatccagatactcctcccctgctcatgcaaaccctgcaactgcaactgcagctgcagctgcaaccaa

SEQ ID NO: 357375 - DNA, 255 bp, Zea mays
gcaatttgaactctacaagctatctatcctacacagtacaaacattcatgccccacgcagagcgagatacaatgggtgagcctatggtcaacggcgaaaagcctcattctcaattcatctctcatctcacctcctaccccgttatatccgactccatcactaccttcaagaacaacaaatacggcgccacctcgatcaaatacgccgaccaaggctacgagcgtctcgcaaaaccactccttccctatctctccg

SEQ ID NO: 357376 - DNA, 256 bp, Zea mays
tgattatattgttgcctcaagctgggtccgcccgtcttcttcttcctcctcagctaatttccattattccgttccaatttccaaccgcacccaggagcaagtctgggttcgcgccacagttggagtttcgacgggtctcggtcgggggtggtgccttcgtcgcggccgttcgacctacaccatggaatcgccgcagcagcaagccccaccgccgagccagggagctagctctggaagctgcgacgctcctctgcag

SEQ ID NO: 357377 - DNA, 253 bp, Zea mays
caagctagtaaatatctgatcattcagtttgggggcaggagaagcaaaacacagcacactagagtttcatatgctgagaaagctgaagcctccattaaaaatggcatgtggatttgtggaaatacaggtctcaagaaaaatacacttctagctcctatggcgggcgccttggccaaaaacagaaacaatgcccagaaaggcttccaccagatttcaatcagaattctttagtatgccaaaaatgtagaacctc

SEQ ID NO: 357378 - DNA, 155 bp, Zea mays
gtccactgtgaataaaacacggaccattttaatcattagcagtaggcagcagggttcgtttttcttttctctctgtcaccttctctcccgttttgtggaacaaaatcatattctgttgtaagcaaatttcaaactgaatagcttgttttgtgggg

SEQ ID NO: 357379 - DNA, 252 bp, Zea mays
gtcaaagcctgaagccacgtcggcaactggatctaccattatgacataagcagaaatctaaataacacaaaaaaatcaggattactatatatttgtgcacaaagccacgaagaattgcatgaattgtggacaaagctgaaattcaaggatgctgaaagcctgcagcagacttctgacatggagagtgtgaatcttctccaaagtggggggccatgagatcaatgttgtctcggatcaatcacaaacaaggtt

SEQ ID NO: 357380 - DNA, 248 bp, Zea mays
ctcgaggacttagaaagcgccagtgaatccgaggaagaagatgatgaaaacaatcctttcggagatagaaatgaagtgtcgactccgtttattgaaaagcagcaacttacctggaaagaggtctagtgacattagtcccgagaccgaacgatgctattccattttcctcataccgctaaactcagatgttttttgcactacagctatatgcgatggctgtaattatgttgctctttggttatctatac

SEQ ID NO: 357381 - DNA, 129 bp, Zea mays
ctggctctgaccactcgcccaacggcagggacgcagatgcagacatggccacctctcgccttcctcaagggcatgcaggaggccaccaggttcttgccattgccaaccagcgacgctactctccacaca

SEQ ID NO: 357382 - DNA, 250 bp, Zea mays
ctggcattgcgtgcgatgcgagacggcatctgttcatcgtcctccagctagcccaccaatgcaccttcgaaaacacacctgatatctcacccgaggataatcaatcacacggagaaagtaaccttttgcttgtcgtcaccatggctgaatacaaactggcctacgagtcagagctggatgcttttcacccttccttccgctatgaaactcgcgatccaagagaagactggaaaacctccgcccttcgcgg

SEQ ID NO: 357383 - DNA, 254 bp, Zea mays
cccacaggtactgtggtgctatggatctcggccgcgtcggcaaggacaacaaggcacaaaagtgtgccgcctgcttgccggtcaaggcacagatggacggcgcgaacgaccgcgcgacgaagcgtcgccgggaagagaagatgtcgtttgctctgggctacgattaagcatcgccgcgactgactctctcattctacgcgagcgtacgctgcaacatcatcgcgagcgaagggagcactctcacgcatcgacag

SEQ ID NO: 357384 - DNA, 253 bp, Zea mays
gcagcacgggcaccgccaccaccacagccacaacggcggctccaagccgccggtcgcaaggaggaggcagagcggcggcggcggcggcaagggggtcaaggtggtgtacatctccatccccatgaagctcaccgccagcgccgaggagttccgggccatcgtgcaggagctcaccggccgcgactccaacgtcgccgaccacgacctcgacggcggcggcgcctaccacgtgggcgcgccgtcgtcgtcctcg

SEQ ID NO: 357385 - DNA, 247 bp, Zea mays
cacggatagcatcttaacctgtttattcttgtcaaaacagttcccattcccatcgctcaactacccgctacaatgagtgtcacagttacacatttgcaagaaggctctggcgagagtcctctgcagggagacaagattgtcatgcactacaccggctggctgaaggacacctctaagccggataacaaacaggacaaattcgactcttcggttgaccgaaactcaacttttgataccgaaatcggag

SEQ ID NO: 357386 - DNA, 246 bp, Zea mays
cttttgtatcatgtagttttgctgagtacttgattggtttaggtcaagaactaaggatataatgctagctgcatttaaattatatagtttctagtactgtacttctcgaccggtggggaaagaccgctcccatggtattgtattaagaagaagcttaaattgagcccaaccgagaaaggtcacgaatctcggccccccttgcatcacgactcacgacggtccgccatatataggtcagatctttat

SEQ ID NO: 357387 - DNA, 115 bp, Zea mays
aaaaagaaatatgaaacgtgagccaaagccaagccttgtgtagctgtatcgcggcatgagctcgtggcatgagctggacgtgtttgttctgatggcaaatcagatcttctcgccc

SEQ ID NO: 357388 - DNA, 244 bp, Zea mays
caggctcaggctcctgtcattatgccggtggctccttcggttccgtgacgctagggtgctccaagtagagctgcatcgtgagagggtcacagctgactgacttgatgggggtgatctgcggaggctgcatccacagctcggcgtccgtaggaatccacagctgagcttctcggtcaccgtccccggggagggaccggaagtaggcggtcacctcccagctaccatctgtcagaatccaagatac

SEQ ID NO: 357389 - DNA, 247 bp, Zea mays
gttcatttacaaaacaaaggtcaagattagatcgctcaggggctagctgtaaaccgttgacaggttgatgaacgagccagatccgaactcgtgcatctcctcgcattgatgtaatctagtgcgtcgatcggctatcagtcggcacggagtaggtctgtcgaccctgtgcgcctcattaagtcttcgccgttggatctagatccggtggccggttggtgatcgtggttaagagtagtggggatctaat

SEQ ID NO: 357390 - DNA, 165 bp, Zea mays
gcagttggttttgtgtgtggtggcgtcgcatagcatgtacggttgagtctgatgaatcccggttgctggcagtggcacacagacacatggatgtatcatggctagttagttagttcatggtgtgtgtgcaagtgctatcttggagagatttagtgactgtatacc

SEQ ID NO: 357391 - DNA, 274 bp, Zea mays
aacggtacaagtttcaaatgcaaccaaaccaaccatgccacgaaagtggacaagcctcaagcagtcaccaggttttctgcgaattctgcactagtagcttccttatcagatgggttgcctgaatctaagaccttgagactgcaatcgttcctgaggccttagattcaggcaacccatctgataaggaatctactagtgcagtctcaaggtcttccaggatgcacgagctccattcagaaagctgtttcacagacacatcgtctgcgaaagaaca

SEQ ID NO: 357392 - DNA, 278 bp, Zea mays
attaaggtctagtaggcagcggatagatggaatagaatagattccaggagaattgggttccgcgggtcatcagactcttcttgcagacatatcatcgatctctctccccaatctagactagagcctggctccatccagtccaattgcatcagagccagtagtggactgatgcaaagcaaagggatgggctctttgggtcgtcggtggcatgcaactcggtgaagcttagctctctctggctctggctctgatgagggagaagctgaatcgctcttgga

SEQ ID NO: 357393 - DNA, 181 bp, Zea mays
tctatatctccagttcatatataagtatgctaggattatttggtttggcgatttcaaaggtacaggtgcgagggcccgagagctactaaatagctaccatctgtaaataatggttatattggatgttgaatttgtaagagtagactgagcaaaagacatctggatagttcctaaaagaaca

SEQ ID NO: 357394 - DNA, 268 bp, Zea mays
cttcttgaattgcagacttgcagtaggcacattgcacaggcgtcagtctcaaggaaggatgtcctccaaatcatctgccgtccgagagtaccttgtaaacaagcaagcaccgtggatgctggaggatagagactagacagtagttgctccacggtggcgcccgttttggtcagctacttttcgcgcctactcaccaatgtctaagtcacaaaggagtggttaattatcgtcctctgtgatcaaaaaaaaaaaaaaaaggggggccgcc

SEQ ID NO: 357395 - DNA, 271 bp, Zea mays
agaaacacttctctattaacctttgagatgtttaattggatacaaagatatatgtaacctaagcagttcaaagcatttagaagaagaaaaaattctcattcgagggactcttgtcatgtcaatgcaggtctgtgggctctgctgatgcatgcctccacgctgaaatcagaaccagaattccactacgcagaaaaaattctcattcggatgccctgtttccttagagcctcacacttgtccctgtacgctgcgaccactcttttctctgcac

SEQ ID NO: 357396 - DNA, 277 bp, Zea mays
cgacctgcccgccattgcattacaagcacattagcacgacttagaaatcaggcttatttgctaccgctcatctgcatcccttgcttacgcgacgctcgacgcagcaccaccaccagttttcggtcgcagagtgtttcttcgcccgctacagtgcatcaataatctaaggatcatcttccgccggtgtcacgctccttctacaccaccttaacttcgaatattaatctgagcaaagtctctggtttatcacgagatttgctgtcgatactttgatagt

SEQ ID NO: 357397 - DNA, 247 bp, Zea mays
aattaatcctacgacttttagttgatttgagagaggaatcagccacatgggagatgagaacaatcccacgcctatttttttttgcgaaagaaaaaatagtgttgcagcagtagggaattttgggcaatacacaaacgtgtgacctggcaatctagtggaaatgatgaagactatggcagtcgctaaatttgatctcgaagcgtttagattaaaggcattcgcacggaagccatggccaatacatgtg

SEQ ID NO: 357398 - DNA, 272 bp, Zea mays
gcttcccgcaacgagcatcagaaagagaagagggatagagagagcagagagcagcaagcatggaaatgggcgaaagttcgagtactactgggagatgcagcattacctggagtcagaggagctcagcctctacatgggcacccaggacgatgccctgtcctgctacgactccagctcgccggaaatgctcttctccaactcgtcctgggcgccggcgggcgtggcggccacggcgtccgagaagcgtgagggccccggcggcgcggcggccg

SEQ ID NO: 357399 - DNA, 264 bp, Zea mays
atccgtttattctttgcactcattttcgaagaatattcttttgttctcgtttgagcgaattattgttcagcatttgatcgtttgcaggatttgatctcagcataccttcctagataaggatcacgctcagccaagttcttactctcactcaccatacacaactcgagtaagaaccaagcacaacgaaatttgcaactgaggggatcgaatcagtattggacatcgaccatggacacaaatcctgagatagtccagcctgcggac

SEQ ID NO: 357400 - DNA, 271 bp, Zea mays
cttagcttcaaattggatttgcttacgttaaattacttaggtgatgggtggcctgaagaatgtctatgcaattgacaccgatgaaactagcttctatgttttttagctgacaacatcatcgtacgattagtattatactctttgcatatcatagtgatttttcttattccatatctatttttatactacttttcatatcatagtgatgtttcttattccgtatctatttttttaactctcgtagcaacacacggacacatacttagttata

SEQ ID NO: 357401 - DNA, 264 bp, Zea mays
cttgcgtcgtcttattgttttgtcgtaacgaagcctacttgatgacagcgtgcttcgttctacttccttttcgttatgctgaagccatgttgtctacacctttcaccatgatgaagcctgatggacgaagcttgcttcgttcctcttgtgttatatcgaagcttttctggtaacgaagcttctgtaatatttaatagtatgctgaaagaaatggttagccgtgtttttgaggacgttcggaagagtaatgccccaacacaagtg

SEQ ID NO: 357402 - DNA, 131 bp, Zea mays
cgatcacctgccttaaagcagtctatttgtctactcgccgagagctcgctcgctcttcttctatagctactgcatgctctgctagtcgatcagctaggcagctaggtagctagctccgatccacacaacat

SEQ ID NO: 357403 - DNA, 180 bp, Zea mays
aaaaaatcgtatttcaaacaactcttgagaaaagatcggaagaagatgagcgcaacaccgaagaccgttgggacactcgtgacccttgctgaggatgtgaagtgggaggttgttggaactctcgatggtgaagggagaggtgttttcgtttctttgctttatggtgatctgaaaacgaaa

SEQ ID NO: 357404 - DNA, 253 bp, Zea mays
ataatgcagaactttgacgaccaatagtggcacctattatccgcaattcaagaacaacgccctcaagatgccgagaagaaaataaacgttcacaccctccctcgttatttagtgatccatccaagaaaaccaacaaataaacacacatcctcttcagtctggagcacgaatcgacctgctactgtcgccacagtctcatagaagtcacaatcagaagtgaaagacggaaaatacgttgtgcaaaacctcttaa

SEQ ID NO: 357405 - DNA, 261 bp, Zea mays
ccgaacccgacgacaacggtcaattgatactcaatcacgccctctttgacttctaaattacccatcgtggctccgagttgacctatccctccatcctcacaactgcaaacatggccgatatccaggagcgtctgaagaagcttggcgctgtgtcgcgcatcggtggcaagggtacccctcggagacgcgacaagcgcgcccctccccggtcggccgccgacgacaagaagctccaggcttccctgaagaagctcaacgtcc

SEQ ID NO: 357406 - DNA, 255 bp, Zea mays
tattgttcctttatttccttttcttggatttatttgtttctttgttagtagtgtagcggtttttagctgtgttctgtattgtaagacaagtggcctcatatgtagtgcccttgggtctggagtaaagcagatcaggatgaattgtaaataggaccaggttgtagataccttttttttgtgctcgaatcgggtggaagcagcgtgccgagtgggccttgtaacctcataatgcaataaactccgtttcccagtttc

SEQ ID NO: 357407 - DNA, 293 bp, Zea mays
gcaggatcttgtaaaacttgagttcatacaagctgatgctcatgaactgaatacaaacaaaagatttccatgacacttaaaccagtgactgttgtgagtgctgggttcttttttggacaagtacctctttggactgttcttttttgagtaaggactaagggcgctagatttgacatggtaatctgaatttcaaaggtttttgattccttgtgcccgatgggaatctaactggttgatatgttcaccagtcaccatttggtttgacaaactaactggtatattcggtaatggga

SEQ ID NO: 357408 - DNA, 204 bp, Zea mays
ctcgtcgggaacgattggtagtagatctttttggagtaggtaggtactcgactcgccggtcccctttcgttcacgggatgatgccggttaatggtttcgccgtgcgcgtagatccactgtaaaggggtcctttgggcctgccgcctacccttgcgttgcgtcgatcatctccctccatggatgctctcgacaagttttgggtct

SEQ ID NO: 357409 - DNA, 167 bp, Zea mays
gtcacatgcttgtctctgagctccctacctatcactcccattgccatctccatcctcctgctgtgagcgtgctgtgtgagaccggccgtccggaatctgttgacgagtgagaagcaaggatcgccatagcgcggtgagcgagttcgtggagaaggcgaaccctacgt

SEQ ID NO: 357410 - DNA, 282 bp, Zea mays
ccttttccaagtctcgcctccacggctcgtcggctccatccctattcctctcgagtcgcctccgtcccctttgttcaccccagaccccacgcgtgtggctttgaaagagcaccctcatgcatggtctggccggttgaattgaaggagaactgggcgaccggcggttatccaactgtctctaaccggatagagaagaaagtgctccactctccagaccaggtaccgaataccctcgcattgcgcgtgtcgaatttttgccaactgcatgggggctggggcgtc

SEQ ID NO: 357411 - DNA, 190 bp, Zea mays
gcaggaatcgtcatccaattctattgccattcgtatcgagtagtacagtgcagcactggtacaagctccctcgagcacgacaagtcaaagcaaggcagaatctgatcaagaaaagaagaccaaagcaaaaaccgccttctctcccttcgtcccgatccgtccgtggatccggtcgcctattcagagccgc

SEQ ID NO: 357412 - DNA, 297 bp, Zea mays
  unsure (1)..(297): unsure at all n locations
ggcagtcaggcccttcttcggcggcgggcggcgagggtttggaggagggcggtgcgcaacgcaacaccctagctctgcggcggcgtattctcttcaagtggctcgctgccttgccgaccccgcgagcgcaatgagggtgaaagtgatttcgcgccccaccgacgagttcacgcgctacgcagtctgngactgcagttttaggggtgctgatcaccagtgggatggtaatctttttgcaactgttggtgctcaagttgatatatgggatcctgacaggtcggagccagtacatagctt

SEQ ID NO: 357413 - DNA, 295 bp, Zea mays
gccttttgttctacattccagtcccctccggcacactgtgttcttccgttcctctcgcgtggttgtctggtgccgacgactgggccgccgccgcctccgtcctacgctcggtgctgaggccttcgggacttccgccggcgacgcgcaccctccgggttgaaatccctcgagaacaatggggcgctcggttctttcagatgaagaagaagatgagttcgaggctgacgaggaggatccgcggccctcgcggaagaacagggacgatatggacgagcgcgatgacgacgacgacgac

SEQ ID NO: 357414 - DNA, 274 bp, Zea mays
ctaaccgagcatgtctatgggtacaatcccgtcccctacggagctgcagataacaatgttggcagggataaatcaaatgctggcgccctagccaaagctctgtacacgtcgatcgccatccctatgctgctgtgctgcttcatctactccctgttgtaccggacgtacccacgagacagggagagggcacagatggactctctgatcactccagagctccagcagattgaactggaaagatgtcatgggcaagtggattattattctggaagga

SEQ ID NO: 357415 - DNA, 276 bp, Zea mays
atcacttactatctgcaaaactgaaggacttgtccaccagtggcaaattgataaaggtgaaccggaagtacagaatagcacctagttcacccaattcagagcgccgaagccccaaaatgccactgttggaagatgtccaaagagagcctgtcaagatatggagtgatgatactaaaacccttaccagatctcaagttgatgctgaattggcacgtatggcaaccatgactgctgaggaagcttcagtggcagcggctcgagcagttgctgaagcag

SEQ ID NO: 357416 - DNA, 269 bp, Zea mays
aatatttagtttaagacatcaaaacaacatgcatagattagtcttaaaatatacttaatttacatatatacatatttattaagtatattttaagactaatctatgcatgttgttttgatgtcttaaactaaaaattgaccaagttattgagtcagttttaaaagcttgacttcagccttgtactaaaccataaggattatataactcgagggagcatacaacaagagaacatagaacaacctaaaatttcttgaacatggacaataata

SEQ ID NO: 357417 - DNA, 266 bp, Zea mays
ctcgtcgtcgagtatcagcacgcaatagttgacccagagcagctgtggttagtgcggctcaagagctggctgcttgtgttttcgctactagtattctggaaggaagcatcgtgtgactatcgccgaagcaactgcgctctccaagtccagccccctttcccttcgcacacggttctcaggacttgtggttccgccgttgcaggttgagacagctgaacggattcggaactattggctctggctcacttggtcgactgctccggtcg

SEQ ID NO: 357418 - DNA, 273 bp, Zea mays
gtagctacaagacaggcttagcttagagagctactagccagggtaactaataaattgacgaagaagaccgtgccagagcttcttccatcccgcgcgccaccgccgcgcgccatgggaggaggcaagtcgttcttctgccccagcatcttcagctttctgcgcaagtggaggcgctacgacttcgacatggccgactgggacggcgggtacgcgcgcaaggtgcgctccagcgacgaggactacggcggctggtgggtcggcgagcccgacgtc

SEQ ID NO: 357419 - DNA, 266 bp, Zea mays
ctactagcaacgctattcattcgtctgtctgctctcgcccttgctcgcactcactccgatctcctcccacgctttccggtctatcaaccgattgtaaaatatttgcaatggcttatatcagcaccatttctatgatgagctctcctctttccagggctttggttatgtctcgctatgccgctcgtccattgagcagcatgtgcttaaacgctagccaagctaaaatgtctgctgccatgccaactgtgcaaactcgtgctttgcaa

SEQ ID NO: 357420 - DNA, 271 bp, Zea mays
ctccatctacaaccaggacgcgatcgaactgtccgccggcaggtgacgacgtcgggtcgtcacacggagcttgttatcgtcgacgtcgcagtgccgacatgtaactgtatatgtaaggcattgttgcgaacttgttagcaaaataacatctgtgacactcacttagtgttgatacgtgcctgtattttattatttgtgtgtataaggaaggatgatttaaaaaaaaaaaaaacaaacacaaacaacataaaaaaaaaaaaaaaaggggggg

SEQ ID NO: 357421 - DNA, 252 bp, Zea mays
ctcgagctctagccgaaaaaagaccttgtatttgatagaatgtgctgatccattcctcaaaccgaatagaaatgtgaggtcggttgtgattaatcttttgatcttaggtaaggtcaaggttctactgggctgctcgctgttgcaggattgtgtagctgttgtagctccaattgagaaatattatcagtattaagctgctttgatggtaaaaaaaaaaaaaaacgaaaaaaaaaggggcggcccccgtctttt

SEQ ID NO: 357422 - DNA, 243 bp, Zea mays
gctagctagcgctagaagtctagaagcagctagtagccacgccagttagtttccaattaagctagccatggcggcattgctcagcatgcttctcgtcggcgtacgctggtgcagctagggatgcacccgagcgcggcgaccatggacgaggacatcgagctcatctggggcgcgagcacagtcacttaatcatggacggcgaaaccgagtcgctggcgctgtccctggacgaccagcagggct

SEQ ID NO: 357423 - DNA, 241 bp, Zea mays
ctcccaggggccaagtccgacccccatcggagcttataaagcgcacatatgggaggttttgttttgcacaagatcgatcacagctagctagctgcagcacagagagagataaatagatagatatagctcgatcggagcaactggtgtgtgaggcgatcatggcgtttctactcggctatatgttaaccggcggcagcagccggtcggctgcggcggtgaggcagctgatgctatcgaggtt

SEQ ID NO: 357424 - DNA, 127 bp, Zea mays
gggtaggcgagcaaggcaaagcacgccaagcgcgagtccgtccaacaaacagcccatcactcactcgccgcggcgaccatccccgcagttctcactccagtctccacacacctctcacgaacgcgcg

SEQ ID NO: 357425 - DNA, 152 bp, Zea mays
cggctcgaggcaagtatgacatgcacaactgaatggtaatttaccacagaatgccgtacctacaacaccgcaacaagggtttacatatctacataattgattaaacatggtattgtcctagtacgatttgtaatttaggtagaatttctttc

SEQ ID NO: 357426 - DNA, 250 bp, Zea mays
agctgtttgagttttggagaaggatggacactgcatggcaggaattgaaggtatcatcggcgagaaagtagtcgaaaaaggctggacaacttgttgtggtaaagttgtttcctatcgtgtcgaaagcagtgggaaagctgatgttgctgctacttgaggcagatctttccgttattaatatagtcttggcttcggtcgatgctccggtttctaccatagtaccttcatttccttcgagcggtagttcgga

SEQ ID NO: 357427 - DNA, 255 bp, Zea mays
tggcggttatggtggatcttctggttcatcagctggcggttatggtggatcttccggttcatctgctggaggttatggtggctcttctggtgcatctgctggaggttatggtccatcctctggttcatcttctggtggatatggtggttctagcggtcacgatgatagtcctgttattcctgtctttatcatccaaaaagaagaaggaggtagctccggaggttatggaggttcttcttctggtggttatggtgg

SEQ ID NO: 357428 - DNA, 144 bp, Zea mays
gggagacgtacgaaacaaccgtccagctgctgcagatctacgaccagctgatacccaagctgatacgggaccaagaggtggaagccggtgtgcgtgcccttcgcaacatcgcggaaagcatgcgagcacggctggaacatcatg

SEQ ID NO: 357429 - DNA, 148 bp, Zea mays
gttcgggatgcagatgagtgcacctcacgaggatggcaaatggatgcagtttctgagcgaagacgcctttaacgcaaccaatcctttcttcacgagtccagcttcttgcagcttctcatgcctcccatccaaggtggatgttgcactg

SEQ ID NO: 357430 - DNA, 260 bp, Zea mays
cttgattaatacaatgggtagcattttgagtcgtgtctccagcaaaaaagtactactaccactaccaaagaagcaaaaatggctcccgttggaatgacttattatgaaaaggcccagagcaccttcaagcctcctctgattgccaatgataatgctttcttgggtgatatttccagcagtgaaaagaatgacgccgacaaacccatttcttgcggtctctaccggttagaaaaaggcaccccactcgtctacgagtacac

SEQ ID NO: 357431 - DNA, 251 bp, Zea mays
gttccaataagcaaaagaagagaaaaaagaattcaagtagctcaagggagaacgccacatcaaatcaacttatttgataagttttctgggttacctgaccaaaatgcaccagcaacttcaactggaaatctgcaaggtggagtaacaaaatccataggggctgattcacgaataaaagagagtcatgaattatcccaagctaatggtaacaggggatgcagtgtaaatgcattaaactctagtgctgcgcg

SEQ ID NO: 357432 - DNA, 245 bp, Zea mays
caaaagatcaaatggccgacgcagattcagccgatcaacgcggaggacgcggtggtagaggtttcggacgtggacgtggacgtggtggattcggtggcgatcgtgctgctggtgaaggatgccgtggaggccgtggtggacgtggtggccgtggaggcaatcgctcaagaggagataaggatgatagaggagaatgggtcccagtcaccaagttgggtcgtctcgtcaaggctggcttcatcaag

SEQ ID NO: 357433 - DNA, 248 bp, Zea mays
cggctcgagcaccaccgtacctgccgaggttattaaagctgcttcttggtggcgtttgcagatacaacagagccaaaaggcttcgcctgaaatggccgacaagttcgaaacagctttagttacccttctgcaagagaaagtgaacggacattggtggactaattgcccgtggaagggactaggccacagatctctttctttggatcgtttgagctctcgacctgacccggtcctactaaaagctgcaa

SEQ ID NO: 357434 - DNA, 252 bp, Zea mays
ttctcctccctgccgcgcatgctctgcaatggcgccgccagtcgccggcgtcgtgcgtcttgccgcggcctcccgcgtattagttctgtccctctacctgctcgcccgcctcctcttgcgcccctacgacacctccgctactctccacccaccctgcctctcctctttctcctcttccccggacggccacacgcccgtctccgccgctatctcgtcgctggccgtgtgggacggtgtccacttcgcccgccc

SEQ ID NO: 357435 - DNA, 229 bp, Zea mays
caagatcccgaggaagctgaacgactactcaagggcaggtataggattataaatgtctggcgtcctatcaatggcgccgtgcaatctgctccattagcaattgcctctgccgcgtcaggcaaccccgataaagacctggtaccgatcgagcatcggtaccccacgagaacgggcgagactatggccgttgtgtacaacccggagactagatggaattactggtctggta

SEQ ID NO: 357436 - DNA, 274 bp, Zea mays
actgacacagcgtctgtactccttgaagccattgggtacatcagattcctccatagtcaaattgaggtccagctcttctctctcacaccatctttctctctctctccatgcgtgcccatgcctgcagccctggcctcaaactgtagcacagtacaaggatcatagataaagcattgccttgcatgcatgcaatgtaattgttccgttgtttgttttcacacttgtgtcacttaacaccaagcactttttggagagctgctttacaatactacag

SEQ ID NO: 357437 - DNA, 281 bp, Zea mays
acgcggaagaacacaaacttcgccaaaaagatgagcattcacgagatgcaaaatcagatttggaaagatcacgtttaccctccagaggcagggaagatatccaccaatcttatgcaaacagagatagggttgacatacagggcaggagttataataaggtaagagagactgaaattttgccaaggagagatgatggtgttcacagccgacgtgctaaagaggaagatttgaggtagagtacaatgttgaaggtggtgcaaggcatagaaataaggtgaggc

SEQ ID NO: 357438 - DNA, 274 bp, Zea mays
gatacattcatggacgacacaaattaacttatggtgttgatttggatcatattcgatggctaggtgtgttgcagaggatagctattggatactttgtagcagcaatgtcagagatttggcttgtcaacaataatttggtggattcacctgtaccatttgtgaagaaatacttcatagagtggttcatggccatggctattacagtactttatgttgccttggtatttgcctttatgttgcaaactgggaatttgaaattcaaactagcaattca

SEQ ID NO: 357439 - DNA, 270 bp, Zea mays
gcgcgacgcatcagggagacggaggtcatttacgaccgtgctccctccgctcgctatcgctaaatggcatgatattccgtcactttattaaaacatctcagctgaatctacaacaccttgggagaggatgagagaaattaatcaagtttgcatgtcggagagcgagttatcatgatttatcatcttttgagtgttttttggattcggggctctattacttgccgaaaggaaatgaagcttgctcaaaagagaaggagaatgtaaagcgag

SEQ ID NO: 357440 - DNA, 279 bp, Zea mays
ggaaggaaagagaaagagggccgactccaccagtgaaggcgaacctactgaagccaaacgccaaaggggtgtaacagaagttgtatctgagcctgccactacttctacttcaagacgtgagttaatcacccttgtgggtaaagccacggaggaacagctccaaaaggtttttatgcaaattgtgagcgatcattctctccaagatgtagccgttgagctccttcgcgaagtgaccaaaaaacccactatctttatcgatatctccattgatggcaagcc

SEQ ID NO: 357441 - DNA, 161 bp, Zea mays
cgtttcttcatgccaggctctctgtaccagcaactgttcctgccgcggttacttctacgacgactcgtcctcgtcgtgctacttggtgaagcacgagctcggctccttcatgaacgctgactccaccaaaggctccgactagctcggctacatcaaggtgc

SEQ ID NO: 357442 - DNA, 273 bp, Zea mays
acgaaatgcacagttctcagaatgattctgcaaatagtgatatagaaggttctttctttttcaagccacaaatgagagcttctcttctgtctcctggagtttcaataatgaacaacacgaagttaatcggcgccaagcttatgtgctatgatccgcctgacatatcacatgaccgcaaattgttctcaaatggtttctcatcaacagagcatgactttacaaatactgtactgctcaccaaccgaatggtgctagtgttaggagcacagctga

SEQ ID NO: 357443 - DNA, 268 bp, Zea mays
gctgacgaagccactgatcaggctcttgatcccgtcaaggcacctatccagggaaccaagcgccctttctgaaccttccagcccgaagtctttctttgagcagctggccgccaacagccctggacacccggatcttgagaatggcataagcctacgacgcccggcgagcctccgttttctcctaggaagcccggcatcgtccgtccaccattactggcgcaattcgatgacagtttcaggcggccggtgtttggtggccgtggcttcg

SEQ ID NO: 357444 - DNA, 271 bp, Zea mays
cgatgatttagcacggagaggctcaaggctgtccacacagcctggattgttcgatcgctcttggagctcgcagctggagcgagaggactcgaaacaagcttacagccctgatgcgtcgcagacatggggaatgcagcagttacaatcatatctacagtcgcctcaactgctacagtggtcgtaatcatcgctctcatcagaaggtgccgcgtcgtgaggaagaaatgaagaagaccctgctgcagaaagtcctggaggagattgagaaaaa

SEQ ID NO: 357445 - DNA, 267 bp, Zea mays
ctgcattgaaacaggcagatcctattaacaactccgcattggctctctgccccagccatggacccatgacatcggtggtttcgcgcacctcaaagacatgggtggggaggcatcgcggctgctgcacgccctctagagaatgcttatcgatcatcaggtgcattcaattacgctttcggtcgttgcattgagaaatgaatcagtcgaactgtgaaccaactacttgaaatttcacgtgtggtcgggtatagtggcaatgcataagcc

SEQ ID NO: 357446 - DNA, 284 bp, Zea mays
aaaggagtcaagctggagggagaagaaatgagctgactacacaaaggcagaaagaggaggaaagaaaagagcttgaaaagcaacagaagagagaggtagagaagaaagagctggataagcaaaagcaaagggaggaagagaggatggagatggagaaggagaagaaaaggcagcgagagagggagttagagtaacagagggagagagagcaatacgaaaggaaaggtggaaatgatgtggagagggacaacaaaaggaaactgatagatgatcggtatgatcca

SEQ ID NO: 357447 - DNA, 114 bp, Zea mays
aacataatcaattcatatttattcaaacagattcaaatcgtaccagtcacatatgttttactctaaaaactacactcaataccagaaccaaactaaaatctccacacaacatac

SEQ ID NO: 357448 - DNA, 279 bp, Zea mays
gcaacttctcgcgaggcatcagcaggacaatctaaatttttcattacatgaagcttgagactgtagacagcatgattacgagtggctgcatcaatcgcctgactcacatttacaacctccgtttcgctgacatgtattgagagtgtcaggtgtacatggacttgttttgacctcggaacatacctgttgggtggaattgagctgtgaacatgatgttacgatctgattaaagtctgcttttaatacttttcggctgttagtgttttttaaatgctttta

SEQ ID NO: 357449 - DNA, 275 bp, Zea mays
tgctcacgggcgtgtcgcagttcatcgacaagcctatcatcttcgtggaagaggagatcgtggaggccacgatgaaccttgacgagcggtgcaagatcggcagcacgtactaccgggcgaactcgacggggaggtgtttgcggtgaagccagcgaaaggtgacgtgtcggcggagctgaggatgatgcagatggtcaaccacgccaacctgatcaagctggccggcatatccataggcgctgacggggactacgccttcctggtgtacgagttcg

SEQ ID NO: 357450 - DNA, 273 bp, Zea mays
ctctcgtcgtttatccgcctcccatccttgctaccctcctccgtgatctctgctcaccaattcctccaggattcggatttaggattgggattctggcgccggaaccgaagcggcgacgcgctggagccgcggccggatcggtgcgtgcttctcccgtacctattttttgatggccaatttttagattctgttgcggttgttgtatggaacgcgatccggttcagttggcgcaattccaaccggatttccgtttttcccaaccgcggatttctt

SEQ ID NO: 357451 - DNA, 282 bp, Zea mays
  unsure (1)..(282): unsure at all n locations
cgacgtgtggcgctgtattgtggagcacaacattactccagctgaggactctgccaaagagctaatagcagggctgcttgattttggcaggtttactgaggtgacgaagcgtgctgatgagatgattgacatgagagttgagttgtcacggtccacaatggagaatatgaagcgtgcttnttaaaaggctggcaggcaccaatcatatgacaacattgcaagaaggctaaagcgatattagctgcacatgaatgctttaatcagctgaaactttgcggctca

SEQ ID NO: 357452 - DNA, 154 bp, Zea mays
gtgaatttcttcctgtatttcttttgcttctttaacacttggcaaatttggctatggttccacggctctgattgagaagggatgctcttacctttttggtcaaggcctgtccaaaactaagaaacacatgttggtagtatgatttttctctcta

SEQ ID NO: 357453 - DNA, 270 bp, Zea mays
cgaagagccactgcacacacagcgcggaggtccacaagcaaaggcgcgcgcgcgggctgctcgatcagcatcagctagctcctcagcagcctcacccatggccttggatgcgaaagccctgcaggaggcgagggaggcagcagcagtccctgttggtgttgccctcgacgacgacgctggaaccgtgcggcggcgaaagaggtcgtcgtcctggaacggcggcgcttcgcctgcgccggtgccggtgccggtgccggtgccggtggtagt

SEQ ID NO: 357454 - DNA, 198 bp, Zea mays
cgcgcagaattcggctcactgcgcgggcgtcgacgtcctcgctgtcgtcgtcgccatcttcctccttccatgctgccgccgccatctcgtcggcgttcccaatccatccaaatttcgcggtacatgcatggacacctttcccttagcttggaaagattactagctagtagctctttagcacggacttgaactggtctg

SEQ ID NO: 357455 - DNA, 264 bp, Zea mays
cacatggaagtcattggcgccgatggcgccatgtcgggactgtcgacaaggttgaaggcaacaggataaaactgaccaaggctgacagcggccaaggcagtcacaaggggcaccatcacttcatcgacatgagtcttgtggccgaagtggaaggccagaaagtccgcctatcggccaatgccgacgttgcggtaacgatggaacaagaaaaagcctgatcggcttggccgtttacgacttcccgtgctgaccgccgtcgagcgg

SEQ ID NO: 357456 - DNA, 266 bp, Zea mays
ggatgatggctgcagatgccctgacggattcaagggtgatggcaagcacaaatgtgaaggtaagggacattttcctgaggcccattgatctttttttagtagcgcttgcctgtccttggcagcttgtgctgtatcgcgcttcggagttgccttttgctactgagccatatcatatcacacacatatatatgatctggctcgtcacgctcctccccatgcgacgctgatgtggaaacgcgcgacagatgttgatgaatgtaaggaaa

SEQ ID NO: 357457 - DNA, 261 bp, Zea mays
  unsure (1)..(261): unsure at all n locations
ccgaaggggaaggttgaaaacaaggaacccatggaatggcattagctgcctgcactcgttacaagatcctaaacgtgtgtggtttgtcagtcagtcagccttatatccatgcaaaaaattcagagagaagtcaatattcatagcatccgaggttcagcctttggtgtgcttaactgcttatgatgagagctgagaaggcaatgtgtgancaagaatctggtcaacaagaacaagactgtcctcgctaactgataacttata

SEQ ID NO: 357458 - DNA, 266 bp, Zea mays
ttcggaagttcttcgtcaactgcccagtgccatggctcgccttcgagataggagcattgccaaatgtcgcatatcttcagctggagttcgctgcgacgctgccaacccagaccagggctccatcgggcatcgccaacatccacaggatcacggacattgctctgtgctacggggaacactacgccaatagccccagcgtcaagatcatagtggaggccgtaaagaaacagatcgtcgagcattgcaacccgatcgacctctacatc

SEQ ID NO: 357459 - DNA, 251 bp, Zea mays
gcggggcttccctccgtgcagccttgttgagccttgccgttgcgttttccaccgtcctcgccagctctcctccgtcgatgtccccagctcgagcgtggagctggagcttgacgcggcacgtgccgcgatacagcgagcggcgcggtggcgggtggatcctggccgtggcaatggcaacgtagtaagcaccgaggacacgctggagtggagcatgctctcgtggccagcgtccatcgcataccaaccgcgtt

SEQ ID NO: 357460 - DNA, 262 bp, Zea mays
cggctcgagggcccaacgccgcgaccctcttctccctcgccgcggcggtggcctgcgcctgcttcggcttgttgtgaccgaccgaccggacggatcggaggccgcgaatcgcgcacgtacgatacggtacggtaccgacgacctgcgcccgtcgtggtggtcgtcgtcaagtcgaccgcagactgcatgctgggtttagttccgcgcgctccgtgttggtgttaataataagattagaggaaggatttaagttgggtttcgg

SEQ ID NO: 357461 - DNA, 261 bp, Zea mays
cggctcgagtaagaagatcatgcacaagctgtggcagtataaggtttcatagaagtggaaagatcaaacaaaaatttgggattgttagctcagaggatatggctgagcatgcttatgaagatagatacgctaatgttgatttagtttgtgctctatgcgacaatggaggtaaaattgtaacatgtgtttgcactttacctagttttttatctgctgtctagatacgctaatgttgatttagtttgtgctctaatgcgacaa

SEQ ID NO: 357462 - DNA, 155 bp, Zea mays
cggcgaaagctacggaaagagatcaaacatttcatgcaaggcgaagttagttcttagcttggcatttttatagtcacttctacttcacattacctagctgcaaatagaacctcccaagaggtataccctacgtctttgatgcactgataatgttc

SEQ ID NO: 357463 - DNA, 280 bp, Zea mays
atgggaaattgcttgctattggtcattccatgggaggaatcttattgtatgcaatggtttcaaagtgtggatccaaaggggctgagccagagctggcagcaattgttacattggcttcatcagtagactacacaacatccaattcctcactcaagttgctattgccgtttgctgatccagctacaatgttgcgtgttcctgctatcccactaggagcattactgtctactacctatcctatatcctctcgagcaccatatattctgtctctgcttcggtc

SEQ ID NO: 357464 - DNA, 259 bp, Zea mays
  unsure (1)..(259): unsure at all n locations
gatcgcggcggatctactaagatcagtggcagaccttccggttctggtggtagcgggctccgaggatgctcttgtttctctgaagtcggcacaagccatggcttcgagatttgtaaattctaggatagtaattatatcggggtgtggacatctgccgcacgaggagtgccccaaggcgttgctctnngctcttgctcctatcatctctacattggtaccctcagaagatttgttgcaaagactgtagaatatactcgtt

SEQ ID NO: 357465 - DNA, 267 bp, Zea mays
ggaaaatcccgtgtggaattgcttggaattagtcttggctcgtgataacaacatactagtagtatgggtgcggtggccgtggggaattggtgaagggaacaaaagctgagccctgaggaattgatttccacgctgatttgtatgtatatataaagaaacgtgtggtggcatattgatgcagtcggcattggatgcgcttcctgctgccgagccatcattctcgcagaaatctgtgtcaggcaggacaggaccagcgctggagatgtt

SEQ ID NO: 357466 - DNA, 249 bp, Zea mays
ctcatgatgctcggtcttgctattgagcttcgtctgcagtctgaccatattgtagcctcctcgctcattgagctatactgcaaatgtcgtaactatggcaatggacgcacgatcttcagtggtattgctaatccagacgaagtcactgtggaactcaatgcttataggttatgcttctaacgggtatggactcgaggcactaaaacttctagttttaatgcaaagtgggggtctgaagccaagcgagcg

SEQ ID NO: 357467 - DNA, 266 bp, Zea mays
tgaagaagcaggctcggtacatgccatctccattgggaagcaataaggctgcagcgttagccgatcatggtgcaggggacccaagtgccttctaccagcaaaaactcaaaacttgacttgaatcaagactctgttctgaatgatggcatccataagtcgaaaagtttgatcaggtctcaaattatcagtttgtcaggataaaggaaactctcctgcaattgaaggtaagaggacggttccatggcaagaccggctagcgttgaagg

SEQ ID NO: 357468 - DNA, 262 bp, Zea mays
tgcgcgatgggggaactacgcattctcagctgccttcgggggactgttccctatgcttagcttccaagtccatgggtttccagatgccgccgcttacgcgcagcctgctgggttccactatggatacgggcatgggcatgggcatgggttccaccatggcgggcatatgggacaagcacaagcccatggcgtccaccgacaggcaccgttggggcaacaacagcagcaggcagatatttatctgaaggccctgctcttcatg

SEQ ID NO: 357469 - DNA, 258 bp, Zea mays
  unsure (1)..(258): unsure at all n locations
ctaagtcttacgaactgaaaggaaactacgagaaggcattcgagctatttggagaagctgctgaagctggaagtgaggcagccgaagttgtcgttggaagatactactccacaggactgggtgttaagaaaagcaaaacgaaagccgcagagttcttcaaatcagcagctgataccggaanagcagccggattttacttctacggagaagcctaattgaaaggaagcggagtttccaaggacaaacacgtcggaggtg

SEQ ID NO: 357470 - DNA, 258 bp, Zea mays
ctggacctttccctctgactgctttttttttctctcccgatgaaacagcataaggaatcccagctggatttttaaggctgggacaaggatggcctctgtttcaaccgccatccttgttgatattccgacatgatatttaggtatttcaagcatgtgtcccttgttgcatggtttgcagttgctcagcggcatggagacatgttctgtcattaagggatctccctaaaggcttggaagaggagacgggttttatactct

SEQ ID NO: 357471 - DNA, 262 bp, Zea mays
cggctcgaggtttttttttcaatgcacaaggtgaatggtaatcttataaatcataagagggtttctcatctgttggaattatgtcacctcctctttggtacaaccatccaaagcaataccagtcaccagatcaacatttccgttgttatacacagcattttttggaaacaaaatcaatatcttgcgagagggaatgtagccgaggagaggactaccgccttataaagctcaccatcattgattttaagagcaagagagagaa

SEQ ID NO: 357472 - DNA, 179 bp, Zea mays
ctcacactcatatacccaattttcaacactgtaatattcacactcaagatttgctcatataaatacaaggcaccatgccgacagagctagaagaactcgttggcttcaatcgccatccaaacccccagatcagggccgtcgcgacagaaaatctggtcccttactctctctctgatccg

SEQ ID NO: 357473 - DNA, 273 bp, Zea mays
gacttccgatcgagcaaccagctcagcaagctcacaaagttggatttggagataaccacattaatgcaagaggacataagttttcttggcaagctaccaacactatgcattctgcgcctttgtgttgaagatgtcaatgccccgttccgttttagtgtttttaccaatggagttgaggactcgctcttatcagaagctcaaggtgcttgagattgcttgcaggtccagcttaagtgtgacttttggatcagaggcaatgaaaaaccttgatct

SEQ ID NO: 357474 - DNA, 259 bp, Zea mays
gcggcgccgccggtcacgtgaagcacgccggcgacgagcccttcagcgatttcgtcaggtcggcgcggaggctcaccgtattgaccgatgctgggagcgacataccttggaagctaaacgacgacgaggagcagtgagagagaaccgtaccattccagccgcgagggtttatgttcttcggtactggtactgttagactgtactagtactgtcacaggtgaggccgggagctaaggttttgtaaaaaatccgttccaag

SEQ ID NO: 357475 - DNA, 268 bp, Zea mays
gtgagctacaacctaaccggaaaatggaaaatcggtttgcaaaaataagagagctcgattccaaaggcaagaaaagaaacccgctggtgcttgaagagtttcaatgggaaaatgaatgtgttgatgaagcattgggtgcaacggagggtctccagggccgaaatgtactagggctggtggtggtctggttagggagacctcttcttctcagcctcatccaaggacctatgttcatactaggaagcgtccaaggaatgctcaagatgtt

SEQ ID NO: 357476 - DNA, 193 bp, Zea mays
cggctcgagggcgagggagctcaccaggagagagaggcctgtgcgtgagcattgagcaaagcaaaggaagcagtacatacatacatatttctctcgctcgctcgcagagaggcccggccggccggctccatgcaacaagggaggacgacgagcggtggcggtgggcgatgatgatgatgatgatggcggggga

SEQ ID NO: 357477 - DNA, 248 bp, Zea mays
gcggaggaactcgaggcgcaaccggttgcaccacgtgaacctcaacgattcaagctctctcttggtgcagcggcacagcaaagagcacaggctgccacaacccgccgcactgtcgctgaagttgaaggccttctggaagacgaagaagaaggagctgccacaactaaacgcacgctggttccgatcaactttgataatgccgcagaggcttctggtctgactgacgaagagagagctccagctgttag

SEQ ID NO: 357478 - DNA, 246 bp, Zea mays
ctttttgactctctctctctcctcacctcaagtccccgaaacagtagtgcaccaagaaccactccatccatctccatgggagactccggaggaagaagaggaccacctcttcctcggctgctagatctcatcccggacgggaaagaacggaaggggagggaagcgcaagacgcgggaaggtcgattaacagcggcggcttcgggggcgaggaggacgcgaagctggagctcaagctcaggcctccg

SEQ ID NO: 357479 - DNA, 142 bp, Zea mays
gccattgtttggccaccagcggtgtggtatcgatctgctgtcaggaactaccgtttggtgctgcctgagcctgacgacagctcggccctgctgcatcaggcgcctcccggaacgacggaaggaaatgattccacacaacata

SEQ ID NO: 357480 - DNA, 168 bp, Zea mays
gaccaggcggcggcggaggcggcgcgcaggacaaggagcagcgggactacagactcatcgcacaagccgtggacgaaacgtaccgggaggtggaatacgacggcggcgggtaacccttcggcgcggtcgtcgtccacggcggcggcgacgacgaagtggtcagcagca

SEQ ID NO: 357481 - DNA, 175 bp, Zea mays
gaaaaggttgaacattaacgaaacaaaaatgagggccttcagctctcctgaggagtacaatgacgccctatcaaccggaaaagttgccgtcattgttgatgaaataccatacctcaaagtgtttcttgcgaagtattgccacaactacactatggttgggccaacttacaaattt

SEQ ID NO: 357482 - DNA, 255 bp, Zea mays
atttaataatactaaagttagaagcttaggatcaaagccatatatagatctaaatattgcttttcttaaggtacataagtttttgaatgagtaatttaataatatttttagaagtgatttgtcagtttaattactttaaataaaatataaaacgctttttaaatgatcttatttataaacagttataattaaagaattagtagatataaatttttttttaattttttttagtttttgatcaacgaaaatcttttt

SEQ ID NO: 357483 - DNA, 189 bp, Zea mays
cgcgccgctagatgtagggggaaagtcatacgtgtggatggtaggtatgtatatagatatcgggaggacatgggggtacgttactgtatgaaaagcacataggggagggaagggagggagaacaacgtcccttggacttaccaaataggcgtggaggttataggttttactataacaaagatgtgatct

SEQ ID NO: 357484 - DNA, 255 bp, Zea mays
cacctgtattgcaatgggaaacgagcgtgctgcactcagagtgaagtccgaattcaaggttcctgataagaggtggtactggcttaaaacgtgcgctttagccacagttggaaactgggatggtttggaaaaattttcaagggagaaaaggccaccgggaggcatatgctcggatgggcatggcgaaggaggcccaagatgcagcctcacaagctaaagttagtgatgagctatttggccgcctaaagattacac

SEQ ID NO: 357485 - DNA, 162 bp, Zea mays
gaactcttcaagcttcaactacattcgttaataccactccaacaaccttcaccttcaaaccccaagacaccaaaaagcccgcccaaactccatcaaaatgcgtgctgccgctttcgtcgctatcttcgctgcaaccgccatggcccagactggcggtcacgc

SEQ ID NO: 357486 - DNA, 274 bp, Zea mays
agaacaagatgcccaagtacgactgtgttaataaatagtactccctccttgcttttttacaaggtgtatttgtttggacaaggctttggccactgattactccattaatagttcattatatgatacagaatcataatcataagctcaaaatcataatcataagtaagcattcttttaacgtggatctaataatattgatttggtgccatagaaattatgtattactatctccatcacagaaaacatgtataggtttatcctaagtcaaactatt

SEQ ID NO: 357487 - DNA, 277 bp, Zea mays
cttgtttgatcaatacgcctctattgttcgcctgactggtacccttcttggagctgctatcggtatcattttcgttgtcagttctgtgttactaggatctttggctactggtgcagttgttgccatgactgttgttatgatagtcgtagacatcataggaaccatggccattgctggtgtttcgacctatcgcagtttcgcttgtcaacctcgtcatatgcgcgggcattggggtcgagttctgtgctcatattgcgcgtgctttcatgttcccgtc

SEQ ID NO: 357488 - DNA, 153 bp, Zea mays
  unsure (1)..(153): unsure at all n locations
atctcttctcctccctagactccccgttaggtattccaatttggtgatctgtttagcttcaagctcacatcagttcnccgactttttactatcacgtcacactgctcgccaaaatggccgacaagggtcgatcccgtgtttaccttgacattg

SEQ ID NO: 357489 - DNA, 252 bp, Zea mays
cggctcgagggagaacattgccacccgtattattttctgattatccaacaattgtattgtaatacagcatataaccaacaatctgcgataattttctgagatgcagtggtcaaaagctgttactggagggattagacccccacctttgtgcaagcacacatgcactcttgttggaagtactttatatgtcattggaggatcttataccgccttcgatgaagcccaagaggctgaggttgaagtgtttaacaa

SEQ ID NO: 357490 - DNA, 275 bp, Zea mays
  unsure (1)..(275): unsure at all n locations
ctccacgccgactctttcgtatagaggcatccatccctctgttcaagaaggactttcagcacttctcttcattcggcgcacatcgcatttgatccgtgctcttcaatttcccacttgttcacctttccggccacctcgccgattttttcccgctcttcacttctctgacagcaaccaacgttcggttacccatgtntaatanttcaancannancgnttcacccataatctntctctccctcacatcgcttgttcatcatggctaccaccgcaat

SEQ ID NO: 357491 - DNA, 270 bp, Zea mays
caatcagctgcttagaatcgagggagaacttggaagtgaaggcgtctatgcaggggagaattggagaacagtcaacacgagctgatctgtggtatcgtttgagttgcggggagaattggaaatattgatccgccttcgtatgtagccacttagcttttctttgttttcttgtccaattgcgtgagttcgtcctcggcaagtatatggaaatatggtggtgaaatgtaccattttttactagatgatggcaattgttgttgaacatacata

SEQ ID NO: 357492 - DNA, 272 bp, Zea mays
ctcacaccctgattcaaacgaatggctctagaatctctggaggtccaagaaacgagcaaccggtagaggtagcttttcacgcagctgtccggtcgtcgcagtgagcgatccagaaggcttgctaaaaaaaggcgagatttgtcctgtttcgccggcctaccgttccgggtcgtggtggtcttgttacccccatcaacaaccgtccgtcatacaggtcgtacggacgcgcacgtgtgaccggaggaaaaaaaaaacaagagaccagtaccact

SEQ ID NO: 357493 - DNA, 162 bp, Zea mays
aggctcgagcggctcgagggccgagaccgagattgcgcgcgtgcaggctgcagactgtcctaacagaagaagctcgtaacgtctatttccagtttacatgagctgcatttgacgtgttgtcatctgttttgtttatgaacagaattaacagggttgagatgc

SEQ ID NO: 357494 - DNA, 268 bp, Zea mays
cccaacacttaacctgttctgcctccttcttctttttttcttttttgcgcaggcgtcacgtcgttcgaggtggatatggagaagaagaaggtggtggtgatcggggacgtgacgccgtacgaggtgctggcgagcatctccaaggtgaagttcgcggactgtgggtgggcccccaaccccaacaaccccaagcagcaagccgctgcggaaaggcgcatgcaggtggtgtaatgtagtgtatgtgtagaagatctatctcccaatggat

SEQ ID NO: 357495 - DNA, 276 bp, Zea mays
cttggctctcacgtattgatctcgatattcaacttcccctctttgccttgaccttacttattccttgtactacaaaacctacttatacccacctgctacatcatcgactcttgttgattcctcagacatagatctaacacaaatttctcgcacaacatcgttgctgcactctatagcaacatttttatcaatcgtgtactttttcaaatcctacttcgatggccgactttgctcccccgtctggtccgcctccccctaaggcccccgaggttcctg

SEQ ID NO: 357496 - DNA, 226 bp, Zea mays
gagagcgtcagatcgcctgcgaggcccagcctcccactcaccatacgcctcctctcgatcttaccttcgcacacacctttctcgatcgtacgcagtgtgtgtaagcctagttctcctacctaggcagccagctcagctcgccacccggccggtgatgggaggacgaaggtcatcatcagtggctctagcggccgtcctcgcgctggcggcggtgaccatcgccatc

SEQ ID NO: 357497 - DNA, 245 bp, Zea mays
cagagattggtgcccacgcatatggctaatgtatggctacattcatttgctctagacatgatttcgtcaccaggggacactcagttttgaaccgttgagcttcatactgccacgggaaccgtatttttcatcattattgtaatataaggcgccggagtttctgtccaaaaaaaaaaaaaaaaaaaaataaaaaaaaaaaaaaaaaaaaaaaaaaaaagaaaaaaaagaaaaaaaaggggggggcc

SEQ ID NO: 357498 - DNA, 269 bp, Zea mays
cggctcgagggtgaaaggcaaacagcctccaacgaagggtgttgtggtaattgctactatgattctcttggcaatccgaccattggcataggattcaacttgcaaaggagtgacgctaggagcgttttgggtcaatacggtcttaacatcaccaaagtcctttcgacctgcagttcctgcaaggcactgcagttcgacatcgaatgaccacactctctcttccaacgatgcctactccatgttctcggacatcctgtaccctcctttcg

SEQ ID NO: 357499 - DNA, 234 bp, Zea mays
tgctgtgatgaaaccaacctttttgcttctcgataacattctttttggttgtgatctgttagcatactacctgtatcatgtgtaacgttatggagctatttgatattgtataggcaaccctggaaaggaattctggtattttttaaggtatatcctattcgttgtaaatggttcaaaaaaaaaaacaaggaaataagaaataaaaatgtgagtattgaccaaagggggggctca

SEQ ID NO: 357500 - DNA, 257 bp, Zea mays
cccttccttctcaaagtccaacacccaatgccccaaaactgcaaacgaaatcctagagcaggcctactatcgtagacagaccatagttttggcaaagaaaagaaaactggcagaaaaaaaaacaccagtttgtccgccagtcatgccaggtagtatagatcgaatggagtagcgggcgaattcatcatcacaccccgtcggtggtgtggtggcgtgcaaggaaatcaaacccatcacggagagtgggttccatgaca

SEQ ID NO: 357501 - DNA, 271 bp, Zea mays
cccagatctgcaggtgctcagagaccacatcattcacagcagctggagagtaagcctcgtgtctcagcgaatccgtggcattcgtctccactgacgaaagacttcaggccgggtggccacgtgaaaacgccaccaagtgcggagggggcctcggcgttctcccagccggtctctgatttcacagaagatgaagaggcagttctattctggtccaatggcaagcggaccagggttaagcatgccatcttcgctgaacgatcgcagatcatcc

SEQ ID NO: 357502 - DNA, 267 bp, Zea mays
gcaagaagttttaagaggccaggaattggaaaatgctgtgtcagattctgactatgcaaaggcaatacaacttgcatttgagcttagaagaccacacaagcttctagatttattctcacagcttgccaggcgagctgacgcagaggatccaatagaaaaggctcttcttggtcttctaaaggatggccttcgtgtgcttctagagtacgcccgtgaatggaatacgaagcccaagttctgtcatgttgcgcagtttgtgctttttcg

SEQ ID NO: 357503 - DNA, 131 bp, Zea mays
ctgcatccgcgtctacaaggaccgcgtggagcgctacttcggcaccgagttcgtcgccgactcgacgaacgactccaccggcgtggcctccagggacgtcgtcatctcccccaacgtctccgcgcgcctct

SEQ ID NO: 357504 - DNA, 290 bp, Zea mays
attctttaattcctgtttttgcaaatatctacactcctttaaacaacgtcactcatttttatcctctaatcatgcgcgttaccaccctcctaggcctgatcgcctacgccgtcgcagaggcgagctgttcgcgcaacatcatttactacgatcaatggcacaccaaggatctgccccccaaggacgtcacccacagcgtcacccacgtcatgatgtcctttgccaactcgtcgctcttcaccactgagcctgctggcaagtatgagccgttccagcctcttaaggaggtc

SEQ ID NO: 357505 - DNA, 253 bp, Zea mays
tgggactgcgacttcgccggcttcgcatccgtcgtctaccaagcgccagatgtcggaaattgtgtgctcccatcaagggcatgaactgaaggaccaacacggacccatcttgtatccatcatatcagaataggattatatcatagctataatactgtactatcaaatatcaacaaagttccaatcccactgtatcttggaactagagaataaagtacatcagttacaaatcgaaaaaaaaaaaaagaacatga

SEQ ID NO: 357506 - DNA, 272 bp, Zea mays
cacaagacaggttcatgctcttgcagagaagatagggctcctatctgactctcatgtcatcaatgggcttattgattcatactggaagtgtggtcagctagattatgcgattaaggttttcaaagaaagccgttctgatgacattatatcttctacaaccatgatgacagctctctcacagatatgacatagtgaggatgcaataaactgtttgtgcagatgttaagaaaaggcctgaacctgattctttggtactaagtaggctcctaaat

SEQ ID NO: 357507 - DNA, 281 bp, Zea mays
cttacgtcttcccccagctagctagctatctaccttggtggtggcgattgatatatagattaaacatggcgcctcaaagcctggatctcgggctgagtctcggcctgggcgtggcggcattccagcccagcttctgccacccggccggcagcggcagcggcgacgaatggcgacgacgggggcgcttgcaagaagctgcggctgtccaaggaccaggccgccgtgctcgaggagtgcttcaaaacgcaccacaccctcactccggcgcgtctcctcttcat

SEQ ID NO: 357508 - DNA, 126 bp, Zea mays
tgtagagtttggacagcttgccctgcatgctattgctcatctgcttgagagatacatttaaacaagtcaagagataatttattgatccatgatgactgtatgcacctgggcgcatgtatcatatcg

SEQ ID NO: 357509 - DNA, 278 bp, Zea mays
ctagatctagatcgtctaccgacggtgctccattgttcacatgggcatttttggattaatgttttttgtaattaattagtttatacggagtatatataagagcaactcgttggctcggctccgcattgcgatacacataaacagggtacgaaaattactagaacatcacgtcaattcttttactcaatcagtgatttggagatcagggatcacagaaggattggaagggattaagtgagaaatgaactaatttcccactaatctactcccatcctccc

SEQ ID NO: 357510 - DNA, 282 bp, Zea mays
gtgttgaggagcgaaatccgtgaaatctaggtgaagaagagatggagcacgtcgtcgtcatggttgcagctttgcttttgtcgtcgtggagcctccaccagcgccgtgtagcagtatgtgatagatgactagaagaaaattataaaaggatgttgaataagattgtgcttattatctcgtgacgaaggttttttctatgcttagggactgctcttatgtgttattggtgctattccgcttgtacggccaacgaaataggtcctactacacaagggaaataga

SEQ ID NO: 357511 - DNA, 228 bp, Zea mays
gggccattaccaaggactcctagcgtcgctgctgcaccattgcacctacagtcgacagcacgggatattcgcaacacatcgagccatctacccagtcgagttgttggtctgcctgcgccacacctcatgggtgcacgaccaccaccaggaatttcagtgcaggctggaggagcgaacgcctacagaactatgcaacagactccaactatggatccactgaggcacaca

SEQ ID NO: 357512 - DNA, 244 bp, Zea mays
  unsure (1)..(244): unsure at all n locations
cggctcgagggcaggagcatgtacagtagattgtccaggaaccgaggtagcccaggctgagtgccgatggatggtgatgtgtgtacatatgacaaatgtaactttggatgctgaatttgtttttgctagttaggaggattggtgatagtgtacgaagtggtttactcttttgctgtccacaggttgctggcagtgtttgtagtggtttgtcctaaggggaatntctgtactccactgtaaatgt

SEQ ID NO: 357513 - DNA, 247 bp, Zea mays
aaaaaattgaattcgaaatgaatataacatcgttgttcaatgtgaaaggaaaagttggacttgttactggaggaggaagaggaattgggtttatgattgcacaaggatttgttgaaaatggtgcaacagtaatcatatcttccagaaacgcaaaagaatgcaacaagattgcggaagaacttaacaatagaggactgggaacatgttatgcaattccagcagatttgtctaaaatggaagaatgcga

SEQ ID NO: 357514 - DNA, 247 bp, Zea mays
ggactttcaattaactaacaactaacataagatcctctgtcatcgttgccatcagttgtcgtttatcaccttctttttatattcccatctgaggacatataatcagcttgataaaatggtcgcagacgctctggtctaccacccctcggtggctcactacctacgctttgtcgcaacaaccctcgtttgagacaaagccctccgcacaattcaatactttgcccgcttctactcctggtatctcttc

SEQ ID NO: 357515 - DNA, 244 bp, Zea mays
atttcagaagaatcagtaattgaagggaaattagtggaattgattcgtatctgtcgtgttgatgcaaagattgatgcagctaaacaacaaattgttattcaatcggaacaaccatcaatctatcaacagattattgataagacaaagagtattgcttatagatccacacaacttatccatgtcatcgaattgaagattgcacaaaggaacgaagttatcgtgctggctgattaaaaagtacctt

SEQ ID NO: 357516 - DNA, 246 bp, Zea mays
ctgccaagtgccaaaccaggacgggacaacggctgtgagaggtcaaagcgaccgcgagcagagtcagcgatcctccctgcagtgaggtcctggactgaaactgaggcgactaggcgagggctgcgtgcatgcagccgctccggaaaagcaggcctgcctgcctctgcctgcttccggccgcatggcaaccggaaccggcatgctgtcgtggaacgaagtcagctatccggtcagtgtggcacgcga

SEQ ID NO: 357517 - DNA, 244 bp, Zea mays
cttcagtgctgtcagctgttttcgattttactgcttgcaactctttttaccaggtatttgaaaacacccattataattatgatccggttcctgtgtttatccaaccagggttttaggtggtatacaaggcagcttagtatggatgaagacggcgacgtggctgatgagttcttggatgaaattatcccagaaagctcagtcaacaacgccaaaagcccagtcggaaggttccaagtgaaatata

SEQ ID NO: 357518 - DNA, 247 bp, Zea mays
gtttcttgagggtgtttctgagctccacatgcctccggtgccaagactactcgatgctatcacaggaggagccaccaacaccaaaatctactcaatgctatcagtggaggggtcacctacatcagtgtgacatctgtttagctgtccctcaaactaaaatataactcttcagaaaacttttagctatcccatgagaatatagtagtttatatcatatcatatatatatgtaaggacttgggcatttg

SEQ ID NO: 357519 - DNA, 244 bp, Zea mays
aaatcatccctcagtgtatgattatatttcattaggaattttttcctctggtcgtcggtctgatggttcttgtcttgctcttacctatgatatcgcttgcatagcctatgctaatggctatctctttgacacgtttctcttttattaatctctggttcctacggtatcggctgacggggttcttttcattctttccacgtggttgttacttctttttatgtgatgccagttcgttttcttagtt

SEQ ID NO: 357520 - DNA, 286 bp, Zea mays
gtgatattctttttccatccgatgctggtttaccaaaattatcttcacctcttgattataaagtaccagaatcatttgattgggccactcaagattttatgtacacctttcatgacaagtcaacaaacgagttgaataattttctttgctttaaacaatatgtgcctgtacacaaacaagaagaacaagaaaatcaaatattatctcaagtccatcaatatctgtctactggacagtctgaattaaatgagattctcaaaggatttcatctttccgtacaaaaatc

SEQ ID NO: 357521 - DNA, 281 bp, Zea mays
cgcaaacccagaaacaagaaattactaaggagttcaattactctgaaaccatatttgtgcaccctgttgaccctacaaacacctacgcagcagagaattgatattttcactactgatagagaattgcccttcgcgggccacccgactatcggtgctgcgtcgtgggctctgtacctatacccctgataagggtgatgttaccacactcctaacgaaagctggaccgatcccgatttctctaagaccttcgggagatgaagctgcggcgttgattccacatg

SEQ ID NO: 357522 - DNA, 269 bp, Zea mays
aaagaagtgaagtattgcaacaatgctgcagctttctagtccagtacttcgtaattttggagcgccctgatcaattttgctgttatacagcttcgtgtcttttattttccaaaagctaccgtacctggattgttagagatgtttacgcagagtttctttggaagaggatccgctcaaaaatttatatttggatcagatggtctcaggaaatgtggttatgttttatggaaaaataaaaaagaaaaaagaataaaaactaaaaaagaata

SEQ ID NO: 357523 - DNA, 175 bp, Zea mays
atcgatctaatcaaatcagaggagcgcaaggacgacgcggtcgccgagctacccccgtaccgcgtgaaggacctgctgcggcacgagacgtgcgacctggaggagttcgcggacctgctgggccgcgtggtcgcggcggcgcggctgtcctcggggctcatcttccacacaacat

SEQ ID NO: 357524 - DNA, 265 bp, Zea mays
ctgctagctactgcttaccgacgatgcctcctccagcacgaggaccctgctgcggccgtgccacgtgtccagcgtctgcacggcaaggtcgttgatgaagcccaggtacttcttgagagcgtcgacggagagcggctcgccgatgagccgccgcagcttcctgtgctcgtcgccgttggtggtaagagagctagtggggcccagcacctgcttccccgtgtagaagaggttgaggctcaccacgccgtccttgcccgacgacagc

SEQ ID NO: 357525 - DNA, 269 bp, Zea mays
cttgactgatagactccttaataaagcacctattttcactaagccacttaaaaaggaaagcatccccatatccatagacgattcttcaaatgactaccaaaatgatgctgatgccgattccgatcaagaactaatggacgatcccgatttatacgaccaaccagagcattctaattactttgatcttgccatcgtcaaaaagcttaattataaagtaatgatcccattacctgacgaccaagagaccaaaacaactgaatacggggctc

SEQ ID NO: 357526 - DNA, 265 bp, Zea mays
ggcatacaccattcttgtagcccttagcatggtagctctgttatcctgcaatgatgtggagggtgaagcatacatgatgcatgaagcgctttctcgcaaaggtctaagggaagacatcaagctaggcactaatggtgcgtgaatccttctgctatcagtttgtctggacaggcatctagcatcagcactggcgtgaacagcaacactgaaagcagcacaagcattgagatctcaggcgctgctgcagcctctacctcgatgaccg

SEQ ID NO: 357527 - DNA, 247 bp, Zea mays
tatattgctatatgctcatttaagctaagtcagattccgtgttcagttcgtattgctgccaggttcctggtatttgcagttatcatacacttgcattctttctagaggatttcatttcggaggctggaccttatgtttgttatttgtatgcagccaagttaagagaatacatattcagacattgaagcagtgtaccaatgcttagaaactgagtatgggatcagccaggaagacattatcttgtacg

SEQ ID NO: 357528 - DNA, 260 bp, Zea mays
ggagaaggagaggggccagcaggatcactacggcatcttcggcatccaggactccatggtgagggacatcgggccctacaagaacctcgtcaggttcaccacctcggctggctccggctccggctccggctccctgacctccacctcctcagcagagggttctcggcgtcgcccctggtaagcaaactgtcggagatgctggaggcgctgcagcaggtggatgtgcgctccttgaatcaccaccagaggctggcgttctg

SEQ ID NO: 357529 - DNA, 261 bp, Zea mays
gaagcaatggccatcaagatcagggggcgtacggtcagaaaagagtatcttgcgcgagtcgttggccacttcccggacggcgaagtcgtctgtgaccagcccatcctccaaatatccccgaaactaggccttaacgtgtgcgtgccaatggaaagtccgccaggacagtcttcaagcgcctcgcatactatccatcacgcgacggggatgcagaggagccggctgttctagcggaggacggaaagccactcacacctgcgg

SEQ ID NO: 357530 - DNA, 260 bp, Zea mays
tactgttccgaccagacgcactttgccttccgcaaggcagcgcatattgccgggatccaccgcgacaactgccgcgagatcgccacgtaccgtgacgacatgttcgcgctctcgccagccgagctgcaggccgcatgcaggcggacgtggacgccgggctggtcccgctcttcctgtgagcggctgtcggaaccacccagacgacggccgtcgaccctatcagagggctctgcgccgtcgcagcgacacacggtgtctgg

SEQ ID NO: 357531 - DNA, 257 bp, Zea mays
tcggaaatgggccacccgcacacatttgcggtcatggactccggcgacgtctgtgccttcggaggaggggtcagaggccagctcggcgtgaagctgcatgagggcgtcgaaaaagtgcgcgtcccgatgaatttccaatcggtctcaattgatccccttccaccagcattcgcctgaacatattgcgatggcactctgcttccgcgaacattctgtttgggccttcagaccagtggcgtaacttagacatgctagga

SEQ ID NO: 357532 - DNA, 252 bp, Zea mays
cggtccgaatagtccgcgcctgtgggccggacggtccgcgcacgcgcagagtagattagggtttcgagttttgtgctatgtttattagctatatccgcggaattagctcggaatccggtcgtgtaaagggtcagccccctcctctataaaaagagaggcctacggccgatttgtaataaaacgatcgaatcaatacaagttctatttcgcaaaaaaaaaaaaaaaaaaaaaaaaaggggggcccgccgattt

SEQ ID NO: 357533 - DNA, 247 bp, Zea mays
caaaaattagagaaaggggggctgaacactaaaaaaaaaggcgaatgggcggagagggcagtcggaggtttctgtgtcatgagatgagagggcgatcccatgtctagagaaaacgataagggtcgcccgatcatttctgcacaaaaattagagaaaggggggctgaacactaaaaaaaactaccctctcgaacaaaaaaaataaaaaaaagcttctcattcttttggcatccccctctgggcatgtg

SEQ ID NO: 357534 - DNA, 257 bp, Zea mays
cgaaattttgttcaacatcgaacattcgcccatcgcccgataatcaagatggtaagttaatgcagtctcaccaaagactctaatggccacagtttatgtgtgagtcaaatgcgcgaaagcgcaattgatacacggcgtttttgtatttttttctcttttgataaaaattgcaaccaacccgtgtgaacattccgccccggatgttcacttcattgtgatactgaaggggtgaagacttggctggagacgcacggtgc

SEQ ID NO: 357535 - DNA, 254 bp, Zea mays
aggagattgaactgcacggcaggaatgccagactgatatgcatggagtccttcaccatcatcctgtcggcgacgcagctcttctacctgctcgccattcacggaggcttgagataaaatcgatcaccgtgtggccggagcactgaggcagtgactgatgaatggagacttgtcgtcggttgcgtacgtgtgtgtctgtcggattgagtgggcgtgcatcggattcacggggcagcgcgtgtactatatatgtga

SEQ ID NO: 357536 - DNA, 296 bp, Zea mays
  unsure (1)..(296): unsure at all n locations
gcttgacttctcttccatctccagcgagaagaggttctgtagcttccgttccatcccaagcattatggcctgccacctgagatccgcaagtgtgccctcaagcccttgctccaacaaaaccagcgtcgaggagcagctccagagcctgaaggcgaccatctcttcaccctctgcgacagtccaaccgatcaccaatggcctgtccaggctcgggagcatctacagctgcatcgatgagctcgcgtgcctgcccagcaccagcagccagcgtcacagaggnnaaacagtggaggagg

SEQ ID NO: 357537 - DNA, 166 bp, Zea mays
ttttgtccaacttattagtctttccttgtgctaattacaaagtacagatgtaagcttccacaaaacattgcttttgatagatgttgatccatccattacaaattgcaagttaattagaccttttttgagaataaaaagtatataacttttgttatgtacctaaata

SEQ ID NO: 357538 - DNA, 290 bp, Zea mays
tgcattttgatttcaatagcactccatttgagttgcaggatgattcatttgtactgaaagcaatggcattatctggcgaagaagctgattgtacccaagctcctggtgcgaatggaggcgagtgctcaagtacacggaacaattattggcaccaccaccaacaaccgcagcctccagggccaagagtagttagggtaccaaactcgcctcctattccagggatactaaaagggcgtgtcaagcatgaacactaggcttcaatatgcttagtggtgtcaaatgagctattt

SEQ ID NO: 357539 - DNA, 284 bp, Zea mays
cgtgtccgccttcgccgcgctgcaccagctgacgctggtggtcgaggccgtcctccagtccgtgtccgtccatcacatttcttgatccagtcagaccatctttttgcttttattttagccttgaggcagcctgccacgtgtatagtagtggaggcttgtagttgtagcagttcgtcttcatttgatagcaagattctttagtgttgacacataaaaaactcttcattgaaaaagggggggtctcgttcgtgatccctcgtagccccggggtttaatgccggccc

SEQ ID NO: 357540 - DNA, 278 bp, Zea mays
  unsure (1)..(278): unsure at all n locations
attgaggttcccataatatggcttgagtgggtaaatactacatacagagagacgtacgcaatggcaagagactcagacagcgccaagactgctctgctgagcaacgacgatctcgaaagatcagattccttcgagcacatcgcctactcgtgcctctgatttaacttcgctgtctggttcaaccgtttattatgtcncctcggtccctaggagctatagtgccacggatctagacgcacaagcggatactgatagcttacctgaatatgccgaatatg

SEQ ID NO: 357541 - DNA, 99 bp, Zea mays
tcgtctcgagctcaggaagatcagccaccggtatcgcaagttcatagtctgcagactcgtgcttgtctccgcaagtgaattcgcagcgctactcgctat

SEQ ID NO: 357542 - DNA, 281 bp, Zea mays
agcgcgttgaggtctgtcagctcgccatcgccgacggcgtcaccatttgccgccgcctcgtctgattgagtcaatgcgtgcccagggcatgcatgcatggctcgcgtgtggatgttccgtcgaccagttctccatccgatccgtttgttgttgcatgatgctttcaataaagatctgttttcctttccttcgttctggtttcttttttcacttttggagttgggagcgtcaggtcgacagatcctgtgttcatttatgttccctggtttggaacaactaca

SEQ ID NO: 357543 - DNA, 292 bp, Zea mays
cagcgcatgcagcgaaagttataccatcactttcaagagcgtcaggatcgatgattactcgccaagctcaggatgtgtcatcggacaagctaacatcaccttgactctcgacactcccgttccggataatgtctattactcttccctgcctcaatgccacttcacaccagactactacgaagtcagtgatatcagagttggagagcaccagatcaccccacttcaatatgacgctcaaactggcacctttttctgcttgacccctgcatggaactacgtggaatccacagct

SEQ ID NO: 357544 - DNA, 282 bp, Zea mays
ctcggaaatgctctgctcggaatccttccgtccgtcgccgacgcgtccttttcttatccgtcgcaaaccgttgatggggaaataattttttgctcaggcaagcacgtaggtactaggttcaggcgatcggcgtcgctgtgaatgtcacatgtcagtggctatcgatctccttccactactgatcactgatgagacgatgagcccgtcgaaagcgcgctccttttctcctcaaggattatctattatattctctcatcgatcatgcgctctctctcgcatcgc

SEQ ID NO: 357545 - DNA, 281 bp, Zea mays
caaggatttgacattccttcagctttggttagctttcctgagttcagttctgctcgaagttaccctgaaattgatccagtacttggatcacctttactagaaaatttccaggaagatagtgttgtgaagtcgtatacagaagtattgctcgttcccctgacaactccggatttcagcatgccatacaatgtcatcaccttcacatgctctgtcttagctctttactttggttcattattgaatgctttgagacgaaggattggcgaggaagagagggagtt

SEQ ID NO: 357546 - DNA, 258 bp, Zea mays
tcagtctctgggaaggaaaaacttggtgtgcgggtacaaagcttggggttgcatatttccttactacgacaggccaagcaaacagaagtgtctgctgcgaagcttcgagcaaatatgagtggatctggtaatagtagtcaggagaaggatttgttgaaaaatgcaagtttccatactcacaagaactaattggacaagaggttcatttctttaactaatcgtataaaagagttaccaggcatcaataagcatatccat

SEQ ID NO: 357547 - DNA, 255 bp, Zea mays
gaagcaaccaaaaagccgatcattctcttcccaaagaacatttctaacaggaacaaacaatgctgatcagaagccagccagcaaaaggtctattatttccaaaaagcaaacttttgtaaacaatgtacaggattcatctgttgagcgacttataagggaggtgacaaacgataagttctggcacaatccaggttgcttctttattgtcatgtttgatttggttgtatatgatttttaccttactggaaaatttag

SEQ ID NO: 357548 - DNA, 252 bp, Zea mays
gggcaagagcatatggtgcggtagacgctgtcgagtggccagaagggttcttcaggcacgacattggttggagagcactgaggcagaagcaagcggcaaaataggtagcagctacccatgaccacgagattttcctagactaccacaactacggtgagcttgtagtgtttgcaagtaataaaaagggaaacggtgtaacgttcactgtttttttggttgtggaacagcaggttgttcaaattttaacacctg

SEQ ID NO: 357549 - DNA, 256 bp, Zea mays
ttcctttgctcatgctgacatcaggaggctacatgaagtcaagtgctcgagtaatagctgattcgatcatcaatctgtccaataaaaacttgataggattaggcagccagctgggttgagcaagaacttgtgacagtatgcttcttatcgggaagcaatatctcgtaagagcttattcgattaggagtggattgaagaggattaaattccttgatggtcaaaattgaatagaaagatatctaatcctactcaatcc

SEQ ID NO: 357550 - DNA, 254 bp, Zea mays
agccggagcacccggaggtgccgctgttcctcgccaggggcctcgggatcgaccgcatcgcctccggctacttccagcagtcggtgcaggcggccccgttggccagcatggaggagcagcaggacgaggctgtggccgcgctggacgcgcagtacaagaccatggtcgacgagcagcccggcaacgctctgctcctgcgcaactacgcgcagttcctccacgaggcgaagggcgacaccgcaagggccgaggag

SEQ ID NO: 357551 - DNA, 182 bp, Zea mays
gggaaaaaggtagctgatatagcaccaagattgttctgcaccatatcaaaaagaattgccaataaaagaacagttcaagaggcaatggacaataggagatggattagtgatattaggggcgctctctcagcaggggccttgattgattttctgcatctctgggaagctttaacggattttca

SEQ ID NO: 357552 - DNA, 250 bp, Zea mays
gtttagtggacctaagaatgtgaatgtatatgagtgtagtctcataagcaataacagattgtcatgattaaccttgagatacgtgtagtcttcttttaaggagctaagtctagaattgagctccctattaatttcatcaagcttatcatagttttcttttttatttctaaggaaaaccttaagctctttagaattggatgagatagctttgttttcatcttttaattcatcgctacctttttctgctatg

SEQ ID NO: 357553 - DNA, 250 bp, Zea mays
ttcgtatctgatccgaattcgaagagaatatgaaaacaaatgtagaacaattaatatccatccgtatctgattacacccctacctagacgtatggtttcattataacgcatccatattcgattacacacctagacgtatccgattacacgcatagatgtatgttttcattataacgcacagacataggttcaactccatttgttctaaattataacctataaccatctatttctaatttgtaagatgttt

SEQ ID NO: 357554 - DNA, 187 bp, Zea mays
aagtgggatggatccaaaggcccaaagattccacacctcccaaattgtcactactgagatgtccggccaatctactgcatctgggcagcgaggcaatgctcctaagatgtctaacctcggggaaagtgccaggagacaatatcttcgagagcatcggtccagttcaagatacagtcaactcactgct

SEQ ID NO: 357555 - DNA, 253 bp, Zea mays
cggctcgagcgtttatcgaatcagttctacgcatcctctgctccttcttcaacaatttcattgaatcggtcttctcgcagcactcgaccaccagtccctttgtttcatcagaacggtggtaaccaaatccaaaccgccaagatgatgaacgctgcagacgtcgatttggacgactttaccgtctttgaaggaggtgcctccacggccttctcttctccggctgttggctccagctttgattttcagcagcggc

SEQ ID NO: 357556 - DNA, 152 bp, Zea mays
  unsure (1)..(152): unsure at all n locations
cggctcaaactcgtctcccatctacatcttccacacaacatacaactctannnnncaaatnnaannnnangacncantaaaaaaccagnanaagcaataaaaggaacgagccaggccgtagtcatacacctactggttctgttaatgaagta

SEQ ID NO: 357557 - DNA, 267 bp, Zea mays
aaaatttgcaggtacatcaggtctgatgttttttatctgcagttgtacttataacttatatttggtgtaatcgcctcaagtaatgtttatagtactatatgcattctgttttttgaatggtttggtgcaagtatgactcgactactgtctaaaattagttttgccacacttttgtggaaagaataatttctagatagactcaggtgatctctagctaaaactctagtctatattaagtgctccatgatgctaaacaaattatattga

SEQ ID NO: 357558 - DNA, 150 bp, Zea mays
tggttatccgtgttccaactttacctcttcgtgatcattttggatattctccatcagatagggtggttgatgggccaggcaaaggaagcagaagcacccggtccgaacatgaaaaggatgtgttaactggggcatagctgtcatcctgtg

SEQ ID NO: 357559 - DNA, 266 bp, Zea mays
gtcgatggcaagtcctgtcctgtggtgttttccagtatgttaacttggttggaactgccgttgggtatacaattacagcgtccatcagtgcagcgtgagtaattcttgcataaaaaaaggctcatttagtagtgaatgttttggcagattcagtctcatcgtcgattgagaaaccccttttggctgaatggtgatgagcagggccgtgcacaaggcaaactgcttccacaacaagggccacgcggccgactgcagcacctacgaca

SEQ ID NO: 357560 - DNA, 258 bp, Zea mays
gccaactcttcctcggtcgaccaccaccccggcgcgtcgccgctcgcagcacaccagcagacaattgggtccagcccgtccaccgccggccacccaaattagatgccgtgcgtgcatttccattccattaacagtagcggtcagtagctgaaaagagaaaaagggcagtagtgctaaagtttcagggttttttattgtggtccgcgtcagtgtttcagtgtagcatgttcatattatgtgcggctgtgtccggtcaga

SEQ ID NO: 357561 - DNA, 257 bp, Zea mays
gtaagatgcaagcatgtactcccacagtcgtaaaataacccaatataagtgccgctatatagttccaaaataagtgtcactagggttgaaaacgagttgagcctgacttgacttcgtcaatttggatatgtttggttgcctggcccagggcacgactaggcccatttgaaaaggtcgccatgtttggtatcctggcccagcttgggagcctggttgaggcgagtcaaaaaaaaaaaaaaagggcggccgccgattat

SEQ ID NO: 357562 - DNA, 263 bp, Zea mays
gctatgccaaactgctcgcctcgctaaatccgctccattccctcgccctcgccgatcgccggatctctccctccgcctcgcttccgccgcacgccagggcgcacggcttcttcctccgctccctcgcctcagcgcagttcctatggggttcctgcaaagcactttttcgctgttgatcgtcaccggattcggcatctacattgcccagaactacgacgtcccaaacataaagaagctcatgaggagcctggtgggcaaggcca

SEQ ID NO: 357563 - DNA, 157 bp, Zea mays
ctttatttctcatggttctcctatgcttccactggaacctcacaatcccactcgactctggcttactgaactaagcaagaccatcacaaagccaaaagcagtattggtgataagcgcccactgggaggagagagaagccaccgtaaccagttccaca

SEQ ID NO: 357564 - DNA, 152 bp, Zea mays
ggccaagaaggaggcggatgcggacgcggacgcggacgcgtcagcaagagcggctgaatgcctctcagtgtcaggcgtcgtggagcgggactacttcagcggcagcctcattgagagcggcaagaagcgcggcggggatgacgcccttcttc

SEQ ID NO: 357565 - DNA, 117 bp, Zea mays
agctctacgttcgagccagcagtcgctcgcaactttttctctgtgaaccaccaccctcaggccccagaccgtggacgcgtcggcttagcattctagcataccacagtatactacaca

SEQ ID NO: 357566 - DNA, 149 bp, Zea mays
cttacccgtacttggaaccaaagaaagatacttccccgcatgcgtgcactgttgatgtctcagctaatgaagtggaagccactggaacatcgaaagaggtggatgttactgaaacgccaaaaccttcaaagaagtttgcatttgttgat

SEQ ID NO: 357567 - DNA, 142 bp, Zea mays
gaaccgtgttcacaatacaatcgccgacacctaaggcaccacagtgtccaccatgccatccgaagctcagcagtccaaacttcaacagccatggaaacagtggcaggcctcacttaatccctggagccggaaagacgtccgg

SEQ ID NO: 357568 - DNA, 145 bp, Zea mays
cccggttcacggggcaatcgcgccgggcctccatgtgggcgtggttctccgcctgcgacctgcctatcctccagcagctgtgagcgtatggtccgagtctatgtcgacggtcgtatgaaatggtgacaactcgcgacggaagtat

SEQ ID NO: 357569 - DNA, 153 bp, Zea mays
gatcaaagcaagcgatattatagaaccatgcctggcacaacatacaaactcaacaccggagccacaatcccagctctcggattcggtacctggcaggacgcagacgcacaggtgggtgccgtcaaggaagccatcaaggcaggctatagacac

SEQ ID NO: 357570 - DNA, 158 bp, Zea mays
gacagatggcagcaggggttcagatcacatgcctacacctgatagagattagatatattcacaaggtttcttcactgtacgactgataacaccgtcatataattgactctgtaccacactaggcccgcattaggtgaccgcttcttggttctccaggg

SEQ ID NO: 357571 - DNA, 149 bp, Zea mays
attgaagttgaggcattggagcttgcaaaacaacgtctcaagtgggaggcatttagtaagaagaaggacagagagctagagaagatgaggttggaaaatgaacaaatgaagattgagaataaacgtttggagctagaggtaagatataa

SEQ ID NO: 357572 - DNA, 148 bp, Zea mays
cgcaactgacgttccggcggggcaaagtactgaaccctgaagagaacagtggctgcaccccgagacggctccggttcaggccttccgtagccatggcagacgcggcatccaggaacagaggcggcaggatcacaagcaagaggagcgg

SEQ ID NO: 357573 - DNA, 146 bp, Zea mays
ccgagaacagctggcgatacatctgaagctgcagatgcagcttctctcgtcatggagtgtgagtttgatcaggcagcatatgcgattctcaggaaattcagctccagttcagagtcattcagcgatctggaatccgtcgacgcccg

SEQ ID NO: 357574 - DNA, 149 bp, Zea mays
gaaaccgcttcccccaccgaacggagggaacccctgacgccgcctgcctcccatcacgcgcgctctacgatggaaccatgcaccacgcacaactgtatcttagctgtgcttatatagtatatgatgatcaataaaactggagtagtact

SEQ ID NO: 357575 - DNA, 150 bp, Zea mays
tgcagcgccaattagcagtcgagcactgaaacagcaacccatgaatgatcgtgttcaaaatatcaacggtgctgatgctgtaccgcctcgttcgcctaaacggatttataggaggaaacgcaaaccagcagcatgaggattatctgaatg

SEQ ID NO: 357576 - DNA, 144 bp, Zea mays
cagagcagcaaccaggagtctagattttcagaacaatttcaataactgtatgcgggcgtgcgtgcagtgacggagctggtggaaggggactcgtcgcggaagatcgtggagatcatctgccggacgagcctgctaaagtcggag

SEQ ID NO: 357577 - DNA, 265 bp, Zea mays
cgatttgccagtatagctgcaacatacatagttcaaaatgggcctcggcagtgtcgtcctccgcctcttcgtcaatggcatccgcgtcctccagttcctggccggtgccgtcatgctcggcatattctcttacttcctggccgtgctggctgaccaccacctccccatcgcccaatggatccgcgccgttgacggcctttctggagccgccactctgtacgcgctgctcggatcaatcttcaccatctgtctcggcggaatcatg

SEQ ID NO: 357578 - DNA, 274 bp, Zea mays
gctccagagcccattgttcttcctccaatggctccgaagttgtttgagaatttatttgggaatgccagctagaattcattaaagcttggattcactaaagcttgaattcattaaagcatggattcgttaaagcttgaattcattaaagcttggaacgtcagctagaattcacattacttgatgcaccttttttgtacttttgtagactgcaagtaggtcagtaggtatgatgttttgagtcgaaaaaaaaaaaaaaaagggcggccgccgatta

SEQ ID NO: 357579 - DNA, 271 bp, Zea mays
gttgccgtgcgatgtggttgtcccagcattgacaggaaggttgtaaactctgggaagcgattgcgggcttatgtaggactcgatgaaggagaggtttgcagccaatgcaatttaagaggaagttgtgatagggcatatgtgaaggctcggaaagaggacgttggaagaactgtggatgttatgcgcatccttttgacttacggtcttgatgttattaccggcaatgtagataatagagcatgcctgaacaaatctgtcaaggaatcaataa

SEQ ID NO: 357580 - DNA, 271 bp, Zea mays
ctcttcccttctctcctccctttctttcttctcttactcaatcctctgaatcgttgtcactgcgtacatcggataccctcagtgttgggtcaagttcttcatcccactttgtatagaaaaatctgtatccgcagtaggatgctatgatcaaacaggagccttctctagcttcttagcataagttgtggagagggaaacactcggacatcaagctgacagaattgcttggcaagaaaaggaaagcaaccgcttaagagagaggcaaaacatt

SEQ ID NO: 357581 - DNA, 267 bp, Zea mays
gcagctcccggcgcccggcaagcccacggagttcgagcagcgcctcatcttcgagatctacaagtccatcgtcgcgtccaaggagctcaccaccatgctccactcctccgccgcgcacctgccgcccgccgcctctgcggcgggcctcccgtccacgcacctcctcgacatgtgatgagccgcgccgctggatggagaaggagagagaacgcgcgcgccgccggttatcagttgtaacgtaacgtaacgagagaggtttggaggaga

SEQ ID NO: 357582 - DNA, 187 bp, Zea mays
gtgggtgaacccgcagagaggggcagctagcttccttccttcccaggcgcgcgggagagattagccgcagtataagtagccagccagccagccatgtcgtcggtgtcgtcgtcgctgaccactcctctctgctgctcaccgtatcgcggcacacgcgcggctaataacgcacgagagcaactgatac

SEQ ID NO: 357583 - DNA, 266 bp, Zea mays
cattgacagcgctcagtgcaggactttaagtcctgcttcccattgcctctaaggcagttctctcttcaactccacaatctcagctacatgcccagcgtttcttcagaaacctgtgccaccatggagtactccctcagattctaccaacctcatataccagacacggtgttctacagaccagctaaaaacagatatgtcactgcaacagcagccgcaacaagaaccatcgttttttgatttttccttgtttgagcgtgattcccaaa

SEQ ID NO: 357584 - DNA, 255 bp, Zea mays
gaattagtgggatatatgatggtttaatcacagtgactaaaatctggactctaaattgctaatagtagacacagtagctatctagtgccggtagtgtttgggggtgtctgttgggctatgctgatgtggtgggttggagttgatattgtggttgttttgtatggcacattgttcaaatatcgctctctagagctactttttatgtttcatttttcctcgaggtaggttagtagatgtctggaatggatattgcca

SEQ ID NO: 357585 - DNA, 255 bp, Zea mays
taagcctgtaaaaacacttgcaaagtattgccatttgagatcgctgcacttgatgcttcagaaagagcaacctagatggcactcatgtcccatatatgatcttactacagcactcgaaccagctaaacattcgttctcggacatcattttggaggcccaatcagatgacaaaatggagtgtcaccattgttcgtgccagttatcgactcctcatattcatagccataaggtcattctgagcgtgagctgcgatta

SEQ ID NO: 357586 - DNA, 129 bp, Zea mays
cgttttcatcgttcttcctaccttctattgcggcggcgacaggcagagtttgagagcccgttgcccccgcgcgttgtcccggtactacttggcggcacgcgtgcgagcgaccgcttgcgcaacccagcg

SEQ ID NO: 357587 - DNA, 268 bp, Zea mays
catgaatccttacaatccctaccccggttacactcaaaccacctacacttcttcttacaccactccccctcctcaacaaccgggaatgcaaggttcctttgttgtcaactttggccaacctgcctacgttcctcctcctcacctcaagttgtcttcaacgttggtgctcctattatgaacaacggtggcgccttctacatcgtttctagaatgaacggacttgttttggacgtcgagggtggtagccgaaaccaaggtactcgtatta

SEQ ID NO: 357588 - DNA, 260 bp, Zea mays
cttcacaccaccggcagccgagaaccatggcagcggctacggcgcacctcctagccttcctatcggttctcacgacgatggctgccctctcttcggtggctgccggtggtcgcatgacggaccagctcgacatactctgggcccaacacagcttctaaacggaagcaacggcggcgacgaccagaccatcgggctgtcgctggaccgcgtcatggggtcgggtttccggtccaagacctcctatctgtttgccaggatcg

SEQ ID NO: 357589 - DNA, 130 bp, Zea mays
ctcggctattaataccacgagtgggaagttttcttcttcgtgacctcccgctcgttgcgccagtcaacccaccacctatccgtttgtcgttctccggcccctgcctgattcccctcttccccccctaaaa

SEQ ID NO: 357590 - DNA, 155 bp, Zea mays
tctgcagggacgcggcaccgttccctgctgtcccgctcaaggtgcagccaaggccacagccgtttgtcatggcacagaggaaggtggtgaagaggcactcgtccttcgctaagatctttattgtcacagtgatcaagtggtcatgtctatctttt

SEQ ID NO: 357591 - DNA, 239 bp, Zea mays
cgccgctgcaactgcaacccatgccatgccggcttagtgattgggtataatttggcttggcagcagccagcattattatgtgctgatctgttatcttttactagtttggtcgtccgatatctttctttctttttcccccttttcgactctgtactgaaactgctgagagattcgcagtattgttgtatcgtattcaaaaaaaaaaaaaaaagggggggccgcggattagtgacctcttc

SEQ ID NO: 357592 - DNA, 230 bp, Zea mays
tttagttggtaatataagattattagtaggtgtatgtataggttgggaacatacatgcatggaagatggtaccacacacaccaagcagcaattggagggagaggagattattagtgaggtaattaattgtaacatatatagagagagaattgagcatggagtcacatacatacatacttacataagccataagtgcaaggcttgctcgtggggccaaagatcggggatgc

SEQ ID NO: 357593 - DNA, 259 bp, Zea mays
tagagacctccacatgtctattcttgaaggacgatttccagagtatgctcttatcaaacccaaatttgtctgaactgctactgtaaatttgcatgggggggaaaatgacatgatttttattttgtgccatcctgtagatcgtgcgaggattcttgagggtgcagtttccaacgggagacgttctgcagtgggttcgcaacgcgatggaggtcgctggcattgacatatccgagtgctgtgcttccaccattgtctgaca

SEQ ID NO: 357594 - DNA, 123 bp, Zea mays
ctaacttttggctcaacaagatccaaagtttatggtaattttgggcctgttggaacagaaggcctccagttgtccttttgttttgttggcaatactgtgaattctttgagttgcccacatctt

SEQ ID NO: 357595 - DNA, 148 bp, Zea mays
cagaaatggcttggcgaggatggaagcatagagacggatttggccgagcgcacaacagctcgccaaagacggcgtcgaagcagcagcgaccgtcgatcgagtgagggagtcatcctcgattcgcggtctctcgactcggccgggggaa

SEQ ID NO: 357596 - DNA, 265 bp, Zea mays
ctcttattggtgtttcattagttgattctttggcatacgcccgcgaggtagatgtcctcgttgagccgccggctaatgtatgttcttctgcctggatagagaatagtgggtgtgcatttgagcgcatgggttgtaagtgagaacgggctgtgtaaatagcttgtcctgatgccagggatacgtcttagttgtcacgagaaaaaagaaaggaaaaaaaggttcaaagctttggaactgtcaacagcggttgttagattggaattgc

SEQ ID NO: 357597 - DNA, 209 bp, Zea mays
tggtactgctgccgtatgaactacatagcatccacttaccacttgatatgacataccaatctagtagtctggtatgacgcgtctgtaaatagatcggtctgtgctctctcacggtgcctggatgctatgtagttcattggtactgctgccgtatgaatttcgatgattgctctggtgacttggtttgtaatctggagttggactatcgt

SEQ ID NO: 357598 - DNA, 101 bp, Zea mays
cctctgtattccgctcgatctgcgatcgaaggctgcaaaacaatgacccacaaatgataagggaatgagctcttgactcaagctggtcattttcctctcaa

SEQ ID NO: 357599 - DNA, 254 bp, Zea mays
ctttggtttttaacaatacaacttcatctgcaattatttgctctgaattctttattttcaaactaaattgttttaatatttaagtaaacttgctatttaattaaaatgaagattttttcgattgttggtttagctctagcagccaattcaatgctagccagtggtaatattttacgtcaacagcaattagttattggtcaggctgtgaaaccaattgtaccagatcattatttgcctccaccagaagcacctgt

SEQ ID NO: 357600 - DNA, 252 bp, Zea mays
cggtaagatgcaagatgtggacattgtcatgtggcctgggggactgtctgcaggcctattgagctgggtggccttggtatttcgagcttaaaagagcttgcttggtcacttagaatgcgttggttatggttggcaaaaactgacccaactcgcccttggacttctattcccatccaagttcctaagaaagtaaaagatttcttctcaatggctatgcaaactgatattggtaatggtgcttctacgtttttc

SEQ ID NO: 357601 - DNA, 255 bp, Zea mays
ctcgtccgccctcgatcagatatcaagtcatcgcgatgcaaacatgtttgccacggctctgcgagagaaagacgcgccgaattaccggcagattgtactgcaaccgcaagacattacgtctattcgttctgcgatcaaggcgggtaacaaggcagcactgcaagcagcggctaatttgtctggaggtgatcactgtacggcaagtgtctggctccccatctctgacgacctcgtccctcccagaggaattatcaa

SEQ ID NO: 357602 - DNA, 248 bp, Zea mays
tgacgttgcatggtctacgtgggctttgggttgataaggcttatgaagggaagaggcttcactttaatgctatgtcttttccaaatcttcgacagcttgcaatatcagatgcaccgcagctcaacagcgttgtaatcgaacgaagcgcactgcaaagccttgttcagctgacacttgtagattgtccagaactgaaggccctgcctgatggcattgagcatcttagaacacttgagaaattatatctg

SEQ ID NO: 357603 - DNA, 247 bp, Zea mays
ccagagcatcatcaagtccatccagaaccgtaccatcatccagtcctctcagaacgccatccagcaggtacggaatatcggccctgctcagctcgccactggtggtgttatcgcagctgaggtcctcggctttttcaccgtcggtgagattattggacgatttaagcttgttggctaccgccgcgaggcctcttcccaccactaaatgtgtctcttgtagtaggtgcagaagttgtaaagattgatg

SEQ ID NO: 357604 - DNA, 244 bp, Zea mays
cgatgctccggaaaagcttggaaagctctcaattcaaaatggccatcgctccgatcaccggcctactgcgacgacagctcatccttgacctcggcattggtctcggtaaataataccccgcgaataactgcaaagctgtaatacagctaggacgacttggaccaatttacttacgactcattaggagctggatttatcatgggaaactggttctggtacggctaccacatgccccgaaccaacg

SEQ ID NO: 357605 - DNA, 244 bp, Zea mays
gaagctggcagcagcgcagcaggtgaaatcccggtcgccttcatcgtgcggaccgaagttctcaagtcaccgaggatgagatcaagcaattcgtcgccaaggaggtaaaagcaatccccgcgttgcttatgtttccacaaaaacaagtgttatttcttagattcgaaggcctccgtccacagggctgcaacacaaaaggaaccacaaactaagaactttttatgcactaattaagaagaagttt

SEQ ID NO: 357606 - DNA, 247 bp, Zea mays
tagcattaacacaacgagatataaccgtggaggcgagttttgaataggagcaaataatatttttttgtttacaatactcttggcttcgatcccaactattctaagaaacctttaagaacacacacataagaacacacacatgaggatcacacatgttaattgctactagtcagtttctcgtgcattgtcacgatttttatatatcatataagtagaccttgttttcataagacacaaaaatatgtgt

SEQ ID NO: 357607 - DNA, 286 bp, Zea mays
catgtctctatctcccactgccttatttactgaatgggtggagaatctaagggaaaaggataccagttggaatatggaagaactaacctctagaactgactgtacctttccttggaaatccactagcaatctatccctattgaaagtgaatctaccagaaggttatggaattccagaaatcacagcacagacaaaggtggctttgggggctgaattagtggacactacttttgttacattctggatgcctactgactacttgtgcttcagagggtcttttgccttt

SEQ ID NO: 357608 - DNA, 280 bp, Zea mays
catggtaatcagtacaatgctcttctctatcctccaagtcctctggcaggtcttaggtgagctgatcatcatgatagatgcagttgaatatttaggcgatcggatgaatgctctcaaacgattcttcgttacctccaagattgtattcttgatgtggcacatatattgcatctgcttcaacatcaagatatgagtggattaactggaagaattatcctgagttccagatgaaggaacaacctcgatcagattctgaagtcaaatttatgaacccatatga

SEQ ID NO: 357609 - DNA, 273 bp, Zea mays
cggctcgagtgaaaagatggtgatgcaaaaatcccgattgtcactaccatatattgtttacgctcaaatatatggtgccagatgtaagtgggaaaaaatggctggagtgtggaggtcaatggaaaatcaaagagcaaagaaggttcagtcatgcagctggctttgcatcaagaatcatatttatgttattacgtcggaacagatattgcaccatggaaaaggagccacctatgaggttttggatcttctattttgggacatgatgaatcataa

SEQ ID NO: 357610 - DNA, 268 bp, Zea mays
gagatgtttacctcctgaagaggctgtcaatgctctgtctgcttctcctgagttgcggttgaaatctagagccattcaaaatggcaatggtggcaccgaagctcctcagatcaatctgttcccttcaaaacagtagagtttgtaacaggataccctgaaagtcggatcaggtataaatgaagcccagcacccatgtgagcacaaagctcagaggtccatgtccctcccatggctattgaagtgcttgcaacttggttttgcatatgga

SEQ ID NO: 357611 - DNA, 268 bp, Zea mays
cggtttcctgttcggcgcccagccatccctctgttttcctccctcgccatgccgcgcagttctccggctcgccggcgttttacgcctgcgcgcgcgcttagctcggcgttcccttccccagctccaatcttctctgccgagcccctccgtggtcgcgtcccggccaagctccggctcggatcggtcttcagctctccctgcgaccgttctccttcgtcctggccccttcctgcgcgcgcaaatatattttccccagccgattctgctg

SEQ ID NO: 357612 - DNA, 276 bp, Zea mays
cggcaatcaatgtgttagctccttcagcttggatcctgtcgcgagtacatggtacaacccaggccatcttccctcagggtttcctgggacagcgccactttcagacacgactgctggtggcagtctcacaagtgctccggcgccttacacgtattcagtcttcccaagttatatatccgtcatttcaccggcaccgtataatgcaagaaatgcggctgggacgggaactgctgtcgaaacttcttcccctacgggcgcctctgctactgggtccct

SEQ ID NO: 357613 - DNA, 269 bp, Zea mays
cctttttcatctatgttagcagtggggaagggaatccagaggatagcaggaggaagagaggtacacaacaaagacgaagagaggcagtagaacggaggtagttcagagtttcagagatttgttcatttgttcgataatcccctttcacaagacacagactcttatttataccatcacgccaccctgacaagctagaccctatatcacagccacacacaacactaggtcccacagccagcgacacacttacaccactctggccttctggt

SEQ ID NO: 357614 - DNA, 270 bp, Zea mays
cgagcaacaggcccgatccgccaccaacgtgcacaaaagcgctcatcccgtacccatgcccgtacccgtatccgtacccgctcccgtgcccaagtccacagccgcgctcctgccactgccactcctgcaagccgccgccatgcccgacaccaccaccaccaccaccacggccttgtccgacaccaccaccgccatgtccgccacctgtgtccgtgtgcaagtgcccagcatggacgccgtgccagtgccgcggccacccgtgggtcgtct

SEQ ID NO: 357615 - DNA, 241 bp, Zea mays
gggcttgtgcggggcacaaacacaaggaacaaacgttatttcactcggcagaaacgcgttacacaacatgcccacagcggacaccgaaaggcgaaaggcaccccgctgctttctttcagtttcagggaaaggacccgaaaccattacccatgctgataatcacatcccaagggtaccacaggcacacttggcatgccaaaaggcgctctgcagtttgcaactatggaatggtagcacaaaa

SEQ ID NO: 357616 - DNA, 176 bp, Zea mays
acccgttcccactcgcagccccggtcgcccgatcgcttgggttgcagctaccagagccgacagcgagagagcctgagctagacacgcagccagcaagcgccgagtcagcgagtccgacgacgccatggacgccgtctcctgcgcgggcgtggcgccgcagagcgcgctcctgttcc

SEQ ID NO: 357617 - DNA, 270 bp, Zea mays
  unsure (1)..(270): unsure at all n locations
atacacactatgtctacaaacgttataaaagcaatgtgtatagaaaagccataatttggaacaagcaatgtatatagaaaagtcatgatttggaatggagggagtagtattacatattagcccatgttggctcactcatgaattcacatataagtaaccagtggcagtaagcaaaagattatgnatgtgaaactgccttcatacggtctccaggcagtcgcagaagtttgattcaatcataggctggagccgaatggaatcagaagtgaa

SEQ ID NO: 357618 - DNA, 266 bp, Zea mays
ggagtcttggtgtggtcactcacgggtcgctgttaggttggcaaggagagggtgcctttgagtccaacgcaaggcgaaattcctggcagggaagtgagtgagtggccgtgccgtgccgtgccgccgtcgtcatcgctggtagtggtcaccaatacttaatatttttttttgtaacagtatcattgcttacttgatgttttgaaacactgaaatcctgcatctcactgtcgtctcctctgcagagaaaccaagaagaaagagtgggg

SEQ ID NO: 357619 - DNA, 266 bp, Zea mays
tttaattaaaggttacattttgaaaggaaatgctaaagtaaaataccagccgggcaggctgaaaatcgtcttaatttacttttaaatcaatttatcaaaacttaattaaccgaaatcatctttaactatgcgtaaaattgcatcaatcagcttttatatttcacttcagtttaattattattttctgactatgtatttttaaatcgcttgcaatcgtttgaagccatcttttatcattttaaattacaaaaatcactttgactgct

SEQ ID NO: 357620 - DNA, 266 bp, Zea mays
ccggagtaactgccggaggaccaactgacggatatatggatcgatgtggcaattaattgatacacaaaactaggttaattattactaccagctgctgcggtaaacagatcagaaagggggaaaaaggagaagagagagctagcaatggatcgatgcctgagggagcattgctgccagtgatagcacatgtggttttaccatagttcatttgagtaaagattcaatttactggattagtagaaggatgaaggatcattttttttcgt

SEQ ID NO: 357621 - DNA, 287 bp, Zea mays
ctcgtctgctggggtcctaactaattgttaggggcattctcttattaattactcctttatacacgctgtccgattcctccacttcttgttcgtacacatacagagatgtatctgcaaattttgtatgtgtaatccgtcctctggtggtttatgccacgagaattgcttattattgttgggtgataaacatatggaaatgagaaattttgtgatgtgattagtgattgcctcctggctcttgcattctcgctaatctcagaccgaccgtcttacgcgcgttagcactg

SEQ ID NO: 357622 - DNA, 280 bp, Zea mays
gtaaccataactggaccagactcctggaaatttcagaccagagccgctgtcgactatcacagcttctgccgaaacgccatcgtccgagcttagttcacacaggtaacattaacagagggtcaattactcagtgaccattggctaatatagttgaatccgtgtcgctgtgctagtatagccgtttctttctgcaaacgtggagaaaaaaaggtgggagactgcggtacatgtaaatgtgtaaatcattgctggatagcttcggttgcctccggcggcaaat

SEQ ID NO: 357623 - DNA, 197 bp, Zea mays
actcaggctggaggtgagatagctgattttatcattgttctgaggaacacggatgccatcagaacattcagtgggaaggcgcatctgtctgatggtgctggtgttagtgcatgtgctggccatgttgcacgtgcagctgaagctgagtgcactgtcaggcaacgtaggatatgccgcatgttactgatacagctgta

SEQ ID NO: 357624 - DNA, 285 bp, Zea mays
gaaagccacctgaaggcacggattttccaaggcgcaaattacggcatgggaattggcatgccctcctcctaagccttcaacgcaaaacacagaagcagcaaaatctgctagttctggaatctgaactgggttccaacaagctgtagtgatgtgtatgatgtagttccaatatggtttttgtccggtgtcaataacggttcctggtcccggtcccaaacaagagtttgcgtcatcagttctatcagacacgcctgttttgccgttggttgcagcgacactggtggt

SEQ ID NO: 357625 - DNA, 283 bp, Zea mays
tcgcagcccaatccaacacagtgcgatgccgttcagcaactccagccagcatcaacaccctcaccagcaccagcaccagcacatgccgcctgcctacgcatccgggggttggtccctctcagtgcaccagcagaataggcatgattctgacatgaagatgatgtcgaactaacagtgctcaacctaggcgtcccatttgttggttgggctggagaggaaggaagctgctgatggttggtactgccgctatgaaatggtcttcttgcgccgtctgtactgatca

SEQ ID NO: 357626 - DNA, 276 bp, Zea mays
gctcctccatggccatggccatggcccgaccttgtgctttccttctcttcttcctagttcttttctcctacgacggatccggtcctgggagcagcaggaggactaggaggagtggcgtcgcgcaggccacgcagagagtcttcctgtacccacaggctcccaaggtctcctccatcgtgagcagcaagtacaggaccgcgtaccacttccagcctcccaagaactggatcaacggtactcttctcttctcttctgttgactttccgtatgccttgt

SEQ ID NO: 357627 - DNA, 270 bp, Zea mays
ccataataggggaatacactaagtattgtatgaatctcataaaaaaacaaaacatattttattttggtacagagggagcgtataacaatcgccccaatggtggatgtgtagcccatcactgtccccaccattcttttcttcctcattgttgcattcagaaacttgtaggtgttgcttctgatgtagctcaaagtactaactaatcttgatgccctgcctcctacagattcaagccgtatcctctccgggtggccatgctgacgacgatct

SEQ ID NO: 357628 - DNA, 274 bp, Zea mays
  unsure (1)..(274): unsure at all n locations
gccagagctagcctcatttatcatggcatccttcatcagctgtccgtcaatctattctgtggctacatgtggtaaagccatggatgatcttcgatcgcagggtggtcatgcctgaaagcctacagcgcagagggcaacctagcatctttggcagagtcttgtatgtctccttcaattgattttggtcatactacagcttgtcctgaactcatgtactgttgtcaacttctatattactanagagtaatgaactgattatcacttctttgaaaaa

SEQ ID NO: 357629 - DNA, 252 bp, Zea mays
ctgctatatttgattatattgcttggaatagatctttgcaaccaagtttattaaggcgtcacgtaagcggtaaggcgagcttggactcgtaaggcgtcctgttgacatcaaggcgaagcacagtggtggcgtgctggggatagggagacagaagagagcggtggtggcacggaggagagggacagagaggcaaacagcaactgcgatgacacagcggctgagagcctgagagagagatagacatgatagaca

SEQ ID NO: 357630 - DNA, 287 bp, Zea mays
ctcaaagcccttatttggaagccatgggggccatcgaaatgcaaactattcgcttggcttatcatccgcaaccgggtttggacctctgataggctcgcagctcgtggatggccgcacagtccttcttgtccgctttgcaagcggcaccctgagacagctcatcacattattgctggttgccgcttctcgaggagaatttgggacgccctagcatcttggctctccattggccctttagctccagctacctggccggactctacttccatcaagcagtggtggtttat

SEQ ID NO: 357631 - DNA, 291 bp, Zea mays
aaatatttggacctttctttcatctgctagactgtccctagcctgatgtcaggacgtagaaaagagtgagacaccgattggagaccaaagacgccaacgtagagatgaacaacgcggttgctgaagaaagtaaagaagcaaagaaattgaaaaaggagaacacaataaagcaatataaaaacacaagcaacaaaaaaagaaaaaaaaaaaatagcaaatagggaaaagttattaaccccgggattttcaaggaatcccatagcaaaaattggaaaaaggcctttttccaag

SEQ ID NO: 357632 - DNA, 307 bp, Zea mays
tagctcggactcggtcgaagggggtgctcggacgcgccaacgaaggcgacacctgctgaagctgctccgctccgcctggccgagcgccgactgcgtcgccaactccgacgacttcctccaacactaccactactgatcgtaatcgtcctacctagcattcgcgttctgttccctaaggccgcggaaagatcactcgcttgcttgctcaggggggcaagtgcaaaggctgccggcggcgtgtatgtatgccgggtccgggaccgggacggcagcaggacggagaaaatctctaatgttttgtacgtaa

SEQ ID NO: 357633 - DNA, 264 bp, Zea mays
ccacaaggccagcttcatcctgcccacctttgccaagaaggctctggagtaagggaagttgacatggacgatattaagagtgctgaaaaacaaaaaatgaaacaagaaggatttgaatgttccttgaagagcaatggaattagcgcagaaggattaaaaagttggacttataggccgtgaaaaggactaagacaaatatagagtgatatactctaaatgtagagagaagatgaaataaagatctaatagatcgcttttctcatg

SEQ ID NO: 357634 - DNA, 290 bp, Zea mays
catggggctcggtggcgacacggaatccctcgtgtcgcagacggctgcgacctacggcaaggcgttctcctactgcatcccgccgccgtcgagctccgctggagggaccctcaccctcggcgcactgctggtggcacgtcctcgtcgcgctactcacgcacgccgctggtgaaattcaacgttcccatattctacggcgtgttcctccaggccatcaccgtggccgggaccaagctcaacgtgccggcctcggtcttctccggcgcgtccgtcgtcgactccggcaccgt

SEQ ID NO: 357635 - DNA, 289 bp, Zea mays
ggaaagccgcggcctgcaatcctatctggtcgaatcgaacgaaggcttctttttattcgacgagaaccttcgtcacggccgtctggtcggcaagacggcggagcggaccctcgccaatcttcaaacctccccgcccgtttttgacggcctcgagaccatggctgcttcagattcctccaagcctgcgcagtcccctgctgcgacgtctaccgagatggacatgagctaaaatccacaaactcatcatgtgtacttttatggttgctttggcgttactggaactggatgt

SEQ ID NO: 357636 - DNA, 308 bp, Zea mays
ctgggtcttcacgccgtcaaggatcgcgccgtggttgtcaacagaaaggtcgaggttcgccacgatgatgtcatctgggcggcttaccatattgaccgacagacatgctcgattggaaggggaagccgtccaattcccttgtcaaggtcaagggatatattgaagaccccaggaaaatgctgttgtaagggatattccaatctcattcctagtgttgcatacctgaggatagcgataaactctttaattcgagaatgccatacctacaggccagcggagagggacttggcgatggcgactgtggacgt

SEQ ID NO: 357637 - DNA, 287 bp, Zea mays
gatagggcagaatcgctgctgaagcttgtggtcgtattggccactggagatcaagcctcagtggatcagatgcttgccaagttggagtctctgaacacggtgaaacgagccagcgatttcgcctactctgttagcagtagcccgtgatggtggcagcgcctggtactttcagagagcatccgatctttctgttactgacgccttcaatatgtgaagctcaacgagatgacatattccatgagcagttctattgttctcctgagccaatcagttgctctatgtcattc

SEQ ID NO: 357638 - DNA, 290 bp, Zea mays
ccatgtacaacaagggtatctgggactggcgcacactcttctccacccataacagccgctggcgcacatcgcaggctatcatgatgggtgtttttggtcagttctctggcaacggtcttggttattacaactcgtctatcttcgatattttgggttacacatcgcactttaaacaactagggttcacggtcgtcaaccaggtcgtttccgccaccggagctctaaccgccatgtcccttactgaccgcatgccgcgccgaaaggtgcttatcattggtacttttgtcggc

SEQ ID NO: 357639 - DNA, 280 bp, Zea mays
gttttctttggaggggccggaaggaggcaagaggaggtcattgtcttgtagcctggggtcgagtttgccgaccactgcagcttggaggtcttggcatatctagttttctagaattatgttgggcccttcgaatgcgttggcgctggctgcagaagactgatcctactcgtccttggtctgatctccacataaaagttcctggaaaagctagagctttcttcatggaggtggtcattactgaggtgggagatggcacaaatacaaagttttggaaggataa

SEQ ID NO: 357640 - DNA, 247 bp, Zea mays
  unsure (1)..(247): unsure at all n locations
agtacgctggactcagcgtgcgtcgtatcgtcacgcaggcagcaaagcatggagaggagaagagggaggggattgaattgcgtgatgaggttgctccgctgagctagctcctcaggccgtcctttccgtcttctacctctaggtgggtattgccattgcgcggtggatcgcagtgagacgtgtattacctccggagccggagcctgaagcggctcctgtccctcggccgccggagcaacnccgacga

SEQ ID NO: 357641 - DNA, 239 bp, Zea mays
aaaggcggctcgtagcacccacatccatctcctgaagcgttaccttcctccacctagtgcttgctgatgtgatgacgcgtctgttacggtttcctggcaaatttgtttcgtcaaagtcgatctctcctccaaagtccaaaacccggttgaaccaggtactggggagacgatgatatctctgtgttgggtgcttggattgtgtaagctatctgctgctggtactattcttgttttctttt

SEQ ID NO: 357642 - DNA, 266 bp, Zea mays
gctttgacgacccgaccacgccagccatggacgccctgacgcgcctccaccgctccctcgtcggcggcgacgacgaggatcagccggaggactccatccttgctgataccgaagacctctgctccctctcccctctccagaggatctacgccttcgcggcatgtttggtggccggactcagccctcatgatcttgtcttttattgtcttcgcaagacctatcaaattcgcagtaatgtttacatttggaaacatattggcagttgg

SEQ ID NO: 357643 - DNA, 260 bp, Zea mays
ggaaatcctgaacctgctacaaccgtctgggagctgtgggattctgatgtggaaggacctggcatgaactccagaaaccatattatgttcggcacggttagcgcttggctttataaatcctatttgggattaacgcctgctcctgcagacaaggccagaggcctaactggaggttttgatcatctctatattggtccagacgcaagtatcgttaatgttctgaacatgacatctgcctctgggtcaactacgactcctcg

SEQ ID NO: 357644 - DNA, 261 bp, Zea mays
agcttctcttgcttgggccgttatgccagcttttggctggaggtggctgctggcactctcatcattgccatcgtttgccctgctactcttctacccagtgacacttgagtcaccaagatacctatgcatgaagggtagaatagctgaagccgttcatgttctggaaacaatgtcacgcgtgaactgtgtttctctcccctctggccgacttgtctctggccatcgggtggaacttcatgatatcggggattcttcagaaac

SEQ ID NO: 357645 - DNA, 143 bp, Zea mays
cttgagttgagtgatccctgcacttcattatggttggcaactatgtttcttaaccatatcagggcaataggtttggctagttccaaaaatagggttgttttgagaaacattgtgcagatatactattctaagggtctgttcgg

SEQ ID NO: 357646 - DNA, 260 bp, Zea mays
gtggcgtaacacttaacaagtttaaagacctataaataagttcgtggacctaagtggcacctcttgataagtttatggtccgttgatgcatttaactcatattttaatggtgccttggacttaactctaatattgtgttatgttatatcatttggaataaagtccttccattcatttttttgtgtgtccccaaactagagatgaattgattagttacaggaactaagggttccaagaaaaatgttgcatccttttcttta

SEQ ID NO: 357647 - DNA, 260 bp, Zea mays
agccagtccagccactatacccggagacgctcagctcatcggtggttaccagcagcaagaggctcgatagatcgacgatcgactcatcagtagtagtcgttgccggacacagtagccagtaggggcccggccgggggaacgccggcggtggtctgacagtgccacgagcccacgagagggagagaggcccgtcgctgtccgtgccgcaggacgctgccgctggatcagggcaccactacgatccgggctgcaactaccgg

SEQ ID NO: 357648 - DNA, 263 bp, Zea mays
atacacctctattgttaattttatattgccgttcattttcagctcatcatggcctttagaacgacttcggctcactcaaaaacgtccgtcatcgtgggtgacaggtctttagatgttgctgatctcgaagtaatcaagttggaaagccttactgcgaaggacccagctgagatggcaaaacttttgatagctgctgagaatcaggggtttttctatatctcttgtgatgaacgtctctcggggaaaatttccgaatgtctccg

SEQ ID NO: 357649 - DNA, 257 bp, Zea mays
  unsure (1)..(257): unsure at all n locations
ctggacctcaagactggagccggcatagcgaaggtgattggcacagcagtagggttcacaggagccatcgtgcttgcgctctaccaaggtccatcactgaccaaaccctcaccagcccaagcagcagcagcccaccatgttcttgctcaccatcagtgggcccgngngtctgtggnncttctngnaggngnnaggtgttggtccttttggttnatncttcagtcgagactggggaagatgtatccggctctctactc

SEQ ID NO: 357650 - DNA, 256 bp, Zea mays
gttgctgacaccccccagaagaagctcagcttcatcaggcagtggatgcgaagtggccatgacacgagcgcaatctggagggccatggcgaggaatgagcaatacctggcattcgtggtagtcctggcggccttgcagctcttcctgcggctagcccgggtgaacgtcaccatcctgttcctgccaatgctgtcccaggccgtgagttccaggagcagcccagcggtgatcggcaacgttctgctggttctggtga

SEQ ID NO: 357651 - DNA, 277 bp, Zea mays
gaagaagacttcccctgaagacagaactcgaaagaactaagaagaaaagactaacttaactttacccgccacctcaaaaaacacctttaacttactttcacaatgtcacacactgtcgatttgtactggcatccactttccccacctgctcgcgttgctgccgttcttcttgctgccaatggagtcaacacaaactaccatgtcattgacctcctcaagggtgaacagaaggccgatagcttcaaggaagtctctgccaagcaacaagtccagcctt

SEQ ID NO: 357652 - DNA, 254 bp, Zea mays
aaaaatacccttttatatatatcgaagtgaccaattcagtatcaaggagacatttcaggtacgatgaaactactctacaactgcaaccagcaccgagatcagatcacaacctatacgcagtatactattcgtaccaacagcaagaaccgagaaaaaatttagaaaattctgctgtctgccaagctccagcactgacgtgacgaggacaggaggggtcagtacccagggacctcggagccctgctgctcttgttg

SEQ ID NO: 357653 - DNA, 273 bp, Zea mays
gtcactcgcaggtcccggaacaaataaatataagcccaaagatgatactggcaagcttgccaaagctgctgataatactggcggttatcgagcaacaaatactgcgaaaggaccacaaagtagtgtttcaaattacactcccactgttgatattggtaaacaagctcctgctggaaattctgatgatggatacagaagacttggtgctgctgctggaccacaaagtagtgtttcagaatacacccccactgttgatattggtaacaagctcct

SEQ ID NO: 357654 - DNA, 269 bp, Zea mays
gggagctggacgacgaatgttcaacgaagaccagctgaaatcgatggtcaaattggctccgctgtccaccgatcccgagctgctgaaggactatgcccatgccccaccagaggtgctggcaacgctgggagatgcagaacaatactacctggccatcatggacattcctcgctttgaagtccgcgtccgcgcattcctcttcaagcgcaccttctttggcattgtcaacaccctcagcgaagaagtcgacaacgccctgtggctatcaa

SEQ ID NO: 357655 - DNA, 270 bp, Zea mays
ttcattcgcacaacacagacatttggcttgcgctctccctttctctctctctctctctgtgtatgtgtgtgtgtgtctcaggttctcagcaaagagcagagaggataagcttggaatgccttggcagtgagagctgcaactgcaacaaagcaaccggcgtccatggtggagagggaaaggggcgagggagaagccagggccctggccagcgggccagggcagcagcagcagcaggaaggagcagcggagggcgagagggtgagaaagaag

SEQ ID NO: 357656 - DNA, 274 bp, Zea mays
gcgcgaaaccctaggttccgacgccatgccggcctctgggtcgccccgtgatggtcgacgcgccgaggaggatgaggcggcagcgcacgcagcaagtcgctagacgctgaatgcaacgaccgctcaaaggggagccggaaccgggaccaccgcggcaagtccaagcggcgagaggaggaggagagcgtgtcctccggagaggactccagcgagcgacggaaacggcgtagaaaggagaaagatcgccggcacaggcgccggcgcgcagcaacag

SEQ ID NO: 357657 - DNA, 156 bp, Zea mays
cctccctctagctagcacaatcgtccatccagtctcacagtcaatctccccgaccaccaaagcgcctcgagctctagcttccctcctgacagcgtgcaggtctcttcaatggcatctctggcgcacctgccgggctcgccggcctcgatcgccgtc

SEQ ID NO: 357658 - DNA, 271 bp, Zea mays
cgatcttgggttcgtaatggtgttccacatgaaagtcagccaagctttggaaatggtgaaccacttcttccaagacctttgcctgcttcagttgtagattctagaatatcagacaaggacgataatgatgttgcaggtgaagattcagatgaagagccacagaagaatgccaacggtgaatacaatacaagtgatttattgaagcagcatgtaaagcgtgcgaaaaggatacgtgctgggttgcaaaaggatcggcttcgtcgattgaaag

SEQ ID NO: 357659 - DNA, 271 bp, Zea mays
catataaccgagatccagtcatgcaccatgtaaaaatgattttttagctcatgtacattaaaggataacgttgttttttaaagatatcagtcataaaacaagaacttatgacatgctttagaatatgaagtaaaaagtgtacatgtcacaatatcatacataagagtatgcaacaaacacaaattataatatacaatgcaaaaatatgtaaatcaaagtgcatattatacatagaaaataacaaaacatataaaaccaaataatctcaaac

SEQ ID NO: 357660 - DNA, 271 bp, Zea mays
caatccagatgttgtatccagttgctggagaaaaacatcagccgaaatataagaaataagaaatttaagagtgccaatagaagagtgagagatacatatatcccaacgatgttatctgcatgacatgaacttagtccggtcaaagcttcaatctacgtccaaaacatcacctcagttgcctctacattattccaattaaggacaaccaagcttctaattagtccggtggcgatcttcacgccaccgtgattgacataaaaaagccatatat

SEQ ID NO: 357661 - DNA, 264 bp, Zea mays
cgcgtgctcaagctgctggagcgcggcccgttcctggacgaggagcgcgatcgtgcgcgcaagatcgcgcgcgagatcaggggcttcggcagcttcaacctcagcggcgcctcccacgccgcgccacagccaccaccaggtgacgagggaagccgcggctacggccggagcaactcgcagttcgtgcggcggtggaggcacaaggacggcgacgacagcgacaaggagaatctgattcagagcccggagccagcacgggtcgcc

SEQ ID NO: 357662 - DNA, 267 bp, Zea mays
  unsure (1)..(267): unsure at all n locations
cgagatgatcgtcgtgatctggagaagcacggcaagcatatgcacccacaggacggcagggtggtccggcgccggaagtggagcctgatgctgatgctcaggctcgtcaagaagctgttaatggtcaagaagtacaggaacccaagaactgcacccatctgatctcgtcctcgtcacatggngttaggttgctacccacctccaagaaatcaatggcggatgagatgagtgatacagaacagagtagtatgtctacttatgtttctc

SEQ ID NO: 357663 - DNA, 269 bp, Zea mays
tgcagatacatggtaaagacctcgctcaccggcccctttctcttcgggtcaaatcgtgccattcctctcctgtccagatacatgatccgctgatgcaggcgagctataggcttctccctttgcagatgttgacaattcatagcatttgcagatattgacaattcataccagtatctctgatgtgtttccgtctctatatatagtctacttcagaagtgtgactccattccgttaaaacacattatttacctaaaattccatatttgtat

SEQ ID NO: 357664 - DNA, 192 bp, Zea mays
ttagagccccctatattctttctagtgtcttaagttccaagacttattccttacaatcagtaaactccctggtaaaatatatgattaagtcttggaacttaagacactagaaagaatatattttaccagggagtttactgattgtaaggaataagtattatacatgtttttatcaagtttttttctcctttt

SEQ ID NO: 357665 - DNA, 258 bp, Zea mays
aggatgttctgctctacggattgggaggatctttttcctggttttttgcttcagagtgctgcttctcaagattcagatcattgccctcttcttctgggtttgcaggatgtcaatagagcaaaagggtgtttcttctttcaggctttctgggtcaagttggaaggttttcatgatactgtggctcaggcttggagtttggtggcgccaggcccctgtccttttgtcactctctccaggaagttgcaaggtactgctaga

SEQ ID NO: 357666 - DNA, 250 bp, Zea mays
gaagaatctgaagaaggctcctcgaagaaacttctttacctcccatccacatgtggtgttctagtttctgatatgcgttttttttttgggttaattcattcatcttatgttcgttgcttctgtgtgaggggaaagcacttcctcgctctactcgtgcggaagcgatccattctttcgtgtccaactcacacgtcaagaatatcgaaatgtggacccttttcagcgcgctctttaattcagcttacctgag

SEQ ID NO: 357667 - DNA, 254 bp, Zea mays
gccgcgaatcctcggcctcgcatccgccggtggccgccgggggcgtggagcaccaacttcccacctgctgcgagaccccccctcacctccacggaagcacacacccgaagaagaagagaaggcgagaaccatggcgccacctgctgtgtccatctcgcccatctgctgcgtcccgtaccccgcctccgccccccgtcgcgctcccgtgcccccctcctccctcagaaggttccccagattcgcagcccggacga

SEQ ID NO: 357668 - DNA, 250 bp, Zea mays
gagcctttgttcagctccaagaagctgcaggcgctgggctggaaattccggactctggaggagagcctcagggacagcgttgaatccttcaaggcggcaggtgtcctggtggattgaacagaacaggcagcgccctattcctggatgaccttcgcattttgtaaaccgaagttgctgtcttgtgcaagagcatcccgacgtcctcggataatgtaataaaaaaagcaaaagcgacaaagtttgccgtgta

SEQ ID NO: 357669 - DNA, 247 bp, Zea mays
ggtatgtaaaccatcctgtccgctaaatttagtagacgaggagcttcttttcacctccagcaaggcgctctaaaccgtccgctaaattttacgggcgtcgccagagctgctaattgtggcagatcttcggacgtccgctacacaccgatacactccctctcccgcgctggggcggaaccttctccattgcgtcttcccatcgcgaaggtcttgttcatgccgacagctagttcccgacagacttcct

SEQ ID NO: 357670 - DNA, 268 bp, Zea mays
caaacgtccggcactgaaacgaacatagtctcgcgatccgagggtcaggatacaccagcacgtggcccaggcgcagactcttcaacaatgaggacgtcgagtacatccggagaagattctacgtctaccgtagagcctacgaaagtgacaccctcaactccgccgtcgcccaaccccacaactcaagaatcattcttcaagtcagtcaataaacgactgcaaatgctagaatccaactcgacgttgtccttactatatattgaagagc

SEQ ID NO: 357671 - DNA, 263 bp, Zea mays
gtgttgcacagcggaaggaggcgaacaacccgattacattcaaggagattgattcaaggaagcatctggggcagggcatggcaagagcgatgatatatcagggagagttatacatcatcgaatacggcgacatgatgtacactgcctcacgggcaaaatcgacccttcattctctccaccgtgccttggtcgccatgcccgaccgcgaatcgcttccctcaatcgaatttcatttctccgccgacgattttgtctgggacgat

SEQ ID NO: 357672 - DNA, 267 bp, Zea mays
gtgtactacgtgctcttcagcgtgcacgccacctatgacatggtgcactctgaaggtcagacgacatcggcgcccgacgctgccaccgacggcgtggagcagaggaagataatgccggtgtgacacagcggatgccatttcttggttagttgagcaaaaggtttgttcaactgtagtgtagggttgaaacctcgtgattcatgaacgccttgttattgtcatcaattatttaatgccgacaactttatgctttggttaaaagaaaaa

SEQ ID NO: 357673 - DNA, 275 bp, Zea mays
ctctaatcaaacagaaacaatttcagttggagaacctcaagaagaactcaatctttgtgcttgttaaactgtttttcaataacaacaacaatacatttacatcaataacatttatatcaatattaacatcaacatcaacaattattaactaacaaatgtttttttgttaatttttttttaaaaaaacattctacaaaatcattttctttctttcaattttcatcaattatcaaaaatacatttataatttttaatttgtaattttttcaaataaa

SEQ ID NO: 357674 - DNA, 264 bp, Zea mays
gtctttcgctacagtacactttaccacttctatttgctccaccagctcactattatcactctttacatctcaatcatgtatgcctctatcatcttttatgctctcgtcgccctcaacggcgtcatggcgtctccggtccaagggcccgaggttgagcctcgagccattgaacgccgtgtgcctagtatgggagacatcccgtttccgaagttcccggcccgcaacaagaacagcaacaagatgggcaaaggcagcagcgactgt

SEQ ID NO: 357675 - DNA, 257 bp, Zea mays
ctggccgcggagtggtcaaggagcaggagcggcggaggcgcaccgcttccgaacgtggctatcaaacaggtcggcacaccgccgcggctgtcgtccgcgaccactgcttcgtcgggcactgggacggccaggacggcgtcgacgatgccgtcgccggcgtcatgggagtcacgtcaggtttagttgggttgattttaggccgtaattgacgtgtgtacatgcatatatggaatgcaaagctaggagtggggtgtgta

SEQ ID NO: 357676 - DNA, 263 bp, Zea mays
caaatacgttgcgcgccatggatggcgactcgaagaagctgaggcttcgggttgtcttctttttttctccgtaaaagcttaggtgaaaaaagggttcggttttctggagtaggaaagggaggtagaggtggacgccagggttcagcgataccacctcaagaaagcaggcctattggaatagcggaaatgaacagcagcggggagtacgatgctgcgttcgcagccacaattgcagcagcagcatttgcaatcgctgcccgtga

SEQ ID NO: 357677 - DNA, 261 bp, Zea mays
gatggaacaaatcctcgtcgatgctcaggtccgtgccccccgctctctttttgctccgtgttttcgccgatctgggaggtttttgaccgggttttgtggccctgttcgtccagatctggggagttcgtggctgctccttccatgggttttgacgaataatctgctcttgtggttgcatggacgggttcggggtcaagtattccggattccacacaacatacgagtttatttttcgtcaaaacccatggaagtagcagccac

SEQ ID NO: 357678 - DNA, 245 bp, Zea mays
gatgaatagaataaccatgtgtgcattgtatcaagacttcaagagtttctaccatgagtaaaaaaactcgacctgcccagcccccgggcattttaataagaagaagaccttctcacgcaggtcgagaaaaccctcgaacccctgtcccacccatacacagcggcatcgaagagtttctaccatgatgagcaagctgaactttgtaaaacgttgagtacttgagtgattgctggttaatgatcact

SEQ ID NO: 357679 - DNA, 237 bp, Zea mays
atctggatgttctctggttcgcatggaaactgttcctccatggtcgctagtgtggtggcttgtgaattgtgatgtgtagaaccagaatgaatcgtgtttgtggcgtcattgcattggattcggacgagttgaaatcggaagcttctctgtctgtgagagaggctggtgcaagtttgcatcaccatgtctcgaatggatattattctttgttctttggtattcaaaatggttcctttg

SEQ ID NO: 357680 - DNA, 262 bp, Zea mays
agcactcttttcctcaatcttgattaaatataaattccgtcgaacctaccacaaatcacacataccaccatcataaacaaccgccaaaatgtccgttaaagacgattccttcccctcaagcgccgcctttgacgccatcagtgccgccctccagaacgaagcagaccgcaaggacgccatcaaacaaggcgccggcctctatgccttcacactcaagaaagatggcaaggaggcatcatggcacattgacctgaaggaaaag

SEQ ID NO: 357681 - DNA, 262 bp, Zea mays
ggctgccagattccccttcggcgagagatccgttgttttctgcaggtccaagtgctctcatgatggcaacctcgacctgctgcttcttatcttcaatttcccgtttgcgggttgagaattcatgagctgttttctgttcgctttccagagccgctctatttgaatccagcatcttctccagccctgagatcaggctttcccgagcctttacgcactcagccactgcgctctctgcgttcgcaagggtcttgagcaagccatt

SEQ ID NO: 357682 - DNA, 258 bp, Zea mays
caatgatatcagtgaagacgaagatggagctaaatgcagacacaagtattctggagtatccatccttgcaagatctctttttacaccacctagtgcaaagtcaaagactattgttttctctcatgatttcaaagacagaagaaatacaacagggaataagcaagctacaatggatgctcttactaagatcttcatgactcgcaaaaagcgccacattaacatagtgcctttcaagtttgatacaccatctcctgatga

SEQ ID NO: 357683 - DNA, 257 bp, Zea mays
caagcagaacgctggcggcacggccagcgctggcggccagcagcatgttcgccaaggtgcacatggagggctacgcgatcggcaggaaggtcaacctcagggcccaggacggctacgactccctctcaaggacgctcaccagtatggcaaccaacttcttctgccccgcagactgttcaggcgcggcagataatgacgctccaaagagtgacaagttcatattcctgtacgaagacttcgagggcgaccgaatgttg

SEQ ID NO: 357684 - DNA, 254 bp, Zea mays
tggaaacatacaaatcgtatttgcataacgtacgaagtcagtccgaaggcaagtcacgcaaacaacagaagaatcaagaacttggcccgtacaagtttacccatcagcaattagagaaagagggcgttatccgcaggagcaacgtcccggagaatcggcgagcgaacatctacttcatgttccgcagcccacttccaggaactttcgtcatcagtctacactataaggggcgtgcgcgtggccttttggaattg

SEQ ID NO: 357685 - DNA, 251 bp, Zea mays
tcttctcccgctattcagtttgagccgcaggaatctacctaggaaacaaacgcaccaaaagatacacgaaaggcttacatcttcctctcctccgtatcgaagatggcggatttgagccgccctagcgatgccatcgcaatcgctcgcctgcccgcccgcccactcgcccactgcgcgtcagcctcgcctcacccctgggcagtcgcgaagggcgctggaacacgacgacatccgcgtcgaaccctaacccc

SEQ ID NO: 357686 - DNA, 246 bp, Zea mays
ggctcgcagggcagggccaagggccacgtcgccaggaggaggcgggtcgtcgtccacggcggcggtgcggagacgacgacgcaccagtaccgcggcgaaatcgtcgtcgtccacgaggaggacgaactcgacgacacggccagctcgtctgccgttttcagcagtcatcatcctatggccatggtgcacgttaattaatttctccggttgaaagcacctccacagctcgcacgagttgcgcaatat

SEQ ID NO: 357687 - DNA, 246 bp, Zea mays
gggagattttgcgcgtcatgcgattttacggaattattccggccagaacggtcaggctcgtcggatgggtcggtcacgaaacaggtaaccaaggagccatctcttacgcgaagatccacgcagacgaaaccgtgctggctctcgaagcgaaccgaggtagttcgatggtcaccggcgtgaaaaccgccttgctcggtcacgaaggcgtcgaaagagctgttgccgatgttgccgatttggtaaaga

SEQ ID NO: 357688 - DNA, 131 bp, Zea mays
ctctttcctcacaatataaagcaagaagaccatatggcaaagctgcgctagaggccagcatcaggccagaataggccagagagcagacgaggcatggcgacgtccgtggcctgcgccttcttcttcttcca

SEQ ID NO: 357689 - DNA, 247 bp, Zea mays
caaacagccaaacaaacgcatctcgaggctccggaaaagcttggaaagctctcaattcaaaatggccatcgctccgatcaccggcatactgcgacgacagctcatccttgacctcggcattggtctcggagctggatttatcatgggaaactggttctggtacggctaccacatgccccgaaccaacagccgagacgagtactacgccaagaaggaggccagccgagccgccgagcgaacccaggcg

SEQ ID NO: 357690 - DNA, 262 bp, Zea mays
ggtaaacatcgcttaccagtcaggcgacgtttccgggatcatagacagccggatgtcctcataccctccggaatgcgtaaagaggttcctctccctcgcaataaggtgctgccgggaacacaccgaagagaggccctacatggccgacattgtcagagagctggagaccatccggagcatgctgcccgagggagaggacgtcctgtcctcgacctcggggtcgggcttgctggcgaagtccatgtcatcatcatcgaccacc

SEQ ID NO: 357691 - DNA, 250 bp, Zea mays
taagaattggaagttcaaaattggtccgccgtagaatttctgtgcatcttagagcatctccaagggaggtcctaaacaaggttgtatattgaaatttagggcttgagaccataaaactctttccaacagtggccctatttcataaaaaattatcaaatgattatagggtttggcatatgaggttctaaatatagtatcacatatattgaagtcatgtccctgttttcccttaatctacaactattttgtt

SEQ ID NO: 357692 - DNA, 240 bp, Zea mays
gtcgtcacagtccctcgcgtagacgcgcacccacctccatccctcccatcctagacctgctcccccgccgccatgacgatccgccgtcgcacacccgccgaccctaccatcgcagacctcctccccattgccagatcgatccttcatcgcccctcgatgacaacggcttctcagaactaggcatcctgttcactctatatccatggaggcggcgatgcagacgattctcgtcgggatggc

SEQ ID NO: 357693 - DNA, 241 bp, Zea mays
cacctgcttctactaccagttctggaagtgtggagactagctgggagctggccttggtcactgcacccagttcaaatgggactgctgtcactccaagcaaattggtatacaagctgagataattcacatatattttgcacttcatttggcgtctctgcgatcatactaaactcaacttgctactagccggtgggctggacctgcttacactcgacagcttgtacaacgaggcgcaccgaag

SEQ ID NO: 357694 - DNA, 143 bp, Zea mays
caccgtcactgggtctccgtgagccaatctgtattgcttaagggatcagcactcccagcaccagcttataaaactacgcccaaaactgtcaccatgtctctcaaattttctatttacacttgtctcccaattccaaccaaggt

SEQ ID NO: 357695 - DNA, 301 bp, Zea mays
cgctggcgccgcgccgccccgcattcgtcgacgagttcgacaggcccagtgctgccggctcccatatgagtggggtagtaaccgagccaagacttaattccgtggtacattctacatagaggcttcatcgaactcaggacctttggcttaatggaaaggcctgtcaccattgcgtcaggtggctgactacagacgcttgacttgactcccaccttccatgaaatgcactggcactcagccaaaagacttcaggagttcgacacatacattgaatcgcaaaatcaatatttacattacttca

SEQ ID NO: 357696 - DNA, 300 bp, Zea mays
ggcaggtggcaggttgctgtccgtcgtcgccgtcggctgcttcctcctcttcgtcgtcgtcgtcttcacgctctcctcccgacgctacgccaccctcgtcctcgacgctcgtgatcgccgaggtgacttccacccgtcgcagctgcaggggggcagccacggcggcggcggcgagggtgacctcaagcatctgcttgctgctcagcggaccaacgacgacgacaaggcagtcacggaaccggagctggaggaatcagggatcagaggaaagatcagcagcaacgtcgtcggggccggggg

SEQ ID NO: 357697 - DNA, 296 bp, Zea mays
cgaggacgaagatggccaccctggtggtgaacgcgtgcagtgcgcttcgcagtaaacggaaaaagcaaagcctatatatccaagtaaatgtagcttgggactcaaaacaaaagcagcgaccgaatagtggacgcgggatggtgccttagagctattggatcactacgacgtcctttttttctggaggcagggcaagcgagtgaggcggatggagcggtgttgtttgaattaatttagggaattgggcactgcttcgttccattctctgccgctgcatttgaggagttctcttttca

SEQ ID NO: 357698 - DNA, 296 bp, Zea mays
ttaagaaccgagtaggcagacagggaaggctaggaggggactaggggagagagagagggggaaggccaagaagaggcttcctctccccccattctccaatccgtgccctagtcgagccagccgcgaggaaggaggcgtctcgcctagcgcccgcccgtcggccgaccttctgctgcaccttcgaactctgcaaagatcatagatttttgggcaatagcaagtggacatggaaccatcctctcagcctcagcctgcgatgggtgtcgccgccggtgggtcacaagtgtatcctgcgt

SEQ ID NO: 357699 - DNA, 291 bp, Zea mays
caggaggtcttcgttcagctatacaccatctcggccttcggggcaatctaggattggttccagccatttgagccctggtggtgagagactgatcatggcattgccaatgtcaccctccacaccattgcagaagcatgtctcttctccttcaactccatggtcaaggaaaagctcaggcagtgccaagggcatacagacagaggcaatgctggaccagttcttggctggcttggatgtaaacattgacaaaatcatggatccagagactaagactacaacacctccagcaac

SEQ ID NO: 357700 - DNA, 295 bp, Zea mays
ccgagcccgagatggccgccgcgagggaggaggacgaggcggcacggccgctgcttctgctgccgcggacggcgcaggaggaccagaagtggtggaggcggtgggcgcgcgaggccgggtgggtggggtacctggccctgcccatggtggtggtgaacctgtcgcagtacgccgtccaggtgtcgtccaacatgatggtggggcacctccccggcgtgctcccgctctcctccgccgccatcgccacctccctcgccaacgtctccgggttcagcctcctgatcggaatggcaag

SEQ ID NO: 357701 - DNA, 288 bp, Zea mays
gccgaacacacacacacaaccaacaccagccagcagcagcttttggggggtctggtcatcgtctacctaagccttttctatactcggtattcttttttggggacgaaatatgtcgcttcttgccaccgctcgacttgcctctcgggcactcctcgctgccccggctcaaaaaataaaaaaaaccagatacatggcgagtcttaaagacttggctgttcgaatgaagtcggttgcttccgtcaagaagattaccgcttccatgaagactgtcgctgcttcgaagttgaa

SEQ ID NO: 357702 - DNA, 269 bp, Zea mays
aaaatataaattaatatggtcttaatcccaccatataaataacgttctctttctgcagggcaatttagttctttctaatattgggctggcagagaagcgcgtgtaccatgcagcactgactggtagtagtctacctggcgctagacatgagaaagatgattgaaagacgttgcgtcgctttttctgtaacagacagccgaggaacacttaaaaatgtaactgtgtgcgtgtttttatacctgtaatgtggcagtttatttgtttgagga

SEQ ID NO: 357703 - DNA, 265 bp, Zea mays
cgggagcagcgacctgccgtttggacagggagacggttacggcaacggcgtcggagtcggagtcggcgttggagctggcggcgtggcgcaacccgaggcaccgcttgctgcgcctttgccgcagcccgagtcgttgccactggcgccgctgcctcaggaagccgatcagttcggtggcgccgcggggcaggagaaaaccgtgcaggatgtggggcagacgttcggattcggcaaccagccgctggtggacaacagcccgtacgac

SEQ ID NO: 357704 - DNA, 262 bp, Zea mays
cccgcagcggcggccgggccgcgcaggaggagcggctcgccaccatgttcagcgacgacaaccccaacgcgagctccgtcatgtaaattagaattactttttcttttcccctacacaccaccgtgggtgcatggcgcagtctcttcgaccacagaaaatgtaaaccgtacgtggatgcatataaaaaccatagatgatcgcctcggttggatgtctatgtccatcacatgtgcttgtacgtacgtagctgtatgttgttgta

SEQ ID NO: 357705 - DNA, 179 bp, Zea mays
cacgcttcaattcaaacgccacaaacaaaccataagctacgtgccacaaccaccaccatacatcatgcatggtctagtaaaatcatacaccatgattaacttactactccccgttcttttttatttgccgactagggaacgataactattcgaaaacggagctatgctaaggtggcatc

SEQ ID NO: 357706 - DNA, 263 bp, Zea mays
gccctactccggcgggatccagatacacgacaccaagggcgacaacatgaacgccaaggggacgctcaaccttctaaccggcgccactgccgccgccagcggagggggcagcatcatcaggaagaaaaatgtgagttggtcggtccccactccccagacccccacccttcgtctgttcgcgttattaaatgcacattccttcgtttcttcgattctgaccccatcagggcagttcttcgatacagccaagacaatcagctggc

SEQ ID NO: 357707 - DNA, 264 bp, Zea mays
ggccgcgctcgccatgggcgtgtccgtcgccgtgacgctcgcggcgctgctcttcttcggcttcgtcaagggccgcttcacgggcgaccgccccttcttcagcgccgtccagaccaccgtcgtcggcgctctcgcctccgccgccgccttcgccatggccagggccgtgcagtccattcgaagactgttgtgatgcagctaaaatagtgaagcaggccggtcgccgcatgccccatatcaatcatcacccgccggctaggttgg

SEQ ID NO: 357708 - DNA, 270 bp, Zea mays
atagaaggccatccttgccatcgctctttgcctcatcttcgttgccgccgcttcggctcacgtcaccgttgtcggtgctcgtggacccggaatcaacagccctgggtacatcaagtccaactccatggatccatgcggaaatggaacttacgataagaaccaaggccatcaacgtcactgctaatgacatcttcaccgttacctgggctctcttcgtcaaccacaacatccctccagccgtcgccggatccatcaacttctactggggac

SEQ ID NO: 357709 - DNA, 258 bp, Zea mays
cgtatgagaagacgacagaacaagcccccagcgcttgtaaccaatatgcagtcgggggggaataagtacactcctcagtgccaccaggcttccgccacaccttcatatcgtcctgatctgcttcctccgccagtatcttccgactatgcaggaaacaacaacatcgataacacctcaatgccaatggctgatgtgtcaaattacctgcccacgcccactaccagcaacgtggacatgaggtacccatcgacaagttca

SEQ ID NO: 357710 - DNA, 260 bp, Zea mays
gcgcgtgtagcagttgtgccctgcacctcgcccttgcaataggtgcacccctgccatggcggattcacccccatctcctgtcgcctcagcccgcgctgccatctcttctgctctcccccgcctctctagtttggagctcttcttcgggcggcagtggacgacactgagtcctggattcgtgacccatcgactccccgcccgctagatttgtcgggaaggacgtcggctacgtcaaccgccatcgacagagtacatcctcg

SEQ ID NO: 357711 - DNA, 181 bp, Zea mays
ggcgaccgccgcagcacctgcaccggcagccgacacgacggatccgaccgaaagcctggcggagcggcataccgaggaacagcgggccaatgcaaatgctgcagctgcggcggagcaccagagataggcatgccgtggcttcaaggagcgcgtggcggatgagctcaggggctcgcgggct

SEQ ID NO: 357712 - DNA, 264 bp, Zea mays
  unsure (1)..(264): unsure at all n locations
cgaacccaccctccccgattcaaaccgtcgccgccgtcgccgagagagtcgtgactccccccagcggcggcctgcgaccacccgttacccagccgtcccttctccgcagacagcatttgcgcccaccccgtcccgtcccgtcccctctccctcgcggaggcccgagagctttgagctgacacntctatctcgtcgagtggtccacagggccgccgccgcggcgggggttacaaagcggggagggaattccggcgcgggatgccg

SEQ ID NO: 357713 - DNA, 259 bp, Zea mays
gtgaaacatgagagtttctttgaattaaaatcaataaggtttctcaccattttcatagatgagagactatgaggagatgcatggtttcgaggtagttctctttctacgagtttctttaaatgaaaatttcatctactcagcctactgctatagaaaatactactctatttgcaattttgccttgtacgaactgtattgttcgatctgttactttatctgatgtgaatatagtatttgtaccgagtgctaaccttgaact

SEQ ID NO: 357714 - DNA, 259 bp, Zea mays
ccacgaaagacatcgtcaatcaagatgagagccaaatggaggaagaagcgggttcgccgcctcaagcgcaagagaagaaagatgagggccagatccaaataaacacctcgcacctcaacctgacttgactcatctcgcatgatgttacgacttcacacgcacaacgatactctggccgaagatgcgaactctacctttacgcctctgggatgtcccgcaacgttatgagctgggatttgactttgggaactacgtcacg

SEQ ID NO: 357715 - DNA, 253 bp, Zea mays
  unsure (1)..(253): unsure at all n locations
cttcagagagggggcaaccgatcgagggaacgcgtttgcctgctgcgcggtcttcattcttcaagcagtagcgcgcacaagataccaccagggctagctagggtggtttagggttctccgccgctttccgatcttgtacagctagcatcatcggtacgctgtcgattgatctgagcagattagaaggatcagncacagcaggaggtgggggagagtcgnncaagaaggaggaggagagcttgccgccgggctt

SEQ ID NO: 357716 - DNA, 256 bp, Zea mays
  unsure (1)..(256): unsure at all n locations
cttctcttcagaagcttgtctttaacgccagaaagcatgctgcggtagaagatctctaaacgattaagttcatcagtatctgctgcatccaaaatgttctcaaattcctttctgatatcaaagacggaagattcctgaagtgaacgtggtagcgcccgttcatcaagtggacaacggaagaaagngatgtgaagtatattggcatatctctccatgagtgtcagttttgacctaaggaattgtaactcctccgagg

SEQ ID NO: 357717 - DNA, 257 bp, Zea mays
aaacagcatccacttttaattgtttaatttcattatttttgtatctgaatttacttttaaagtcaaaaacaaactttataacaatgcgtttcctcggagtttgcatgttcatcgttgccactttggccattttggttgcttttgctccatctgaaaatctagccagtcgaagtaccatcatgaagcttaaaaagattgcagccttgtcgattttgttaaaacctaaaaagttgcttgctttgccattgccattgcct

SEQ ID NO: 357718 - DNA, 256 bp, Zea mays
gttaaaaatgataatgacttggattttcttttggatgaaaaccataaccttactgagatggacggtaacacaggagagtgtcatttagaggataaatcaaacagacaaacagatgaatgctgttcgtataccagctcaaaccgagagagctggggaagatgttcttccttgggtggagctagtgatggattgtcatcaggcgaacagcctgagatacctaatcataagcttaagagcttgacactaagggctctag

SEQ ID NO: 357719 - DNA, 152 bp, Zea mays
cgacaaatttgatgagctgatggccgctgctgcagaagagaggggcgaagtggaagatggtgaagagcaggcttgaaaacagtaccgatgacaagctgctgctgctgtgctctgttagtgttgtttaatttagtttaataccgtgtgcatga

SEQ ID NO: 357720 - DNA, 163 bp, Zea mays
tggacatacccattattttacacaatttgacctgtctgaggacactgagtgatttacataaacaattgtattcataacagagagtagaacataaagccagctctttcagaacatcctatctcagtcatggatttggatacattcactccattgcttatggttc

SEQ ID NO: 357721 - DNA, 265 bp, Zea mays
attctctgttgtcacagtgtctgaataattgaggcgtcagacttcaaagttgctccggttcttggagatgggtatgtttgaagcttgcttggaggtctgaaactttgtgcttggtcactcaagaatcaagatgctgagttattgcattctgaacctgtaatttggtgccagcattcagttgttgcagttgacgcatggcttgtattttaaggtagcaaaaaaaaaaaaaaaaaaaagggggcgcccccaatagttcacccctccc

SEQ ID NO: 357722 - DNA, 274 bp, Zea mays
agaaaagtgtaacttcaactacgatggcagatgaacgatcagataaccagggaaatagtaagagctcaaggagtaatgtttataataccatttctgataaaggggtttttgatggtaacacatctgggggagttgctcgagatgttgtcaagtgttattctctgcaaaatggagacatagtggttgttttgcaagtgaatgttagcgttaacaaattggaagatcctgtgcttgaagtccttcagtttgagaaaagttatcaaacaattgtatg

SEQ ID NO: 357723 - DNA, 265 bp, Zea mays
tggagcgctgcccgacctgttaccgggttccccatcccgtgccctggaagcggacaccgccaccgtcgccaccagcacctacaccttcacagggagcattggcggcagcgctaccacctttgcggctcccgttgtcgacgcgggatttggacgaggcgctgctgcgttgggagcaaatccagaaactagcggaagcgtcgtcatcagcatcgctgcatcggcgccacccgcggacgtcgacgtcggacaggaggaggtgttgccg

SEQ ID NO: 357724 - DNA, 158 bp, Zea mays
aatcatgacacttgctctagccaggagcagccgtcacaaacttatgtgtacaaagaggcatcagaagcaaacgattctgagattcagatggaagatgttggaaagttgtccgttgatcagacatctagtttggtgcttcttgactatgaagacgaggg

SEQ ID NO: 357725 - DNA, 191 bp, Zea mays
cgacaacacatgccacagccacacgcgacacacctgtctcggctgtggcgagcgcgatggccgcaaacgtggcgctggtgctgctatcctcctgctcgccctccacttccgccgcacgccgcctcgctcctccctcgccgccgcttcctgccctcccgccgaagaagagcaagctcccgagccaccaccat

SEQ ID NO: 357726 - DNA, 263 bp, Zea mays
ctagctgaccgcatcgctgctctccctcctgaggagatcaaacagattgctccagcccttctattcagactgaaccaagagccgccacaggctatctccggccagggtttcagttttggtgctcagggtggtgcgggggtcggtgccggaaaggctgaggaaaagaaagctgagaagacagtcttcgatgtcaagttggagaaattcgatgctgctgcaaagatcaagattatcaaggagatcaggacctttacggattgggg

SEQ ID NO: 357727 - DNA, 181 bp, Zea mays
gctgcatcggctgggaatgcattggagcctgggttttgcagcagggattactataccagagaagtaaaatcatttcatgtcgaggaggaagcttctcaaacttttgctccaacatcgagggctattcttggtgctctctctaatgtaggctcatcaagatccagctctgctctgtcaaata

SEQ ID NO: 357728 - DNA, 289 bp, Zea mays
tcctgataaatatagaaaggagggtgatagagaaacacttgcagcggcatccatcatcggtctatccctccgtgtcaaccccctcctcagaagttctaattgcagttcagcccctggccggtccgccgggccaccggaaggagccgctcgccggagggagccccccatctccttgccctgcggcgggtttatggggctctcgctgtaccccatgaagacgtccacgcggttgctctggagcactagcttcttccgcgataagctcagctcctcctcctgcttcctctgg

SEQ ID NO: 357729 - DNA, 285 bp, Zea mays
gggcaatcaggcttggtactgccttgtccttcttgaggtgttatgtcagcttgctgaacttggctattcaaagccagtgcgagcaattcagccaattcttggttatcctctgatcaattatcctgaagtgttacttcttggtgttagccatatcaatactgcatataatctcatccagcatgaagtactgtcctgtgtttttcctgctgtggtgaagaacaccatgcacagcagtcttatgaactatctatgacatatcaatccttaccttactcttcaaggatt

SEQ ID NO: 357730 - DNA, 277 bp, Zea mays
ccacaacagtgtaaaccgtagacccatgccctctgctgctttgtaaaccactaaagctgagtgcagcaattcatcgaacacctcatcgccaaccactaggtctgcactggtgacagtgccacactgccaacctgacccccaacgctgctgctgctgctggagcagccaccagccgactcaacggtgactgataccgagacattactggcagtagaggtggcagggaagagctggagctggagctgggccgaaatcgatcgctcaaggcgacgagaga

SEQ ID NO: 357731 - DNA, 274 bp, Zea mays
gagctgcagggagtggctatggaggtaaagaaacccgaggaggaggcgacggcgaggcggacggccgatcagagcggggacgccgaggcagggctgatctacagcgcggactatagcagcgtggccatgcatgctgcctctccgccgacggcgaagcccaaacacaggcaccccaccagaccataggaagctgtccttatgtagccagtcgtcgtatgccgtccgtttcgtgtgtttcttatctcgctggattgtacgagcagaagcacccctg

SEQ ID NO: 357732 - DNA, 272 bp, Zea mays
ataaaatctggccggccgccaggatctattggccgacggcgcctctcctcctctctctgtattctattttctctctcagccgcgcagaacttcagccgccatgaaattctggttcctggccgaccaatcccttcagctgggctgtgcgccacagagagatttttgcttctcactgttctttttatttcttctggccgcactagtactcggccgccagggagaaccggtcaatggcactgtgcatttgaactcgaccagcactgtcttttctc

SEQ ID NO: 357733 - DNA, 210 bp, Zea mays
ctcggttgtgcaggatgcccctgcggcggcgcggcactccggcaagggcccagcgcaacatgcagcccggtggcttcaagaatctccagcgagcgactacctgctactgcatgcaccaacccacttggacatgctcaacgaacgagcgataggttccagcaattgcctcgacggccctcgacagcaccttaatccgcgctgcagagacca

SEQ ID NO: 357734 - DNA, 115 bp, Zea mays
atttatatgtacggggccggattattagttatatatgaacatttaaacttgctttctgcataagtatttgcaatctaaaatggaccatgcatgcacaagataagacgttcaaaaa

SEQ ID NO: 357735 - DNA, 196 bp, Zea mays
gtcgtggcagtgtaagtcctcgaggacgtggtgaagacggtggcccaagagaggaacctaagagggatggtagggatagggagcgccgagacagagaccgtggcaggcacaggagccgctcaaggagcagagatcgacgggacagagaccgtgaagatggagagtaccgcagaggcgtggtcgtggcagtgtaagt

SEQ ID NO: 357736 - DNA, 289 bp, Zea mays
cggctcgaggcaaggcctccatgggcgcgcgacccctcggctgtccagcaggaagtttggtgcctccctctgcctcctatacagcgcgcacccctggtcctggtgtgtttcttttttttctgtccggccatggatttcctcggcaccattcctttgattcgagtgggggggttcggcctcaagccagcatgagtcagtgacctccctgctcggccatggctgcgccatgagcatctagtgcacctccccctcgacctccctgcttggcaagtgtctagccgacgcccaa

SEQ ID NO: 357737 - DNA, 284 bp, Zea mays
acaaattagaagatccagcagatgaagaaaatgatatgcttgaccttgcatttgggctcacagagacgtaagtcaagacccttcgaacagaatctcgcctcggctgccaagtgatcgcgaacctgaactcgatggtattcggctggcattacctgtagccacaagaaacttcgcggtagatggctatgtaccgaaaccacactgaagacagttatgtacaccacactgaagacagttatgtacaccacactgaggcagtcatcttggggggcacggattcgtac

SEQ ID NO: 357738 - DNA, 186 bp, Zea mays
gcttcgcgacgtatttgtgtcgtcatgattcgttccaaatcaaggcagctgggagaccgccgttgccattgcccgaaggggctgttgtgttattatattatatatgtgcgtcgatttgattgctgtaaattgacaaaatgatggcagccactggccttgccctgcaaaattttgatcgcttatgtc

SEQ ID NO: 357739 - DNA, 277 bp, Zea mays
gtctttttccaccgctgaactataatctacattcaggtgctgtcaatccatatgtttttttttgtgttccatccatcaacgttgaggtctttgggcccattaacttttgcttagatatatttcgccaatatatggggttccttgaaatgagactggtcaacaaaggatctaataaacatttgtgctttgttgattttgcaaccccagcacaagctttttttgccatgagaaatcttcaaggctacaagtttgatgagcaggacctcactcacgcatt

SEQ ID NO: 357740 - DNA, 133 bp, Zea mays
actttcaggctccagagctctgcaaggcctctgcatgtcccctttcagggtccagagctctgcaaggcctctggctgtcccctttcaggctccagagctatgcaaggcctctgacctgtgccctttcaggctc

SEQ ID NO: 357741 - DNA, 135 bp, Zea mays
ttcgactccgattctgggatgccaggacccagcagacggttagttggcgtttttctcagagactttgaaaatgtgtgaagggcttcggcctctgagacttcaagtaactgtgcggcttgctgtggggccaggact

SEQ ID NO: 357742 - DNA, 107 bp, Zea mays
gtgtttgaacaaggttaggagaggtgaacaggtctccaatgacgacatcttgagctttgcgaagcttttcaatgatgaactgactgtggataacatgagcagatcac

SEQ ID NO: 357743 - DNA, 337 bp, Zea mays
tcagttggaggaactcgcaaagaactcatgatcaggattaagaacaagaaaaaacttctccaggaaattgaaagaccagtgttatgacctccagaatatcaagtttcgcaaccagtttctacagaggccagcagagagtgtgaatggtatctgccttccattcttattggtcaaggcatccagaaaagcaagggtggagattgagatctcagaaaactcaaagtttgctggtttggacttcaactgcgtaccattcaccttgcacgacgatgtatcaatccttgaagccatcaggtgtaatagcgtgaaaaaaagctagctacttgggcacgcttca

SEQ ID NO: 357744 - DNA, 116 bp, Zea mays
actacgtgatattgcattgtcaccctgcctctgtatccgagcatactagcggatcctggcccgatccctcttcccagcccaggaactgcggttctctccaagtgaggaaccccaag

SEQ ID NO: 357745 - DNA, 279 bp, Zea mays
aacggaatcaatacttctttcatctcaaccaggtctcaggattgttgatctgtccagcaattgctttgacgtgggccatgtgccaccacaattttctcgaacctgcaaaaacttgagttcctcattcttatgatgaatgaattatctggggagattcccagtgagataagcaagcttcaatcactggaagtattatatgaagtttaagttagaactaatttgtttgccatacttttgtatgatgactctttaatcgcataatatgctcttattgcatct

SEQ ID NO: 357746 - DNA, 344 bp, Zea mays
  unsure (1)..(344): unsure at all n locations
gggttntgcactttgcagccgcgagaggttcgcggagctgaatgccaagctgtggtgggaggagaacaaggagaggatacagggctcagtaccgttgaaaactgagctggaacgaggctgaatcttactaggagttcagttgagcagaagctggtgataatgatggtgttgtgcaaggggctgacatataattaatctggtataagtatacggggagagtttatgtttcgagttaattcggagatggggggagagataggagggggttcatttngagctgggaaagataggcagggatgagataggggttcatgcatgtgtagggcacctcacctggctgccca

SEQ ID NO: 357747 - DNA, 105 bp, Zea mays
ggtgttcgtgaagctagcgtccgacgtcatttccaacaggaaaaacgtgaacctggcccacataacgcccacgaaggaccacatctgcgagaccccgcacaaggt

SEQ ID NO: 357748 - DNA, 128 bp, Zea mays
ggaagaatcagaagagaccagaaaaaaaacctgctgaaccgtccaagtccagtcttgttctaaaatctgatgtatcaaagattgtagatcaggaagcggccacagcacctatgagagttcaagaacaa

SEQ ID NO: 357749 - DNA, 123 bp, Zea mays
gcagaactgggaaggggagaagattctgatggggactaagaaacatggaggaggcggccgacaccagaaggtcctcctctggcagctgccggtggtcactctaaggagctcggcaagataggc

SEQ ID NO: 357750 - DNA, 128 bp, Zea mays
gcaagccagaaccctagcaagcaaaccaccggagcagcggcgcttgcgcgggcggagtcatggcggacgacgattacaacgacatcgacatgggctatgaggatgagcctccagaacctgagattgag

SEQ ID NO: 357751 - DNA, 121 bp, Zea mays
tcgatatcttcagaagtcctacatcaatgcacaacggcatgcagctggaagcggccaggtccttcctgggacctaaccaagtgtcatttccagaaccatccagcgttgtcgtcgtttcaac

SEQ ID NO: 357752 - DNA, 102 bp, Zea mays
tgagagaggcgatgaaggacggagagagcacggaggcttgatcgaagatggatgccggagcacaggtggtgaagaatgccgcggcgtagcgtcgctgcgggg

SEQ ID NO: 357753 - DNA, 114 bp, Zea mays
aatgctagagttacctgcaagatcatctctagcttcagggccaatcttccaaagatcagctgggggcatgtccggttcattacagcaagttcagttcaggagccagccacttct

SEQ ID NO: 357754 - DNA, 107 bp, Zea mays
gtccggggcgctcgtcatggatgctttccttggcaacctgcaagaagcaatcttcaagatgaacccggacacgactcagatggagatgctgttctgctccactgtcg

SEQ ID NO: 357755 - DNA, 100 bp, Zea mays
cgctggctcacttctccaggtaacgaaagtgttcgtcctcatggcgtcgcgcagccgaagtcgaagctcttcgtgggcatcaacaacggccatgtcgcca

SEQ ID NO: 357756 - DNA, 125 bp, Zea mays
ggaatcggctcagtgattctcggcgagaagaaggtcagataggtcggcatgcttgactgcgtgaccatcctccgctccgagaaagtcaaggactagcttattctccatggcaacgacgtcgagtt

SEQ ID NO: 357757 - DNA, 272 bp, Zea mays
gataaatttagtctggcagtgcctacaaattaagtctgaggtgaactacttttgaacagttgagttagaaagtatttggtagccaccagggaaaagagatcttatttcaagaaaataattagtgacactcagtaaagtagaaggtggattagaaggaacaaagggaagcagagatgggatagagactggttgcaacttaactaaatttggaagctaggattaagcccttgattaacctttaaaaatgcctataagatagcataagatgtaca

SEQ ID NO: 357758 - DNA, 261 bp, Zea mays
ctgagatggctacacctgaagcacacaaagatattggtttagaaaacttaacagcttcagtaacaggcatgcagactctgatgtctctatactttgcattgtgcaccaagaaacattcccttctcagacatgtatttgcaatatatggtaatctaccgcaagctgccaagcaggcagttcatcaacaagtaccaattctgatacgcactataggctcctcctctgatcttcttggaatcatctcagatcccacagctgact

SEQ ID NO: 357759 - DNA, 107 bp, Zea mays
tccgaccggtcgaccgaatgttgcgcaccaatcccatcctcctagcaatcgaaggacctagcgagggttacgacggcggctatcggagatagatcgtgcgcattgcg

SEQ ID NO: 357760 - DNA, 121 bp, Zea mays
cagcgtggcacctcgatcgctccgagtccgcgactctttcactgcgatacatacacaccgactcgctagcgagcacgtaggcagattggcgcgccacgctgaaaagcagctcatcgtggtg

SEQ ID NO: 357761 - DNA, 105 bp, Zea mays
aaatattgacacggtaatatataggccatattatagtgaagatcattagtattaatggcctcgtttaatcattccatattgaggaaagcctctgcatataaacat

SEQ ID NO: 357762 - DNA, 241 bp, Zea mays
ggaaaactgggctatcctgaattcagtgcaaagcattcatggcatatgattttcactcctgggtattgctagggaaacctgtgggcatccacacagtaattttgaagagcattggtctcttagatttcaacttctcttaaaaactagacccctacgggaaaggcctcccacggtgcattgctttaagaagaggatctcaacacagggccgagatcagggactgaaggctggacgtccagga

SEQ ID NO: 357763 - DNA, 298 bp, Zea mays
tcgcggtggtggtgtcacagagcagcgccaaccctctgcccagcggcatcccggcctacaccgtgcagatcatcaacgtctgcggcggaaggtgcaccgtgtacgacgtgcacgtctcctgcggcgacttcgcctccacggagctcgtcgacccggccaagttccagcgcgtcgtcttcgacgactgcgtcgtcaagggcggcgccgcttggaacccacgagacgtctcttccatacctaatcctctctacactcagtgtcgctcgtcggtgcatagagatcatcgaccagacatata

SEQ ID NO: 357764 - DNA, 235 bp, Zea mays
tctggtttacgggaaggagtctcaggtcactctacagttttagtggatgtttgggacctggccttcctggtcgcttcagtccaggaggtcaaggccccctatcaaggctgtgggtcttcaccactaggagaggagtgtgaccatggtagaccacagagccccggaggctgcagccaaggccatcgtagacagaatcctttgctgtcagagctggaaggggtcttacgttgtgtgg

SEQ ID NO: 357765 - DNA, 265 bp, Zea mays
tcggattcggctcgcgcccagagcagtggcgagtcgcagcgcgtctccgcaacgcgggccgcaacatcgaccggcagatccgagacgtgcagagggcggacacgcaggtggagacggccatcagggaggccgctaagcgcaacgacatcggatccgccaaggcgctggccaaagcggtggtgcgctcgaggccggcagtcaaccgactgtacgagcacaaggcccagctgcaatccatctccatgcagcttggcgaaatcgttgc

SEQ ID NO: 357766 - DNA, 225 bp, Zea mays
ccggcacagggagcgatgacagagtctcgagagcaagggagcgcagtgacgtcatcggattccaaggtttctcgagcggctgctatggcgaccagagcgacgtcgaaatgactgcagctgagctcctgtcttccggcggcaaggtcatcagcgactaggcacaggccacggcggaattgtacatcaagatgatggactgagtgtagctagaggagctcgctcgca

SEQ ID NO: 357767 - DNA, 348 bp, Zea mays
gtcttcacaacagtagtagaggttggtgttttgattgaagtggaagataaactaaattccaccccgatttactctgactcaggtggattaaatatacaaacaaggcctcaaggcagagcagtcaccagcatacataagcttagtgtgaataagaaaacaaagtgttccataggtgatcaccgttggacacgtgctttggtttttttgcggtctaggtgtagcttctagaagttttgtcgacggctcttgtaaatgaagtgtgagagggcttatgttatgtgtagcaacaccactgttctatgccacggctatgtttacaaacttcgccgttcatgggccatggatatt

SEQ ID NO: 357768 - DNA, 245 bp, Zea mays
ctgggctatagctctggaatcctactctggtcctttattctcttcgaaaagtatggtgtgaggatcaaggcaacgagggggctgtgcttttgcaaacaataaaaggttcacggaaagatgagtggacagctccgttaccacatgttactgtcacctttgctcaggcgacccggagcgtccaacttgaggctatccggaactttgttgttggaaatgatacgaacaaaaatggagagtcttgccca

SEQ ID NO: 357769 - DNA, 172 bp, Zea mays
gcacaatgctaaggtttatttggttgggtagggctagtattacctctggaaacgggaaaacagaggagaggtccagttataactgaacaatcttaaactaaacacccatattgaattgtcgatgtaacggataggaatatctctcaaagcacacatgctgtttttttactga

SEQ ID NO: 357770 - DNA, 331 bp, Zea mays
gggatcatctggctctcccgctgctggctacagtaggagcggcgacggctcgcactctgcctccgccatcgtcgccggcgctgtgaccggctcccacgtgcttaagatcgtgatctactcccgcactaaggaggtccccaatcgtcaggtcatctgctcccgtcacttccgcctgggaggacacacctggttcgtgaagtattaccccaatgggaacgccgccgacaaagccgatttcatatcgttgtatctcgctatccatggtgcagtagtcggcaagccagtgaaggcgcaggtcaccatcagtttactcgaccaggacgggaagcgg

SEQ ID NO: 357771 - DNA, 175 bp, Zea mays
gataaagagagaccaagtagtcgtagtgcgcccgtgttgcgtgaaggaacaagggcgagggagggctgtgcgtccttgttgcgcgaagaagaagatggctgcggtgattgccagcactcaaaactgtcgcgttcgtgaccagcactgatcgtgttcactgccgtgctgctggtga

SEQ ID NO: 357772 - DNA, 112 bp, Zea mays
cagtatttgaatgtgcttctcttggtttctattctagttcctatgatcatttccaccagaacttgaacctcgacataaggaagctgtctcttttaaagtacaaaccgctgaa

SEQ ID NO: 357773 - DNA, 241 bp, Zea mays
tgtcagcaggtccagcatccatgcttatccttttcctttgtgtttctatttgatctgtttttttgcccgcgccagcaacagagaagaatgtggtcgtggctgtaatgggtcagcagtttctgcaattttttggagaccgagaggtgctgccgtttatgagtaactttccagtgggctcacagtatgccacaacatcatggtcagagtttggacattgcatgaagcacttgctggacaattg

SEQ ID NO: 357774 - DNA, 233 bp, Zea mays
  unsure (1)..(233): unsure at all n locations
gctctaagaaatgaaaattggcaaatcaattgtgtgcttgaggatttggcactagcaatggattctaagttcgataaatactgggagaacggcaagtataatatggcacttgtcatagcgactatactgacgcgtcanagaagatggattctttggacttcttttatgagaagacgtgtcaacagtttatcgacatccagataaacatgtccttggccaaacaatggttcact

SEQ ID NO: 357775 - DNA, 166 bp, Zea mays
  unsure (1)..(166): unsure at all n locations
gcgcccgtcctcgcccgcccgtgttcatctctccattccataccttgcagtgcaggtgcggtggtagcacagcgctccggccatggcgttcttccggggcctcaccgcggtctcgaggctgcgatccgcatggcgcangangccaccacgctgggntgtgtgagat

SEQ ID NO: 357776 - DNA, 167 bp, Zea mays
gccatatcccttgaggaatcaaatggtaactgttctggaaaatcagttttggtcccagcgtatatactaatttggtaatggtgccttaagatctgttactcttctgcaggattgccagcaagatatgtgattcagtcggggcaattactcctggcctgcctcttttc

SEQ ID NO: 357777 - DNA, 144 bp, Zea mays
gcagatcgcaacaaaaccgcacgccgtctctctagcgcgcgcagtcttcagcacgcacaccaatcgcccacaagcgctcgcatgagatgtcgaaacctaacttttgcggcgacggcggcggcggcagagaagatgatctacgac

SEQ ID NO: 357778 - DNA, 145 bp, Zea mays
gtatatattgcagtcattggtacatggcacggtctataatactgacaattatcaaaagtggagagactacaaattaaacccttccaccacatgataaagttagattagtatagccctacaggaggcactatacgggaacatacca

SEQ ID NO: 357779 - DNA, 319 bp, Zea mays
  unsure (1)..(319): unsure at all n locations
cgtgcatntggcgattcagatggtgagatatgtccagttgaagtgcaaaggacagagagatggaccccgagctccgtgttaaaaccccaaggcaatttagtccatgctaagttggttgcctggaaggatgcgcagattgcaaagctcatagaaaagctgaaaaagaaagaagccgatattgatgattggcagaggaagagaccataaaggccaggcagaagatgagaagcgctgagttgaactggagaagagagagcggaatcgcaaaagtgcaaggcataagcggacaaaaagctgtagagaagtcagacagtacata

SEQ ID NO: 357780 - DNA, 134 bp, Zea mays
  unsure (1)..(134): unsure at all n locations
gcnctatctcncttacataatcctgctccctcgccagtcgcgataaccctagccgccgacagaccattcgtttctcgcgagccatcgcttctgtaattctcaggcaccccgctcgatctcatcctaatcggtgt

SEQ ID NO: 357781 - DNA, 128 bp, Zea mays
ttatgactacccagggacattcggagctgtgttcgcctcaatatcctgcaccaactttgcagctatgtattgtatcgactctgcttatgccggtgagtgaagaccttgaacctacttgtgattgttct

SEQ ID NO: 357782 - DNA, 139 bp, Zea mays
  unsure (1)..(139): unsure at all n locations
gaganatgtatctaatcagattggcaatagaatgttctaacattactacgctgccagaaggaatgtggcatgctgtcatggtgcttgaaatttgattactaaggagagctgttacctatttccccttttcaatggtatg

SEQ ID NO: 357783 - DNA, 330 bp, Zea mays
  unsure (1)..(330): unsure at all n locations
atntgctggaaaaaggtactatggcaagtgggaattctttggtcttagtcgactcctcttccagctaggctcatgattagcatctgtaccagctccagctccttgctactccaattagtcgattagatattgatcggtacagtataaagttggatcaatttaattgaagcaggaccatcttgcatcatctttacttgcttatcactggctgctctgtanagaaggggtgcacatactttatccttttgctttataattttctatttgtgttctccctcccatatctcgtgggaacttcattcggctttgtaaggcatgtggatctttagc

SEQ ID NO: 357784 - DNA, 330 bp, Zea mays
  unsure (1)..(330): unsure at all n locations
gtcgccacgccgcagtccattctttcgtcacccatcgcagctccaacacctctcgctagtcgtcatggcggcttccgcggcagcttaccccctcccaccgtcgacgcctcctcttcgactttcacatgtctgttgatatcacagataaggattgctcctgccttcactgctgtgaatgccagggacgtatctgtcgccctacaatatatggacattggacttgatagttggcaaactctcttctatatactggacgttccagctttcgccaatctgctgctttaacacatcttctcctgctntcccgatttgcctctcactatcatcatt

SEQ ID NO: 357785 - DNA, 160 bp, Zea mays
ggcagggagctctctcattcgcatcccaggccaacctcaaccccaatccaatccggtgcaggtcgcaggatggctccgcgtgagcactaccagccccatgaggagtaggagtaggacaccgcatgcgtcgtcaagctcatcagcgccgatggcttcgaat

SEQ ID NO: 357786 - DNA, 108 bp, Zea mays
  unsure (1)..(108): unsure at all n locations
gtggtcngtcacttgaagggtagctctcaaagtgggctcttatgacactactagatccaacaaatagtgatgccaaccttgcagatgtcggctatcctggtgagttca

SEQ ID NO: 357787 - DNA, 142 bp, Zea mays
aggtatattaatgaagttctgcttttccttctctgacttttcaacgacagcatagacaccttaggaatctgagctagttgagttgtcagtgctttgcagagatagacatttgggagcagttttgctcagcatgttttaaacg

SEQ ID NO: 357788 - DNA, 258 bp, Zea mays
gcaagagccaattttacacaataaatgtcttcagtccattggatataatgctgtttatcttccacttcttggagataatcttgctagttttctggagacatactcatctcctgacttttcaggtttagttgctcattccttcaagtagatgtgtacagtgtgtgagacatgatcagtgctagcatagagcaaacacaaatagagacagtggaatatggggacatcggcactgggctaacgcatgagtggatgagtcag

SEQ ID NO: 357789 - DNA, 216 bp, Zea mays
  unsure (1)..(216): unsure at all n locations
tagctcgatcgctcgagcttgaagcgcacagactctgctcgcagtgctgctgtatcatacatctgtatntagtggtggctgacttctatatcagaacacgtacgagagtcttacgtgggtcaagatcgtgtcgctgagtgcanagcgcttgcgcgactactcagtgtggaaggaagtgtgctgaccaatgagtagtgagattcatgcaactccgca

SEQ ID NO: 357790 - DNA, 208 bp, Zea mays
  unsure (1)..(208): unsure at all n locations
agtctcgcgngcgcgactgtatcatgcacactagcacgtcgtgagacatactctggatgcggacctagcagcagctctgtcagagagtcacgtctggagaccgtgatggttcgaggctgaacgtagcacgctcgatgcagtacatacgccgcgcacctttgtgagtctcatcatatgacttcagatatcacagcgcatatagattctc

SEQ ID NO: 357791 - DNA, 152 bp, Zea mays
  unsure (1)..(152): unsure at all n locations
gatcgctcagcgcgctcagttgctcacactctgctgctagcncgatctggtatcgtgcgtcgtcgtcatcgacgcacgcgtagcaactccgctctcatctcgctgagagacacgctgagcgcgtcatgcaaggcaccgcacacatcgtctcg

SEQ ID NO: 357792 - DNA, 141 bp, Zea mays
gacgatcgtcatggtcgagacgcgagcgtcgtacgctcatgatgacgtcgaggtactgtctgcgtgctcctggaaaatcagagtcacgaacaggcaagagacatctgaagagagtggctaagctagagaacacgcgatcga

SEQ ID NO: 357793 - DNA, 254 bp, Zea mays
  unsure (1)..(254): unsure at all n locations
agagtttcccctttgtggagctcatcgtgctcaatctgagacgactcttcaagctggcggagcgacgctatatagaacagaagcagaagatcgacatgcanaagctggccaaatttgccaacaagtcacacagggaccgtatccaggacttcaaccagtatctggcgaacctcagcgagcactatgacatccctaaagttggccctggctaacaaacatagccanactgctgtgtacgcacaaacaattgtatg

SEQ ID NO: 357794 - DNA, 218 bp, Zea mays
tgtggggtctatggacgctcgaccagcaggctcgtcgctgcgatcggtgtatacctgcgtcaacaactctgatctggtgatctaggtatcatcgtcgtccggtgctgtcgtatctgtgttcatgtcagataaataaaagtggtcttgtgtctacggctgccatcgccatgtgccaaaacacacatcaccatccaccgcacctatccaaggtaagagca

SEQ ID NO: 357795 - DNA, 294 bp, Zea mays
cagctgatcagggcacataaatacaagtggtagaaccagtatttgatccctggcagtttggctctagagcctctgctcttaaccactgtgatgttgccactatatagtacagtcagtttgcagaatttcagtttcttttccattcttttgaagattaagagaaatctgtcacttacaagaatccaactgaagttgtgataaaagtgatcttgatcgtgctgtttgtgtttatgatactacagtcgtcgggaatggacaagaggctccagttggagtgctcagaatactcctcga

SEQ ID NO: 357796 - DNA, 267 bp, Zea mays
  unsure (1)..(267): unsure at all n locations
accgaatgaagtggttatcggtgacaagccccaagacacagtgacagataaagttgttcaggagggaagggaagtactgataactgatgagatgcagcaggggacagctggaatgcatgatgagatcgaggatgatcagtttgaatctgtttttgttcaagctgatcaagtagtcactgctgacaacctgcatgaacaagttacagaacgagaaagtacgtgtgaggagaacacagcacngtgatnctgcgtgagacaacagagcac

SEQ ID NO: 357797 - DNA, 211 bp, Zea mays
atggtgcttaagggaagagcttgagcggtggaaggcaatataccagagagagaatttccagcagactgcagttaatgggcactgaatatgcaaaattgaaggcttgtttacctcgtagcgaagaagataagatacgaaatatataaagtgacattccgataaaactagggttaacttaggaacactgctgttaaagagtctcctcatcaaa

SEQ ID NO: 357798 - DNA, 169 bp, Zea mays
ctcacctcccgtggcagcagccggccaacacccgcaccgcagtccacagcaagaaccaaggcacagcgaagaaaagatccaatggtgatagcgccggcggcgcgcagcagcagcggcgccgcgacgcgaggcggagtgaacctgcccccgggcttccggttcacacaac

SEQ ID NO: 357799 - DNA, 262 bp, Zea mays
  unsure (1)..(262): unsure at all n locations
tgcagatgtgtctgccagaagtgtttcaaaggaagcagcaatgaccgatgctgatattggcatacatgaaaatacgcaaagtgctgcagatttgcctgacagcagtgggccgtctcctatgcatgaagacatgtctcagcctgtggatggacataaggagcctgggagtgtagaagtctgcatagtccagcaatcttacgcttctctggaagctatggctccagaacatgattagaaagnttacgcgtantgcgcaggcaca

SEQ ID NO: 357800 - DNA, 173 bp, Zea mays
ggaaatgatactgaacatactgtgttaccagagcctgagaacttgaaagcaattcaagggtctgacaacaagcttgagacttcggaacacgtgagtgttcaaccggtttctgcacgtaatggttcaaggcaaaccaaatctgttaaaaggaaagaacgaaatgcagaggtcaa

SEQ ID NO: 357801 - DNA, 173 bp, Zea mays
atagataactacaatctggttgatggcttggagtctcgtatcctgccgtgttcatacatttgactggcgatgaacataaatattatgataaatgatgttgaattgacttcatatacgaatagatatatcgaaggttgatgaaaatcaacttgtgctctatgctcagatggcca

SEQ ID NO: 357802 - DNA, 196 bp, Zea mays
  unsure (1)..(196): unsure at all n locations
ctgatggggattgtggatggtggtgtcggcatagttgtgttacgtttcttcgatgcgtgagttcatggagagatgtcacatcctagttcgtcgtcaccgtttgccatgggtccaatggctcgtcttggaaacctgcacttcagtaggccatctatcgtggtttctagctatatccagagcttttngcgtagacaaa

SEQ ID NO: 357803 - DNA, 178 bp, Zea mays
  unsure (1)..(178): unsure at all n locations
gtcgtgtcacccaggaggcggcgctcgatgncttcgtcgacgatggcgttgacgacctggtggtctcgctctaccagatggacctcgatctcacgctcttcctcctccgctcctaactcctcccggagaagatcaagaagtacacgatgcatatctctagggccacggccgaggcgac

SEQ ID NO: 357804 - DNA, 142 bp, Zea mays
agagagaagagggctcgcggccgtgctcgattcgccacggtttaccggatcctgctgtcgattggaagcgggaggtggtcaaggaagatcgcacgatcgtgggtgtggcgtcttcttccgcgaaggggcgtcgattgctcgt

SEQ ID NO: 357805 - DNA, 214 bp, Zea mays
cccgatttcaaatagctggcccgcggtgcctgcagtgcagcactgcactgcacgcctccgccatactgcgacgccgccgtgcatcgcttcacgcagagcagtgatggaatcccatcacggcggcgacgggaaggcgcgggacaagttctcggtgtaccagaacccgtccctcacccgcgccctagactcccgcagcgcccgcccctccgtcaca

SEQ ID NO: 357806 - DNA, 251 bp, Zea mays
cagtcattcaacttcctgcaagacctgttgaacctccaaccagaaacttacaatataagccacaagataaataagctgtcctttggggaagagttcccaggtgtagtcaatcctcttgatgggtattctttggaacttgaactaaatttcagatcataatttgcattgcactttgctctataactttccatggcctaatttttcaagcatccagagttgagtggatacaggaaactccaatgatatcgggg

SEQ ID NO: 357807 - DNA, 127 bp, Zea mays
ggcgcgtcgcgcacagctgcacggtgggccgccggagctcctgccggcgctccagcctccagccgctcggagcctcgcactcgatttgccaatttctaaatagcagtcttcgatataaacaaaaaca

SEQ ID NO: 357808 - DNA, 309 bp, Zea mays
  unsure (1)..(309): unsure at all n locations
gcgcgttgcaggtcctctacatccgccgcttgttcagtaaaaatgtgggatacaacagagtgtaggatagaaatctacttcaaaggcgacagtggaagcaccgcatatgatggtcggagcgggaaacattctctgccagtttgacaaattgtagttctgcaccctcctttttttgttagtttataagaaacactttaatttatcatcatggtactttagcaacacgtgngagangntaagcgtcattggcgcngaacagtgntccantaaaaaaaaaaaaaaaaagggcggccgcttctntccgcgcgc

SEQ ID NO: 357809 - DNA, 125 bp, Zea mays
ggttgatgggcctgggcatgcgtcaaactctgttctctcagctgtacaagcttataatacatcaactggctcagtttcatttcagagtgctggctcttctaccatctccactaacttaacttcaa

SEQ ID NO: 357810 - DNA, 124 bp, Zea mays
ccagatctaccttatcatattataagcgcgcgtacctctggcacgtcgacgcatcttcgtctccgctcaacgctcgatcacgcccggcgtcctcccagcgatccacgagaaaccttctcgcctc

SEQ ID NO: 357811 - DNA, 126 bp, Zea mays
cgataacagagatgccataaaggaggccattccaaggtatgatgatccatatatcaaagtgccaagagtgctgaacagagaatgatctgtagcatgtatatcagaattgttagaatattaatactc

SEQ ID NO: 357812 - DNA, 123 bp, Zea mays
ctagtgatcacttcgtctagtgtacctccgttcgtcgtcgtcgtcgtcgtgtacctcgtacgtgacatgctgtagcacgtactacgctagcagagcagcacctcaatgtccttgggtttgctt

SEQ ID NO: 357813 - DNA, 119 bp, Zea mays
  unsure (1)..(119): unsure at all n locations
atcgtctcncatcttcatcttcctcgcagcgccgggactccatcttccgcttcctcccttactcgcgctcggcacgcaggcgacgggagcggcgtcaaactcgggctctcagcggcgac

SEQ ID NO: 357814 - DNA, 281 bp, Zea mays
  unsure (1)..(281): unsure at all n locations
aaagccanatcganaacaaataccaagacagcgaggacaacaaaaaatttaaagaaaagctcnccccatccacgaacaaaagatcgcgaagcagagcggaatgatggaggcataggcactagcacctcctcgcctccacctccgtcctcttcgatcccgtccaatcccccggcggctttgctgggtcncgcgctcctcctcctcctaggctgttcgtgttgggcatcggcggatggaacaaggnaagggggaaggaaaggggaggntttagggagagcgca

SEQ ID NO: 357815 - DNA, 115 bp, Zea mays
cgatcccaatcgaacccaccaagccgataccctaaccctagcgcttctcgatgtcggccgcgacgactggaccagccccttcagtagccactccgatggcgcctcctccgtccta

SEQ ID NO: 357816 - DNA, 155 bp, Zea mays
gcaagacgctccatcaagtatctgcaccgcactgtacttgaaggtcgcctggtcactgtagagaagtttaacatggtgctgggctgcctctacgtcaacctggttggtccaaactgtgcagtctccaaccatggttgtctccaaaggatgtgcag

SEQ ID NO: 357817 - DNA, 234 bp, Zea mays
cacacgagaaggaggaaacagcaattgcagagcttgatgaagaagatgaggagcttataaaatcaatcactttccgaaactctggattcgatgtaaagcggatagatagatgacgacgacgatgatgatgaggatttggctcctggccaatcaattagaacaataacggacagtgaatcttcagaatctgtgactaaaccaacagatgtttcatgcaataataacggatcagag

SEQ ID NO: 357818 - DNA, 309 bp, Zea mays
  unsure (1)..(309): unsure at all n locations
gtgaatatttttctanagcttactcaaatagttatgttatggtatcagtttgaaacaatctcttattgtctctgggaactatttatacataatttctggcaagctacctaatgcagttatgcggtatgcctaccaactttctgtattaatagcctgatatttgactatcagagcaagtcagtaaactcactacctttgatgctgttttctatgacaatgttacacccagcttatcggaattgtcataaagaagcttgaactctatcaacccaactgtttgtgcgttgatcaatttatgggagctttgcc

SEQ ID NO: 357819 - DNA, 326 bp, Zea mays
gctcgccccacaacagctttgttccattgcatcctccccaactcatgttgtgctgtgcctggtggtcaggaaagaggctcctccctttccctctccacctcgccgtgcttctccagtccacctcccccctcgtcgttgcttcttccctccccttccctcgtcgtcgcgctatcccgccggtgcgcgggcgtggggccaagcgccgccgaaaggtagcagcagaggagaagacggacacggacgcaatagcgtccacccccgtaggcaccccccgcccaaagactggtggcaggcctcctacaggcagatgctagagccatgtgact

SEQ ID NO: 357820 - DNA, 328 bp, Zea mays
gtggagggttctttatcaggagggtggcctcgccgggagccctagcggtgaggggtgtcaggaagccgttggcgcggcgttatatttcaccctcgaggaacaaggagaacctgctgccggtttaggcgttgagggtcacaccgacaaagaggagcccgcttcctggatagtaccccaggacgccgctccgtgatattacggccattgcaaaggctattcagagaagtcgttcaaggattgctgcagctcagcagcgaagccaaaggatcgagcagtcttcacaatctgtgaacgtgactactccagcacaagcagagcaggatgctca

SEQ ID NO: 357821 - DNA, 323 bp, Zea mays
gttatctcctggaggacacatccacaggtggatgcttatgctgtcaagaaatggaataagagacattcaaattaagacaaggatatggaggaatgacaacatcccttctgcttgctgctcatgcgtggaattggaatatgcttgcctgcaaggatgtatattccagttgccacctctgtttacaggttttaagcgaatgcggacccttcatttcgttgagtactgtgcaacggaagacaatattggggaattcgtagcgagctgcccgaacttggaggaactattctctccaggttgctcagctttactgatatcaccatcca

SEQ ID NO: 357822 - DNA, 279 bp, Zea mays
tctttcctccatggagtcctcaccttttgagcagggttagtcagggcgcactctcttgctctagaatggatttcttttatttatgtattttagtattatgtgtatgagtggtttttcttcatgtaagcttactgctatgccattggaggccagaagagtgcactggatcctccagctctgaatgatagatggttacaagctatcctgtgggtgcttagaactgagcacccagtgcttctaactctccaggccctgtaatggactcaggcagcataagcc

SEQ ID NO: 357823 - DNA, 146 bp, Zea mays
cttcactacaaccaaagttaatgcaatacattcatgcaaagttttgatatccagatcattggctaaacatatgcctgatatcttgtatagcttggccaacttgataccatctctgacataactcgtcaaaattacatcatgcatga

SEQ ID NO: 357824 - DNA, 228 bp, Zea mays
  unsure (1)..(228): unsure at all n locations
gtgacagcctanaggagaggggaacagtccaaatgcttacggtatcacgagaagtggcacttgacgttcagtcactcgccacagtactggatcatgcttgaatgtactgcatcactgacattaagactctgggtcacgaactgccggatgtacttaactatcatatgctgtctgagtactcggtgttaatcatcatctgctatcgaagatcgtgctgcactcatccat

SEQ ID NO: 357825 - DNA, 360 bp, Zea mays
  unsure (1)..(360): unsure at all n locations
ctcgcctcctcacctgccgcgtgacgcccccagagatggggcgagacaagagccgtcgtctatacggcagccgccacttccggcagcggcttgtgctggcgacgctcacctctaccgctgtcaccatcgaggacatccgctcaggggacgcttcgccggaggctccgcccttacgaggtctccctcctccgcctcctcgacaagatctcagaccatcacaccattgacctcaacgagacaggaacgaagctgaggtaccggccgggggtgattatcaggggatagggccttgagcacgactgcgggggtgcacggnggtattggctactttcttgagccactcatactgcttggtctatt

SEQ ID NO: 357826 - DNA, 305 bp, Zea mays
ggatctcctctcgtccatccgcggcgagaacgaccgacgacgacagggcgagatgtgctgctgcccgagcaaggcgtgctgcatctgcacgctcatcgtgctggtgctggtggccgtcggcctcgtcttcggcttcggcgtctacacccgcggcttccacaagctcatcagcaacatgcacctgtaggtcgatgcatacggccgcggttgcgccgacgtgtccttccgtgcctacggtgactttgccccgtcgtcgtactataaggaccgctgttccttctccgagatctaaggcctggatgctg

SEQ ID NO: 357827 - DNA, 101 bp, Zea mays
  unsure (1)..(101): unsure at all n locations
ctgagcacattctcatggttgatatcatcnctgacgctgctgttcgtaaggcaatgaacgacataaatgcagcccaaaggcttcaactggtcagtggttac

SEQ ID NO: 357828 - DNA, 189 bp, Zea mays
caggttaattgggagatagatgcttcagaaactcaaactactattcctggaagtagtgaggtgcaaaatgaccatgcaggaaagaggacctctactgtggatgatagctcatcgtcttgttcatctgactcagtgcactcagttactgtgaatggatcatataaaggaggtgcctggacaagcgtcaga

SEQ ID NO: 357829 - DNA, 190 bp, Zea mays
gttattttctcagttggttaactggttcatgtttttctgtatcacacggactctatcaaacagcttggagactgttttgaccgtggctggactctattattggtttgctgcaatagagtcttccaaggcaacctcaatcgtttcaaagcagcacgcggcctgtgaacaaagtatcccatcaagaaaagtg

SEQ ID NO: 357830 - DNA, 163 bp, Zea mays
acctcctctctgttgatccgtggagcaccagccaagctcctcccctgcggctcgcctccctcacggcgccgcctgatctccattgctgacctccactccagcacctgtgcaggcgcacctgaggctatcttccgcatcttcctctagtgacggccgccaggtc

SEQ ID NO: 357831 - DNA, 140 bp, Zea mays
cgatttcgaatttcacccagctccgcacgcgcctcaacccttcctctcgggcggcggcgcggcaatgcggcagcaaaccggagcgggagctgtgataaagaagatcttcggcgcaaagaaggccaaggggccgcccccct

SEQ ID NO: 357832 - DNA, 312 bp, Zea mays
ttttatgtaagactatcctataaataaaaactatgatttcactgtcttctctatgttgtagctagcagtgcaagcatagaacctatgaaacatggatacttggttacaaaattcaactttcagtcaagttttgttcaacaagggtctgattgagacttccatgaaactgatcgatttgtcgttgctgtcatgtatgtgaacttatggtttagaagcagctaagtttccaacatgttacatggtagggaatgtatttgctaacactatttgctagcactacgagttccgtatgccctatgtgatagatggaaa

SEQ ID NO: 357833 - DNA, 220 bp, Zea mays
  unsure (1)..(220): unsure at all n locations
aaaaaactgagatttcctactggctggaagtttgtctatttagcaaaataattagtaataagtgttgactaggtctaaagaatgaacacattgtagacagttgccacagtagtgtctaataaattgatcataaaagcagctatccttatggggnngaatcctagcttctttttatgggttattggggtacctaataaaggataatttatatcttattacg

SEQ ID NO: 357834 - DNA, 289 bp, Zea mays
attcaagcagtttgatttgatgtgcggtctgatcagccagatgcatgagattggggggttgatgtcgctagcgaccatgacgaaggtgatgaggaggctatgtggagccaaccgatggagtgacgccattgatgctttccataaaatggaccgctttggggtggcgaaggacacaaaggccatgaatgtgctcttggacacattgtgcaaggagaggagtgtgaagcgtgcaagaggcgccttccaagctttgaaggggacaattcatcctgatgagagtacttcaaca

SEQ ID NO: 357835 - DNA, 186 bp, Zea mays
aagatagctgctctacagcaacaacagccgagtaacaatctgcaacagctcctccaacatccattactgagtcagcaacaacaaagctcaacttatcttgaaggtgagcaggaaaaaatgggtgctggaattgtaacagttgcttttgctggaaatgaacaggtttctaagaatcgaaatgggcga

SEQ ID NO: 357836 - DNA, 200 bp, Zea mays
cagatttggaaaggatttacgatggacatgccacgtctgtagatcaatatgttcggggaaatggggagacattagctgaccatccaaaaaaagaggaagctggcctccaaaaggacactggcaccatagctcaacatcgtgatacccttgcttgtgatggggagtctgtgtgttcgatttgtgaagcgccgagacgtgga

SEQ ID NO: 357837 - DNA, 137 bp, Zea mays
gccaagtcttcacaaacccttgcaacattgcctggaggttatggaataagatgtattctcacgcgcatgatctcagaggcgtaactctggaagcacagcttcacgacacgtaattttaaccgatgatttccaggtga

SEQ ID NO: 357838 - DNA, 231 bp, Zea mays
atcaagaggaggaagaggaggaagcataacgcacaggaagctgcatatacaggagagtgggatgtgcctatggaccagatctagctacatggacaacattgggagcctcctatctcaagagcaaactgaagaatgcagagctaagggacgcacaggccttgtgacagatggtggtggaaagactgcctctgaggtatactggcatgaatggaccagaggatttactcagta

SEQ ID NO: 357839 - DNA, 329 bp, Zea mays
agctgatcatgtgctctccaaacctcgtcgctgcatttgttggcacatgacacataagtcagattctgatgtgccagccaggcgcttcctcatggtctgttcgcgcatatgatccgtgtgctgcatttgaagacatggctttctatcagggcaagctctacgcccttgatgatgatgaaaacctcctcgtggtcgacatcagccaagaccaaagcactggcgacccacatgtctgtcgaattggacaggtcatcaagggtgatcccgaccatttgtttgatgcttggatgccagatgacactactggcagaaagaagctgtacctagtc

SEQ ID NO: 357840 - DNA, 329 bp, Zea mays
cgcatctgtttagttaggtcttgccagtcttgcaatttgttatatatctttttgccgtcatgatgtttttttggtccttttcttcacttttgacatatttctgctttgaaagatcatttttatgaattataccatcaaagctacatgcttatgccttatgtttgtggttactcctttcagaggttagcaaccagatgttggaactgtatgagcaaaaccgtgttcaaccaccaccatcacaaggcaatgatactgaaggcagttctgcaagtgttgcgaatcaacgtgttcctggtaaagtcctaggagtagctgatgaacctcttgcc

SEQ ID NO: 357841 - DNA, 233 bp, Zea mays
  unsure (1)..(233): unsure at all n locations
gtnggagatctcatggcggtaaacaactgtggactgcaggctggactccctccgtattccactgtggataagtcctgtagccactgctggaagtacttgagtgtgcagggctagctcttccgtggctctagcctgctattccgccgggtgtcatcagggtcgtgctttgcccttgagtaacctaagtctcccgaccatacatatacggtgtcaaagcctactcctgttgagga

SEQ ID NO: 357842 - DNA, 252 bp, Zea mays
cagaggagggaagaggacagaagagcgggccaggaatgagcggacgagacagcggaggagtgagacataggaggaggatcgtgcacggagacgacgaggatcagaagcagctggaggatggtagtaatagagatggaagatagacaagaactgcatacggagtacgaataaggtccaatccgacgtcgtatcgaaccacagacggatgacgaaggcggtgatcaaccagcataccggttgtccaagaagctg

SEQ ID NO: 357843 - DNA, 308 bp, Zea mays
cttacattggctttatatatctaaagaagtgtattggctccaggatctcttgctaatgaagaatcagggttctactatgcaaatgtctggtctcgagcgagacattgatatgctaagaggcgccgtacttgaagttgacatgaaaatcaagaaaggagaagaagaatcagaagatgtgtgcaactgattgatggagcttcatacttctgttaactgagcacgccaccatgcatagtattcactaagcacattgaggatgcctttagcgcagttgacataagctcagcacttctatgcgacgctgttga

SEQ ID NO: 357844 - DNA, 255 bp, Zea mays
ggtgagcttccacctctttggcttctgttcgtcaccggcgcgcagaccgccgtcctcctctcttggtctgcatccagttcatcccaccagcgcctcctttggcttcctatccaccatggggacggtaatgttccctcgctcgggcgttgggcctatgacgacaggcacctgccaagataccgtgtgaatcctagtcctagctcatccatggcttctctagctagtagtatcccactagaccacatcagtgtcact

SEQ ID NO: 357845 - DNA, 246 bp, Zea mays
gaataattgcacatgaattgtgtcctatcacgtttcagctgaggacacttctggttgtagtcatcatgatcctcttgccaacgtgttgtattatgtagcctaaatgaacattctttaacattgccaaatgcaattttctgaagtgttgaggtgcaatggtgcattatctgtcagcttcattccttgattgaagtgctacttcgagcttttgttcctgtttgaatttatagagctattagtgacagc

SEQ ID NO: 357846 - DNA, 247 bp, Zea mays
gttctttgactaaagcaactacaacacaaaaaactaaaaggtctcctgggatggcttcaacgtccacacaaactagccgaaagactccaacaacgccctcgccgtctcagccagcttcaaaagcggaaagggccattcaatcagtgaagaacaagaaggaaaccattactgctaccaagccagctataaagggacaagaagagaagaccaaaacagcaacaaagacaagcagaataactaaagtttc

SEQ ID NO: 357847 - DNA, 251 bp, Zea mays
gagctgtataaggagtatgtggcacagacactccctttggctcctggctatgttgaagctaataacgtggctgccaacacgaatgttaaccagggaaatcctcctccaactagtgatggtcttcttgactttgatatgtacctttctgagattcaaagtagccagcctgcaaaatgtgaactggagcagtatctggaggaatctctcactccacgcatccaggagtttggtattcttaactggtggaagct

SEQ ID NO: 357848 - DNA, 175 bp, Zea mays
agcagtaccccaaagtccacgagctgatggaacatcaaaccaacatcagggtcgttgagatgagcatgaacgattcctggttccgcgacatgggccccactgtgcgccatttaaatctttgtcttcttttattctcattttcaatccggtgtttttgcttgctaacaatgttcct

SEQ ID NO: 357849 - DNA, 161 bp, Zea mays
gaagccacgtccgacattgatccgatcggttcacatcccgcgagataatccatggctgggtgctagggtttatggcttcctccatttgcaccgacccctaggcgccgcgggctcgcagtgcatgatcgatcagttcgcgcgggatgaaggatggggagacg

SEQ ID NO: 357850 - DNA, 238 bp, Zea mays
ttccccctgcacctctgctgaagacatatgttgaggaacaaaaggatacaattgataataatggcgatgcaactgcgatctcattaacggatgaccccaaatctagggagctaattgctttgagggctgtgattaagtgtatcgaagagcataagcttcagaaggagtgttcacttggacctctccagaagcgtgtttctgagctgaagcccaagggtgagacaacggcatcaagtga

SEQ ID NO: 357851 - DNA, 233 bp, Zea mays
cgtaatgttgccttgttctgcacctacaccttgggcttccggaacgagtaccagaacctcctcctggccatcatgctctcggctacattcaacatcctcatctggcaatggtgcctaatacggtttggcaagaagacggctgtatacgttgggatctcttctgcagttcctcgtctcatctttgtggccctcatgaagagtaatctaatcgtcacttacgtggtggccatagc

SEQ ID NO: 357852 - DNA, 257 bp, Zea mays
ttattaacggatgacaagtggccccaacttacaaattaccagcatagataataagagttagcattgtttttatctttagaaacaatgcaaaggacagtaataagaaattagaaagcaaagccatgaactgaaatccatatttgggtagttcatcgcatatgaaaatgatatccaaattttgtttgtacacggtggctcaggcattattttgtagaaccacaatccattaattttgtcagaatatgcaaatagagtat

SEQ ID NO: 357853 - DNA, 242 bp, Zea mays
acgccccttctttctccacccgccgtcgacgcagctgccttccagcatctccatatccgtttcgccgtccccttcctcctcatcagggaaaccctaattcccttcctctctccccatcaattcgcccctaacctaattcgtgctgatgatctcccccgaggacccgcgcaagtggctcgtcaagcgcgtcgtcgggatgcatgggggctccgtcacctaccttgtcgaccccggcaacaacg

SEQ ID NO: 357854 - DNA, 304 bp, Zea mays
gtccagctgtggcaccaagtcgtagctcactgtcttgtcctggttctgctatattttctctttgttgcaggcggtatcataaactgattttttgtggttcagttagacgagagcgatgaagagcaacttttgtgaactagagtttcagatgctaccatggtagtatttgacgatcaaaccctttttattagtagtttacttatgttgttttttacttcctgttctgagaagatgaattttgaatggtgatgaacaactgtgttttggactagagtttctgatactagtggtagttgaagaccaa

SEQ ID NO: 357855 - DNA, 298 bp, Zea mays
cccctgccggcgccggctgcgagctgcacagctgcagctcccccccctggctggcagagctgcagcttcaactctcttgaaggcaaaagcttgcatgctctgcgggcgcacacgcagctcgttgggagcactaggattggcttcagttcagcggtccgcttttgctccaacagagtcctcagagggttaactcccattggcgcgatgaagtcgtataggctatcggagctcagcgacaccgaagttagcggcctcaaactcgtccccgcatcgatttctcgtctatttttggcacggt

SEQ ID NO: 357856 - DNA, 109 bp, Zea mays
cttgaagaggacctcagatcgttagagacttcgctaacgagagcttgccggattgtttaatgctctttaggggtacccatacgcacgcgcttgcgccaatcgtgcctta

SEQ ID NO: 357857 - DNA, 162 bp, Zea mays
tcgtttttacgcgttctcccatgtggacgagtattcacaaggttgaccgcatgtatacagagtacgtcaactcgtcgtgaacaagttcacagaatgaactctgttgcacaagcaaaatgtatttcagaagtagaaataagatcagtggttactgtgtcgcag

SEQ ID NO: 357858 - DNA, 229 bp, Zea mays
tccacaaatttcaagacgacatgatagatttatctgacgacatggtggtggtggtgcatctgtaactagcttaacggctttatacatctgtttgcccgtacctacgtgtaaagctagttccgcaacatttgctttttaactatacttccctaatttccagtcacactctgcaaacttttttttaaaaaaaatgtaaattttttccagaaactgatcgagcttggggcaa

SEQ ID NO: 357859 - DNA, 305 bp, Zea mays
gttgcaaggtttcttagctgcgcccactgggttctacaggttttggatacgcgtggccgtctgctgacagctctcggctatggtctgtggccgtctatggtgctgttttcagaaatcgtgcagacattcatccttgcagatttctgctactactatgtgaagagctggttggtgggcagctggtgctacggcttccctcaggggtggtgtaagagaagtgcaagctgcagcagaacacaaaactttagtgcttcaccggttcatatgtactttgagtagtgcccaacctggagaccttttttagt

SEQ ID NO: 357860 - DNA, 300 bp, Zea mays
agtgtataccttccgcctagatcacactcctaggtgctagggttttgcagagtctggtgatgcgaagacgaaccggcggcgtatacgggaccggcggcgtatacgggaccggcggcggtacctgtactccaagagcctcgaggcctcccattgggtgctgttgagaaggagcgccgtatccgggcggcgctagaggagggaaagcccattcctaccgagctccgcaacgaggagcacgacctgcggaagcagatcgacctaggagcgtggaggtgcgtgttgttcccgtacccgcgctcc

SEQ ID NO: 357861 - DNA, 233 bp, Zea mays
gtaatccacagattccatagccaatcaaccacgcactcggcagcgtcaaatgctagcgggtgagtgagatagatacccggccttgtgtatatataccgaccgatcctgaagaaacgaagcccttaccagacgagtttgtgtacagtatagagatctgccaatggctgattcatctgggtgagttgtttcttctctcatttgttgactggttcgtagtacaatgtacacagtca

SEQ ID NO: 357862 - DNA, 308 bp, Zea mays
cgtcgagtggccagctgcagcacctaccagtgttcccacaaccacatcacttcccacttccaaggtttttggtcgcgacagggatcgtgatcatatagtagattttcttctcgacaagacaacaactgctcaggcaagctcagctaagtactcgggtttggccatgttggagtaggaggaatggggaagtccaccttagcacagtatgtctacaacgacaaaaggatagaagaatgcttcgatgtcaggatgtgggtgtgtatctcacgcaaacttgatgtccatcgtcacacaagggagatcatgga

SEQ ID NO: 357863 - DNA, 222 bp, Zea mays
ccaattttgaggtcgtggtaggagttgggagcacagacaagggcaattcacaggacacccttgttgatgggaacctgaatcgccccagttctatggtttctgttgacaacggaagctcctgttaccccaattgtaaggatgctgttggcgatacgttgctccatcctctgaaggctctaatccagaatatgcatcctgcactgtagtagtggaacagagtag

SEQ ID NO: 357864 - DNA, 243 bp, Zea mays
  unsure (1)..(243): unsure at all n locations
tatcttttaatggtatagatccaattattcctttttgtaacacgtctttgagcgaatcctaagtttcataatggcagaaatccaattttcttttgtaaaggtgaaggatgaagtggtgagcanaaatgaagaggatgatgtggggcctggatcaatttgcatattactaacgatcaggtgtattgtgagacggagaaggtgaaagaaggaggagggaatacgttgaatgatctagccaggaga

SEQ ID NO: 357865 - DNA, 356 bp, Zea mays
  unsure (1)..(356): unsure at all n locations
agcggatttctatacgtcagctcgtttcggacccgcttgggggcttctcctcggcgtcgtcgctccctccgccgcctcttcctcttcgtgtcgagcgctacagagaaagctcgtggacgggcaacgaaccaacggcgtttccatacgcggaaccatcctcttcgttttcggattgcagtacgtgctacaatatcacatatctcgggtttatccgaagagctcacccatcgacctcatcagtggtgtgattgattcacgttacaacatcttctgcacggtgggctgttcaccagagaatgtattggagtgggttgtcttccatagtacggaataatcatcancacatcctcatacaa

SEQ ID NO: 357866 - DNA, 298 bp, Zea mays
tacaactaggctaacctcataagccttagccacagtcttaggcatctgggccataacttgagtttagatttcagacttcaagcccgtcacatacagtgtcacacaggtatccaactctgaattatgcacaggtcgttgcatacctgatatcatcaaaggcctgagaatatgcttacactccatgatgctgcctcatactaaggaacgaccccatggcgtgaggatatgctgctacaccaagctgctctctcactgcacgagtggtctgtcccctatcacgcgatcacctaatccatag

SEQ ID NO: 357867 - DNA, 205 bp, Zea mays
tatcatcttatccccgcctcctccggtcctcccgccgctgttgctcacttctgagtcccgacgcacgagctcccaagagctagccatggcgtccaccaccctctcctccgccttcaccctcctatcccgcccctcctccggtcctcccgccgctgttgctcacttctgagtcccgacgcacgagctccaagaagcagctcgagga

SEQ ID NO: 357868 - DNA, 99 bp, Zea mays
aaatcagatccgatttcgtagagatgaagccggcagtagaggcggaggctgacgagcgatcggcggacgagatggcacctaagaacgcagcggctgcca

SEQ ID NO: 357869 - DNA, 151 bp, Zea mays
atcgcactcgcacgtacaccacactagttaccacagacgacgggcgccatgaaagtcccggtgcttctcctcctggtctccctgtgcttctcgctcgcgctcgcgtggcaaacggacacggaatcgggctcaggcaggccgtaccactacg

SEQ ID NO: 357870 - DNA, 105 bp, Zea mays
ctcggaatcgactcgaggtcgcatcccatccgactaccactcatctcgtcgtccgccgattcgaatcggttcttccaacccaggggctgtgatggcgacgaagag

SEQ ID NO: 357871 - DNA, 121 bp, Zea mays
cgtgttcacggctttcatcatactgttatactagatccaaagtattcagacggcagtcagcgaagttatccaaagccagctgtgtatcaggtgtgtgccctggcccacatagattttaggg

SEQ ID NO: 357872 - DNA, 121 bp, Zea mays
ctgccgctccagcctttcgctagggtttatccaccggcggcgcactcgacggcggcaagatggtgcagcgtctgaatctaccgcaactgcacagctatgccacgaagtccaaccagacgcg

SEQ ID NO: 357873 - DNA, 352 bp, Zea mays
  unsure (1)..(352): unsure at all n locations
cgtagtaactcggaatcggtcgaggcaacataagtctggagcagcaaaccttaagggtactctccatttagtggttatggagtctcccaggaagcataaggcaatgccgtgccagtcaaggagaaagtgaagttagaagatggaaatgatttgttagtcaagcgcagaaagactgaattttcagggtccattgtccaaccagaacgggaaatgaagtctttgacccggagaacaaagtgcctgatggtctcccagttgaatattctactgacaaagatcccatggatgcgctcactagttgtgcagtacagaactttngtcaagcgaaagggtacacatcagcaagttcgag

SEQ ID NO: 357874 - DNA, 171 bp, Zea mays
acaagatgaaatattccagaaatttaatctggacactgaatgggccgtgaggtaatatcgaggataacgaatgatgaagacatagctatcgagagcaatgttgttgtgaaacagcttctaggccttcaaatcaacgcggagaaatattattttggattaaggaaaactctg

SEQ ID NO: 357875 - DNA, 153 bp, Zea mays
attgcatcaacagctactgaggagatgaggtaccgcgaacatgttgtatgaatcaatagagacaccaagttgaaacttttaaggaagggatcctaccacatatatatgcgcccatgaattaatactttgaaggtgacaagcagtacacacaat

SEQ ID NO: 357876 - DNA, 231 bp, Zea mays
tgatcctccaccatttccagtgccaacctccaatagcgcttatattgacttgatcctcaaacctactgaagatgatttgaagatctggccttcataggtgagcttattgtcacttgtattgatttaatgctactgtaggacacctgaaagacttatctttgttatatttcttagtatgtttgttgcatagaaggcagcgggctatctggatgtttacagatatatggattg

SEQ ID NO: 357877 - DNA, 187 bp, Zea mays
gatatatacactttccctataatgtactcggttgctagtgattggttgtcagttaaacttatttgttcgtttttcaggatacgacgataagaattttgtatggtacaatattctatatattaaccgcgggagcatatcttgcactgcgttgttccacgtcaccccgtctcgcctcagccacatgata

SEQ ID NO: 357878 - DNA, 222 bp, Zea mays
agcatttgcagtgtggaaggagctggagaaggagaacaaggagttcttcgacaagtaccaggagtggatatcggagaagcgaagcgcaggcacctccctagcgcggtggcactgaactagctgctggctttgcttagattagccatgatgtgtattgtttggttattcttggattcggtacttaggcatgtttagttatgtcttggattcgttacgtaggct

SEQ ID NO: 357879 - DNA, 256 bp, Zea mays
  unsure (1)..(256): unsure at all n locations
canagaatcagatagatgcaagatatctgtttgtgggataggatcagaacccaatcctgtgtgtgcagatatagataaaaatcatcttttaatgaaatgtctatttttttctcgggtttagtacttatattgtcctctgggattgttttttccttatggggatttctcttggaaatcctaggatagtgtttcgatgatctgaaacttgttgtgcagaaacatgcatgtttatcataccaattgagttaggatacat

SEQ ID NO: 357880 - DNA, 107 bp, Zea mays
ttccaaggcgcggaggaagatataattatcatatcaacagtcaggagtaatggagctggtacagttgggtttctatcaaacttacagaggactaacgtggctctaac

SEQ ID NO: 357881 - DNA, 113 bp, Zea mays
  unsure (1)..(113): unsure at all n locations
cgtgtcgaggataaagagagagttgcgcanaatagagggaatactgtgcgtgaattgcagcgaagatctattgaattcagttccattatacagagtcatcgatcgatgagatc

SEQ ID NO: 357882 - DNA, 210 bp, Zea mays
cggaaacaatcctgaaaccaagccatgggtctgcaggaggaatttgaggagcatgctgagaaggcaagaccttgcctgagacacgacatgagacactgtctatcgggtcacagcagcaggtgagtgtaatcgtcgcggatatcacaaggacagcatggatgctgagtgtagcatagtaggtatatatcagtacgcagagagtcgctaacc

SEQ ID NO: 357883 - DNA, 322 bp, Zea mays
  unsure (1)..(322): unsure at all n locations
ggcggcgaccttgcggcctccgctgcgctctgactggtgcgcgtttagacgaggagctgcggcggccaagaccaatcgaccatggctacccgtatccagtttgagaacaactgtgnaattggtgtttctccagctgacaaatgctactgtctgtagcgattggagggcaagacttctacatgccttgaggctgacttcagatgcatccctgtggtcagactctattggggactagatataggcgcttgtgttgaacaaaatgctctatgcaatctaaacgacagactcacatctagatgttgctgatcagtgtgtcacgatg

SEQ ID NO: 357884 - DNA, 234 bp, Zea mays
gagcagtatgagggcattccatactactcatcagtactgtcttgtcctatgcgacagatacctgagcaggagccagtacaatgtgggcctacttcaagttcttgtcttgaatgtcaagctggacatgctttcctggtagagcaccttcagaatctatgattagattctggattgggtccggtttctcacctctctagtatttctgcacctatcagtacagatgctacacgtttg

SEQ ID NO: 357885 - DNA, 244 bp, Zea mays
  unsure (1)..(244): unsure at all n locations
ctctttcgcctcctcgcttcgcttcctcggcggattcctcctccctcgaccgtcnccgtcaccgtccccttccggcgcgcaactcgcccgagatggcaacgcgagatcggtgtcctgtgatgacgatgcatctcagtcgggactgcagtcgagagctcacgttctacttcagatggacgacagtcaagagatcgttgtgacagtcggaccgcacactagagctcacacactccgagatgctgcg

SEQ ID NO: 357886 - DNA, 100 bp, Zea mays
  unsure (1)..(100): unsure at all n locations
ggatgatcatgacattgaaggggtaattcatctgtactacaacataatttctcagccttgtttagtctgcanaaacctaactgatgtagagctattgcgg

SEQ ID NO: 357887 - DNA, 99 bp, Zea mays
tggaaacactacttgcgttgaaggctgaggagaggaaagttgaagttgacaaggatctgcgttctctgcagccactttcatacaagatagagaatgatg

SEQ ID NO: 357888 - DNA, 336 bp, Zea mays
  unsure (1)..(336): unsure at all n locations
cgccttcaaggtgttcggcgaaatggcggatgtgcccgtggtttcatatcgtaaaaggtacgatttcatgatgtatggctacttgaagaatggagacctgcagtctgcatccgagatacggacncggatgatgcaggggggcatcagctatcactcaccagagacgaatgcttcgatgctggcagaaccagggcttccagagaacatgctgcnatcaaggtgaaatttcattatggcacaggaatcgatgagggatccgtttgttccggatatgaccacggtgataagtacctccaaacgctcactcctacaatttggtaatcgccggtctctgga

SEQ ID NO: 357889 - DNA, 120 bp, Zea mays
tgtgcacggttctgccggttccgcatcccgccagattgggacgaattcgacatcggctccaccaaaggctccacggattcggcatcggctccacggatttatcggtaccatgctttgttt

SEQ ID NO: 357890 - DNA, 133 bp, Zea mays
ctcaggctgaagctcagaaaaccgaaattgaagaacttcggagacaactggctgaagctaagagactgcgcactcgacaggtaatcagaatcaggatatggacatagcaggacatgtaagactgcgatcagat

SEQ ID NO: 357891 - DNA, 322 bp, Zea mays
tgcacttcgcatgtttttggatacacactattgggagactgggatcaaagtctggtgctgcatggtggagaatggcttgccacccctttacaggagtgtggagaaccatgctttgtaagcaaagctgaaggatgacaggctacctgaggcatgcaaatatgcagaagacatgattgatcggggtatcaagttgagttcagcgacactgtccaagctgaagcagcgcctgcagaggattaagaaaggagagatccatgatcacctgcttgcaaaatggaaggcacattagtttgttgtgctccctcgtatgggtaacctggtg

SEQ ID NO: 357892 - DNA, 313 bp, Zea mays
ggatgattcaaaccatattagcttagttggaaatgatggcaagcttgaaggctatatctataatattgaggtttcatatgtactaggagctactaaagtaccaatacccaaagaactcaccttttaagttatctattgactattcatgctctgatggaatcgaagagggtgatgacggcatttggagcatcgttggtgggaaggcatcttgccggagaaatttcatcttggaagtagtactaaccaacacttttggtgaacctgtgaaggataaagaggtcgttgcttcacttgtctatgctgatgatggaac

SEQ ID NO: 357893 - DNA, 284 bp, Zea mays
  unsure (1)..(284): unsure at all n locations
ttanaacctaccattctactttacaggatggaagagacaaaaacgatttgctgatttttttttcagaacaaaaccgctttggcgttcaaaaaggcatcagtaaataacaatttgcattttgaattcaacttagctatcgtggaagatacgttctaaatcacataggaaatttgtaactgatatttctattgtctagcctaattctacttgtacttgaatatacatatatattgtgacttgtaggatcagctttttgctccatactattgtcatggtaatttgtg

SEQ ID NO: 357894 - DNA, 311 bp, Zea mays
agaatctcccttctcctactctcgtcattcctagattatgttgcttggagcggacgctcacaaattgatatcggagacactgatctaagcgctagcacacacctactacacgcgtcgcgcgaaggaatccggatccatggagcccaacctgaagatggcgatcgaggaacaatccaagcttcttcgcgacatctgtgaccacctctttgctcaggagacgcgttggtgcacgctcgagacaaccgtcgcgtggaacaccgcgtcaccgcaacatctggtagccaacatcgccatcgagagtctgacatcga

SEQ ID NO: 357895 - DNA, 312 bp, Zea mays
caagagttggttcgcaacaggagatatagcagcccttgaagatctgataggtcgtctcagaaggctcaaagaaaacctagggttcattacaaatagaatcaccacactttcaggctagtctggacagttggcaatcggagcagataaacaaaagcttgtactacctttcatttctctccataatattcctgcctctttccattgtcactggagttttcgggatgaacgtcggtggtgtgccgtggacagggcagaacaagaaccctaaaaaccgggatggcttcatgaatgtcatgctaatatgtgttgcaa

SEQ ID NO: 357896 - DNA, 313 bp, Zea mays
  unsure (1)..(313): unsure at all n locations
cggctaggtagacttgacagganagttgagttccctcttcctgattggtggcataagaggcttgtgttccaaatgggcggttgcttgacaccccaaatgaaccgggtgtgggccaggtgttggcaagttgctcaattagtatgtcggtggaagccgacaaagccactctggtgcccagtcttgacactgatggtcactactctttcaatagtgaatcttgcagcgtctgaagtactcttaattttgtgcaatgtatgcaactactaacctttcagagaaacgctaagatattgatgtcaatgataacataagt

SEQ ID NO: 357897 - DNA, 299 bp, Zea mays
tgttgattaggcaatcgatatatcgaagatgagactgagtatgcaagattctgtacaatcagattatttgcatatgcagcttgcaacttgcatatgttgattacgcacatcgccttcacacatcaggttgggtctagcattagttctgatcgtggtgctttccttgagggttttcatatacttggttcaagaaaagcaaaaaatatatttctcctttctacttcaacatctagtgatgtatctggatctagcctcgacaccaacgaagagcctacatctttgttagtttcgtcaatcct

SEQ ID NO: 357898 - DNA, 266 bp, Zea mays
actcgccttcgccccttctgtctcccttcgtccgtagcagaccaggaacgcccaaggcgctagcgtctccaagatggtgctgaaaacgacattgacttactcaatccaccggagagctgagaagtaaagccaagaagagcggctagtcagtcccaactccttcttcatggagtcaagtgcagggtgttcagcaaacatgtgttcagcactccagactgggtggtgccaggtgcaaatgtctggcaactacggtggaagcagctacg

SEQ ID NO: 357899 - DNA, 225 bp, Zea mays
ctccctcctgcagcgcccgtcgcctccctttccccttccctccctccctctccccgcgggccgccagaggcaatttcgccctcgattcgacccgattcgtccgccgcgaccggattcctcgcaacgcggtctaagctggtcgtgtgcgtcgatcgcataaggggaataagggcgcaagcgtgcacttgcggaacaagggcgaaccgcaaggagaaggagcgcaga

SEQ ID NO: 357900 - DNA, 311 bp, Zea mays
tcggaatcggtcgagtggaaagttggtggaggaggaggaggaggatgatggaggagagagcgggcgagccgtcggaggtggaggagcaaggctgcgcacgaggccagctcacagtagattcggcgccgtgggcacgccgtcctccagctgaggaggaaaggcagctatcggcgaggaagggtggtggactggtggtgctagcggtggtggtggtggtggtggtggaggatcccctctcacgtcaagcgctgtgtggaaagcataaaggcgggaggaggaggagagggcgaaggcgcagagcttccccgccg

SEQ ID NO: 357901 - DNA, 100 bp, Zea mays
agcactccaaacacttgcggcgccgctgcctcacaggtaaggccgccatggtctccggttcgggcgtgtgcgagaagcatcaatggtcgacgggcgccac

SEQ ID NO: 357902 - DNA, 213 bp, Zea mays
ctagtctacataagaatgttgacagcaagctgaaacaagttcccatgaaactggtatctgtcaagaggtaactcagagcatgtaccataagcattttctttgatctatagtttgttggattcgttctaatgaggtccttcattaggatcttgaggtgaactgactgtactgtacgcagtagccggcaattacctaacgtttggtaagcatgta

SEQ ID NO: 357903 - DNA, 348 bp, Zea mays
gcgcctcgccatgccccctagcttccagagtagcgtcgccagcctgtctggctccgacgtgtcaaacatgtacagcggcggcttggagcagcaccttcgggcgccgcacttcttcaccccgctgccacccatcatggaggacggcgaccacggtggtccccccacccgcatctcctcctccttcaagtgggcagccagcgacggctgctgcgagctcctcaaggcgtgaaccgacgaggaggaggggatggctactcagacgaacggccttctcgccgatggctggtcgtctgtacgcaaatcattcttggctgttccgcattggggtgcaactcatccacatcatct

SEQ ID NO: 357904 - DNA, 342 bp, Zea mays
ccacgcctccaacagaagaagcctaagctgccctcgctccgacgccgccacctcgtcgtccgaccgcatcgattcgatggcgcgcatctccgccgtcgttgccgccgtgatcaccgccgccgttgtcgttgacgcgctgttcacagccgcctccgccaccgaggcacaggcaccggcccccgccccgatgtccggcgcgggcgccctctcagcgcactctccgtcggctgcctcgcggcgctcctcgccgctttcctccgccactgagcggtggggccgccccgtctgcgtgcgcgtcttcagatctagtggtacagtggtagtgagagttgcagtctaatg

SEQ ID NO: 357905 - DNA, 111 bp, Zea mays
tcgctcgagtgccactttgtgcgcagttgtctttgatgtggagaaactggagacggcgattcgtcgtcatgctcacgttccttcggcaataagaatgcacgtgcacgtgtg

SEQ ID NO: 357906 - DNA, 199 bp, Zea mays
gctgctccagcgcgcccagctcccagctcggatccctgcctcaactcgcctccctcacggctccctgcctccgttccttctcctccatggccgtcggtcctccccgagctagtctctgtctctctactagccgcggtcggctctggcccaggtccgatcggtgctcctccctgctgtagcgccggtcccagctcggatc

SEQ ID NO: 357907 - DNA, 129 bp, Zea mays
tggatgctgtttctgtgatccatacggtggtatctttgcgttgtcatgtttactctctactcctttttgtctgcatttggttcgtatgcgatctttgactagtgttctagatattggaactccaccaga

SEQ ID NO: 357908 - DNA, 159 bp, Zea mays
  unsure (1)..(159): unsure at all n locations
agatgcacaaagattgtcaggagatgtaaactgtgagtgtgagttagcactagcagttgatgaagctttagcctagagagttgcatgaaatggagagcanactaagccacacttcacttcatgacaataatgggaagaaagaccacatcatcttcagca

SEQ ID NO: 357909 - DNA, 187 bp, Zea mays
cttatttctcactcaagttgaaagcgttgcaacatgagcttgcgagctcaagagccagccttaaagcaaaagcgtctgaactggaggatgtgaagaagacgatgcagcggcgcaacgcacctgtgcaaaggacgcagcatcctggacctgacagatctgtgcagaccagggatggagatgtagtcga

SEQ ID NO: 357910 - DNA, 101 bp, Zea mays
catggttgagcaggaacacgaggcgccgctagctgcagttcctcggatgccagtggcctctgaggactcctagtgtaggtgtacatgtattgtatccctac

SEQ ID NO: 357911 - DNA, 152 bp, Zea mays
ctcgcactcgcacgtacaccacactagttaccacagacgacgggcgccatgaaagtcacggtgcttctcctcctggtctccctgtgcttctcgctcgcgctcgcgtggcaaacggacacggaatcgggctcaggcaagccgtaccactacgg

SEQ ID NO: 357912 - DNA, 333 bp, Zea mays
gtgggttcggttgcttacaaattggatttacctgcttcgtctaaaatacatcccattttccatgtttctcaactatagaaggctatctctccgactgttacagtcgctcagctacctcagtccctagaaggtttgcaggtacctgacaaaattttacaacgtcgtctgaactctgcaggttgtctcaattgctcatccagtggtcaggcatgcctactttgttggccacctgggaagatgaactgttattgcgccagaaatttccatatgctcctgcttgggggcaagcacctttcatcgccgggggattgttacagacactacctaagttcg

SEQ ID NO: 357913 - DNA, 257 bp, Zea mays
  unsure (1)..(257): unsure at all n locations
tgtgtgtggagccatgttcatgtgaggttagtaataaagtcgcaggctgctgcgtagatgatgtatgtattagtgtggtgtgtgtgtgtgtcagtgtgaggtagcgctctgtcatgaactcatgacnctgtattctgaagactacctgcttccttgtgtgttctggggaggtccctgactgatgagatagtgctagtgctagtatgtggcatggacatgtagtggctcgctgacgaagacctgtctgatgctgagtg

SEQ ID NO: 357914 - DNA, 102 bp, Zea mays
ttcctttccggccggatatctgcttcgcatctccgcgacatatccgtgcaaacgtgccgatgtagttcttcggcggcatgtcgctgacgtcgggcgcgctgt

SEQ ID NO: 357915 - DNA, 170 bp, Zea mays
cgtagtaagtcggattcggtcgaggattcaaccaatcgtgctccgtcggtcaccgtcgtccacgcaacatgtcaggaggagacagggacccaaggaggagaacgtcacccttggacccactgtccgtgatagagagtatgtctttggtgttgctcacatctttgcatcct

SEQ ID NO: 357916 - DNA, 158 bp, Zea mays
acgaatcggcacgacgcatcggcatcgcctccgacgatcttgagacgaacagtacgcaccgctgcggcaactccgcctcccggtgacacggcgatcgcctgacaacatgcacataaaagaggcgcatggtttgcccgcgaagatggaggacgtggacg

SEQ ID NO: 357917 - DNA, 152 bp, Zea mays
agaactacctcatgcaatttattcatctaatcgtcaaggatcaagtagtcagacagcaaggagaagatctacatctcgtactgaagaaagccctcaacggatgtttcatggtatgttttgggagagagatggctacagggggataaacatgg

SEQ ID NO: 357918 - DNA, 150 bp, Zea mays
cgtgtagtggagtgtagcatcatcagaatccagcaaggagcaccgtgtgtgcgtgatgttgccggatgagatgtacgcgtaggcgttcattgcagaagacccgctcaagcgcgcggggtccgcatcggcgcatccgtcgaggactctaca

SEQ ID NO: 357919 - DNA, 157 bp, Zea mays
tgggcatgtccacgtgagtaagctagttgctagacgcgcaatgtttgtccatgctggacgcatctgaggaactgagcagacgacgatgctccaggctcatcatgtttctccatggacaggttcatagagatgtgaccgtcgagacatctcatcccgc

SEQ ID NO: 357920 - DNA, 146 bp, Zea mays
tgtagcggcggtctcaacatcaggcgtactcggctccggtcacccgttgatccacgcaatcatgtcgatgacgaatgccatggatcacaaggaggagaacgttactctatgacccattgtcctagaaggatagttattctttgttg

SEQ ID NO: 357921 - DNA, 133 bp, Zea mays
cgggtacggcgacgagacatatcttgagtgtccttcattcagtttctaatggatattatggtgaatgtgggagaacgggaggctacatggaagtcactggcttcatctctgatgtaaagagacaagtgtacaa

SEQ ID NO: 357922 - DNA, 347 bp, Zea mays
  unsure (1)..(347): unsure at all n locations
cttctgcatcgctcacttgctccactacgcgcaagacgcaatcatgcccgtggcctactagtgcctagcttcctgcccctctctatgcgtgccactccaggcgtcgagcttgcctctgtgggaccatagcccctgcccctcatcgactctctgcgtgagcgtgatcatgcctccgcatcccatgttcaatgcagccctaaagttctggctgccggtgctcgaggatttggaaaggcgctgtttgattagaagttgagcgtcctgacaagtgggtacctatagcttgtatggaccattttctggttatgcttatacgaagatccanaattccttggatccaaagcttc

SEQ ID NO: 357923 - DNA, 342 bp, Zea mays
gaagaagcgctttcccatccgaaaagctgccacatttcacaaaataaggaatcaagtgaagataccagtagcagctgttgtacttcacaatattattcggtcactcaaaggggatgaggaatggttagataatcaaccagataatatttcgccacaaaactttgctgatctaccggatggcgatcaaggcaacgatcaagtaaatgtccaaggaaatagaccatatgttgctctgttctacattttatttactgtcacattgttacctcttctcaatattggtttaatccatttctcattgtttagtatcctgaaacataatatcatctaactgttttcata

SEQ ID NO: 357924 - DNA, 128 bp, Zea mays
atcaatactcagcagagttttgaagctatgaaccctagagccgtcactgttgtgatagaccccatccagagttgaaggggactgtggatattgatgcattccgcctcattaatccgctagccatgatg

SEQ ID NO: 357925 - DNA, 159 bp, Zea mays
cctagttctggttatcgcgagcctcgacacgctctagggcgtcgcctgttggtaggtgcacatcatattgtcgcagccttgctggttatatatgagagagagacacagagacaacacgagcgacactgaattattcagagcggtgctatgtgttgatag

SEQ ID NO: 357926 - DNA, 342 bp, Zea mays
acgctactaggctctagcccctagtctggtcctgcccgctgtgcctgtgccgctgtgcgtgcacagcgaaggcgcacagtcagcggcttctggccactgggcgtcgccataaacagtggagattcccgcccccattttcccaattctggatagccagcggcgaaccgggggagcactgctgaagccgctcgcccgcccgtacgccattgctcccgtcgatgttcaaacttatcctacacatcgtagctccgcgacctagtttggcaaaatgaggccttcagatggcaggacgcagctttcaggctttgcacagtcagatgaatcaacacttgatgtggaggg

SEQ ID NO: 357927 - DNA, 251 bp, Zea mays
  unsure (1)..(251): unsure at all n locations
ctcgagccagaaggtgcgncaccggctgaacgacgactgggcttacggcaatgatctcgaggcccggccatgtgacttccaagcagaggcattttgctctccgttgccaacatggaacgcttcaatgcccggcgctatgaccggacccacagcaaccctgacttctggccagtggacaattgcctgcagagcgtcttgggccaacgggtagatcttctctgagacttccagatgaactatgacctatggct

SEQ ID NO: 357928 - DNA, 141 bp, Zea mays
tgctactgtcggcgctcctcttcttccagcagtggcgcggaggagctttcttcctctgttcgaagaacatgaggacgagagattacgccatggttgcggtggccagctcttaagaaaaatcgagtggatatgaaatgcttt

SEQ ID NO: 357929 - DNA, 342 bp, Zea mays
ccggacaggagggtccatcaactaagttcatctgcagcagctctcgcagagaagtctcctgaaaaccataaggagcacatagattaattttggtcaaacagattcagatctgtttcatgtttctctaccatctcctgctccgacaccggcattaaccccaattgaaagagtggctgcaatcgcatggtccactagaaagcgatatattctccaccaagacagtagctcgactcttcgcgtcatctctgtgcatctcttcagcatatcagtatctcagggggatgtgtcaaggagtgataggaggttactacagagttctgatgcagtattgaggttaagatg

SEQ ID NO: 357930 - DNA, 332 bp, Zea mays
  unsure (1)..(332): unsure at all n locations
agctcggngcctcccagagtcacagactcaggcggccaggctctcagcctcccaggtcaacggtggcggcagcaggctcccagtctcagaatgctaccagatctaaactcttagccgccacacgancacgagcagctgtcgacctccaggccggtcgatcggggcgccgggcaccgtcgcgccgagctgagcagagagtgtagcacctgcaccgagcggctagcggtgcgccgagcacctgagtgagcagcggtgcgccgagcactcgtctagtcgtctctctgtctatgtatttgaatatgatctatatcagatctgggcgtctgctatga

SEQ ID NO: 357931 - DNA, 110 bp, Zea mays
cacgtctgtggatcaattgacgtgtattacagccttgcagttgacgattaaagtcgaggtttaagacgcttgaggactggcatcatctcatgaatacattgaagtgcaag

SEQ ID NO: 357932 - DNA, 184 bp, Zea mays
  unsure (1)..(184): unsure at all n locations
ctcaacgcgcttcgangaagacagcagacaagaaaaggtgtctggggtggtccctggaattctagcaatgctcgagaagtcattgaatataccgttgtaaagaactatcctatcgattcttggggatttgggaatgaatgtaccggagtggagttggtgcgagtgtgtcagctgaacaatatgg

SEQ ID NO: 357933 - DNA, 266 bp, Zea mays
cttgtacttggacaataacaacttcattgggaggataccggataggttgtacaggcatccatttctgaaggagctgtacgttgggttccaagatcgccgattatatattatacttccagaaagatttccactttacttgtactgtgcatttactgaaacacgtctgcgccattgctgcaggtacatcgaaggaaaccacttcagaccaggaaccagatcgaagggaacgcacaaggtgctggaactgcctgacgccgacattctag

SEQ ID NO: 357934 - DNA, 116 bp, Zea mays
cgagatatgcatgatgcttgtaagtggattgtacgcagagtactttggtaagggtatgtctcaagtatgaatgatttgggtattgtatatgaagtgagtgatcaagtgaataatgt

SEQ ID NO: 357935 - DNA, 124 bp, Zea mays
cgcaagtacttcaaagcacaccacgagggcccattcctactgctagttttgtgaattcggaggcgcacgccaccaacttctaccagctcaccgccgagcggaacgaaactcggcgagtgagagc

SEQ ID NO: 357936 - DNA, 309 bp, Zea mays
tcagaatacaagtaattaaattgatatgtgcgccgatgagattatcagtggttatgttcttgtatgtctgcattctccaaacatgttaaattaatttcttaaacacagggaggagctttcaataagaaattgaggtactcaaaagttgcatttcattagaagttttgcagagctatatcgcattgagaattctacttattttcttattttatagtggcacagatcgaaggattagcaatttaacttattaatttgcatatgatctattggagcataccatttcaacagttgtatttgatattgaatagg

SEQ ID NO: 357937 - DNA, 302 bp, Zea mays
acgactcgacaggtgagctcgtcccatggcttgggctccttgtttcttcctgcacgtacgcacgcctctcccaagtcgtgtccgaccccctgctcctatctccagccctctcctctatgttccttgcgtagaggaagttcttccccaatggccgacgccctactcagggaatgaagccaatgctccagcggcccccatgtccaggagctcgacgccggccttcttcctgtgtcccttgccgcaggagcagcaactcttccctctctagcgttcccccttcaagcatggcgacaacaacttct

SEQ ID NO: 357938 - DNA, 290 bp, Zea mays
tgaagaatgatctaattgagcatgtgtggaacaagcatgggaacatgtgaggcaaggtatcaattatgaactcagatggtaccagatgtttgtgtgtattctagtccactaataatttttgttgcttactttgcagatatgttgttcgccaggtgactcaactcaaggttctgcattagtagttgaactatgtactgtgaccaaaacaaccttttgtaacagagctatcaagtgcactatatttgaattatgtactgtggcaatctgctgtgagcaaatcaggcttttgt

SEQ ID NO: 357939 - DNA, 303 bp, Zea mays
gagatcttctgtgggaagcctgttctccttttgggaaggttctcagggtaacaacattcccaggccgaacatatgcatttgtccagtacactagtattgcagcagcctgcagagcaaaagaagcacttcacgggaaacttttcaataatccacgagtaagcatatgcttttctcgagatgaaggggctgtgccagaacttgggaaacaatcatttgttacccaatatcatccccaacctagtgcccgacctgtcgtcggagaccaagattatgaagactttcctagggctaggcttttggata

SEQ ID NO: 357940 - DNA, 362 bp, Zea mays
aacaacatgactagttcgtggtcatgtcgtttggcttgaggaatgcgttaacatcattctagtccccttgagaattgaatagcactactagctgacaccatggactcatcgcactcttcatgggttgcttggcctcacgggcttctaccgcttcttcatcaacaactacgacatcatcaccacaccatgaacatccctcaagcgtgttgccttccagtgtgctgatgtggcgactacatcctttgaggccttcaaggcggccctcacctatggactggtgctgcagttgttgagcatcacggcttcgtccatcatcgattgcgcttcttcgggcattggttttggcgtgctcttcccgatcg

SEQ ID NO: 357941 - DNA, 328 bp, Zea mays
  unsure (1)..(328): unsure at all n locations
atcattatatcatgcgctagtcntgcattggcagatgctggaatcatgatgtatgaccttgttacatctgtatccgtgtcctgtgttaggaatgacatcatcatcgatccaacctaagacgaggagtcatggcaagacggaagccttttggtggctttcatgccagcccgcaagtagttcacgcagctcacgctcactggagaatggatcgatggcagattaaccaatgcagtagagctctgtatggatgcttgcagcaagctgggtgacatattgcgtgaccgcttgaaagataccgctaccttaacgtgtgaatgacgtgttagag

SEQ ID NO: 357942 - DNA, 245 bp, Zea mays
cgctgcttcaagaaaccaccgagagcccaaccgcacaggcaggagagagagcagggagccagggacagtagcgtggggccggggagcacgatggaggggaaggagaggactgcgctgggcgcacaattctcgacgtacccatggacgcgcgtgttcaccgggactcaatctgtctctacggcggatgcgatctgcactctttcttaatacgctacgcatgcgtcagcactcatcgcacgcgatca

SEQ ID NO: 357943 - DNA, 363 bp, Zea mays
cagatcttcaaggcatactcgtaatgtgttctcttttatctgtgtttgtctctattaaatatactggctatcatcagcgagcaattggtgtcttgaattgagtatacaatgtgtgtctgtttctgtatttagggcctgttttgatccatggtgctaaagtttagcactacatttttagctgaactacatttttagctatactttaggacttcgagatccaaacaggattgctaaaagatgctaaacgtgaagtgataaactttaggcactccatagtagtttagctgctccaaggtctgcttaagtgaagtaacagtggttcaagtaacgaaaagacactcttcatctcctcgtccatctctc

SEQ ID NO: 357944 - DNA, 210 bp, Zea mays
cgctctgtgactgctgtgtacatggcagatgttgaggttttctcttcaaaaagctgcagagagctctgaccttcaccgatgcagaggctgaggaacagctctccttcgaggaagacagtgcttctggagtatacaaccttggactatatgaaagttcaaggtaatcttggacacacattgaaacagactttatgcttttctcaagtatcc

SEQ ID NO: 357945 - DNA, 272 bp, Zea mays
ggatattctgttggaaaatctctcgtggaagaggataaacttgagctcgcaacttctcttattgagaaggcgaggcaaagggggttctcttttgcttcccactgtatttagtagcggcaatttgcactgatgctgagacaagatttcctgcactgctatcctgatgactggatggctatttggctgatgccacaacatcacgaacattgcccacagctgttattgacggccatggatttagtcgaaattcactgcatgaggcgatcagaact

SEQ ID NO: 357946 - DNA, 113 bp, Zea mays
cgtgcagttacagttatcacactacacgcaccgagagttccacctctcttctcttcaatgctcgacgcgagcgcggcaagaatcggtgcatgtgagccttgttcggagaagag

SEQ ID NO: 357947 - DNA, 194 bp, Zea mays
atcatctccctccctttccctgatattctctctcgcggtgctctcgcgagctcaggtcggccgagcgctcagccgtcgctcctctctctaccctctgcgcgcttcatctccctggccagagcttgcctgcgtccgcgtctgctctcatggtgagcgccctcagctcgttcctgtctcgctcggcccagtacctg

SEQ ID NO: 357948 - DNA, 175 bp, Zea mays
ttcttgttggggcatattctggactctctatcttcagctgcttctttgcctactttagaagctgttttgcggctattctgggtctcaaggcctccaaagcattctttggcgtgctaatggactccgtattcaaggctcccatgtcattttttgactcaacaccagtgggaagaat

SEQ ID NO: 357949 - DNA, 305 bp, Zea mays
  unsure (1)..(305): unsure at all n locations
gcaanggggcaccacgacaggtggtggcgggcgcgggggtggacacgaaggcaattgggtttgccctgacgtgagttacacaagaacaacttgatcatgctagagaagcaaccaaatctgcaattttgatgaacttggatcaagggtacaatgttcttgctcctgatcaaatcctaattgtatgacctgtttccctaaagtgttctttacagtacatacttttcctattttgtaatccatagcatctaaagataaagacaagtttaaaataggagatgtgactaggttattattattgaaacaat

SEQ ID NO: 357950 - DNA, 314 bp, Zea mays
cactaaccgtgttctacattctgctatccacaaaaagctaatatttctccagtgtttttattttgaaacccgtttcaaggggcttctgtgttaggcataggggaacctaaacagggattggaagaaaagtatgtttgtgtgaaagacgaaaagtgtgaaatcgataaacagcttgttgtctaccagactactgacgctgctcctgctgaaaatgtactgaccacaccttccatggtggagtgcagacccttggcttgtcttccacgcgaaagctccaagaaactccaataaacacggtcttcaacaaactcaca

SEQ ID NO: 357951 - DNA, 136 bp, Zea mays
gatgtgtcgacagtccgttccgtaccgctctgcagtgcgggtgctttctacagcgtatgcgacacgaagaggggactggatacagcaagctcctcctcctctaggcctcgcctcgtccgtgccagatctatctgtc

SEQ ID NO: 357952 - DNA, 138 bp, Zea mays
  unsure (1)..(138): unsure at all n locations
tcctcctcccaatgccccatgcgacgccgatgtgtcagacgacgaaggcaagggcgcggacagcccgtcgtgcgcgcatctcgtcgctgagttcatagtcgcgcgngattagaaggtggtggatcttgcagagctccg

SEQ ID NO: 357953 - DNA, 158 bp, Zea mays
gctcgacggagtctcctacaacaaacacccacgcatagtctccgatctccaggccagcacaacattcgcagcttctcggaactcactgtacgacgttctgcactcggaatcttcaatcttggacagcggcgcgtccccaaagagttagatcagccatg

SEQ ID NO: 357954 - DNA, 143 bp, Zea mays
  unsure (1)..(143): unsure at all n locations
cgacttctcaaagtggctctgcgtgactcagtgagcggcgagggtagttaagttgtgagtagctgagcttatngtcgtagagcaagcatgatccagcaaatctgtggtatcctgcatcatcataagaagttgctacaagtctt

SEQ ID NO: 357955 - DNA, 185 bp, Zea mays
cagctaaccgactcctggtgaagatgcactcggagcacattgcacagccaattcgtaggacatcgagcgagtagatggtaaataggtcgacatccgcgcaatatgagcgtctatctatcgctacatgtgattaaatcacggttgtcataaagtacatgtgcgacgattatcaatataactatatc

SEQ ID NO: 357956 - DNA, 261 bp, Zea mays
  unsure (1)..(261): unsure at all n locations
gttggggacaaacatgatacacctcataatgcgatgcagtggcataggttctgagttgggaaagatctccctgaatagcacctcagtgatctcaggttcctatgttgagctgagggcatgatgggacgtctgcaggtaaccatggaaatcatcgatgagctgaggaagtctgtagatcagaatatgccagtactgcattacctttcaccttgctagctagcatggcaataaaatgagatcatcnacagcggcgcggttaag

SEQ ID NO: 357957 - DNA, 101 bp, Zea mays
actcagctcacactcgactcgagtctctctcttccaagtgaacatggaacagggataagtcctgctccaagtgaagaggcggcaacactagcagatcctgc

SEQ ID NO: 357958 - DNA, 123 bp, Zea mays
  unsure (1)..(123): unsure at all n locations
gcgtcgtaactcggcatcggctcgagatantgacaatttcaggcaaatgacagataatgagacgcttaacatgatggataatgtgcaaggggaacttatagagagctcttgcctgttctcgac

SEQ ID NO: 357959 - DNA, 117 bp, Zea mays
  unsure (1)..(117): unsure at all n locations
cgtcgtagctcggattcagtcgacgtgttataataatgaagtaccagctgctgccatcgtgatgctatgctgctctagagatcanctcagactctgcgaaaggctataaactcgtgg

SEQ ID NO: 357960 - DNA, 134 bp, Zea mays
cacgcagcactctctccagggattcttccacctggtcatcgcttcttccttccgcactccgtcggcgcatcatcagcaagtgcggcactgacgcaagaacgagaggtcgcgcgctccgctcacgcccactaaat

SEQ ID NO: 357961 - DNA, 251 bp, Zea mays
gtagtgagtcggaatcggctcgagtgtgaacaatctggactgcgagatgcattgtgaaactcaaatcaacctggtgagtttcaagatactgatggcatggaacctgcatacatggaaccctgaactgtggtgattatgatgatcgatgacctatggataaatggacagtctgaaagtgtcgtgtaacgcaatggtttaggtatgtgacattctatagagtcttgctggatgctgctcacatacagttagag

SEQ ID NO: 357962 - DNA, 107 bp, Zea mays
ctgatgccagtcaccatgagtcgctcggttctctcgcaagggagccggccttacaagagcgcgaatgtcgcagcgaagaagctggaagaggcagcgctctcctgcaa

SEQ ID NO: 357963 - DNA, 144 bp, Zea mays
cggcagatccagaagatgaatctattgcttgtgcaactactgagcactgtatggatgtcgatgaaactgtggaggcacaagtggtactactcgatgagagtatagagaataatgctgctgtcataggagtagtcgaggagactg

SEQ ID NO: 357964 - DNA, 170 bp, Zea mays
gctctgcattatgtctgacgcgcacaaaacaaacgcgtcccttgtagagactctggattgttatagttacaggtatactgtaaagcttcatttttttttggcgctctgaatcgtttgcagtgagggggaaagacggacatggtttacggagggttcaagacagttttttt

SEQ ID NO: 357965 - DNA, 129 bp, Zea mays
agtggcatgcggttcctgctgtccccgtgtcaattttaccatgtgaaaatgaaggatccagatcagaagtactacaggaatgggacgtcggtcggagaacaacatgaatcaatgtatgtacattcaggt

SEQ ID NO: 357966 - DNA, 222 bp, Zea mays
gagtaatggaacaagcatatggcccatgctactagttgttattcttgcaattttggtgtactactgtacgcagcacaaagaagacattttggcaatgttgcagcgttgagatagatttctgttcagcccctgactggtctactctgctggacgtattattagtgttgcttcagtgattgaagaaattttggacttgggccaacttcattattctctcaagga

SEQ ID NO: 357967 - DNA, 263 bp, Zea mays
atgcatctcagttccacagtctcattcatctggtggtcaatgcagcaattagcaattaccggaaggcaatcgatgaatgccgtcttctcaaactgcctttcacaacaatttttgagtaccttcagttactacaaatggtggctacttctatgaattgctgggggcaccgtggaatgttttatcttgctgctgcagtttccgacttctatgttccatgggaaagtatggctaaacataaaattgagtcagcaggcggccctttg

SEQ ID NO: 357968 - DNA, 361 bp, Zea mays
ataagacaaaggtgaacagcaactgcgtactatatttgcaggaatattctgctctccagtattgcacacacactctacgcaatatttctccagtattgatcgtcttgcttgataacgcagatgatacaatagtacaagttattatttgaccctgattgttgcctctgcaggtaaagccaacaaagttcaatatttacaataactcgttgtgtccagggtttgcaagacaagattaagcagctctaagattaagatagttgtcatcgatcttgccacaatttttacttgagctgagcagataacaagcgacttggggaagacgtcgaccttctgcttctccatcaccatcgtaatcatgcag

SEQ ID NO: 357969 - DNA, 133 bp, Zea mays
taatcttagactatatattagcctgctgccattgtaatctatatgtatagatgggtcttacagtattggatgctggtgtagctgaacgttagcttgtgtgttgatcattgtataatccgaatcgacatggatg

SEQ ID NO: 357970 - DNA, 171 bp, Zea mays
tgatctttcatgtgacttctgcgttcgtcactccatcaggctcacatggtatatagtgaacatgcatcaggcactagctaatcctacgagatattaactgctgttcatgccgtgttcgttactactcgtatgctcaagcaatgagcggcagaactgcactatttttatcca

SEQ ID NO: 357971 - DNA, 162 bp, Zea mays
  unsure (1)..(162): unsure at all n locations
acttcactctgcaaacagtgcaatctacagtataagacaatagtttacacggcctgctggagatggccttaaagcccaactaatggatgtgtaacgttaacatgtgaattgaactcgtntttgtccttacaaagaccactctttttatgttcttataaagcc

SEQ ID NO: 357972 - DNA, 120 bp, Zea mays
  unsure (1)..(120): unsure at all n locations
tcaaatttgccaagtactacaggtccctttgccctggagcatangttgataaatggaacgagcagacggagcatcggacgtttccaagacctctctgaatgtacaccacgatacctccag

SEQ ID NO: 357973 - DNA, 334 bp, Zea mays
  unsure (1)..(334): unsure at all n locations
gttaaccatgaagtttatgtatcttgcattcctacttctatatgaaatatatnaacaattcttgcttggaggagcagatgcttcccccagacaagtgattgacacagaaggcaagaaagttcgagctggcgtagattactatatccgaccggtcctaacaaccccatgtgatgggcgtgggtcgtgtgtggttggaagtgctatgttctcatagcaaggtcatccaaccacacttgccctcttagtgttgcggtggtggagtgtatccgtggcctagcagtcacattcaaactagttaaccctaaaacagggtcattagggttctactgacttg

SEQ ID NO: 357974 - DNA, 345 bp, Zea mays
atttgccatcaacgacaaatggataacagatcctcaacgggagtcagtaacaaggggtcacatatgtaacaacattctaagagtagatagatgatgcattctggttcaggtcactattgctagatgtatataaaatgcaatatggacaggaggggagacgcaagcaagcatgcaagaatgagcagaatctagatgagattcttgtgctaccgtcctgtttgtacatttgggtctgtttttttggtccaagtacatttgggtctgaaatcagagaccatgacattatctaggactgtgcaagagtgaatgagaaatgaggaatgtagggtgggacagtgcaggggg

SEQ ID NO: 357975 - DNA, 329 bp, Zea mays
agacgacgtagcatttcacctctctggggtcgcaactacagcaggtcccctcgatatcgtcctcgccgtgattcaccttatgtgaatgcagattaaaatcagaatgtgaacggagcaagtgctgaatagtttttaggatgttctctctgctagagtgtagttactctaggattggttgagcataccacagacatgttagttatgttgatgtcatgacaatgggtattgttaagaacttggcttatgatggaactacatagggttgtagctggcaaaagggtgcgttggacactgttatgcattggctgtctctcttcagctgactgaaa

SEQ ID NO: 357976 - DNA, 169 bp, Zea mays
caaaagaggatggggcatgatagtctaagggaatggggacaagctggtagcagacggcgcggcgccttctgcattggaagaaaggggtatgcccactctacaatgggagagattcattgcttggttcttcgatcatgtctttctgtcttgcatggtgcttttatgtaca

SEQ ID NO: 357977 - DNA, 176 bp, Zea mays
tgtctctctgcttgcttcttgttggtgtaactaaggaacaaagattgcttcttcttcccttttgttttcaaatttcaatttttcatcgggttctctgaaatggagagagatttcatgggtctcaactcaaaagaacctcttgctgtggtgaaggaggatatgcacgtttatggctt

SEQ ID NO: 357978 - DNA, 309 bp, Zea mays
  unsure (1)..(309): unsure at all n locations
ctcagccttgctggctattagctgcaaaagcttaggaattaacctgccataatatatatacatatatcgatcgagcaacgcagccaaattgagttctctcatcatcaaaatcatcattttctttcttctttcatgttttccacaattccactctatttcatgttattttgtcaattgttattaggctgttctgcatgataattaatgaaaaaaacactatgtatgtatgtacttatccgagaaganaaagcgaggctgagattcagttatgttgatacaagattgagacaatacattggcttctctttc

SEQ ID NO: 357979 - DNA, 317 bp, Zea mays
cttgcctacaggaaaagattgtctgtgcattgtcctgaaaacaccatcatcagagctcgagggatactgcctcatgtggaatttacgcccgtacatcgatgacgatgtgatgcgtcttgcgtggaaaatgtgtccttagtaggcgcaaggttcgtcattctagcaacaagtaccagaagccggtacggattaaagccaagcttgtttaagctgtttgtcttcaaaaactcacagcagttcacgattacccaaaacattgtttgtattgtacatttcactgtttgcatatgtatacactatattaaagccccctcaaa

SEQ ID NO: 357980 - DNA, 134 bp, Zea mays
caaatattggttgtagagtattgcttttttaaatacaatgtccaattaaattcaaggatccgatcctatccaacataattggacattgttatttaaaaaagcaatactctacaaccaatattttgttttaaaaa

SEQ ID NO: 357981 - DNA, 174 bp, Zea mays
ggtatcgaaggcaaatgacaggcttttcagcttccttcctgtcaacgacaccataacatcgggtgttagcgagcacggaaatggatgtagttttgttgggaacaaggatgctgctaatggagacattgagctgacaagtggtctcaacaaaggttgatggctacaatgctactt

SEQ ID NO: 357982 - DNA, 168 bp, Zea mays
cttcataagtagcccgtgaattttagccatttcagggaagtaacattcgcactcaaatcgcctcacatgaggctagccttagctcaatctatcctagtcctagtgtggtgctatcagcacgcaccaggttttttgatctaaaaaaaaaagaaaaaggaaaagaaagaa

SEQ ID NO: 357983 - DNA, 172 bp, Zea mays
gttcatcttcctcgcttgcactctcgtagactcacaaaccttccctcgcattcatcccacgcatggctgccatgaactctagcgtatttgcctgtagctatgccatatcaggtgcagcgtgttcggagctcaatgggaaggtcacttccgtggcctatgttgcatgctctgg

SEQ ID NO: 357984 - DNA, 162 bp, Zea mays
  unsure (1)..(162): unsure at all n locations
atnttgagattcatcagcagccaacagctttgtctccaactctttccttggtttaggtgaaagtcctttggctaacatctcctcatcatacttcctgggcatatctatgagggccttgtccacaagagcatctatcaaggcattgtaagccgcagcatcagg

SEQ ID NO: 357985 - DNA, 168 bp, Zea mays
  unsure (1)..(168): unsure at all n locations
cgtcactcctttggataatagcacatgaatcncaatgaccaattgtgtcatcttttgagcttcataatgtaccagttcaacattttttttagtttctgacaagtttgtggtcgcccanaggaaaagtatggccaatgtacacttttaactgacgcatagatttatttt

SEQ ID NO: 357986 - DNA, 168 bp, Zea mays
  unsure (1)..(168): unsure at all n locations
agaagacttcgtcatccanacattattctctttatgaaacggtgtgacttcacctcaacatcggtgcantgtaacagagtttctcgcacgagaaacacatccnaaagtgataagagacggcgagttcatatggccttagatgttgcacgaggtgtacattatcttcat

SEQ ID NO: 357987 - DNA, 143 bp, Zea mays
gtatgttcgagaggactatgtgcttgatgaatagtacgggtcagaatagcgagatccactcttgtatttgtcctgtataatgcatgctttgcatcagccgcatgtccaatcatggagcttcagtttcatcgaaatgaagatct

SEQ ID NO: 357988 - DNA, 129 bp, Zea mays
  unsure (1)..(129): unsure at all n locations
atcattgtgttgggcaagcattttcgtagacattacgtgganttaggaagattctgattatgcttctacatctactatgatcttcancttaataattgtagatgtagaagataatcagatcttccgaat

SEQ ID NO: 357989 - DNA, 168 bp, Zea mays
atcatgtggtggtgatggtgaatcatcaagatggtatagagcacttctgttggaccgaagttgagggaccattattgctgatttggtgcacctggcattaatgtcagtaactcagtgtcacaggcagcaagtgagccagagttactaggctcatggtgttgcagtggc

SEQ ID NO: 357990 - DNA, 263 bp, Zea mays
agcatttccagttggaagaatatgtagatcagctacgcgtgttgttcttgttccgtctatacgtgatgctaaccatgatgttgtttttcctcagcctgcattggacatgaaatctcagatagtcagtctcagtaatcctggaatctttgaggcaaataaggttaaggttggttgctgcaccgtggatattctgaagcaaatcagtggggaggagatatcacgaactgcagcagatggacaacccattgatcgcttgagtagat

SEQ ID NO: 357991 - DNA, 183 bp, Zea mays
ctttattgaaatgacctggggatatatatagtcttggtcttgttccatgtgatggaattattaagtaaagcagcattgttcttgttagttttctttgtttctagaaatgtacgagagtatttggtttttactcatttctacttctcaatgcaagtattaagtaaagcagcattggtcttgttc

SEQ ID NO: 357992 - DNA, 179 bp, Zea mays
ctcaaaagggctctcaaagggccttgcgtctccagcgttggcgtccgcgagcgcggggaccagtggccatgagtcctctctcctgttgcgctctcgtccgtctccacaatttgtgcagtggatctagaaagaagcatgtcacgaccggccgcaccagaccaaaccgtagcagaactcaa

SEQ ID NO: 357993 - DNA, 151 bp, Zea mays
  unsure (1)..(151): unsure at all n locations
ttttgatgagtaagagtgaccagtaaaagaagcggcttggagcattttggttttaccatttctttctccaatttgtttgatctaggaatgataaagttaattggcttacatatnggagtatgtacatttanatatttatcttttctctttc

SEQ ID NO: 357994 - DNA, 180 bp, Zea mays
ctcgccaagggcatatgccaccacttcgtccgcacggggacttgcaagtatggggattcatgtagatacttccatccgaagccagatggtgccaatccagcagtctgatttgattgcgaaccaacccaattgcgttggataccagggagtagacataaattctgcctcagaaagaattgt

SEQ ID NO: 357995 - DNA, 181 bp, Zea mays
aaagcttcatgaatcatgttcagccttttatgcttcatagttataatagaagaatgagcattgacctcattacttgtcgactgagtacatggatcgccaggtattcctggagatggaaggtgtttattccgctccgtggtgcatggtgcatgcattagatcagggagaccaatacctaacg

SEQ ID NO: 357996 - DNA, 338 bp, Zea mays
gtatccatcaacaccagacttcaatgcccaagagttctgagagccattgccacatcagaagagaaactgtttttaccttttgcaacagaaaacatggagcatccatagcctcttgttttggtctctaagagaatctgtagcattgaggtatttaagatccggacggcaatttgtttgcataggcacttggcatgattaatgttttttttccttctttgatgagtcgtgtgcttgtgccaagttcaaatggtgagcaacgaggagcttggtttaaaggtttgactagttaattgatgtgttcagattcctgaaaatgttatctcactcacgattaagaa

SEQ ID NO: 357997 - DNA, 101 bp, Zea mays
gcaattaatacttaccagagttgcattgtttcgtgaacaaataagcagagatgtcagtatcctacctaagatgctgatctgctttgaaacatggtatcact

SEQ ID NO: 357998 - DNA, 103 bp, Zea mays
gcatatgcaggactgtctcctgcgtttatcatgggctcttgttcactccaaacacccacaagatgtgcaccaagggatagccatgcttgaatcatctttgcct

SEQ ID NO: 357999 - DNA, 314 bp, Zea mays
cagctaatgaacacaaggaacccacatataatgacttagcatcaatactgactgcagttcaggtggcaccaatcttgtcccagcaccgcaaacatgcgctgcttactggagagctcagggcagtcatttgagatgtcagacccctatatatggtttcatttcaaaatacaaaacacctccccagtcatttttttaggaacagggatctaaattcgttttgctccctattccatttattactttatagattatttagcagatagaatttcaatcacgaaaaaaacaaatccgcagaggctaggacaaaattgggg

SEQ ID NO: 358000 - DNA, 329 bp, Zea mays
ctctatagcatgtatttggtaacttaccatccactctgtgtacacgaagcggtaggcctgggggagcttccaccctttccaacagaaaagatgtcatatacagacttcacagtcaggaatcaaagagaaaatcaagttatagacacacgcacagatcttaaagcttagtgctgtaagtttgtgattctgtgtttcacccttgtcgctatcctcagacaaggtaggttggagactcttaattgtgatatgtttgtaaattttatggaacgtaagttttctgctgaaaattatgtagacttaaaatttagttgattggtccactttgttgt

SEQ ID NO: 358001 - DNA, 328 bp, Zea mays
gtgggctattcgttcagtgatctacatggaaatttgatggagagggatgttatgaaaataccatccgtatgctgcatttgtgtattcatctagtgcagtaggaaatccaaaatacattggacggttatgcattcgtatatatagtcaagcttgtcatcagtttaatgaaaatgtggattttgcattcgtccttggtacaagtaatctttgtagtgcagcgctgcagcagtaataccaaccaaaatacactggacggttgtgtacatgttttaagatttttatttttcaattgaataatcaagcttgttttatcaaactcgccgattgt

SEQ ID NO: 358002 - DNA, 325 bp, Zea mays
  unsure (1)..(325): unsure at all n locations
ggctgaaagaattcctgatgcaagctcccagactaatctcttccctgagcattatgggcaggaggatctaatgagtgcacttctaaaacagcaagaaggcatgggaccatctgagaatgagtttgactttgatggatattctctggacaacattcctgtctagaacaaacccttcccgattgaagttgccagtgtaaatagtttgttacacaagcacatgatcatcctgcagttagctattttggaactgagtcaaaatttggttgatgtcaaatattcagacttctgggagtagtagtgtattgtaatggtttagntctggatg

SEQ ID NO: 358003 - DNA, 317 bp, Zea mays
cagactatctgagactattcaggcccgaacgtttgaggattcagagaattctcataagtcaactaccgtgaccttggccagcataaaggagtccttaggcatggacgttgaccagaaaagtttagagcaacttatcaagataaatggctggtggaccaaaagcagctgggcatttctgaatgaaccgccagtgatagaagctgcttccaataagtatgcatcacagtttcacgtggccaacttggggtctacgagacttaaccccggagatggaattaatgcttgatatgagtttttttcacgttttatagtttcgt

SEQ ID NO: 358004 - DNA, 187 bp, Zea mays
gaatgctcttcgtagtttagcagagaagtatttggcacatgtggagcctcaatgtagagctgtcgataacgattttgacaagctttctcttggatggcgcgatggttccttgtgggatgtgatcaatccagaatccagtgaaccgcaaccagaagatggagtgtctagagaaatgcttctgagcatc

SEQ ID NO: 358005 - DNA, 320 bp, Zea mays
gttgcaaacacacaaaatggagtgctgtctgagaccaaggaagatgacaagaatcttctgctaaataatgaagaatccaagcttgaggtcactgatgcagctggaggagacaatgatggtgaatatgaggagggaatagtgtacaatgaatcgggtgaggatcagtattatgaaggtgatgatcagagagatgcggactatgagtatgaacaaggtgaagagggatactatgagtatgaacaaggtgaagagggtgaaaatcaagaggaagattacatggaagaagaagatggggatgattctgctaagaagattggtgt

SEQ ID NO: 358006 - DNA, 155 bp, Zea mays
gagcagatgtatgtggcataggcctaatgtacaaaaagaaaacagcagattagaaggcttatgaatttaatgtaattctttacctattcctatagctgcttatgtgcaacagttttatgctccatcaattatttcaaatagaaatatagtaaaaa

SEQ ID NO: 358007 - DNA, 276 bp, Zea mays
atgggtgttgactctctggtctgcaaatagataatctagatctgaagaccgtaccttaccgtctttataaaggttttcgagctcttactcgggcaggggaatttgaagtcaggtcataattttgtatttaacattgagtgatcttagacttgtaatgattctggacatgaaattttgttgcatgtacacggctagtttcatttgtaaagagttgatagtgttctcttctgattacaaattatcttctttttaggattgaaaactgcagatcaaata

SEQ ID NO: 358008 - DNA, 338 bp, Zea mays
  unsure (1)..(338): unsure at all n locations
ctcggactgagaggaaggagcgacaatgtgatgtttggaaattttggccagtctgatgctaggagttttagtgtcactaaccatnggtacaggacctaaaggcagtttcaacagtagtgacatgatcagtactgatcatgacatgatgactgggcatgatgatggagcggggcagaaacccgagctgcaaataactctagtgagatcttgcctgctttgttgtatgtgccgaggaattcanaacatgttatgatcaatggcaatttgattattcattctgtgatggctagtgagaagcagtggcacataagggctcaaatagtcagtcagttaaagat

SEQ ID NO: 358009 - DNA, 278 bp, Zea mays
gacttttattctggagataatcttgtattagatggacaaaaggatggtgaccttctgggtgttagaaggacatgtttgatgttgatggagtcacttggacaactgcactctaatgatatgactctgcttctttggagaggcacatgcttcaactaatatcatagagcgctaagacgatgcattcgtggagtcccgtcagatatctgacatgatgtagcaagggaatgtctgaagccagcggtctcactccggcacctttgtattctgcgaatcatgag

SEQ ID NO: 358010 - DNA, 151 bp, Zea mays
accgagcaataatagaatgagcattgtggatgagatgtacttagcgtccctaattaacaaaggtcgtgaggcatatatcagtggaacaacaaacccaactgctcttcccgctgagacggtgtgaagatggctactattaatggtgcaaaac

SEQ ID NO: 358011 - DNA, 251 bp, Zea mays
aggtcacccgtgtgcacacgcagtcgcaggcatctcgacagatctgcgctaataattagcgctggtccgatgcgagatcgacgtgaatgattctgaatcctagaatgcacacaaatacagtacttactggcgctgcaaaaagagtggtagtagtacgtaagctggtccaatcggtacatgtttacttgcacgcaaacatatggagtggtagtggtaccgcctgcctgacagtggcgcgagcgagctgccac

SEQ ID NO: 358012 - DNA, 246 bp, Zea mays
cttgcaaccgccaatgcccctattgcctcgtcgttgccgatcccagcgcccagacgcccagatctcccctctcctcccctagccagccgggacgcccaacttggcagccttagctcgatgtccaatgcctaccgacgcggcggcgcggtggctcggcggggcaatcttcgcggctcgcccgtagcgacgcagatcgtcctccccgcagcccgcttccctccgtccctgcgcgccatccagcagcac

SEQ ID NO: 358013 - DNA, 239 bp, Zea mays
gaacttctcaaagtggctcggcgtgactcagtgagcggcaagggtagttaagttttgagtagctcagcttatgttgagaggaaagaggatccatcaaatctgttttatcctgcatcatcataacaagttgctacaagtcttgcatgttcgtgttgtttgtgcatttccgcgagaacatagtatttttatattcgaaccagttgtctgaaaaaaaaaaaaaaaaaaaaaaaagggggggc

SEQ ID NO: 358014 - DNA, 253 bp, Zea mays
ggagtacctcaaggtaaaacttgttttctcgggctatggtagttgttaagcaactcaaggccttgtataattctggtttaatttgattacagtccatatctatgaacgtgtagagttggcatttaaactaccatgcatacctatgcttctttgtccatatcatatgtactgtatcatcagatcacgatgtagctagtttatgtcttggaaccatgtgttttgaggtattctaatttctgtgtttggttttgca

SEQ ID NO: 358015 - DNA, 215 bp, Zea mays
cggcgtcggcggcgttgaagttgtcctcgggcttgaaggcgaggtgcatgtacatgacgccggtgctgcggagacctcggcggtggcgggcgcgtcggtggcgggctcgacgacgacccaaacgacgggttcacctctcgattatgtgtgtccttgatctaacatgtagctctcatgatatatacaaaccgtagcaatgtgcaagtattgtacta

SEQ ID NO: 358016 - DNA, 158 bp, Zea mays
cgaagatggcaatagaattggcatctcccaaatgggttccaaccgcagccgcatgtttggcagccttggacgccctcctcctcttcctcctccgcggtctcagccgccgtaaatacaatctccccccaggccccaagccctggcccatcataggcaac

SEQ ID NO: 358017 - DNA, 208 bp, Zea mays
gtgagctctcaggcgttggaaaaacgggactgaaccagaatggatctgtccatagacctccaagggagagaaggaaggacgtggagagtctacgggcgcaggaggaagaggatgcgtcggcggtgcagagcagggcagctgtgccacgagacatcttcaggcttcggcagattcagaggagccgtggcctgggtgtgggtggtgccgc

SEQ ID NO: 358018 - DNA, 121 bp, Zea mays
  unsure (1)..(121): unsure at all n locations
atgctttaacagctgaactctctgatgataggctaagtcatcaggacgacttagttanatacagagatctcgaggagatgattggaaggtatgagatggagatgagttcatgcttgtggat

SEQ ID NO: 358019 - DNA, 383 bp, Zea mays
actcactctctctctctatctccctctctctagctacccatgcaacagcagccgccctcccatggcgctgacgaccgagccctcgcaagtttcaatcctcacttaggcagatgttccaatggcgtctaccccacctctactgcagtaaggtgtaggactgagagatgacgatcgtagcagtgctgtggtgccaacacaagatgcagttagtcgacgatctgccagctgatggactgatccagtggatgctcgcccagcgagtagccactccagcaaacacgatctaagtgtaagatgaaggtactcttagatgattggtagaagtgtaatgggcttcatcctgccaccgggataacggtcgaatggttatgcttccccgagag

SEQ ID NO: 358020 - DNA, 294 bp, Zea mays
gtgcaccaaaggaaccttctctcctagatgagagatctctattggcttgcattgtacgtgcagtttgtgctgggactgagggtggaatcagggataagtcaatctgccaatgggcttgggaaatgttggccccttcatggcatgctatagagcatacggaactcgcgatttgtggtagtcatcaggtgttggattagaattcacactcggtgaccgcattatcgcataactgtgaatgctggcgactcgctctacactatgctcgtcgtatcgtgaatctggaaggcgatgtcg

SEQ ID NO: 358021 - DNA, 119 bp, Zea mays
cgctcaccctcaccgtgcacgccaccaaccacaacgtcgtgcccgtgcgctacgggcgctccaccgtctgcatcctctacggcggcgcgcacctcggcaccgtccgcatcgacagccac

SEQ ID NO: 358022 - DNA, 100 bp, Zea mays
tgagcgatacgtgctcacgcgcgcgtccaggaaacgcgagctcaacaagcacgcacggctgggctgccaggatcgtctcgctgcggagctgcaagggatg

SEQ ID NO: 358023 - DNA, 277 bp, Zea mays
  unsure (1)..(277): unsure at all n locations
caaggacctggccaacaaggccgctacncaagtgcagcagcagcagctcgtataacgctcttcctctccctcctcacccgtgtacttgattattaaagatgcaactgcagacctctctgctgtctgcggtgatgagtcagaactgcgtcctggtcagcatcttcacgacgtccaggtctatctggtgggccgtcgaggggtgcatgcttccaaaggtccagcgtgcatagactgtagtccacgagctgatcccgtttctgtggtccagtcctgaaat

SEQ ID NO: 358024 - DNA, 265 bp, Zea mays
  unsure (1)..(265): unsure at all n locations
ganaagcttagatgtagaaggagctgtgaaaccaattctctgagtgcgctgctaggtttgtgaggtagcataagttatgttcatgtttctatacatcctcactatagaatagatgaaacacactttgttgtgcttagctcctgctttggggagaaaactgcatgcatacatttagctttgactatgtactttcaaaattttgttcagatttcatttactgaatttgcttctataaaccagactgacatgatatgataagcggggg

SEQ ID NO: 358025 - DNA, 217 bp, Zea mays
gcggatcacctgacatgtgacggtggccgaagtactacgaactctaatgacgttggaacggtaaggatattgtgatggcctgttagtttatgggaggtgtactgtttggcattgatctcgatgtaaacaaacaatgttagccttgccccatggggaagattaataaaacaaggaaaaaaaagggggggccgccgattatgaaacccgacgacccggg

SEQ ID NO: 358026 - DNA, 328 bp, Zea mays
  unsure (1)..(328): unsure at all n locations
tacaaaaggtctatgcgcatttagtcctaattctgaagagtgttatttggctctcccagcaagcacatccattggatctgctttagtatacaaagcatcaaaaccggaattaatatagcagatagatgctcatctggctccgttagctgcactngttttttcttgaacggcatgtacctggcaacggcttctgaaaagggtaccatgattagggtgcatcttgttgcacaagcaaccaagtcacatagctttcggcgaggaacatacccatcgacaatctattcactggcatttagtccctctgatgatctgcctgactgtcttgttg

SEQ ID NO: 358027 - DNA, 192 bp, Zea mays
cggaatcggctcgagtgaagagttcatgagtctattcattgatggaaaagccgaattatatgttgcataatcatacacgcaagtcacagaattatgtgtgtactatgaaatacgctctgacttgtacactgtaggatccataataatttatcaaatcaaggagaaaacattagccagcagctacgcataata

SEQ ID NO: 358028 - DNA, 101 bp, Zea mays
ctcggagtcgtctcgatgcgtcactattgttctcaatgatcaggcatgatggtagcagtcaggagtactgtcgtcatagcgtattagcgtgcgagaacgtg

SEQ ID NO: 358029 - DNA, 331 bp, Zea mays
  unsure (1)..(331): unsure at all n locations
cgcttctccaacctccgtttctaatccgcgctgctaatcccactcccagtcccagctccggcgctgagatggacagtagcagcctccaatccgcggaactcttgaagtgatgcgcagcacctggccacggatgccggcaaggaggtcccaaccaggtcggcctcgtctaccagctcaacatcgcgcccaagaagatcggccctgatgnagagatcttcgtggtcgacctcaacaagggcgagtcacanagggcgtacanggaagccgatgcacttctcctcacgacacgattcctggatcgcacggcagacgatccgagatgcatcatcga

SEQ ID NO: 358030 - DNA, 371 bp, Zea mays
ctcatcttcttcagatggtatcaatgagctaagatcagcaactgcacatgccttaccctcagcaactccaaggagataccgcactctcttctgaaggaactggttttggcatggtgaactggagttgttttaacctccatcatatcgagccctttaacatcaaaatcctgcaccacaggtaccttaggagaaacaatgagctcccctggttcttttatcatatcaaatgtatcacagatatcggcacttccagatactttgatgtcccactagaaggtgacagattttttgtatgtgtcacgcctgtgggagaactttcaagagtagttacaacctcagtatgcacagatttaagttcgccttccaatgaa

SEQ ID NO: 358031 - DNA, 133 bp, Zea mays
cgacgaagttagccgccgagctcggcagcgttttgcgcgaaggacgtacgacgacgcggacgcaccgtcaaagtctacaggctgcgcaaatcactttctcctcttaatccccaagccgagaacctgagggggg

SEQ ID NO: 358032 - DNA, 112 bp, Zea mays
  unsure (1)..(112): unsure at all n locations
tgcagagagtaatgcgtnttcagacttgttccggcattcatttccagtgccttgcatgtgcctctattcctcatttctcaatccccaatcccaatgtcttccacacaacata

SEQ ID NO: 358033 - DNA, 310 bp, Zea mays
aagctttacatggactaagcctccatttgtttttgcacctcgagtttttgatccagcagttagcatgacattcatccgttggtgagaaagaggcttgccgggtttttattggcatatatattagttgatgggcaccctttagtttactcagaatgtgatgacgctcggctggaaagatcaccgtgcgtctgaagcgttactcatcagcagtacttatgtcactgaaatcgcattagagatgtgagatacgcctctttgttccgcgtactgagctcgagggatgcacatgatcgcgaatgtaacagtgtgt

SEQ ID NO: 358034 - DNA, 333 bp, Zea mays
  unsure (1)..(333): unsure at all n locations
ctgagcanctcctcatcctattctcgcgcacggcgtctcncttctccaacctccgtttctaatccgcgctgctaatcccactcccagtcccagctcgtccgctgagatggacagtagcagcctcaaatccgcgcagtcctggagctgatgcgcaaaacttggcaccgatgccggcaggaggtcaaccagaagtcgcttcgtctacagctcacatcgcccccaagaagatcggcgttgatgaggagatcttcgtggtcgctcaaagggcagtcacaagggcgtacaggaaccggtgcattctcctcaggcacgttcctgatgcacgcagagatc

SEQ ID NO: 358035 - DNA, 332 bp, Zea mays
  unsure (1)..(332): unsure at all n locations
tccanaatccccagaacctgacgagctggagggccgatccgcggctcnccggcgcctgatccgagcagtctactcggcccagccggggatccaagcgggatggggtacttgagctccgtgatcggactacccattgatggatcctccgtcagcggcggcggcttcagccaagatggtagtttagctatggcatgcaagcttcctggtacaaggcatcatggagactttatgagcaaaaattgatttgtgatggtcaatattggtctttggagtttgatgtcatgtgtctaagtacagagtatttaagaactgtcacatctgtagtctcaagt

SEQ ID NO: 358036 - DNA, 335 bp, Zea mays
cggcacggcaggcgccatggatgggctcgaggtagccctcaggatacgggagctcagtaacacctgctggctgctggtcctcgtcgccgtggaagccagcggcgtcgatgacaccgtgcgtgatatgtgccggcgagcaggagtcgacgggctcatccacaagccatcacgctgccgcgctcggagctcagctccagagagtccttcagaacaactgatccaacctccaaggaacctgtgtgtcgatttgcagccttcacattacgccacgtcatgatgtagctgtgtagagactcatgttgagcgtctctcatcgcaattatgttgaagctgta

SEQ ID NO: 358037 - DNA, 266 bp, Zea mays
tgccgtgcgccttctcgctcctcatcgctcgcggccacgaccgggggaccgcagccaccgtacgccaggtgcgcaggtcttctttgggcccgtcgccggcgacgagcacccaccatgggcgtccgagtctggaatcctaactgatcggaatatggtaaagtcaaagatcaggcgatgacggcgcgcagatgctgatccagggtctcagggatctgctctggatcgctgcctgtatcggtgcatgcagctacatagaggaggacgtc

SEQ ID NO: 358038 - DNA, 281 bp, Zea mays
  unsure (1)..(281): unsure at all n locations
catgaaggcatattcacggtntagtatcgacatatcaaggggaaactctgcgtaggggcgggctacgtcttgcgtagcttgacatctttctgatgatgcggtcatatgtgaggacaggcgatgacatgccgtggcaatgcaaacaattgtattgtgaaagcagcgggcgataangttgtagtcagtgtgagagttggtgatgcgatcatgatcctgttagctagagtagctcccgtntgtgttagccctgacgatgtnttgcaagcgcatgttccgactct

SEQ ID NO: 358039 - DNA, 142 bp, Zea mays
  unsure (1)..(142): unsure at all n locations
ggacaactgaaggcgaaactagcagagttgaggacacgactattagagtgtccanaaggttccagcggatgtggagatggttctcacgtcacaaagtctgggcatggtcgtgctgcactttattggatttcccagtgttgga

SEQ ID NO: 358040 - DNA, 207 bp, Zea mays
ggctcgagctcgagccgatcaaagacagctactacaatttcctgtgtccttaactaaggaccagcttacatgtgaatgaatgtgaatgttttggacattaaaaaaaaaaaaaactcgggggggccgccgattagtaaccccgtcgacccggaatttatttcgggccgggtccctgcgggggtaccagtttcccctaaaggatcggta

SEQ ID NO: 358041 - DNA, 327 bp, Zea mays
attcggctcgagcgccagacttgccgtactactgctcctgtactccagcaccagagcatgcgtgttgccacgccgtcgactcgactcgccaccgcgtctctcgcgatcggagcagccatggccatggtcggccacgtcctcggcgcgcgtgaaggagaacaccgccgccgccaacagcgccgaatccgatcagctcggcgcttcaccgtcgacgagcacaacaagcgcgagaacgcgctgctggagttcgtacgcgtggtggaggtcaaggagtaggtggtggccggcacgctgcaccacctcacgcttgaggcgatcaagacggga

SEQ ID NO: 358042 - DNA, 246 bp, Zea mays
gacaaaatcatgatgcaagggctggcggaattaagagtgagctatatttaccagctgagtgtttgagcagggatttctgggttggtgggcatttttgagattctttctgcacaatgtgattgtcctttaagcaagattttatatcagttgggcgagggttttcagttttctcatatattacgtcttccagtttcactggattgtttgtggtgcacctgatagcatgtaagatattgcctttgatag

SEQ ID NO: 358043 - DNA, 334 bp, Zea mays
  unsure (1)..(334): unsure at all n locations
aggagttttcagagctgcagtacatatttttggagtacctcttttgctgctccggaaactctaaaaaaacaacctagacatggagtctggagttatttacttaccactgccaagattccagtggttataagaaaaccatttaaatctggaacaaagctgctccacccgagttttgaagtggagcagagccatgccgaacacgcccttaatttattctgtgccacgtttaacttgaggttgtgcttatttacgatggacacctatacattccatttctagtctanaataagggtgttgcatctgacaggaagagaaaaaaattgtaagttgataa

SEQ ID NO: 358044 - DNA, 206 bp, Zea mays
catccatcctggcgtcggtgtcttgccctgccccagcgccgccgctcgttcccccatcccgaagcgccggctcttctggctccgtcgactgtggtggtgctctgatccccgccgttgaactggccataggagagcatagacgaatgggataccgtcagtgcgccagtagatatattcaatctcatctcggcttgcgatatctttga

SEQ ID NO: 358045 - DNA, 166 bp, Zea mays
atcatgtacctctagggtctactccccctaaagtttgtgccatactcatgtgtttccatttgcatctggtcctctttggatgcaaagtagcattggataaagctagggttttgtaaaatatgttgttttttaaaaaaaaaaagataacagggaagggcaagatgct

SEQ ID NO: 358046 - DNA, 354 bp, Zea mays
  unsure (1)..(354): unsure at all n locations
actgggganaagatccaagatggtgttgaccacagcacacatattgttagtcgcaacagacccagtttagctgagactgaagataattgtgcattacgcgaaactgacagtgaagagaattctcccctaggggaagctgaccgctgcaagctttcatcagacagtanaaggcgacaagaaatagttgcatcagatggttttatcgctgtaaagaggaaaaggaagcaaccagaggaacacataacaaataaaaatctgaggcacctaactgggggagagaagcaaaagaggaacttaaaagagaatgtcagcattccagaccagaaggttttggtccaagagcaaaccagacgt

SEQ ID NO: 358047 - DNA, 176 bp, Zea mays
cgatgatgtggcctgctttgccgatctcgccctcgtctaccaccgccgtgggcgtgccactacctcgactcccactgactcggggcccgtcaacgagcgcggcttgcttcgctgattcgccgtcgtctatcaccagtatgagcaagccatacccgcggctcccgacgccccagcag

SEQ ID NO: 358048 - DNA, 344 bp, Zea mays
  unsure (1)..(344): unsure at all n locations
tattgttatgatctttaccttgcatacatatactatattagctgaacaaaaaatgttgtaattaatgcaattagaattttgattcaagtctggttatttctttaacatgttttcttactgtcnactatctccgtcattaccaagcctatcgaggaagacaaatgggacgtaccacaagtgccaatggaggaagattagccagattctccaacatcgatttttacacttcatttgtttttgaattaaatttctaaagatattgctgtattttattgggcgtgaacttttagtgccaatattggggtanaataggttcccagtagattgggcccccaatgttctga

SEQ ID NO: 358049 - DNA, 303 bp, Zea mays
  unsure (1)..(303): unsure at all n locations
tgtgcactgtgaccatcggtcgtggtaagntgtcttgatgatctgcatgctgctgctgctgtaatgacctcagattttcgctggggacttgtgactgagcgagcactgctgacactggcggaggttcaagattaacccaagagatggaaggctgaactaagagcggttggatatggcatgcatgcatgctgctgctgtgcatatcttaggaatcaatcaatcagtcagtctgtactgaatttcttcaagtttgctcttttgttggcatcctgccatcgcagggaagaataatgggtggggtga

SEQ ID NO: 358050 - DNA, 259 bp, Zea mays
tcgagacctagattatatccctactattccatcccattataggcgacatgtccctcagaatgcatcagatacatccaccacagggtcgagtagtaggaacatgaataggttccgtgatgatgtatcgaaggtactttgggagtcgaggtgattagaagaggtggttcgtgtcatattttgaatattgtgtcgtgctagttttatgcaatttatggattaaacatttgagaccattttatgcactactatgatggaaata

SEQ ID NO: 358051 - DNA, 303 bp, Zea mays
atatatttggtcgtctttcactctctatttttattgctgcagtaatacatgtcaatttccttgtattattgttactgcacactaactactaaacaactcgagtcaactgtctaaatatcattctttttatatgctatagttttggttatatgttcctactcagtattgttgaaatttatttcatttattgttacccttaaacatggcaagacatacaatagccatcacaccccttgttttaaaggcgtcacctaggcgacgcctaggcgtccaggcgcctgaaagatccaaggcgtcaccgtc

SEQ ID NO: 358052 - DNA, 177 bp, Zea mays
ctcgatctcgatccagcgaggcggcgaccctccctcctccccttgcttcgctcgtccagccctgaccactcgcatccccgtcagtcatggcagcggcagcaggcggaggcgcggtgcgtgcgctgtcctagaaggagcatgacatacagatgatgctcgccgccgatgtccaccttg

SEQ ID NO: 358053 - DNA, 262 bp, Zea mays
agctcttagaaccctgagttatacctgccattagttcatatcgtctggtaagtagaatctgtttcacttcagtaaaagtacagatcgtctgttgttttatatcagcagtgatcagaaaatcttggcatgcattactttgtttcagtcccttcgcatttcttgtcaatggcagatttctcccagaagaaaatctgtgtctgaaatttgctaatatgaaatagtacagtatgctcaccagtacttgactttgctggctcaatgg

SEQ ID NO: 358054 - DNA, 268 bp, Zea mays
gtgaaaggttcccttttggagatcaatgaaagattgatcaaacaaccagatcttcttaataccgctgctgacagggaaggatatatagcagtcttccagccgaaaccagctgactggctcaaaattaaggataaattccttagttatgaggactacaagaacttgagaggagtatgctgacacccaaaagaagatgtttcgaacatgaaggcagcgcttaggttcgactcaaccattcgtgtgatgaaatctttactgctccagatat

SEQ ID NO: 358055 - DNA, 264 bp, Zea mays
gtggcctagccggcgtcgtcctccccctctctcgctcctctgatctcccctctccacttgagaagaacacaattaggaaaaaaaggcaaaaaacatttaccttttttctatctgtatattatctgaataaatcaagaggaggaagaggggagggagcgagggagggggaggagtagcaaatccagactccatagcaaccagctcgcgagaaggggaaaaggggaggaagagcttcgcttgtgtattgattgctcgatgctccag

SEQ ID NO: 358056 - DNA, 261 bp, Zea mays
atgttgagcagagagaaagcaaacaaaccgacggaagatagctctttgctgcttacttctacgaacagccaacccaccttgtccctgctctctcagctgaagcagcaaaacaaaccagataagttaggccccacactggaaaatgagtcaaacccagacacaatattgaaagcctggggtggcaaccagcctagccacaagagcatttcctctacagagcgccatgatgctgaatccctccaatcagtccttcaaaatttc

SEQ ID NO: 358057 - DNA, 263 bp, Zea mays
gctcgctggagccgataaggctgccgcgccctccctctctcctgcggtgctcccatggaatcggcggcgattgggtcgcagtccccgctctccttcccctccaacctctggtatctgctcatgtcatatttatggggtaaaaaaaatccagtacccagctgtcagtaatgcgcgggttgcacgggaggaacacgacagtggacaagagtgtgtcggaccagctacacgccagatgggctgcgacgttcgacaaggcccagctg

SEQ ID NO: 358058 - DNA, 264 bp, Zea mays
gtttggatctccttatgttgacccaagttctatatcctacaggtttgttttaaatttggtatacttttatgaatgcaattctcacttttcgagaagtaggacaatttaaagtctgactaaaattattttaaaaaggtattaatattgaggatacagaataaatatcattatattgattataaaatatattttggtagttgacttagttggagacataaatgttaatgttcctctatagttttagttaaattggatctagtttga

SEQ ID NO: 358059 - DNA, 260 bp, Zea mays
cggcaccctgcgtcttcttcctcgccggcgtgagcttcatccctggctcgctgcgcgcccatctctgatgtcttcttccccagctcgatctttcctccaccggaccgtgcctctgctcctccctggcaccgatggccgcgcccctcatctacctgctcgccaccatccggtgcttcctccggtggagcagagggcaactgtagacgcggcagcaaaaaccactgtgcagcctccttcaaccgaaccaagcaccgcccgct

SEQ ID NO: 358060 - DNA, 239 bp, Zea mays
gtgcaccatgcgtcaccagtcattctcaccatggtcagcagcttcaaaaacatggacgcccaagcctttttcccatctttcacgcccacctcggtcttcatcctcaacctttgccagaaatttggttaaatggacgaaccagaagatctccagaattttatggatgaagaagaaaataaagtcgaagagtgacgctcgctagatgctcgacgaaaggcgtgaaccgaagatttatcact

SEQ ID NO: 358061 - DNA, 246 bp, Zea mays
ggccaccgccccatttagattctgttcctcctaaatctcctccccgttggcccctgcgctcttcacaaaatagctctctgcctcacagcaagcctgtgcgtctcatattcaaggagcctgcctctgaggtggttgcaacttgcttgggacgaggatttggattttggaggcaagattggaccgcagactgtgagatccatccaatccaacaaccgaatccaatccaatccaatcagagaaaaagaa

SEQ ID NO: 358062 - DNA, 255 bp, Zea mays
agatagagcagagccagcaggtgaaatctgtgaggaggtaactcatcagatatggatgccaagcagttcccaaaggcttccctctcttcagctgtcatcttcggtgtttctggctctgtctgtcgtgcacactccattgacacatcactgcggtccacaggaggtgtcttcctcctcttcgagtcagccctgtcaacctcaacatgtttctcagtggcagcagaagccaatttcttctcaattggcctccatcga

SEQ ID NO: 358063 - DNA, 253 bp, Zea mays
cttcctgtccttgggctctggtcttgggttccctgcatgtgtaaggtaatcctcgagtcttcaagcttgtgcagtcctcttcccagccaccaactcggtcagttttctgcatagcgcgtcatctttctgccagtggctaccacagccaccaaattcccacctcactgtcgccagggcagctggagcagttgcacacccaaggccatgtcaccgcagaacgcagccgtggatagctctaccgctggccatccaa

SEQ ID NO: 358064 - DNA, 253 bp, Zea mays
cgctaactaagctgacaggtggagcccctagaggtgcctcatggtgggctaatgacgtaacggtgtgacatgtagcttccgccggccttagagccttcgtgctatggtacacttcgctgcgcttggacggaaggcggtcgccaccgttggagccttcgcgctatggtacccttcgctgcacttggacagatgagtggcgatggagactctagggcgacatagcggcgagggcctcgattgctggcgatcgctc

SEQ ID NO: 358065 - DNA, 251 bp, Zea mays
agtatcttgattctcgtatttttatctgattagaaataccttggttccaattccttttattaatgcaatgcattacaaatgttattagaaataccctgaacttgctggatttgatttttggtgtatgcgactagtggacaaacggatatatccgcatatatctgtgtatacgggttttttttatctgtggcggttaacgggtatgtatggattcaggtattggatttaagtcgtgggtatggatgtccaga

SEQ ID NO: 358066 - DNA, 251 bp, Zea mays
gaggtgatggaggatctaggtgctggaggcgaagacgcaacagagctcatgcatcttcttgatgcaaacagtgacggctccttgagctctgacgaattcgagtcattccagagacagatcgaagtgatgagaaacttggaggacgatgataaccactataggaagatcttgaaggagaagctgcacacgatcgacagtgcaggtctcatccatgtgtaccgcaaggagctcagtgacaaattgcttgtggg

SEQ ID NO: 358067 - DNA, 239 bp, Zea mays
acgacatgctcgtcgatctcgacgatctatcttccaattacgtgctacttgtgttgagctccaaagccccctgttgaactcttcctctggaaaccgccttcgagcacaacccctgccaagtgttcgatgggaagtttgaaccaatactcatcatcgatctgcgattatcaaatcattatggtcatgataagctgatgagttattcagaatatttcaatcgttgaataaattaatgtgct

SEQ ID NO: 358068 - DNA, 249 bp, Zea mays
cggactgaagcagaaggcctcggagctgctcaagctgtgccgcctcaactacaccgacaccctcttcatctccaagtgcaaactcacaaggacaattcagtgagagatgcaaatgatgctggtctgatctgatttggttcgatgatgcgtggtttgtcgattgaccttgctgagttcagagttccaaggaaatggagttggcaaattgacgaatggtaatgagcatgtatagataaacttgcagtttta

SEQ ID NO: 358069 - DNA, 252 bp, Zea mays
ctgttttctctaggtccagccaagctccttactgccgagctccctccccatcacgatcatgcccctggtagtgccgtcccgccctagcggagctttttggaattgtgatattaccaacactggggcttctgaaaatagttccgtttcttattacaacggatccacgggcgctgctctccccgagcgctcctcctctcctcgagcaggaggctgagcgcggttgaggagcctctcttcctcatgccgcccgca

SEQ ID NO: 358070 - DNA, 251 bp, Zea mays
gtggcccttttcgcacccgcgtcttccaccaccatctcggttcaagctcgctcattcctcttctgcaagctaccgatggcaaaggcagcggcatcaacgggaacggcaacgcgtcccatttggaggatgccatctgcatccaagataagaggatgatgagctgccttgcaatgagtgctcctcctgctgctgctgatgcggaaggcgagcacgaggagcagcagggagagggcggtggtggctgtgatggc

SEQ ID NO: 358071 - DNA, 249 bp, Zea mays
ctattgatctgcgcagcatttgcgcgtcgtcgtcgaaacccgcgccccttgtcgtcgtcacgcttcgcgcgtcgtttcttgacaggaagccaaaacgacatgcatgcatgcacaactccactcgggtttcagccaggaccgagtgatgatgatcgagcaagtgatgtggtgccaaccacaagatgcagttggtgggcgacctgaagaatggtggacttacccagtggatgctcgccaagcgagtacccc

SEQ ID NO: 358072 - DNA, 287 bp, Zea mays
cgtaaccaggtctgagtttccaagtctgttgagccaaagcagaagttccatgatgaaggatcattctgcactgaatcgtcaaaagtctcaggcaggcagattgccagttccttctgctgctactgcaaaccaatctggcaaagggaaagcagaggctacaaacaagcagactgaggcaatggacttcagagattggttggatagtgaatgggccaagcttactggaacaaatggttataactgtgtcttgcttcaagttaggataattcaatcttttgtattacttc

SEQ ID NO: 358073 - DNA, 282 bp, Zea mays
gtcggagcacgagcaccaaaggtccccgtaccgcccttacctttgctctccttttcttctcctgttcacccctcgtgccataactgggcgaccgccgctcccgccctacgccaggtgcccagatcttcgtcggccctgcccctgcttccttcaactccaccaccaggcgatgccctagacttaattgaatgggctctcttctcaccaggactggcgtcctgccatggctccacgccaagattgttgatcccatgctgcaggtcatcagaaggggagcagaac

SEQ ID NO: 358074 - DNA, 282 bp, Zea mays
cgcatcttcccccagctcggaccacgccctagttcccgctccctcctgctcagctctccagcacgcgccctgcttcctcctcgccggccaccaagaagctctctccgctgcagcaccatgcgcgtagcggcgtaggacgttctcctctcgacctcctcccacgctcggctcctggatcggatctccgggccgtgtgctccagtgctggcgcgcgcccgtctcccatggcgctcctctctgctgccacgcccatctccctgctcgccctctccatcgccgtga

SEQ ID NO: 358075 - DNA, 281 bp, Zea mays
gagagacgtcagaggacgtgctgtcccccaaccaaacgtacccttagctgccgacgttggaacaaaggcgcttctttggccgatcgttgaatgtggggcgagcatatttagttacaggcttaaaatcactctctgggatgtctttccacacctgcagaatttcactgcgaaccaagttgattgaatgaaaagcgggagcagaggatgtccatttctgtcaaagatcgatgacatattgatatatgtgatagggttaatagttactgcgaggtcgaatttgg

SEQ ID NO: 358076 - DNA, 276 bp, Zea mays
gcggatgaatatgcttgaaacaattgtttggtcggaatttggcgcaactaattgtctggttgtttgagcctttgaggcgaacgtggaaatttcaataatttccgtccagattggatccgcaacagtaggcctcgttgttgatttctggaaaagaaaagttaggtctttttttttcttctgttgcttgtctccgagcaattaattcaaccttttcattgaatgtggtttggtattgagtcgccggttggctttgaattcgatttcctcagttaggtt

SEQ ID NO: 358077 - DNA, 264 bp, Zea mays
gcacggctaattgtttgccatgataattctaaaacctgtttaatatctcagagaatctactgcacaagtttttttttcccttagcaaaatgctgcataagcccagtaattccagagatgattgctcaaaggggccatcatcacaggggcagatactagtacaccaaccactctttccccctttgcaacaacagtcatacaagcagcaaactcaactcacagagagaggggtacaagaaatcaaacatgtcacccttagtaattt

SEQ ID NO: 358078 - DNA, 277 bp, Zea mays
ggagggagagggaggagtcactgccgatggttgtcgagcaggcggcggcggagtgagctcagctgcttgatctttcagtcttggcttcctgagaagcacgcgcgcctccgaaaagtgtttctactctgttactgcgccttgtcagtgatcgtgtttttttttttggcgccgtctataaatagaagtgctttgggcgtttacagctatgaaatcaggattatcatccgtaactcgtaagctggacgccaatgctcccgcccggataatagaagcagag

SEQ ID NO: 358079 - DNA, 117 bp, Zea mays
tgtcgcctctccgccgctacgagacgagacctgcgctacaaatacaccgccactttggccgcgtcagccgccgccacttcccagatcccgatgtcctgcggccagattccacacaac

SEQ ID NO: 358080 - DNA, 279 bp, Zea mays
attgcagtgtcaacacggaggtgatgcagaacaccattgcgctcgagcccctcgccaggagagtggtgagaccgctttttatctttcactatgtacctcccattttttgcttgctttcagtgctttgaatcatttagtaacagttcgttcaatagttggtatgatgtgcgccctctgcgtagttaaattcttccctgctgttgactgcattgccgatacatctctgtggcctgatgacactctcatgttgattttgggtcattcagtcagttggcttat

SEQ ID NO: 358081 - DNA, 270 bp, Zea mays
aacgtttaacaatatctgtaaaataggacggaacgtttaacaatatctgtaaaatagaacggataaaactgtaacaaatggaataatccaatgaagtgtgtggctttgtgcttcacttagagcaatgcaaagttcatacctgttgcagcatcccttgtgtggcaccaacttctgggtaggagctgactgtgattggtaggtatgtggagctcaaaggctcatgtgactcagttgaattgaaagcactcacaggaggtgacggttgaccag

SEQ ID NO: 358082 - DNA, 272 bp, Zea mays
accaaatcgcacccaacgaaactctctactggggagactattcaacaaagatttcatttctttcttgtttatgtggcatcttagaaacacaaatatgaaacctacccattgagaatagcctaagggtgttgtggcttttgaaaaagttgtgtggattgtggaaaagcagttgtgggttattagccgaggtcgcgctcagcccaggcagtaaacctgtgctcgaggtcgcgctcggccgaggcagtagacctgtggtggccgagccgcgctcg

SEQ ID NO: 358083 - DNA, 263 bp, Zea mays
ccaagatgcaatgtgattttttttgtttggatctgtgttttccaatcctctctgtgagtctgggtcagcaagcaattgagctgatgcatcgaaattttggctctaaatgggagtggtaagctgctggggaacactgtatatcttgttcaaaaaacaagagtactgcagctgctggtggctgtctcctttcagaacacttgcctgtgtcccttttctttctttttcttttttgtttgagcagtagctgggctgttggtgatgct

SEQ ID NO: 358084 - DNA, 268 bp, Zea mays
gtactcccaaaagcattgaagctaacagagaaaatcatgcccagaagaagagaaacgcaagcactaatatgctgaacgacatgtcaatgctgcccaatgttacaaatgctccaagcaagccaccagttgcagataatgcaaacaatataatgcagcctttgcaaatggatcacatggaagaacgtcctgaaggtatcagtggtattcctcgatcacaacaccacccgagcaactgggtcggtgctgatgataacgacgatgacaatga

SEQ ID NO: 358085 - DNA, 268 bp, Zea mays
ctcagtaccatcttccctacttacctaccccgaacaacatcttatcacaagatgacgtacttggccttacaaccacgcaccagcgacatcattttccaaattatccacttctagcagccaaacaaacatggcccgacgattgctagcatatcccggtgtgccacagaatacagaggcggatgtacactacacagatcaacttaacaagaaggagctatcctcaccatcgaaaatgaatttgcttttgcgtatctgtggagggcttcgt

SEQ ID NO: 358086 - DNA, 254 bp, Zea mays
gacattggaagtcctccagaatgcttgacatttgaaatacactaatcgtatggatgattaatgtgctgggagtggtcatgattcaggatgttctcagtgggagagagatcaggtcatgtcggcctgacagtgtatgaaatcgacgacacactggatagcactaggggagggataaaatggatcttcttgggtgcatttgttgcttcaaggaagctttatctgctcaacatagcctattcagacacccagacagt

SEQ ID NO: 358087 - DNA, 262 bp, Zea mays
tctcttcatcataccgagcatggtgttcctaagcaaaaagacatcaccgttccgcaagagaaaaccatccataaaccgcttgtagcatccaagacacaaaccaagaccccagagaaagataaagacaaggaaaagggaaaggagaaggagaaggaaggcagccagctgcacaaggaaaaagataaggagaagaaagacaaggagaaggaaaaggaaaaagataaagagaaggaggatcataaagataagaaagacaaggatc

SEQ ID NO: 358088 - DNA, 257 bp, Zea mays
gtcaccagtgcttgcttctcccgtacttcttcccggtccccccaccgcagctgagctgcggaactccttactcaccgacacttaggtcccacccgcttgtggccccgccaccagtgacccaaaccatcagagcatcctgtgcacggagcttcctcctcgaatgcgcactaatggtggtagtaataattgctcattagtttaatgagcagcaggtatgcactgtgctggctgtgctgtgctgttcctgtgcctccatc

SEQ ID NO: 358089 - DNA, 256 bp, Zea mays
tcaggctcaagctaagtagtccaccggcatttggaacttgttcgcgagtcgcgactcgcccagccgccccttccgagttccgacgccgataccgtgactccgctcgctccattccgctcctaccgccgctggccgccgcaccattcgatccctgtttcttaatccggcggccggcctggagccctcagctcaacactcggcagatcatctcggctgttcgcctactttcttcttccccacggtcgttcgcgtgcag

SEQ ID NO: 358090 - DNA, 255 bp, Zea mays
gttctagatcgcgagcggctgccctttttttttttttttgacacaacccgggtccttaaattttagggggatatcattgccgattccccccgaaaatttgccggcaaaaaattttgggaaccagtccttgtagttgttaaaaaaaaaagccaaactttgcagcgttttgccgaaaacggcggcttcagtcgtcgaaggggctgagccccttttcctggccggacccctcttcgggccccgaggcttttttttttt

SEQ ID NO: 358091 - DNA, 282 bp, Zea mays
gcaacgtgagcgttccactcgtcccacctatttctcctggaaactctggctcctagtttctgggatcttgtggtgagtgcaacatcccttgcctaaaaaaacaaaaaaaaatcactagttgattgtactatctaccaacttctaaatggtttcaccttagctttctgaataataaagcctgaaacttcggactcgtctgaagtttcagaggtactggagttctgctatgtatggattctgttaagcgtcaagactaaggttctgttggtgatgaattgtagt

SEQ ID NO: 358092 - DNA, 287 bp, Zea mays
cagcacaggcacacacacagcatcaacacaacctcagaggtgcactactgcgagtcaatcagcgagcggtaggagaatccggacatggcggcggcagcgagggcgtcgtggatggtggcgatgagcgtcggcgcggtggaggcgctcaaggaccaggcaggcctctgccgctggaactacgccggcgtggtcggtggaggagtggacgtggaacacgaacagctcctgcgcgaagagcgccgccaggaggagcatggagatcgtcgtcggcgccggcgccgcgtggg

SEQ ID NO: 358093 - DNA, 279 bp, Zea mays
agaattcacactagatcccaagtacagtgtgttcattgatagtattctgtacatcatagacatcatgaatcccgaccagtcgttgcgaggcccacttctgaaaggtctactaagggcgctccggcatgtgaagtcaccactggtatgcgccgctgctgtttgggccatctcaatgttctctggatcactggaagaggtcagtgatgccattgttgcactttcatgcttcttcaaggacctgcttgatcgacgtaagattgagaagctgatacttggagg

SEQ ID NO: 358094 - DNA, 282 bp, Zea mays
ctctttatgaagatattctttatatggctggtcagctgggccttgaccctcctacgatgaagctctgtcttggaggtccaagagcggaactagaattagcactacaaaacagtgaagctgtggccaatgcctttagctgctcaatctatatctcggcaatacactttctggtgtactgctctgctcagttgacgtccagcgagaaggaagaaattgaacagacattgaagagttcttatattactcgtttggatcgctcaaaaggtggatcatatccaactg

SEQ ID NO: 358095 - DNA, 279 bp, Zea mays
cctgcaccgacgccgcgacaccgagctcgcccgagctgcaaaccgtcccgcgcgaccgtccgctttaatggagatttaactcgtccgttcctctttctccccattcctctccccgttagtggtgataatggcgacgttaatggctttaaagaccgccgtttctctccccgtctctccctctcccctccctctctctataaagccacggccgaagcccttcctctacattcccctgctcgccatccctcctctcgcatactgtgtttgttgtgcgtgctg

SEQ ID NO: 358096 - DNA, 272 bp, Zea mays
gtgctctcaagattggcttagaaacaaatataaatgtatatctaacatttgtttcttttgcattttatttcttttgcagttgtaagctaatttatttatgttctacatagttgatgacaaaactaaacagcctgccacattttggtcttgtctccaagacatgcaagagggtcttcaggaacttacaatatgactttcactttgggctcaagagttcagatgatgttcaccttttggctgcaacttgcaaggccaagtcaagttcaagaaca

SEQ ID NO: 358097 - DNA, 155 bp, Zea mays
  unsure (1)..(155): unsure at all n locations
accgcnaccgcgatcagcctctcgggtttctcggacgctccgccatcgccactccgccactcggtggttcgttggatcgacgccaccgtcacctcgcgtcgcgcaatagacccacgcttcttctgacgctatgacaagcaaggaactcaactttt

SEQ ID NO: 358098 - DNA, 274 bp, Zea mays
acgcgccgccccgggggatccgccaccgcctcctcctcttcctcagccgtggcggtgagcgcagcgccgcccccagtttagatcttgaggcggcgacgaagcttcaagcccacgcgcccctcgagatggggccgatgcggacgcggatccgaaactggaccatggggccgacggggtcgccgcgtggtgggtgtgggtcgcgctcaccgtctgcgttgatgtcgtcggcgtcggtctcgcgctcgtcgggttcctctactgaacaaggtttcta

SEQ ID NO: 358099 - DNA, 272 bp, Zea mays
ctcccttccccagccgactctatgctgcttgctccactgcgcaccgcctagctcctctccccatggccgagcgccctccttgctcctcctctccttcccatggcgctcggacttctccttctcggccatttcgtcgtgccctccctggttcacgcgcgtggcctcctgttcgccggaatgatcctcctctgcttgaccctgcgcgccgctccctggacgttctcggctcggcatctcccacgagctcgtcctccgctcgacctcacccaccc

SEQ ID NO: 358100 - DNA, 271 bp, Zea mays
ctcgagccgttgcactcactgcttcacaagttcctgctgtatccaaacttgaccatgacacattgcacttagtctggacagaagagaagttgcaagaacagcttgatgtgcttgatcgacgatgggagatttcaaggcgaagggcattggcatccttcaagtctggagataaagtagctgcttatcgttatgtgaggcagtctaaattattctcacaaagccggagcagatgcacacagttgttggaaaggattgaagaagtcatcagcct

SEQ ID NO: 358101 - DNA, 288 bp, Zea mays
  unsure (1)..(288): unsure at all n locations
cgctcaatgaccactaacaagtccattacctcttctgacaatgacccagttcgacttgagattagaaagcagttgcaacaagtcatggattatggatcaccagaagggagccagtacatttgtttgccactcatctattgattgagaagaagttaagagatgtttttgcaaacttgcagacaaaagaaggaagaatcgcttggcttcgcaatgcttacgagatagatctgaanaagtgcacttagctgctggtcctccgacaacagaggcttatggtcagtattatcg

SEQ ID NO: 358102 - DNA, 229 bp, Zea mays
aatctgtccttgccgccgccgcccgatccaggtctgcagactgctcacttctccccacccaacgcggcggcactccttctccctccccgagtgcctgctgtgcgcctgtacttcacaccggcgtcgccccctcctccagaactccccaccggagccaccctcacccgtcacgcacttctccgctgagtgcaacaagtgctgatcagtgggtggacgggagatggtgctg

SEQ ID NO: 358103 - DNA, 288 bp, Zea mays
cccttttggagaccagaccaacaccaggttgacgtgctcctcggccggcggcgggatttcttcttcctccccaagaagtacctgtaccgccgccaccaagcgccgcatcccatctccccccatactaccttccgagcgacctcacctcgcacagacggcaatggcgtcccccgagcccgccgtggatcccagcctcgcgcaagagacccccaccactcccacacccaccacggcgcactcgtccgcggcggagcaagaagggccgccgcagccgcaagagcctgcccc

SEQ ID NO: 358104 - DNA, 283 bp, Zea mays
cccacttcagcaatcacagatgcaactccagcaacagcagccgcagatgcatgtgttgttgcagctgctgctgctgctgttgaaattgctgtagctgctgttgctgcattggtgtctgctgagttgaggcctgcggtttgaacaccaccatgtccccagggaagagcatgccaatcaaacgacctgctttgtcagccatcgacagcaacagagtttgcgatggtaactgtatcacagcacacagcttcttctcttgtagttgtacaagaaacccatggtgatt

SEQ ID NO: 358105 - DNA, 287 bp, Zea mays
gccagacaccacgtgactcctctagaaccaagcgagcagtgtgatggaaggagatttatgcgtcaaggttgactcacccccgacggggcgatgactgtcaaggtcgacgacagcgccgtcgtccttccgtctccaatcctcccctgtactcctttatccaggcctcatcgcttgccataggtacaaccatcctctcccacctcactttcctctcacacttcatttttcttggatctgaaagcaaccagactccgtgccgccgataaaggtgcctgcgccatccacgt

SEQ ID NO: 358106 - DNA, 282 bp, Zea mays
tacaggttcgaattccaggatgtatgctgcgttgtcttgactatgttgacatggaagatctaggtaggcccttggccattgtggccaaaatggcgggctacaggccacttgctttgcagcttcataaagaaggtcttctagatccaagtagagtagcagcattactcgagggtcctatagcagaggagactttgcttgatttccccatggttatttctgacctcgctcgcaggtcgaaggacttttatgtggccatggataaagctggactcgtatgttctt

SEQ ID NO: 358107 - DNA, 271 bp, Zea mays
cgagcccaaacgaaagcaccgagagccatgtcggtaccagacctaggagcctcactgcgttcccgcggaagtgatcgtggtggtcgcgcctgggtgtattggcgactagacctaggagcctcggccattacttcatctagggtacgaacacttccatggaattcgccttggtatcctctacatgtagaaccaggaatggagtttgccaaccgagagcatggtgggggtgagggacgcccatggtgccgcccgcagctaatcaggcaccgcc

SEQ ID NO: 358108 - DNA, 260 bp, Zea mays
gtggtctctctcgcgaactgctgcgcaccggagctggtcgacgaaatgctcgccatcccctctctacttctgttgtctctgtttgattgctgtacgtgtgtaactgaatgttactgcaagttgccaggtctggtgctcactgctgtcgtcctcacattgagaacaatcatttcttcgtttactagttgacagcactgcaagtatgccctgtcctattaagtgttctgcggctcggtgtgcaccatcattgactgaacaca

SEQ ID NO: 358109 - DNA, 251 bp, Zea mays
gtcggaataacatttttcttaacaacaaaaacaacaggttactgactgcactaaaaagggctggtaagagttcgggactacaagtggttgaggatctggacgagcaggaggaggacaccaggatctcgtgctcctccccgcacattccatcgtcgaccacgggctttcctgactgatggttctttctacaagggacatgaaacggaatcaagctagacgatgtcaaactaaccagatgagtaactctaaag

SEQ ID NO: 358110 - DNA, 261 bp, Zea mays
aggcagtagggcactgctatttatagaatttgcactgagcacgtgtctacctttgctgttttacattagatgattctcattgtagtttatatcttgtaccaccattacctactgtcatccacgcttccttctagatatttttacatgttcgcaagggtgtgtattacacatctgttatttctgcggagcacttcacaagcatattatcaacgcaggtccagaagtgtcccgcttatctgcattagctggaaaatataaggt

SEQ ID NO: 358111 - DNA, 262 bp, Zea mays
atggctccaaggaatatagccccgcacctcttcgacctaatcccgagaaagaacaattcggttgcccacgaactcagcggacaacattggatcaaaacactaagaagtaggatcacttccagtgttcagattgaggagtttgtctctctttggactagactctgggatttccagctgcaacctgactcaccgataaccattgcctggaatcggtctcctgatggcatcttctcagttaaatcggcctacagagcacaattca

SEQ ID NO: 358112 - DNA, 260 bp, Zea mays
gacatcgcatcatcgtggtgcatcagcaggacgtcggagcagtatctgtgtccttgcctcgcctgttcgcccttcgctatcgtcgggtgttcggtaaaaatcttgaagcaggaagtcaccgccgttcgcgtgaaatttctaatcgcttggatgctcgctactcctgttttttggtttataagtagaacggttaaatatattagttgcgataatttccttgtcgtggttagaatgcattgtgactgtattaaacatttgct

SEQ ID NO: 358113 - DNA, 258 bp, Zea mays
taggcgttagcactgcgaacctgaagccatggtggttaacaccggaggagacaccgatgtgaaagatgcctgcaacaatgtctcggaagagatcaagattgcccctaatgacctaaccaacaaaccgttgcttgccggatgcacaaggtcgaggtttgtttatcatccgagctcgttcagctacaagaggatgctgccatttctcatggagaatgacatctctgctcaggaatgtaacagggtcaaaattcgaaaaat

SEQ ID NO: 358114 - DNA, 262 bp, Zea mays
ctagcggctagccacaggttgggcgcctcctcctcttcttggtgcgtttcttattagatacgctggttcatgagtttattattcaaatccttgaatcgaatcgaatgcattgatggatgatcttgctggtttggtttgaagatgagataccccctctatgatttcggtcctagtctgtcatgctttgcggaatggtggtggtgtctgccatgaatcaagtgcttgaacacatgtggatgagaagccgctaagccttcaagtg

SEQ ID NO: 358115 - DNA, 271 bp, Zea mays
tcgcttgtccttgttatgctcgtcactgacgcccgtgccttctcctggctgcacccatcacccgccgccattctcctcctggacgccgcccgccactaacctccttttggtagcgcttgtggcctgtggcctgccctccttctgggccgtggccgtctgtactcgcttcctcggccgccagtccgccacctgccgtccctcaggcagcatggctctggatctgggggcatgctgcctatccactgctgctcccttgtggaacactgatgtt

SEQ ID NO: 358116 - DNA, 253 bp, Zea mays
tgcccgggaaacacgcccggtcgaccgggggtggaaaatatcctagcctggaccgcaagcgaacgcgaagggcacgcgacttctcgtcggcgtcgatctgctccggcgaccgcttctcatcggtatgtttcttcctccctgggctttccgttcccaccacctcagcggacggcttgaagtttcctctagcggtgggcgctcgttacacacggctcccatggtctgcttgaagtttcctcgccctaaaccctaa

SEQ ID NO: 358117 - DNA, 256 bp, Zea mays
attagattagatcaaagtggaccgcgtcgggttgggtccagtcctttcgctggtaactaatcaatgaaccagttggattgttctaacttgctgccaacaatcaaattcattttgccactcttcctccgcttcagtagattgctgttgcagattcctctcctgcgaggcacgagctgagtcctatccctatccgcccttgttgcagcggtgcggaaggcaatggtggggttgggatggagagtcggctcaaaggtgc

SEQ ID NO: 358118 - DNA, 253 bp, Zea mays
gcacgccttatcgccacacagacacagcacaacgcacggagtcagattgcgggcagcgctcgctaatcgccatagcctatagctgtagagaaactgctccgggaggaagtagacaaggagagagagagagaggtcaacagggcactgccggatccggagccaaaaaaaaacccagaaggatccatggctcccggagccggagacgactctgatcccgcctcttatatccacacggtgcagcacctgatagaga

SEQ ID NO: 358119 - DNA, 259 bp, Zea mays
ccgtcactgagtgggcaggtgagcataaccttgatagctactggcttcaaacggcaggatgaaccagaaggccgcgtgtcgaaggtacctcttgtcaagcaatttactactactagggcccctattcttacagttttttgcttgcattgcaaccaaagggtgggcaacaaggtgagaatggccgacgcccatccccagcagagggcagcagcacggtggagatcccagagttcctgcgacgaagaggaccttctggctt

SEQ ID NO: 358120 - DNA, 159 bp, Zea mays
  unsure (1)..(159): unsure at all n locations
tggatgatcagcaatggctcacgtactgggtgctgtactcatttatcactctattcgagctcaccttttctccggtactcgaatggtanaacaacaaactntcagcacgacaggggacattaacacacgtgtttacgggtcaaagggtctatatcgcga

SEQ ID NO: 358121 - DNA, 264 bp, Zea mays
gtacatctttgtctgcttccacttgatggacaaacggcaccaaatctggagaagtcatatctgtgttgcggcccaactctgtccatcaaacaactttgtcagtttgtcgccagtcagacatctcacaaagatgaagaagttgagatgtatgcgctgaagccttcttgtagcaagcctgtcagcactaatacatgcggtcctgacaaagcaaggctcgcaggggaggaacgcctttcagacttgcgctcctcgttcacatttcct

SEQ ID NO: 358122 - DNA, 248 bp, Zea mays
gcgtacccaggctgattgccagcagttctatgccaagcgtggcttgccatatgatggaacagttatcccacccgcaccacagcctgcaccttcaccgtcaaggaagaagaacaggaatctgaaatacatactgatcggggccattggtggaagcctcctgctgatagccggggttgcagccattgtgttctgctttgtttgttctgtgagaacagggaggacggatggtcagagggaaagtggggcat

SEQ ID NO: 358123 - DNA, 101 bp, Zea mays
cacacaacggcagagaccaagaagccgtgaccgtgggagagctccgagcgccagccgcgtgcggcgtgtccatactccatacacggaggaagaggaacaga

SEQ ID NO: 358124 - DNA, 261 bp, Zea mays
gttgattctggagaaatctctcttacaactaggtacaatgaacagatccctcaagaaaatagcagttacggttcttgtaatgcggatattacagctcgtgctatggaagacataacttgtgtggacaaggaacttgaggagccctctgatttgcaattctcaagtactgaacaacagcctaaacatgatttaccagggtcatcccacgaaggttgtgctaaacttgaaagacatccatctgttgattgcaaagagcaatta

SEQ ID NO: 358125 - DNA, 257 bp, Zea mays
cccacagccgccgacgtctggagccgtgcggacaacgcagctgctcatgttgcactgctgccttgatttgcatcagcccttgctcaaccttctggagcgtggcttgcatctttgcgagatcaactcttatgttggtccacaagtcccccatcgatggagctagtgattgctgagccgtggctgcccctagtggctgttaaggcccataaggcccatatattattgactgcctatatatatgctacagtaccccgagg

SEQ ID NO: 358126 - DNA, 254 bp, Zea mays
aagaaaaaaagaatgcgccatcgctggggatgggtacgatgatcaaggttttgtgtgctgtttggctacgcgcagatcgtcgaacgacgaagggcaccgaggtgttcgtcagcgggttgccaatgtcgaccacggaaagcatgctcctctctcatctccacaccgtgcagtagctactgcccgtagcatgtaatgcaatggaataagttatcaaggcaactaacactgaacatagttcttgggctccttggcag

SEQ ID NO: 358127 - DNA, 253 bp, Zea mays
tatggaggggagcggcggcagccagagccagctgatccatccggccgtggacgaggcagccctggccgtcaccaagagagagcgcaagagaagcggcagccctccgtttcatggccatggatagcaggaacaggaacagcattttcgtcgacgaccatcccgattcacatgctgccgcgggcggtgcctcccaagacgatggtgtcagcaagcctccatcagctgctggtgttggccgcaagatgatgctcaa

SEQ ID NO: 358128 - DNA, 283 bp, Zea mays
ggtggatgtcaacctgaagtcgacttctagccagtccaactcgcaacaacaggagggaagtggatgcgcctgctccaagtgtgttagcttcaggcatactttcacttgaagagcgtgtgtcggtaactgttgtataagcagttacatatttcactagtgttactcacttactatccttaattctctgatgcttctgtagtgaggctcacatcgttttctcattttccatcttgattttgtatgttgcggcaaagacagcaataacacattttgatcacacggg

SEQ ID NO: 358129 - DNA, 282 bp, Zea mays
gcaaggcacacgacatgctagctgttgatgcaagattggacagcaccaacatttaaaatgcgacgtggttgtccagttttgcccccgtcgtttatatatataaataaatgtagtcagtgtcctctatctccctcattttgtgtagctgaggatgctatggttctcctttttactaatattattaccaatgcccttttcactttatttatctgagttttgtgggtggttcttgttgggtttcatttctagccttaggagtacccaacttgctttgggactaaa

SEQ ID NO: 358130 - DNA, 265 bp, Zea mays
aagttccgtgcgatgaggatggatctggtaactggttttgtgagaagaaaatgtcacgagatctatatgagcttccgttctcgtgttggagtgcctgatcaacatggacgatgatctgtgtttcaccgttcttcgtaacacggtgatcaaaggttctcacggcagaggagattgctctcatggctcaatgcaacatgaaactcatgatcgccacgacgtatcatggaaagagtgtttcactgcctattctagatgcccagacagg

SEQ ID NO: 358131 - DNA, 160 bp, Zea mays
gagaaaaagaaaattgaatctgcagtgtggaatgaattcaagagggtaaaagttagagatgtttgaaaggaaaattgtaattattgttcaaagaagcttttgagtgtaacaaataatggtacatctcatttgaaagcacatctagagacatacatctatc

SEQ ID NO: 358132 - DNA, 273 bp, Zea mays
gcgcagcctcttgccgtgctagggtttcctcggtccccgtcgcctcgaactgctcttgtcccgcctcacgggcggagctaggattcttctcgaagatgatgacgagcatccaagttcttctcgacgatctgtaaacttcagctgaagacttcttttctgctatgcttgattgatggggctgtgtcttcacccagttctgcctgaggcctgggctattggatcttccactgcgatatatgttatgttcggctacctttcgagcttgtatccccg

SEQ ID NO: 358133 - DNA, 196 bp, Zea mays
cacagtctaggaggcttcttccgctcgctcaggtaggtgtactgtactgtactgtagtaggttggttctccattcatcattcagctcacaggtccctccgcctccgccgtatcggagggagaggaagcggaaggcttggaaggagaagagaatggcggggcggcgcgcggaggaggagtacgactacctgttcaag

SEQ ID NO: 358134 - DNA, 262 bp, Zea mays
gtagctacgaaagacaggtttaggccaatgccattttgtttgccagtattatttccaacggcccatgctttcgctttgcgaatgatacttcaacttggggtgaagccttcttggtttgaatgcaatagtagtgataaattaactggggacagctttaaggtagcaccaacatttggagatcttcgtagttacatgattgagacaacactccctcctattggtgacgccgttgtggctgaattgctccttaaagtgttggaac

SEQ ID NO: 358135 - DNA, 269 bp, Zea mays
gcaggtcagtgactggggtgtagctgccttatatgggctcgaggtactctaccttgccaaggcacctgaggtcactgatatcggattagctgagcttgctgctaagtcgccacgcctccgcaagctgcatgttgatggttggaaagcaaacaggattggtgaccgggggcttgcggctgttgcacagacatgttcagcttgcaggaactggtcctcattggtgtgaatttgacatcattaagtcttgagttgattgcaacgaactgccc

SEQ ID NO: 358136 - DNA, 275 bp, Zea mays
cgcgcacaggcgatgtacctgcgcgccgtgaggcagggcaccactgtggtagttgatatcgccgccttgctgggagggatcccgtctcagcagcctctggttgtccccgggtctagctctggtcaccttcaaactcctccgttgcgtcttcatccgcgtcctgctcgccgccgaccccgggttcgcctccaggcaactattgtctgaagccgcggtcgctatctcggacaacaaccatgacacggcggccagccatctggccgccctgaagcgtg

SEQ ID NO: 358137 - DNA, 275 bp, Zea mays
gccaccagctacaagctgttccccgacctgctggcctgatgaagcgcagacggacgaacggcacctgttttgccatgccactgttaattacaccccaaaaaaacacacacacgacgactcatcatcgtgcaggactgaagttacagcatgtagcgcaacacactggcgctagaggttcttcaagttggtcggccgacattggagatggtaacaagatagaactggggatccataataattaagtaacctgtaacttctattacaattttcttaat

SEQ ID NO: 358138 - DNA, 160 bp, Zea mays
gtgacatgtttgctggtagatagcatcttgctcttggggtcctcgttttttgtatgcccttgaaagttgtatgcaaacaatgactcgatcatctgttgctcaaatctgcataacgtatgccgttgtcagatgtaataatcataggcgctcaaatgacaat

SEQ ID NO: 358139 - DNA, 270 bp, Zea mays
tgatttgctgcacagaggccacgccgaacctgctcagaagattggggcaggagtcgaagcattcgagatacgcaaccacccggtgtggcagagcgctgcttctatatccgcaagatcgaaggatcctcggcagacttcagattgccgaactgtgtcgacaacatactgactctccctgaggacatgaacgtcggcaacggcaagaagtctggtggccaccacaagggtggcggtagcgcgcgtaggggtacgggatgaagccgtggccca

SEQ ID NO: 358140 - DNA, 161 bp, Zea mays
caggggcggaggcgcagtccgcaaccaccgaccggcacgacgacggcgtagacagggcaccgcgcgactgctccgtctttttttgccggctactcctacgattcgttcggccatgttgggcgcagagagcgatgtacatacttgcgtacgtactgctattg

SEQ ID NO: 358141 - DNA, 267 bp, Zea mays
cacgcgtccctcctcgcgcctaaacccagcgaacacgtagccggtgtctcgctcttctttctcgcaggattctctcgaccggtccgtgtctcgcggctccgtgacgggcaattcaagatgctcaccttcgacgatccgtcttcctccgtcactctgctgatgagttatgcacttcagcgcatcaaccgctcgcataaatactctcttcattgcacggtcagagattttcgatgaggccacaccgaaggttgctgtcatttcccacgt

SEQ ID NO: 358142 - DNA, 103 bp, Zea mays
tggcgtggacgaagcagcttcgcagtcaccaagagagagcgcaagagaagcaggtacatctactctccctatagcgacacaggcagcctccaagaaaagaagg

SEQ ID NO: 358143 - DNA, 263 bp, Zea mays
gtctctctctctacttcagctctcacggcgctcctcctctgactcccatggcgcgcgactgcttccctcatggcactcgaccaacatctcccatggccgactcgcactggtctaagctcactgctcttctctatttcgagctccctccaacagcgctgtcgtacctgcgtccacgaatccaaagccatctttaactctgccgctctacgctacaacatcttcatgaccctgcgcgccgctccttggacgacctcacgctctct

SEQ ID NO: 358144 - DNA, 236 bp, Zea mays
  unsure (1)..(236): unsure at all n locations
ctgcccatcaactgaaggctaaagcagtttttcacatgcacatagtgcttaatgtcactggcacagctatgacatttttgaagcccccgagcaattggcccttggagagcccaattgtgcctacctgcgttgtgagttcagtggatctgatggaaaggcaagaaggctcctcgagacccgaacgnctcagtggaagattgaaagtgtattgtgggggtatcttggggctagcattt

SEQ ID NO: 358145 - DNA, 257 bp, Zea mays
ttgatccaaaccctaagccttcacctaaacagacaagaagcttcttatagctttgatttatctaccataatgcgtctttcccttcttttattagccctccttgcgggtgttatggcagcccctgtcccagacacggcagcaaacccagtgatgctagcgtatgatgctggtgatgaccccttagataaaactcccgtcatgttggcttatgatgttcaaggacgcgcctgaaggggggctgtgctggccatggctag

SEQ ID NO: 358146 - DNA, 262 bp, Zea mays
gcgcacgcgtcctccaatacccgccccggctcctcgtcgtaatcaccgcagcggccagatctgacctcgcccgacccatggcatgcgcccgagctgcccgcgtcccccaaaatccaccccggatcctctcccttccccacagcgcgcgtcgacatcctactgtgctttcccaaatttggagatcttccatcgccgatcttcaccacatcgcggtgattgcggacgcgcgcgcactcgacccatggcgcccgatctgcccgcg

SEQ ID NO: 358147 - DNA, 239 bp, Zea mays
ggaaattagcgtggaccttatctactgaattaactgtgggatgatgcatcaaaagtttttgtattctctctgaaggacgcacagtgtttattgatggcagtccacagttcattgatttgtttgtgtgtgtttacacgttcctcactttgtatctaggcaatagaacaacttagatcttattagatacagataacgctacacttgtacacgagttgaaccgttaacttatggctaccctc

SEQ ID NO: 358148 - DNA, 242 bp, Zea mays
cacgagcaaggcacagcagcaggggagtcggagtgacagccgcccgcaggatgccgacactaaacctgagcaccaacgtgccggtggacgcggtggtcgccgccgacatcctcagggactgctccaaggccgtcgccaggatcatcggcaagcccgaatccggacacaacttcggcttcaacggatccacattctaagtcgactccagcagaaaccgaagatgatggtcgctgcgtccaaac

SEQ ID NO: 358149 - DNA, 236 bp, Zea mays
gcaaatttgactctagctgtttcctgtacagagagcagcatgataatgcttaataaagatacgcaatttgtgcctcaggtctgttgcaggtatgggtgtaccggtggagcactcctgcaagctgcccagcgacccggcactgcgcagaatgggcccgaatctacttgaggtacaacttgtgcagccagaaggaaggtgctgccctggcacttgggctaatcagtgtcataagctgg

SEQ ID NO: 358150 - DNA, 237 bp, Zea mays
tacgtacaaatgttctcagttcttccaccagtagccaaaggtctcacgttggctttgatgtctcacgtctcttgctccctccatgcaagtgcccagccgctgtcacccatggccgtgctctgtatctctagccatcagtcgttcatccttgctccaccgtgctcaacatccaggcttcagtctccttgccgctgtcatggttcagctttggagctcgcctctactggcccatggcgc

SEQ ID NO: 358151 - DNA, 236 bp, Zea mays
gtccaacttgtgggagtggtaatccttgtgtttctgctggtataaaccctctcatcagtcctcaggtttgtcctgtccagaaccttacacgttgtgttcctgcacgtggtgaccaacccacccagttgctcatctcaccgtggccggggtgtctcgaggagttcacgtgccagagtcacaccaccgcggtctggtgccgtggacagcttcaacaccaactcatcgtaccgcgtctt

SEQ ID NO: 358152 - DNA, 240 bp, Zea mays
cgaagtctaccatttcgatatttattatgattgttatgttgatgcttgatagcatcactaaataatgacatgtgcgtgcacaagtgacctctgttgcaacgcacgggcatatacctagtattggtcatatgcttcttgttgtattatgtggtgataatacataattagtgtgtgcttccgctgttgtgaatcaattggtatctattgtgtttgtcctgtaatagattttcatgtggttct

SEQ ID NO: 358153 - DNA, 237 bp, Zea mays
ggctcgaggacggacgatttcatcagggaatgtcacctggagtttagtcagggcatcagttcacaacttcagattggtgtccaccgctgttgtgaagattggcgaggtcagcttggttaacaatttactgcctgattggtaacctgcagctatttagcttagccgacactgctcccggcttctgtgactttggtgttgtgctcattcatccctgctccattggcttgccaagctatt

SEQ ID NO: 358154 - DNA, 231 bp, Zea mays
gttgtttcaaggcctcctaaaatcgcatccacgaaggatggtagatctgatatgcctcaaagtccaaaagcaccaatacgcacagctgatcgagaaaatcagtggaggtcatcagggactggatctgaagaatctctctctctcagagatactcagagcggaagagggagagtagaaagttctactgatgacaatgatccatctgtaagtgggtcaggaactgttgtgtta

SEQ ID NO: 358155 - DNA, 239 bp, Zea mays
gaaagaaaaaaaaagagacgccactgttctgagacaagatccaaccaccaccaccacacgctccgttgttcctcgttcgttcgtttatcctggacctggatcccgctcggagatctccaccaccaacagcagcaagtagcaagcgttacaaaccgtcagatttgccattgcatgatcacatcctattctctatctgtaaatgtgaccgtgaagtgtaaagctactagctagtatatatg

SEQ ID NO: 358156 - DNA, 235 bp, Zea mays
gtttgatggtaaacgacaacttaggcgatatcagccacaagttcaacgtacctctgcctgacaaggtcttccaaattaatgcacgcgacaaagctttgaatttgccctcacgaatgccggacttacccaactacgaattaagagaacacctttattcgtttaagaccgcctcagctcttggaatttcctatggtgctttatcaagcaattggaatttgacctccgacgacaaagt

SEQ ID NO: 358157 - DNA, 191 bp, Zea mays
  unsure (1)..(191): unsure at all n locations
gctaatccccgtcctttcggcgccgcacccagcccgacccccaccacatatgcccccgcgcgaccacgcggcaggtctcgctccggcccgtctaccaactccgccgcttcgctccnagggctcgtcgttgctatcacttcgtcgccgcgggtcgatagcaaagcttggcccgcttgcgcatcgggcacgna

SEQ ID NO: 358158 - DNA, 259 bp, Zea mays
caagaatcaaccactagaaaacgagggggatctccggatcatgtttgggccaattgtgtgcactaataaaactaccttaattctactaggtcaaccaagggatgcagcttcattttcagatgagcttgaagaagatgatctagaattagtgggagagaacccaactatggttacgatatgttccccgtgcgttgtatcgtgtttcgtcgactacatgattcgttagttaatgattacgacctcattgctagtcgaggtg

SEQ ID NO: 358159 - DNA, 266 bp, Zea mays
gggccaggaaggagcaagagaagcagcggaggagagagaaagaggaggaggagcgtgcacggagacgcgaggaggaagaaagagagagggaggaggaagaagaacggcggagggaggaggaagaaggtggaggcggacgtggtgacgagccagagagggaggaagaaggcggtgacaagccgccataccggttgtccaagaaactgaagaaacgctaccatgcacgtgccggtgtgttcagcaggagtggctgagtgagcagccga

SEQ ID NO: 358160 - DNA, 259 bp, Zea mays
aaaatctgttttctgctgcatgcgcacaaatttagcatgacaaaaatgtgcgttgaaagaaattggagcgccttgcatggaaacaaaaatatgattttaatgctttattcctccataaatataggacctctccaacaatcacgcagttagattatgctacacagtgaaggcgtttatgcactgtggttaggctgtttagaatcagttcctatttttacggagcgcaggcttgcggtttctattttgatgtagatcccaa

SEQ ID NO: 358161 - DNA, 264 bp, Zea mays
gtcggcacacatcttgctacggtgttctacgcgggatttgctgtctgtgtttctctttcattgtcttccatgtaggtttgatctacgcgccgccctttcattttggttcctcgatgctttcttccatgattccgcttgcggttcgcctgatcggtattgacgaggaggtagtatgatggcgatgacgaaaaactatggttcgctcgtctgatcggcggcggggtttaatccccactgccttgctgagcttaaaagtagtccgag

SEQ ID NO: 358162 - DNA, 253 bp, Zea mays
ctcgagccgtttaatttgtgtatatatatctagttagctacatctaggggtagacacggcatctcttgcggtgctgccatgcctgcatggagatcgagcagtgtgtacgtatgtactacgtgctgatcatctcaggcgttaattcatcaccatgcatcagggtgctcgcgtcgtgttgtacttgtacatgaggaataatgtagtgcttgctaccgcgcagttcgatcaaaaaaaaaaaaaagggggggccgcc

SEQ ID NO: 358163 - DNA, 255 bp, Zea mays
cgtgcaaagagattgactcattacatgtatcatcaacaaaacatgccacaagataacaacatgtaatgagtcaatctctttgcacaggttcctggctcataaggagacgactttcctggagttctcatgtttagactctgttgacgcagtcactgctgctgctgttgatgctgctgctgttgctgcaactggtttctctgcaaaggtaagttctttagaatctgttgttgctgctgctgttgcatatgcagaagc

SEQ ID NO: 358164 - DNA, 253 bp, Zea mays
agaagttcgatctcatatagctatctggagtctttcttttcaaatcaaagtgaaacgattttccttttacgttgagatatttgaattggattttctttcaccactactatcgtaacgcacagaaaacactgacgtttccgctcgctttcaaccactgccactttacctgagcactgtgacgtcgtcggtcaagtattgaggctagtatatcaaggacttatgagaactgaaaaaaaaaaaaaaggggcggccg

SEQ ID NO: 358165 - DNA, 242 bp, Zea mays
gttcatggccgcgtcccgccaagttccgtcctccatggctgcgtgcaggcttctctgttcgccgtgaccctctgctcggcgtcctgctcgcccccgacactgcgctcggcctagccatcttcacggcgttcgccggccgcgattttgcctgagtttcctgttggctcgccgggtgtttctccctgcagctacgccatcggcgcgcccagcctgctcgtcgtggacgtgagccactgcccatg

SEQ ID NO: 358166 - DNA, 244 bp, Zea mays
ctatgttctagatcgcgagccgccgccctttttttttttttttaacgaaatcgggcatccacatagtttaaaacttcccaccgaacttaacaagttaacagaattcaacttacgctcaaaatttaaaccacacccatctcacttactactagcataggtaccaagattccccatacccgcgagaaattttcctgctgaaataaattcgaatggactcaaacattgtggcctatatcgtctagcc

SEQ ID NO: 358167 - DNA, 266 bp, Zea mays
ctgccgtgccccctccttacacgcccctgcctccgtccccttgcccgtgatccctccggcaaacccgatcgtcatcctcctcccccgactcccttccatcctcgcccgccccttccatactcctcccgtgccccttccatccccacccgtgctccaccattccacacgcgcgtcctttccatcctcgcccgtgctcctcccacgacctatgcggcggcggatccgaagcacaacatccacgacgaggtcttctctgtgctgcacga

SEQ ID NO: 358168 - DNA, 263 bp, Zea mays
gctcgtcgtcgccgccgccatctgcgccctctccagcggcagcatcgcggtcgcctcagaacagccatttcatcttggtcatttgatgacatctctctgaaatcgacggagtcaacagatcaagatgacagaaccatcatcatcatattcattgccctctaaaaagcgacaacgctctcctgatgataatgaacattcactagacagaggtcgaatttgtttaagccttgatgataatcttacgttcaatgataccatgatag

SEQ ID NO: 358169 - DNA, 250 bp, Zea mays
tccatcgccacagcacctctacgttgtctctgtgtcttggtcgagtccgtgctcctctgctcggcgtcttccctgctcgccggtggagcttctttggcgcgtgcctcccctgcgcatccatctccttcctcagcccgtctctctccctgtccccagtcagcgcgctcgaattcctccatgcgcacgcgctggatcccagctcgcgaagtactctgctcggtcgtctcccttctcccgaagcttttcccca

SEQ ID NO: 358170 - DNA, 259 bp, Zea mays
gtcgtccaccgggtagcgctgctggaagccaccacgccacaccatcgaagacgccgccccaacccatagtcgcacgacgctcccatcggtcttggaggtgagatctgcgctagtcccggccgatccgaccaaggacccccggagcaggcccccatgggtaccggtgattggagcatgcccccacgggcatcggcgaaagggaccagaagcacacacgacacacggagaaaaacaccagcggagagaggggagatggccc

SEQ ID NO: 358171 - DNA, 268 bp, Zea mays
cagggggaaaggaagagccggacggagctcatcgccggcgcgagctgggcctgggctgggcagggcaggcaggattaccgcgaaagggttgacctcggccgcggctgcgccctcctcgaaggggttgtcgtacgtcgatctccccgccatggacctttccttccctcctgccggttccttggtctgctccgctccgctccgaggtcagcaaggagggcaggaccaaccggaagaagcagcagcctacttggacctcggttccttgtgt

SEQ ID NO: 358172 - DNA, 249 bp, Zea mays
gacgcggacgccagaaatcccgtcatgtcaggtcccggcgcagaggagagcgcgagccccgagaagcgcggagcggataggcaaagagcagacgagcagtgtagacaacgggacagccattgacttccccgcctaccctgccccgtcccgtccgtctccgtcccaatcagacacaaccgcccgtcgtcgcctataaactctccctcccatccgtctcttgagggcccggcttcctcccaactgccaccg

SEQ ID NO: 358173 - DNA, 254 bp, Zea mays
gaaggatgtgaatgaatttctcttcggctcacttgatgttccattagtgaacatggagacgagtctgcggaattatgtatttcttggccacttcaatgtaatcttgatttttttgtattatccttgcatcttatgttagcataacttgttgacaggaaccttcggatgtaccttttgatatttcatctgttccgaaggagacaaaatcccaaccccttgcggagaaaaagtctacaggcaagaaatcagcaggt

SEQ ID NO: 358174 - DNA, 258 bp, Zea mays
actgctctctcttttttctctctcacccttttgcacgtcaggagtgctcgaatgtgacagcagacagcacagacgactcggagagcagcagcaagaaccacagcaaccactcctcagaccagctcggagcagcagcagcagcaaacatggcgagccagttcgagcaagcttcacagcagcagcttcagcacaaaaatatggctacaagttccactccaagaactggcaaggctcttgatccaaaggtaatcagaaggc

SEQ ID NO: 358175 - DNA, 253 bp, Zea mays
gtcttcaactgtttaggctatgttttagctcctaggatatcatgatgcgttaggacgatagaaatattctgtcacttgaacactgcatgatgaaatcatgtattcctctgtttgaaattacaagcttatctcatttacaaaccttggattactgataacttcattaacacatttttttttacacagttgtcattagattcacgtattaaaaaaatcttgcttatgattgtatttttttatctcatgtaaatca

SEQ ID NO: 358176 - DNA, 260 bp, Zea mays
ggctcggcgtcgagtactacctgcactacacgctcgtcctcgtcgtgctgtccgggctactggtcctcgggttctaccacgtgatgatccagaggttcaaggtggagtacttcaggagggtcaccgcggtcgggtactcgtgcgtcgtgtttggctggatgacaatcctggccgccaagcaaccgtcgtccaagctgaacatcttcggggttctctcactgcccatcagcttcgcgccgttcgagcgctgatattcacat

SEQ ID NO: 358177 - DNA, 248 bp, Zea mays
ggacgacgccgctggagcgcgccagcgaaggactccgaggctgcatggaaggcgcaggttcgttcgtttcggtagcctattcgtgcttggtctaatagatccaggccgccgtcagcgcgacctacaggctatgataggataaccatgtcgtacagttttgcaagagctagattagatcttgatgactttgccgtcctcagtgattatctagggttagcatctacgtagttctaggctttaaatgctgt

SEQ ID NO: 358178 - DNA, 254 bp, Zea mays
gtgattttttatcacctgatgttctaatatatttttcttatgaatattaggaaactatcatttgttagtgttagcttaagctttgtgatcatatcgttatctacaattggttgattctcaatgatatgcattttcagtcatcagtatatattcatgttattgtaatatgagttcagcaccgaaagctttagggtcttttggtcagcaagggcattagggcaacatgtgtgctcttatttaatacaattgtaatg

SEQ ID NO: 358179 - DNA, 265 bp, Zea mays
cggctcgagccttgataaaatcaaagaaggctgctgccttgccttcatgggcagtccagatttgcccatcctctgagtgtaccgctgcaatgaaattcttcttcctgaaccttgtttgtgcatgaaaaagagaggtattggcatcaccttctttgatccacccaatccgcgatttcagccttgccatggtacgagagagagagagagagaggacatggcaagagagtgcttcttgagcaggtttcggagcacagttcaccaggag

SEQ ID NO: 358180 - DNA, 261 bp, Zea mays
caggcttcagacgtagctcgccagcttcgacctccgccctgcccttgaccccactcgcccgttcttgttcccgacgctcgagctcacctcagcttcgctgtgcccctgcgttcggcctcttccctccaccagcggacgtcctcggtctcgctttcctcgccgtggcaaggccccggccacgacgtcatccccctctaagctagctgttgaagtcgtgcctcgcatacgcctattcgatgaaatgccaaacgtcacgtccgc

SEQ ID NO: 358181 - DNA, 250 bp, Zea mays
cttctctgatttactagggaaatcatcaccactaacacccttggattgatgatatgttgtcgtgaggcgataaatatgatgaggaaccaacctcgaggtggtcacatattcaaccttgatggtgctggttctgatggaaggccaactccaaggctgaattgcagatgaatgaagtgaataatgtgatggtgcacaatctatcgcctggcatggtcacaacagatcttcttatgtctgtgcaactacaaaa

SEQ ID NO: 358182 - DNA, 204 bp, Zea mays
tcgacgcgcgcgcaacttggaacaaagacgtggtgatggcacctgcgggcaatggcgcggacgaccatgagctgccactcttccatccgtccccgtgcgctcactactacgtgcagagcccctccgcggcgtcgcacacgctgagccacccggcgtccgactccatggcgctcatcctctccccgttcccgaacctccacacaa

SEQ ID NO: 358183 - DNA, 256 bp, Zea mays
gactatatgagtttacctatatattatggactatccctccagccaccatgcaaagcatactggtgcggttcacgcaagcagggcagactgacagggatcaggttacatagtacgccaagaatgcgcacagcgagctgcatgattctcaggtgatgtggtccctgaatggtccttagaaccttgcagatgtagcctcagcaacttccgttacaacttggtcatagtctgacttcagtttatcttcacctcgtcactg

SEQ ID NO: 358184 - DNA, 249 bp, Zea mays
gcaggaccctcactcacgcattttgaacctgcagttctctcgctctcctcgtatgggttcacatggtgggtcctaggcactgaattgtgcaggtcttgttttcttctacaacttcttgaactcctgatatcttgacgcggcaaccttgttcttgctttcatcagcatcttgattttgccttaaggcttcagcttagtctatgaggaagaattgttgcaactgacatcggtacttaagtactggaggttg

SEQ ID NO: 358185 - DNA, 255 bp, Zea mays
gaagatagtcctgctccacgccgcgtatgatgttgagcaggactatcttcagatgaggagggaagcacatagcatcagcaatgtggcgatgctcaacatcatacgcggcgtggcgcattagagctgaggattttcacattgagctgctaatagcaattctttccaccacctttatgtagctatttttttcttggtctgtccggtgttttggaggatggatggatgttcagcttgatacccaaaggtggcacttga

SEQ ID NO: 358186 - DNA, 260 bp, Zea mays
cgactccctccgcgcgtcggtacggtggctctgctgatccgccccgtgcctgccatatagctgcacccgccgccacgtctagacccttcttctcgctccctcagtagcccgtccctgcacctataagcggcctctccttgcctgccccctctcgcttgctgcttgctgcctttcacgcggagtgatgcagccgacggggttgccaaaggtagaacgaagcttccgcagcacagcgtcgtcgtcgaggagataaggtacgt

SEQ ID NO: 358187 - DNA, 255 bp, Zea mays
gaatgatgtaacaattaaaaatagatgaaaactggcccattattcaacttcctctatcaattccaactagaacaaacaatgactctgttttttatataaatttacatgtagatatttacaagtttgtggatcctttttataataataattgttatagaacagtcattgtgaggttctgtttagtgtttaccaccccacatctctgctattgcaatcccacaccttggacaggacatatacagtgcaaaattgaaa

SEQ ID NO: 358188 - DNA, 251 bp, Zea mays
catcccatgaatccgctgtaaataatattatccttttaataagaagcactagttatttacagcggattcatgggacggtaacagtacttgtacaaacatatagataatattatttgtcaaaaaaaaaaaaaagggggaccccctgcctggtgaccccgccgccccgggatttattccgggcccggaccctgcgggggtacaggtttccccaatggtgagccgtataggagctgggcgaaaccatggccatg

SEQ ID NO: 358189 - DNA, 256 bp, Zea mays
ctttgccttcaagtctccaaagccccccaggccccagctcgacgctcgctaccctaccccgcaaccccgagcagagtcccaagcccaagaaaccaacccccgacgcgcgcgagacggcgagagagggagagataggtgtgcggcagtaatatagtgggtttgctctctttgattggccgcggctaagcaccaaaccttggggaaatggagctgctcagtggcgcagtggcgcagcgggagctatggggaagcggaa

SEQ ID NO: 358190 - DNA, 248 bp, Zea mays
gcagaccggccggctctcctccatcgcaacatttcaagggggccgagcgaaagcaccataaatcccagcgcagatcactcgaccgccgcctgctccatttggagcctcccaaccgacagcgtaaggctctctgcaacagagccggggttccggttcgacccgacggacgatgagctggtcgtccactagctcaagatgaaggccgacatcatcgcgtttacaagttcgatccgtgggagctaccttgt

SEQ ID NO: 358191 - DNA, 288 bp, Zea mays
tgcagcacccgcacgagcaacatcgttcagcagacgagataccccaagcagcatgcacgagtgatcgtgcatcgatgtgcctgtgcatagcatgtctcaggatggcataaggttcgctggctggcctgtacgatagcttgtgttctcgctgcctgctcattcttaccggaggacgggagacagaccgatcatggtgtcagcgtcaccatggttggtccaaagtccccggattggattggatctcagtatacatgagacatgtatgagaagccgcctactgcctttttt

SEQ ID NO: 358192 - DNA, 252 bp, Zea mays
ggaaggccatcaagctctgaaccacagagcaaaaaagaaaagaaaagtaagctggataaaaaagataagatagagaaaaggaaggaaaagggcaagaagaaatccaaacatcgccaccaccgccatcgcagaagcagcaggagtgagtgatgttgcctgttagcagaacagaaaaaatggacacaacggttctgccatggccatgagacaagctagctgactgttcctgtgtcttgaaacctgtattgtatg

SEQ ID NO: 358193 - DNA, 251 bp, Zea mays
cgccgcctctgctccagtaggaacgttccccatcccggcaatcctcacccacgctagctactccggagcaccggaacgcatcgtcgcccccgtcaagcaggtctgggttgctccccactcattgccctagatgggtcgccgtccaccctcactcgtgattcgtggccgtggcaggttgcgccgcccgcccgtggttccggcgctgtgctggaggcggtggagctggggtccgtggggaagcttctcgctgg

SEQ ID NO: 358194 - DNA, 251 bp, Zea mays
caaatttacctgcacgattttcaaactccctgcctaacattattccgacaggacaaatgtatttggaaaatttaaatcaatggtctttagaacaatctaatatacatatgaacatgccaattgatcaagtggatttggcattattagctaaacaatggatcacaatgcaacaaaatgtgtatcaaacttctacaattctttcaccaacttttaattcaattattcaataaattttaacacatcaaaattct

SEQ ID NO: 358195 - DNA, 267 bp, Zea mays
ggcccaagggaaagcattcttttacttcatggcctggcactatgcaggattcgatctcttttctcgtaggaggatcttccgcttcatctatagattcgttttctcgttgaactcttgcttgaaagcaaacatgatatagtgatataggcccggggccaatgggaatctctttttctcttaggcaaaacaaagcaaatagaagtgaagtaaagctttctcgattcgatatagaatagaatagtgacgagaaagggcaactagatcaca

SEQ ID NO: 358196 - DNA, 263 bp, Zea mays
cagataggcttgcacatacctgatctcatcaaccacggaatcccaacagaaatgagtgtgcccaaaaacatggcaagctcctccgtcttttctgttgctgtgtatatctctcagcctcctttccaaaaaatcagatccaattaccttaggaaggtatgggtaataaagcatacgtttctctggacacaactcttgccttggtacgaatgtgaaaatgttaatatctgtttgctgctacttttcacttcttcagtagcatcatg

SEQ ID NO: 358197 - DNA, 264 bp, Zea mays
ggaagctggaccatgagcgacactgttgcaggcttgcagcaactttgctcttcgaaggggtcggtcgtttgctttttcccttgaccggtcatccagaagccccaccagaaaggccgacggcagcgcgcacgtttgcgtcgatcagggtggccgctcccgctggaggggccatgtcggattctggccaggggagccgacgacgtggaacagaggaggcaacgatggatccacacgagaaggccgcgccagatccaaccaggaaga

SEQ ID NO: 358198 - DNA, 264 bp, Zea mays
ccgcgatccccgcccatctatcccacgcccgcgccgtcgcgtccgccatctcctcctcctgccgcgccgtcaatggaagccagaactccaaacccgcagtcctcggaaggtagcaacctcatctcctcccgcgcccgcgtcatcaatggaaggaaaccaaatctcctcgcccgcagtcctcggaaggtccgcccattcacctccttccgcgccgtcaatggaagccagatctccaaacccgcagtcctcgcaacgtcaatggaa

SEQ ID NO: 358199 - DNA, 245 bp, Zea mays
cctctgcctccctagcgctcacttcgctctgcttcctcgtgcgcgcggcgctggcgcatccgggcagggcctgcgtcgtgcatgggcccgtgcgctacacctgagctaacacctatcaccggccatgcagctcggcctcctccccatcttctaccacgcgtctctctctcctctggctctagctcgcctatgttttttttcctctgctccttccagccggtcgaatccctcctgtgttagttagt

SEQ ID NO: 358200 - DNA, 210 bp, Zea mays
ggggttcaagtgacaaagaggggattaactcaatccctcctggattcaatacctctctggaataaaaacctgtaaaccgaacatgcccctagggaagtaatccattgcaaacgaacatgccctcagggtttactattgtgatccgctacccacacgggtctgtctgcattcagtagaccgatcaagaactttgggaaattgcgcagagat

SEQ ID NO: 358201 - DNA, 285 bp, Zea mays
caatcctgttcctacagctcctgagagggaagtaacagatactgagcaagttcctgagacagtaagcgaactggtaatgttggttgcgatgaccaaagatgtgacaatatcggaggagagactatgccgctagaggacgaagtgctgcttccagagaacgaggaacctactgcattgctcacagatgcagggcagccacaagcacatatggttccgattccaattcccgatgatggcggcggccactgttcagaagaaaaacgagagggtgcttgctctgagagc

SEQ ID NO: 358202 - DNA, 137 bp, Zea mays
caggccacatgcatcgcggtcgcaagcgtcctgtacaggtcgtcgaggaagccgagcctgactctgcttcaggctcaaaatctgctcccggcaaggccaccgaaggcgccaagaaggttgacgacaatagcccaggt

SEQ ID NO: 358203 - DNA, 142 bp, Zea mays
tgtggccggatagacgagaggactccagagatattccgacaccgctgggctcagatgccgccgacgccgacaccgccgcagcagcagcatcagcagtccggcatgactctctgccgcctccccacggccactcttggccttc

SEQ ID NO: 358204 - DNA, 212 bp, Zea mays
tgtggcctctgtcgatccgccgccgcgcgccaaggagcaggctaatcatcgggctccgtctctattcgtcatcgactacagtctcgtcttcgcccaagcgcgaatgttcgtccccaactccatccacacggaatacgaggtgtcaccagtctttgtctgtgcgaaaaaaataaatctggattaggggacggtggcgagtcgcaagcggccga

SEQ ID NO: 358205 - DNA, 283 bp, Zea mays
gcgacaaactatcttctataccttatcagatctggtttcagctcatccaaagagcctctctctgttagccgtaacctcaaagctcaattacgctgatatgcttgaaaaaaggataaaatcaagatttggaaaagctactcttgatgtttcttatcccattttggatgatgtgttggcctcactgaaactctggttaactttaccactgggagacgacagtcctcctcattttcatacttggaacaagaaaattgttaaactttttgagattgaagatgacaca

SEQ ID NO: 358206 - DNA, 262 bp, Zea mays
ctcccttgtacaccgttcctgctctctcttctctgcgcggtcggctcttggaattaggcacaactcattcattttcaccgctggccgtggcctcttgctcatgccgccggaccccaggccacgctcggctcataagctttctcccgatccactccggccatgagctcctcccagtgaatccctctgctaccgcttttctcgctggtggtggctgccatggagctcgcccaggtctccccgcagcgctcaacgcccaacgtca

SEQ ID NO: 358207 - DNA, 262 bp, Zea mays
gatgggattcaacagtatccctgtccgataggccagcaccttcactctccgaatcataaacagagctgctctcatatgttgaagatccagattcagcatcggagtcactacttccagaaagtttggccttgcctctgattgctgccgtgacattacggtttaattccatactttgaggctttggaagtggtgcataaccaggtgctgcatgaagaacaacctgcgaaagtgaacctggaagatatatgcgatagttgcttgc

SEQ ID NO: 358208 - DNA, 254 bp, Zea mays
ggataacgttccgcgtcctgtttgatccgagacgcgacgtgttgcgttcgttttgggcttgtaggtgttggtttctctatttctctcgtcgtcttttccaagggattttcagtagatgtttcctagtgtttttatgatcttggacgaaagaaaaacttaatgaatgcaaaaaataatggtggatgaaacaacaacaaaaaggtgggtcgtcgatgtagccggggcaccaggcacgctctacaccggcgagacct

SEQ ID NO: 358209 - DNA, 232 bp, Zea mays
aaggagcaaagctaccgtcgccgaagccgagcgacgttccaagaaacgaaacagccatgatgatgatgggagagggagcgcacgcgccgccttggcagcagtcaccggcggccagcggcatcatggacgcggacgaggtgtcgccgtacgccctcctggcggagctgaagcattacctgccgtcaaacgaggtgatggcgtacgacgaggacgacgaggaggccctggcggc

SEQ ID NO: 358210 - DNA, 257 bp, Zea mays
atccatatctagcattctactgtagtggcaacgatgatggccgtgtctctgcagctgcgcccaatccctcgtctccctccgtcgagaaatcgctgcgcaggcacaagtccgcggatggccgccttgagctgcagatacaaccaggtactgactgaacttggcggatgcctgacagtgtctctgctaaagatctattcccgactctcccgagcaatcaatcgtatgacgaattatttcatctctacgacagccaaaaa

SEQ ID NO: 358211 - DNA, 254 bp, Zea mays
ggatggacagactacaactgctcctcgagcattaaaattgaggatgacaagactggctcagtgtacactgtcgacgcacaaaacatctccgctgggtggagatttcaatggcacaactccttaattctgttgatattaataaggacaatctggagctgtttggttatagcctaacgctggatctaggactaaagccccgtttgtttccttccaagattatataatccagctcgtggattatataagcacctatt

SEQ ID NO: 358212 - DNA, 249 bp, Zea mays
cttggatgtgtggtggagaacaaggtgctttgcaactcactgctcttacgtttacaggaagaattggatgatattgaaaatgtgatatatcctaccagattggtgtctcttactttcccgttgaagaccagacaagcaggaatgaaaccaacatcaagagaaccattatctgttggtcatactacagaagagttcaatcgcagtcatttagttaaacttgatctcagtgatggacggagtttatattcc

SEQ ID NO: 358213 - DNA, 256 bp, Zea mays
ccttgccccaccatataacgatgacgctggtcggatttgcacttattttcatgactatccattttcaagtctctcagctggacgcacgaaggtagctggtaacccagataattatgcatggctggaggccataaacactccagtgaatatcaacatgcacactggcatgtataccggtccaactgtacaggaacttcagacatgatgtaaagatgaaccggagcatcaagcagcagctgggtgcctcttcactgat

SEQ ID NO: 358214 - DNA, 246 bp, Zea mays
gatagctattcctctccgacttacttttctgatctgagatagggttaccccggtactatcaatagcgaagtaactgattgcttgggagcatttgttggcatgtcatagagagccaatcagagagtgcaagtacgagttcaattttccatgtgatgagtagcggcggtatcacataaagaggcaggctccacaagaacattcgttcctaggtgcatgacttggaggggagctccttcttgctaagat

SEQ ID NO: 358215 - DNA, 245 bp, Zea mays
gatcgccaccgtggtgctcgccgagcctggaaccgtcacgcagcagcctacttcaacacggccgtgctgctcctcactcgtcaccgcttcctcggagtcgtccacgccccttcctgtgtctctaccgttgcgtcttcatcgggacaccgcttcgccgccggtgtgcactgttgaacgccgcccgacgtcgatcgtccgttctacgctttccctgtttgtgtttgtgtgagcatcgagtgttgggt

SEQ ID NO: 358216 - DNA, 189 bp, Zea mays
gttctagatcgcgagcggccgcccttttttttttaccctcctgtggattcgttctcgtgctgcgttccactagcccatgtctactctgtactatctcataaaaaaaaaatagatccagctgagacgttgttccctccctctttccctgtaccgtgtttcatggtgacttgtgacaatggatggtttctc

SEQ ID NO: 358217 - DNA, 240 bp, Zea mays
ctgggaccccagactccgctcccatttggcatggaattcaatccggcattcagacacagcgaaacaaggctaccaagcaaccacgttcgtggagcagctagtggaggatgaaagccagatggaaggcatacccgctgactgctcccaaataatgaactggcatgtgccggctgggtactgagttctcgcctatcccagaggatggcgagttgggacgaatctggatgtggtcattcctct

SEQ ID NO: 358218 - DNA, 248 bp, Zea mays
acacgacaacccccctacaacacacacacacacatccgtggcccggtccgggtggccggttcgattcgatgcttgtggccgcccatcagcgaacgagtcgcagccggatcccgactcacccgagggcgctcgagcgccatccgaagaagaccccctctccgcctccgcttctgcctctgccgccgagccctggtcgcctcctcggcatgcccgtctacgagttcatcgaccagcacctgctcttccgc

SEQ ID NO: 358219 - DNA, 245 bp, Zea mays
ataccaaccccgctggaaatgctggagaaggtaccgctcaaactgacagatccaatatggttcaaatcgcaactttgggagatgccaaaccagctactgatgattggattagcaagaatactcctcttttcgaatcaaaggaattgagactttacatggctatgttgggacaaaccaactgtttgacttatgaacaattgttggctaagaacgcaaacaaccaaaacaatgttgaggctgacgtt

SEQ ID NO: 358220 - DNA, 246 bp, Zea mays
ccggcatctccgttaatggaggagcccgtgtggaaggaggaaaagcagcgtaagacaaggaaacacgtgggcgccgcactggtggttccatcgccgccgactcctgatgcggcccaaaacttgcggatggaagccaagatgatggctgagggggcgacggtgaggaagaagcagaggcggctgaaggcggggcaggagcaatccggcgagccaccattttcaattgatgtccatccacacggaggg

SEQ ID NO: 358221 - DNA, 242 bp, Zea mays
atcctcgcccccttgtactgctcgccacagcgcggaatctcacctctcttccccgacccgagagagctcggtcggacaaacccaccacccacaccggccggccgggagagccacgaagttactgcgcgcgtacgtcgccggtttcctttctcaccgcacgtcgtcgtcatggacacctcgcaccactatcatccatggctcaacttctccctcgcccaccactgtgacctcgaggaggaggg

SEQ ID NO: 358222 - DNA, 239 bp, Zea mays
aagtagtcgaattctgtccaaatctggataaaaattacgtttagtacagtttgacctttctaaaggtcgattcttattatgatgataatacaaaagttatagaggactttataagctttacataaagtcctagtttactatttttggatgcatatcttgtgagttatgagctaaacaaatagttgctgttctgctgtccaaattcagcaaatatgaaatgattgcttggaatttctttt

SEQ ID NO: 358223 - DNA, 241 bp, Zea mays
gcttgaggtgggaggcctcgggatggtttctcttttatgctgggaatgtagcagcagcatttggctcagcttactatcacctcaagccagatgatgaccgcttaatatgggacaggttgccgatgatgatatcatcctcctctcttttgtcaatattagtaattgaaagagttgatgagatgcgtgggctatcttgtttggtctcactcctatctcttatattagtgagcagtgcatgtga

SEQ ID NO: 358224 - DNA, 239 bp, Zea mays
caggcaggaaagaagagtgacacagacaactcctggagccagaaccgatcatctccatctatcctgggtcagccaagcggtgatgctaataacaagtctagcgcttgggacggcgctcccagcggaggagctggcaggggaggttcaggttcttggggaaagagcgacgaggatggctggaactcctcccaggaaggttcaggttcttggggtggtggggcagaagctcctcccaggaa

SEQ ID NO: 358225 - DNA, 238 bp, Zea mays
gaaactgcacggttgggtatgagtttcttttattacaaaaagggaaggagcagcattcataggtgtggagcaccgatcaacttgaaaccaaaaccagaggtgcgttgggcctcaaagattatcgtcgatcaggcctatgaatgctgctccttccctttttgtaataaaagaaactgcacggttgggtatgagttggatttcctcttgcctttctgttgctctggactcttatggctgc

SEQ ID NO: 358226 - DNA, 268 bp, Zea mays
gcccagcttgccatcgcgtcgttcaccgtcgaccttgcttggcactatatcgttaggctagtcgaccatagtcgctgccgcgcgcgcttgtccctgatgcccatcgtgcggtatttgggtctcgccgattcgccgctcttgcccgctgttaattccgcttcgcagctcgcctgcttttgtggtgctgctatcccacgacactcgtgccggtgcatcgtcgactggccgggtgttgtcgccactagttcgctgtcgtccaaatcaccac

SEQ ID NO: 358227 - DNA, 251 bp, Zea mays
catcacgcgcatgcgtatggcgatcctcatgtaatcctcggcctccttgcggttgcggtactcgtctcctggcgcggggagcgcagcatttcctcgcgtggaaggctcgaggtgcttgctttctctacatgcgaaaccagcggcgaggcctccctttcatggccatggtaatcctccggtgccgggagcgccagcatctcctggcactggcaggcaggacttgagccgctcagcttttcatcaccgtacga

SEQ ID NO: 358228 - DNA, 259 bp, Zea mays
acgacaccatgtgcaaatgccttgctgctgctgctcggtggttactcgatgaaatgcctaacaaaaggattgaagtatctttcggccctggcgttttgccccggcaccggtaatctgtcctgggtttatcagaaatacctattcactattgtcgtgggttttccgttaaaactgagttcgatcgtgttggtgattctagtccttaagtctgtggtcgctgctgccttgatcccgcagctccaacacattattaccgtca

SEQ ID NO: 358229 - DNA, 263 bp, Zea mays
gttatttgatgccattggccatcatattctttttcatactaattctacaatagtctgattgactgtgtctacctgtgcttttcctttagtaagtgcttgtgattgtttctttttcttcgagtcctgtctatatggaaagcactattacttatctgtcattaactaatcttataatgttcattagttgggtaggatgagcaagacgttgctttaaaacaactaaggaagtcattggtgattagagcgaaacccatgccaagctt

SEQ ID NO: 358230 - DNA, 249 bp, Zea mays
gtctgtagattgagatgccgatcgacaaggcaatggagacactgctgcggttggggctggtgattgagcttcccactgatggtgggtcgagcgtgattggtctcccatgctcggaggcatacaggatcctgaaaagccgttgggacggcttgctggaacaagatacagaacaaggtagctgcggacacatgcatggcgatgatggcatgtagattatatatgtctaaaaaaagaaagattacatatgtg

SEQ ID NO: 358231 - DNA, 210 bp, Zea mays
ctcctctcctactcgagcagctagcccagtcaatcattctgcttggattggatccaccttgtctctgaaaatagcttcgagaccttagcgcccaagaaacggtgaccgaccgtccctgcgctagtagcaacagcaacaatggcggcgaagacctccacgacgggtacgagcaggacggtcattagttctagcactgaaacgggagtcaac

SEQ ID NO: 358232 - DNA, 259 bp, Zea mays
ctcagcggtggccggagaggcgacgggcaggatcgagcaccgcacaacggcacgacacgagagggacaggcagaggcctgaccatatagtgagggaagaaaaagaagaaatcaggaggaaaaaatggagaccgggcaacgaagacgacagcgcgatggaattgaattggaggtggaggaaagcgatggaggtggtagatggttcggttgggaggacccggatcggaggaggcgcacatttatggcctgccgcgcggcct

SEQ ID NO: 358233 - DNA, 261 bp, Zea mays
tttatcgaaacagtttcatgttccagttagagatacgctgagctcggataaagaaaaaaagaaatataaaacagatggagtttcagttacaggaaggacatatttgagtttttatacagcagccgaagcattcctctgaatcttgcaaagaacaagcaagctgaacaccagaatgcaggtgtgactgttcagataacctccgcgctgaaattgaaaactgtacagagtatcagcagaaacaagcgtgatcagtggcaggca

SEQ ID NO: 358234 - DNA, 269 bp, Zea mays
tctatatcatgtgtcaataggaacaaaaaggggttcaagtacaaaggttcttgcctgtaagaaatagaggaagaaaggaagcggcagagccaatgaaagatcaccccttagcattggagtgttcgaaatctgatgctcaagggcagcttgacagaactttggaggatgcacagaacataactgaattatcaaatcaggagaacctgttacccacggtgtctcctggctttatatcaacgtctaatgggaaaggtactaacatacatgat

SEQ ID NO: 358235 - DNA, 258 bp, Zea mays
gacatgcttacgaagcagaagctgctgcctccgtgacgaggcacgccgtgttgctcgtcttccatgactctgatgcctgcctgcttcgctcccaccaccccacaccttaatcgatggattaggaattaacctgcagcgcccgtccaggtctcgtgagagatttatatgtttggatcagattttagtttcttgaggcagatgacgacatgtgcatcctgcttgagatgcagaagctgcctcccagaggcttagccatgt

SEQ ID NO: 358236 - DNA, 257 bp, Zea mays
aagttcgaagctcattatgagaattgattggggcaacatcactgcggcccacagatttctgatgcaacctgtcaggtcttttcgatctgtgtttgaaatcagcatcactgggaagatctgaatcttttcctgaagaatattcttcatcgctgtgagacacccctcgttttcgttgagctggcatgggcaacttccttcccttggaagttttagttgctacaatcttaagtcgtttaggttgcctccggttctcaaca

SEQ ID NO: 358237 - DNA, 266 bp, Zea mays
ttggtggagaattttgtaagataaacatctcgggctgaattgggcgagacggctcaaaattatttcatactggaattgccttggagaaatcagcagggctcgtttttaactctttcctcttgacgcggattagatatatgaccttgtatatatcttatgacgatggattgccttgttgggtcaggaagaagaggatgcggaggaagagcactggccctgactccattgccgagacgatcaagtggtggaaagagcagaaccagaag

SEQ ID NO: 358238 - DNA, 267 bp, Zea mays
gccgccgaccgcgcgccgcccaccatggtcttcggagtgcacctcagcgccgcgcgaggcagcaagaggccggcttccccggaggaagaagacgaccagtcgcccacgtcgcctgctgggaagccacggctggcgctggactgcgccggcttgagcctggccgtcgcggcgccctccgccggcgcctcgtcccctgctagcactagctagctaagctcactcagcttgcgcgcaacctgacgcgcgtatgcatgctgctgcatgcaa

SEQ ID NO: 358239 - DNA, 279 bp, Zea mays
gcagccttcgcttcgctttcctcgcagcgtgaccgactgaccgcgaaccgccgtgaaccctcctcatccccgtcccccctgctccggcttcgccgtgctcctctctcccacttgcgccaacattcaagccccgaccccaattcacatccgaggcgctcgcacctttccatctcctacgcccacgcccacgcacgcgcgtctcgtgtccacgcctcgccgcgacttctcccccctaaaccccgcgagaggccgaggtacatgagagagtgatcggcctcg

SEQ ID NO: 358240 - DNA, 131 bp, Zea mays
gctgcatacaattgcagtggtttacgtttagctcataaagtgcaaaactggaatggttcttatatgtttcttggagttatgtttgtctagtttctgtgttgtaatttaaaataaaaaatcttgtagcctgg

SEQ ID NO: 358241 - DNA, 223 bp, Zea mays
tggtttcctcagttccctctgccttgcttggcttgatgtagagagttatcagattaaaatatctctgatgtgcttcgttattgggtggaatcatgtgtcccagcagtgctgggaaatcaagatcaagatgtatctttctttgcagtaatgaaatgttacaatcgagatcaagttgtatctttcaaaaaaaaaaagaagaaaaaaaaaaaaaggggggccccga

SEQ ID NO: 358242 - DNA, 267 bp, Zea mays
ggaggaccatatcccacacacgcatatgatcggtgcgctgtgtgtgtcgtctccaccccccggccccttcttctcctcttcctcctcccgctgtccgctcttgcataagccaactcgaaccagcgaaggctagctagcgcttccgccaagcctgcaggccacgccggccggaaccgagtgctctgattgattggtcaatcagtcatcagtccgcaatcgtatagctcatcagctgagcgaagacactgctgctagctgcagggcggg

SEQ ID NO: 358243 - DNA, 272 bp, Zea mays
cgtgcgacggaagccgatgcgccggcgccgaagcgaccggcaaccgccgccgcaatcctttgccacgactgcagtcgccaccgacctggacgagctgctgctgactgcaccgccgccgtccgcgtcggagccccggagcttctcctatgcggtgaaacagcagtgctgggagaaggcggagcgggtgcccggacgtgacccggagaggtggcgccgcgatgcgctcggcaacatcgtcttccgcaagctcgtgggttgcccggctgcctttg

SEQ ID NO: 358244 - DNA, 245 bp, Zea mays
gctacttacagctgtgtcatgatcatcaacgtgtcatatgtgttgaactgggaaggctgccttcatgtcttcaagaaatggataagagctcaataataacaagtggtctgcttcagtaaaactttggttgaatctcagactggctcattaagcattgtgttagctatgcattatggtgaaactgtctgctgaaaacgagcatgtggatcaaattgcacactgctacatgacactttttttttcta

SEQ ID NO: 358245 - DNA, 262 bp, Zea mays
gtggcacggcttgaaaaggagtatgagaaccagcagaagttgaggaaagcaacactgacctcgtctctagggcctccgggagattggagtagggagaggaacaggagggtgtgaagtctgtacattattcatgtcaaaaatcataggctacggtatatcgtctgggggggaacagcggaaccaggcaactgtttcataagaggtctcagaacatttgggagatgtgataatttaggtggcgggtgatgtatctattgggcca

SEQ ID NO: 358246 - DNA, 267 bp, Zea mays
catgtcgccggcgtggcgcgccaggccggtcttcgtccagtctttcgcgccgacgtcgctggtccgcgcggccggcctcacggactcgccgctcgtcttcctcgtcgacgacgtgaccgtgcggaccgaggacaccaaccagccgtacgacgatatcacctccggcgagcacctggactacatgaacaggtacgtggtgggcatcgggccctggaaggacacggtggtgccgccgaccaaggacaaccggctggccacgccgtcgga

SEQ ID NO: 358247 - DNA, 262 bp, Zea mays
gctcaagccggtcgaggcgccggctgaagacaagggcgcgacgcagaggatcaggggagcagagctccggccgagcgcgccatggagagagaccaggggaaggatccgcggccagagaggaagacgctcggcggggagagagaggagtggctggaagacggcgcgaatccgagctgaggcttggtcaggacgcgtcaactggagcttcagggcgcgcggccacggaggcatcctggctggggagaaggccgttgagccgggg

SEQ ID NO: 358248 - DNA, 250 bp, Zea mays
gaatcatcaagaaaggagcctgaaggagctcttgctcttccacaagagcctggcaacctggtaaaaattaaacaagaaagtttggagaatgaaaccgagatgtccattttcagggagaatgacaaagtttctggaaaagatcaggcatcagcagagtttataattgatccttcaaatacggatgaacggagggagaatgatattgggcggcccgatgaatcagcaaaaggctgcgaaaggttaacttctg

SEQ ID NO: 358249 - DNA, 241 bp, Zea mays
cttagagtcaaaccgctagctgctactccatcatcgttgtcgttcgcctctgtaacgcgctcagcagcgttgtgtcatggagcgtgatagggaacaccttggtcgcgtgttccaccgtgccgagctctctggcgtcgctggctctgctgttccctgtcgagctcgccccaaccgttctcctgctcctcgcatcgtgattgccgagttcaccggcaaccacagtcacgtcgtgctgcgccgc

SEQ ID NO: 358250 - DNA, 260 bp, Zea mays
gaattcggctcgagggaatactatgggatcatgtctttttacacaccggcaccttgctcaaaccctttttttatacttattcattattccatctggctcttctggactctattttatcaaagcagttttgtgaatcgaagccctccttgtccgagcaattttccgctccaccggggtcacgtcacggcggaaacaaaaacaaaaggcagtcttgtaaagacgaggggcggggcggctgcctgcgcggacaccggacagtc

SEQ ID NO: 358251 - DNA, 238 bp, Zea mays
gtccgctgccgagacgacgaagagataaacccaaatggaatggaccaccagaaaccaaaccgtcgtcaagaggatcggagggagggccggatcggaggggcgggcgctggaagccacggtctgcttttagggtttctctcccctcgccgagacagacaagtactccaccacacaaacgcgccctacccacgaaattcacaaacccaccggaggcacagaaatttcccaggcaaggaaa

SEQ ID NO: 358252 - DNA, 239 bp, Zea mays
ctctatcttctctcttccctgcaagctccattttttcctgcgcgtcgagccgagttccttccctccctgcgcgcattccagctcgccgagctccctccagcctccctcgccatggccgtcgcgcccctgttccagctcgctcggccatcctccctgccttcagccatggcaccggccgtccctattccatccggcagctcgcctcatcacgctcggctccctggtggctggagctcgcc

SEQ ID NO: 358253 - DNA, 239 bp, Zea mays
tgttaataatcttctaatgcagatccaggtaaagaaaatgacctcttctctctattcacatacaagcacttatgacttatccatgtatcttaggaattgaatttgtggtcaattatactaacatgttttcagtacatgttatttttgctccaaaaggccatgctttcagttagtgcttttgtatcgttggaaatggacgaagttgatgctaactctccgtacttctctcctattaagat

SEQ ID NO: 358254 - DNA, 242 bp, Zea mays
gggaggagttgctcgctacgtggtgggggcggcacgccaggggaaggaaaattaagaaaaggaaaactccccgcgcgggaaggcctggactggccggccggccggccgctgggcgatcgatctggcggccacgggacgacggggctctggcgctctggatgcactgcactgactgctgccgatccggatccgatccgatcgctttctggcgttgtgtctttgccgcgcggcgtgttgtggcg

SEQ ID NO: 358255 - DNA, 238 bp, Zea mays
gtcgctgcgaaaaaccacagacacgcggaaggacatgctcccgtccgaccgagctctcgactctctctctctccctctctcccaagacgtgttgagctgtttcccagtccttcgtcaccttacctccgcccagactcaccagcgcagtcccctcctcttctcttcttcataagcccactcaaacagaagtggagcggagttctgcagagtaccactagcactagtaagtaaccttggg

SEQ ID NO: 358256 - DNA, 119 bp, Zea mays
aacttagaaggatatcagatagtgatcggctaacagatagtctccgaaagaaatcgagtaatctgcagcctgttgttaagctttatcagtacttaagcagaatcccatacatcaagggc

SEQ ID NO: 358257 - DNA, 256 bp, Zea mays
gtttgtgtttgtgttggcaaatgaggtagcggcgattgtgtcaaacagtctcgccgaagaccatgcaagcgccgatcgatccatagcagggccaacccagcctcatacataatctgagaattcttcagcgcacgacgctcaccagttaggctggactggaacacacctgctactactccctgctgcacgccagtgaatcagtgatgagacattcagagatgcacacctagtaatgcgtttctctctctcttcctct

SEQ ID NO: 358258 - DNA, 252 bp, Zea mays
gtcgccgccagtccagctccaggcgtcgagcgaggccgcagcaaacgcagcatcggccatggcggccacccgcctcagccgatccgagacattcctgtctgggtgagggtgaggccaaccaaccgcttcgctcctctcggtaaatcggcgatccatccaccggagccgcaaccaaaaagcacagcaacgcccaaattaaaaacagggcaggggagaaaaaaagctcgcagaagtgagctccctcctcccccc

SEQ ID NO: 358259 - DNA, 112 bp, Zea mays
gctgcttctaatgtatgtatgtcgcattttggttgatcggcgtggtgcacaagtgttctgtttctgtaaaatactagacgattgtgttgtaaaactaaccaaaatgccaagt

SEQ ID NO: 358260 - DNA, 255 bp, Zea mays
ctttctaccagctgaagagaatgttgctcctgcaaacttcattaaatggcctacgacacaagatcatccaatcgagaataatatgcaatgggacaataactagatcgtcctgggatgtttcgctgcagctagagacaacaaacttcggtcgagcatgttctatcaagtgctgcgcagtggggggacgaccgtggatgaaggagctggtttgtttcatctagagaagcagggcgccgccatatgggtgcaattctt

SEQ ID NO: 358261 - DNA, 249 bp, Zea mays
caggaagagtggtaggcccagtactaccattcgagagcgcaggtcactgatcaacacatcgcgcgacaggtggcaaggaacccagccgttcctccagcaaccaacacctcgtcagcctactgctaccacctgaaaccggacagcgccgacaggcaggagcaacagctagagcttgatcaagaccatatgcagtataggacagggcagcatcccatggatgccaaggtagcacatgagatgggccggaac

SEQ ID NO: 358262 - DNA, 247 bp, Zea mays
gccggccggtcggcggcggaggctgtacagagaggaaggagagcctggtccaagcctaaacgtagctgctgctaactttcagagttcatgttgatctcgtgctgcctgcagtatgtggcatgcagctagaagaaatctttgttctgtcagtccagttgttctatctaatcttgagataatccctggtttctgtaacagacttggaaactatgattcagtcgaattctccatgaactgggcaatcctt

SEQ ID NO: 358263 - DNA, 243 bp, Zea mays
gaggcatccaaatctgaaatctcggagttattttttttaaaagttttgcaacaatattaaagtatttgatggtatagtattagaggcttaaaaaatgtttagttgttagtgacaaaagacaatttttaaataccgtatccttgaagttctagatactccacatgataccttttttcttcttcgaccctctgctagagaagcaaggattgactgtggcgaatcgtgcttcactaagaacaaggc

SEQ ID NO: 358264 - DNA, 248 bp, Zea mays
accggggcaaccggggacgcggacctcttcatctccgttcccgtcgccggcgacgctggtctctaggtgtcaggccgcgcgagccctagcatagcagctgtagtagtgctagactagctagtagtttagcagggcgctccgcgcgtcagttccaccagaaacagaaaggcaaattcggcttcgcttttacgcccgcttgatttgcctcttccaccctcttccaccagaaggcgggcggccgagcgacc

SEQ ID NO: 358265 - DNA, 239 bp, Zea mays
tgacgaggtggacgccccgcggacgccacggtggtcatacgcctaaagccctaaactctaaagcgtcactgtccaacgccttagcgcttaagcgacgattaggcaatgatttagcgatgccataacaaccatgttacgtaatgcagtgaaactcatgcttgtgactttcctcaagacattcttgtttagttggcttagctgtgatcgatttgtgattattttctttatttagaagttag

SEQ ID NO: 358266 - DNA, 241 bp, Zea mays
gcgcccgtagccttggtattatcctggatcggcggcggcggcggcggcggcctgtctgacttcggcttcttgtcggcgagaggctcctcgtccgcctcggcttcggattcggcgttgttcggtaaggaagcagcggcctgcttccgcttcgaccgtgcccgcctgttctggaaccagttgtacacgttcgtctccgagatctggccgtgctgcgagagctccgctgttatctcctttatct

SEQ ID NO: 358267 - DNA, 265 bp, Zea mays
accgtctcctgttcctgcttctgatgatgtggcgccattgtgtcaaccagtagcaccatcttcaggttcggcgctccctctgtcgtcacctcatcatgatgtgtctgaagcctctacacaattgaatcagtagcgcctgcagatcaagagcagggtgatctgacctttgctaatcctcgaccgactataccagacttcagcggggaattgtaaagtcaaaatagtatactgatggcacaattcgttatgggctctcctctgctat

SEQ ID NO: 358268 - DNA, 257 bp, Zea mays
caacagtgtagtaggatgtagatatggaaaacacttgcttttcctccctaaagtttttttttggaaacgttttcctcctttaagttgttgacaaagaactgagaaaagttggatggtctcacaaagatcttgtccatcctcagaactgtgttcctttgttctagtatagtttctgggagcttgataggcaaaataaaaaaaaaggggggcccccggattattgacctgttaacccggggattaattccgggccggta

SEQ ID NO: 358269 - DNA, 104 bp, Zea mays
gcagactaagatacatgctggattgtaatgtaaccgagtcccagttgtatgagccttttgaggtagaaacagagctaagagctgtggctttcggtgtcactgtt

SEQ ID NO: 358270 - DNA, 271 bp, Zea mays
ggctaatcgaaagaaaagaaaaaacagccgccacggatctcctccgctgagtcattttgtagccgaaaccctagcgctccgccgaggcgccgagcaccaggctccagcctcgcctaagaaaaagccgggccgagacaaactacttgtactaactcagctgctatgccatggatctggagatcgttgggcggtgtgccttactgttcgacgatgacgcgacaacggaggtcgtcaactccggcggttccttgtcccctgggcggccatcggg

SEQ ID NO: 358271 - DNA, 223 bp, Zea mays
tgcgttgtccccgcccgtctctgtcgtctcccgtcgcgccgcggcaggctgtccagcatgataagtagctgccgcgccgcgccgtaatcgatccctcctcacaacacaggacgcaacgcatccaagcgctccgcccgcccggttggattcgattcctcccaaacttgtctcgtccccaagcagcagcctttccctctctttcccatggccaccaagcccggca

SEQ ID NO: 358272 - DNA, 270 bp, Zea mays
tctcaccggagcattaggctacgaaggtcgcgcccatgacagggtgtggagttgtggtagcgtgcccacaccggcgagaaattgcggaggcgacccgggcacccaccaccgaacttgcctcgatgagttctacccacgccaatggtcaccccaaccctggtttgagctccgagcagcaccgcttgccaggcatcagcggtggcgctcatctctggattccaccaccgtgcacaacgaaggtgttcaccggctagtctttcccatggctgg

SEQ ID NO: 358273 - DNA, 261 bp, Zea mays
gcgagagcctggttttcgcagggaatgacttgatcgtgctggcgaagacggggtccgagagaatgggcgcgttcgcgttgcccattctataagagctgctcagtaaccgcgagggtgagaggcttttttcgcttacatgctctcgccaacgagggaaggacctgatcgcgctggtgcagacagggtccgggaagacgcgcacgttcatgctgcccattctgcagaagctgctgagcaaccgccaggccgagcagtctttct

SEQ ID NO: 358274 - DNA, 259 bp, Zea mays
atcgccgatcatcttctagctagcagctagcttgttattagctcatcggcgatggactacgtggtcgcccggatgcaattgcaacaagcagcagtgccgccgcctgttcactccatcccgaccaccgtcctccgcctgtgtcgcagaggacgcggggcagcgcgacgatgcaacgacagcggcgtgaggcactcgaacaggaggtggcagagctgaagcagcagctatccaacgagcagacggtgcaccagatcctgga

SEQ ID NO: 358275 - DNA, 269 bp, Zea mays
gacaccatatcgccggaagcttgctttatgccaacttcaaggtaacaaatatttttgttatttcattactattattattaacttttgggtcgtgttctaacgaaggtcatttcgacagagtatattattaagcaaggttcgaagatgcaacaagatctggaggaagagaaaaacaaagctgtcattcaagatttggctgaaaatgttgagaatcacgaggccaatctgaaaaagaaagacttcgcaattcaagatcttgaactcatggt

SEQ ID NO: 358276 - DNA, 272 bp, Zea mays
ccgcatcggcggcgacgcgccagacacaaactacctctttatgggcgattacgtcggtgctcaagctgactgtggctcagtcgacggtgttattgatgctaaacggactgttcaagctgatgatggcttcctcactgttgctctcggatctcaaagattctttcgggcgttatcacgtgacagattagtctatttggtatctaccgtggctactactctgtggagactgtgtcgttgttagtggctctaaaagtacgttatagagacagaat

SEQ ID NO: 358277 - DNA, 270 bp, Zea mays
tcaccttcaaccgcggcagcatgtgcgtcgagccggcttgcaccgtcgggtggagggaccccgggttcatccacaccgccttcctcatgtacttctgtaccaacaaggagtaccactaccggatctggcagccgtctctgcacgcgtgatcgtgttcggcgacatggggaaggcggacgggacgggtcgaacgagtacgcagcgtaccagcccgggtcgctcaacaccacggacgcgctgatcgcggacctggacaactacgacatcgtg

SEQ ID NO: 358278 - DNA, 106 bp, Zea mays
agctcctctcgtgcgtgcatgtcgtcgtctccaagtcgattcttggctgtcgtagtatttttaagttatcccggccatgtctgtggttgtcaggcgtgtctgttgc

SEQ ID NO: 358279 - DNA, 271 bp, Zea mays
ctggtcgatcgtcggtgactgatggcgatggcggcggcgcaattggaggccgaggaggagctgcggctggaactggaggcggtggcggcggtgtacggagacgacgtccgcgtgctccgcgacctcccaccgcacctcttcgtccacgtgcggccccgcaccgccgacgacacctcgcagcaggaagctgaacttggacgactgggatcctaagcagaagagccactatccttgtaggctgttattcgaaacttgtttcctacgagttgtt

SEQ ID NO: 358280 - DNA, 272 bp, Zea mays
gaaacgtacggatttccaactccactgaggtcccttactcccacctacgctatagctatgctacgcctacgagaatgaagctgctgtcgtcagtcctgtcatgtagattgttggcgccatgtgcgccaaaagattcggaaccttatccggagtccgggcaacatgtctagtcgccaacaactagttgcagctgcacaaagacagtcacagtcacaaactgagaggcgacatggagccaccggagttgacccacttcttgcccgttgcattcg

SEQ ID NO: 358281 - DNA, 172 bp, Zea mays
atcctcatctgtcctagggacgcagctggagaccgcgcgcagttgcccctggtgtgtcctcacagagcaatcatctgctctgaccttgcctcttcctgcccttgcccctccgccgatcattgtcacaggggtcgcttgcacctagacgtgggctgccagtccctgggtccgt

SEQ ID NO: 358282 - DNA, 269 bp, Zea mays
cccacttcaccgcgcggaaaaaacaaagagattcccctttgctctacaggaagcgccgacgccgttgatggaattcggaaggaccaaagctgctgccgtagccctgatccccgaagcgaccttccgccggtccagtctgtcttctcggcctccgcgacgccgtggtcccgggaggtgtgggtcaacgcatccaaataacggctcttccagagcttacgctgaaactagactgatcaagaaggcgaccagctgtcaaaatgcatagacag

SEQ ID NO: 358283 - DNA, 262 bp, Zea mays
ggcggcggcggcacgggactgttctggccgacgacggcatcgatgacgacgagattcatttgcaggagtgttaaaacagctcgttgttttgggatttgccgcctcaagtttcatctagctacctccaacaaaccctcaatctccatggctacatcgatatcaactcaatatactaacgaggaggaaattaaaaggaagagaaagaagcgaaagagagttgttgtattagcctagtgtacaataaagaccaagcaaatggaga

SEQ ID NO: 358284 - DNA, 262 bp, Zea mays
ctttgagtgagtaagtggtacttgatcctgttagtggccttgtcggactagatccgagggactggcggtttattcctatttaagtgtggtctagcctttaaggcgggacttaggcacttaagtcagaataattaggcggtttcgccacaaaagctagtgagccgaagctagtgctgaagcgttgaagaagactttagaagctccttttgttaaaatctatagtaacacttttggaaattctttgtgcaagaaagtgtattat

SEQ ID NO: 358285 - DNA, 265 bp, Zea mays
cctccaccattgagcgtcccctcgcctttgtccacctcaccgccggtctgttacgccattccttgcgccctgctccgaccaggctcgcctaggttgcgacctcgccaaaccgcgcccctgctcgacaccggtgatggcaccgttggtccctgcgtccttccctggtcgtctcacctctcctcgacgcccctgttttttccccagctccggtgtccgtcgcgccctgctccttccattcgtacagcactgctctggtggtcgtcca

SEQ ID NO: 358286 - DNA, 280 bp, Zea mays
tctatttctggtgcacgacggggacaaatcacccagggtggtggtggtggctcttgtggctttttcaagtggtgtgacgagctacagcctagggttggtgcaccactgcaagcttcagcgcaataccaagcggattccatgccaagcatccaaaaccccagccagaggagctcgtcttcctgcttcaagtgcgggcaggagaaccactgggctcgagactgtccgaatcaaccgtcggatccttatcctgacaagggtgggagaccagtagctccagcgg

SEQ ID NO: 358287 - DNA, 146 bp, Zea mays
tgcattttgtagccatgtatatctgaatcagagctctgtgattgagatgaatatggttttatgtgccgtcgcaacacactgacattgtactatggtattataagtatcaatatgaagtatttctttgaagcaccatttagatcagc

SEQ ID NO: 358288 - DNA, 275 bp, Zea mays
gctagctcactccatcgtctgagccaaccttctggccatgacacacacacatggttaattagatctcgaacccttgtattcattcccatccgttcctgcttttggtcttgttcatccacagaccacagagagcccagccactacgtagatagatagatagatacatacatactcaacgaactggcggcgaggatctgaggagaattaggaaaaaagaagggtatggaacaacccttgaagctcaggagggatagcgcctaggaaaacacatagat

SEQ ID NO: 358289 - DNA, 269 bp, Zea mays
gcgtctgcacccaggtacccaacatttttagcttcgatcggacatgatctcactttggggctgtagcctagtgcttctatatgctctcgatctgcttgactggtcggtgtgagaatttggtagatagcggcatacttgtgctgttgtgcaatagtagcactatgcatggtcatctgctaagatcgatggcagctcgtaattaatggagctagtctgcctggttcagtagcttgtcgcctatggctatcggtaataaggccggttgcaat

SEQ ID NO: 358290 - DNA, 270 bp, Zea mays
cgaaggaaaggaaaggacccagtctctttaaaaggccctcgagaaaaatctccgcgtcaccaccaagcacgtccccgttccattacaacaaaagatagtgctagtaagcaatacgctcaatttgagtttgaggtcgatttctggagcattcgagttcttttccagtaaacttttcaggtttaagcgcggattgatggcagagctgctgtagatttggagcattttggggttggttttttgcgatttgaggatcgaatcgggctggtacaa

SEQ ID NO: 358291 - DNA, 265 bp, Zea mays
gtcctgcgaactaaagtaggtcgttcctcttcatcttcagctctagattagtaataagtttctagctaattcagtaaaatgccttacacaagatactcgaagacatggaatgtcacttacgcactgtcatgatctgacaaggagaactgccctccaaggtccatgtcaaagtctattgtagcgaacgacttatgggttttaactgcagagtctggttgctggaagaaaggaaaaaagttctgtattataacatgtagaatgtgtc

SEQ ID NO: 358292 - DNA, 269 bp, Zea mays
tttctatttttaaatatatttaaggcgtcgcctcgccttacgctttacagcttaaaaggtaaaaagggggtcagtcgccttacctcgccttaccgccttaacaactatagatctggataaggctccaagggggatgcgcgtcctggacattaggtccaacttgaattgtcattaacagttctgattagagaatttagaccgcttccttttctttactccacaggtgtcatcattgaatatattggacacagagagtattgatttacaaa

SEQ ID NO: 358293 - DNA, 268 bp, Zea mays
gcgtcttcctcgcgttcgcgccggaggggcgctgccgccttgtcccaagtgcttcgccaccgcgagttcgcggctgccattcgtcgtcgccaccgctctatcggtagttgtagctaccgtcccctcctctcgcccgctcgtcgatgacttcttccccttcctctcctcgttgtcatcctcgcccgcgccagtggtaggtatcgccggagctggtgcctacgggcgtcgacgcccaaccagcagggcgccagagctgcaatttcggctg

SEQ ID NO: 358294 - DNA, 122 bp, Zea mays
ctaggccaaaacccgacacgccttctcaccccaagatccatggcgccaccgggctagtaaccccaaccgccggtccgccctcgctccatggcgctctccaagctcccgctccaccattcctt

SEQ ID NO: 358295 - DNA, 265 bp, Zea mays
gccgcagatggtctcacccggccgctactagaggcttagcgttgagagccacatgttgagtgaacagacggcggctagcactagcagcggcgagcatcaggagaggagcgtcgtcgaggacaggcggctgaagccggtgggggagaacgaggaggagttcagggacatccacgcgctgagcccgccgcctgtgcagttcagttgcatcgttcaccgcttcactccacgggatcagacagagtgatcagtgccgtgcgtagctgtg

SEQ ID NO: 358296 - DNA, 265 bp, Zea mays
cttcttcctccactccaatcgatcagcttaactagctgaggcaacgagctagctcctgaccactccactccacccgtccgtccgtgcacggcaccaattaattccatggcgctgtggtggtactgctagcccgacgtaccagcaagtcgtccccttgagattcaaggggaggatagctgcgacctaggcgtccttccgtccccagtccggcagtcccgagctgagtgcctgagcccccagtccccactgctgcaggagcaggaca

SEQ ID NO: 358297 - DNA, 263 bp, Zea mays
  unsure (1)..(263): unsure at all n locations
gcatcggctggaacccctacttccacacaacatacgcaccccgggagaantancatcccggagganangganagnggggtgatgagtatgatgaacaatggcgcggaggtcgacatggtgctcataggcaacttccagcagcagaacatgcacatcgtctacgacgtggagaacagcaagctgctcttcgcatctgcgcagtgcgacaagatgtgacgaactcatcacttgctagcttgtgcgtacgtacgcgctgcacgtgt

SEQ ID NO: 358298 - DNA, 99 bp, Zea mays
tcctggaccacctcctcacgcacgggcccacagcgtcgcggtcgagttccagaaggacagggaggacatcgagcggatggccaccttccacacaacata

SEQ ID NO: 358299 - DNA, 280 bp, Zea mays
tgacgctttatccccatcccccgtcccctcgccttccagaaccttcctttcccgaaatagccaaatccataccctatccccctacccaccattccagagccactgcatctagtaggctgctgagctacccaccctccccgcgctcgtgacggctcacccacccccgccgtggttccgggcaacagggaagaagatcccgccctggtctaaccacgaggtcccagaagctcccgccttcccgctcaaatctctcctatttctggttcccgccgggaagatc

SEQ ID NO: 358300 - DNA, 172 bp, Zea mays
ataatatccacaaaattattttgccattgctcgttagtatttctctttgtgtcctgtttacttagaatgattagtggcagtacagttttaaataaaaaactcgaccagagggaaggatgtcctctgattttggtcatatcaagtttgtgccagccttcaaacctggacgggt

SEQ ID NO: 358301 - DNA, 276 bp, Zea mays
atcactgttttcaggtggcagcagattcttgagaagaatgaccaaagtcctgttacagttgcagatttcggagtgcaggcccatattagtttgggtaatccatagcaaaatttcaaagttcagatttgtgactttgtctaatgccatattttgccatgttgctattgaaagagctccagagattgttcccatcgatacctcttgtggccgaagaggattcagcttctctaaggtcatccaaagctgatgataatagcagtgatatactgttgagtc

SEQ ID NO: 358302 - DNA, 273 bp, Zea mays
tgctgcttctgttttccatcaccatcaccaaccagaacagagaccaagcaagcacgggctacaacttaattgcacatttcagtcttaattaacgctgtcatcatcactacatgcacggaaatcagcccagcaaagtcaaaagagacgcacaagacaaagaccacatcgtactgacagacttcatccagggtgccatgaaaagaaagatacccagctaacgctgaatgatgaaacgcgagatagaagctgcaggtgaggagcttagttcagagc

SEQ ID NO: 358303 - DNA, 204 bp, Zea mays
acgagacgcccctcgcgctccgcgccatagggacgccattccatctcccggcgggataacccagtggtgctcgcagaacgatgccgggagttacgtcgctagccatgtgccaagcggatgcaccgtgccaatggacgtagcatggagctccaagaacaactgcccacagaaggatcgccgagctccgctacacggcgaatggag

SEQ ID NO: 358304 - DNA, 262 bp, Zea mays
gggatagagggagggagctggaagctgaaattggggttgggcgtcggccgttgctgaatcacgaaagcagcgcgccgtccgccagtgccgccaccacgaggttccactggatcttgacgtccagccggactgcagcatcgtctgtcgcggcgtcgagcagagaaggagtagacaaccggacttgggcaggatgagctcgaggggagcagggaggcgggcgcgcgccgagcaggaaggagcttcaaccgggcgccaggattgc

SEQ ID NO: 358305 - DNA, 179 bp, Zea mays
gtagcatatggtgaaacgctatccatgtcattgcatgttatttaatctaagtaaccgttcagttacactaaccgatgttgaatgaggcatgcattcataccttgttgccggtcagtcttgattggcgtcgttctgctcctgaagctttcaattaactgccagctagttctagatcgcga

SEQ ID NO: 358306 - DNA, 255 bp, Zea mays
gcggaggcctagtcgcctggagacacccaccaccaccatttgcgtcggcgagcgggcggcggcagtacattccgagcttaagtttttatttttctctatttttgtttgtgaggtagctgccgcagcgagattagatgcagcctgccgctcaggtgtctgtatccattgactgagtgagagactgcttcagtgggtgtcattcttcctcgcgtgtatgtatattggtggaatcgttgatgtgacttttttagcttc

SEQ ID NO: 358307 - DNA, 263 bp, Zea mays
agtttctgaactgctgtgttccaaaatttcagtctggttcttcaagaccccatcggtctgtatcattgatggtttgctggtggtaccctgtagtgttacagaaccatgtggacgtgatgcagtttggagtcgacttccagaaatcttttctccgatctcctgcaagtgacaacctgacattgtggctttgattgcccgggttggaggttgctttccagtcgcagcgagtgggttgggcgtgctggtgccgctgaggcgtggag

SEQ ID NO: 358308 - DNA, 101 bp, Zea mays
accaattggagattgccgtagatttccgcgattatgggaactcatttaccttttatttcaaacgtatcagataatcaggtaaatgagttcccattagaatg

SEQ ID NO: 358309 - DNA, 219 bp, Zea mays
cttcttctcactccaatcgtcagcttaatagctgagggagcgagtaagtctgacagtcaatcacagtcgtcgtgcaggaccattaattcatggggctgtggtggtagatgtaggaccgacgtaacagcaaatcgtccccttgagattcaagggaggatagctgcgaaaataggcgtcctttccgtccccagtccggcagtcccgagctgagtgcatgag

SEQ ID NO: 358310 - DNA, 208 bp, Zea mays
cgcggtggccatgccgcccgcccatgccgcccgcccgcactgcactcatcggcagctacgtccatgccggattctctagtgttcggtgctacgcacacgcacaggtatgcgcagggtccatcgagctcgcttcccctcggtttggctctcgcttagagggccgcacgcccgccttgctgcgcgcgcatgcgcaggccggtctaggcag

SEQ ID NO: 358311 - DNA, 176 bp, Zea mays
gccgactgcgagtgatagccatgtggaggaggcgcaggcaggggatcaagacaaacacacagatccaggctccaccccgcacgtcgggcgtgagggaagggaccagccccagcacctgaccacttggttgggtcgggagacgacgcaggacatgatggatcacctgagcctggcgc

SEQ ID NO: 358312 - DNA, 174 bp, Zea mays
tctagatcgcgagcggcccccttttttgtttttttgaagcggaatttcagtctcttgacccggataagggttcggtctttactaaagtgccccatatttatcaagcgcccgcgtgccgtgaccagggaattcagctcaggcttccaaagcttcttcaacctgcccttccaacaa

SEQ ID NO: 358313 - DNA, 193 bp, Zea mays
ccagaacaagtcaatctatggtgacaattaccgttattctacagatccaccacttaaccctagaacaacaacaccaataaacgagctgcacatggaaaactgacatcccaaacaatagaccattaaaggaaaatggagccagcaaaagagactacctgatacgtctcgacggtgtcgacgtctcacccaagcc

SEQ ID NO: 358314 - DNA, 277 bp, Zea mays
cgcctgcttgttcacctccatgtgctgataggctccatctcctcctgtccctaaccccctccagacctccactcctccagagccctaaaccccacgtagcgcggtgtgtcagtccactcgcccgcccggtcggcgccgcacccatctttcggattctaccctaaaggcatgaccttggtcttccaatctggaaattgagtagcaatcaagtatggctgcaagagcaatcacgaggagaaggaagtatcttttcgaccatgttaaaacacctaacctc

SEQ ID NO: 358315 - DNA, 274 bp, Zea mays
atcgatactgggaagctttcttcaaacgtaatcacataaacgacacaattgcggtacgatactgctgcaatctgcttgaatatgccgataatgctgaacaacatatgagctatgagtgccgttatcaagttcgtctagtctatttaattatgatgaatccaagtattcgttatttatgccgcgaatatgagttcgaaaatgttcaatgctttttggttcgatggatgtactggtggattcctcttttactaattgcactcattgtgggaagtgt

SEQ ID NO: 358316 - DNA, 190 bp, Zea mays
ggatcggcataagtgcatcggcgcgagcgggcacgccggcgacgccatcacgtcaacgctttcgaaaccgtcgccgtcgcaccatccgtttccatctccatggctccaggtcctccacggttcgctcaccttcccctccaaacccaaccaagccaagccaagtctcgtccttcgcgatcccgcgccgtcc

SEQ ID NO: 358317 - DNA, 267 bp, Zea mays
cccttccccgtcgttcgataggtgggcgaccaagcttgtggcgcgccgatctcccgatctggtggcccgcttcttccgcgatccgccgcggaccgacgcgtccggcccggatttggcgctgtgggaggatcaggagaggagtagcagttaaaatggtgtatgtatgggtaggaggcgaaaatgagagcagccagagtgttgactctgtcgatttgcaacacgtcactagtgatttgcttcatctaaagggcctcagcaattgtgctt

SEQ ID NO: 358318 - DNA, 180 bp, Zea mays
caagtaataaaggctaccaatgacgtaaaatttcttggtgtagattcggtactatgggttggtactcgtcaatctttacgtggtgcctggggctgtaatagtgattcgtatggtaagtgtgtcgaattgcaaaggagggactccagaagtgaggcagacgagcgatgctatcttggttct

SEQ ID NO: 358319 - DNA, 269 bp, Zea mays
gccagctctggtctccgcttgacctcgccctgcagctcggttcctggtcgtagccgtcttggactgcgtcgtcgcccaaatccaaaaacgacctccccaacgccctggcggtgagctcccagtcctctgctcaccggcgccatggacagctcgtggtcgctgcgttgcctgggtcccagtcaccatttccaagccgcccaactcctagcccgtcatccctgttccccacagccgcgacgttgctcctagccctctgctcgctggacgca

SEQ ID NO: 358320 - DNA, 266 bp, Zea mays
ctctaaacttgcctctcagcattctcatcaacaatgctggagtgatgacaaggagctgcacacgttcctgcgacggcctggaactgcatttcgcgacaaatcacattggtgtgtcctcttataccagtacacactacagctagcctttgctaagcgtattgttcgaattctaactactttctttgtgcgacatctcttgtttacattattctgtagaagagtatcccttgctcgtcttatgacctatgagaatgattcctgataat

SEQ ID NO: 358321 - DNA, 267 bp, Zea mays
ccgtttcagcagcaccagcaacacagccaaagcccaaagaggcggcagcagcacagcagctcggcctgttcccatggctcctctgctgttcagggacatgaaggggctgtcgtgctcgtccccggcgtccacggctatatgcccgagcctggagcggcagccgatggtccggccacacaaagccattgccagtgccactgccagccccatgtctcacgtccctgccgcgcccaggacacaccggcacgacggcaagaaagggcggca

SEQ ID NO: 358322 - DNA, 266 bp, Zea mays
ctagaccagcagacttgcagataatcaccagttcataacacgagttcacaactagtacatagataataaagttcgggccatcaagccatcaaacctaggaacttcagtcttcaagttctaacagaccacagaccagacaacaactagatttcattaagaatcttcggccaaatccaaggccccaagatcttcaaacaatctttcttcaagttctggctcatcaagcgacagatcagcttgctcaagaaaatcagcatcaccctcaa

SEQ ID NO: 358323 - DNA, 259 bp, Zea mays
ccgaaagtgacagtggactggagatttcctcccagccttcggttgacgcgccccaccgcgcagtgatggtcctgagtcctgaccggtttggtggcatgtggcatccctgctctcactcacggtgccgttttccgatcagtaattggtaatccccttggtaactaatttgggtctatgctaagatgttcaccgatcagtatcagtagttctgtgcgcagtgtattgctgctgcctgatgctgggactgggatacagaatc

SEQ ID NO: 358324 - DNA, 256 bp, Zea mays
gtgcagctcaagagctgtttcgggtacgacacgttcttcgccgtggacgtccggaggttcggcgacggcgggatcttcatcgggaacctgcgtaacccatcgaggaggtgcggcctaagctggagaagaagatctccgaggcggctggaacagaggtcaccctctggttcatggaggagaagaacgacgacatcacaaagcaggtctgcatggttcagcccaaggcagagatcgacgtccagctcgagatcaccaa

SEQ ID NO: 358325 - DNA, 255 bp, Zea mays
ctttcgtagatgtacgggcaacaacttggaaccctcgcctggaatgatcaaacaagcaccatcagaaaaccacatggctcggcaaccttggagcaataatggccatagaaattccccttcaaattcattagatggaggagttcctggacccatgcctctggtccctttccaggaggaacttgcagttggttgtgaagagattcgtagaattgctgctgataatactcttgtgctagaggatattctgggccttag

SEQ ID NO: 358326 - DNA, 255 bp, Zea mays
acgaatgtgaaaggacctgctgtttctccctcaaagtctcccatcatccacaggaaagaacatggcattccagttgctgcaccgccaaaggaacattcgagctatttaccacctgcaaatcatagacatcacaaaggttccctcgtcctgctccacataaaagtaacagtacttctgcacccagccatggatatcctggtagtactgcacctgcacctgtacgtttgcctccgccaaaaggaaagggagaaggaa

SEQ ID NO: 358327 - DNA, 222 bp, Zea mays
cggctcgagatcaatttggtgagaagctccatggattactggaatcaactggagcaaaatacgtgcacattgacgacttttgtgcaaacagccaggactcagcagctggagacactgatcatcaaattcttgtagtcctgcacgatatccattggaattcagcaagatacgtgtgctgtttactttgtcaaagatcagtgatatcaagctattggcagctat

SEQ ID NO: 358328 - DNA, 242 bp, Zea mays
cagccgtaccggcgccgcatcgcgcgccaccattccattgtggagattttatgaagagctcgatcctgcgtgccggtgttgtagcgctggcatgcgcgctgggcctgtccgcctgcggggcgggagcggcgactgtacctgaccggcgcggtctacaacgtcaccaaggacggtctggtactgacgattaatggcggcacgaaacggccgtcgtgtatccctatacctcgttccagttcagc

SEQ ID NO: 358329 - DNA, 245 bp, Zea mays
  unsure (1)..(245): unsure at all n locations
gatgagctggagaaatgtgtgacaaatgaagnttccacgagtcctcaagatctggatcggtttccttgaggactcgtggaagctgcagtcctcatacaatcaacagaaggataataaaacgtgtgatgagcggagaaatgtgtgagtgattttctaaagttgacaaaacaacatctttcagcattcaaggaagtcctaagccaattgattgagaatatcgaaacatatgtcggtaacttggctgt

SEQ ID NO: 358330 - DNA, 248 bp, Zea mays
actcgagaacgggtgatactacgtgaagagtctacaatggagggagaggacatcaaacacattataaaccaaaagactaaagaaatgattgaacaaaatactgtatgtgttaggatacagtatggtccagactcttccaaatgtagctcatcagaaggcggcaaattgtcccactattacgtcctcgtcaagtatggctgtccatccatgatctagatattatacaaaatacaacaggacctctcagt

SEQ ID NO: 358331 - DNA, 240 bp, Zea mays
cctccatcctccccccctccccgtgatggctgcaatggatggggtaattgtagtggagctgtagaggcggcgggggtgcggttgcgacggactgtgctgcgccgacaagctgggaagaggaggcagcggcggcggggtgggacttgggatgggtcttctgtcgaaccgggtggagcggtcggagatcaggcccggcgaccacatctacacctggcgggccgtctacgcctactcccacca

SEQ ID NO: 358332 - DNA, 223 bp, Zea mays
cacagatattaatcctcaagacatgccgatgacgtttattcttcaaatactccagtagctatgtggttggcgttgaccagatacataaggactttgaatattgtttaaacatgtgctgaaacagttattgttttgtgagaagttttcgtatttgaaacaggatgaaaagcacgtcaaaatagtgttcactataggatttcaaacatgaggttcctgatgctag

SEQ ID NO: 358333 - DNA, 228 bp, Zea mays
cgagacgcgccggcaagcaaagcgccgacgactacgccgcaagtcccaacccaacccaccctatccagaatccaggtatatcagatgactcgacatgtctgttctcgatgtttcaaatgctacaatatgttaaataacaggcaaaaggttgagtggaacaataggggtttctctacagtccatgcattggtagctgctgccgtttctttctacctgatcatgatctct

SEQ ID NO: 358334 - DNA, 225 bp, Zea mays
acagaatgaaagcttgtggtaagtgtggcatgccaattactgaggccgccattcgaccaaacttggctcttcgccttgcagttcaggcattcaaacgtgaagaagactcagcaaagtcattgaaaagaagaagagagcgccttgaactggtatacgcccttttccagcttatcagtcacccttcaaatcgggcagctatatttgttgcatgttcttaaatccatt

SEQ ID NO: 358335 - DNA, 226 bp, Zea mays
ctgaaacgctgatcacatggatgatggttatgcagttatttttgcaaaatcaccagcaaccacattaaaattacttgcagatcactcgagaagtctggaatcttgacaatctattgcctccctaattacacaagtatatgacagagtccatgctgtaaaggtttgaaaccaaaaacatgtcccagaaagttgaatgttcagtttgtaaattgcaaggcacgtgtga

SEQ ID NO: 358336 - DNA, 227 bp, Zea mays
ggcgtcctccctcccacgagagcaccgacgtccggactccggttcggtggacgcgcacggacgaacccctctggaaagagagaggattcctccgccgcttccgcgttggacgcactggacagctcacgcacgccgctgctttcgcagccagccagatccgttggttccaacggaacatttccttccacgcccgccaccgcgcaccggcatctccatctccatctcca

SEQ ID NO: 358337 - DNA, 224 bp, Zea mays
ctacacgcccatccgatgattcgttggctttctgttatgcgccctccctcagacagacaatgttgtattgtattacacaaacacattggtggatgtaagacataggtagctatatatagaactgatcaccaggccccctcgcaccacttgttcaccgccccatgttctgttaaatttcgtactgacaggatttgtctctttaggacaagcaagtatggtggtga

SEQ ID NO: 358338 - DNA, 218 bp, Zea mays
tgcatcgcctcctcccccacagcaacaccatccatcgccatcagtacacccagttcaatatggatcaccgccaccccctccgctgcatcggtagaaaccaatctcagacgcaaggaaggatagctggttctgctcttgcccagctccccctgcggcaatggctagcagctgccagattcaccggtgtacgtggtcattgtcacgcttagcgaatagcg

SEQ ID NO: 358339 - DNA, 211 bp, Zea mays
ctcgacaaatatcttgtgttggcacaaaccacacatgagagacgcatgtttagctacagctgcaactatctatgccagcaaagaggctgcatgggggaacaagaaagattaacaatggagaagaaacaacagtgatggtggctggtgatgcattcgtgagctgacggtatcttaaggtctctagattcatggatgagctagcaggccagca

SEQ ID NO: 358340 - DNA, 281 bp, Zea mays
ggaggatgcatcagatgatgaagaaactacattggttgcgcaaactacttttgaggaccccatctttcttaccaccatcgaagacgacccttctcattctatggttgagggcaatacagaacctgttttggtggaggacgcaccagatgatgaggaagctaccttggctatacatggtccttctctttctatggttgaggacaatatagaacctcgactggtagaggatcctccgatagagacaaggtcttcttcgtccaccagagctagagaggatgagg

SEQ ID NO: 358341 - DNA, 281 bp, Zea mays
gcgtcctccttcccgtcccgcgcctccgcctccacctccaccgctgccgccggcagtcaccacccgccccaccaccacaggaccgtcgaggatcgatcaggcgggcagaagcggtcgtcgccggacaaggcgcacaggtccaccatggacgccgtctaccaccaagagtcaccgttgacgagcaacggtgccgccaccgccggcgagaagctgggcgtggagcggttcgagctgccgctgatctacatctcgctctcgcggaaggagaaggaggacgattt

SEQ ID NO: 358342 - DNA, 273 bp, Zea mays
cgagctcggtgagcctatcaacctccttctgcaggttcattttctgttcctggatgcgttccagctcctcctcacaccgcaacaaggctgcccggcaatccttgatctcttcctgagcagacacaagggcctcctcctccacgccttcgatgctaacctccatgggcccgaccgacccccgcttggcatccagcgcctcggacgccagctgcagcctggcctcggccatcgacagcgccatggtagccttctggacggcctccttggcgtccg

SEQ ID NO: 358343 - DNA, 273 bp, Zea mays
gcaaccgtgtttgccaccatctgctcttcaagccgctaaagcgaactccaccagagctaagaaatttttttacacggtctgagtaccgattatcacaatcacagatatctagagtggatttcaagggagtttagaaagaatttgggagagaatttagagagatgtcggttcacgatagatattgcgagaatgttgagttcagagttctctcaacaggcacattatcacatttatctcaccaagcactagctgttcttggctcgcatatttgct

SEQ ID NO: 358344 - DNA, 272 bp, Zea mays
gacatgtggacggaatgctgtctccaaatagcgcatcacacaagccagaaacaacaaataattctgtgctcagcaatgctgcaagcactgatgtacaaaatgggtgtctcaccactgtcgattctggacagcaggaggcgtctcattctcacagctcagtggagtttacccagtatttccaagagggctattgtaaaatatcagaactcgatgactgccgtgagttaactgaagctgttactgatgctgacagcagcagcagccactgcgag

SEQ ID NO: 358345 - DNA, 278 bp, Zea mays
  unsure (1)..(278): unsure at all n locations
cacaggcttgcgacccaggcaaactcggcacggaaacttaacgcgcgcagagaaacagcatggcacagtggagcacggaccaagcgccagcgangcaaggaaatttcgcgcgcgcagggaggaaacaccagagagacgtggctgctggcacgcacagaaaagatcgcgcgcgacgtagggacgacacaagaggacgcacgcgcaggggcgagctcaagggagacaagctgggtgcggccatggatgtgacggggaatacgcagggcaccggcacgagg

SEQ ID NO: 358346 - DNA, 211 bp, Zea mays
  unsure (1)..(211): unsure at all n locations
ggctttgcttggaacaccagaactcattgcgtggtttgaaaagattgcccgaggagctggagctggagctgctgctgctcatccgtggcgcacacacaaacttccggcccaaaatttcgctccacggatttctgngttccctccatggccgctcctctctttccctcctccatttttgatctcagaccctcggacagcttccctttttctt

SEQ ID NO: 358347 - DNA, 154 bp, Zea mays
cgagcagacagtcaccgttgtttgataaagttcttccacaaggtaaacagtcttcctggacctgtgactgattctgagaagctaatttaatgagctgtttaactgcctggaaagcaagtaaaaccttttgctttctcctagttctagatcgcga

SEQ ID NO: 358348 - DNA, 307 bp, Zea mays
gaaggaagcatgcgcacagagtctccaatctcttttatcttttctgccgaccctccaccacagccctctccctccgtctctcatccagtccatggcgagattggccctacagctgtcatggtgctccatggcgtggcggtgtcctttctccttccatctttccggtgacgagcaagggatggtctaggctgcatcatgggtatgaggcagcagggtggtctgcagcagcacaaatgcacatggacacagctatggggaggtgagtttttggagggttcggtgtggaaggagagatggagcacatgac

SEQ ID NO: 358349 - DNA, 178 bp, Zea mays
ctcgagcacaactagcacagcagttcaaacaagtctcatcaatgagtgcatatggcatggtcatctgctgctgttgctgctgaagttgttgctggtttagttgctgttgctgttgctgttgaaggtgctgctgctgattaatctgctgtagttgctgctgcctagttctagatcgcga

SEQ ID NO: 358350 - DNA, 325 bp, Zea mays
tcggctcgagactagagcaacttcgtttgggcacctcacgtttgccatgttattgattgattgaatggttccgtgaacgtagtctagagtagcatcttaaaagcttgggttggttattcaccatactgccctttataggtctaacagaaacttggggaaaattgctgagtttttatcaggtctcgttttttgtttgttgctgagtgcaaaatctgaagttgttactctccgacccttaactctcgttatggaaagtatgttggtcaaactttctttaagtttgactagatttattgataatattattaatatttgtgctttttaa

SEQ ID NO: 358351 - DNA, 177 bp, Zea mays
  unsure (1)..(177): unsure at all n locations
gatctactaagattcagcctgtgtatgtaatcgatgttgctgctgctagtaccgtcgncactgagggatgtcacaatagcagcagcaacatcgattacatacacaggctgaatcttagttgctgctgctattgtgaactccctcaaggatgacggcactgcaaggggaaagatatat

SEQ ID NO: 358352 - DNA, 126 bp, Zea mays
cgaactttttcatgtacatctccaaaatccaagtgtttctcgttatggcagcttgtacttcagtcagtacctgtgatatgtaaatgtgtaccagctggaacaagagtaagatactgtcgcctgttt

SEQ ID NO: 358353 - DNA, 277 bp, Zea mays
gattccgccgcctgctgatcgatctgaaacacgagaagtgaagagtcagaagagctggaggactcaggaggggatggggcaaatcgcggcgagtgacgaagagagcgctgcctcgcctggtggaggagggtctcgactgctttgagcttggaggagatccaccctgccatggcgctgtgaatggaggcgccgcggggcgaggggattggagcgccgcactaacaggcgactagatctagacatctccctctcccaagatcaagatcagctcggacga

SEQ ID NO: 358354 - DNA, 277 bp, Zea mays
gtctcgcgagaccatgacaaccgagaatatgtcacggccgccaccatgtaccagagagaatgagggtcgtggcgttttggccgaaagctcgatagtggagacggcggagagtgtccgagagaagctagaagcgaacaacacttccgcgtggagaaggctcgtgcctctctatggagttactcgaccgtggtgcttgaccctcgcgtgggctaccatttgtgtaggggcaccaacgaggattagttggcaccttgcgtggttcgagattcctcagtaa

SEQ ID NO: 358355 - DNA, 283 bp, Zea mays
  unsure (1)..(283): unsure at all n locations
gaaagcttccgccttgggagggagaagaangcatcctgcatgtgagcgtgcgataaatagcggctccaggtccaggctgagggagaacgcgtctctggtgctctcgcaaccaccgtgcgcttgctttcctcctgctctactccgttgcacacttgtactaggcctggaggtcctgtagctcgcctggtgctgtgtcggagacggtggcaatggcattgcaggagcaggaggcggacggcgacgagggcggggaggaagacgacgaagcgaggatgagcggatg

SEQ ID NO: 358356 - DNA, 274 bp, Zea mays
gattccaggcacgccaccacaaggtcttggaattggtatgcctggtacaaacacgatgccagtgtttggactccctgggcaagcaatccatccctcagcgtctagcgtacagccattcccatcgttggcgggtcttcctgttaggccaaacctggcacctcaagtcccagccgtcatggctaacatggtgcaggagcaacagcaaggcgtagcgactcagcagcagcagagtctgaataatgaagctcaacagaaagcaaataccggagatcca

SEQ ID NO: 358357 - DNA, 276 bp, Zea mays
ccagctctcctacaaaatgtttgtaattatgtgtgtagctttaatgtgaaagagttaggtggtctgagcagtactcatctcctttttaatataatactttagggttgttttactctcggcgggtcgaaatttttttgtgtagctttaatctgcacagttgaattaacatttcataccaccattacttttcttgattttataattgtagagcggcagaatgcaagatgcaccttactgaatattatactgcaaggtttgttgagtctttttttgtgt

SEQ ID NO: 358358 - DNA, 136 bp, Zea mays
cctatttgccttgagctgcaaaggggtcacttcatggtgctagatgaaagagtctgattactggttttcttcacataagatagtgatggagtccagtaacaactccacattgcgcattttccttatttgataaaaa

SEQ ID NO: 358359 - DNA, 249 bp, Zea mays
ggttattcgttttagctacccgttttgaagagaagccgattttggaggagacgatgatgagtccggcgtcggagcgcagctcatcatccagagcgacgacgacgacttcgcccgatccggccacgtcgtggattacccggagtatggctcctgctcctcctcgtcttcctcatcgtccggtatgccagccgttgcccccgttcgttcccctagatctagctatggccgcagtgttacaggccctcgctt

SEQ ID NO: 358360 - DNA, 264 bp, Zea mays
gaggtaccgtatcgaatatcgatgccttccgtttggtatctttatcggtgcacatagactgcttattcgcttttgacccctcgcagtagatgtagatcgagtttgtatctacagcctctgatagagggggcgtggagttttccttctttcctttgttttccgttggcgctgtttagagatttcagttttgtatcggtgaggcctgctgcattactgcttttttaaactttttttttcttcttcttcttctgttaaaagaaaaca

SEQ ID NO: 358361 - DNA, 279 bp, Zea mays
cgcggttccgctcgacctgcaaggtactacgtatatgcataaagtaaactcaataactagttccgaaaactgaaaaatatcttttgatgcttttggtgctggtttctctgtggtctaactcttttggccgtaatacaaataacataagcttattaaagtttcaaaatatttctacaatatccagcagactggtcttatttaacaggactgcttaggcattatgtttagcatatattatgcaatgtgctaattagaggaggttaacacacgtttgcctgt

SEQ ID NO: 358362 - DNA, 262 bp, Zea mays
atttgctcatcatcctcactagcgtcattgggaacacttctacacctattttaattgtagggattaggaagtgattaagtgattgtaaaacaatatctgataaggttatattgagcttggtcatgcatactgtaaatggttatatcccatgtgacctgtaagttctacaacatattgtctaagaaactttcataagcaacaaatagcgtacctttgaatcaaatttgatggcagctgctcattttacaagaacaatgcagtg

SEQ ID NO: 358363 - DNA, 261 bp, Zea mays
aaacaagttaagcccaatagttttggtctgagtacctatgatatattggcatcagatgacaaggatttgaaccagtatgtttccgttaagaagctagctccttacagagaggatgaatggaaggttacacatcataagaagcagagcaaggatttgatccttggaggccagaagaaggaagggaagaaggacaaatctggcaagaaatctaggtctgacgaagaccctagttcttcaaaaacagagaacgacaggatgaca

SEQ ID NO: 358364 - DNA, 256 bp, Zea mays
ggtcaaagtcgtcaccgagcgcgctgggatccaagctcaggatgcacgggaaggccctgcccgcgagactcgccgccgtccgtgaaggcgcatgcttcacctgcaaaaacgcggtgctgctcgttctcgccgtcaaggttggcaacaaggctcatgtcgcctatcaaagcgaggttgtcgctgggccggagccgggacagcggcgccggtgtcggcggtggcccgatgagtgggctgaagcagcggccaggtgtta

SEQ ID NO: 358365 - DNA, 258 bp, Zea mays
tcgacatgttttcactagattttgctggctccccccactccattgtagcttaagttaacacattacctttctaggagagagatgttaatgaggaatcaagatggaagcatgaccatggtgacgtaattcggcctcaccgaagtatgatgtctctttcgctgatccacacggaagacaagaacctcaaggccgagggacccacgtgagagctgaagaagaagtgcggcaacagcgtgagcacccatcgtcctcgtctac

SEQ ID NO: 358366 - DNA, 255 bp, Zea mays
ctccgatctcctctcccgttccccagccatttccgttcaataattcagccacgggatcccctcgccgatgccgagctctgtgtcttccctcgtctcgatccaagactcccaggtgaaacattcagactctgaccctgtcacaaacgtgcttgtccaccgacggtgacggctaccactcgctagcaagccatctcttggagctggagggggtccgcttcctccttgtctgcacatcgacctctctaacccgtggcc

SEQ ID NO: 358367 - DNA, 252 bp, Zea mays
ccaggtcatccgatgatgcctgccatatgacgggcacttcatcgccctttcctttcttccttgtacgacgtgcgtgcttcacaggccggtgcagaggcagcaggctgcgtcaagcgacttatcggcaccaatccccccgtggatgatgaatctggttctgatcgatccagtccacacgaattggtgcctggatcttgcgccgcgatacctcattatttgggcgccactgccagtttgcatcaccgtgccttt

SEQ ID NO: 358368 - DNA, 248 bp, Zea mays
gtccatttgaaaagtgtgattacagtgcaaggattgctaatgagatatgctgcaagaagctggagtatgtaattgagaagttggataccatgcaacagagccttgaacatatcactgatgatgtttagcgagctagctacatattagctttgggggtaatagatgatcgaggagtacactgaagaaatgtagaagcattctatcaacttataattgcataaagcttttgctccactgtaggactgtaa

SEQ ID NO: 358369 - DNA, 247 bp, Zea mays
  unsure (1)..(247): unsure at all n locations
ctcgggtgtaagccacctaccaacctatgacattctctgcgagtgcggccatggatagatgtggattggggcaagaattgaagctggccggccccgacgggccctgtgcgcgcccgtacaagtctcctacgacgagcacatccaggaccgcgagcgcgtcttacgcgccatgttccccgaacatcgcatgngacagcgagtcggcgacggggaatggcgggtccacatactgccgctgcagttcctc

SEQ ID NO: 358370 - DNA, 251 bp, Zea mays
gtggcagcccgcctccgctttgagccttcgaccaatgtcgatggtaatctcagtcaaagcgcgggatgcatttcgcatctccttcggtccttccccagcccatccggtacggagccaaatctctggccgaacgaacaagcgcggagatttccagggagatggagtgttgcagacgcccggattcggtgcgcgccgctcctaaatagaccgcgagtcgcctcctgcacgtgcgggattcgcgcctgtcccag

SEQ ID NO: 358371 - DNA, 148 bp, Zea mays
  unsure (1)..(148): unsure at all n locations
gtcgcggcccccgccgctatnggaggaggcggaggcgtcgtacggggagaacatgctcgagtcggaggccattgggaggaataccatggctactacggccagtagcttgtttaactctcatatgatcagtactcccagcactcccgga

SEQ ID NO: 358372 - DNA, 255 bp, Zea mays
ctcctcggtccatcgcaagcttctgcggtcctgcctacggcggcatccacccttctgccgcatcgtctttctcaagacgctgccccaggtccatcgcgcctagggttcgtcgagtccggcggcgctaagctttggttggggcttggattaactaagtgtcatggaccctaccaggaatgcatagatgcaggcaacgagtacagaggggatagaataatacagctgtaagctgctggcatttagctgtaataacag

SEQ ID NO: 358373 - DNA, 255 bp, Zea mays
ggttcacttgtttggaaacatgtttcgtgggaactgtggtttgatggcgtcgattaaattatgaaaaaacaatttgaagtagagccaacactgtgtcaagccatttgtctttatgctagatatgatggttaggatggcatgaaatgccaaagcaaattggacataacatttggtaaagtaaatgttatatttttttggaactgataaggttgcttttttcccgagaacgtgtccatttacacgtgttttattaag

SEQ ID NO: 358374 - DNA, 256 bp, Zea mays
  unsure (1)..(256): unsure at all n locations
gcccgttcgacgccaaacaccgactgaccgacacgactccccccttcgtcttccaatccgccgctgttcgagtagtcggaggccggggcggaggcgatgaatccactcacgcaggtgaaccggactcagattatcaaccagaaggaggcgctcatgggcatcggcgaggacgcgtcgtggcattcgangtntaaggactcggcctaagtctacgtcggcggcgtacccttcggactcaccgagggcgacctcctcg

SEQ ID NO: 358375 - DNA, 254 bp, Zea mays
gaaagggaggagagcgctcacatccggtcgaccggtcgttttggtggaacgggagcatttcaactatttatgaatgtcatcccaagccaggcttctttgctttgtggtgactgccattgcaaagctagcaacatgccatattgagttgcttcgggaagcacgggtgtcattgggtaagtttgctcgttcccgaacctcagacaggagagtctggcaatgggcctgtgactatttagggctcatgaatgaaccag

SEQ ID NO: 358376 - DNA, 255 bp, Zea mays
cgcgttgttgatttgtttccctgcgcctggccttatcccgtcgccgaccctgctcagatttttaggccaatagcccctgcagcaaccgctcaatctctccctctgttttttcttgccgatcatcagccgtcgtcctcatctgtttgtgcaaccaagaaaaatcaggcctcgtcttcatcctttcagcagccgcaagctccagcctccaccttcccttctgcagaaatcctgccatggccgccctccctggtgctc

SEQ ID NO: 358377 - DNA, 267 bp, Zea mays
cccgcgtcgtccaccaacgtgagcaaagaactgtcggcctgtcgcccgtcgacgcggtggttgagtcgccgccagagttcaacaagtatcgtcatatcctccggcaacagcatcgtcgtcaatcatcatgccagcccgcgaccagatccagacgggagaaaagggaggaggatcgatttatttgaaacttgaaaggggctcaccttgcttatgaacagcgtacccgccaatgcttagctcgaagagagcaacgacagatattgagca

SEQ ID NO: 358378 - DNA, 268 bp, Zea mays
cgctcgactaccaaaatcccaccgcccacctctgcaatggccgcctcccgccccccaccccaacgtgcggtgtcatcctccctccccccaccccaccccgctccgtcatcctccctcggtttccctcctatctgccctccgaatcccgctcgtgaaccctagacaccctccgtcgagatctccatatcccactctcgaaccccgtgcccccgccctcgtccgccccacatcgtgcgatgcccccgccgcgagagctcccctagatggc

SEQ ID NO: 358379 - DNA, 271 bp, Zea mays
gcgagtcaaacgatcagatggctctgaatcccttcttactagatgatttttgcctggctggagtagttctgatccaagagcttgttgctttgatttttgcttgctcttagacttgtccacactgttaaattttgtgcccctcaaacaagcctgtgctcgctcactttcaactcagagcgattacgaccagtcggctactccaacttcaagaacggaagcctcggcctctcgggcgtgaaagctggattgtggttgtcccgtactattcact

SEQ ID NO: 358380 - DNA, 234 bp, Zea mays
accaccccgctataaatccgccgcacccgcccacccacctgccgtgccagtgctctcatctgcgtacacggtctccctcttcctgtcagtaatagagcccgagtgagtcagcgagtaggagacaaggggacatggggaagggagcgcaagggagcgatgcgtcggcggcgacattcgatgtcgtgacggctatcgtcaccctgtacgaatccacagtgctaatcttcgtcggcc

SEQ ID NO: 358381 - DNA, 280 bp, Zea mays
gtggtgcttgcggcactccggagtccaggcagcacgctagtcggggggcgcgggggaggagatatggatcggtcgtatctccccgtggcggcggcggctcggggcgagggagtgcgaggacctggggttcaccggcctcgctctctgctccgactgcaacgcgctctccgagttcgtcaaggaccaagagctggtggaggattgccataaatgttgcaccgaggattcagatgattctatcagcaagctcacattttctggtgcaattattgaggtgtgc

SEQ ID NO: 358382 - DNA, 276 bp, Zea mays
ggtgcggggtgccgcgccgggcagggcttgcaggacgagaggatggtgcagacgttcgtggccgcctacgcgcagccgccgccgcatcaggacggcttctacccaaaggaagccgtgatggcggccgtggaggagtgcatgcggaagcaggccgacgcgctgctgcactcgctcgacggagtcgggggcaggctttcgcagctcgagctctactgctacaagctcgagaggtccatcggggaactgcgcacgacgtcatggactaccacagcgaga

SEQ ID NO: 358383 - DNA, 263 bp, Zea mays
gctgtcacggtggtggaagcacgaactcgcggcggggcaggcccgacttttggctggcgccaagggcggagaggctgcggcatccggcggtgggctgcggaaggggaccaagaggaagggctctcgctcgagttccacgggcgagagggccaggaaacggcgacacgtgcttcaatttaggtcctagatgacgaaaaaggtatggctttgcttcatgggtgcatgtgctttagcttggtggactggtagggttttagacttgt

SEQ ID NO: 358384 - DNA, 269 bp, Zea mays
gatttccacgctcaccgatcagatccagtgcctcgcgcaggagctcactcaggttaaggctgagaagcactctacaagatcgtgctttgacgaggatggatactgctcttcccctcggacgccggggtttaacgaggataccgctttctctctggagtgcagcattggggaagcagagacgccgaactatggtagcccagatgaaatgttcagcaaggatcttaatccttgtctgaccccatgcattgccaagagcaaatctgacgtat

SEQ ID NO: 358385 - DNA, 258 bp, Zea mays
ctcgagccggtggttctataactagatgctgttttaccttcaacttgttatagaaccacataagtagctccgatgatagacaattaagccacgggtacaggcatcggagctacttatgtggttctatccctagatgctgttttaccttcaacttgtgctgttgtaccttcatatttggactttttaagccttgtgtcggacgcctttggcattgaaatatgagagattttgcagactaaaaaaaaaaaaaaaggcctc

SEQ ID NO: 358386 - DNA, 180 bp, Zea mays
tctgcgtacacggtctccctcttcctgtcagtagtagagtgagagttaggcagcgagtaggatacaatgggaaatggggaatggagcgcaatggagcgatgcggcgtcggtgggctttgaggagtacgttgctggcgtttgtcggatggacgacttgttgccgctcatcgtcgtcctcct

SEQ ID NO: 358387 - DNA, 277 bp, Zea mays
cggctcgagcggtggtcgaaaaactaaaaaaccaaaatagtccatctaagaacaacaacaaactactgaagaaaaacgtcctccgaggctaaacctcaagaaggggggcagacagataggatagccctttagctccagccatttcccacatccatctttcctccatagccatcctaatggctaaagtcacattaggactccagttatcaaagacacatctattgcggtggttccaaataatgtaagcacccaacgcaaccagagaattcagcccctt

SEQ ID NO: 358388 - DNA, 193 bp, Zea mays
actgatcccccaccaccaccacacacacacaaagctgccaccttgtaattttgtacattacttcattgcttctctgttattcccatttaataaattaaaaggaatagctttttattgaatataatttgcttctcttctccgaacagccaagtagtcaacacggaagttatgtctatacatatatgatatgtcc

SEQ ID NO: 358389 - DNA, 267 bp, Zea mays
gttgcctgaggcgagttccctccctcctctccgaaaagttctcaccttgtagttagcatgtggctatttatccacgtctccgcctgcgctcacccaccccacccccactcgttgtgagtacacagtacactcgcaaaccgctacaccaacaccaggccaccgggagcgcggcaggctcgggagggacttggcagacgcgcgcagagaggcacgtaccactaccgcagcagcgcgggcgcaggcagggacccgggccggcggcatggg

SEQ ID NO: 358390 - DNA, 256 bp, Zea mays
ggctcgagtgtttatgatccgagaacgagagcactgctcaacgtgagaacgtccgcgtacgcatggcgtggtgcttgcagcgttcgcgtggctgcgctgcgattcggaggtcgtggaggactgctcgagcttcgtgcgtgggcacggtatcctgacgcggagcgttagctagttgggcgcggatccgaggtacgtccgggtgagcattctggatctggacgatgcctacggcatcttcgtcaagcgcgtctcctcc

SEQ ID NO: 358391 - DNA, 277 bp, Zea mays
tgctccagcgaggcatacagccgccgccgtttcttcattcttccttgcagcgccgacgctccatcttccgctccctcccttgctcgcgctcggcacgtaggcgacggtggcagcgctcagcctcgggctctcagcgacggcgtcagcggcttcccctctcgccagtcgcctcgacctccgcacaccgcgccggtggccctgccaaataggcaacggagagggtttccagaacagagtatacagagggcaaggctgttatgagcaacaaggaggagaa

SEQ ID NO: 358392 - DNA, 266 bp, Zea mays
ctaaagctcatagccctctccttccagagcatttcacatcgctcacatctccacctgcttgcatccagcgcctcgtcactctgcaaaacagggactcctccaggagggcgatggctgatgaggagtcatccccgagctcctgcctatcgtcagagaacgagcatggcatgcagtggtccaacagccctgaggccacatccatggttcttgctgcctgtcctcgctgcttcatctacgtcatgctccccaagatgaccctcggtgcc

SEQ ID NO: 358393 - DNA, 259 bp, Zea mays
tctagatcgcgagcggccgtcctttttttttttttttgcgccctgaacatttattcaaaaaccgttttttttccccaagcgatatcccttgcgagtcaataactgaaatccccttgaaaaaaactagggtatggtaaaaatgattaaccgtccctgcggcatgtcccaaaacccggttttgcagctctaggaactctcccatttcaattccctgttttaaaggccttacctgttgtcctaggaacctaacattcccccc

SEQ ID NO: 358394 - DNA, 261 bp, Zea mays
caacacacttgagaacacactgcatccatagagtttcccatggccggctaccaaagttcgtttacaagattttggatgatggacgaggaagacgacgacatgcatcacttagtagacgacgatgaagctgagcttgcaacatacaaccaccttgtgcaatgcgagagttctcagcgtcggcgacggtcggatgcgccacctaaccaaatacgtccaagaaacctgggtgatgctgatggtcacaaagaatttggcttgatt

SEQ ID NO: 358395 - DNA, 256 bp, Zea mays
caggcgtgaaggacagcgattaccagatcgcgatttgtttccgcgcttcgaggaatcgacagtcaagcttcggcgaccaagagatcgaactcttcgagttctacagggctgaagaccctgagcatctgattggtgaaggttgtcagcattgcaaccactgctcaggagaagatgaagtcgtggaaggagacttccaggagttccaagattacgacgagttctaggcgtgggttagcggcacccccagtcggctgcc

SEQ ID NO: 358396 - DNA, 257 bp, Zea mays
cgagctccctcgccgtggccctctgctcgattcgctatagcttatccgagctccccatggcgcccggatttccctactgcccgtccgcgcgttctgcttcctgcgcgcactgcgagctccactctatcgctcggttcctgccaaagctcgcgtcgttcattgtgctgacgcgccatcgcctcggtctggccgagggccaggagctctcaatactcagctccctgttcatccataacgtgcccgttttctttgtctta

SEQ ID NO: 358397 - DNA, 260 bp, Zea mays
gtgacccccaggtggttgaaccggccctaggggcggttcaaccggtgtcaggacctgtttttgcagtctgacctgcactctggcagactgtctgtcagcctacccaggcggttgagccagtcttaggggcagttcaaccggtcttggttaacttgaccagtctgcatgtcagtcagccagtcagtctgacagtcagactggcagacagtctgcctgacctgtcaggggcggttcaaccgccctgggggcggttcaaccgg

SEQ ID NO: 358398 - DNA, 250 bp, Zea mays
ctagaccgcagcggaaggggagcaggcggcggccccgattgcggtaatggagctgtcgatgagtggcagctccctgcgaacgttcggccggtgcgtgaccttcctcgcgcgcgttgcctccgagctcgtgctccaggcgcaccccgccaagctggagatgcacacgcttaacagcttgtggtcggcgtacgcttcgatctccctagcgcgcgacttcttcgaccagtatcacctcgagccgcggcttcgg

SEQ ID NO: 358399 - DNA, 263 bp, Zea mays
gcttgcagggctggtgtacgagtacctggttatcccgtccgccgacgccgccgtgccccacgcgcaccagccgctcgcgccagatgactactagcttgaaaattgtattgtggggtcgtgtaagtggttaataaggggggcatatgtacgtacttgtctgtcgccccagcgtgtgttggagacggtgattcaggtgatgtgtacatgctgcttcactgtagtgtatgtgtatgtgtatgtagtaaataattccaggtatataa

SEQ ID NO: 358400 - DNA, 268 bp, Zea mays
ggggtaggcaaaactggaaggcttgtagccacaccgccatacatatgatttgctcccgttgtcgttgagcagccggagatccttatgtgctgtggattctgaaacttcagagtttccgcagttctcctgatcctctcgattagagctgggttgcttttgcagcaaaaagtcaggcctgacggtttttaggcgcaagaacagtgacaagcctggcctggtcctgttagccgaagtatgatgaagtatttgtttgcctatccttctgaca

SEQ ID NO: 358401 - DNA, 259 bp, Zea mays
acgagtttggtcaatacgcatctgctggaaactcaatggggaccactggtatgaaatggagtaatctagatgactctcttaatggaatgcgtgttgtcttgattattatggttgtggaatgggcaatagttctccccttggcattttatgtggatcaagtctcgccactggggggtggattcaggaaaaatccctttttcttcttgggctgctttaagaagagtcctctatcattgcggagatatagctttgggagaca

SEQ ID NO: 358402 - DNA, 293 bp, Zea mays
gcattctaaagctcatagccctctccttccagagcatttcacatcgctctcatctccacctgcttgcatccagcgcctcgtcactctgcaaaacaacagcacatacctccaaaggatgagccgcagcaacaggaagagctctaggggccttgacctgaaactgaacctctcacttcctgcaacaggggactcctccaggagggcgatggctgatgaggagtcatccccgagctcctgcctatctcagagaacgagcatggcctgcagtggtccaacagccctgaggccacatc

SEQ ID NO: 358403 - DNA, 281 bp, Zea mays
  unsure (1)..(281): unsure at all n locations
gaagatgttagctctgcctgtgcctatgcagcagcatcctctcagcagcagaacgggtcgagcattgccaggaggaggagaacatctgaacagggtgtcaagcgaatgcgtcctttcaaacccaggcttccgaatttccttccgtcagagaaggtcgatctcaagcatcagtcggtgggcgatctcacagncgctgaggagtggatgctcgactacgctcttcggaaggaagtgaagagctggcccgtgctcagaagaggaaagttgagatgcttgtccag

SEQ ID NO: 358404 - DNA, 287 bp, Zea mays
ctcgagcccgcagcaataacaatatacacaaagacgggagacagaagagagatggcggaagcgacgccgtacgaggagcagcggcggaggcaggtggaggcgaacaaacggaagctggaggagctgcagctccaccacctctctgctgccatcagagaggccgccgccgccgccaagccctcggtggtcaagaagcggaaggcgcgggtgcctctcgacgtcgccgacgccgtgatggaccagtacggcggtccggccggctcgccaacctcccggataagcccgtg

SEQ ID NO: 358405 - DNA, 296 bp, Zea mays
ctttcactcccactgatagcggcggcggcaccagaagccgctcaggtgggatgagcgtgtccttagcagccgccgacggccgcgtcatcggaggcggagtcgccggcctcctcgtggccgccagccctgtccaggtcgtggtgggaagcttcctcccgagctaccagctggaccagggcgccaacaagaagccggtgatagagatcacgacagtgccgccggcgcccgtcgggttcaccatctcaacggggacatggacgacgcgtacagcggcagccagcatccaaggtcggcgg

SEQ ID NO: 358406 - DNA, 279 bp, Zea mays
gttccgcccgtcgctgcggtttgtcggctacatgcggcgcaacctgcatcggtccaagcacgactccgagctgcgcatgctggcgtgcgtgcactccactcgcaacgtgccgtccatcatctcgtcttctggagctgtctaacccaaccaagcgctcccccatcttcatctacgcgctgcacttcgtggagctcaccgggcgcgcgtccaacatgttcgctgcccaccactccccaccaaccagagcttctgctgcatcgatcacatcttcaacgcctt

SEQ ID NO: 358407 - DNA, 280 bp, Zea mays
gcgaccgccacgctgctgggctcctcctttgccattcccgccgcagcccgtaggcgtacctcctctgcctccacctccttgggcttcgccacgtcgcagctcgccggcctctccctctccgcgggcgccgcaactccaaccgccgtcgccttcctcccaaagaggcagcagctccagcccattgtcgcgcgcgagacttccgtttccccttgctgttgcttccctcccgaacgtccttcaggtttagtggttgctctggtcttcagctgtcccggctgtt

SEQ ID NO: 358408 - DNA, 230 bp, Zea mays
cggcaacggtgaagcaacagggtgttgttagagcccaactgccgcgccaagctcaagcctcaaacactttactataagcctgtacacagcacgaatgcggcccaaactggacgcgaccacaacttttcgtccggctcgtcctggcccagcccacttgtagacaattttcgttttcgcgattctagcgggccgatgctgacaaaactaagttctcaatttgatttttagtc

SEQ ID NO: 358409 - DNA, 294 bp, Zea mays
  unsure (1)..(294): unsure at all n locations
gcattacctgcgtgaacatcgcgaaatggttggtagtactggttaattttganctgtaggaggcacaggtcactgtgccgagcaaattctcttgttgaaaaaaataagcaaaatcaactgtcttgtaggaatatgctccatccatccatagcctagcaaatcagttcgatattgactgaaacttgtagctgcatagatgcanggcagcttgatcatattcaagatggggaaggacaaagaagcgccaatctgaaggagggggagacagagatcaaggccaagtttgttgagaag

SEQ ID NO: 358410 - DNA, 305 bp, Zea mays
tgcattctcgatagagctgctacatcagtcaggagcaccaccggtctcctccacgacaaaaaacagatattctatcgtcagcaatcctgcgttccctgctcgacggaggtgcttccctcgttgctgcgttgcactgcggcggcctcgcgcttgttgtcgattccagctccatgcgcccatgatttactttacttgtgtaagatcaccaatctccagtctctactgctattcccccctttgcgttgctggaaaataattggtttgccatttagattcactaattctatgcgtctttccaattctag

SEQ ID NO: 358411 - DNA, 210 bp, Zea mays
gcagatcacggctctagtatttctgagcctttgcttaaagataccataccggccacagcaaatgggcacggcgttgactgcagccagcagcaacaggtggttgcctctgaagaaacggtcgttgactggttaacaataacgaccatttcaccaccagtttgaagcccgctgagtcaggcgtcacatcacaagaaggttcagacagcaacg

SEQ ID NO: 358412 - DNA, 177 bp, Zea mays
acacgccgtggggtggacggattcggcggcttcccgacaatggagtttgaaacgagagcgcagatggataaggccaataagctacatcaccggatcggaggagaaggcgaccaagagcatgagccacgggtccacggagctgttcgtcgaggtggattactggttccagtcgtgtcg

SEQ ID NO: 358413 - DNA, 272 bp, Zea mays
ccgccggtaaacccgtgtgtctgcacagctaggccggagcttgctcaaggtgcgtggtgcgagtgcaacggcttcggaagggagcagaggttgaagaaaatgcttcgccgcagccgatgaacagggaggcaaggtcatgaaaagcgacgtgtggtctcgaggacgtctgttggctgttgctaccactgggtggattaatttaccgaagtctatattagagtttttgtcaaaaaaaaaaaaaaggctagttcaagatcgcgaggggccgccga

SEQ ID NO: 358414 - DNA, 271 bp, Zea mays
ggccatatgtggaggtggcgttctaccataagccttcacggacactactggtgaccgatgctgtcatctttgttcctcaacagccaccggagtgtataagcaaagaatctctgttggcatctgcgaagaatggactggcagtgaagctattgagcaaagggaaggaggttcccgataaaccagttgttgacaataagctaaaccgtcagaaagggtgggagagaatggtacttcaaatactatttcttggtccgtcaaatctacttgagcc

SEQ ID NO: 358415 - DNA, 267 bp, Zea mays
gctatggccgtcaaaaccccgctgccctctccatctcggctcctgggcatcagcccccacgccagaagctagggcatcgtccccttgatgtttcccatggccgcctccagctcctcccatggcgcctctcctgtatttctctggccgttagctgcggcgctcgccgtgggcgctgcgtgcccctgtccagttctccacgtcgtcgctgagctcgcccctgccttagtccggtcgcctctgttcactcctctctgtccgtctggtggc

SEQ ID NO: 358416 - DNA, 267 bp, Zea mays
tcagacaccttgtaccactagtagtttgtcacgatatacctgaggatagcttccagcctccaggccacgaagggaaagcatgcccaataggagaatttctgggccagaatgggtcctgtaagcggtgcagtggagagtttttctttttctgttggcagtagtgaacgggtttattatatatatgggagatggttcgtgtggatgagactaggatgggaactgaagattgaaccggctgcctccgggagggcgctcctccagataaat

SEQ ID NO: 358417 - DNA, 280 bp, Zea mays
cgcgaacgtctgcgcttgtcacgtcgtggcgtggacgcattcgagcccttctcgtcgttggagtttgccgcgtagtcgctcagctcgcccccatctcctcctctccccatggcagcttcccctggagccctccctgtgcgcgctcctctctccatggctgttgcatccctacttcctgttcccagcaccggctcccctcccccgcgcgtcctcttcttcgccatgcatccatggagtcgtcgaccgtctccccaaactgcaccgctgtccactcctacgg

SEQ ID NO: 358418 - DNA, 288 bp, Zea mays
  unsure (1)..(288): unsure at all n locations
gcgaccattaaaagattaggatctatggtcaatgctcttagggattagggtgtattaaaggctagtttgggaatctcattttcttaagagatattagtttattttctcttgagaaaataagaatcattcggaaaaatgtagttcccaaactagccttaaacgtgganattagttcatttctctttanatccccttagatcctggaatggatttgagtttttaaactggtgtagtatggagactcaaatcccctacgggatcttcgggattgaaggggatttgaagaga

SEQ ID NO: 358419 - DNA, 254 bp, Zea mays
  unsure (1)..(254): unsure at all n locations
ccatgcttgagtaattgtatgtagttcgtctttctccatctctgactgcccattttcacacatatcaatctctaatatctctaccttgaaaatagctaggacaaaatgccttggtgctagcaactcctagcgcctattgccaccttttaaacagagatattcactngtttcaggtcgggtgactagctgggcgttccagaggtccgaccaggcgcctaatcacgattagggcgacgattttggcgcctaatcgg

SEQ ID NO: 358420 - DNA, 256 bp, Zea mays
gcgcaaaggcggacagatccaccagtgctggaccaacgccacgctctcctacgcgtcctacaggttcaccaccaagagctgacgcgcccgtgcagctgtcgggtggaggaccaccgccccgctcgccccccggggccagctgctgaattcgtgggaagcacatccgcgacgtgcgtgacagcattcatatacacgcaccgcatgtagaaatgcgtttttcttaataaactcccgagtgccgatcgcggtagatatg

SEQ ID NO: 358421 - DNA, 267 bp, Zea mays
accatacgcgcctaactccgcgtcctccccccctccctcgaagcggccaaggcggcggcagcagtgccggcatgggcgcaatgtcggcttcgatttcgtcggtgaattggctagtcgaggatgacatccttctcaagaacgccgtcgagaattattgaacactgatggtagcagcagccagcactctcatattaattatgttttgaagcaatgtcctgcactatgtagcagcgaatcagcagcctaaataaattgaaatggttgctt

SEQ ID NO: 358422 - DNA, 261 bp, Zea mays
  unsure (1)..(261): unsure at all n locations
gaacaatcttgggaagatgatcttgtccttgtcgtctaaagccaagtcacctcaagaagcggatgcaaagccggccgtggacagtctcagtcttgtgggagaaatgcaacatcttcttgccaaggttgacaaggtgctgcaagcgcagcgtngcatctgctacagatcatcatgcaatccaccactgaccagtctgtatggttaggatgcatctaggtcgttcagctactgacccatgttccttgtagctgctgatcgtca

SEQ ID NO: 358423 - DNA, 240 bp, Zea mays
ctgccgcgcactgcctgcttcggccgagacgatccccccggcccacgtttcgctcacatctcgcgacactctgcccacagctcactcgcctccgtctctccccgtcaaaaaagccacccccgtcccccgcgccgcgccacccgcctttggcctctggctggcaccctttcccccgcctagaaacccgagctctccctctagccttctgccgcacacttccgagcttcttccacacaacat

SEQ ID NO: 358424 - DNA, 257 bp, Zea mays
gtggacaaagcctgcgtgagtgactctagatcagtgctggtgtcgagcgacacactgaggtccagctggctgtggacggggtggacatccgtcctgtcggcgacgcagagtggggtggcttccagcagtcagatgcgctgatcgcacgatgtccgtgaggtctccccagaggcagatggaggcagcttggacattcctgtggtcaaccctccaccgatcagtgatcatgttcagggaggcgcaactcatccctgaag

SEQ ID NO: 358425 - DNA, 259 bp, Zea mays
acatggagttagtgctgaacacatacttagaaaggtacaagtcttaagagaagcttttgcttaatgacttaaggttagcatgtgtcatggacatggaatggagaaaatccaccttcctcctggtactaaagctattagggatatctgtgtactgcctgggggctatgttgtttttgcatcactgggcaggaagttgtctattttcagtgtggctaccaacaatgttgtccttcaatatgatctgccggctcctggttgg

SEQ ID NO: 358426 - DNA, 187 bp, Zea mays
tgctactttagttttgctatggatatgagcaatagagatcaccttaggaggagggaggaggatgatgatgacctcttccttttcattctcccttccctacatctcttgggctatcttggacgtagtaaaaagaaattgaggcatacatcagcgctgaccggggaggaaaaggttcgagagctacttg

SEQ ID NO: 358427 - DNA, 260 bp, Zea mays
actcatgagaaaatatacgctattggtggaggagatggaaatgaattttattcagaagttgagatctttgacccctaccttgggaagtggatatgtagcccatctatgctaacctctgtatgttctcagcctcagttgcatgcatatacacaatttgcggtttgctcttgctgcgtccggactaaatggagtcatctatacatctggtggctatgatggaaacatgtacttgaaatcagcagaaaggtatgatccaaggg

SEQ ID NO: 358428 - DNA, 137 bp, Zea mays
catcatcagtctccggcccctcttcctcgtcgttctcttggcgtcgctgcaatgcggtgctgcgacggcggctgctgggtaccggagttgcgcgcgtgggttctggtcggcggatcgtcctatcaagttctccgggg

SEQ ID NO: 358429 - DNA, 248 bp, Zea mays
tgctgctgaaggtagtagcagtcatgttcaatcatcatccggttctacgaagaagttggatggacattgtaaagcctgtatcagtaggccaggcacttattccaaaggtgccaaactgcagattgactgacactgctcttccaatatttagaggtccatagattggattccccacagatttcttattactgttgtcagaactgcattttccatctccactagactcaactggccgttctagatcgcga

SEQ ID NO: 358430 - DNA, 285 bp, Zea mays
gttcttatatggctgtgctatagatgcctggatattgaatcccatttggctcttcgattctcttcaagccggcatcatgctgccacctggaaagtatttaattcgacaaaggaatgcccagaagcataattcatcattcgaccgcccacttcacccaaaatgtagtacattgatatttgatggagtagtcttcttgatccacggcaaaatcagcttctgttcaaagattttccaacattgtcaagcatggagggggccaagtttttatatctcttcagggattag

SEQ ID NO: 358431 - DNA, 281 bp, Zea mays
tctctcttcactccgaggatcggagtgaaaggagcactagctactggcagtatggtgagtctgtgtctgcaggcgaagaggcctcgggtggggactgcgcacgggttgtggcgaaccagatgggggcgttcaaggtgctgccccaggagctgatcctctccgtgctcaccgccctgtcgtcggccgcggacaagcccgccgacctcttcaacgtcatgcttgtgtacgtgcacgcgccggccggaccccatgcatcctagcctagctagctacatgttttt

SEQ ID NO: 358432 - DNA, 282 bp, Zea mays
ctaagacctgcccgtacttccaccagctggaggccaactgcatcagcaggaagcacctccgcagcggcggcgccgcgctgacgctcctcctgctcttgcgtaccaactatcagtgaactcgagccggcacgagatagaagggaagaacatcaacgacgacaagaggaacaacgggggatcaggtggaggcacacaggtgctgccgaccagcaatggcgagacagcaccgacgacgacgcccgccgctttcgacaccgacaccggcatgaagaagccagaaga

SEQ ID NO: 358433 - DNA, 272 bp, Zea mays
ctcgtctgtgatcgtgccgcctccttcagcgcctcgtcatccgagtctttcggcctcgacgatctctagctgtggtagctaccggagggaacgactcgtgcttattctcgtccccgtggcacgtttgcgtggcgcgcttgcgcaacagtgtagatagtgcgcaagagctgcgagctgtgctgccgtccttcccaagggaggaatgccagcttactttgttgtacggaatgccgtccttcccaagggaggaatacctccatgatgttcttttc

SEQ ID NO: 358434 - DNA, 283 bp, Zea mays
gtttggctctcaggaaagcctcggcagctggctggatcgcatctaggaagatactaaagtacgtatttggtagagcagatcagcaacctgatcgatgggcatcttttttgcacatgatatggtaaccggtggcagctatttttgggcttgcaacacaaagattgcattcttgcattagtgttgtattagtgttgcgctgtcaaactttatctggaaaccaaagaacctttcgctcttttctattttctttagaacctttaacagctggctatcagaacactag

SEQ ID NO: 358435 - DNA, 270 bp, Zea mays
ctgagcggtgacgctcgcgccccaggcctgaggcctccatcttcgggcccttcactggctacgagcaccaccaggtacgcatacccctcctcttccgttccttctgtacgatcaccctaaccctagtttaagatacttgtaatcggatctgatccaatttcaggtgtactgggtccgatccatctgagtctgatcttttgtttctcgggttcctggcagaggattatggattggctggggcagaagcgcgcggagatgctgatgcaggtg

SEQ ID NO: 358436 - DNA, 289 bp, Zea mays
ggctacaagggggtagcctgcctcccttgtgttatgccttccgacgatctcaaccgtcagttctctcccgcctccattttggtcgtccgtcggatgctgcccacgcccgcatgcgtctccctgctcgtcgcccaccactctcctgtccacgcgagcaacccctgcaaccactgccaccgtcgtgcctcccgtcactcgcccccctcccacagcgaggaacccctaccgttgctaacccctcatcgctcgcgctcccctaccatcgttccaaataaagaggtggaggcta

SEQ ID NO: 358437 - DNA, 283 bp, Zea mays
caccccgctcgcatccacaagcccacaccgtcgcgatctcgtctccgccatcgccccgctcgcctcctctgccaatggcccgaccaaccttggctcctcgctctgcccctccctcccaactcctgccatcaaagtgcacagcttcgccggccccaatgtggctctgtcgaccctccgtcggcacccacgcacaccacctcgagtgcgcgtagctctgcagcacgccgccagggccgcctcttccgcgacggtgcgtcgcccctctgcgcctctgcagcggtcg

SEQ ID NO: 358438 - DNA, 256 bp, Zea mays
gtctcccagtcccaggtcgccccttcggccgagctccacatggtgcccggatctccctgctcccctgcgcgcgctctgctccctgcgcgcactgcgagctccgctcgtcgctcctccctgctcgcccctgcgctcatccaactccactacgccgtgtctctctgtcgagtcgcatccgcagttcgccgccagcgtccgtccgccggtggtgctcgttcccttgacgtcgaactgcgccccatgtcggcttctccag

SEQ ID NO: 358439 - DNA, 258 bp, Zea mays
aaacgaagcatcttcctgttagcataaaaccatctgagtaacatcttctcatggtcttgttatttacttgcttggtctcagttaccttaatttcgaatggccatgggaatctgttaatgactaatgagtatttggtagtttggtagtcaactttccaaccatcttctagcagttgtgcggggggtcaattgagtttttctatcctatatacttcggttgctgagaatattctggagactactttaagttttgtatgga

SEQ ID NO: 358440 - DNA, 192 bp, Zea mays
gcgagcagccgcccttttttttttttttagcaatctgtttcttaatcttcatgtcttaacatttcggtacttccaggaccaggagtgttactgtaataacataaattctacattgtccttatataggattatatgatgtacctagtcaacatttcagctgtaaattgtaataataagaagtatttttctgcc

SEQ ID NO: 358441 - DNA, 252 bp, Zea mays
ggtgtgcagttcgatttgttcgtcttcggttggtttgcttcgagacattgctgaccacgcttgtcactgctaatttgtgcggacggaggagttgcttgtgctccgataaataagataaataatcaattctatcgtcgtctgggttgctttcacttggtccttctcaagcgtgtcggagtcggactgtgcttgcaaaatgtttgagagattaaggggtgtttggtttctaaggactaatgtttagtcccttat

SEQ ID NO: 358442 - DNA, 251 bp, Zea mays
tacggatctagatttccgtctttgtcaagatcgatctccacgtctgcttgggcgtttctgctcccagctttaatttctcaagagccaaatgtcgccttcgtggaacggcttcgtcagtgattaatattacggcagcaactcatctgcaggggcattgggcaagcaacagacgaagcagaacatcatagcagaacgaatcgagaacagccgaacatcataaaaatttaagcataaaaatcttatctagtaaa

SEQ ID NO: 358443 - DNA, 170 bp, Zea mays
gggagctggagaagaaattcagcggcaagctcctttctatcaagaggtttgacatggtagatctgccattatcagaacaagatgaattaatggacatgctttggaatatctcttgattgaaacaccccagtatgcagaaaatggctctcttgatgatattttgtttacac

SEQ ID NO: 358444 - DNA, 248 bp, Zea mays
ggtgtacatcagtacgagcatctgatttggctttgtctataaccttttgttttagatgacgcgtcaaggaggattccaatgttgatgtcagtggtctctctttctcgatcttctccatttttactttaccttatctttcttttttaaggaaccacttcttgtgctcctgatttccttatttttctttgcccttactctgtttagtccgtggttagtagtggtgtcctaaatttatcgttcgtacagac

SEQ ID NO: 358445 - DNA, 249 bp, Zea mays
ggaacatatggagaacacgccagaatgcagtgtcaatactagtgctgagaattctcagacaacagccccacttacagaatcagaaggtggcggtgaagagattcaatccgcacaacctgttagcaaaggcatgtcacggttaagggcaaagaaaaccagagatcctgttgtagatccttcggtggaccgcagcaccgaatatagggggaacacgccagagcacagtgcggatactagtacggagaattc

SEQ ID NO: 358446 - DNA, 273 bp, Zea mays
ctcatcgatggcagtggatctcatcccaccggcatcatgagatctcggtcggtgcgtgatttcgatgggaatgtgcaacccaatcaacctgtttgatacccctgcactgactcgactgccaggggtctccccgggctctctccaggcgccgggattcctttcctgtggaatgtccgcggatgtcagggtcacagatttgacactgacatgcgttggcatgaagggcatgtccggaggtcctgtcgtcaacaagcgtggagtaattgggatgaa

SEQ ID NO: 358447 - DNA, 131 bp, Zea mays
ccccgtctccgcttccgtccacctcacgtcggcgtctgccatcgaagtggccttttcggcggcgagtgagagggcgaggaataaaactcgcgtcgcgcacgcaccgcaacaataatatccttccacagaac

SEQ ID NO: 358448 - DNA, 279 bp, Zea mays
agaggttgttaattcaggatttcaggctgctttcatggttccaacagaggtgcttgctgtccagcattatgaacacctaacttcattgctagagaagtttgatggagatgagaaaccaaatattgccttgctaactggttcaacgtccacaagggagtcaaggataattcgagatgcaagctgttctccctagttctttcactcactctcaagttccacatgcatatattaacatctccgctctattcgtattctattacagggtctgaaaactggaga

SEQ ID NO: 358449 - DNA, 219 bp, Zea mays
  unsure (1)..(219): unsure at all n locations
gcggaagtcctggagaggctcggctgccangtgcttccagttccatcggccgcccgctgcctcagccttctactggggagcgccaccgccaccggcggcggcgatcagccgtcattccagtccccgtacttggtactgcaggcggtgcttgtagacttccacacaacatacgatccccgcctgcagtaccaagtacggggactggaatgaggctgatcg

SEQ ID NO: 358450 - DNA, 272 bp, Zea mays
gcgagctgatcggctctactcccttctcttgttcctttcttctctccgggctcacctaccggatcatcctccatggccaccctcgccttgccgccgaccaccaaggctgccggccaggacgccacccaggaaagcctagcagagaatcctgccaaggacgccgcagatccgggcagcatggagtccgagtacgtgtccccgactccccgaattaggaatctgtggtgggttcttctcggaaaatcggacatcgtcccggccgatgtggccgc

SEQ ID NO: 358451 - DNA, 272 bp, Zea mays
agcagagttgcggcggcgcgacagggaccacgcggatcgtgtgcacggggcagcccacgaacacgaaggcgatggatggaccatcccgcgcttggctgttagatccctcggccgcttaccaccgctgccctgcgggcccgggcctctcttccctggacgcaccgtggcgttgcgcgcgtctacgacggtggcatcgtcggcttgcttttgcggtgatgcagctcagagaattgtaattaaattaaaatgaagagcgtttaacatctgagcgc

SEQ ID NO: 358452 - DNA, 274 bp, Zea mays
gcggcagtgacggtggcatggccatcctcggcaacgtgcagcagcgctcgttcgaggtgcgcatcgacggcacctccgttggcttcaaacccagctcctgctaactcatggattaacagtcggcgacttgggatcactcactagtagtagtatatgcacgtacgtagacgagagtgcagagatacatacaaagttactgtacatgatgatagtaaagataaacttgcaggagagcgtataccatacacagcacacagcagtagcggtggaagtt

SEQ ID NO: 358453 - DNA, 268 bp, Zea mays
gacatgcgcaaggccaagcgcgaggaaagtttccaaaagaagcgctgcgatgggtttcccgcctccgccgccggtgtgccgccgatgggccactccaccgcgctccagcagaagggtatgggtgacgtggtggcactcgatctgctgggttcggatctgattttcttggtgacgggatggcatgccggcgatggtgcaggccgtccactccaacgacccctccgtgcagcttgaggccaccacacagttcaggaagctactttctata

SEQ ID NO: 358454 - DNA, 230 bp, Zea mays
ggcctgtagccgtgacggtgacggcgtcaggctcagctcgctcgccccccccacgaaaaccctaatggcgtcccgcctccttcacctccgccgcctcattactcctccccccaccgtccccgccgcttccttctccaccgccgtcagcgcgaccccgcgcgtctccgcgctcgtcgacgagatctgcgggctcaccctcctcgaggcctcttccctggccgatgccctgc

SEQ ID NO: 358455 - DNA, 271 bp, Zea mays
gatttttctgcaaagaagggcttacggtctggttactttttgtgggcaatggtggcctatggctctggtaagttttgagtggatgaacgctaatgcagcagaagattggaaacattaactggctatttcttgtgtggccacataatcaggacttctaatcacatatgttgcgctgaacctgatggatgggcatggacaacctgcccttttgtacatcgtgcccttcactcttggcaccttgatcgcgcttggatggaagagaggggagctg

SEQ ID NO: 358456 - DNA, 263 bp, Zea mays
ccgtgtctttcgtttcgtctactctactgtagcacgccattaatggccatcacgaagccggcaccgcttcgcttccttgcccagcttataaaagccacgccgcggccacgaacccctccctttccccagctgctcgtccatgctctctcgccctgcttctcgcacagctcccatgccagcgcgctgctgctgctcttcgttgtgttgcgcaacacctcaccggagctccgcccttcaccatctcgccatctcaccagtgcctc

SEQ ID NO: 358457 - DNA, 256 bp, Zea mays
ctgacttcattttgctggcagatgttgtggctggcattgatcttcaaccgggagttccagataaacattattggaggttctcttccaatggtatctattcggccaaatttgcttatgagataatgtttttgtggttctacctccctggcgggctttgaaagagtgtggagcacctgggcgctggctaagtgtcagtttttcctctggttggtcctacataataaatgttggacggctgaccgactcgctaagaggg

SEQ ID NO: 358458 - DNA, 140 bp, Zea mays
ctaacttatggccaaaatacccatcaaattttgaagtactgctggcaaaattatatcaaattatgtagagacatttcaagaaagataatgcgaggtatagccttggctttgggaggggcaattgatgcttttgaagggga

SEQ ID NO: 358459 - DNA, 253 bp, Zea mays
cccatggtcaggccggacgcgccgccgctcgacctgggcttcgtcgccaccaggggcttgcacgccgccgtcgccgcgaggccctggctcaactcgctcctcgccgcgctcaacacgcttctccatggtccccggctcagcacagactgacgctgacgctgacactgacagccaccccacccgctcgtacgcacgcgcaggtcttcgtcgcgatgcaggcggcgtacatcctgtgggccatcctcggcgagca

SEQ ID NO: 358460 - DNA, 252 bp, Zea mays
atttcgacgacggagatagtgactatgaaggttgcaagaggaagcggccctctcagaacactaacaggagcgctaataagaagatgaagcaagaggagccacctcaaggagccccatcagatatggaaaatggggctcctgcagatccttcgtcgaatgaaaaacctgcagatggcccagccgctcttattctacattttagcagtccagaagctattccttctgttgatgacatcaatagcatattccgta

SEQ ID NO: 358461 - DNA, 257 bp, Zea mays
agcagatccggatcggttccgggctcgaccccaaataggaagcagtgctcgtcgactttcttcgcgcagacgccgacgtctttgcgcggagtccttcggacatgcccggcataccgagggatgtcgccaaacactcgctggatatccgggccggagcccgatccgtcaggcagcctctgcgcctcggtcatcaaggaagggtcactctcgccttggcagagcccgaccctccctcgggggctaagaagggggaacat

SEQ ID NO: 358462 - DNA, 139 bp, Zea mays
ggcatctctaaggggtatttggtttgatgttcgatgaatcatctacatattctttatttatttttatttgggctatgatgtggaataggttgatgcatcaccatctcatatctcatatattagaagataactagcaaag

SEQ ID NO: 358463 - DNA, 248 bp, Zea mays
gttgcccggtcccgcgtgcacttgttctgccgacgggccaatcccagcttgaggcttgagctcgccctgcggaatggccgcgtgtccttgcgggttaagtaggccaaggacacgccaggacgtacgggccgacagcagcaacgtcgctgccacgctggtggagtggtggtacactggtggtggtgggggtagccgctgcctgcccgagggggttgcggccttccccagttacgagcggcacgacggga

SEQ ID NO: 358464 - DNA, 250 bp, Zea mays
cttcccccgcgtgcaccgactgcttttctcccgcgtgcggtggctaattttggccaccgatacgctgcgtcggcgctccaaagttccaggtcaggagaggctagagttccaaatcgtagttcgtgtgaaccagtgtgaaccagttgaatctcatcaatcttatcaagtcatctaataaaaaaaggttcgacgcgtcttagagttctacgatgcatccaagaattcagagaacgttgacaaatatatagat

SEQ ID NO: 358465 - DNA, 246 bp, Zea mays
attcccttcaaggcgctggttcgcgacggggttcttggttggttgggggccttcaatgctggccattcatggaggcggggctgctgccatggtgtcgcccgcttggggttcacctgccgctgttgctgcgccgtccgatcacccatgatcattcagctctcctctctctctctctcttcccgccactcatgcatgcatgatagcttttcctcttgctctagcatctaggtttcccgttcctgttac

SEQ ID NO: 358466 - DNA, 132 bp, Zea mays
gctttgttcgactttgatctcgctctgacgctctcgctcgcaactcacctctccctctccactcgcacctcgccgccgtctacccgtctgctgtcctagccccgcttctgccgcagccatgaacccttccat

SEQ ID NO: 358467 - DNA, 246 bp, Zea mays
cgagaggaagcacatgacggctgtcatcctgctgctccacctcaactgctttgctcagtacgcgctctgtggcctcaaccttggctaccggaggccccggcgtccggtggtcggtgtcgccctcaccgtagcggtcgccatctgcgcgccggccgtcgctgggatgtacaacaacctcagtcctctcgggagagactacgaggcgccggcgccggcggaggggatgataatacgtgaggaagagtc

SEQ ID NO: 358468 - DNA, 128 bp, Zea mays
gcccgtcatcagctccggcagaagggtgggagtacggcaaaaggcctgcctctctgcgactgatctccggcggcgaggcgccgaccggggtatgggccaggatgtggtcgcgcacgtctacgacgtcg

SEQ ID NO: 358469 - DNA, 261 bp, Zea mays
aagtcggctcgaggacggcggcgtgtccatcatcggcaacatccagcagcaggggttccgcgtggtgttcgacggcgacggccagcgcgtggggttcgcgcccaaaggctgctgagcccccaggccggagtggtgaacccccccctcccgagagagagcccttgtggcgcagttaattaattagcgagtgattagctggtaatgaagtgagccgccctgttagtcataattaatggatgcggtggcttgtggttgtgggtt

SEQ ID NO: 358470 - DNA, 257 bp, Zea mays
gtcgcccagagcaaaacggaggacggaaagtttagtaggaaggagacgatgaagggaagagaggagcagaagggagaaggggccagtgatggggtcacccagaccaagactgaggatatgaatgtgactaggaaggaaacgatgaaggggggagagaggaagggggacgggagtaggaaggagatgatgaaggggagggaagagcgtgtgaaaacggaagagaagacagggaaggaaaaggagaggaaaagagtggc

SEQ ID NO: 358471 - DNA, 254 bp, Zea mays
ggcattcttccttccctttttcgccggcaggaggtttcatcaacagccgtcactcggtctcagcctctcagggatgggaggtgggatcggatcgcaggccgggggagcggcaccggcgccaccgacggccctcggatcggcatcggacggacacaaacgtgtccccgtcggctttcgcgtgtccccactatttagccattgatacgccggatccaaggacgtcatcttcatctccacgctacgctgtggctggc

SEQ ID NO: 358472 - DNA, 256 bp, Zea mays
caacattttctgtttgtgcccatgcgatgtcaacttgactgggccaaaattattccgttaacagttaacttcactgctcctcataatttttgtagggcactgtcaattttcagttaacagcgtttgacccatcgcaagtatttgattttgagggtattggacctgatcttcgatgggatgaagaatcgcctcaacatgtacccagtgagttagctatgtattcgaaacttggattggcggcgaagatgaacgagaa

SEQ ID NO: 358473 - DNA, 259 bp, Zea mays
gtcaactccctagacacataacacgtgccaaccgcaacaacccacctttccaccctcatcatgcatttcaccaccgctttcatcggcctcctctcggttgcctcctccgccctggccgcacccgtcgacacccaggccgacaccatcaccgcccgcgctccccctccgtggatcatcaagtccttcaagcggtcctgcaatgccgccaacaccgagtgctcggtgtcgtttggggtcgacacccgatcagccccgtcgt

SEQ ID NO: 358474 - DNA, 252 bp, Zea mays
cgacgccctcctcgcgacgctcgacgttgccaactcgacctccacacctttcgcccatgggttcatctccactacttctacatgctctggcttgattccacatgtctccgcatgcccagatctggcatcgcggtgcccgtgcgttgcctcgcggtgcccatccatctacaccgacaaggggcagaagcgtgcccgagctttggcggcggggtccctactctccttcatcagtcgtgcactcggtcttggcta

SEQ ID NO: 358475 - DNA, 258 bp, Zea mays
caacagcttgttggatttaaaattctttggcacttcaagggcgcaaaccacctccaagttaggttccaaaacaaaaccttctagatgacagctctcttcttcaattttcacctcttcaatctgcctttctgcccgcagagatgttggtgaatgctcctgttctgtgtacatgtcaaaaccagtctttgatgcagtcgacttctttgtcttgggatgcttaggatcctgttgtaaagatgctttcttttgaggaactgc

SEQ ID NO: 358476 - DNA, 239 bp, Zea mays
ctagatttaccgaagcgagcggacggtgcagattcaccgatagcagaaccaggggaggcagcctaccccttacagccttaatatgtagtaaagatatgcccctaataagctgggttttctatttgcaggtgaatgtctcaaattacatggtagaaatggcttgggtaaaagatatttatggtgtgagcacagcagaagcaatggacctattggaacatttcctggcatgaatccagata

SEQ ID NO: 358477 - DNA, 254 bp, Zea mays
gccgacctccactccagcacttaagcaagcgctcctgaggtcatcttccccatacgctccccatcttcctctagtgtcggccgccaggttgtcttccccatccatcccatggcgccctggctctgctcgaccttcacaatgagctcgccctcagccatggcgggtgccgccgccacctcccccttggtgctcgccgagctcgccctcagccctacgtgcgcccctgcttcctcttcccagtgccgatgcccctg

SEQ ID NO: 358478 - DNA, 250 bp, Zea mays
ggacactcaacctggccatggtcccgtgggcgcctcccaaggtcgatgcccatgccgcctccagctccacagcggcggtggtggaaatggtggacgctgatcaggacggcgacggcgcatccatggaggtcgagcacgacgtggagggccaggccacgccaccagctggcggtgcgctgcaggtggaggcgttcaaccaccattaccagcagcagcaccagtggccagcgcacactggttgcgtcgccgc

SEQ ID NO: 358479 - DNA, 249 bp, Zea mays
gcttctttggtttcgctgcaaggaaagcgatctctgccacagcgttcacagtgacaggtgtggtcaacaagttcctcacggttgcgataaatgtgatgatttgggacaagcatgcaagcatgtttggtttggtttgcttgctcttcactctcgctggtggagtgctctatcagcagtcagttacaacaaaaggcaatccttcagcagcagctaagcagggaagaggtagtgatgagctgttgaggtgga

SEQ ID NO: 358480 - DNA, 249 bp, Zea mays
cttgcagacattacagaacatcggagatatagaaatgcggaagcgattacataaacttacatttatttagaaaaacgatcatattagtaggaaagtcccgtccggccaaagttacgggcacttgataggccacttctctagtaaatatttgtccccctggtgagtgaattttaaacccctcttttgattcatggcatgagatgcaatgttgctccacaaatttcttgctgatgatgtatgcgaacacca

SEQ ID NO: 358481 - DNA, 247 bp, Zea mays
cggatccaggtcccacactggagccaggcgtgcaagggtcgtcgttgcacgcaaagccgccttcgctgctagtgctgccgccgaagctgccaatgatgctagtgcgacggctttggagatgattgttcaaattgagacaggcgaacgccgaggctaccaagaaagctcctagacctctgcgtcgtgattgcaaatgctaaagagggaaaagggagggaacaccgggagtacctcggctctagtggtg

SEQ ID NO: 358482 - DNA, 235 bp, Zea mays
  unsure (1)..(235): unsure at all n locations
attgcacccacatgaagtattctaatggtggcatttagaatggtggtggtggtgctggacngaagaatctctttgtagcgtccttaatctttgntagggatgctgaggctggatttattaacgccaatacacctgtagctaaggttaaaccatcggacttacgnaaagctgaagagcacacatacacattgagcgtgnagaacgccgaggccacctatccctggtgtacagaaga

SEQ ID NO: 358483 - DNA, 159 bp, Zea mays
gtccccgcggtctccgcgccgccggccgtgcgccatggcggagagctgagggatggtctggaagatgagctgcggctggatctgcgcgagctgctgcggctgcatctgctgcgcctgtgcatgtgcctgcacctgcggtaagacatgaggctgcggcac

SEQ ID NO: 358484 - DNA, 263 bp, Zea mays
tgtttattcaacgtgtactataatccatgggagaatgaggctttggtgagatatgcattggatacctacaaatttctttcactagtatcacagtacccgaaagttggagggcctggtattgttggttcgtgcgagctgttcaacaagacatatactgaggaatggttgagagaggatgaatctgaccttgttcagagtttgatccgtcatcatcagtggataccattggtttcttcatcgcgaaatttgatgttggagagaaa

SEQ ID NO: 358485 - DNA, 263 bp, Zea mays
ctcgagccgcgccgtgccccgtctgctcgatcagccgttcccactgttcgacccttccgtatccagcaccttcagggccgtcgcctgccccgaccccatctgccggccgagctccggcttgagcgtgtccgcgtgtgccctgaaaactttccggtgcttctacctctgctcttacggcgactagtccataacggcgggtacatcttcaaggacactttcaccttcatgtcgcccaacggcgagggcgcgccgccggtcgccgt

SEQ ID NO: 358486 - DNA, 263 bp, Zea mays
aaaacagatacaactgaaggattggcagaagaaatgcaagcgataactaaaggactggaaaaagtggagcaggaactggcaacagctgaaaaggatccttcagagacagagatattttacaggaaactgaatttattccttgctgatgcccaagctgaaggaaggtcgttagcttcgctttacagcagtgcggggaaaagtgccgattctctagcacattattttggtgaagatcccgtgcggtgtcctttcgagcaagttgt

SEQ ID NO: 358487 - DNA, 259 bp, Zea mays
cgtgtgtcttcctcagcactcgacaccggaactccatcctgtctgtatgtgtgtggaagaacggagtcgatgaagaagaaagtgaagcccgtgtggttcttgcgttcgtttagtgtggaatggagttgtggatattggggaagaaattccgagaaattagtggacgatgatggtgatgttcgtgcgacactgttagatgctcgacaaaaagcccaaatcgggagtggctgcttagtcttcttcgtcgaatgggaatcgt

SEQ ID NO: 358488 - DNA, 259 bp, Zea mays
gttctagatcgcgacggccgccctttttttttttttttcaaaacaatatcgtcatcatcgtcaccgttcattcatcagataaacaaatggtggtggtggtagtactgtgatacaggagaaaagcagcagcagcaacctatgggcggctgcccctagatgactagtagatatggatgtggtgccggccatgacagctggctcgctaatgtaaagtaaacgggcccccgtcgtcttgtctaacctggatggattaggttta

SEQ ID NO: 358489 - DNA, 281 bp, Zea mays
tggaaactgaacgatgggcacactgcgggtgatcaggtggcagcgatgtgaggacggtcagcatggccatggagatgctgatgaagcctaggttggtcatcctagatgagcccaccattggtttggatagaaactctttcaggcatgaactaactgtactggagaaggttcgacactgtactatgttgctcagttcgtcggagctgtcactcaggacatacctatgatgattgtttctgaactccatgaagagacttatgagatgtatccagaagaaagca

SEQ ID NO: 358490 - DNA, 285 bp, Zea mays
atgagaaagaggaagattatgtgagcatagatgcccacatcttgtccaccccagtaattgcagatattgacaaagatgctctcagaatgagtgtcgtttacattgtttggcaactgtacattctcttgcacttgcgtagaattaagttttgtttcagctgagtgttgctcggatgaatttttcagggcctcacctcccttcatacttcctgatttattctgatctattaggggagtttcattagaagtagccactttggcaattgaactgtcattaacatctgga

SEQ ID NO: 358491 - DNA, 267 bp, Zea mays
ggtctgtgttgcaagccaaagctcttctccccagccaccaagttagctctctccaattcatcaagtgccactccattatctggtgaccaaagcagccatccttccacctcaccgtggccaaggatcttcgagaggtgtttcggccatgttgtgcctgttctctactcctcacaggagcttcggaactagaatagcttcgatacggaacaatggaagagcaacgaaggtagcttcgtcataataacgcaagaagatgatgcaaggaga

SEQ ID NO: 358492 - DNA, 274 bp, Zea mays
caaaccataggattgaagtggtttcttaagctgatgcaggtatgaacaaggatacatcgtggaaatcattactgaggatcagtggcgtcaacgacacaaaattgaaggaagaattgtggagatagataagttctaccgcttgctgggtggaatggtaagtagctcaactcacaagtttccttctggacacagatttgcaattgcggaggtttctctgacaggagatggtcgaaaatcatgccttgtaacgacatggcaaaaaaacaacaaagaa

SEQ ID NO: 358493 - DNA, 262 bp, Zea mays
gaaaatcgccgcgtggtcggtccatccggggcgacttgacttccctctgcaacctcagaacccagccaatccgctgatctcaactgccaggcactccgactccggcgacgatggaggggagcgccgactccttcgggtccttgacggcgccgcttgcctggcacgacttcctcgaggcatgcgccagccttccgccgccgagttcgtcaagtccattaaaagctttattgtgacattctcaaacagagctcctgatccagag

SEQ ID NO: 358494 - DNA, 272 bp, Zea mays
ccggccctagaatggttaaaccctagtagagagaaaggaagagaagggggcggagaagcacgtacgtcgtacatcgcccaccgccctttgcctcgcctcgcctcgcctcgcctgcatatctaacagccggagccggagccggagccggcgccgacaatcgttccaactgatatggctacgacgccgccaggattcacgggcaacctgaaggtgagttattgaacgatccccgtccgccaccgcacggttcaggctctttgccagttccggcg

SEQ ID NO: 358495 - DNA, 272 bp, Zea mays
gctcgactgctcagctctagcctccactccaagcaccggagtccgagagcccgcctgcagtgatggcggccaagcacctcaacctcttcgccgccgcgctgctcctcctcctcctcccctccggctccagcgccaccgccgtcgagtactgcaaaaaggggtgggactacccagtgaaggtgagcagcgtggaggtcgtccccgatcccgtcgtcaggggacagccggccaccttcaagatttccgcctccacaggcattggatgttggaga

SEQ ID NO: 358496 - DNA, 302 bp, Zea mays
agaggaaccatattcctctcctgtcacgagagacagagcggcaccccatctcttggtgactgtcgttcgctacaggataacggcaaagctttatttagcgctggtcggtgtcagtgtcactcatatggttgttagagctcatgctcagggatttctgaatgctgaggccttggatcttctcgctcccaaggcctcgggcaggaaatcacaaacgggagaagttctatggtgtaacacccttgtacttgcacagttttacagcaaatcaaatgatagcagagtagcaggaagtaccatgtttt

SEQ ID NO: 358497 - DNA, 295 bp, Zea mays
gcaacagtccctccccccctgaccccacgccctccgtgccgtgcccactcctctccccgcagcttcgggcccctgccatgccgtcctcgtcggtactgatccaactgcacttcaacttcctctggagttgctttgtgcttcttaacaattgctttcgcctcatcgtacaggctactccgagctccgtgttccgataacgctagagaagagtttcatcgccacaacagggcttcatggattcccaatgggtctctccggaactgagattttgaatctacccaaattcgataccgcg

SEQ ID NO: 358498 - DNA, 103 bp, Zea mays
gtaagttcatgtgaatgttgtcgtgttcccgcagctgcgacgccatggcgtgcgacgtgcgcgttcttggctgtcgcagctgctgaaacttttgatggttttt

SEQ ID NO: 358499 - DNA, 285 bp, Zea mays
gaccccaatcacgccatacaaagccagacactgccatcgccgcgagagaagagccaacatcatagccgcttgcctacatagtcgcccggagcgcacggacaagcccgagagcttagctcttatggcgtggtcatcatcgctccaaagaaaacaacagagggggtcgaccaagccagaattgctcaccggagctaactcggcgtcgtggatccgcaccaagcaatagtcaggcccgaagcccttatgcacaccgatgagcaagtgaacgaggacacgaagctcgca

SEQ ID NO: 358500 - DNA, 272 bp, Zea mays
gtcgtctccccgttggcgatttcctgatctcgcgctggtccatgatgagttgttgtggagggggaggtggctctgacgggatccatggttgctgtcagcggaggagttgtagcgaagtgggtggctctgctgctccagcccacggcgatggggctccagcgtgtgttgacatggttgatccgagagctgcctatagagagaaggtgctaattgaagcagagaaacagtttcaggacgatttcaattttttgaaggaaaagttattagtgatt

SEQ ID NO: 358501 - DNA, 291 bp, Zea mays
aaagaagcagaagcaagtttcgaagtcatagtcaaggatatcagtacctaccaattgaacctaaacgctatgtatatataacagctctagctagtggtatagtgcacagtcccagcttaattcagggcagggacatatccattagaatggtgctcttaaaaatagaaactgaaccggggcggtggtctggctaaggccaagtgtataagaagtagagtgtagctgccagcgtagaaacccatgacaaggaggccacaggagattcctgggagcactgggtgtagcaaaaca

SEQ ID NO: 358502 - DNA, 293 bp, Zea mays
tacaatttgatgaaatatccagcacctccgaatattccattggctccaatacaaaatggaattcatcatatgccaggtaatgtccctgtttataagtctatcttggaaagatggctaagttaattgcctacatgtattttcagttagacaaaaaagaattatctttcttgatttcactcattgttacaatgttggctcaggcacttgtcatgctatatctgggaatgcatttggctggcactgttgatagacaagcatttactgtccagtcattgctttaactatgttgcttt

SEQ ID NO: 358503 - DNA, 293 bp, Zea mays
ccttgtcgtgtggcgccatctcgagttcgtcgtgagaaacaccagcaacccccacgccgtcgtaactactcctcgcaccacctctatccaccgtgggtggggaaaaggtcaagtacctccgccttgttgcactgatcatgtccgtgagagctgggtggtgaattggggcgagcctggccggaatcaccatcggagtcaagcgccgctgggagtccttcgtggccgacgacctccaccgcttgagtaccggagaagaacaggtggtccaggaggagccctacaacgaggaatac

SEQ ID NO: 358504 - DNA, 263 bp, Zea mays
accgccacctacgcaacaccagacgctccagcagtccagcactcggagctcgcgcgcccgacggcccaccatgatcatccccaagaagaaccgcaatgagatctgcaagtacctcttcaaggagggcgtgctgtatgccaagaaggactacaacctggcgaagacccacagattgatgtgcccaacctcaaggtgatcaagctcatgcagagctccaagtccaaggactatgtcagagagaccttctcctggcagtactacta

SEQ ID NO: 358505 - DNA, 129 bp, Zea mays
gcagcccccggcgtctccagaacctccaaggaaccatccacaggcgaggcctcgctcagtgcccggatctcccatttccgcccggccggcgcggcgggatcctgatactggtgctgtctgctggggttt

SEQ ID NO: 358506 - DNA, 288 bp, Zea mays
atgacagcgctgttgaagctgtggctatcgaagataagcaaatggagtcagataccgctggactggaccatgctcaagacatgtctgaaggcgaggacagtgagtttgccgaagacatttctgaagacgaggatggtgagtttgcaggctctgacttgaatgatgaagatggtgatgaaatggataacacccagagccaactgtccgatgtgcatgttcatacatctgaatctgttgaggaactgatcttagacagtctcagctcagcaatgctgaggagggaatgga

SEQ ID NO: 358507 - DNA, 273 bp, Zea mays
tttctttcctctttggtgtcaaaattcctgcctcttgtacagcttccacaggttatttcatcattttttgcaagatatttcgccccttccccaggaagcacatctcgcccctccaggagtcttgttggaaacacaccgtcccatagaggccgtgctgttcagaatcagccatcaactggatttgcacctatcgtggagcctccagagtcctccgttgctatgctggtctcaatgggctttgatggcaataacgcaaggcaggcactcgtgagg

SEQ ID NO: 358508 - DNA, 150 bp, Zea mays
aaagaaacaatgactccgtatgtgctcgctggcggcgagattatcgccctcctctacgtcatcaagaatcgaagaggtatcaagctcccgccgtccccgcggtcgatacggctgatcggacacgttcacctcatcggccgcgtcgcaccc

SEQ ID NO: 358509 - DNA, 272 bp, Zea mays
atctcaagtagggcaacgatggaccactgagagcgcacctgaactgaacctttgcgcaaccatatatctatccggccgccctgaggtttgttggcggccatcatggagcagcagcggaagaagcagcaccagcagcagcagagagggaagttgcagagggtgctaagacagcagaaggctaggctctacatcatccgccgatgcgtcgtcatgctcctctgctggagtgactgatctcaagcatgatatggcacagcaccgatcctgctgtg

SEQ ID NO: 358510 - DNA, 243 bp, Zea mays
aaacaaacaatgcctccctacctgctcgctgccggcgcgcttatcgtcttcctctacgtcatcaagaaccgcaggagtagcaagctcccgccgtccccgccgtcgctaccgctgatcggccaccttcacctcatcggccgcgtcgcacaccgatccttgctagagctgcaggttcgctatggcggcggcggcggtctcctcttcctgcaactcgggcgcagaccgaccttggtcgtgtccact

SEQ ID NO: 358511 - DNA, 268 bp, Zea mays
ctatttgtatggtagcacctgatagaatctgtaaataatatgttcaaatacattgcatagacccattcaattttgaaagtaattgccagggaagcaagtcaggggctgataagtctgataagaacacatatttagttttttctacaatacattacattgcatagacccattcaattttgaaagtaattaccagcgaaacaagtcaggagcagataagtctgataacagcacacatttagtttgtcctacaagtaggtttttggcttga

SEQ ID NO: 358512 - DNA, 100 bp, Zea mays
tcgagcgtgccggtctagcactgtgcgcttccagtgtaatcgttgcttcgtgtacgagtttcagacatttcgaaatatcttctccgagttccggtggttg

SEQ ID NO: 358513 - DNA, 324 bp, Zea mays
tggcaagaagacttcgttctgggaggctgaggccgtgacaagtgaatccgccacacctgctggtgccaccgcctgacaggtgtggcaagaagacttcgttctgggaggctgaggccgtgacaagtgaatccgccacacctgccggtgccaccgcctgacaggttcgatgatctgaagtgcacggcacggcggcaaagaaaaaaaatgtgaatgtatttagcttggatctgttacaaataattgcaaactgctagctcggtctgtacattttacagttgctattcgtgtactgtgatgttctcgtaagtttggggagatgataaa

SEQ ID NO: 358514 - DNA, 285 bp, Zea mays
  unsure (1)..(285): unsure at all n locations
ggagcacgtgagctacatcagtgcaactaccaaggaaatcttatggttgactttgtacctgatattcatatcgaggacgttaagcgcgtcctattccactacaaagatcagcatgcgaacacaaagtgagtaacacgttccccacggagtttggcctggtgaagagattttgggattcctgctagaacaggagagtttaaatggtgatacacactgggcctccatgccanataatcatctanacgcagtggccttccggttgaaacaatggacgtttgaggttgt

SEQ ID NO: 358515 - DNA, 276 bp, Zea mays
cggctcgagactgacgggcagccacgcagaacaatacgagtatcacacgcgcaaagcgattccgatccccatgctccacacaatagggcactagagctacgagagggggaaacgggaggacgggaataggcatcgtcggccatgtcgtcgtcgtggaactcggtaagtctggcgatcctgtagcaggtgctggactgagtcgccttcgccgcgtagtcctgcagctgctacccgcaggtcctcctcaactgaaagcgcaagaatgtgatgggcctg

SEQ ID NO: 358516 - DNA, 346 bp, Zea mays
tgaacctggagttgtcatccgaggacagaaggtacagtggggaacagattttctaatagaagaaatgctttgatgccgtggtcgtttgcttatgttaatgtttacccaataacaaactcagttcatatctgcagtactatattattatgaaaatatgtaatatggatcaagcttgtgtaaagaattattacgagtactgtataaacaatgcctggatacttggtcatgattactcgtgttaattagtacgcctgctgaactctgctagtttattgcatgtgcaagctcttgtagcatgtatttcagatcactgtacgaagtgggcagtaattggtcctgcaggctg

SEQ ID NO: 358517 - DNA, 274 bp, Zea mays
attgctcaacctttagattgtaaaataggtatatcctagaaccacactgttctttgctgaatggcaaaccgaactagctgtactgtatacttctatggtggaatgactaagatggtgattctgacacgaagattgtgaaatgctacgaaatatagtcattttacttaattttggcaacataatttgtccttgccatggtaacttcgagaacttattggactgtaattgtgctactccctcttaatatgataaactgcacatcatcactagatct

SEQ ID NO: 358518 - DNA, 221 bp, Zea mays
ctctcccgcgacgccaccaccacacgttcacggtagcgagacttatcgtcgtcggcggcgaagatggtgtcgctgaagctgcaaacggtcgccggagcgtcctcaagtgtggaaggcaagtctgcttgacccatgaagtcagcgagatctccatgtactccgagaatcgagtgtaggtggtactagagctaagtatcagtcgtcagaggctagcacaagag

SEQ ID NO: 358519 - DNA, 186 bp, Zea mays
ttcgcagatgtggatgcctttgaactggcggaggaggaggtatcagaatccgagctggagtgaaacctgagagctgaaggtcttccccagaactacgtacgtgtcctgcctccatgtacaggagtagttacttgtacggcgatgggcggccagggcccagggttatgttatcgatgtataggcata

SEQ ID NO: 358520 - DNA, 223 bp, Zea mays
ctgggcgagtgcaaaaacacacgagcgagatgtgtatctgtgattctggataggggcgctcgcagcgattggctccggatatcgcagcgtcggggtcgctcagttcacgccgccatggaacgtcgagccggccaattgctcgtcccgatcctcggcatcgttgccgtgaccgccgtaaccttctacaccggcagcttcatggagatgggagacaaatccttcg

SEQ ID NO: 358521 - DNA, 247 bp, Zea mays
gacaagcccacgagatggtcttctaaaccgagttttggagttcggaggaagtcgctttggctgtactctcttgtgacaagccccacgagatggtctcccatagctgaaggcctaccttgtttcattctgcttgaagtctgtcaaatattatgagaagatctaagaaagttttatcggtaacaaaaaaaaaaaaaaaagggcggcctccgcttagtagcctcttcaaccggggatttattccgggacg

SEQ ID NO: 358522 - DNA, 175 bp, Zea mays
  unsure (1)..(175): unsure at all n locations
caagacctcctatctnggcgacgagctcctgtcggattcattcactgacaggagctcgagacggcgtctgtgggagtcanggaagtggcaccaggtctgtgtgagcatgtgcatcatcgcgagtgtagatacgtatccacgtagtgtgtatgtgccatcgctcgcactcttgcag

SEQ ID NO: 358523 - DNA, 195 bp, Zea mays
ctctctctctcttctgccgcacagagcccaaatcgcggcggatccctcgctctccagggagccgctgcggcgccgggttttgtacaccgacttgtttgcctacctccagctcctcctcggcgacccatggctctcctcgcacccgccatctccagcgaggttggtctgcggctcttattggcaccgctaagctct

SEQ ID NO: 358524 - DNA, 354 bp, Zea mays
gtgttctttcaggcagcaggctatgtcagacagccagatggcttgcgagagggcatggaaggaaatttgctgaggagggtgggggtggtcatacgacagctcctgcttacctcattggatgattctaatgggaaaattcgcactgctattagcatggctgtagcagctattggacagcaagattggcctgacgactggcctgagttacttccggttctcttaaagttaattggcgatcaaagcaatgggaatggagttcgtggagcattaagatgcctagcccttctatcggatgatctagatgatatgtgtgttccaaagctagtgccagagctatcccatcactgtatagat

SEQ ID NO: 358525 - DNA, 191 bp, Zea mays
aagcagcatagactctgcggctgcttgggatacagatggcgacattccatctataccttgtgtgtcgctggtcgagcgatgaatttgaagcttacaaagaaggcttgatgcacctaggagctgatgattcatcttaagcttgtgtttcgtgtatacacaacacaaagggcacttgctgtcttcgctgggtt

SEQ ID NO: 358526 - DNA, 307 bp, Zea mays
ggcgaaggttgagttcgacgagcagccgccggataacttcgacccgaagaacccgtatgccgacccggtggcgatgctcgagtaccgggaacacctggtgcgagagaagtggatccagatcgagacgccaagatcatccgggagcgctccgctggtgctaccgcatcgagggcatcaaccacaccagaagtgcgccactcgtcgacatactagagtaccgcggctggttgggcagatccgccgctgactcacgagccagaaaccgtcagcgatacgcctctgctgctctgtctctgtctgattgaag

SEQ ID NO: 358527 - DNA, 143 bp, Zea mays
cgatcacatagcgcaccatgctcagattctcagtagcgcatgactgtaaatgtgtaacgtgagtatgacgaggactcatcctatcatcggtgcttgatctatgccgacagtgtcgtctcgtatcgcagctcagcagagctgtg

SEQ ID NO: 358528 - DNA, 323 bp, Zea mays
gcgagagaagaggcagacggcggcggccatggatttccactccctctcccggcgagaacttcaggcgctctgcaagagcagcggcatccgtgccaacatgtccaacgcggccatggcggaagcgcttaggtgcctccccgcggtggacaggatcgacgagatcgggagcacggcgccaccgccggtatcggcgatgaaggaacagacgccggatgcggaagaggcggtcggaggggagcaggagcacgggtgcccgctccctcgcggcggccgtgcacgggggaagagaaggaaggccggggcacggaagagtaagacggagg

SEQ ID NO: 358529 - DNA, 301 bp, Zea mays
  unsure (1)..(301): unsure at all n locations
ccccgcccgcaatcccagctctctcttcctccttcccactctccccgcccgcaatctgcccgcaatcccacgctcgcgccgtcgatgactcgccccaggaaatctcgcctccgcaacctcctccacgcaccgtcaatggaaggtccaccccacgtcgtctatggaaggtcgcngcgtcacatggaaggtctgcacctcctcnctgcgctccctttcgctgtgagcatcccctgctgctgactcctttcgctatcttccccggcctctgattcgcctttactgtgtgtgtatctggggcgaa

SEQ ID NO: 358530 - DNA, 346 bp, Zea mays
ctcgagccgattcggctcgagggccggcttccaccccctgctcactcaagttcggcagccggcgttttcttgctcggcaccagggtacgcacgccgcctttgtctccctgactggtggtcgcgcgtcgggcgttctacctgcttggcccgatgtatataggtcggccagtagacgttgcgtctattctctggtggccagagctcgcacaggacgcaccctcatcttctccatcgctggacctctacctcaccatgtgctgaccgcgcgatgtgctgctcgcatccctgcaccgcactctggaggtcatgcgtgctcatgtcactggtaccagccagtcgagcgcct

SEQ ID NO: 358531 - DNA, 374 bp, Zea mays
tagtagctcggaatcggtcgagctcgagcgtacttgcgcaccttctcccaattcatcctagcagcaagcatatattgagccacttgagtactgtaacaacagctctatatggcttgcaagcctcagctcctgttcttcaccgcgatcgcagctctagcctcgatcatccatccttgtgcatccgtcgagtttcaccgcaagctatccagctggtccgacggcggcgcaacgtggtacggcgccgccactggggctggaagtgatggtggcgcatgctggtaccgaggtgccgtcgaccaggcgccgttctcgtccatgatcgccgcggggagcccttccatctacaactccggcaagggctgcggctcttgctt

SEQ ID NO: 358532 - DNA, 352 bp, Zea mays
ttgtgattgtatcattgaacagttcatgtcactcctggtccttcgccacactcttcctcttgtgattggtgacaatggggagtactcattggccttattctcgcttctggtgctgagaactgcgggaatcctctttccaatcctggtgatggtgagagcattggcaagcttccatcatcgacggcggcacaggtaatttcgttactgagctgcaccgtgtcatgcatcctgatcatgttcagttcagcagaagcagatatcgcataattgcatgtcacacctgtggaaatttctccattcgtagtagtagaaacatagatttgtatcaggcataactctcggatctagatca

SEQ ID NO: 358533 - DNA, 265 bp, Zea mays
cgatcacattgcgcaccatgctcagtttctcaagagcgcctgactgtaaatgtgtagcgtgaggaagacaaggaggcagcctagcatgggtgttttatctatgccgacagtgttgtctcgtgtggcagcttgaagagaggtgaacagcacaccccacatgcgaaataagatggaagatttgctgttccaaaaaaaaaaaaaaggaaaaaaggagagaagaagaaaaagacaagagacaaaaaaaaacaagaagtgtgcacgaaga

SEQ ID NO: 358534 - DNA, 193 bp, Zea mays
ccagctcaaatttactagtatgctttcgaatctagtagtcagtatggtgtttttcagtagcttagccgttatatttagggtctgattccacaaattgacatagattttgagcaaactcacaaagtgcacgtacattgttgtcgtttctatttatgcttaagtatagaatataaaacataaagacatgtgtgtt

SEQ ID NO: 358535 - DNA, 326 bp, Zea mays
tgggcagcggcgtaggggtagacgggctgggcggcatgcttaaccggcaaccgggctgcagtagcgaggacgattgtacgtgggggagttgctttgggtggagggttgaagcagggccatttgtcaaagatgcgggcacgtctgcagcggaagaagcggagctgagcggttgaaggagagagaggatagtgctgacgcgcagggcccacaacacaatgcacaagcggctaccaagccggatcatgttcagggcgtgcgtgtggctgggcactgccctgctcccgctgcgcttgcacatggtgggctaggaagtcgagtgggctggc

SEQ ID NO: 358536 - DNA, 329 bp, Zea mays
tccgttgaaatcttccccgagccctaagattctctcgccggattcgcctgatccgacccgacacgcgatctctcggctcgccgcaatggccgacaaggagaagccggaggtgagagaggaggagtacgagagcgacctcgacgacgcgcccctctccgcgttgtggcgccgcgacgctgcgagcgacgacgagggcgaggacgaggatgaggacggagggacgcccttgaggcggaggaaagccggattcgatgcagattccgacgggcagggcgccgccgaggtttacgacgaggaaggcgaggaggagtacggggggttcgaagcag

SEQ ID NO: 358537 - DNA, 146 bp, Zea mays
catgcattgtgttgcaacggctgcaacagctcaaaataagcaattcagtacaggatcaacaaattggttgacaagttataaacagttaaacttctgggcagtgaatcagtgtattggcataattttttttgaactgacatggtacc

SEQ ID NO: 358538 - DNA, 313 bp, Zea mays
gtagcttccttgcgcttgctccatctctctcccctcagcgcggccatctcctgctccctccatggcgcgccctccccctccatgagctcggcgcccagccccaactcccagccgagccccttcccctggtctccatagcacgcatgccctggagctcactgcgccagttgaactctcctgcatgctcgtctgctccctctgctcggtccctactgcgagctcgccggcgttgcccctgcttccatggctgaccgcgcggctcctctgtgtcgccgttctctgcgcccgggcatggagcttcctcatctgcgac

SEQ ID NO: 358539 - DNA, 241 bp, Zea mays
agagtgcagaatagtgtaaatgtaaactaggatgttatcattatgtcttcacggtcacggtcatttcttgtcttcagctctgctgtataagtttgggaagagcctacatgagatgtaaataatattagagttaagctgaaaataatgtatctcctaatacacaggtagttcagtgtcactttttttttaaaaaaaaaaaaaaaaaaaaaaagaaatagaagaaaaaaaaagaggggggggg

SEQ ID NO: 358540 - DNA, 230 bp, Zea mays
ctttgcactgttttgcttcttcattgtctacctcttgtcaaagtactctagaagataattatgtcttcggtgggcaaatctagaataccatgatttgtatgtagtctaaagggaaaacaaaatgctattgtacttttatttggccttgtatcctcggtctatttgtcgaaagttgaaaaaaaaaaagagaaaaagaaaagtaaataaaaagagaatagtgagaagagaat

SEQ ID NO: 358541 - DNA, 301 bp, Zea mays
gctttgagttcgagcaccgcggtgtggagtaccgcgcgcgcccgacgccgcctgcatcatcatcatcatcatcccacctcgtcacagcccacggtgagacgacccaccgtcacgacatcgtgatccacaaggcgcacttcaccggggaattcatcaccgcgctccgcgccaaggcatcagaaggccgcggccacccattcagccggttcgagaccatcgtcggccatgtatggcgtgccatgacgcgcgcgcgcgcctccgtgacccgtgccaggcgtccgccatacgaatctccgtcgac

SEQ ID NO: 358542 - DNA, 211 bp, Zea mays
caagaatctggttatgctttaagtaactgtcagcgctccttcggtcaatccccaattacatattgtaatgcatactgatcgctgacagacgatatatgaagaaaaatcaattgaatgcggatttgattccgttgttctacccctgaaatgtaactccttttatgcttaaaaaaaaaaaactaaaaaaaaagaaaaaaaaaagagaagaaga

SEQ ID NO: 358543 - DNA, 213 bp, Zea mays
tagggaaggggatagcgccactaagcagagtcatgggcacctatcgccgatttattaagatatgtgtccatgcgcatgtataaaattcaaaagttgtagctcgaaagaaaaattacagctctctctctctctctctgcccagctgggactggttttacatgaaaaccttgaaaactaaaaaaaaaaaaaaaaaaaccaactgaaaaagaaaaa

SEQ ID NO: 358544 - DNA, 337 bp, Zea mays
gtgaaggagttctgtctagtcgcagtgataatcaagatttttacaatttggatctacaacctgagactgagaggaaagaatcgttcaacctgtttcttgagaaagtcgtaacagtcttgcaaaaagatactgatcagaaccaaattgtcgatgttcgtggcctttcaaaggttgaagctcgaattgttgttctctctgtccttcggaagatcaaagagcaatacctcctaggaagagtggtccaggatgatgtggttatcatcacgggtcatgagaagacatcaacaactgaagctgaaaccacaactagtgcagttgactcgtgcaggcaatagtt

SEQ ID NO: 358545 - DNA, 339 bp, Zea mays
ttcttctcatgcagatcgatgctccgtctgagctgtcgtcggcgggccgccctcaccggtcgttcctccctcatctcgtggctgccgagcatctaccgcctcggtctcaccccttcttcatcacacaccatgagagtgatgcatcaagaagagatcccagctgggcagcagcagcagcatggaaggtgaccgcagctgcacctcctcctcctaccaccaccctgttgccgttgccgctgccgagcatctaccgcctcggtctcaccccttcttcatcacacaccatgagagtgatgcatcaagaagagatcccagctgggcacagcagcagcatggaag

SEQ ID NO: 358546 - DNA, 252 bp, Zea mays
gtactgttgaggttaaccaacataatctgggacaataaagggattacaatttagcatgtgtatcactacaaagatagtttctttactggatatcacactctggtcaggtctattgtggttgttagctgaaacaagttttcttgttgaaaagaacacaatatgactagactgggtcatgacttcaataccttatcgatgtatgtgtgtaggctgtgtatgtgtatgcagtggccggaaaaatgttcgtaatga

SEQ ID NO: 358547 - DNA, 272 bp, Zea mays
atcgaatttctggtggtgcagaagttagaaggtaaagcttgagacgatgagggtgtttacgtagaccagaaacaatttagcagaatacttgaagctagaaggggaagttggttgtaaatcacatcaaaaagctaactaaaaggactggtgtaatgtaaaataaactagggcagaaggcttttggaagagtctaggcgctttggaaagccttagatatagtagcttagttagagaaatgtgatggactttcgtaacggaagtgattcaagatc

SEQ ID NO: 358548 - DNA, 315 bp, Zea mays
ataaataacaataatgtatattgccaagccaccagattcttcacttataaaattccagcattagcatttataatccagatcagttatgacttatttcagtaaatgggccttttctcatttgtggcttatttactctagttgccagttgggtgccactgaggtgcttcatgtaaattctcactaagcttctacatttctgagcagaaggtatttatctccatgtataaatgaggtaatgaggatcatatgttagccaacttgccctgtcatactggtgatactggacatctgcttggtaactagctatgtctgact

SEQ ID NO: 358549 - DNA, 349 bp, Zea mays
ggggtggaagagatccattggttgaagacgtgttgtctattattcatgctgatgatgcaaatgcatgtcaaaagattgctttagcaccaactcctaggagattagttttcgagtggcaattaaagttggcacgcaaaattagtccattctagcagtatgaaccatggagaagcttggagctatggattttgcaccttcatgaggaaagggtgctcgcctgctcggggagccgttgagctggattggatcaggcaagtaaaaggttctcgcgtcttctttacttgcacaacgttggtcaatgtgaacttgtagctggtacgcaatacgagaggaagaagctaaatacacg

SEQ ID NO: 358550 - DNA, 336 bp, Zea mays
ccacgtccaccgctgcccccacccaacagccaccgtccagccccctccttgccctccatctgtgaccgcccaatctctaaggaatggatcgcgacaggccaccgctcgccatggggtgctcgtggctgtgaacgaatgccaacttgcagaaccagggcccttcgattcggtccttggcgccggatccaattcttgtcaggtggtccttttgtgctttcccttgcacacaaacacaaagtgaactttcttctgtgatcaggataaaagaagtaggcgcaatgaggagtcatgttcattcacaagctctaacagagaaagttggggcagatgttcata

SEQ ID NO: 358551 - DNA, 326 bp, Zea mays
  unsure (1)..(326): unsure at all n locations
ggtattgtttgctgaaccacccttcaaggctgagatcagttctatacgagaatactaagacagactaagtgacagtactacaggtgctgatagcttattggatataagttctgaagctgaccaacaagatcttctctctctattgcaagcaaaagttgcttcccttgccttacacaataaggagttacaagatatattacaggccaaatcacccaaggaggcggaagcagacctaagctgtnttttgataccattccacccagactgacttgggcccatccctgggagaacctagtgaaactctcggccagactccagatcactcc

SEQ ID NO: 358552 - DNA, 345 bp, Zea mays
caaaatatatattcagcattcgtgcatccaaagtcaaagtgtgtgtgtgtggctaggtgaaatttagcagtcactttagctaggctagggcagcactgcatccccctctttcgtgcgtgaggatctgggacagtgggcgaggtgacaaaacgcgatgccttttgcacggcctggcgccggtcgagtcgtgtcaaaagaagaaaaaaaatcgatgccgtggcccactaactaacggtgtttggtgtgtggccattacatttttgcttattatacttgacttgacccactacggttgattttttttgggtttgtttgcaggttctgggtgggcccctcgtgggcgct

SEQ ID NO: 358553 - DNA, 329 bp, Zea mays
ctcgccgcgcgctcatcaccagggacgcctcttcccagtgacaggctgatccatctcggcgtcgaactcgtactactggcacgtaagtaggagtacgttgacaggatgacatcctgctgctgctgtttgcttgtactattttcgattgtgtttgtaggtttgattgtgccagtctcgatcagagacgatatacacatgctagaataaaatatagcagcgcgtgtgcgcaacaaagctagggcctgtttgatttcgaagcctaacctgacacacttcgacaaactttgtggcctaaggttagttaatcaattcgaacgactaaccttaga

SEQ ID NO: 358554 - DNA, 171 bp, Zea mays
cacacgccgcgccgtgggagccaaccggcggcgattgagcgcgcaccgttgcttgtgatccctacttccctctcgcgcgtcgtctgtgcttacaatgcttgcgacgacgcctcggtacccgctcacttgcatccatgctccacggcaggcgcaggaggacggcgccgctcg

SEQ ID NO: 358555 - DNA, 280 bp, Zea mays
  unsure (1)..(280): unsure at all n locations
ccgctgcatctcagctgtggcttcctgcaggctggggactttggctgcttcctgcaggctggaggagtttctgaatggccaatcccaggcatgcggtggacgtcagctcctccatgtcggagctgaccgtagaagcagcgccnacatcgattgaggcaagtgtcccagaacgggtctcttcagcacgcggataccttagacagaggattgatccacacgcagagtcagtttcagaagataggatatcgcgatagagtagcagaaaggcagaaggactctg

SEQ ID NO: 358556 - DNA, 269 bp, Zea mays
  unsure (1)..(269): unsure at all n locations
cgctgcgtctcagctgtggcttcctgatgngttgggactttggatgcttcctgcaggctggaggagtgtctgaatggacattcccaggcatgcggtgcacgtcagctcctccatgtcggtgctgaccgtataagcagcggcttcgtcgattgtggcccatttccccgggcagggtttcctcagcacgcggataccttagacagagaatggatccacaggcagagtcagtttcagaagatgggatatcgtgatggagtatcagaagggca

SEQ ID NO: 358557 - DNA, 338 bp, Zea mays
tgctgaaggttcctagttcaatgttggtttcggagatgaatgacagtgctgtcgaagctgcgcctatagaagaggatcatgctcaagacatgtctgaaggtgaggacggtgagtttgcagaagagatttctgaagacgaggatggtgagtttgcagcctctgatttgaatgatgaagatggtgatgaaatggataacacccaaagacaaccgtctcacatgcatgttcatgcatctgaatctatcgaggaacctgtccatagacagtcccagctcagcaatgctgaagagggaatggaaactggcattgcacacgtggatgcatatatggtagagcca

SEQ ID NO: 358558 - DNA, 182 bp, Zea mays
tggggaatgaacgatggcaaattgtgtagtggagtggagcgcattactttttatttctctgttttttttgctcatttgttcattacaatcattttttctcttcgtatagtgccggtaggaataggatcgtgctctctctctgcctcggttcctgtggacttttttaccgcctgagattaatt

SEQ ID NO: 358559 - DNA, 125 bp, Zea mays
gcagaccagacgagacctctcgcgttccgtcctcgtcgctgagcacgcacctggtgccatgtgacctgcgaccgcgataatcgcgtcacgcagcaatattgaagaaatctgaacttatgtggtta

SEQ ID NO: 358560 - DNA, 164 bp, Zea mays
gatttaccgtgcaaactatgaaccgtgccatcctctcagagacatggtattgatcgtgtatacattatggaagggacagccgaacatgtccaaccattttttaaagttcaattcatgtacaatgatgagtgatgaataatgaataaagatttgcagcttcttgt

SEQ ID NO: 358561 - DNA, 314 bp, Zea mays
cgcctcggtcgccaccgacgtcgactactgcagtgagcatcgccgcctccacgccgccggctccgtcatcgaggggggcggagtgcagatttcgtagacctgtaactgcagtccgttcttgatgtggcctgcaggtaagaaggactacccggtgaaggtgagcggggtgcagatcgtgcccgatccggtcgaacccggcaagcccgccactttcaagatctccgcttctactgataaaaccatcgagaaggggaagctggttatcgacgtcaagtatttcttcttctacgtgcactcggagacccgcgacatct

SEQ ID NO: 358562 - DNA, 237 bp, Zea mays
tcgaaactgtcggccgtgcgtcctctctcctcgtgcgctccgcccgtctccacagttggtgcaggtcgctgaaacacttgcaacagacagagcttgcttttgaagtgctatagcacctaaaggatcagtggaaggatatctaatgtagagttaatttgaaaagattgcatctacttcttcaacagactcaatgatgactacaacgacgacttcacagtgtgcctatttcaccaatga

SEQ ID NO: 358563 - DNA, 100 bp, Zea mays
caacttcaggtgccaagacgtcatgaatgacttcgtgatatcactggctcacaaattcacgaagctacaatgtctatctctacgccagatcaggcctcag

SEQ ID NO: 358564 - DNA, 190 bp, Zea mays
cggagacgtgagcagtcgaccaaccccgtcgatccggctgcggcccggcgtgctagatcgctaccgatcatggtggtggaggagatcgccgagggggtgaagaacctcaccgttaccggagacgcggcggcttcaggcggagaggggcagaggaggggcggcggcggcagcagcaaccgcatccaggtgt

SEQ ID NO: 358565 - DNA, 318 bp, Zea mays
  unsure (1)..(318): unsure at all n locations
gtgcgtcttcctcggccctcacgacctcgctcgtcgctgcccccgcacacccgcgcttcttccgtccctcccgctaaatccttccgtccctcccgccaaatcgcgccatttagtctccaaatccattcgctgcgcgccaaatccaagccaccatcctaaatcgcccccaatcccaaaccctagaagcaaaacgcgttgaggcgtcaatccaagaggacctctgcaccaacgcctctggagatcccgccgcaaggggctccgcccgttcaaccaccaagggctcagcccatcctcncgcctggcttcccgtccatggtt

SEQ ID NO: 358566 - DNA, 171 bp, Zea mays
gttatatggcagaagcaaaaaattcccctatagagtacatacctttctctgtcagcattgaacttcagccagaattaacgctagcacttctctttatcagaaattgatgattatgtaaattcggggacagtttgggagtttttgcagtgggatggctgtgtaacataccaa

SEQ ID NO: 358567 - DNA, 173 bp, Zea mays
  unsure (1)..(173): unsure at all n locations
tgaanaggcacagcacgaagaggaaatggcgttaatagctagagaaagagcacgtgcagagttatcaagactcgggagaaggagagaggaagagtttcattttgaccaaagcaaggtcaggtctgagatcaggttgcgggaggggcgtacaaagcctattgatgttctcctta

SEQ ID NO: 358568 - DNA, 172 bp, Zea mays
ttaaggcagtcgggtggcattgataatatgtttaatgtcatggtgaattgccattcagagctggagaaacttgtaaacgatgcctccactacggatgtggagggagaggaaagagctcctctgcaaagcgctgcactcctcttgaaatgtttgaaaattttggagaatgcca

SEQ ID NO: 358569 - DNA, 166 bp, Zea mays
gggtgaatgaacaaaaggaaatagctggttacttttgagagtacagctgccgaaacagcttcttcctgtaggcgttagctgatttagtatcagaggagtacctgtgaagtaaaacttttgtctgtagctcaacaagttccgttttcttgtaataatagaagttcag

SEQ ID NO: 358570 - DNA, 109 bp, Zea mays
tcggtggctggcttgaacagctccagctcgatgagatggtagtctagaacaaacacagacatagatcaaacaagaaaggtgccatgttctcccctgtgatcaaagaaaa

SEQ ID NO: 358571 - DNA, 164 bp, Zea mays
ctttcgccgccgcctctctccttctcgagcaggaggcggacaaggtaagcagcaatcgcaggaaccctagcgccgccgcacccgcaggaatgggtatcgacctcgtcgccggtgggaggaataagaagaccaagcgcactgcgcccaagtctgacgatgtctac

SEQ ID NO: 358572 - DNA, 164 bp, Zea mays
gctcctctccccatcctgcacgctcctccgcctgattcccagcgcgtcgcacttcaagagattcgatcgggatcgccggttcgcgcccgccgccatggcgacttcctcaggaccaaaggaggcgccagcgaataaccctgggctccagaccgaggtcgaccccg

SEQ ID NO: 358573 - DNA, 159 bp, Zea mays
cgctcatgtagccagtatttgccgttctcatgtttagtaaattaagtttggctcgaagtcagtcctgagcatgtcaaggctgaagtgcgcactgcggggatttgatctgagggttctcttgatcctactgattggtgtgccaattttgatctttgccaa

SEQ ID NO: 358574 - DNA, 158 bp, Zea mays
tttgaagcccatttcggtgaaccctgctccaccgttccggtcctcccgaaagctaagggagacgagcagcctaaaaaccctagcacccgaatcagatccgaccgcccgccggagcgcggaaccctgcccccggccgccatggagatgagcgatgcgga

SEQ ID NO: 358575 - DNA, 153 bp, Zea mays
ctagagacaaccgctgcgtaaacgaatccatcgccatggcgtctcatctcgttgcggcggcggcctcctcctcctcactctcctcagcgtcccccctcgctcgcctaatctctagccgcggccttgccgttgcagcagacggccatgggtctg

SEQ ID NO: 358576 - DNA, 169 bp, Zea mays
tgttcacacactgagttgtgtgcgtgttaactctggtagttgttggattagatgatgatacctgttctgggtgaagccgtttatgctattcatttactcttgaattagtcggctacacttatgtgaagtggaaggtagtagttcctgtgtagttttagagggcgagtat

SEQ ID NO: 358577 - DNA, 103 bp, Zea mays
tagcaaaagtggtactggacaagatgctccagtggcatcaactccagtggccatgtctgtataccataataaacctggagagttgtctcctggtagtaaaatg

SEQ ID NO: 358578 - DNA, 334 bp, Zea mays
agacgctggagcaggcgttcagggagtgctccagggggaaaccttcttcggcggcgacgcgtcgggctcgtggacatcgcgctcgggagcgtcgtggtgtaggatcagggtagtggacgaggcagccggcgtaaagcttctagacgaggccaggttcccggccttgacgagcgtgggcggacgcttcttagcggtggacgccgtgagggaggtgatgccggacgctggaaggctattagagcactacaaggggtttctcgcgaaacgggcttcaccttcacctactggttactgatcgctgtaacagcagctcagtgtcctgtactttctgtcg

SEQ ID NO: 358579 - DNA, 347 bp, Zea mays
  unsure (1)..(347): unsure at all n locations
cctgattgttcagatcgcacagaagaaatgccaagtctgcggaggctctggtcttgtaacgaagaacgactattacgttcgatgccaagagtgtggtggttttcttccgtggcagtcttggcgaagattcttcaccgggtgaacgtggtccctgatcagtggtcttcagtacttgtaactaagatacaatagatggacatcaccgtgctttaaaatgcctcctcactagaccataaatgaagcaatatgccgtagacatgtagaattactcgcgtgcatgttgtcccacaggaaaatgagtgtttgcanaaggcatcctacaaaaactatatttttgcgccttatgt

SEQ ID NO: 358580 - DNA, 339 bp, Zea mays
tctcatgtctctcaatcagtaataatggaatgaatgaaatggtaagacacagagctatggtactatgcagaacctctttaattttgtgctactgtactacgttagcactagtcgccaccaccctgaattatcatgtactcaaatgttggatggactgtacgtctgtcactgagccagactattgctatgaacgatgagtctgtcctcttgctcgaggctatagagacgaagtcgtctctgtaggcgtgagagcaaactgttgggcgaataaaacaggtgcgtgttgcaattgcacgtcacagacaaagggagcacaggctagttcagaggtactcagtc

SEQ ID NO: 358581 - DNA, 316 bp, Zea mays
gcagatctttttcagagccccaaggatctccgctgttcatagcatagaagtaaagtttaaggaattttgggtcacccatatggaggtgttcacatgatgatactattgatttctatgaagtacgtaatttacagtgtggaacagattattccaacttcctttcggagcagagtagggatggaggtgttgcacagcccaatctgactatcgagtattcttcaggcacgttgaactttgtttctacgtttaccttactgtagaatcctaccacggtttaccatgtgcagcatatatccttcagaaaaatgttcatacc

SEQ ID NO: 358582 - DNA, 326 bp, Zea mays
accacgaagcaatacaaacccgagagccacctggagaggaagagagtgttgttagcattcgggagccatccaccggaatccaccgctccttcggccaagcagcctacagaggagatccatggctggattgcccttcccgaacagcagacagtggcggcgcgggggacgagacggaacgcagccaacctcgccggagccggacggcgaggatgcgctcctacttcggatcccagctttcagcctcttcgacaaggacggcgacgacgagcaagccactgtggaaactgaggttcaacaagtagagatagctgagcaggagctcattg

SEQ ID NO: 358583 - DNA, 327 bp, Zea mays
tgagcctcgacaggtgcaaagtgacaatagtgccactgaaaatccaggttgtcagttggttgaagaggtccttaaacccgagggtcatgcctctccatcgacatttatattttctgtgataccttcttgggacagcatagttagtgactatggaggaattcaactgctattgatgatgccaaggatccttatgtttggtcaagggtctgtgtgcataacatggccaagctgtccagggaagcaactacattccgccgtgttatggagtccctattttggcacttcgataatactaattcatggtcatccgaaaattgtcttgcactt

SEQ ID NO: 358584 - DNA, 321 bp, Zea mays
cgggtccgtgctcatcgttgccgggctatacatggtgctctggggcaaagggagggagatggacaggccggacctcgacaacgacgacgacatagccgacgaggagaccgccgtgggccttgttggcttcagcggcaagggcggtggcgcggtcgccatcgcaagcacgcgtcgaggccatcagcctgccggtgtcgttctccacaactagccccaagcggctgcaacacatccacgggtgaagggtgacgtggccgacgacgtgcgcgcgtgtcactttggacgcgccaagaaatctttcagggagccatggagagagtg

SEQ ID NO: 358585 - DNA, 140 bp, Zea mays
ctcgagccgcttggacccagataccttccatgtgggaaggacttcagagcatgcctcagatgaacttcaaccctggtgtggcagctgatagcggcaccaacaactctggctccatgaagctcgaacagtgagctgctgtc

SEQ ID NO: 358586 - DNA, 143 bp, Zea mays
cacagatcagagttcacaagatcgatgtcttcctcaacaagaaggacatggacgacgacgaagaactgctcgaactcatcgaactggaagtccagaagctgctcagcaactatgagtacgacggcgacgaagtgccaatcgtc

SEQ ID NO: 358587 - DNA, 137 bp, Zea mays
acttgttgttccctatacaccaaacacacccttaaacaaaacgatgaataatccatgccagtttggtatttggaagaggatgaaacgcctgtctgattgtagctgttgatgttaagacatactgatagcatcagttt

SEQ ID NO: 358588 - DNA, 132 bp, Zea mays
ctcaaaccgcgcgatgaggagcggaagaagcagagggtactcacccgccgctgaccgccacaggcgagcccgaaaccactgcaagggcgcagcaatatctgcagcacaattcctctcctagaagcagcgcaa

SEQ ID NO: 358589 - DNA, 121 bp, Zea mays
cgacaccgagacgtcgtcgacgacaagccacatcgtcatcttcacagtcgtctcgttcacgatcagcagcccatgagatacaacgtgcggagttgcgtcaacaggcagagtaccatcaatc

SEQ ID NO: 358590 - DNA, 121 bp, Zea mays
tgtttgcagaagatgacaattcaaccagcacagtatcattggctcatcgcaatgactgctacaggtctttcggctgaggttgcttggtgactaccatcattctactcgcatcgcttttgtg

SEQ ID NO: 358591 - DNA, 119 bp, Zea mays
ctttgccaactagtgagagaggatgtaggccagccaatcctgtcaaagaataatgccagcatcctttgacaggattggctggcctacatctttgccaactagtgagaaaggatcattta

SEQ ID NO: 358592 - DNA, 341 bp, Zea mays
tgggtcgccgccgcttggtgctgaggctttcgttggtctcttcggcggcgacgagcacccaccaggtactcccgctccttctattcccttccatgcgaactgagcaccgaaaccttaatcatttagcggcgcgatacgtgcggaacccgcgccgccgccgtatgagtttgctatggcctcgatctggccagatccgtggtgtggtgtagtgtgggtggagatccatttgcaggggcacggatccgcatcccatgagtccggatctgcactccttcgagctggtgagatggttcacgggcagcaacaccggtgcatctcgacgcacgcgggcggcgtggcgg

SEQ ID NO: 358593 - DNA, 129 bp, Zea mays
ttcaactcacctaccacaccccctcgattccttcccagctctggctacttcctacgccaccaccgcccgatccgggctcggctcctcgagcaagctgccatggctgccgctgagctgagggagcaactc

SEQ ID NO: 358594 - DNA, 172 bp, Zea mays
tgcatttctgcgttgtcacagtgtatgaataattgaggcgtcagacttcagggttgctccagttcttggagataggtctgggtttgtttgaagcttgcctggaggtctgaaactttgtgtttggtgaagatgctacgttattgcagtttgaatctgtaagtttgggatcagc

SEQ ID NO: 358595 - DNA, 185 bp, Zea mays
  unsure (1)..(185): unsure at all n locations
agctcgggttgttcagcgccttcatcaccaataaccaggcccgtcgactgtcaaaagtctcaggggtgctcanagtcacgcggctggaggaccctcctgcgctcccggagacggacggccatctctaagaaatttggtgttacgggcgcatgggaacacccacctagggcttgttcagttatttt

SEQ ID NO: 358596 - DNA, 193 bp, Zea mays
gtcgtgtgatcccagacaccgccgctagatgacgagctcggcgattctcaggtcccgtgagaatatgctgaagcagatctcatgagattagggacttcatcctcaccgcgaagaggaagtgatgcgcgctcagtgaagatctagaggagtaaggatgttgtccagttcaatgtgcgctgctccaaatacttgt

SEQ ID NO: 358597 - DNA, 124 bp, Zea mays
caggaatggccacggcaggaccaacgcccataacagctgctgtgaagtctgcaggccttgagattggagacattgatttgtttgaactgaatgaggccttcgcctctcagtctgtctattgctg

SEQ ID NO: 358598 - DNA, 278 bp, Zea mays
  unsure (1)..(278): unsure at all n locations
atccatcagttgaacatttaaatgcaatggccaaggtttttgatgaggatgatgatgatagttatgacgatgatctgacaanaaccgaccctcttaatgaggtgaagttagcggacttcctaacaaacatctttgctaacttgtgggagaataatcgaccaatatttgagtatctttgccagggcctatcggattcacagagatcagctgttgaaaaggttttgaggaggtgaagcgttaacttgggatcctgtcttccacctttcgggatataatat

SEQ ID NO: 358599 - DNA, 148 bp, Zea mays
aggagcatcaagctttgttttctagtggaatttaaacgatatcacattgcatcactagttgcgcacaatcagaaaagacgtgcttgctgaaaccacgtttttctcgagtacgaagacaatatatagattgtctaataaatggacagta

SEQ ID NO: 358600 - DNA, 343 bp, Zea mays
  unsure (1)..(343): unsure at all n locations
tatntcttgcagtagagcgctaggtatgctctctatgcctacgatgatttatatgaggatgacttagataaggaggtggatcacatgtcagtttcgagcaactggtttgtagctatctgtcattgcacactgattcaagtgacaacgatttcttttctgtcgatgcattttagtaggattggccaccagggtcgtggagtatatgttgcccaattttaatgaggtgtttggactggaatgcgcacagtctgttactttgatgcaaaacgtatgaattggttggacagagccgccaacgaagtaccatgggtaaggatgtgctggacaatgcaagcctctgtct

SEQ ID NO: 358601 - DNA, 190 bp, Zea mays
ctcgtcggtccgccgtgcacacacgggtggcaccaccgtggaaccacgtacataccgtcgctcgggatccgattgctcgccctggggcttaccatgttgggagggaggtctggttgctggcgtccagacatcacacgcatggatatcgcgtaagtctcacgcggtatgcgtctagcgtctcacactcgca

SEQ ID NO: 358602 - DNA, 132 bp, Zea mays
caacacagctcaaattactccactgtctcatggccatggggagggcggcgacgggtggtagggccttggagctcgcggcattggccttggtgctggctctcggagtgtccgttgaggcgcggttccttgaga

SEQ ID NO: 358603 - DNA, 326 bp, Zea mays
taggtcgcgtcgttgcgtccacgccccgcccacccaccgcaccgcccgtccgcgcgccgcacggaagccaaagcacaagatgaagaatggaagtattgcatcgctttttcgaaaacatgaagagaaaactgcatctcgtgctcccccaaatcctcctccaaatatagatgaagagttgtctactctagttgatgttgtggatgatggtccaactgctttaagtgaagaaccaattgaagatgaagaaccaactgaagatgaagaagaactttctcctgtttatgatgttgatagccttgaaaatgatctaggattgagagttacta

SEQ ID NO: 358604 - DNA, 212 bp, Zea mays
agcaaatcatttgggtcctaaacttggatgtgtcggaataacatttgtacatcacttctagctggtggaaatgattcatcatgagcagaagtttgtagtactgcactggaatgaaacattggcatagcatagcttttgtccagatgtgagttgatacgtggatgctgttatgagcagagcttgtggctatatattacagcatctcttgcatc

SEQ ID NO: 358605 - DNA, 312 bp, Zea mays
ggctctttagaggacggtctgaatgcacttctgaattttgaagtatgaatgaaagattctagctatgcagtacctttctatctgaactactttttatataataaactcgttgttttgaaaatcattggtcactagaaatgattaaaaacattttgttttttagtgtatgtaatagtaattcagacatatggcaatgttacatctatgctctgaatcatggatgttctctgtgaggatcatagaacaaaattgaactagatgtgcagcacacttgcatatagagaaatactagatcagcagcgatggtgatat

SEQ ID NO: 358606 - DNA, 111 bp, Zea mays
ggacatgatgagcggtataatctcgcaattgctatgcgagatgggtgtctgccccaactaagcctgttacgacaacagggcaccccaatgacttaccgtctgatcccgact

SEQ ID NO: 358607 - DNA, 314 bp, Zea mays
atcagcaagtgcggcactacgccaagaaggagaggtcgcgcgctccgctcacgcccactaaatccaaagtcaagaaatacaagatgaagtccccctcgtccatgaagttcagacttcggaagcctgctttggtgcatttggcctacgcaaaggttataaagaagctcaacttctgtgggtagcaaatcaataaagacatggcgtattttggcatggaaaactagttaactgatactgaccgacaaccgctgcatctcagttgtaaacgctggagcctctccttggaccaaatacttgctttttgtcacatgatg

SEQ ID NO: 358608 - DNA, 344 bp, Zea mays
gtacgagagcgagactgagagcgaggacgacgagagcgactgcgaggaggcgttcccgccgcgcggcggccgaatgcagggtggcgcggcaatgaagaagcaaggctacaactacacgaaggaggcgtgcggagagagcgacgccggctacggcgctcaccacggtgagcgccggtgccgccggcagacgtacgcctacaaccagcaggcgctgtacggtggctccatcggtgccgccgtgcagcagccggcctacaagcagaagggcgccgctagtaagactaacggctctcggcagaaggtatacgggtacggggaagctgtcaacacagcaggggcggggt

SEQ ID NO: 358609 - DNA, 224 bp, Zea mays
tgttcagctccaagccgttcgacgagagatacgaccgaacccggccggaaggggaggagcgggaggaccgcctgcgccgtcggtgagctacattgctcaagtcagcaaactgaacccgtccggattcgtgcgccgccgagcacccctcgacgccagcggcgatggcagcagacgacgtgcggagctcctcctctccaccacaaaaaaaaattaaaaattaaaaa

SEQ ID NO: 358610 - DNA, 323 bp, Zea mays
  unsure (1)..(323): unsure at all n locations
ctactgtatagaggaaggccgaagcgtnttccatttctcgaagccgcggcagcacgcgtcctgcttgcctcccggtcccggatcttgcccaccccgcaacgcgccgccacctccgccaagcaagggcagcttgatcatattcaagatggggaaggacaaagaagctgcaatctgaaggagggggagacagagatcaaggccaatttgttgagaaggaagagccaaaactcggtgtggcgcaggtcttgggagaagataagagggaaaagacaggaagaaggagagaaatcggtgacataataggcgagcgtgaaagcgtcaga

SEQ ID NO: 358611 - DNA, 130 bp, Zea mays
  unsure (1)..(130): unsure at all n locations
ccaagtattggatggttagtttttttcactanacaaccttgattttctggtggaaatgattttggtatggtattatcgttgtatttaactgctatcctaacttcgtgctataataagactgaattagttt

SEQ ID NO: 358612 - DNA, 211 bp, Zea mays
  unsure (1)..(211): unsure at all n locations
actcncccgatctggagctgaagtgcttgagccttccgcatccacttccacacaacataaaaaaccaaanannnnatngnnnagcggcnatanngnnanncannagaaaactnnnaaggcgaatgcgatagatagacacagagaaaccgatacatcacnanaaaacgagcgaaaaaatcggtccaaaccccagaccggacgcgcgttagag

SEQ ID NO: 358613 - DNA, 285 bp, Zea mays
ctcagcggcccgcagccgtgactatgcactacgcgcccacccggcctgtagggtgagtcggcttcatcccaccggcaacgcgtcttcgctggtcgcctccatcaccatcgctggatccctctacgtcggttcccctccgccgtcactggatgtcgtcgtgaatcgtgaccgctgctactagtcgcctacgcagctgtcgtccatacgcagtcgtcctcctctacatcgtcaaaccgtaaggattcaactgtatcagctcaagatcaatattcttgtagatgagta

SEQ ID NO: 358614 - DNA, 329 bp, Zea mays
  unsure (1)..(329): unsure at all n locations
tgcagatcctgcagacggaggccaccactctctccgccagctcacgcttcttcagcgggactcgcngagatcgcgacgcagaacaacgagctcaagttccggctgcaggccatggagcagcaggcgcactgcgtgacgcattgaatgaggcactgacagccgaggtccaacgcctgaagctcgcgactccagagctcggggattcttgctcgtccagcaacctagctcagcagatccaaatcagcgttcaggaccagatgtttcaactgcatcagcagcaggcaacgcctataccgttctaccagctgcagcaggcgcacgaatggcgc

SEQ ID NO: 358615 - DNA, 322 bp, Zea mays
  unsure (1)..(322): unsure at all n locations
gatccaactattccaaataatatggaacatacagtcggaagcaaaagaccgctaaccaaaagagtctagtaaatcaaaagacagttaggcatntgtttcagaagcattgccgcattgaccaagctcaagaggccgaccacttctcaatttttgaaagctcaccaagtgccttacaattgaacttatcttttgaagattctcctagtactcctgacagttatatgaattcagattctctaggcaagcacagtggaagttcttcagcacggaagaaaccattttcaaggttaagaactaagccatctgaaccgagcccagcagt

SEQ ID NO: 358616 - DNA, 233 bp, Zea mays
agccgagcgagcagggagagacacggcaccgagtgaggccgccgcatcctcctcctctccgatccgtacgtttcctcctccctagcaatcgcaacccgttcagccaatcattgccgtctccaccaactccgttcccctattacctagttagtccattcgctgctgctgctcacggatcgaccgacagaggagagaggacgcgtcaatctaagagcgtcacacgacgcacggag

SEQ ID NO: 358617 - DNA, 131 bp, Zea mays
ctcgagccgaatcggctcgaggacctttctgtgaaggataagtatgtcaagcctccacggacggcactcaatacaaactaagccaggagctagcccaaggccaataccttctggaactgtgactccggtgt

SEQ ID NO: 358618 - DNA, 113 bp, Zea mays
cagcagactactcagttgtgctatcgcagcttcaagtagaaggattgatgtttgagcactgataatggctacgaacttcgtcatctgcacccaattgacgtggacgacgaggc

SEQ ID NO: 358619 - DNA, 284 bp, Zea mays
ggtagtttatgatatgtagcaaagttatgttgctacggtttctatttataaagtatagactatctaatacaaagacatatgtgttctgttggttataaagcgtggcatgtgagctattccagcacctgccctgccctcagttttatctgtgcttcccgtggtttatctcctgctgctgttggccttgatgtgtgatgtgtcgtttgtccgtcagtaaatacgagtttgtgatatgacgtcgtgctgggaactttggattgtttgcttcttatcgactgcagtct

SEQ ID NO: 358620 - DNA, 339 bp, Zea mays
agcacgtccaggtcacacccggcgcgacgctcgagtacatcgtgcacgtcgacagggtgtccatctcgccggcgtgacgcggtagtagatagttcgcagtcctgcaggtgtctagatcattagtttgatggctcggctcggatcgttctgtactggcagtctgacactcggtagcgtgaccacgactgtgctagctgtcatgatccatgggacatgttcattcgcgtctatgcagcaagatcgcctagagagcagacagtttctgagtctgcagacaatgctcgatacgacaaatatatgatacagtagaaagttgtacaacaagagcatgtttctgtg

SEQ ID NO: 358621 - DNA, 196 bp, Zea mays
tcgagctcgagccgttctgcctgcctcggcacccgggcctttgccttgtgaacaaaagtcgtcggatcctcttggctgtgaaatctcttctcgtctagatctgagctccgctgtcttcgatcagatgctagtcgtcaacacgtgatctgtcgtattgatgtctaacgatgttcgttggtatgtcagtcgactgtcg

SEQ ID NO: 358622 - DNA, 206 bp, Zea mays
  unsure (1)..(206): unsure at all n locations
atatcatccanattaatctaacaacgaacgacaactccacgcagagcaacaatggcgccgcacagcatcatcggcagtacgtcggccgtgaggcgacacagcgtcatcgacgagaactcacagctaggaggtctgccacgtacgagcagcttcgtctcatactgcgggaaatcagcgcgactagcatgtcaccatcatgcagatac

SEQ ID NO: 358623 - DNA, 128 bp, Zea mays
tctcgagccgaatcggctcgaccggaacagagcgaggcgacgccactgcacctcatctccggcgaagggaaatggcgcccgatccaagggatctgatctaggcaattgtgacggagaacaactccttc

SEQ ID NO: 358624 - DNA, 325 bp, Zea mays
cggctcgagaatctggcggcggcggcacgcggcacccacccggttccaaggctaagagtgttgctattcctaatatggtttatgaaatggatgaacttgaggctctagcaagaaatatttcatttgaggatgaagacctagatgatgatgatcatgatgatggacctgaggcatcgttgtaagcttgttgatgaagatctagatgataataacgtaccatgaatgctatgaatgtgtcttattgtacttgctccgtaatgtgttgtgaccttgcgaacttgggacttgtggcttcgtgcacttcatgatgacttgtgatatgtgt

SEQ ID NO: 358625 - DNA, 274 bp, Zea mays
  unsure (1)..(274): unsure at all n locations
ctacttcatccttctcttcctactcgtggtaaccttataaggactgctcctgtgcgtgaagttcatcttgacctcgtgcagtttcaacagggnagctgtacaagctaaggaaccctaacagatagtacttagccactttatccgcatatgactcctccaacccaacagaggattaggggtttcctaatattaatttacatgagcaatccactgcatagtgccaatctgaagttcttactgatgaatcttgtggcggaagaagtgtctcagctgc

SEQ ID NO: 358626 - DNA, 339 bp, Zea mays
tttgatggatggtttggctagatataatatttattaaattgcctaagtcgctttggtaattggtcgatgtcgtaggatgaaagaggtcacagtgtttgcgggactataggtgttaaaactgggaagttttattaatatatatgatacacaggttaaccggtaaattagtttagaaagttaatgaaagttcttttattaaattttataagtgttaggtgcccaagaattttgaagttaaagttataagtcgtttagtgtgttctctaaactaggtatgatattctatgtgtgttggtcgatttcatgatgtgaataattgttgattgctacttcgaatac

SEQ ID NO: 358627 - DNA, 315 bp, Zea mays
  unsure (1)..(315): unsure at all n locations
attatttatcaatagatattttacaataaataaacacaatgtaataagcttanaataatatgattagccatattaacattaattgaaattaagctttatatgtcattagtaataataaaatccatatactattattagctatagatgacttttaaatagtttaaacgatgcatattatatttttttgttgtattgacattgatagtgtttatattactagttagccatagaaataagtatttagatgcctttatggggggtagtctgttattaaatgatatggatgagatcggagattttaattttttttagtat

SEQ ID NO: 358628 - DNA, 233 bp, Zea mays
gtccgacagcacgccacggcgcgggacggcttcctgaacgccgagctcacccagatcgagaccgtgaacctgcacataccaccgccaaagatctcgttcacgatgttcacgctcccccttggcgtgatatggagaagatcgaagcggagaaagtgatactcaaactgcggggaagacggaggaacagcagaacaggaacagcacggcaggcatagctgagcctgtcctgaggg

SEQ ID NO: 358629 - DNA, 322 bp, Zea mays
  unsure (1)..(322): unsure at all n locations
gttgaatctttggcatcactgagagcgtaattanaatgatgaaacggtacttcttgttgcgatgaaccaagaaattagtatcctgtagacctgtacaaacatgcatccttagattccttacttcttaaagagagtaaggacctaaatagtctagtgtcatttgtctattatggttcatgtgtatgtttctatgttgataatgtactctcagaaattcatgaatactcactgttcttgtatgtccatctgtctatgcaactgggatctgttctctcggccattctttgtttgctgaggctgaatgagcggcatatgtccagag

SEQ ID NO: 358630 - DNA, 333 bp, Zea mays
tgcggacggtccgcgtgtaaaaccctaaaatcctgatttaaggataagtagaactttaaaaaaaaattgataatgaataattaagtaatgttaaaagtttggaggttcagaattaaatataaactttaacactagaaattaaattgaaactacaaaaaacaatagcaacactttccatttatttattagattagataaattcgttcataaactataaatgctctttaacattatttgacctaagtaaaagttttaaattactttatcctaaaaaataaaaaaagcgtttttatttaacttttaatcacacgttcaaattaatacccttctaaa

SEQ ID NO: 358631 - DNA, 261 bp, Zea mays
ctaataccgcaagcaaggacaatactgctctatctgagaagaaagaggaggtgcttgatacctctgataccgtgagtaaggacaatgaggaacaagcagtcactgctgatgaaccaagagaaaagaagcaacgcgtggaagatcctccagtttttgagcaggccgtgcaaaaagagactgctgatgaaccaaaggagtccactgataaaccataggagtccagtgacaaaactattgacgatttaattgatgaggacctga

SEQ ID NO: 358632 - DNA, 191 bp, Zea mays
tgtggcggcagacggcgacgttaggaagtccgtgtccaggacttcggccgcggagatggccggctcggcgtgcagcggcggcggcggtggcggtggcgggcagatcttcttcaccaccggcatcgacgccgcctgatgggcgggcggacggacggacggatacggatccgtcttctctggtctagtgatac

SEQ ID NO: 358633 - DNA, 321 bp, Zea mays
cacgagtacgcgcccctcatctcctcgctctcccgggacggcttcaacccgtcctccatccaggaggccacgggcatctccggcgtggagcagaactgcctggtcgtcgcgtcccaggtccgcgactcgctcctcgacgaccgggccgccgcgttcccgcccgaagaagctggctgagcagggcatagctgctgcggcggccgaggtggtcatcgtggtccggccgcccaaggacgaggacgacatggttagcgacgaggagtgggactgatgactgatctggagagcgtactggttgtggagatgccaatttgtctttct

SEQ ID NO: 358634 - DNA, 326 bp, Zea mays
gtgcacagtgggtctcctactcggctattcagttctcctgctctactctccggaaaccatggctgttgtggagctgaaggttggaatgcactgtgagaggtgcatcaaggccatcaagaaggcaatcaaaactattgacgacatggagagctatcgccttgagacggagataaacaaggtcacggtgacggggagcgttaccccagaggaagtcgtcaaggctctccacaagatcgggaagacggcgacatgctggacccaagactgaggagggcctggttgattcggacgtccctgagaatgagattttgttggctgtgggttgg

SEQ ID NO: 358635 - DNA, 187 bp, Zea mays
cttgggaaaattatccatgtgaggcaaagtctagggaaaatttgtggatagctgtacagtgcaacacttagatttgtatttaaccaactgaaatgttttgttccagttataaacgtttaaatcatataatgttgtttataaaaacagacggacggatacggatccgtcttctctagtctaatgatac

SEQ ID NO: 358636 - DNA, 314 bp, Zea mays
  unsure (1)..(314): unsure at all n locations
cggctcgagcccttctcttgtggcattcgacgatgttttgttgggtccagtatcttgctgtcggactgtattttttgtggtaaagttagggcggttcaagctgatgctgattagcgttcaaatcccagtgctcagtacttcactagtcgatgcgtttgaatgattcgactggtgatttgcggggcgtactccgcatgattcgtcgttggttaggtagctgtggcattctcgcattttatttttcacttgttctgtgttacagggtaattgcagcccttgtcttagctcagttacatctggtagcganatggtgc

SEQ ID NO: 358637 - DNA, 126 bp, Zea mays
tgggagatcagctgtggctagctagggcatgcatgtacgactctaaggctgtctctatatgctttctctatattcatcatttatagtcttgtttaaaatgtatatcttctttttctctaacaatat

SEQ ID NO: 358638 - DNA, 328 bp, Zea mays
ctggatttctcccccgaattcgcacctcccccctcacttcgctgtgtctcatcaacgccggcatcaccgcgaggactgggccagctctccctcactttctcctccctccgccttcattgctgacggcgacgactgggcgagctctaccgccgctctgcgctaggtgcccaggtcttcctcgggcacttcaccggcgacgagcacccatcagattgagaactacaatgaaccctatctcaatgccttgaatgaatatgacgatgggagagacttgacctcatatgattttgaggctgactgttttagttcaccatatcgatgatgcgac

SEQ ID NO: 358639 - DNA, 313 bp, Zea mays
  unsure (1)..(313): unsure at all n locations
catcattcgtcggcgatcgtctcggctctccggccgacctgctgcgatcagccgatgcgttgtctttanaaggtgagacgatgcgttcatgggactactggatccacctatatgcctaggcgatcgacaatgcgctactggtttccatggtcaaattagcataacgtgattgatcttctaccgaaggagcttctagcgtaatgtataacgcttccgagtagtaccgtcaggtcctgggttcgatcttcctcaagagtgaatttctggcttggttaataacaatcctctcgttgtgtcccaccgctctcgagtt

SEQ ID NO: 358640 - DNA, 236 bp, Zea mays
attgggcatggggttttgcaaataggtcaaactaggctcaaagatacacgggttggtgcgaggagatcaagatcatcaactgtaccatgtgttaagagagatacgttgtgcacttcttgttacgcacggcacttggatagcatagggggatgaagatgataccaccattagtagaccttcgtttccttcagcttctcttagaacttacgggttcttgctgcctcttcgcatacgtg

SEQ ID NO: 358641 - DNA, 358 bp, Zea mays
  unsure (1)..(358): unsure at all n locations
gttacatttatctgaaccagaactggccaacatgaaatttatgctttgtgctttgcatgaacttcgagttgaagcaacaaaaaaaacctgctaacagtttatcttggtcaataattcagggacatcacaacaacattccccagctttgtgtttaactctgaagtcgatgatctcgtcacgtgaccacgattttctctccgatgtatagttaacaaggagaacctgtcgagggttacgactggagatttctagcctctggcattatgaatggagggtatattcatgcggctaccaggaagggtgcgtcanaattgtctgccacagatgtacttgacgagctgtagtttttactcggtga

SEQ ID NO: 358642 - DNA, 121 bp, Zea mays
  unsure (1)..(121): unsure at all n locations
gttaattataccgaggctgaaaattaacccttccaaggagatcttgccagganaggtcatcaacacgtagtcccgttattagcaagatttggttggaagggttaattataccgaggctgaa

SEQ ID NO: 358643 - DNA, 223 bp, Zea mays
ccacaggctattttggactgtgtgcttccagctgggtttccaggctgtaggtgttgggacctttacaggaacttctgcagctgcatctgctgctgctatcagatgggtatcaaaggatggcattggggcctttggacgtcttctcattggtggacgctttggagcacttttcgatgatgacccaaagaagtggaggatgtatgcagatttcattggaagtgct

SEQ ID NO: 358644 - DNA, 279 bp, Zea mays
cagcatttagcacttgagcggcaaaatatcggggacacatcaaaagtcacttgctaacctgcagtgcgattgactgccactgggggggcaagatgtagctgtttgagccacctactactgtcagtttttcagtgccaagctgttacatactggtttcaatccatcagatttgctgtgctcttttcttttccagtcgatgtcgagcactggcgctacatttattatttgttttttggaagaatctaaggggtgtgatgcaaattgaagagctatgtgcca

SEQ ID NO: 358645 - DNA, 323 bp, Zea mays
atcgtgtgtactgcttctttccagccttcttgtagccactcttgcagctacttcttcgtcctctcctccgtattccgtcggcaagcacccagggtggctgctggttctaggtcgcaaaggcagagaactcggccagtcgtcagggtaccattattaccagcatcagagcaagcagcccgagctatccgtccatggcgtgcagctgcagggagtggctatggaggtaaagaaacccgaggaggaggcgacggcgaggcgaacggccgatcagagcggggacgccgagacagggctgatctacagcgcggactacagcagcgtgg

SEQ ID NO: 358646 - DNA, 255 bp, Zea mays
ggggaggagtgatagatcggaaggcggcggagggaaatacgggttctggggcgcagatagcgacgtcggcggcgggacttgagctcgagcgtggctgcgatttggtctggtggtgaggactaagtgtggagaacaagggcggcatgctcgacggcgaggccgtgaagaacaagggaggtaatcacgatcaggagaactccacgagcttcttcttcttcttggtgacggcggtcgcagccccggctggccctggga

SEQ ID NO: 358647 - DNA, 311 bp, Zea mays
ctcgagccgttttcttttttcccgccgggccgccgccatggctccagcgtccaccagatggcgcatgatttgcagagtcagccttctacagagtgcgctgcacggctgcattcctccggtttcgaaatgctctagagagagagagagtcagagagagacgtgagctggttcgtcacaaatcacgacccgtgacgatggcagctgcattgcacactcgaggtgaagaacacgagacgccagtcatcttgagcgattccatgtgcgcttcgattggactcgtctagctagccttgtctctctgtactacgtta

SEQ ID NO: 358648 - DNA, 189 bp, Zea mays
gcaaaaaatcctcctgagtcctgatgaatgggctagagaggagttcccacctcaagaagaccgacagtagaaaactagcatgttataattattgtcctccgtaatttctttagaaaatgtaatttgagtcgtcttcgaataagaaatgtttccatgatgtagtcaatacatattattgtagaactatca

SEQ ID NO: 358649 - DNA, 218 bp, Zea mays
acgcgcgttcatgagggagggcgacgtcaaggacagggtcgttggcgcaggacaaggaagagctagcaaggaagcttgaactacacatggcatcgtagatcagtgatgccgtaatgtatattcgcctaataagaggacgctcgcctcactctggaaactatgctctgtatggaatcgtataacgatgcctttgtggtatctcgagtatatatctgctt

SEQ ID NO: 358650 - DNA, 196 bp, Zea mays
cgctacttcgggccccacgacgtcattcgcgcagtggcatcatcgtatgggtcacttatgtggatcccgtctgtctactctaataaagtcaggatgtttaggctctactcatgttgagtctagttttcattgtaaaggttgtcatcttggaaaacaaatacaacttccatattttactagtaattcccattctgct

SEQ ID NO: 358651 - DNA, 315 bp, Zea mays
ggcttggtcgctgatgagttcccacacctagacatcatcaacgacttgctggatgaggagcagagtgacagaagaagggttcttcaacctgattttgttcaacagtcctatatgcctcatggtgccagcacacctgattatggtgagccatacttgtttgaccagtccgagcaatacttcgatgaggagcctccaaggttttatagtccattgagcagtgctcctcggaggttgaacggactgagctattcgcactttgatctcccatcacactccagcagcagccagtttgatgatctgatgatgagtcagtgg

SEQ ID NO: 358652 - DNA, 319 bp, Zea mays
  unsure (1)..(319): unsure at all n locations
catggggatgcattttggcgtacactgacagaaagcaaaggaagtggcaaataaggaatataagttaaactggatgatggataaggaaccanaaagaaatcagtggcaaatagagcactgagttatctacatatggcggataagatattttctctttttatggtgatggaagaatagttctcagataccacctagcgtagtatattaattccagtggttttgatgatattttatcagaatctatagcatgcttacaaaaagatgccttcaattatgagcattatttattcaacaatttagaactgttttctatatgccg

SEQ ID NO: 358653 - DNA, 256 bp, Zea mays
  unsure (1)..(256): unsure at all n locations
gtggtgcttttatttggttagcgctgctctagtctgtatctttcagtatagatgtgttgatattctttctgttcttagcatttaacanaatatttcacttgtaatgtcatctgccatcttgctgctgatgcagagtagaggatgccccttctcggtataaatgctacaccaacctgagtcacaggagaacttttcttggcatggatgcagaagcgtgcagggtatctgaaatcttatgctcatgacgcagaagcgc

SEQ ID NO: 358654 - DNA, 303 bp, Zea mays
  unsure (1)..(303): unsure at all n locations
tgtctcgcncatttcgccgctgggcgctggctcacaccactggctttctcaagttttcaagccccgctgcatcttagccagtttgagatgagcagagcgatcaatcaaatcatctcagagtgctacagactagtgatggatcttgattctaaattcttcaagaggtaggatgctaggggtagcatgttgcttgcttactcccatgtcacagcaagcagatcgcagttgttcctgtggatgctacaagcaaacactttggatgcatgctactntgctatgcattttgtagcagaggataaagtt

SEQ ID NO: 358655 - DNA, 332 bp, Zea mays
  unsure (1)..(332): unsure at all n locations
tgaatacgaaggagatttctcttccataaatcttttttaattctctgtccactaaaccagccttgagtcaattttaagcgtttctatctatgcttgtactgtccatgcccatcctagtatcagagattaataactagcgtcatttatatacttgtacctaggacggtgaccttgttggatagtgacattttttagctgctaatttatgtacttgtagctatggtactagcacgatttacctatataatcgagcttaggaatcgtggctggtttgctgtgatagtgctaccaccttgatcanagattgttaactcgagcaattataaatagca

SEQ ID NO: 358656 - DNA, 303 bp, Zea mays
  unsure (1)..(303): unsure at all n locations
tggttgcagatgattgtaagaanaagttgagcttgatgattgggtagatgctgcagacatgtctactccanagctggcaccagattctgganatcaggctgggcacacccaagtgctagattcagatacaagtgcagctaacagcaggaagacatattcacgggattttctgttgaccttgcaacaccactgtactggtctcctgttggattcagatgatgaagctgtcatgcataatgataattggttgaagtctatgtgtgacgggacttacctagtctgagggttgacgccacttcgtgt

SEQ ID NO: 358657 - DNA, 326 bp, Zea mays
gtgaaaagtactacctttatgttgcatggacctcctacaagttccctcattaaccaaaagaaatgagaagtctccaaatttcttaaggtagtcagattttgatattgttgctatcaaagtagacaaactatatttttaacgatattcactaaagttataaagttgagcggggcgtactgctaccaaggttccctgttcaacgcttgcagccgcatccctttgccagccaggcggtggtggggagggagactgggatggagcatgtgccgatgtggctgcgtgcgttcccggatctgcacagctatgtcagcagtaggtgtgggttg

SEQ ID NO: 358658 - DNA, 325 bp, Zea mays
tggtgacacgccgagtcactacaaatgtgctagtataaatgttggtggctatcccagtaatggcaaggtccaaacaaagacttgtacgttttacttgtccattagaaagtgtaagtatggtgagaattgtcacttttcccttgtgtgcggttacccagagattaatgacatgaggcaagttgaccaccttggttcattgcaaatgttggagatggagatcgatctcctgttgctgcagccatcatcacaagtcccggtagatcatcttgaaaaaaaattccttgagatttatacaaagcttctggagattgatggatccatacag

SEQ ID NO: 358659 - DNA, 117 bp, Zea mays
cttctcgaagtggcgacagtggcagtgacagttcaagcgaagggagtgaaggagattctcgataatgattcatgacaagcataagtggggacaggaaccaggattggagacgttacg

SEQ ID NO: 358660 - DNA, 331 bp, Zea mays
aaacaggaccagctgtcgctagcctagacgatccgtcgtcacgcgcgaacggtccggccatgcgcggaccgacggatttacctctgatttgcgtaggaggctgtggttgtccagggtacttatccgtcggtatcccgtaaaggagttgtgactgatcatgacaacctgcagccgatgaatcacgtgtattttcccttgattcaacctcgtgtgagggaaaatttgggacggtagatttatcaaatacgcgcactagcattttatagtcattttgcatacccatataatctgttgcatttggtctcgctgctcatctacgtaagctctaaga

SEQ ID NO: 358661 - DNA, 165 bp, Zea mays
cttttatagagggaactggcattgctcttcgccgctttgaaattgtactgctttattcctactgatgttatatgcaagtgtgtgtgtgtggctcattgatctctccagtagcctctgatcaattgaatgttatatgctaagctaatggtggtgtagtttcgggtc

SEQ ID NO: 358662 - DNA, 310 bp, Zea mays
cgacgagcaaaccctagcgagcgagagagcccggagccgagagaccagccagccatggcgctgcgtgccctgtacaacgagatccggagcatgaaggtccgcgacgtgccggcttacctgaagccgcgcttgacctgggacaacgtcaagaagagcgccgaccaggccgtcgaccgctacatcgagaagtacatcgacacgagctcgccggaccctctctaccacgtctgcatcggaggtcgtcggcatggaccccgagctcgacgagttcatggtacgcacgctaaaccattgttctgattcatgtgtc

SEQ ID NO: 358663 - DNA, 285 bp, Zea mays
gcgccagtcaaggacgccagctgcgctggccccagaatacagctgcgctgtaggccttgtatccttagcgacaggtgtattgcgtcacataaacttgtcttgatcgcagcgtgtatgcagtgtacggtaggacaatattgttctgcaggcttgctcaagtctaatgttgtacctgtgttaccaattaaacatgaatcgtgtcacgaatttcaagttagcttgatcagtctatagttttacgaagggctcgtttggtaaagctccgagagtcgatgtatagtgatt

SEQ ID NO: 358664 - DNA, 179 bp, Zea mays
cgggcagctactatacgtctaaggggcgacgaaactggctccaacgaccgccaccaaggtagacactagctacggcgacgagcgccgtcgcgagctgcaggcgttcgacgacacgaagctggcggtgaaaggcctggtggactccggcgtcaagtccatcccgtccatcttccacacaa

SEQ ID NO: 358665 - DNA, 224 bp, Zea mays
aggttcacaggattcctactctgcgcagggtgttgtaactgaacctgtcattgctatggtgccctttatgagttattttctcagttctatggtactgtcatgctgaaatgtggtgccgatcccaactttgaaacctgtcgagttgtatcaggaaggtctgaactgaacagacatatcgaaccgaaacctgtgctaatctgaaataaagcaattaagacgtttag

SEQ ID NO: 358666 - DNA, 304 bp, Zea mays
gcccatggctgcttctggaccggatgccaagagggccaagacgaggctgcactcggacacggacgatgactctgcttccgagctgctgcgtgacaaggttctggtggagaacacaaagaaagagctctcaaggattcaggctgagctatcatctacaaatcggaacttgaacttctcgatcagcagatggaggccatctcaacaaagcttccggtggacaagtctgacctcaagtccttcttcccaaaggcatggtgtgatcagcacggggatggcgtgatcaccgcggctaaggaagggttca

SEQ ID NO: 358667 - DNA, 306 bp, Zea mays
gtggtaggatatcatcaagattctcacgccttaaactgttggcagatctgtctaattcctctacaacagatggtccttacaagttgtaggaaggcattattcggtacaaaggccgcatttggattgtccacaatcccacactacaacaacagataatcttctcattgcacgacagttcgttggccactctggttttccagtaacgtacagtcgcctgaaacatctgtttgcctagccagcaatgaagtatgttgtccgacaatacgtctactcctgtgacatctgctcgcgtgccaaatcggatag

SEQ ID NO: 358668 - DNA, 299 bp, Zea mays
gctgcagcagcagatgatggcgccgccggcatgccgctccacgccgggcccggcaacgtctacacggggctgatctgatctagtaccccacgcggccacgcccggtggccagtttcttggttgcgttagcgctactgttgccccaccattcattctttttgtccaagttttctggtgccattgtgagaaggaaatttgtagcacagacaggcaggcaggcaggtagaggcggtcacggttggttatttataaatagcagcgtcgggtggtgtcctgtacgtaggaggtgagtgcatgta

SEQ ID NO: 358669 - DNA, 301 bp, Zea mays
gagccatttatccaacaacacatcaatgagcttcacgagcaaaatcctgggcatacggctgattgggtaatgaagcaacataagcagcggttcaacacatggctaatggtgaaggacattccacgtggagaaacaatagaagaaaaaaccatcaaggggttggcatctggactcacgccaggtcacaacatggcaaacctatgacattagtggattcacattttgtacaaagtccaaggacaaaaagagcatgtcacaaaacagtggtgttcgatgcgaggccatagatgatgaaactggt

SEQ ID NO: 358670 - DNA, 228 bp, Zea mays
tcctgctgctgctgtttgcttgtactattttcgattgtgtatgtaggtttgattgtgccagtctcgatcagagacgatatacacatgctagaataaaatatagcagcgcgtgtgcgcaacaaagactaggagtgtgatatcaaagttgtgcttgtaatgtaacgtaatacgtgtcgcatatgcaccgggatatggtatattgaatggagctatgcgtaagctagcagt

SEQ ID NO: 358671 - DNA, 126 bp, Zea mays
tcggtcacgcactctgggaccttcagctagcgtgtggtggtgtccatgcatgaatgaatgcagtagtagttatatatatattagcaagctagttgtgtcattaaataaaggaacgctgtgtgactg

SEQ ID NO: 358672 - DNA, 306 bp, Zea mays
cggaacaaaatcaactagaacacaaaaattgggtctgtgctaagaacaaaaaactatatgaaaggaataaaaatacgaaccaaacacatcaaaaagaaaacaaagtatttattaaaaaaaacataaaaagtaggctacacaaaaagaattaaataaaatgaacaaaatataaaataaatggacaggtataaataagaatgagcaataagcaaacgtaatacaaaaaaataacaaaaaacaaggctactatgaaattcatacaataaagtacattgaagcaatagatatttgagtcaaagtctacca

SEQ ID NO: 358673 - DNA, 185 bp, Zea mays
taagtattggatggttagtttttttcactaaacaaccttgattttctggtggaaaatgattttggtatggtattatcgttgtatttaactgctatcctaacttcgtgctataataagactgaattagtttaaaaaaaaaaaaaaacaaaaaagaaaaaaaaaaaaagagaagaaagaagaaagaa

SEQ ID NO: 358674 - DNA, 334 bp, Zea mays
aataaaaaatcctctcacaccgcacacccgcatctctcccatcacagtgcgccacccgcacccaccaacgaggcaacgaaacccagtcagaagctagaccggcgacaagtgcagcgctcgccgcgatggattctgactacggcgtgccgcgcgagctgtcggaggtgcagaagaagcgcgcgctctaccagcccgaagtgcacccctgcctccagggtggagtatggtgacgccgcaattgcagctgaccaggcaggcgctcatgtgatcagccatgcgttccctcacacctatgggcagcccttgcacattttctcaggaagacggctgttgt

SEQ ID NO: 358675 - DNA, 337 bp, Zea mays
cggtcgtctccattcggcccaactccaactcgtctcgctctcctcccccgaggccccgattatccaaaaactaaccagaatacggaatcttccccgtggatcccaactctcacccgatctcctcgataggtttttccgtttttgcctccaaggccgcgtcttccaacaagattcctcccctcctctctccgataacgctagcatccgccgccgccggcgacgaatccgctgctgttttgtctagcaggtgttttgagtttctgttgccagtgcagccatgtccatgttcaacaggatcttcgggaagcccaaggagcaggccaactccagtgccttg

SEQ ID NO: 358676 - DNA, 336 bp, Zea mays
cagaggtgacctacacttttgggagaagctgagcggtttcgttctccttcttgccgctggccggccggctggtggcaagctcgatcgagctaggagtcagatggaaggcacgatgaagcacagcaacgttgtggtaagctcaagaggttcctttcatgaatggcagccttcttctcgcactcatggtatacgcatcctgttatctcatcagacggagaggagctctgtgaccaagccccgtgaacaggaggtgtccgcttggcatgaggaggctggagagcgtctggtttggacgccgggagcagcagttcagctgatgctttgtgcctagcatta

SEQ ID NO: 358677 - DNA, 332 bp, Zea mays
cctgtgtactgcagagcttggtctagtggagcttttccttgccctcgagttctagccagtgttcctcacgagatcgaggtagttcctgtgttcaaaccagtgttagctcctcttctcagtcactaggttgttctgcctttgtgctgcgcctgccaaccctattgtctggtgaccacacccaccgaaacctcccacctcgctgtggccaaagcgttccagtgagttgcatgcccgtgtggtcttcgttccgtggtcttcaaagagtaccaagaagaagtgatttgtgaaggagcctgttccagttctactgatccagtggtggattccatcta

SEQ ID NO: 358678 - DNA, 234 bp, Zea mays
tgccgccaacgtcgccgccgacgaggtctacatcgtcagggagcccgacaagtgcctcgccaagacggccagattgttggcctatcgattgatccatcactcctagctactcctactctagtcggtttcggaagagttttattctcatttaatgcagcaaatctgcagtgttaatttgcggcagtaccagattaagcttccatccagattggcagtgttaatctgcagtaaaaa

SEQ ID NO: 358679 - DNA, 275 bp, Zea mays
gtcagccctctcgtttttcatccgccttcgcctccaaccgcgtgcgctccacgcctcctccaggaaagcgagagttctgcataagaacaacaaatcaaaagcgtgatcagctcggtgccaacaaaacctcaacaaccagttcaagtctgatctcgacgtccacttccatctgctttgatccgtttgctgagcaaatgctgaggactctggtgctggtctggaacgaagatatggcagtgcgatcagcacgcacggcaaagattgctaagtcaggt

SEQ ID NO: 358680 - DNA, 365 bp, Zea mays
  unsure (1)..(365): unsure at all n locations
cgtagtaactcggaatcggtcgactcgagcgatcggccgacggctcgaccgcgaccgcccacacgcaactgcccttgtcggagatctcgccgnctccgnggtcgacttccgtagcccccctatcccgcgtccgggcttacccgatggcacggctgcactggcttgacgccgtcctgccgctggggatcatcggcggcatgctctgcatcatgggcaacgccagtatttcatccacaaggccgcgcacggcaggccgaagcacatcgggaacgatatgtgggacgtcgccatggagcgccgcgacaagaagctcgtggaacaacctccggcaactacggtattgatcaacctcaactattctggat

SEQ ID NO: 358681 - DNA, 330 bp, Zea mays
tcgctttcgaaatctctcctctcctgtccaaacccagcgctatctgcgggattcataacgaatcgccatagttaatcgaagcattacactggggaacacagagggagaagagaagataggggagagagggagagggagagggagggaggaggccatcgcatccgccggctggtcctgatcccggtcacgggtcgtatctgggcgccgccgcacgcagcaggaggaagacatcagcgcggggcgaacgatcgagcccatctccggcgcgggaaccactgggtgatatgtgcatcagagaaccatcacatctgttcgagagcatagtgattg

SEQ ID NO: 358682 - DNA, 341 bp, Zea mays
ttgtcatccaaaagacatggtccgcagattaacatatccatatcttcggagatgtgcattgctttgggagctgctaagatcttctgccacatcacccttgtatgacggttccaatatttgggaaggatcacatctttacttgagtaatagcacacaagacggcagttcttcactggcaatggaactggccgggttacgagaattggaagacctgtttcagattcagtcgctggatctgattctccaggttgatctctgcatataggcgccccataaggtccgacaatttctgtgaagagtacaatcctcgtgaatatataggggcctctctttctacccct

SEQ ID NO: 358683 - DNA, 104 bp, Zea mays
ctcgagccgcaactatgaatatttgagtttgtgacttgaggaacacctcattcctcaagtcacaaactcaactatgaatatttgagtttgtgacttgaggaatg

SEQ ID NO: 358684 - DNA, 205 bp, Zea mays
ggcgactggaaattgctgatttgacactgggtttgaaacaaccagcacggagtatactggttactcttgtaaacagttgtgtgtttttccatcttctggtgtttagaaaattgtgtaatctaggaacatttttaccaagtatccactgtaggcgtgaactggaatttcctaaaccagcaggagttgagactaaagggttctaacc

SEQ ID NO: 358685 - DNA, 241 bp, Zea mays
gaaaacatgagcttcgcgtcctacgaggagtaggggctaactcagcagaggatcatgagctgccagatggtgacgcttctgaagaggaggaccaccatgtgttggcagaaggaggtgatgcatctgaagacgacttctatcgggatgttaaaagaaagaggactgaaaagctatcaaccaagaatgctctggactcgaaaactccgggcgttgaacatctggaggaaagaactgaaggcga

SEQ ID NO: 358686 - DNA, 314 bp, Zea mays
atggtatgtgatgctgcaaaagctgttgtacattgatgactatattaaaactactcccctatttcaggcgattgatgatgttatccaacatttattgctgcatttgataaaaataatgataaatctactagtaaaatttatgtttgaaaatcttaatagcttttgtttatagtactgttcaaataataagaatttcaatatttataccttagtgatacatatatagggacacttgcactagttttagttcatgtgtgtccaatatttatttcagtaaccaaaatttctggcaattggactatctttggctcgtt

SEQ ID NO: 358687 - DNA, 273 bp, Zea mays
tggagatgcacgcagttgactacgataatgtttgcaatgcagccaaggacgagaaggggggcaacgcagagcgtggtgagtgacaagggagctgcatgcagcatccaccatcatgattcgcagagtagggaagaaggaaattggagaccgacagagcactggccgcacagaaggctaggagccctatggagacagcccagaccttgccgcagcgccagacatacgtaaattggcgtcagatagagacttgctgaagagatcgacgcgctcaat

SEQ ID NO: 358688 - DNA, 309 bp, Zea mays
cagagaagcatatggtggccatggctatgctatttaggaacagaaggcaaaaacagagagggaaattgcacaaggaataaacaagagattgtataggaagcttgatacgaaatggaagcagagcattgtggtcagaccagcaccatctctaagggagaacaaagagaaggcaagcagagcctatgcacgtattggttggttcagttgtgcggttgctctttttggctcttatcttcgtcgccatcttgtatttgtaggattgtggaaatgtaaaccgttcaagttgctgcattagtagcagctagtagt

SEQ ID NO: 358689 - DNA, 193 bp, Zea mays
gcctcgctttgactgggatactggtacgtgagcagagacaaaaggcggacgagggtgacacgtgagagagtcgagacacggtcacgataatctcccgttccttattataaacttatagtttatatttgaatcaagtcaagcttttctaaaagaaaatggaaaaaaagggcggcgcgcaattagttggctctga

SEQ ID NO: 358690 - DNA, 311 bp, Zea mays
cagaattagaaatacaggtatcttctactatacaagagcatgaagaactgaagagcaagtaccaaaatacaatggaagagaaacatgcgttgagtgataaatatgaaaccgcaaagaaagagctcgaggatgcaatagccaagtttgttgagaaggaagaggtcaaagacacgggtgacggtgcggcaggaaagggtaccaagaagaaggatacaaaggagaaagacaagaaaaagaaggaaggtggtgacgattcagggaaggcagaggaagacaagaagggtaaagcgaaggattcggagggcaagggc

SEQ ID NO: 358691 - DNA, 260 bp, Zea mays
catactccgtcgcttcaccactgcactcgccgcaaggctacgtgcgccgccgtggtcgatcacaggttgatgctcttccacatcgttctgtcagcgcgcacatgcagctgaaccctcgagcacttcgagatgtacctcctcgacaagttgggttccaagctcgttccgggcgtctacggcatcctggtcctgccggcacgagttcgttgtggcgatcacgggtcttgaccacatcgtcaaggtgctcgtccgcgatggca

SEQ ID NO: 358692 - DNA, 187 bp, Zea mays
cgcctgtgattatgattgggaagcaccatcctaaaccggtttgagaagtccattcattgctatccttctcctatccctggtggtcatgcgctcagcataggctgacaaaatgtctgcaagatcagttactccaacttcccttaatctctagatgagctcttcaaacattacggagccctcatcttct

SEQ ID NO: 358693 - DNA, 257 bp, Zea mays
gatgttttcttcttctttccttcttcttccattgacaagtgtgtattgattctttgtatgttcatttttggatttggttcactgtgcaaattgtggtaaagtcatcaggaaaactgatctgttgtgtaaatcgcttttttgaagcattacattcctcggaatctggttacccatgatttttttgtggtctttctttttttcccctttagtagtgtgattagataccacaatatttggcaggtttgagttcgatgtaa

SEQ ID NO: 358694 - DNA, 251 bp, Zea mays
cagagaaagcggctgaaagatgatgctatgggggtgagcgatatgaaaagatagagttccaaaagaaagttgcagagcattaccattcactccgtgattcgacatggaaggtggttgatggtttccttcccatggatactgttgaagaaaaactgatagatttagctacgatctgtattcaggactgccaagggaacccacttaccaatctggcctggtgaagtgccttatgcacaaagtaatggcggcca

SEQ ID NO: 358695 - DNA, 342 bp, Zea mays
cacattttaatttgtttttgtcaagaactaattgacattttctacatgtacagctgaatttgtttgaacacatttgttgggcaagattggttaaaaactaagttataaaagtacatgcccaagctaaaattagaatcttctatgcctctccattccctttctatttcttccacttcaactgatgtgagaacagtaacactcttcgtcattttatttcaggtaaacccaacatattttagcaaagactcgggaaggcaaaacttttctgtttgtttggctcgcttttcattggcctaacatcttcgggagtcctaacaaatctgatgtctaattcaggacact

SEQ ID NO: 358696 - DNA, 165 bp, Zea mays
gtgacttccgatcagtccttctcctggggtgctggcgatggtggtggctgggcaatgcaccagcctaatttatccatagctatatgtctgctttgtgtggccagtgatattgccgtgagtatttttggatcctattcgagtcgaatgtaccagtaccagagttaa

SEQ ID NO: 358697 - DNA, 193 bp, Zea mays
  unsure (1)..(193): unsure at all n locations
cagagaagcatatggtggccatggctatgctatttaggaacagaatgcaaaaacacatagctaaattcaacaaggaataaacaagacattgtataggaagcttgatacgaaatacaancanancattntggtcanaccagcaccatctctaagggagaacaaagagaangcaagcagagcctgtgcacgtatt

SEQ ID NO: 358698 - DNA, 326 bp, Zea mays
cacatcttcgtctatatgactttgccaagagtgccatcatcaaaatttttgcctttccttatgctacggtctgtgacctgtattgcgacggtggaatggatacagacaagtggtgtgatgcccaggttggccactacataggcatcgatgcctctgcatcgggtgtcaactatgcccgtgaactatgggagaacaggaggaaacctttcactgctgaattcatcgagttggatccttctgatgatggttttgaagctcaagtgcaggaaaagggcatccaagcagatattgtctgctgtatgcagcacttgcagttatgctttgag

SEQ ID NO: 358699 - DNA, 190 bp, Zea mays
tatttattttgtatctgtagggcatgccaccaagatccactgtgcatccaatgagagtaagcggtgcttctcaatgcgttgtcagttatctgcagttaatgaggctaataggctgtaacctgtaacagaataaactgctctatctttggtgcagtgtacttgtctctttaatttcatttctgatgcattt

SEQ ID NO: 358700 - DNA, 218 bp, Zea mays
tgtttcctattggtttgattggccgccatgatggctcaatctgtattagctctatctgatcatctccttggtgaagaatcgacaaaactcaattaaaggtagtagataatctcataatagtggcaggtgtcgagtgaataatttccctggcagccggtgaattatcctgggatgctgtacgtgggagtacaagtactacaagcacgtggattagtaat

SEQ ID NO: 358701 - DNA, 160 bp, Zea mays
atcgcccggaaactgacctctaccgatgtctggagccggcgatgaggataagaagcccgcggagggcgcgccacatcagccttaaggtcaagggacaggatggcaatcaggtgtgctatcgcataaagaggtccacccagctgaagatgctgatggacgc

SEQ ID NO: 358702 - DNA, 359 bp, Zea mays
  unsure (1)..(359): unsure at all n locations
ctcgagcgctcagcctgcgccgccttgcactcctcgcgtcgctagcccggccggagccgctcttcttccaccgcgctcgccaggtgccgcggctcctctaatggtgacgaggtggagccagaagagcccgggcctcaagatcctgtggatctggaccctgggcaccgccgcaattgtggtcggcggtatcgtccggatgcgggtaaacgacgtgcagaagatccttcgggaagaagaggaggccgccgctaccgccacggccacgtcgccccccagcgagcgagtcctgaaagacgaagagtagaacaggtaaaaaggaagtggagagttntgcgccatttgacttggggatcatctgt

SEQ ID NO: 358703 - DNA, 193 bp, Zea mays
  unsure (1)..(193): unsure at all n locations
tgtagctttggccatgctaatactctggtatgtgcacttagattactcatactcatggacaatttcaccatatataccgtgtgtnaatttcaagaggaagatcttgacaattcaattggctgcaagctactcgatacccccgagtacatgtgccacctgttttgttgcgtgctcgagcaaggatctaaaatgt

SEQ ID NO: 358704 - DNA, 344 bp, Zea mays
gcacgactatgctggcgaacggttcgcgatcgatggcaatgccttcgtcctctacggcggcacgagggagtctatgcctccgctaaggcgggcgcgttcatccgatacgtttttgaaaccaccttcgagaaagtcacgttcagaaggatgcccgagtcggcgaccgcgaccgaggaggacggcatcttcacgaccacggtcacaacggtcatcttcaaggccggcgattgcgacaccgttgggggtgcggacgtctccatcgccggcgggcgcgcactctgctgcacgcgggacatggcgaggctcgaggcctgcacagatggggcagtgacgtactgcgcgtg

SEQ ID NO: 358705 - DNA, 348 bp, Zea mays
cgcggcggcggcggagggagcaaagccaagctcgtaagattctgtccgccttctgattcgagatgtactggatgtctggatcttgagtatgaggcatcaggcctatgtagatttggatttgatttcactatggcgctggggaatatctgcagcgtgattgaattttgattctaagctgatgtgattttagtatttgtgagctggggatcagcaatttttgttaggagaataatgacaaatgttcattgaacacagtatacaatttggtatactccatccactgagtgatactataggtttactagatcataagcgtgagctataggtggatttgaacttgatttcaca

SEQ ID NO: 358706 - DNA, 168 bp, Zea mays
gtgtcctccgcatcgtctttccactgactccacgtcccaccaccgcctcggcgttcttccgctgtggagaggcttacctcggctcagctaggctcgagccggcgaacatgcaacgggctctgcatgccgacaggacatagggtaatgtccttagatatgctgtgctac

SEQ ID NO: 358707 - DNA, 104 bp, Zea mays
gacaatatccttgcaccaagccacttcttctgtccgatattgtcgaatgtgagagcaacagtaaccctgctaaggatatgtgcgagctctggaagcaccactga

SEQ ID NO: 358708 - DNA, 335 bp, Zea mays
  unsure (1)..(335): unsure at all n locations
cgncgcgtcgcaacggccataccttccgtcccgcggcctccgctcgcctcgccgcccgcctgtccatgtctgtactctctctctcctcgctgagtctccgccagccatgacacacctcctcacggattcctttgagctcacgcggcgggactcctcaagagatgcagacattgccatgggcatgcatcaagctgatgcttcagacaacttaaaagatctcttgaagaaggtcgatacaattgagcgtttaattgcaaagctgacaaatctattgaataagctacagactgcaaatgcggaatccacagaagttacaacagcagttccatgaaagc

SEQ ID NO: 358709 - DNA, 326 bp, Zea mays
cgcacgcttcccagcagatgccgcatcagcatggaaatcattcaggaggaggcacgcccggaactagccaaccgccactgccagcatcatactaccgttaagttggatcttcttttgctattgtacttgacctgtgttttgaactgagtaatcatgtaatactgcaataacctgcggtctgtaactgtgtttagatgtgatagcagatagatacgagtgaggaatacatgaatatgtttgggggttttcattcatcgtaaaaaaaccgatcagtgttggctcatggcgattactggcaagatcatgattgatgttggattggtggt

SEQ ID NO: 358710 - DNA, 329 bp, Zea mays
gtggctgtacatatacatactgtacatgattggttcagtgcagggtttctgttccttcattgattagttattatactaataagtactagtaattttgtaagggcttgtagttgcagtctccgtactggtggtaggtagtgcaggccatattcgtcatcgccaagcttcgagtgtacttactcctacaatatatattttacagtatatattgtagctgtgttggctcttcggaagaaaaaaaatggaaggggaaaataacataatccctattttccccaaaaacactgggcttgatttggacgttaatgtgtgcattgtaactggtgtgc

SEQ ID NO: 358711 - DNA, 199 bp, Zea mays
acggatttttgattatacccgccgccgctgctcatctcacatacctaccagacgacgcctgactccacaccgatcgatacgatagccgtctatctacgaactaccaaccgacgacggcctcaagtccctcgaggctcacctcgccggcaaaacctatctgactggagactccattactaaggatgacattaaggacatc

SEQ ID NO: 358712 - DNA, 231 bp, Zea mays
ctcgagccgtggacaagcagggggccaaccttaggttcatctactggtgggaggacaaggtctcaggtacgtcctgtcccccgtggcatcttgttctctctgacgatccagttcctgtatagtgtacgtggttaattctggacagaagatctgaaccatgttgaattgaatgatgcctatttgagcattccagttttacaaaaacattgatgtctattatctggaatcctt

SEQ ID NO: 358713 - DNA, 134 bp, Zea mays
tatttcacacccaacgtgcaacctaggcgaagtccgactccgcctccgctccttccaactcgctctgtaatctgcatcagcctcgaacgctgtcgtagctgccatggggagtggaaagttcaacgggaagccca

SEQ ID NO: 358714 - DNA, 237 bp, Zea mays
gtatatcaggggaaacaccagttggataaaactattcagatgcgtgaggaccttgaaaatgaggcacgccatttccttaaaggccttgttctgtgttagtttgatgtggaaaccatagaatcagtggacactatcttggcgtcggtgtaaaatcatgatggatttatttccttgccagagtccccacttaggtttacttgcctacattggtttgaagatgaaaacatgctaaatgta

SEQ ID NO: 358715 - DNA, 318 bp, Zea mays
cggctcgaggcttcaccagctagctgaaactactagccccaacagcccccgcctctactcctacgttccggcacgtgtcccgccgagctgaagctcatcaacgtcacggggatcttcatcctcctctacgggctcactgtggcgtccgccgtcgcgctgcgcaaggccttcttgtaggcggctgtttgctcggtcggcgctccgcaactcgctggcgcgcgttccgccgttgacgtgacacggttggtgtttccctcgtacacgcgggagatggtttgtgggtggttcgctcgtgtaatgttgtgcatattgcgtgag

SEQ ID NO: 358716 - DNA, 118 bp, Zea mays
ctcgccatgttttgtggcaatttcttcgtttgcgagagggatgtacccagagatctcgtccgcgagtgaggcttgcgctctgatctcgtggaggatttgttggacacatgtgtgtttg

SEQ ID NO: 358717 - DNA, 223 bp, Zea mays
gttagctacttgacaatggagtcggtcttctcagtatcaagtcaggaaatggaagggttctgttcaaagaggtggagaaactagagtacatataatgggtccttatgtcataaacctgttagaaatatttcgttttaacttactcatgccaaatatgatgggtacgaaacactctgtattgttctaaacttctaatgacagtaaacggtgttatactgttgcc

SEQ ID NO: 358718 - DNA, 315 bp, Zea mays
cgaaacagtattacggccacttactactactatgattatattagcatcagttatgaaatgtttagctgctgctatgattatattagtatcagttatgaaatgttttgctgctgctatgattatattagcatcatttatatcatcaactgtttccaatgttttgctaggggaaaatgcaacatttattatgtctacatatgaactaaaatatgctgctggtattttaccttattctgattattttttgtgtcaataaggtagctgtgtcttagctaccttcaagatatagggaagtatgtgttctcaccttatttt

SEQ ID NO: 358719 - DNA, 346 bp, Zea mays
  unsure (1)..(346): unsure at all n locations
gctgatcaaagtaggttatggactggggatatggaaaatcggctcgtagatccttgacattctatgctgactagtttctgcaactcagtttatcaccactgtagcctaccgcaaaacctagttggtcgccagcaaatccatttggaggaatactgtacaattttccgagattttcaaatcgagagcatcaattcacatgtaccctagtgtttgatcatagagacgttgacagatgtaggccaaatttgttgtcccagctatatccttttactgatttgttatacnaggaactcaactgtgtctggccttgattatcacagaagaggggcanacgtgttgcgtacaa

SEQ ID NO: 358720 - DNA, 192 bp, Zea mays
atcaccctgccccagtggcgccgctgaactcatcacccgaccacaaccacaggagtaaccatagcacagattgccaactcctttatgcacttaataatggattttgttttgcttctgaggtttatgaataagtggtagaaaaaaaaaaaaaaaaaaaaaaaaaaaaaaaaaaaaaaaaaaaaaaaagggggg

SEQ ID NO: 358721 - DNA, 334 bp, Zea mays
gagctagttgaacacagctacgatacaatacatggcggcgacgacggcgagcatgatggcgcgggtggatcggctggacctgctgctaggctatctggaggagatgcaccgcaacggcaacggcaacgctagtccgcctagtgctacaaccgcctcatcaccctccacccttgccgccggcggagtccatctcatcagcagtgacgacgacgtcgacgtcgactcctccgccggccgcggcccgccaaggaggtgctggaggaggcgcaggccagagggagcctcatcgaccgcatagcctctctggaacaccgtgtgctcaaggttatattac

SEQ ID NO: 358722 - DNA, 334 bp, Zea mays
cttgagctttgaagctgttacacctgaacaggatgccccatataatgatgacaatgaagaatctcaaatgcctgtggagaagcatcaccacattcttgaagaggttgatggtgagcttgagatggaggatgtagctcctccatctgatattgaagcaaccaccaaatgccaaccagaggaaagagacaccaattgtccacgacctgatcaacgcctttcagatgttggccctccacttcctgtggatcggcctccgtcacctccgccgttgccatcatctcctccacctgtagcaactccgactgccgcatgtcatcagagtgcacatatgcag

SEQ ID NO: 358723 - DNA, 183 bp, Zea mays
cggtatttgtccaagtggtataggttgctccagttgttagtgtatttgtttcagaatacctcagctttgcttagcttgtcataagttctcagtttgcagaaagtctgtatgtttctgtgttggatacagatatgcagtaatgttgtaacttgaataaaaaaataagattattttcattggaac

SEQ ID NO: 358724 - DNA, 342 bp, Zea mays
  unsure (1)..(342): unsure at all n locations
anataaatatgtctcactattatttatataatatatactgtgtggctctccaacttgcttgggactaaaaaggatatgtggcctggccagccaacagggtcccgcccgtattcgtttattcccgcaggggcaggggcctttatgttgtcctaatggttgtaagtattttgggagtcactttgcttgcgaatgtctctcgtaagacttatgtggtcaatggtcggttattaacttattaccatgaaagcacttcgtctgctgccctaagaggtttagtcccatttgcattataaccaattcaatccttgtggatgatttgtgtgattccatcgtgaatctcat

SEQ ID NO: 358725 - DNA, 236 bp, Zea mays
  unsure (1)..(236): unsure at all n locations
tgtctagtcccgaggggaggggttgtgtcgtgtaattttggatgctactgttgtgcatgtatagcttgtgtgctaccctgttccatgctgtttgttactcctatgccagtagatgttacgtactactacttntgatccccagcttgctggcaactcttggataatggtcgttctccacttaccgtttcagttcttcacttaccgtttcgagaataaactgaatgtgccttgatcag

SEQ ID NO: 358726 - DNA, 175 bp, Zea mays
gctggcatctgaaaggaagtggtagctgctgtgcagagtgtttagccgttaaattcaaatgcgcccgttcaatttttttcttcgttttccttgtatatatgtgtttgtttttttttgggcaaaaatatgtgcatgttatgcacttctggaatcgtcgaatcaggctgcagtcttg

SEQ ID NO: 358727 - DNA, 345 bp, Zea mays
atcctctgctgcagactgctgtcttgtgggtcgtgtacaacaactgcgtctgcgacaccgtccacacaccatcggctgccgcgcgcacatgcggcatgacccgctggcacagtgacccagcccagcgcacactctcagtcagcagccgctgcggcaggacaggaacgggtggggccggggtacatgtctacatctacatgccattgccactgtgcagttgcagtgctctgagtcaatgtcagtagcagacttgcagtaataatcggtggtgatgtaatgagtgacatgttccccacagttttactgaagaactgggttcctcattggatgctgctgcagagaaca

SEQ ID NO: 358728 - DNA, 346 bp, Zea mays
  unsure (1)..(346): unsure at all n locations
accacaccaactctccccaatccagcagccctcgagtctggtcgcccacccctcagcgcgacgaaggtaagatgttcctgcggaggatcctgaccggcgggggcggcctggcggccctgagggcggcgcgcgccgtgaaggagacgacggggatcgtgggccttgaggtggtgcctaacgcgcgagaggttctgatctgccaggaggaggaggactggaagcgcatcgaggaccgaatcggatgcgggcaggtcgaggagctcatcgaggaggccgaggacgagctcaagctcatcgctanaatgattgaatgggatccatggggtgttcgcgatgactacgaatg

SEQ ID NO: 358729 - DNA, 341 bp, Zea mays; identical to SEQ ID NO: 258864
  unsure (1)..(341): unsure at all n locations

SEQ ID NO: 358730 - DNA, 228 bp, Zea mays
aggaagctgaggaccacgttcaaggcttcgaggcccaacctgttcatgtgatttagctgtggtcagtgtatgcgatcataagagtcacaagtgtttctgtttttttttaagttttgacttcctaatagtaatacttaatcggtttgatgattcaactcgttttgaagcgagcttggtgaaccaaaaaaaaaaaaaaaaaaaaaaaaaaaaaaaagggggtcccccctt

SEQ ID NO: 358731 - DNA, 366 bp, Zea mays
  unsure (1)..(366): unsure at all n locations
ctgattgacggattcaataacctttctagcagtaggatgtcgtagtagcctgtaaagcggataatatggctgtcaagaatttttggaccaacgagtgataaagcaagcaaaacatgtttgtgcagctgccactggatcagtgtgtagtagggcaaacacagagagcagtttactgcaacaatctgacagtgttaccatctgattgaagctattttactttctacaaagaagactcagaattgttttacttgggtttcgatataccatgtaaattgtaatgcacagtgtccgatgtgcctgtctcaactcgattggtattgtgttgtgtgtntagtgattctgggttatcctttgggatgcttatgt

SEQ ID NO: 358732 - DNA, 136 bp, Zea mays
ctgtctgtggtgtgtctctctgacggccccatgcgtcaggtacactgcttgcttcagttctgcatctcactctgttgaggtgaaaaactgataacctctttgcagtgctagacaacctgagaacctcatgatatct

SEQ ID NO: 358733 - DNA, 344 bp, Zea mays
ggagtgaagtggagaagaggtttggtgcggctgcagcatttgctgctagtggggctggggcggctgcctgtcaaagctcgatagtgatgtgtagctgcagcttcaaggtctcctcaaggttgccattgacggtccctgttatgactcagcgcagcacttacactgagaccctcatctcgtgcaaaatggtctgcttggcagaagttagggaatatgaaccctgagattgctatggagaaatacatgaatcttttatcagaaacaattccagggtggatgatgaatgataccttggacacagagaacactggcagtttacctgcggagactatcttaacaacgat

SEQ ID NO: 358734 - DNA, 197 bp, Zea mays
  unsure (1)..(197): unsure at all n locations
ggctcgaggcacgccgngagacggagaaccgagcagctggaagccagcggaccactcgcgagcgcagcaagcacggacgggacaccaggaggccacggggacagaaagaggaaatggctagcgctgtagcactgcctgcttccaagatttgtgatctgaaatcaagttaccttttcaatggcatcgcgttgtactgc

SEQ ID NO: 358735 - DNA, 207 bp, Zea mays
caccgttcattctcctatggcatctactcacgcaagcagtcctattcctgattccttgctcggcttgcgtggcccatggattcgatgtcatatcatgtgttgtttgctcacccgcctggtcgcagttcgtgtcggatggcggtctcgcggactaatggtgtccgagacgctatcgcgcagcggtaccagtgatgattacgcacggca

SEQ ID NO: 358736 - DNA, 354 bp, Zea mays
gttgatttaacgcttatctccatttctctatgttcaccttctagcttagcacctgttgagttgttacttttcaacttttgatgtctattgcctaccccttatgctcaaaatgtgctcttctgtgctgtggggtgttgcataatgagcagtcaagccatgtttttcacttcttcacaacgttcaagccatctagctaaacagggcttaggcctgattcatgctagttcaagtgattattggataaaaatatgaagtccagctcacaaagtcccattacattgggaactgaaggtatcaccaccagagcattcggtgcaccatgcacatgtgcttcaacagaccacatgctacttg

SEQ ID NO: 358737 - DNA, 344 bp, Zea mays
acgagatgagccacaggacgggcactcgcttccatttccacaaggagtacttctgagtttcgacagatagaatgggcagtcgatgctcgttctaacgtgatctggtcttttctgatctgatctcgatagcgttaggtaccggtaaagaagacagaattttgcacagatgcaagacaaaccaagctgacctctcctcctgatctggaactgtacatagcataaaagaagcaccacagggttagcttagtatacgtagcacaattcaaataaatatattgacaaagaaaagagagacagagaaagggcaggatagaggctgttgttgttaactcgaagatattgat

SEQ ID NO: 358738 - DNA, 190 bp, Zea mays
acgcccacctgtcagcgacggatattggtggtgggctagtcaagtaagctgtaaagccagggagacaagtgcagtgtaatagtattgtcaacgacgcggcgccccaccgacagggtcgtgaatattattcctaaactgcacaaaatagaaattttaaaaacaaaatatttctaataacttttgtagacaa

SEQ ID NO: 358739 - DNA, 338 bp, Zea mays
ggcggtgaggacgacactgccggggtcatcggtggctggcttgaacagctccagctggatgagatggtagtctagaacaaacacaaacataaatcaaataagaaaggtgccattttttccctgtgatccaccatttgcttcaccaacttactacatctaccaaccttcataccttgctgtaattactggtgatacattcttttggagttggttagtgtaggtgttgagatttccatcaccatttagggtccaccacaagtgagaaattaaggaatggaaacctagccaattttatggaatttccacatcccatgcttcatgtgaaggagcagtagggt

SEQ ID NO: 358740 - DNA, 342 bp, Zea mays
agaattatgacctttctactaattcagtacaattaactctgatatctatctatgcatgaagagcgctgtcatgctctccattgaccaccatggttttaatgtcctcgccaaagtgcctcaaggagacatccttactaatccacaataccactggaaggagttcaggttcacattcaaggacctgccaaaaatgctgaggacttctgccgcatgctggttggattagaggaagagggtttgcagaccgtgaagagctgcagcggttacggttgacaacccacttgcgaggatcacattccagagaccagccaaggatgctgagggactctgccgcatgctggt

SEQ ID NO: 358741 - DNA, 344 bp, Zea mays
  unsure (1)..(344): unsure at all n locations
ctgaaccctcactacgtcgcgccgcctgcttcacagttcaccccggccatggtctccaccgctcgcgccgccctcccgacgccccacctctctctcgcttcctcctcccgccgcagccccatctgtttttcacgccctcctccgcacctcgcctgcgcggcggcgctgccacctccatcaccgcggcagctccgcctcgccgcagcagcaccaggtcaccacgcgcctgggcgacgtgatagaggcgcacagttcgatcgggactcgcttaacgagatctttgaggtngcgcgggagatggaggccgtggagctgacttccacggcgctcccagtcgcgtcctc

SEQ ID NO: 358742 - DNA, 266 bp, Zea mays
cggtgcttggatctcggccagacgacgacgcgacatgcaaggagacgtatgtcttggatctccaaatactgagcttcgtgaacggagccgagcgagaggagcacgagtggaggaggatcttcctagctgctggattccgtgactacaagatcacgcacactcgtggtatcccgtcgatatcgaggtcttcccatgatggatgagagtcgatcgatggatcgagagagagggcagggattaagttagtttgaataaggtgcgtgcgt

SEQ ID NO: 358743 - DNA, 338 bp, Zea mays
cggctcgcggcctctctgcgctgcggcgatgcggtggctacccaggctgctctctcactccatcgaggtcgggacggcctccgcggcggggaggtccaaccctagtctcgtcaaggcaggatcccatgggttcgccagcggcggctgggatgggtcactagcggtgccccgggagtgctgcggaagctgtgggtagacgtgctgaagaagcagaaggaggacgcgaggaggtggggcatcggcgcgtcacccgggaacgccggcagcggtgcggaccttcgctatgcgcgttcgcgaattctgtggaggctaaactggctccgcttcttgcaagagct

SEQ ID NO: 358744 - DNA, 241 bp, Zea mays
cgacgcaccagtgatctcccggcgaaatcccgctcccgcgtcccccctcctccggctgcctctgccgcgcccccgctccggaaggttcgcagcttcaacacccacagcatgcacactcccccgctgcttctgctgtcgttctccctctctgtggcattaggccgaacgctcggcggcccggatcgctggggccgcggatctgaggatccgcgtgcgccgctgctgtcgggatcgcgcgtgg

SEQ ID NO: 358745 - DNA, 183 bp, Zea mays
cggctcgagcaagctagcatgcttttcccccctgctccacctcccacactctcgataccaaacaatacgccaccccgtccattttactgtcttccaccgcaaatcccaatcttgccaagggagagggctgctggatccatgcctgtgtacgcaaactttggcgcattggctggtgtcagtcca

SEQ ID NO: 358746 - DNA, 124 bp, Zea mays
ctgattgtgaagttacaatttcggttagcatttcagtcatgtgctggtcttacgcaaacttatctgcgccctctggtgctctagtaattgttttggcctcaatacaaagggctgcttttggatt

SEQ ID NO: 358747 - DNA, 196 bp, Zea mays
ggaggaggagagagagaggcagggagccctagccctgccctgcgcgccggcgtcgccagggttagggtctccccggggcccccgccttccttgccaatccctccgccgtcttcgcgctttgggattgattccactcggaggtggccagctagccacccgagctcgctgtccttgccggtacgcgtttcctgaggag

SEQ ID NO: 358748 - DNA, 204 bp, Zea mays
gggcggagtccgcgctgccgccgcaagagttcgctcgcctcgctcctcccaacctcgccgatcgcctgggcgacggtccaaggatggcggcggcgatgcctctctgctttcctcgcgcgttctccccccaagcgtgcttgtctcctcgtgcctgcgccagctaggacgcttccctggacaagttgccgtcgtcgtcgctgtctc

SEQ ID NO: 358749 - DNA, 109 bp, Zea mays
gccgaagaaggcggcgcatcgggatatcacgtatgagaagacgccgttggcgaggagcagcgcgatgaggatccactcgagcagcgcgtacgcgagcacccgcgcgacg

SEQ ID NO: 358750 - DNA, 237 bp, Zea mays
  unsure (1)..(237): unsure at all n locations
tcataagtgcacttcaagccgagagtttcagtagtattttgaagaaattcttgagtcctcaactggagctgctgtccttcttcaagcactatgaaagagcagtggacgaacatcgctatgctgagctgcaagccgacttccaagctagtcagagctatccaagaatacccccagccaagatnncatggcaaactgctcatacatataccccggtggtatttgagatctttcgaaaag

SEQ ID NO: 358751 - DNA, 228 bp, Zea mays
gatagcttctcggtcctccgccggaagatcaagtgtatctctcctccctccctctcctttcgcttgatgtgtgtgtgtgttttctgctgtgaagtcgtcacaaagctagctagtaataagcaggcctcccctttttatactttagatttcgcttggctctatatacctagctacctcactgcagtttggccgttgcagtacatatgaatctgcaagggcatataagtg

SEQ ID NO: 358752 - DNA, 233 bp, Zea mays
cagttatcacatattcacatatgtggtgtagatccttatttgttgaatctatacaaacttccaagtcaaacgtaatccctgacatggaacttgctaacctgctatgttcagctctgtgctcttcattccatgttcaattgttccttgttacaactttctgttttgaaatccataggttgtattcagactgtaagccagacttatttcttagcaagtagctagttctagatcgc

SEQ ID NO: 358753 - DNA, 239 bp, Zea mays
tggatgcccgcggcgtggcgtggcgtggataggatcgccatcgcgagcccaccccgccgccaatcgtcatgctcgctccgcaggcaaacgaacatacgccgcagtcctatcatctctttgctctgcgccccggccgggccccgccgtctcgcgtcgcgtcacgcatttgcggtttccgtccacatcaagccctgccgtccgatcctcctccagctccctgtttctgagcgcaaccgcgg

SEQ ID NO: 358754 - DNA, 233 bp, Zea mays
aggtggagttgagtaagttcttgttggatcatggagctgtcaggataacatgacgaaaactttttgcacaccctggataatggaggggaatggagaccataaggtcactcgtgaagtgcatacaatccctagagatctattgcatacatgtaaagccttacatagaatatcagtgttatctgagttatcatttgcccaattgcctaatctggtggtcggggtattcgttgggt

SEQ ID NO: 358755 - DNA, 259 bp, Zea mays
gtggctgccaacaagtcatgctcatgcaaaccgatgaatctatctctgtatcatcgatctcggttgcttgctagtccagactccagacatggctatatatatatagctggtgctaataaataggagtataatcgtcatacgatcggttgcgtgtggaatgccaatcatgtgtgtaatctgttggcaaataacagacaaaaaaaaaaggggcggcccctgaatagtgacctcttcgcccgggaatttaatttcggcgggg

SEQ ID NO: 358756 - DNA, 127 bp, Zea mays
tggcagcgggaagggacgagtcgacgccggtgtgcagtggcggcggtcgcgcggtaacgtttcccttcagcttcgatcatgttggtggcggcgacggccataaaaggctcacccaccaaggatttga

SEQ ID NO: 358757 - DNA, 183 bp, Zea mays
cccgcccacacggagcacgctccacgccccgcgcggaaaagacggagagagaacaaaaaagttaggggggggaagaggagactcggcggcccgaacgacaagcgctgacgcacgtacgtcggcaagtaatgtaccagccatcccctacagcagcgcccggccgtggctgatgccggcgggcga

SEQ ID NO: 358758 - DNA, 168 bp, Zea mays
gcgccgtggcctccctgtgcgccagcctgctctccagcgactgcatctgccagctgatcccgcgctgctgctggttctgcctctggaggtccgccaggagcaggctcttctcgtacctgagcctgctgatctctcctcgagctcgcgcctctgggactccgctagcgg

SEQ ID NO: 358759 - DNA, 200 bp, Zea mays
gtagcttctctccactccagtccttgactaccatttcatcatcatctgtgtatctcaaacttgcttgcattgcttgccctcactcctaccatccaagtttctttctcggtctctggcaagacttcgttcaccatatctctggcccagacagccacacgagacgtgatctcgaaccggaggtcacgggccaggtagtctgg

SEQ ID NO: 358760 - DNA, 249 bp, Zea mays
gttaatgcttgttcagcattgtgggggaaggtttcctggtagagctgacaattttcccccattgagaagaggttttagggtttctcttcctcattttcccagaaggaatacaccaaatggaagtcttgtcggtgttggaggcacataggtgtgcgttgctctcaaagaagaataggttgtctcttgcttttcgtcgctatgttttcttttttggaaaaaagggaaaaaagaatgatccagcttaacata

SEQ ID NO: 358761 - DNA, 111 bp, Zea mays
ggtgaagacctgggtaattagtgataaaacacaacttgattgttgattagatgtaaatggtggcttcaacttaaccggtttatggaagagcactcagtcacgagcggaagc

SEQ ID NO: 358762 - DNA, 250 bp, Zea mays
ggcaacttattgaagcagcctctctccctcgacggctcgacctcaacaattgtttgttcttgaggcccgccagaccttagtaatcttgctggctggctggctggtaactgaataatctagctagctataggcgctctgaccctctgataatggtcttggactccatcggcttcttcttcttcgtcgtcgtcgtcgtcgtcatcccccgcgcgctgcttaggaagagcttctatttctggatcttccacgt

SEQ ID NO: 358763 - DNA, 99 bp, Zea mays
atcagctcttgtatcttattgaaaaggagttaatctggatatttggtcacgttcctgggttttctgccacccttccgtctgtgattgccagactccatg

SEQ ID NO: 358764 - DNA, 283 bp, Zea mays
tcttggttcaatatatatctggctgttggatgtactctgctgcttttagtttcaatcggtttttcttgatattatctatgcctaccagaacatctcatattctgtatatatttaaattttatcattgcacaggctgctggacaaattcatggactggaggactatagaggactgccaagtgcttctggaaggttctcgagcactattgaactaaggattccaaatagttctttggagtctattgttggtgttggcggggtcaatttagcagagatacgtcaga

SEQ ID NO: 358765 - DNA, 274 bp, Zea mays
cttcagacatcatgttcaagcggttcatagtatttgaagtgcgacttgtaatgttccctaacttatgttgccgtgttggtctgcagagttcacgtggctatgtttactttacgtatttttgctgaagttctgggattgcttaccatgctagtattcttcttctgtatgcgacgatttgtgactactgttcgtttcaactaggctcatgctttctctgatgcgacctaagaatagaccacactgatgcttttagaaagagacatgtaattgtgtc

SEQ ID NO: 358766 - DNA, 289 bp, Zea mays
ataggtacatgactgaggtgaggcgattaaaccttccacagaaccaaacggataatgtctaccgtggtttccgtgaacttgaggagaaattactatcttcttattaggcagattgcagtcattcctcaagatagtgaagaatgatcttgcatctgttgtaccacaaaaccaaggaatagagtcgagggcttctggattcacctcagcatgatctgtattgttccttacacttatctgcaagaaccttctggattcacctcagcatgatctgtattgttccttacactta

SEQ ID NO: 358767 - DNA, 275 bp, Zea mays
ttccaaaatgttttcaacaacaaactattctgattcatctaaacttcatagcaatagtgtttggtaatgaagtttgcatgacataattgcatgtactgctttccattccactattgttaatttttggatttaatctttttcagtcttgttcatgttcatagccaacaaaactgatgcaaaaatgttttgttatgtaccactaaaacttgaaacgtctctgtctcttctatccgtctgttctagaaagagtgtgtggagggcgaagaggttgggag

SEQ ID NO: 358768 - DNA, 274 bp, Zea mays
gtgctgttgtgtattatcgctgttgcattgtgcgcacagcctgattacgacgcaaacatgaacttcggtacatcattaatttatccccatctgaatgactcttcatacccaggctcatgttggtggtttacgttgcggtttttgattgtgctgtatgttgggtggcctgacagaagggaggaatcggtcacggtggcttgcggatcgagtgcatccgtgttgctggtgttgagattccaaaccacaagatggtggactactcgatgcagtacat

SEQ ID NO: 358769 - DNA, 277 bp, Zea mays
gaagtgttcgacagcaggctggacctgagctcgaggagagtcgtggaagagatgtccctggtgctaaaaatcgcgctgttctgcaccaacgagtcaccgttcgataggcctagcatgagagaagtcatttccatgctgatcgacgctagagcgtcctcctacgactcattctcttcgccagcatctgaggcacctatagaatatgattcgtccccaaaaaattagaggccagtgtcgtcaatctattttaccagtcatgcatcgagggagcatccat

SEQ ID NO: 358770 - DNA, 276 bp, Zea mays
atcatacatcatattgcatcaatggcacaataaggggatacaatgttgaccttcggagaatgcttcgaaaaagtaaaattgtgctaaggcacaaaataagttttgaagaaatacaactttatcagctctgatgtggagaaaaaaatctattgttgatgaagcattaatgttttggcgacgcttggaggattttttatgaagcactctgatatggaggaaaaaactcattgttgacgaagcataatgttttggcgacgcttggaggattttttacga

SEQ ID NO: 358771 - DNA, 265 bp, Zea mays
taatctagcccggtcgaaggatggtgatgacagattggtcatacagactacagaggtatgcagggtctttgatcggaacggtttgatcgcttgcgtggttaccacatgagatgaaaccgttccgatcaaactctagcccggtcgaaggatggtgatgacagattggtcatacagactacagaggtatgcagggagttgtataatttctttgttgggttggcgaagagatcggccaacatgtaaactaagctccaatcaatggaag

SEQ ID NO: 358772 - DNA, 277 bp, Zea mays
cagaaaataatcttatggcttctgaatccttgaaattaattatgaactatgaaccttcatgcattatcaaggctagagaataatatccaagggccagtgaaattttattttcttatctattgtttccatttcagctactaaaaaaattctaatgtgagaggataaggccatctggtaggcagcagaccaattggccgatcagattttaaatggactgtaaacagggatatgttttatacttattgatcaataaaaatgagatccttcctttctgaca

SEQ ID NO: 358773 - DNA, 146 bp, Zea mays
catgctgggacaacatatattcggtgatggagagtgctccaagtacacacccgatgtaaataaatgttgtcccagcatgaggaaagaagggagccctttatttacatcgggtgtgtacttggaggcctctccatcaccggatatat

SEQ ID NO: 358774 - DNA, 248 bp, Zea mays
ttctcttgtcaggacaggacaaccgtttgcgccaagagatagcagtcctgaagaaagatacagggtacaaactgcgagttcttgcacaaaattatcctgctacacctggattggctatcacagatttttggcaggctgctgagcgtactatcgctttagctgctgatccaacctttgttgatttagacgtccctcggtaccttaggagtcaggcttcagggtactatgggctcatgatctactggaaa

SEQ ID NO: 358775 - DNA, 144 bp, Zea mays
tgtaccaccagattgtctagtgtcttctctgtaataaatttatctgttcttggtactttgtctatggttccgattcaaccatagacaaagtaccaagaacagataaatttattacagagaagacactagacaatctggtggttc

SEQ ID NO: 358776 - DNA, 126 bp, Zea mays
atcagatctggggtaaccgtcggatcccgttgggcagatgagctgctgagatcaaagagtctcgcaagtgcgtgcgcgtctggctcggtacattcaactctcccgaagagcctgtgagggcttacg

SEQ ID NO: 358777 - DNA, 225 bp, Zea mays
gttgaaactgatgatatgggaatctttagggattgttaaggagaaccaaaatcatcttcaatctcaacagagcctttgtgaagcatttggttctccttaacaatccctaaagattcccaaaggctctgttgagattgaagatgattttgctactcttgctgataagagtatttatcctggggattttctctgggtcagagattctgaaatatatgagaaccgtga

SEQ ID NO: 358778 - DNA, 260 bp, Zea mays
ctcgagccgtgctttgtaaacagatttaccaagcaaatagatagaacatgaaaagtgcataatctatttgctttgtaaacagatttaccaaaaaaactcagaagataggcatgagagctataaatattcttggaataaaaggtgaggctgcatgcacttgtttggatcacatggtaggaaacgagttgttgctgctaattttccctaaaataggaaaggtagggaaattctttctggataaattatatggtatgtccaat

SEQ ID NO: 358779 - DNA, 124 bp, Zea mays
ggcattctctgatgccctgttcattatccaacactacgtgttgttacctgtacagtgcgtcgagtacggtaacgcaagcacatctgaaagggtacgcccccttatcaggccttcggacaagact

SEQ ID NO: 358780 - DNA, 208 bp, Zea mays
tggctaaatgactttgttgtttccagtgatcaggattttcacttgtattagatgaggtttgaagtgattgtaacactgatccatcttccaggttgtgccaaggaaaacatatatccgcgattagtggttattactctgttcagacatgcaatgatgtaagttaataaatattccttctggcttccggtcaaaaaaaaaaagatagaac

SEQ ID NO: 358781 - DNA, 275 bp, Zea mays
gtaacaagcgactaacatcgcacgggggcgtccagttcagtgcagatgctccaggacaaaccactgttccgcttcaccatccccgagggttcttcgctgcttccatttctcaaacgccaagaaggaatgctttgctctggtcttgtttcctgcctgaaaatatattttgttttttttttcttgcgagcacttgatgataagattttgtcagcttaggaacatgcaccatcaatagaaagtttcattctatactttcatagacatttaattttatg

SEQ ID NO: 358782 - DNA, 261 bp, Zea mays
ccgatttgtccttgttgagaactgaaaccgatgctgtgtgggaaaggttaacgcaggcaaatggtgatggagtttttgttgattgtaactttgtgcctacagattctaagattcaatcagtactgccactgacgaaaactgaaagaaagaaaaggataaaagagaagatggatctgaagaagaaagagaaggatagtaacaaggacaaagatgatgaggataccaaggataaagatgatgggaaagaagaggatagtaacg

SEQ ID NO: 358783 - DNA, 262 bp, Zea mays
tgttaaatataggatggtgcccttaaagctattggtatcgacaactcaacaatcaaacatattccaaggtttaacaccacttctgaactctcaggggacgctttaatctgttacaacttgaggacgtcaaacatcctactgacagagagctaccgagccaaagtgtgctgttctgaactgtcaaaaagtggtaatatcgtgctattaaagggaacagggggctacattgatccagagtacttggagacctcagagctcactg

SEQ ID NO: 358784 - DNA, 293 bp, Zea mays
cacgtctgaatgagtacttcgctgccgaacagcgacggcaacagcaggatttcattgacaagtacaacttcgatcctgcaaacgactgccctctcccaggcaggtttgagtgggtgaagctagactgatggattcagagggacgagagagcagcaggcatggaatggaactcaccccccgctccctccacaccaccccagcgttgtggcagaggcgcataccgtcgtgttagcttcgtttctgctgtaaaaaaaacccttagtgttttatttagcatgtagccttaactggtc

SEQ ID NO: 358785 - DNA, 285 bp, Zea mays
agcattagagaagtattatttgttaaataagatactaagatatactaaacaaatgcacactagaatccatagtccgaactggtgagaaagaaacacagggcgacctgaagaacaagaagcatttgttttgtgttgagctaaaacgtacgacaagaacaccatccgacgaaacagagatctcgatgaaacaagaacacattgcccacacatcctatgaatttgcaaagcgaaagtaggaacagcatgctgaaatttgccctggaatttttggagcaaagaagcaga

SEQ ID NO: 358786 - DNA, 225 bp, Zea mays
ctctcttcctagctagacagtatccaccactaagagagtcttgagggattgatggacgcatgcatcttcaattcctgtgtattgtattattacagattgtacctgtagtaatacaatacacaggaattgaagatgcatgcgtccatcaatcctagtgtattgtattactacaggtacaatctgtaatgttacacactgatgatgaattgatgatggctgatgagc

SEQ ID NO: 358787 - DNA, 280 bp, Zea mays
gatgagcaaggaggatgtgctcaaggtgcaggtgagttcgctccactcttcttcttcttcttcttgccgatcgacccaaccaccgcactccacctacacacaggcacatgttcattgtttttgctgatttcaacatagtactgctcagtggcggatccaggatgagatgcaaggaggggctactagcctactaaaataaagctaaaaatatttagatataactaaatgatctaattaatatagaccaaataagtatgaaaataactactcagttgtgtta

SEQ ID NO: 358788 - DNA, 278 bp, Zea mays
ggtaaacagtggatagcaggtttatcttaccatgaaggttccaaatttccaaggcgatctcggcagtttgtctggagaggatgtgttggaataagccagacttcatctcaacttgctttacaggttagatatcttgatgcccacatcagatggaaggatttcatccctccagatcatattccctcagatggaaaaagttatgatgctgatttttctgctctcagaaatgctgtagtctgtgataaaaaaataattgataataagataagatacgcact

SEQ ID NO: 358789 - DNA, 271 bp, Zea mays
aaggtgtggagctcctgcattcctgcacgaacagagaagatatctatgttactcaccctgattatattgttgccagagaatgccaaatgagaagctgcgaaacgatttgagcaacattgacatctgggacgaggaccggatagaagcagtgctcgacacattcttggaggacctgaggagcgggcggctggaagaggctgggtggcccgtgatgctaccagcctacagcgtatcgaaaatggtcatcaatctgtacaccaggatcatggca

SEQ ID NO: 358790 - DNA, 291 bp, Zea mays
agtcgactggtaaggggagcaaaaaagattattgtccctaatctcctacctctccttaccagtctcaagccaccagcagagggccataacctcgtggtgaggtctggagcgcgactacgagttacgtagtcgtggtccggcgacgctggggccgagacacttgacaatatataatctgtaattctgtatatcctgctttacttgtgaattcttatatgtggtggcaaggacagatctggtagatctgctactattatctgtgttgactgattgcttggctgcagttgtgtg

SEQ ID NO: 358791 - DNA, 279 bp, Zea mays
  unsure (1)..(279): unsure at all n locations
ggtggcgatacacagagaaggagaaagagcttgttctcctgagagctcctgtctggcaactaaattaaacagggattctattcagtttaaatttaatgctgattttgattcaatttattaacaccaaaataacagctgattctattacaggtgagcctcgtggaaaaagaatcagctgttatttttccacgaggctctccttgtaatagaactatagaagtgggctgctgcatctcgttctaatttcgtttcttttngaataacaaaaagttcatttat

SEQ ID NO: 358792 - DNA, 283 bp, Zea mays
agaagatccctgccaagaaaggaaacaaggaggacgaagcgatgaccccagtccggcgctccagcaagctgaggcatgtgaaaactcctgaatcttaagattggcgcaagctggcatctgaactgccttttagattattagataatgctaatgccactttgtttgctgcttagtgaagcatcaagtgtctaggccatcaacaggtttgcatgatgtgataaacagctctctgctgtttttacttcaaaagatgattaggacttgtgtgttcagtataactgct

SEQ ID NO: 358793 - DNA, 278 bp, Zea mays
caaggttctattcataatttagtgaggtctggagttactgttgaagggaaagttaatgtaggggcacaaggagcttttaactctgcctctgcaccacagatggaatttcccacagttcctccatacaacccctcttccttcgggctagctcacagtttctggacaaaggcaaggagttggtttccagcattataagcactgaacctcattcatctaaagttgcatctcagcctgggatttctcatggaagtcccatgcaagataggcaaggtatgatc

SEQ ID NO: 358794 - DNA, 279 bp, Zea mays
cttaaaccgagttctcatgcttggttcacaagctcaaacagttattgggaggccaatactacctgatgctgctgttcatgctgttgtagaagaacatgtaagatgaacagttggaaactaaattcttgagctcttctttttgttaccacagcattttcactgacgaaatttatgaaatgattactaaactcaatttgaccgaaacaagtcagtaagtgtatttgctcgattagtggaattttggtttgcaatatatgtgtcagacactttctgtgtatc

SEQ ID NO: 358795 - DNA, 277 bp, Zea mays
ggtgaataaccaccatctcgatattatcaagtctctcatgtgcagaggtagccaacaacaagatgctcaagcacttcactacaaccatagagtccatgaagtgctgaacacggacgacggtcgccctattgatgtagatttggccctttgtgcagaaatgtgagactcgtgtttgattgtacaaggaagaactgcagggaagtgaaggatggccggtctcgatgccgcggttgcttcttttgtgttgctagatgtgaacttgtggtggctgcatcga

SEQ ID NO: 358796 - DNA, 162 bp, Zea mays
gcacaagctttggacgagaagcaccagctcacgtcagctgccacagctagagtgtcttccgttgacaagagcataggcctaagtgagatgatcagtgttggcacttcagtgtaaatgataaagcgaaggaaatggatcagaaataccaagtctctgagaaga

SEQ ID NO: 358797 - DNA, 259 bp, Zea mays
aggagcaggaattctcagcacagttagagatgcaaattgaagtagagagagctcgttctattgagtctgctaaagaatcattagaggaacaactcctgttagtgaactcgaagctgcaaaactgcatgacatggtgtctgcgcttgagcacgatgtggaaaaggagaagtttttttctgccaagctccagatgcagctagaagctctagaggctgtcaaaaaggtgttggagtctgaggcggagtctgcacatcaggat

SEQ ID NO: 358798 - DNA, 263 bp, Zea mays
gttatgccccacatcaatttgactaattagactatggtaaggtggttgttagacataacacaaacatgtcacaccatgggatgccaacaaagcagttcactagcagacgtaccactctattgaagatgctaagtatcacaatgagttttcaggaagctttctgccacccattgagcataatgcttactcttctgctggctttggtaatgttctggccacctctaactcagcatgtacacatgaaaattcacaacttggtggag

SEQ ID NO: 358799 - DNA, 262 bp, Zea mays
  unsure (1)..(262): unsure at all n locations
gtatgccatatcttcagttctcgtatgctgcttcagcgctgcatcttcagttttctcggctaaaaagagatcatagtcactagtatacctatgtgtgaaagcagcagacttatcagttttgtgaacaaccctaacttatgtggtcctggcaccacaaaaccttgtcctaatgctcctcccttttctccacctagtccatacaaccctacaaccccgatgcaatcaccaggaagtagctcttccacgcctgngagcaattgct

SEQ ID NO: 358800 - DNA, 261 bp, Zea mays
agcgcaatggcaaagcacacgctcagcctgtgcgcttgccatcatgctccaaatagagagagacagccagcccacacacggctgctggttctactcagtattttgctagaaaattgagactatcatgtcacggcccctggtaaatctgctactactactacttgtatagtttagtaagtcggttgaagaggaaggggattaaggaaggattactgttgggctggcccattagggttccaagccgtgtaatagatccaggcg

SEQ ID NO: 358801 - DNA, 262 bp, Zea mays
gcaaaccgcatgattatccgcttgatactgtgagtgatagctccttcacctcgtgccaatattctgtgttccaatgccaagtcacatattctgagcagcaactggagatttgctcatgtaccgattcttcaaggtcataggatcatttcgggtgatgaagactctgaaatacatgtggaggggtacttatatggagatgcatggtcttagtacttcagcggtcaagaacttatcgtcacctgatgaaacaaggatggttgtg

SEQ ID NO: 358802 - DNA, 264 bp, Zea mays
  unsure (1)..(264): unsure at all n locations
ctgatttattctgtcaaatctattgttttcgaaggtgtcaactggtcatagtgccttgtgtttcggtaagatggtatttttcatgccaacaaatttggtgcttatattgttgtgctatatagatatcatatcataacatgacaaatgctggtgtagaatgcatcttttgacattgtatgttgtgaaccaatagcccattgctatctgttacttgagaggaatttatggctgtcatctctacatctctgttanaaatttgtaaaa

SEQ ID NO: 358803 - DNA, 263 bp, Zea mays
acaacgtcgcgacgtcctcgtgggctattccccctccatcacttcttcccgtcgagatgcacaacaccgcgagatccatccaccttctccagcacccccacccccgctcaaatggtgtcgcgatgtccgccaccaacagcgccccttcccccctctcaaacaacgtcgcgacgtctgcgagttctgtaaggaatgatgaataactcccagtcgtgattattcttcttcagccttctatccttccggttctatctggtgcaggt

SEQ ID NO: 358804 - DNA, 171 bp, Zea mays
aacaaatcagatgtgggaagatcgtcaaaaccactatgcttcctaatttgttattgtttttcttgctgtaatttttatttatggacattaatatatggacttaattaacgaatccacaaatggggaagagtaatcctgcatatgggcacttaagtttgggctaattaatgt

SEQ ID NO: 358805 - DNA, 185 bp, Zea mays
cagcaaagcaatagccaacagctcccacagcaacatcagcttcaggaacctgctgtctctagacagcaatctcaaagttcgaatcaacatcttcaacaagaaaagccacgaattggaagtatcgacagctgatggcgggcatagccaaagttcatattcaggggacgctgtaacgagatcagaca

SEQ ID NO: 358806 - DNA, 152 bp, Zea mays
cagtgactcgcatgttatgttattgcaacagatctggtatgaaaggcaagctcatggctgagatgccaatcgagtattagagatcacattatagcatcataggatggtgcaactactaacgtatgttgacacctccgtacatcgatcgatta

SEQ ID NO: 358807 - DNA, 123 bp, Zea mays
tgcatcaaggtgatcctactaagtaccatcagcaataaatgttcaaagatgcacttccagatgcggaaattcaagaagtggatgccgaataagaatgccttctttgggatcaccagtgatggt

SEQ ID NO: 358808 - DNA, 275 bp, Zea mays
catatggttctacgacctacacgtactgctgctactactgcgtgctaactttaatctgatggcagtccacagctagctagcacatcacctcctgttcgtaatgtgcttatctatatgtgcaccgaccggaaccggaggcgtgcgtacgctgatctgtcacgaggcctactagtagttaaatgtaacgtaacctgcaggcaattaagcagggcgctgctagatatagcgtaattaattgtgcgtatgggtatggtggttcgattatcggatgtgta

SEQ ID NO: 358809 - DNA, 271 bp, Zea mays
gatcatagttgtgtgatagaaagtatgtaccttgcggtatacacgaattgtccaaatcagattcagacctgattttcaagattttctctatctcttctgctaaattttcagcatttttagtagaaataaagtatgcttcatcggactgtgatgctcgaacagctattctgttgaaaattctgcatagagtggaatagcgatttgatatcttgactttaggatcctcatgtatattgcacatgctgcttatatgtaggacttttgcatcaac

SEQ ID NO: 358810 - DNA, 265 bp, Zea mays
catgcgctcgcggtgacggcgaacagcagaacggctgccactctcccctccaacctagagcgctagagcactggacttcggcactcccgaatcctcgaagaagagagagagggccttggcgttgttccaggaggaggccctcggtgccaggaaaagcccggacccggaagctcagatgaccagcccatcttctgtactgagcccaccgccgtcgttgaaacggagaacgattcgggactacttcgctgccagtaccgtgtcttga

SEQ ID NO: 358811 - DNA, 256 bp, Zea mays
agcccaagagggcatatttactgtcatagaaagataaataagcattccggtacgcacatgctgcacttgcactttacgacctgctcttgtcatcaaatctgctttccagcctggcagctgatcaggaattctatccacaataggctgcacctgatccttggtgagattgttcagggacagaggcagccccaggtatttacacggagaggtcgagatgccacaagggagcagatctgtgcttgaagtatatacacgg

SEQ ID NO: 358812 - DNA, 280 bp, Zea mays
gtgaagcaacggctggcactctaccagggggtcatccctattcacatgcagttctctgacgacgcagaagaaactttctccagagcaattagcagcttgctggtaaggccatgtgctgtgaagtttcactgctgatcttttgcagtcagttcatcagataaacacatctcggctttacttcatcttttttttttgttcttccgttttttattttgactgattattcatggattgaatgctgaacagaaagcacaatatgtgaagaagggagactacgtca

SEQ ID NO: 358813 - DNA, 272 bp, Zea mays
atatcatgtacgatcatcagcatgccgttggattctctggtgttctgattgccatgaaggttgtgctgaacgcctggtcagacgatttcgtgtatctgcacgggatggttattccagcgaaatacgctgcctgggcggagttgatcctcatccaggtttttattcctgggacatcctttcttggccatcttggtgggatacttgctggactggtttacctttggctgaagcaaaaaaggccccaagccagatccgatcactcctttgatctc

SEQ ID NO: 358814 - DNA, 218 bp, Zea mays
agttcaacatcaagttgcgcagtgttcatgacttcctcagttcgagatgcccaggtacctgttcactcttcggagcaacctatacaattgtcaaattctaaacaaggcctggctggtagtttggaggttcctatggagttgacattgcccaagctggacccattggtcagtattgaggatcctgctgaagagtcattggccatggcagacccacaggt

SEQ ID NO: 358815 - DNA, 276 bp, Zea mays
caatctccttaatgacaggctcctcacttggacgcagctcttcaaagagattgagctattcgtgtagcatggctcaatctccttaatgacaggctcctcacttggagattgagccatgctacacgaatagctctgccaaatgtgaatcggaaattcaacaggttagcccaatgaccgatatattcctcgaaacgaaagccaaagtttactcaaacaaaagccctaaagctgaaagcgacgccgaagatggcagcagctgggagacaataagccatg

SEQ ID NO: 358816 - DNA, 275 bp, Zea mays
aataaataactccatgattccaaattatgggcattacctgctgcggttcgactgacacttgatgtgcaaatccttatgtgcagacaaagaaattcgcaggcagcaggatgttacatgctccggaagcaagtaactacgatacaggtccaaaggactattcaatttataacaagcataagagagtacaacaatcaacaagaatggatgacaaagggaaggccacacaaatgtcaccttgggatcgtccttccatctaaggattctctagcagctga

SEQ ID NO: 358817 - DNA, 276 bp, Zea mays
atcgtaaaaagaaagaggaagaagagagaagaatggaaagagaaagggagaaggaaagaatacgaattggaaaagaagattaaagcacaggagctaagggatcgtgctcgtaaaaagaaagaggaagaagagagaagaatggaaagagaaagggagaaggaaagaatacgaattggaaaagaacttctggaagccaaaagaattgaggagcaaaatgaaaggaaacgcatgatagaactgcgaaaacttgagaaagaggaggagaaaagagctaga

SEQ ID NO: 358818 - DNA, 174 bp, Zea mays
ccgccctcctagtcgaggaggctacgcttgaggtctctaatgacgctgatgacaacgaacggatcttagaggtgtaccagaagctaaatctccgggactcatgatgccgcacgtgcacgagcttccaagattctcacggggctggggttcgatcaggccatgcatgccacatcc

SEQ ID NO: 358819 - DNA, 128 bp, Zea mays
acctggagaaagtttatggcttccctccaggtactcaaccgctccatgctccccttgcgacagcttgaacatgttgcggttcagtagctgacgcgagttcatggcttccctccactcgtcgaaagtct

SEQ ID NO: 358820 - DNA, 197 bp, Zea mays
agctaattgttgcacttaccagtttcatgcgtcacgtccgaagcgtgtagagtagctcggtttttctttcccatatgtcgtctaacaatcaaggagttaccagctgcgagaaaacatctaagtctaacatggcatgaagttacatagatgtagcactcatggtatcacttcgctagctgaactgaggatgattgatt

SEQ ID NO: 358821 - DNA, 116 bp, Zea mays
attacgattcccaatccagcaaaccctaccagctttttgaaaactcagacgagggacccgatgagcacccaaggccggacgaagaagcacggcggcgatagaatgcccgcacgagg

SEQ ID NO: 358822 - DNA, 145 bp, Zea mays
cttcacagacggtagacagtgaagatgtgataagccgtttacgactcaaaggctgtaacacatcttcacagacggtagacagtgcctcgcagggtgaggctaatgatgtcaatcctccatctaagaagcccaaggaggaagaatc

SEQ ID NO: 358823 - DNA, 196 bp, Zea mays
aagacccgtaaatgtgggaaatctgcatcaaggccatctgcgatgtctagtgatgacagcttccttcagagagactgcaccgctgaacaagccgtctctaagcagcttgacagtcagcaggtagcgaacttgagtctagggctgcccttgaaggtgaacttgctgaacttggcattccctcagagatatactcaac

SEQ ID NO: 358824 - DNA, 283 bp, Zea mays
acacagaatgctcatttgctatgcagttgcagagaaatattcgagttactggcaatgaagagcttgaaatgcatcccatttctgcttggaaagaagcaaagctacagttttatggtgggcctgatggtgctgccatgcagagaaggccattaatccatgttaaggattccgatagtttggcggatgtggctgactataatcagaaatgaaatatcctcagttcctatctttaagtgcatgccagattcatcaggagtgcctttccttaatcctgcaacctcca

SEQ ID NO: 358825 - DNA, 285 bp, Zea mays
aagaagaccgccttcgaactcgaggcatttgagactagcttcgatgcagttgcacagcgactgggagcagcaggagagaagctcaagcaaaggcaggaggggtttcctcaggtcgctgctcacgaggcgccggtggaggaacgacgagtcgtccttgtacagttacttggatgagtactgattgctggtgttggaactgaaaaaagtctggtgttaactgaatcttctatagatggatgcgatgctctctgctttgccaaaaaaaaaaaaaaagggcggccgccg

SEQ ID NO: 358826 - DNA, 280 bp, Zea mays
cgtcgaacaggagtcaaagtcagaagttcttcgcagccagttgcaagtcgctcgatcagaggctgaacatgccattcaacttaggcaacgatttgatggtgccgttgtctcaaatggcacaggatctaattctagcctgctaatgattaccccaacagatcacacagctgctatgatacagggttctgagtaaggctgacgtctcctcagttgcaatcactgagtccagcaacctcgcttgcccctacagtcagtgcagtgggagatgagccgaagagaa

SEQ ID NO: 358827 - DNA, 278 bp, Zea mays
agacaatcctcagccttagatttctcaagaatacgtcctctaaagggctggatatgcgcctgctagtcatccagacattcagaggacgtattcgtgagacaagcctcagcctcagagttctcatgcttcagtacgggattgtgtacaagcctacaatgacagagcatgatacttcgcttgcagtttggcttctcatgggtcgtagtcattgggatggttcgtcggttcaagcttcttactgcagctcctacgaagtcgacagccttgccgactttcgt

SEQ ID NO: 358828 - DNA, 102 bp, Zea mays
ctcaaactgttcctgggcaagaagaacagtttgagatgacttcaagcaagatgttttaatgttcgaattggttctcaaactgttcctgggcaagaggaggca

SEQ ID NO: 358829 - DNA, 261 bp, Zea mays
tatatttttatttaaatattaattttttgtggtgttacacgcgagctgaaaagagtattttcttaaatatcttattgcgatatcctaatttgtatcgacttttcctaaaggatgtcacgtacaaataaaccaaccaaatatacctcgatacattatattagctttaattttgtttctcattttttctttctattttaaatttaaaattcaagtctaatttagagctaagttcaaatttctatttcgagcataaattgcaac

SEQ ID NO: 358830 - DNA, 276 bp, Zea mays
gaagcatggtgcacgtataccgacccggcaggaagtgctggacaagaaagaagccatccaggaggcctataattttgtgtattcagctgcaactgtacagcagatgctgcgagagaaatcagctgtgagacgccctatcaatattgctgctgagaaggatcggttgaggagtgagttggagatggccctgagccgtaggaatgaagctgaagcagagaggattcgtgtgaagctgaaaaatctgcaaagcaggccacaaccggtgtcaaaggataa

SEQ ID NO: 358831 - DNA, 272 bp, Zea mays
gtcaacaataagcctatcttgcattatcatgcaaggggagcgacgctcttgaacactctcccgtgaggacactaagggccaccttggacacaaggagagccaaaaccaagggggttacatacaattaataactaattatcttattcaaatcgcacccatatggattactcaacgaaaagacgtggtttttaagagaatttgacttgtcaaactagccctaattaatggtaactgatatcatcatcgataccagcgaagatgcaaatatggag

SEQ ID NO: 358832 - DNA, 269 bp, Zea mays
ccctagcttatcatgtatagcatcatcctggtctcttatcctttcttatatggccacaaatctaactcaacatacacgtttccgcatatctgagaagttctgaactcgatccgttctgtcttgtctgaaaagttccatatctgcaacttgaatccaaattaatggtaaacaaagttgatacattgattccaaatggtttacttttagatttaaaattcaactttaagtttaaaggggaaactacatctatgagaaatgagcttacacca

SEQ ID NO: 358833 - DNA, 272 bp, Zea mays
tgctcttggcaccctgatgactgaaggcgcggtggttatccatggagacaacgtgaggagagtttgatgtcttgacggccatctgcggtgatgcttctataaggctccaacccgccacttccttgaacagacaaggttccgaagataactgtagcacttagccgtaacttgtggtccgaggtctaaactggtccagatttgtagcagtattgctagttgtagattttttttttaaaaaattgttatcagaattttgttctcttgctattgtc

SEQ ID NO: 358834 - DNA, 247 bp, Zea mays
ccaaacgcatctactgagtgaggagtattcgtttgattcattcatttatcaggtgcaatcaatgtggcagcgctgctcaaggcagcactgtagcaaagccactcattgcatttttttttgcagtggagccgcgatcgacgtttggaacgttcatcctgtaccgtagcaaaaaaggaattttgttgtatagaaactagaaggaatggatgcatcggcgattgatagacacaaaaaaaaaaacccctcc

SEQ ID NO: 358835 - DNA, 252 bp, Zea mays
gggaaggggaagcctgctcctcatgtaaaaccagtttgagtgattggattttatatgccagagtatctctctttttttttttcccatccatttgtaggtgtaggtaatatagtagggttcttagagggatttgtaaagaggcaggcagagttctggatgttttctgtctattatgtagttttttttacatcttcaagtctctgtaaagtacgctatgtaaatacataatgacatccagttcggagtgcgatg

SEQ ID NO: 358836 - DNA, 255 bp, Zea mays
atcccacggcagcagcagcacgccaacgcagggaacttcccttccttctcgccagcgcagggagcagctagcagccatggcgctcggcacccttgtagcagggacaacgcccttccttcctccctgtttctgtccatggcgagcaggagtttttccctcccatggccgacggcttccatctccatcagccgccatggccgagctcccttggagcaggcgctccccaccgtggcgccctcctccctggcgcttgct

SEQ ID NO: 358837 - DNA, 271 bp, Zea mays
ggatagcttgttttacccttgctatcctacccgcattgcaaccttggtaggatagcgggtaagggtgtggtgttttgctctagcggagaatcagttcagaaatgcaattatagtcaattactaccagacaatggctagtgtccctagccagaagcttcattttttcaagtttgaattggttcatgctcaaacacgtgtttgatggatatttactccttctcccaccagtttttggatgccccctactgcaacaccaactgatgagcatgtg

SEQ ID NO: 358838 - DNA, 273 bp, Zea mays
agcgtctagaggctaagctgcttcgtacctggcaactcgtaggcatggatgcctgggaggacacaactcctaaattgttcttaggtagtcatgaaacatcgtggctcacacttccatggtccaactagcgggccctaaggcctagatatgcacccactgatcagagagtccatccattctaccagtgcactgtagtagtgtagtagatcacgaaccgtgagggaagagacgcaacacaaaataaccggctgagttacattccaggagaccgcg

SEQ ID NO: 358839 - DNA, 261 bp, Zea mays
cccatgtctaactttaatcagcagcagcagatgttcaaagctgcggctcctgagactgatattcagggtgcagatcccagtaataacacactctttggaataaacggtgatggtcagctgggctttcccatgggagcagatgatttcttatcaaatggaattgatgcttccaagtatcagggtcatatttcaacagatattgatggtaactacaggatcccaaaggatggccagcaagaaatatcgtcatccatggtttca

SEQ ID NO: 358840 - DNA, 268 bp, Zea mays
gacataccatgcacaagacggtctttggatcttgtggttgtattatgtctgtctcatgtgcaatgactgtacgatgtccttaggtgcttacattattgtcactcagtcatagcttgtgccagtattctatcatgttcccttggttatcaatgagagtctttatgtgatactaatgcttgatgaattgctttcttatccataactcaatgttctcctggtaggactgatgctcaacatttgcataggtggcaagaggtttaggtgtatt

SEQ ID NO: 358841 - DNA, 259 bp, Zea mays
attgagaaaacaacaaaaagtgttacacaacttgatttgatgcctgattcgctaagccaggcagatctaacagttctgcaggaattacctgaggatgtgaaggctgatttgtttagtgcacttccactgcatagatcaggagatcctgcatgcagcacttccaatgtatctgaaagtaaatcatgcaatgtggttagagctgaaaatagatcttctaatgatggtggaactgatgatctgaaaaccccaaggtcttttc

SEQ ID NO: 358842 - DNA, 260 bp, Zea mays
agaaggaggaagttgtggataacaaagtcaggtgcatagacaacatcaatgataccttaactcatcaagagtctttgcttaaagaaagattaagtgggctggaggaaacaaacaaatccctgctggtacagtctggcaggtgaaggtgttggaggaagcttcaaacaatacttctgaggaaaatcagatgttggtaaaaaaaatatatgaacttgattcaagactacaagcacttgaagcaaaggctgctcctagtgaag

SEQ ID NO: 358843 - DNA, 237 bp, Zea mays
gataataaatctttattatcttcgcactctcatgagcattacatggcattcattcttatttatacctatatggttatatttagaaaatgaagaagagatcgaagggaccgaagagaagacaccaccaccttcggaatctcaggccggaaattgttgctacttcgatatctgcgggtccgagcctgactcacctactaacgaaggcaagccccggtgcatttgccacctctccttgat

SEQ ID NO: 358844 - DNA, 274 bp, Zea mays
cgactactacgaggccacaggcaaggacgtggattgtgtaaagggtagtaagctgaaggagcttactactaaagtgcagaaagtctgaaaaaaaagcaactttgttttgtgttgaagaggtgtagcttgtagcgtatgtctggagaagcatgttccatgtgagttacattttggtgggggccttcttgaaaagtggccatctctgcttcgccaggcagttggacaactggaggccgcggttgaatcaaaggagcggccgttgtttcgttccggt

SEQ ID NO: 358845 - DNA, 275 bp, Zea mays
gtttaccagtagcaggcaggtaacatgagcacaaagatgttactgtgacactgtccttgatgtactctacaatgacaggccccccaacccaccccacccccactaggtttattatactaaatgcgaggttaatccacgattctggtaccaggcacatgtcacatgtaaagagcagtacagctacagcctgctgcgagattcatcagatattgtatactactaggccactagggaggcccagtgactgtagaagtgcacatgaccatggcagttgt

SEQ ID NO: 358846 - DNA, 273 bp, Zea mays
gaaactcactggctccctctcctttccccagtccgcggcgctcgctccgttcacctcggccgcggcgaccttcgaggcgacgagacgatgctgcggctctcccgcttcctcccctccgcctgcaggaggggttttgatctgaaagaatctctttggagtggttcattgacattccaacaagctgtttccactgcagcaacaaatcttgatggtgaagcttttgtctctgttcttgttattaaccagccttctgcatgtttagtgctaacctca

SEQ ID NO: 358847 - DNA, 269 bp, Zea mays
aaaatggacttggtgacaagatgcatcgatttatctgagaatcgattatgcattatgccaaaacgagaaaacacaattacacctgaacgtctccgatcattcttttctcgcttttcagcgtcctgggtctattcgaaaatactcacattaggtgtctctgtttatgaaagagaccgcagtaagttgcaataactgctataattacggatcagatcaaacactctcattagatgcatggttttcgtgtttcatagaattttggttgaaag

SEQ ID NO: 358848 - DNA, 269 bp, Zea mays
gtggaaagaggcctgacgtcattgctgttgctacagagaacaccacagcaggtttctcagaacacctcgacactaaagcatctggaaattttggaccgtcctcagctactagccacctgagcaggagtccagctacgagtcttgaaggcagttataaaacacacccagacaacccagaggtggatgctgaagaaatccttcccgagactgtgagaacaacacccgacgatgcaaccacaagctccaatggcgaacattattctcttcag

SEQ ID NO: 358849 - DNA, 270 bp, Zea mays
aggaaggagacggatgactcaaaagcacgaaaagagcctaaacctaaccaaagtttcagtattgtagatgctgcttctgcttctgttcatggcaggagtgcagcagcagcaaaagcaacttctgctgaaaaaaccgctgctagaatcgatctgcatatggcaggggaacgagctcctgtaaatgctatactggtcaaaagtcgttacactactggagctgcgtcgcgttctttcacatcgacttcttatgatcctgttaccaaaaatgaa

SEQ ID NO: 358850 - DNA, 293 bp, Zea mays
tgcagttgatggtcttgttaaagtttggagaagtatccagaggaagaggatatatacggtattatgttttccattggtaagaaccatgggagcttttcagctaacatagctaaacatttggccaaagagattactatggcatctgacggagagcttatcttggacaaaccaagggtcaaagcattgttaatagtgtctatttcagcacctttttctaatgataagcacaagcagctgggtataccttcgattatcttcttgtatgcaattcccctactggagaagatctcgtg

SEQ ID NO: 358851 - DNA, 279 bp, Zea mays
ggtttcatcgcggcacatcagtcgttagtcataataccattaccaaacgcaaccaacgataaatccacgtgacataaatagatggagcccatgagagtatggctaaaaaaataagaatgtgatcggagttgaagcagagattgctggcagaagagcatcacatgagaattttcttcaatcagagaattattttatgattaacatggagattatcaggtcagagatttatacgagagtggatatgaggggaaccaaccatgagatcaagtttggcaactt

SEQ ID NO: 358852 - DNA, 278 bp, Zea mays
cccttcagcgtgctgttaaattgattagattgatttcatcactgcggtggatggtgtggtagattgattagattgatttcatcactgcggtggatgcagtcaatctaatcaatctaccacccccttcagcgtgcgtgttaaaaaaaaaaagaaaaaagggcggcccccgataattgcactcatcaaccggggatttaattccggacggtaattttaaggcgaacaaggtttccccaaaggtagcagtcttagacattggggaaatcctggccctagct

SEQ ID NO: 358853 - DNA, 271 bp, Zea mays
gtgtaagaccgatcttcccataccaatcatcttcctcgcccactcaatgcatccatcctcgattgaactagggcttcgcttcgctattgcctctcctggcttgtgtagtgccctctggggactgctctagttcgccagatcgtagccagatcagtcaagatcaatgctaaggattgtgggtgcgcagtggacttatgtgcattcggaagaaccaacctatactaacatgtacgaccgaaggacagactcctttccgaatggtctatggggc

SEQ ID NO: 358854 - DNA, 140 bp, Zea mays
cccttcagcgtgcgtgttaaattgattagattgatttcatcactgcggtggatggtgtggtagattgattagattgatttcatcactgcggtggatgcagtcaatctaatcaatctaccacccccttcagcgtgcgtgtt

SEQ ID NO: 358855 - DNA, 276 bp, Zea mays
acggctcgagaatggtggccgtttcttgttccagctgctgctattgtcctaaaattgggtagaaagtgtatgacaaatactcaagtacatgcagttcgtcctgctgttcctggattgtttccttacatggtcccaaacagtgaatgttccttgctacttctgttgctggaaatatgccgtagttatattctggtgaatactagagtcttgattatgatatgtaggctttgggttatgacctggcagctaggatcaacttttatttttgttagtttg

SEQ ID NO: 358856 - DNA, 195 bp, Zea mays
tctcgagccgattccgctcgcggttctcccctccactgcgattctccgtttccgacttggctccggccgccgacttcctgtcggcgtgcgcctctggttccattccccgtgcgctcttcctgatcccgaggcgtcttctgctcccaattccgctctcatctgcgcgctgcgaccgccccgcagctgcagcctctt

SEQ ID NO: 358857 - DNA, 278 bp, Zea mays
gtctaaatgaatagatggagacaacaattggaaagcactcgacagctataacagttggaaactgctcgacagccataacagtcaagaggagcttgactgtactacaaatagcaagttttctcctaaagaaataccatgtcctatggaacttgacggttttagtagcctgaagcttgtcagtcataacatcttggaagaacttgataatcataactgtctaaaagagaacggtaatgaaaatagttctaaagagctggacaacaatggaagtccaaaag

SEQ ID NO: 358858 - DNA, 273 bp, Zea mays
gataccgctataaaatattgagtgaactatcaaagtcattttgttatattactgaaggtaacctaggtaatcatatattgtggaccagatttcttatgtatacgattatacttttttttcttatgtttattatactactattggtatgaatgtgagagttcaaatgaagaagatgaatactctccaaaggtgtgagcattttaagtcgccttgtccttttattttgacattcccttaaactttattttgtatgatattctgatgttagttttt

SEQ ID NO: 358859 - DNA, 104 bp, Zea mays
gggagaacttggctgtctgccctgtctgcaagtacctcgtcttctacctggagcgacatagcagaagaccataccaagatgtccaagatggcggcggagcaggc

SEQ ID NO: 358860 - DNA, 231 bp, Zea mays
atctctgttaggcatctaactgaataaatgatctccattatggactggttatattattttctgtgcgatcggatgggttaaagaaaagacgtgaaatggtattttccagtatggactgtataaatgtaattatattcctatgctggtacgtctgtctaaccttgctattacacttctattatggctttgtgtttacccaaagttccaaacctttcaggtcctgcttcgctt

SEQ ID NO: 358861 - DNA, 232 bp, Zea mays
caaaaaacaacagtcaacaacctgagcttcttgattccaacagatggaagaaagataagaagcactggatccttggaagttcattgtttctaggaagctctatcttgctgaacattgtcctgatctctgttatactcttcggtacttactgtactataaccataaatgaaagcccgtctgtgcagtcatcaaacaatctaggattgcccctgaaagccttcaattacactga

SEQ ID NO: 358862 - DNA, 234 bp, Zea mays
gaggaatccgttcctgcgtggcctagagaacagccgtgcgaaacgaaggaaaaccgatgaagctcgcccgagcgaggcggccgagtcagagcagcaggaggagcactcgctgactctctcccagcactcctcgccgtcgcagtcagaccaagagcagaacggcggcggagctcacaagctctcgccctcgcccaacgcgtcggtctcagcgctgcaaccgttcgctcgcctcaa

SEQ ID NO: 358863 - DNA, 224 bp, Zea mays
cgctggtgaccccgagctcgggcttcccctccatctccaccaacaacgcgcggctgggccccaacgcgctgctctccctctccttcccgcccaccttctggtccggccgcgtcgccgcgcgcacgggctacgacgccgccgcgtccaactgctggacggagaccacgccgcacgccaccgacgtgcaggtcaccgtccacgacggcgggatcctggaccaggcc

SEQ ID NO: 358864 - DNA, 228 bp, Zea mays
ttaacattagccgagtcttttattgtcttagtagattttgaaaatcattgaaattctttgttagtattaattagtcatgatgtaatgcagtcaacagtgatctgtgttaggggcttagggctggttgcacttttatatttttgaaccgagcttattgtacttaccttttttccaaaaattattattttctctctgctagcttccaactttgcacttttcttgagaaat

SEQ ID NO: 358865 - DNA, 231 bp, Zea mays
gttcttaagagtgttcgtccagaatcatgtctccaaattcaacaagcatccatatgatcttttgagccagaacagaccaatacagattagccgaatggctacaccttctgaatatgtcgttattcgtcgtcagtatcagtgctcttcacaagaggaggttcccaagataagagcccaagatgtagtgtatggaagcatgaagacttgcggaaaatttgaggtcctattatg

SEQ ID NO: 358866 - DNA, 244 bp, Zea mays
cagtgctggctgcgctgaaggtttccatgcataagatgctggtgaagaagcactactcggaagagaggagggagcagaggaaaagaggtaggaacgacaagaagatgaagaactagctgaaaagaggatgaagaactagctcagcatgcggtatcgagttgctataacggttctcttttttgtttgtttgtttttttagagaaacaaaaacagatattactgtagtatcagaaaccgtaagagt

SEQ ID NO: 358867 - DNA, 242 bp, Zea mays
attggctacttggttgcacgtcggaggcggcgtgggttcaaggttggtttcattgacaggtggtatcatcaaatctttttctttcctttatttcagcagtatcatgtgtcaatctgtttgcttgactttaatctatatcaatttctattatagtattatttatacagtgttttttgtccatataaattgcagctgcagtcagcccatgtaattctgctattcgaaaacccccattctagcag

SEQ ID NO: 358868 - DNA, 234 bp, Zea mays
atcacagacgcttaatgtaacgtgtggctaaacagaatcattaatggctgcattgtggtccaactaatattgttgctactttattgtatatgtatatatctatgttgtggcttaatatgtctgtaattatactcgaaaataccattatctgttcagtgtgagttatatatataacttttgctactttgccatataattagacattgtacatggtatcgataggacattattttc

SEQ ID NO: 358869 - DNA, 246 bp, Zea mays
gagcactagagcccattaagacatcatatgcagtgaacatacactcagcctcttgtttaagcagtacgtatactatttcagttgatgaacaaatattgcaggcttcttgttatttgtaatcagccactgattctggcaggatgcacggcttctgtttctctgtgcggtgcatatctaaaagtgcacgtagtcattttcgtctgtggtttgatttgaaaccaaagcagaggctggcctcaatgttag

SEQ ID NO: 358870 - DNA, 246 bp, Zea mays
ggttgctacacgtatatattctgaagaagagatcgagatgaccagcgtgtggaagaccaaggttctgcctggcctcaacaagatctttgacaaggatggcaagaaggctgcagctgcaggcttcttgaagtccttcaacaaggaggagattgacaaggagattgaggacaagaagacagagctggagcccaaggtcgtggaggcctacgaagcatctcctcctgaggtcaaggctctgttcaagga

SEQ ID NO: 358871 - DNA, 232 bp, Zea mays
aacttcgacctagctaactctgtctctagcaaccgtgcatacatgtctgagatctcttttgcggtatcaggagaagggccatcaatacagccgtacaggagattggattctgcatttttttattccacctcacgaaataagtagtaaaatctttttactgatacgggaaataacggatcatgccatgctccggagtcgatagtttttttcaccagacggggcagtgcttggc

SEQ ID NO: 358872 - DNA, 158 bp, Zea mays
ctagcagcaacactgcagctttattgagagagcgagatttttactgctgtttcctttcttaaagaaaaaaaattcttggttagtgtatctgaacttatgtttcctttggaatatttgcttttcagtatgatgtgcccaacttaagtacttttattagc

SEQ ID NO: 358873 - DNA, 233 bp, Zea mays
ggagcacgccactgccggagcctctgcgcctgcgcctgcgcacgcgcgcgcggggcgtccggcgtgaggacggtggcggcgtgcgcacggagtcggaggagcaggagcagagtcagactcagacggcaccgcggacgttctacgaactgctcgggatctcgtcgcaggggagccccgatgatgtccgggcggcctacaggaggatggctctgatgtaccacccggacgtgtcc

SEQ ID NO: 358874 - DNA, 234 bp, Zea mays
tctttcagtgcgaggatagctaggcaggaggacgaagagcaacttcgcttgattgaggaagaagagagacgcgagcaggagaggaagaggcgaaagatggcacgaggccgatagtccaacacgcgtcatatttgggtgttataattgcacagacctgattgcctgaagacgaggcccatggtcgatcatacgggcgcgttgcagacaacaggaaaacttgccacgtggattata

SEQ ID NO: 358875 - DNA, 222 bp, Zea mays
gccagtgccagtgccagcgcgtcgtcacttttccgcaacgccttcgtggcctggaggaaaaggtcgcgtgaagtggagctgggacatggtgagctcgcccaggacgatgccgtgctcgcggaagaggtgaaggggctggcgaggctgttcccgatatgggcgacgtgcctgctctacggcgcggtgttcgcgcaccgcccacgctcttcacgaagcaggcgg

SEQ ID NO: 358876 - DNA, 210 bp, Zea mays
ataacatgtactgtaattatggccactctacgcagatggaacccgaacgggaaaccagatctgtagagtggccataataacatgtactgtaattcagttcatctacatgccggaccagaagctggggaatcgtgtgaagcttaataattcagtttatctacgtcccaaaatgaaaaaaaaaaaataaaaaaaaaaaaaagcatgaccaac

SEQ ID NO: 358877 - DNA, 269 bp, Zea mays
cccacgcgtccgcgagggtgccacacacacacagcacagacccacacacgcgggcgcgctactagtgagagtcggagatgtcgccgcggccacacttcctcgtgctcaccttcccgttccagggccacatcgccccggctctccgcctcgccaggcagctgctcgcggcggcgcccgacacgctcgtgaccttctccaccaccgaggtcgcgcacaggcgcatgttcccggcaaagcccaacgacggcgccaaggactccgacgaagac

SEQ ID NO: 358878 - DNA, 100 bp, Zea mays
cctgtgtctctctcgtctcccaacgacgcgattggcgattccatttctaccccgagacctccagccgtccgcccctgaaccctcagccttctcagtaccg

SEQ ID NO: 358879 - DNA, 120 bp, Zea mays
cccacgcgtccggtgtatcgctgggccccggtctcgtgaagcatctctcagctcaagccgttgcaaatcatgcgaatctcacagcaaatccctggttgttgcaacaacctcggcggacat

SEQ ID NO: 358880 - DNA, 163 bp, Zea mays
ataccgcccagggcggcaggcatgggaggcagcgccatggctgtgcaaacagcgaatgattcgcgggagaaggcatggaggcggagtggagaaagtggtggagaggcggcggcggaggatgatcaagaacagggagtccgccgcgaggtcccgagcgcgcaaa

SEQ ID NO: 358881 - DNA, 282 bp, Zea mays
cggacggtgggctttggtgtcgtgtttgccgatgtgcttggcttgttttttccttggaggcttcttgcgttaataggtaatgaaaccctgatgcattaataatacctgatgctgctgttcttagcatgcgtttcaactctctgatctgatatcttagctcgcacgatcagcaactcctaaagagctcagatagtacaaatgcagtagacgaatgtttttggaattcagtccctactcgagataatttctgtcgtgaagcgtgtgaaatgccacacttgcggg

SEQ ID NO: 358882 - DNA, 286 bp, Zea mays
ctagaactagtccggacgcgtgggttcaaaatcagttcttcgatcgataagaatggcttgaatggaaggatcatcaggacggacagacttgagtgattccatggagggtatgtggtactcttcctgtacatcagtgcatagtgaccatacaagccattcttatcgatcgaagaactgattttgaattaggtatgttggagagttatgcttccagcattctttccagttctgctgatgccaaagatgtggtaatccaactggccaaactcatatcttcaagaatggg

SEQ ID NO: 358883 - DNA, 278 bp, Zea mays
cggacgcgtgggtgcgcgtgtttatccacgcctcacgccgcgctcgcttcggccacggcggtaatggcggcggcccgacgcctcttctccttccacctccaagcgcgtcctctcgccgccggtgttgccgtcgcgaccccgcactgccacggaaagcatgacgcggtctcgtgcaaggccacggggaaaaccaagcccaaggcgaaggcgggcaagggcggcgagcggcagcataggcgggcgctggaggagcatctcaagcggcgcacccgttccgc

SEQ ID NO: 358884 - DNA, 268 bp, Zea mays
cccacgcgtccgtagaaccctcatggaacttgtaagagaaccttctctatcctttgcagatgatgggaaacgtgtgaaggtctgtgttcaaggctccatggggcaaggtgcatttgctggcatcccacttcaactggcaggaaccagaaaaattttggaattcatggactggggtgactatggggcgaagggcaccttcattaatatcggagcagtaggtgctagagatgttgataaagaagatgatatgtttgtcctcattgctcca

SEQ ID NO: 358885 - DNA, 267 bp, Zea mays
gctcaagaagatggctggcgctgtacgcaccggatcgaagggcagcatgcgcaggtacctcctcctttctcttacctgcagtacccgtagatacatgtatgctgctctgcagtaaccttagcttctgtctctcttttttttgtgacaagttgagttgtagatatccaagcacctaagcctgttgggtttgtgatctgttcatagagtcaacttctggacccatagtcccgtgctaactaatttatgagggacaaaatgctgacagga

SEQ ID NO: 358886 - DNA, 261 bp, Zea mays
ggcatcaccgccgcgacgacgatgggagcctcgctccaagccgcggccaccctggtgcagccggccaaggatcggcggccgggcgccctttgcctcgctggcgtcccgcgcgtcgtcgcaactcggctgcagggcgtgtcggcgtcgacgccggctccgccaggatcaggtgctccctgcaggacgtctcgagcaggtgcggtcgacgccgcgaactcggccggcttcgcgctcgccacgtcggcgctcctcgtctcgggc

SEQ ID NO: 358887 - DNA, 273 bp, Zea mays
cccacgcgtccgagcacgtccagccgttcctccccagcacgcgcatcacctgcatcaccgtgggcaacgaggtgctctccggcaaggacacgaccgccatgcagagcctcctcccggccatgcagaccgtgtaccaggccgtggtcgccctgggcctcggcggccaggtgaacgtctcgacggcgcactcggtcaacatcctggccagcagctacccgccgtcgtcgggcgccttccgggaggagctcgggcagtacatccagccgatcctca

SEQ ID NO: 358888 - DNA, 268 bp, Zea mays
catcgacctgctggtggttttccattcatcatcgatcttcctgcgtctctgaactttttctgctgtgtctgttggccgggagcagaggttgctacacgtatatattctgaagaagagatcgagatgaccagcgtgtggaagaccaaggttctgcctggcctcaacaagatctttgacaaggatggcaagaaggctgcagctgcaggcttcttgaagtccttcaacaaggaggagattgacaaggagattgaggacaagaagacagagc

SEQ ID NO: 358889 - DNA, 270 bp, Zea mays
cccacgcgtccgcccactcgtccggtggaccggacgtggacgaaggagagatagagatatagagaagaaagggcgccgcgggggccatggctggacacgctccggctagggacaagaccacgatcggcttcgccggtacgtgcagcctggtgagccagtttgtcaaggagaagaagggcggcgtgcaggggctcggcggggtcgcgatggcgccggcgccggcaggtggaccaggggctttcgggccgccgaccaccgtgaagttggtgt

SEQ ID NO: 358890 - DNA, 241 bp, Zea mays
gaaacctcaaaacccaaccaggacagcgtccacagaaagaagagagatcacatagagtggagtggtggacagaccatggagctctgcgtgtgtacacccccatcctccgtcggctccacctccgcgccgatgtcgttcgccccgccccgacgtggcgcgtctgcctggaccggcgttccggccgaccgccggatggcaagtcgagggtggcggtgcgccactcggccgtgcctggcccggt

SEQ ID NO: 358891 - DNA, 163 bp, Zea mays
ctgcagggtcgtgacggtgtcttggtcctctgcggccatggagttcgctctcgctctcgtggaccagctctacggcaaggtgcaaggtcgacgagattgccaaacccatgattgtcatgtactaaccagggtacgccttcgagtaactgaacccggttcagtg

SEQ ID NO: 358892 - DNA, 260 bp, Zea mays
tccgtgatcgggtggccgtccgtgcccatccccggcggctgcccttcgacccgtccctcctccccgcctgctctcgtcccgtcctctactgcctggaggtggccctgtaccagtacgcgcaccggcccgacgacgtcgacgacgacgatgaggaggaccaggcggcggtgaccgtgagccggatgatggcggcgctcaagcacgtgcggggcctggagttcgcggcggacgtcgggtacgtggacttcctgtcccgcgtg

SEQ ID NO: 358893 - DNA, 276 bp, Zea mays
tcgtctagatcgcgagccgccgccctttttttttttctccttcatttttttttaaatataaatccgttctcctgccatggtatttagcacgcacaagcaacgcttgaataagtcttgcaaattcaacacaggttctacgaaagtggctttggctaaggaacgactgcaatgtcgagaaacgacactaagttctttcagcgcttcccaccaccgccgcccaacttggggcccttggaacccttctggaccgcaccctttgtctgcgtcttctgggac

SEQ ID NO: 358894 - DNA, 275 bp, Zea mays
ccgctcgaggcgttgcgtccgtcgcttgccgttagataactgctggtgagccagtgccgttacataactgaacccgtcggcccgtgatgatatatatataacacctggagtagctagctagttccacgtacgtgttggtgttgtgttgagtagtctacgtatgtgtacttcgatctgcattgtgtttgtgtgtgtctaactatttctacggtcgttgttgtcgctacacgtttttacgtctaatactatattctggtgaataaattgaagttatt

SEQ ID NO: 358895 - DNA, 276 bp, Zea mays
cgtggaccttcccttttatttttcaatttttttatatagagtaacaatcttgtacatttatgcttgtaatgcaggtcgacagaaacctctcatttctagacagttatgtgcagcaagccttggaaaacggtgcatcaccttacattccagagagtgaacgctctggtcttacaagtgttggcagctacagaagccaagaacaacaggaaacatctgcccatactcttagattcgaggcctatgagatgcctaaaccttctttgccactagcaactt

SEQ ID NO: 358896 - DNA, 263 bp, Zea mays
ctgactggtaccttcccgtgagaggatacaaatgcacccggatcgatgaaaccaatctattccattccacacgaggctaagcacatgcgtaccaaacccatggtgtccgacggctgtcggcgtagtgacggtgtacggcagcaactacgctaagcttctggagctgtctctgcagcccaagtcggcgactttcaccgtctatgtggtgcttgctcttatgctccggttctaggtcttcatggacgttgtgatcccggaactgg

SEQ ID NO: 358897 - DNA, 267 bp, Zea mays
tgcgggtctgttcggtggcggtggtggtaagcaggcggtggcggcgggcggcggagatgagcggcgcgctcctctgcggtgccctcccggcaaagcgatggtggtcgagaacggcagggcgcgttgtgtcgtgaaggaaagggtggaggtgccgttcgacgccgtcctggcaccgccgagttcgaggtacggtttaggctgaagcgcactctcccccgctgcgcccgcgcctgtgtgtgtgaatagtagtagtagggtgtagctcta

SEQ ID NO: 358898 - DNA, 196 bp, Zea mays
  unsure (1)..(196): unsure at all n locations
ctcaagtgaatcaaaccgcagacttcgcagtcctcctcccactaacagagcatgcgcgttagcgcgacccgagccgncgccgncgctcaacctacgagcgctttctgctactctgttactctcggttgcgcgtcctcgcgatcgtgagagcagcatggccggcacgtctcggcgcgtgatgagaaccagcgcggca

SEQ ID NO: 358899 - DNA, 129 bp, Zea mays
gttagaaggtcaactagaccagaaaaaaaaagtgggagcccgtaccccgctcaccctaacgttggtctgtccctgtgtacatctcagagtcaccagcttagaaaactcttgattacccttcttgattct

SEQ ID NO: 358900 - DNA, 270 bp, Zea mays
ctcgagccgtacgccgcacaccgaggggaaaccgtacctacagaataattcttcaggcttcccgaacttcaacttcagcacctcgcaccatggggactacgtcggtattgcatccgagccactttgccttgtcggcctggacatcgtgtccgtttccgagccccatggagaaaccgccgccgagttcgtcagcaacttctcttcgtgccttactgaccatgagtggagctgcatcgttcgtgctggcactcccagggacgtctgacagag

SEQ ID NO: 358901 - DNA, 261 bp, Zea mays
acgactcatcttcatcctcgtctcacctccctgctgctgctgacgctgctgccggcaagatcaaatcgttcaaaaggtgttttaggtgattggtgctttcgacctcattagtgccttttgttcaattgctggacccaaggagcagagttctgtcgacatggcatctccaagaggaaggatgtcatttccccttcgttcctttctgatgatctgcctcatggctcagctgggagcttccaatgttgtactcaggcgaacaac

SEQ ID NO: 358902 - DNA, 266 bp, Zea mays
tttgtgatggatagtccaataacagtgttttgccatggggattggagtgtcttcagcatagtactccctgtttcctcggttctccaaagtctgcgtcctttgcggtggactgtggtggtagtagagcaatatcaggttcagataattccgtctatcaagctgataatgccaaccttagtgctgcatcatactatgttgcgggtgcacctacatgggccgttagcagcgttgggttattcttggacgcagatgcaccaatgcaagtt

SEQ ID NO: 358903 - DNA, 209 bp, Zea mays
cgattattctgtgcgctctcgcccaagtcatcgtctggtcgtcgcccgcagaggcgcagacgcccaaaaccggaaggcgcgccatggccgcgtcggatctggagagcaaggccaaggagcctcgcgcgagacttcggctgcacggctcaagcagcacgagctggccgcacgcgctctatgcgacggcagcgaatagctggataatgagc

SEQ ID NO: 358904 - DNA, 137 bp, Zea mays
atttaattgctaagcttggcctgacaaataaaaatgttcaccgcttttatttgtcaggccaagcttttcaattaaaatgcggtgaacatttttactttatatagttcaaacaagcaactctaaaaaatcaaaccata

SEQ ID NO: 358905 - DNA, 146 bp, Zea mays
gtacaccagatccggagcagctcgtcgccgaacccagcgctgaaccgacggggagaggcgtggccgcgctttatcccgggaactacgatgcaacgacggtgtgactgagcaggcggggaaatgactgtgatcaaggcagctggagc

SEQ ID NO: 358906 - DNA, 168 bp, Zea mays
  unsure (1)..(168): unsure at all n locations
gctcggcgttcggctcaagatcgagcgaatcggctcgaagccacgcacgccccggatcgaaggatggcacgcagacgcggangagtctcttcgggcttggacggacccagaagacattccgccccaagaagagcggtccatcacgcaaaccttagggaacttttaagt

SEQ ID NO: 358907 - DNA, 165 bp, Zea mays
cgccacagaaccactaccgcgcagacatcatgcttgccggcgattcgcgtacagggaagacgccactctagctcaaaagggatacaaggtggcaaatgtcccaatcgtgatgggagtggaccttccaaacaacgatccttcaggcgattagaaagaccaaggcca

SEQ ID NO: 358908 - DNA, 160 bp, Zea mays
tcatacaccacgtgctcaagcaccccaacagcaaccgcatgtcagtcacgtccttctacaaccacaccgacatcttcccagagaccacgctcgtcaagacacgaagaggaccgcgccgaagccgaaattacaggccacggaacccaagttcgaggccata

SEQ ID NO: 358909 - DNA, 165 bp, Zea mays
gtcacttcctcatgagttcacagatcctggtaacttggaggagaatccaacagctggtggtgctttcagatgaaaagcttggagcatcttgtttatgcaccatctgatcagtcaaacataccggatacttctccttcggtgggagaagccgagacagttcccaga

SEQ ID NO: 358910 - DNA, 160 bp, Zea mays
aaatagtctgtcagcacctattcgatcttcaggaggttttgtagattcatcaggtgacaagtccaagtagagattaaaggccgcttttcagttacatctgagaatgtcgatcttgcaaaggttcagtaagaaaatctgccagcactggtgattgtttgat

SEQ ID NO: 358911 - DNA, 153 bp, Zea mays
aggcgaatgtgatcagagagtgatatgtcatattatctgaggaccatgacacgaagtgctttacatacgtcaaaaggatggagagcgtgctacgtacatgacgcgacgtgacgctcattggaatctataagttacggactgaaaccgctgctg

SEQ ID NO: 358912 - DNA, 163 bp, Zea mays
gagacgagaatcctggaggtcgtcacggacccggtggccttccgcgaagagcaccgccgccacttccgatgagctacgccgacgatgtgaacgtcgacaaggcggaggacatgctgctgcaccggaattcctgaactgcatccgacctcggtggatccacaat

SEQ ID NO: 358913 - DNA, 169 bp, Zea mays
aacgtggaatggtgggaaggcctgacactgcatcgatggtagaggcaaaatatccagcacttcggttttgacagcatatgtcgagaagatatacgggataatcagagataacctgaagaaggaaataagtcacggggatcactaataaacatacactctaatgcatgcc

SEQ ID NO: 358914 - DNA, 147 bp, Zea mays
cacgaacgtgagctcagaatacagcacaagcaaccatctaagattttacctcgcccaagactatcccaagctgaataaaatacattacctggagttgtccagagggacctaactggacactgagaggtagatctaaatgggaatgta

SEQ ID NO: 358915 - DNA, 169 bp, Zea mays
agggcacaagctcaagcgcgcttcgtgacttctctctcctctcgatcgattgctacctccaccgaggcggcgcccagatcgccgtaggaagacgacgatcactccagctttgagcataagtgtctgcaagagggctggctgagctggaaaacggtgtgttgtttattcg

SEQ ID NO: 358916 - DNA, 147 bp, Zea mays
agcagcggcggcggagaaacgcaggcgaaggcgagggtgtgcgggaaggtgcaccagccatcaacttctaccgcaactatggtaagacgttcaagagaccaaggcgtccttatgagaaggaacggtaactttttaggggccagtatg

SEQ ID NO: 358917 - DNA, 154 bp, Zea mays
ctgatactgatccttgtgtcacttgttgctcacaaagccagatcaagcagatccatgacgatggtccacgggcgctccccaacatcggatgcatccaccacgtgctcacctcacagccgcagcctggggcaggtggacaccgtcgtcatctcct

SEQ ID NO: 358918 - DNA, 153 bp, Zea mays
ctattgttgaagtgacgcatttttaaggtttagggccgtttacggcaatgcagttctttttattgttcaagtgacataactataatttaagtatttgtttacgccagtttaacaaacatattttaagtatacttcacataaatatagtttaat

SEQ ID NO: 358919 - DNA, 114 bp, Zea mays
aagcgagaatctggagagtacacaggctttcctatacttggcgttgaatggcagacaatggagtccgcaaagcaatgggaatgacaccagatcataagggtgttcgtgttaaaa

SEQ ID NO: 358920 - DNA, 176 bp, Zea mays
cgtgagctcagcatacggcacaagggcaacgttcaaagacgagtacaacgttgacgcctaccagaatgcccgcgcatgccgttaggcgtgtgagacgattaagacggtgctgagtgccaacccagaggctccactgaacattgagtgaacacatcagtgcacctgagctggaacgt

SEQ ID NO: 358921 - DNA, 160 bp, Zea mays
aagctgggcacttcgctaaggagtgtccagctgcgcctatgtgagtaactgtgaccttccacagcagaatgcacattacaaactgtttgctggaactgcaaagagtctgggcacattgccagtggcacgtgactgccctacttcaggtgctaacgtcctg

SEQ ID NO: 358922 - DNA, 127 bp, Zea mays
gctcaaggcttgggatccaacggaccaatcattcaaatcctctccagaaccgcgttgagcagggcacatctagattctagggtgagggaccgtcaccgaagaaactcacaggcggtcacgaggaggc

SEQ ID NO: 358923 - DNA, 159 bp, Zea mays
acaagcgacgggcacctggtctgggactccatcaggcagtgggcgtccgagtacgtcaacgtctagacgaggccgtggccgccgaccccgaactgagggcgttctgggacgaggtgcgcaacgtgggacagcctggtggagacgctgaccaccatcatg

SEQ ID NO: 358924 - DNA, 156 bp, Zea mays
cgagatctggtctgcgattcccacactccttcctgtgaaccacaaacctaacgcggagcgaccgccgggcgaggtgcgcgtacctgccgtcgatcgtcgccggatccatccaccatgggaagcacaggggccaaaggagccatctcgagaaccatt

SEQ ID NO: 358925 - DNA, 183 bp, Zea mays
aacgacagcacggcatacggctcaaaccaaaagctgctgtgtgtcttggcaaaatagagagtgaagttaacagtatcatggatctacagcctgacagacacactatcctgaaaaagctgaaagagttattttccatgcgacacaatgtagaaacccaaacctgagacccattagatgtcagat

SEQ ID NO: 358926 - DNA, 152 bp, Zea mays
agcgaaagcgaggcagctggggacgttcaagaacttcgttgccaggcgagccaacgagggaacgtcttcgagaagcactccgctgtgctgcgctacctcggtgccatcgaccccaccggccacaattgctgacgtggagcacattctggcca

SEQ ID NO: 358927 - DNA, 158 bp, Zea mays
acaaaggccagtaaacccacaagatcctcccctagacccatttacttgtgcatacactaaccaaccaaaaaggcagagacctggtgaggcatcacaaaattctagtgatccacgaaactttgagcatattggtgtcatgttcaggttctgggattgaa

SEQ ID NO: 358928 - DNA, 183 bp, Zea mays
actcccctggtcgctgcgcccctcagctcgcgacgtgctgtggtggcctggtcactcgccctcggcttcaccttcaagccgcaacgccatcggttcctcgtccggttttaactttgtcgaggccagcagcttcaaatccttgtagtgtgtctccgcactcaacgtcatcgccgtcgtggtttt

SEQ ID NO: 358929 - DNA, 179 bp, Zea mays
cctcgagcgcttacggcgatgccgcagtatcagtcagaatgattccacaagagctcgtgcagctgcccggttgttgctttactctacaaaggccaagcccagcttacttaggacaaagattggaactggcccaagtgaaggcccatatgaagcactggtgctttctcatcatgacaggc

SEQ ID NO: 358930 - DNA, 160 bp, Zea mays
ctcgacttggttccctgctcctgccctgaaaggagttgtcttggttccctgcccctgctctgaaagcagcagttggagagtcgaatcgtccttcttctctccggcgggaggaggcgggcggtgggcggtgggcggcggcaggaccgtgatgacgagcagc

SEQ ID NO: 358931 - DNA, 103 bp, Zea mays
cctgtctggtgcaattcttattaaagcctcttgagcaatgcatcggatattcttggtggatataatgcggtgggttatccctgtaatttttgtgtcgagattt

SEQ ID NO: 358932 - DNA, 174 bp, Zea mays
ttcaaggttatatagcggtgtcgatactgctcctctaacaggaggtttccccacaaatgagagtgaaagtacacatgcatcagaaagttcctttatgcattataagaacacaaagaaaacctcttcagaaaaatctcagaacacttgttttaatcaactcgtccatggaaagga

SEQ ID NO: 358933 - DNA, 192 bp, Zea mays
ctcgatcgcatggcggccgtgatcccaacctccacaagcattggtcgatcagaagctggagggcggcaatcttgccctcgagcgccgatggcttatggtattgagattcgtgtaatccgtgctgtcaagtcaagacgaagccctgttggtaaggtttacttctacgatggcctctacaaggttgttgactac

SEQ ID NO: 358934 - DNA, 188 bp, Zea mays
aagtgctgttgggctcggccttcttataagtctaagtactccttttatacttcctattgaggatggccatttgagctagtatatatttcaaacgtatacttttgtaatcacttcgataaaataatgtaaaatttttgtaacttgtaaaatttggtaataagatttctgctgcaaaaatgttgatgtgt

SEQ ID NO: 358935 - DNA, 163 bp, Zea mays
gctccgtggcgtacggcgcgacgtggcagttcgacacggagtgcgctgcccaacgaacctcatcaaggcggcgggctggccgtggcgcggtggaaggaacggggaagctggaggctcaaccatgcaaggaactagcccctaactgcccatcgacgggcttcct

SEQ ID NO: 358936 - DNA, 189 bp, Zea mays
  unsure (1)..(189): unsure at all n locations
tggacaccctagccgccatatctccacgtccagatcgagcaccaagccganggaaggtgaggaacgatggcgccggctggtgtcggcgaagggcggcgcggtcgcgggcaagaagaaggggtcggtttccttcacgatcgactgcaccatgccagtggaggacaagatcatggaggtcgcctcgctcga

SEQ ID NO: 358937 - DNA, 259 bp, Zea mays
catccccatgttgtaactgtggatctgggaacagagaaggcccgctggggtcttaacaacaagaagttcttggtccatccacgctggattgaagcagcaaatttccggtggcataggcaaccggaggaagattttcctgtcactgccctaaggagaagagcaaagagaaagatagtgataatgatgtggctggcaagaaggaaacgagcgaggataaagagaatactgcagctggcatgaaggaaacgaggaacgatga

SEQ ID NO: 358938 - DNA, 109 bp, Zea mays
ctcgagctggacagttatgggtgccgtgaaactgtgtgctctctttatgagcatgtgtacacactgaccaccttttgttgatgctgtggccgctactgaagatagtgaa

SEQ ID NO: 358939 - DNA, 257 bp, Zea mays
cgttagcaagtattgattcaagtgttgcatgtgaacttgagtttcctccggacttgttttgtgacaaggaaacccctccaatccccctcaattcccttgtcaccaaaggagctgttcaagagaattctgttcatctccaaggtttggtctagatgaatagaatgatttagcatgacattttgttagactctttgactctctagaagactattttaaactccttgaaattcagggcccaacccggcaaattggtttac

SEQ ID NO: 358940 - DNA, 255 bp, Zea mays
cttcagccaactgtgcccttccgccgctgcgggagcccacggccctcgctgcgtctccctgcagctgctgctgcgccacgcgtggagttgtccctggatggcggagaagatgtcgccgcatggccatggctacgcgaagccaccgccgatgctgcggcgcacgcctacacctacgattccctcatcatctacttcaaggcggagagcagcatcgaaagagagggtcactcccaagagcacagaatcccttgaggg

SEQ ID NO: 358941 - DNA, 251 bp, Zea mays
ccgcgccgtagccgtgtagccacttccgccgcgagaaggccaagggctctccagcgagctcggtgctcggctacagccgcttccggtgaagccggtgagctgtcgcacgcgacactgctatggagggcggcgaactcaccatctactccgtagcgctaataccactcacagtagggagcgcttctgcttattatcatgcaggcttattctttaccaagcgctattttgttctcctgacagcagcagtcctc

SEQ ID NO: 358942 - DNA, 271 bp, Zea mays
aaatctcagaagtggtggccattacattatcagagcaatgaatgggagaaaccgagcttttggctagattggtttggagcccagaagcatgaccaaacagctcaacttaggaatttgttatgggcaacatcgaagcatgatgtctattttatgtcaaattccacagtaagccactggtcatcattgtctcacaaattatcagaggttcttgacttctctgggcatgttgctccagccggaaagtatcctggcagtttacagaaggtttctc

SEQ ID NO: 358943 - DNA, 110 bp, Zea mays
ctgctctctcctctgtcctcatcatgttccagctctcgacagggccacatactcttctggcatatctctcctgtctcttccactgctcactatgttataagcagagagca

SEQ ID NO: 358944 - DNA, 268 bp, Zea mays
gcaggcagagcgtattgataaggttaagcacgaggatgactctcttgctggtggaggtcgcactccaatggatgtaagtacaactgctcatgagatatctaacactgatgttactgttttggaaggacacagttcagaggtttttgcttgtgcatggagcccatctggttctcttctagcttctgggtcaggggactcaactgctagaatctggacaattccagatggtccatgtggttccaacatgcaatcatctcctctggtgttc

SEQ ID NO: 358945 - DNA, 250 bp, Zea mays
ctcctccctctcctcggaaggtcaagtgacggtatttgtgaccatggcagggaccttactccagtcagttgccctgggaacacctcttcgtggttgcctgagaacccattgttggaggtcccatggcatcatgaggcctgcctctatgttggcagtgtcacttagccgccctgtcaagatgtcagcatttgtgggtctaagatcagtgcatagcttctcggtcacaccgacggtgtccaattccaggtcg

SEQ ID NO: 358946 - DNA, 186 bp, Zea mays
acacgcagcaccagacgcacgactctcctctgtgctctctgtgccgcctcctcgccgagctgcgggctgccaaccgcgccggtgaactcgcccggtccggcgcactgctcgtctcggctcctttggaaatccttcgcgaacgtctcgtcaagttgtcaggcctgtcttcgagtttggtggagtccc

SEQ ID NO: 358947 - DNA, 185 bp, Zea mays
agctccccttcctcaccgcgcgcgtacgcgccgccgcgctcacctcaccgaaccctaaacctgagcaaccgccctcccccggagtacggccgctccgtgtgggactctaggcgttgcgtagccccctccagggtctagcggcggaggaagtcggaaaccgattacccctcccctccccttaccgg

SEQ ID NO: 358948 - DNA, 182 bp, Zea mays
accagaaccacaagttcttaatgagattgttgaagatagcaggcttcaatgtattgaattgggctccccggctcacacaaatttcccagataaaacaggcgccgaaaactttgcatccccaagttttgatgtggttgcaaaagatagtaagcctccgtctttggaattcacatcccctgctc

SEQ ID NO: 358949 - DNA, 180 bp, Zea mays
cggcagtgaacgacctgcagccaaccatctaccagcgactcagcgagcgagacagcaggcgcgcagctagctaggagcagtacagagcagcggcgatggcggcctccatgatctcctcgtcagctctggcggtggcgcctcagggcctgccgcccctcggccgccgcgcctcctccttcg

SEQ ID NO: 358950 - DNA, 183 bp, Zea mays
atagcaaagttagaataaaagttaagttagttgtatccgagttggactccttgtcatgttacaatcctgttggtagtattctgtcctaggacagggcgaacagcttaaacccgctgcattgttttcttacagtgcaagctacgctactctcggctatggcgttggaaaagttgagaagcagaa

SEQ ID NO: 358951 - DNA, 179 bp, Zea mays
acgatcacatccgtctgatcaatcaaagaaccaggcattatagatcgttgtgggaaatgggcggtgttgcagagtgaaccggcagcgggcatggcaagcgtgcacattgtgttggttggttcatggattcgttctctctgttcgatcatcgcgacagcattcataataagccatccatc

SEQ ID NO: 358952 - DNA, 171 bp, Zea mays
gactgatacgcatacaactacaagcaaggcggctagctactctggctagtgcgcgcgtggtgcaggcgcatctagctactcctggtgcttgttgtgcatacaatggcgacttcgctgggactgaatcctgaagatctcttcacttcgtactcgtcttcctactactcctcg

SEQ ID NO: 358953 - DNA, 176 bp, Zea mays
gaaaccatttgagatttgaatctaatggttaacgctattctcattttcccaggggggcttacctcatgaaagtagttcgggtcagaatgatctactcagttaaaaaacaacaacaacaaaaaactaagcgattgggaaaaaacaggaattttatctggttattgcatctggtgata

SEQ ID NO: 358954 - DNA, 290 bp, Zea mays
taaaaaaagagaaaaaagataaaaacaaaagacagaaagaaagggaaaaaagaaatatcacatcctgtttctctcctaaattgggaaaacttacaaggaactacagtaaagatctatgagaatagtgcaaaaaggggaaaaccaaagagttcctaaaaattcctattctcttaaaagtagcaaaccaaattgctgttaccctctacatggtccatttcccacatggttttggaagtacaaattgggtaaacaccaatttttagctattactatttctgctattttaaaaa

SEQ ID NO: 358955 - DNA, 132 bp, Zea mays
gcgaggggcagaccagcttctcttgacctccccaaatctggacgcctgagggggcatcacgccccgcctcctcacagcttagggcctaacttgcattcagaagttatcggtttctgttccttaatcttaggg

SEQ ID NO: 358956 - DNA, 243 bp, Zea mays
agccgtcgtttacatccgacctctccacctgcaccaccaacaacaccaactcacatgtagcgagagctaagagcacagaaaagtactgagcgggacggaacagctagcgctaggaataacgcacacacaccaccatggcaacgctcggagaacagccggcggaagtcatgtccgtcgagatgcacgcacccgacgggtggaccaagaagttgactcccttgaaaggagggtgcatctcgatta

SEQ ID NO: 358957 - DNA, 274 bp, Zea mays
acttgaggggcacgtcctagatcggtggcgcctgcctctcgccgccggtacggtgcctctcgcggtctcgctccccctcgcaggtcttttggtgttttttagttcctccctttgcttcttggaggtgtttgttgccgtctcacccgcagttcttgagcaatggagatggctcgacttatatgtggtggctgccagacattattgctgtatgctcgcagtgcaacaactgtaagatgctcatgttgtgacacagtcaatcttgtcagaccagtga

SEQ ID NO: 358958 - DNA, 271 bp, Zea mays
cagagttccttcgcatcgtgcatctccagctcgccgagtctgactccaaaccgtcgtgcgccgcctgggcccggtgtctctttctcgtcaccagctcgcgcgcccctgttttctttgtcgtcggtcgtcgtcttcgagttgatttttagctgttgtagtatttttagttatcccggctgcgtctgtggccgtcaaatcatcggagtcgctcaactcaccaatcgtatcttggtcagtcatcgatttcatgtttttcatggtcctcacgtca

SEQ ID NO: 358959 - DNA, 264 bp, Zea mays
gaggggaattagactatgtgattgtgcaggtatgtgacttgtggatgatcgtcggtcgacattagggttttgttgatatggctatataattgtaggacaatttttttttgtttcacatcaccagagcaatttatgcactagcagattaccacattatgcagaataattaatggtcaggatgacagatattggtggcatgtcctcagatgattattgcttgtagcattagaatattcggtgctgatgtttagcttaacaatgtca

SEQ ID NO: 358960 - DNA, 255 bp, Zea mays
gctatgtgatcagtgctggctttaggccatgcatacttttaagttgcaaacctctttccaggcagaacttgtttgtagttattagagctgccacttccctcagcactggagtctcatgggatcagctcttctccatgggtctggggcctacgtaaagaacgtatattcaatgcatttaacttttgtgaccaggtaaccacatttcccagctttatgacttatacaaaatatggaccaaggtttatccaagatata

SEQ ID NO: 358961 - DNA, 262 bp, Zea mays
gcagaggcaagaggcccctcaccctcaggtgatcaagtcgctagctcgcggcttaactagtaggcagccatgaatttcggtgggaatggcaacgcgacgatccggtgcaagtactgcagggcgagcctgagcgtgatccccggcgagcgcgccatccagtgcgcgcaatgcaactgcgtgacccgcatccggcgacctgaggggccccgtcaacgacgtcaagtgcatgaggaactcctctgccagcgcttcgcttcccggc

SEQ ID NO: 358962 - DNA, 162 bp, Zea mays
caaacatattacagctccaactcagtgctgcagagactgaaggccagccaaaccgctcaccagacacgcggaattcacgcagcatgtacgccgacgacgggttcgccttcgccatcgacgccgcctaactcacccaaacctaacttcctcgcagccacagcc

SEQ ID NO: 358963 - DNA, 188 bp, Zea mays
gcgcctgcaagagcagagaggcgaaagtgtacgtgccacaagcagcagcagcagaagcagtagccgccgccgacggaactcctcatcctcccagctggtcatcctctcccgccagcaggtggattgacgacgatgcagacatcaccttccgcggccagcccagaaggcccggacaggccacggcgcag

SEQ ID NO: 358964 - DNA, 210 bp, Zea mays
ctcacacgatccttcccaactccacagtgtagcctcttcgcgacatgatctaactccaagtaatctaagtatcttccaaccctgcaatatcatctccgatcatactcctcctacagcaatctattgctcgtgccacagtgatatgtgtggattggcgtaacttagatcagctctgctccatttccttagttctcatggcgtggctggcta

SEQ ID NO: 358965 - DNA, 192 bp, Zea mays
aaggggcgagcctcacccatggcgaaattaaccacaataacgccgctgaagataggatacacctatatcaagagggacgagcccaacggcacttagcagcatccacaacagaacaaagttataacctgtaggaaatgaggaggacgccggccaaggggatgactgaggatcagggcgcccgcaaagaagggg

SEQ ID NO: 358966 - DNA, 261 bp, Zea mays
cgggaagacgaagtcctagcacaacccccgccaatcgctcgatgaaaaatctaaaacagaaccctacagcgtttcaagggttccgagagggattttatgttggtaaggctttgatgattgctgtacaaagatgatatggcctcccgcccaaagctgtctggtattcagaagcaggttttggcgctgtataggggattccttcggacagcacgccttaagcccctgaagaacgccgcaggatcgagtctgttatcttggcag

SEQ ID NO: 358967 - DNA, 223 bp, Zea mays
caggtggtggacaagttgaaagatttaggggcaaccagtgtacgagagatcagagatttgctacttcgagatgtgaagtcggttctgtgccatacctgaagaatccacttagaaagataggtggaattcatcagctttgtcagtccgtccttggtttaaagagagaaatgatctctgccttgactcaaagaggatgatggctaattttggtccctacagtggc

SEQ ID NO: 358968 - DNA, 191 bp, Zea mays
cgggaagggagcacctgcctgatcctgcgcggcggcggttgttactcttctttccactgtgggttgtgatttccagagcggcgtggaggaggcactacccgttcttctgggctgtcaggccttccgtacagcagccgccgtcgccactcccaatcccacagcggcgcacgcgttctcctcctcctcctcac

SEQ ID NO: 358969 - DNA, 170 bp, Zea mays
ctcgagccgcgaaccgtctccattccattctccacttcttcagatcacctccgcaatctacgttcgcgccggtgacgaaagccagcgaccgtggccatgcagtcgccggagctctcctcttcctccccggttctcatcaatatagggggcaaaaagtacgcgacaaccgt

SEQ ID NO: 358970 - DNA, 215 bp, Zea mays
gcctggaaccctggactgaattggtcagccagactgtagatagatagatatcgtatggctgttccgtcggctctgttgttttatttttccccagatagatattctagtgacttatgtgcaataaacgcatatggttgtaaatgtcgctacatgcagccgtgccaaaaaaaaagaactaaaaaacaagaaaagcaaaaaaaaaaaaaaaggagggg

SEQ ID NO: 358971 - DNA, 260 bp, Zea mays
  unsure (1)..(260): unsure at all n locations
ctgcacgtcgttctccatggagagcctctgctcttgatcggcgctcgaccacacctcccatgccgtgcactcgccagactcgccttccctttgcccatcttcaacgccagccgatcctctccttccccacctcaggtcgacggcctcaccttccttggcgcccaagctctgctcggcacccatcccagcccgngtcaccctcttgctggacgcagtcatcgttactcgtatcgcagttcgtcgagctcatcccatactcg

SEQ ID NO: 358972 - DNA, 266 bp, Zea mays
ctcggaatgaccaaaaaagagtaagaattacagaaaagcccctccggtagtctctctcttttccgtttctcttctccggccttcgtcttcctgcttctccccgtccgccaattcccttccccacccaaaccctagagcaaagctcaatggccctcgtcacgagttcgcgagagactctgcaccgccgccgttgactgctgatccaaccgctcccgcggcgcccggggccctgtcacggaggcggcggcgacatggcgtcgaggcag

SEQ ID NO: 358973 - DNA, 266 bp, Zea mays
ctcgcgaacttaccctgcgcggccgcttcctcgtcgttttctatagtcgcgcccggccgaggttcctccctgcgtgcgcaagtctgttgcgagcgccgatccgtacccacaaagcctcgtcggtgctcaattggctcgaaccctctgctcggacctttcttccgtggcgctcagctcggccagatgcgacctcgccttggctctctgtccctactgcgctcgccagtcggactcctggccatcgtcaacgaatctcgcgatcacag

SEQ ID NO: 358974 - DNA, 269 bp, Zea mays
gggagagatagagcttgggtggtcggattagggagagagggaggggaggatgtccagacggtcgttgaacccgagccggcgggtggcggacgggggtctgccgacagtcggaggcctgttccaccccaagtcacgctcgcctcccgtgcttactattgccctagtcgtcctgggtgtcattcttctcgtcgcctacttcaacagcggctcaggtcggttaaagattctcggtgtaactgttacaagcagagagtctgtgaccaggtctg

SEQ ID NO: 358975 - DNA, 267 bp, Zea mays
gtgggcatgctagccagccggcggcggcaccggagtccctagcagcaaccacgcggctacgagctacgacgggctggctaaggcgccggttgagcgctgaaggctacccagctgtggtctcacgcgggtggccggtgagagcagccaagcgcgcggtgcgctggacgctggacgaaccctaccacgcgcaccgtcacgttgtgaattgaatcacctctgttgatgggcagcctgagcgctccgccagtgatgtcgccgctcgtttct

SEQ ID NO: 358976 - DNA, 198 bp, Zea mays
ggtaagacggagaacggcttgcctggctctaaggcagaggagaaagcaccttcaacagtgtgagccctgcggccggctgagcagctgtcgggagccccctttctgatgatgaaactgatgcttgagccccgatcgtagaacccacgtgcctgagacatctgctgcctggcctacatgttccattttctatgaacaaag

SEQ ID NO: 358977 - DNA, 259 bp, Zea mays
ctggcgtgatggcttcccagatccatggtgctcatccctcggtgggatccatgccacctgttattggaaatgcgctgctgatggcagctgatgtattggccaaaaatgacgaacctcgtatgggcatggaattcgactctgatgctgctgctcgcgcattctacactggatatgctttatgctttgggtttgggattcgtgttgccggatcccgtagtgagcgaagaaagggcgtcgaggtgctcgtcatgacgcgttt

SEQ ID NO: 358978 - DNA, 258 bp, Zea mays
gccgattgtcgtcgttcgttatcacgtcgtgcgtgcagcagccccggatctgtgcagccctggtcttgttgtcgacattgctcgccgtggctcaacttgctagttcgtcattgtttcgtcgccacgtcgttcgccgttgagcctcactgcccatcgtgaagtcccctgctgtcagcctccgcactcgtcctaggccgtcgtagccagtttgcctctatctcgtggtggtgttgcgttgccgtcgagtcccgatatcga

SEQ ID NO: 358979 - DNA, 215 bp, Zea mays
tagcagtatatatccccgtcattcacctgactgtccttgtccatatctcgtacgtacacgcacatgcattttggcgtggaacataaaacaacggccactgcaggctttaacgcttctcccagaccaaaatgcatgtgcgtgtacgcactacatatgtaaaagtacactcagaagaataactcgtatatatactagcagtatataacatgtggatt

SEQ ID NO: 358980 - DNA, 234 bp, Zea mays
cctcaacatccacaaggttctgggttgcctaaccaaaactcggcagataatgccactgccgtggatccaccagctggtggacaacaagcacaaacgctgaatcaacaaccaccacagcagcagcagaagccaaatacaaatgatcaggcccaacgtgtttcaatgggtctccaagccatagactcgccaaccccttccacaaggaccatctaggtacttcattgttaaaaggtg

SEQ ID NO: 358981 - DNA, 258 bp, Zea mays
gttgcctcctaaaacacacattctgtataattatcgctaaatacaatgctgtgaggtctatagttcctgtaacccctttctcctccccaaggacagaagaactaggcataaataatagggaaccctgagtgccctactcttttcccaagaagggtaaagcctacaatatcatcagggggcatgaagcacattaatttgcagtggtgcttcctatgaggagatatggtggacaggctaatttttccttgaatatgtggc

SEQ ID NO: 358982 - DNA, 256 bp, Zea mays
tcaaaacccaccagcgtatggtggtggcggcggcggcgggtatcgtcaaaacccaccagcgtatggtggtggtggtggtgggtatcctcaaaacccaccagcgtatggtggcggcggcgacggcgggtatcctcaaaacccaccagcgtgtggtggtggtggtggtgggtatcttgctcctgaacgtggaggttggaacgatgggcgcctccttctcgagagcagcagccgccgccaggctaccctcctgctcgtc

SEQ ID NO: 358983 - DNA, 145 bp, Zea mays
atcatagatagtttcttctactacacgacgacagacatggggaagcctgcgaagatcggacaatggggtgtatacacctgccatcttcggtatctgagggctacttcggaccggctgaccgaggtgaaggtcacggcggtacaac

SEQ ID NO: 358984 - DNA, 281 bp, Zea mays
  unsure (1)..(281): unsure at all n locations
tttgcagttgaagctctgtgatttcgctgtgggcacattctgttttttgtcttatggtgtggcagaatcatgtactgtttcgaattctgagaataagcgcactctcccagcatggatgttgaaagcaacctcaggtaatcaagcggcaaagaccgcagatcagaataagcaggcactggaatctgctgacattggggctcttgatcagagcaagctcatcaaaaggaacaacagacggccgctanaaaacttggattcagtagctactggtgaactgggag

SEQ ID NO: 358985 - DNA, 224 bp, Zea mays
cgctaactaggggcgctgctctggtggccgtgtgtgagaggcgcaggagtgggggtgtgaacttcatgaattgtgcagtggctgttcaaaagtaccttagccacttaaccttgtggagaagactaggttacacttaatgggccaagcaatagggtgtagcgtttttatagaactgataatcaggcttatggcataagagaaatggagttatcaaatttacagat

SEQ ID NO: 358986 - DNA, 182 bp, Zea mays
aattaactctgtaacttgcagggttacagcacacagaccagagttttggttggaaacttggatgttgctacattgcggacaaatagcttggcagcagtatgacacctacaccatgtgtctaaaggcgctagatctagtcttgctcactactccctccatttgcaatttataggttgtttttg

SEQ ID NO: 358987 - DNA, 242 bp, Zea mays
gcctcatccattccagaactgcgaagacagacagacagcgagaaagagggatcgaaggaccaacgcggggccgtgtccggtcacacacgagcgatccctctcagccgcgcgtttgtcaatggtgaacggcgagcggtgaccggacgcggagtgcacgcgggcatcgcttctggggaggtatgagatactctgggcactcggcgagggcaacttcagtaaggtgaactacgcgcgccacatcg

SEQ ID NO: 358988 - DNA, 264 bp, Zea mays
ggcagctaacgacctgcagccaaccatctaccagcgactcagcgagcgagagcagcacacacgcagctagctaggagcagcagcagagcagcggcgatggcggcgtccatgctctcctcgtcagctctggcggtggcgcctcagggcgtgccgcccctcggccgccgcgcctcgtccttcgccgtcgtctgctccaagcagaagatcaggaccgtctcgcgctacgggattggggctggcctgaccgtcgacgtcgacgccaac

SEQ ID NO: 358989 - DNA, 276 bp, Zea mays
cttatttttccatctgataagttgcctgagaggattcaacgttggaatggtttacttttcttttggggcattttttatgcccggaaagcaagtagtctactagagcttcctacaaataattgtccattagaacaaaccactggacctgttatccagcatgatatgggttcatctaaggcacttcagcctttgggtatagatttgaatgagtgccctaatgatgatatatctgatccagctctttcacttggatcagagagtgagaaatttggtgca

SEQ ID NO: 358990 - DNA, 275 bp, Zea mays
gcactcccactcccaaaccccatgatgaacctccctttccggctccgccatctccgacgccttctcgctgcaccgcccttgacaaccctcgccgccacacactcccatagcccaccctcctcccgaccgctgcaccccacccgaatccagccgctgcggttccatctacccaaccccacagtgcggcggctctcctccgagcaacgcaatcctccccactcacctccaggacgagcgcttcgacacgctctcggataggatctatgatgccgtga

SEQ ID NO: 358991 - DNA, 268 bp, Zea mays
atggcatctgcaatgatcaaactatgttactatcaccaagacaccaacaaatcacagacaacactaacacacacacacagtggctatacacactatcaaacgtgttgtgcactatgctgccagtgtgcgcctagcagggcacactgacagctgtgccttagatttagtagccaataggattgtatgatgtcgtagtcatggggacctggaattgatcgatagaaggcgtcagcacatgtgttttgttggaaattatgtaggcagcctg

SEQ ID NO: 358992 - DNA, 229 bp, Zea mays
gccagtttgcaagagtttttctatcttttttcaatgcatttagtgccacacatatctgcaattctggataatactttatggagcatatgtatatggaaattgcttttttttggtccactgtttggagattgagcaccacactgtatggaacaactgttgcaaaagttttctactggctagagctttcagtcaaaaaaaaaaaacaaaaaaaaaaaaaggggggcccccc

SEQ ID NO: 358993 - DNA, 271 bp, Zea mays
gggaaaattatagtcatagctaagcttatggtatctttcaggtaggctaacagcactttcttagttggggaagtgacagagtcttagatatatttaaatagtttgcaaaaattctttgagcttaagagatgagaatatgcgaaaatatgaacaagtagtttttcaatgaataataaacaggtgtatgtttgcaaataaacaggatcaacatgggtgagcctaaaatgtagagtgttatatgcagagagggttgcccaggagaaagagaata

SEQ ID NO: 358994 - DNA, 199 bp, Zea mays
tgtcgaggtacatgtgttgcgatgagatccacctcgtggatcacaggggcatggataactggctcaaggtcacgcatggtgtcgaccatgtcttcaatcgcgctgctgatatagggggcatgggagttcatccagtgaaatcactctgtgattcatgtacaacaataccatgatcagtttgaacatgcaggatgctgtc

SEQ ID NO: 358995 - DNA, 261 bp, Zea mays
cttgttatattgagccctcgatctggacatggtagatcaagtaaagttttccatgagaaatctgaacctatatttaagcttgcaggttttcagatggaagttgtgaaaactactcatgctgggcaggcaaaatctcttgtatctacattggatttcagtgcatgccctgatggaatcgtgtgtgttggtggtgatggaattgtgaatgaggtgctcaatggtcttctcattaggagttgtagagcagaagctgtatcagtg

SEQ ID NO: 358996 - DNA, 260 bp, Zea mays
gccatctacacgatctcgagcgctacacgtacgttgtcggaagctctagttaggagaatcgccagtgcctgatcgatggcggcccaggctctcctctccggccggcagctgctgggccgccccgtgcattcggccgtctctaggtcgtcggcgaggaaggcgcccttcgtcgtcagggccagctccatccctccagccaagcaaggtgccgacagcagctgtggttcgcgtccaggctagtccctctcctacctcgatgg

SEQ ID NO: 358997 - DNA, 273 bp, Zea mays
cactcccataacttctcgaacgccatgttccttgggggtactctctcatcgaagaatggcttcaagctccagggcggtcatggtcaagaagagaaggtcgagtactcgggccctttgttgtcccagtcgcacaaggtcgatgaactgttgcagaagaacgagcgccacatccggcaagctgttcgaacatcatggttcaggagagctgtttgattgtgtggtcacaggaagaaaggtggacaagtgaggaaaagcttgaccgttcctttccat

SEQ ID NO: 358998 - DNA, 139 bp, Zea mays
  unsure (1)..(139): unsure at all n locations
cggctcgaggttcgtggtccacctctgcaagaccttcatgagcctgcgagacatcaaggagcnccagttacccagtatgaggggaaccttgatgtttggcaggtctgaagttcttggagagtggagagagcttgtccat

SEQ ID NO: 358999 - DNA, 209 bp, Zea mays
  unsure (1)..(209): unsure at all n locations
tgacgacgctggacatcctctcgtcgcactcgcccgacgaggagtacatgggggagttcgcggagcgtcgtggctggctgagccatggtgaaggcggcgttgagaagttcggcggcangatgaggagatctagggttcgtgacgttgtgaaacaactggactcagaacgctgcggcgctggatctgcgtacgagctgtcagccttctca

SEQ ID NO: 359000 - DNA, 255 bp, Zea mays
tgccgcgccggtcgagcaggcggcgatgccgcggtcgtggagcagctcgtcatctagcgagccccgcgtgttaaaccgggctcgcggcgagacaatgaggcgtgcaagtgcaacgacgggtgcgccggtggaaagctgaggaaaacaggacgatgccctgcgctgcacttgcgcgaatgcgacggcgcgcggaatgcgataagctcgggagcaattgggggtccggatgccgctgttgctccgtgcaactcgcgc

SEQ ID NO: 359001 - DNA, 127 bp, Zea mays
catcattgccgcggccaacggcgtcaaccgcagtcgcatcgtgccggagtacagcttcttggatgcacgcggattgggtgcatttgagtggaatagtctagacaccttacccgaggtgtacgcgtca

SEQ ID NO: 359002 - DNA, 246 bp, Zea mays
atacagttgaacatgatcgtgttatgaagagacatttcttcaaaacgggaattatctgctagcaatatgttattgttacgcttgcataaattatttattgatcagttggtttcatctccctgaattattcctgtaaccttgtcaatggctatgaatttgcatcttcccagattggcactagtgtcacgaatgcagcgctcaaagcaaagagggctgttgataaggaccttgaggacgagtcatgga

SEQ ID NO: 359003 - DNA, 164 bp, Zea mays
ctgtgaccattatttttaagattgctaccattggatagttctgtcatggtccaacttttggagatttaaaattgatccctgtgtggctaacagaattaatgtttccaaaaatgttgaaaattatatagttctcctaattccccacctctaactatatttttggg

SEQ ID NO: 359004 - DNA, 279 bp, Zea mays
ccaatatgggctgagttcaatgacagtggggaccatattgtgccatatcctagaggtgtagaagatagtacaatagttagtgccagggacctcaataacaatgaggaagaggtggctagtattgctggcatcagtgaacattctacaggtgttcaaactggacttcaagtgatggaaaagcagacttcataccagacatgtgcacatttttcagccacacaaatttacatgcgatcctgtcctgaccttccttccctcaatcctaacttgacagaaact

SEQ ID NO: 359005 - DNA, 278 bp, Zea mays
caaagatcggtaagtgcggttcaaagttgaagcctcatggacgcgatctcgtctcgcccgagcccggcctcgggcaagaatagtggtcccggatggattcacgcctcgcccgaggacctcctcaggcaacgggcgcacccccagctcgcccgaggctaagctcgggcaaactttgtcgtacagcgacctcggccaaatcgccttaccaaccgaccgtatcacatgcacatttaatgcggggatcgtcttacaccttatcctgacagcgcacctcagtc

SEQ ID NO: 359006 - DNA, 215 bp, Zea mays
agcgcgcctgctccccgtctggtcctccggcatcgtctactacatcgtgctcaccaacctcggcaactacaacgtgctccaggccatgcagaccgaccgccgcgtccgccgcgggggcttccacatccccgcgggctccttcgtcgtcttcaacatgctggcgctcaccctctggctccccttctacgacgtcgtgtgcttgccggccaggcatc

SEQ ID NO: 359007 - DNA, 115 bp, Zea mays
ctcctcttggtctcccgctgtcatcaatccgcaattccgcattgctattgtcctttgtccgtcgcatccgtttcgtctctttgctcgcatctggcctcaagcccctcaggcctca

SEQ ID NO: 359008 - DNA, 136 bp, Zea mays
catcagtgctgtgtagacaagaagagcgggcagcttcgttcaaccccgagaaagcttggagccagatcagggggggcgaatagacgatggtcgggatcttctccaggttctccgccggcgcccaccgccgctccaa

SEQ ID NO: 359009 - DNA, 131 bp, Zea mays
aacttagtgaattcttatctctttttcctccagaagtatttcttacaagatttgtaaataagagctctacttagtttgtttaccatgaacatgttgcagcaaaccttatgcatctaattcctaggaggtta

SEQ ID NO: 359010 - DNA, 133 bp, Zea mays
ctgaagtgtgagcaaatacagtagctgtatattggaaactgtgcaagtgaagatggctttagtattgcaaactgaggaagaaaattgtttttaattagcaccttcataagaactgctgattaatactgttttg

SEQ ID NO: 359011 - DNA, 137 bp, Zea mays
aggggggcaacctggtgtagcagtaagagcatagattttacagtttggctactgattaaggggaaaacatacttaattctagtagaaggttaaacttactattttaaataccttcttagattatctaggatttcatg

SEQ ID NO: 359012 - DNA, 271 bp, Zea mays
gaaaagtcgccgcgttcctcttgcctgatgaaatcctcttctcgtctagatctgagcctccgcgtggcttcaggatcagatgcttggtccgatcgaacaacgagctatgacgttccgggggaatctggatcttgacggactggacaaatgggaggcgtcgacgggcttctaaagcatggttgaacaattgtgagatgtgacatcttgaaggcctttgccatgttgggtgcgctcgcatggcaggcatcataataaagatgtgggttttgtg

SEQ ID NO: 359013 - DNA, 276 bp, Zea mays
caaaatgttttctctactaaaaatcatctctaaaggatatcttccagaagtggagttacggaatcaaaaggttagactcatttatgttgacaagcttttttcccaaaatagttgtcccagtttacaccaaatttggaacattttagcctcagttatgaatgggaggcttgagagataactgtaggtgtacagaccacttgtggttcagtccaggtcaaacatgcacagcaactggaaggctctggaaatgctcatttgtttgcacatctctcagac

SEQ ID NO: 359014 - DNA, 133 bp, Zea mays
ctcgagccggttctggcaggctgtgatagctgcagctttgagcttcttattgagcattattgggagaattgacaactgggcacatcttggggcgaccatttctggaatttccttgggtaatctgacatgccca

SEQ ID NO: 359015 - DNA, 199 bp, Zea mays
gcatcgtcaagccacgccttggagtcactcttcataaggttgtagtagcaggagccctctatcttttgttctctggcatggaaggggtcctcagagttactggggcccagattgatcttgcttccatggtctttatccccgtggctttcctagacactgccttgtgctggtggatatttattagcctgactcaaacaat

SEQ ID NO: 359016 - DNA, 197 bp, Zea mays
gcaagctaaggagagtgtgatcaccaacagctagtgctagtcccccttccttccatccatccatggcatgcgtcagcaccttccagagctgccccattgccagaagagcaaagatcaacaccaggtccaggggcagcagcagtagcgtggcgaaggggtcaccaccaccagccttccagttccagtgcagggcgtcg

SEQ ID NO: 359017 - DNA, 102 bp, Zea mays
ttgcagtatgcatttcttcacaccagtacattcttaagtgtacttgggtataaggcataacatagaccaatctgtacctttatatatatgtgtgtgtacata

SEQ ID NO: 359018 - DNA, 220 bp, Zea mays
ggattatatcttatataaattgttttagtgttatctttgaaggaaactaacataatactaatgacacattccaccaactcacataattatagaatagataataacttttgtttattaaggaatctctattatcaatattagatggtgtttttcctttttagaatatttttgtctgaatatatgtgtttttttcatacacaaagtaaacagaaaataataa

SEQ ID NO: 359019 - DNA, 140 bp, Zea mays
gtagacacagtgctctaactgtcacctgcgccaggcttcgtgctaaagtaagcagatagctaggcgtgaacacgatagggacatccagtggaaggtagccctggaaaccttgccccactagtaattactgctccactagc

SEQ ID NO: 359020 - DNA, 218 bp, Zea mays
gtgcggaggggtgccggtgtccggactccggagagaatggcggccactcttctcccgaccttatcgccgcccgtttcgcgcgccgccgccgctttcctcctccgacgagccccactgaagccttcccattatgtgcacccagcttctactctccgccgtttactcatctcctcctatccagcaacccctgccatgtgcaccctctccaccatgtcgtc

SEQ ID NO: 359021 - DNA, 184 bp, Zea mays
gaaaagagtccaaaatagaccaaagtacaatgccaaaaaaggcagaacacgagaccaccaaactcctgcagcgcacagtactccagcctccgtctgctcatgaaaacagcaggacacacaaggacacaaggaggcaaatagcaaaagtgccaggctccacacacacctgctctacactacacac

SEQ ID NO: 359022 - DNA, 194 bp, Zea mays
cgtccttcagagagcaacggaagagcttcccggaggcgaggaaaagagggaaagtagccagcaatgtcgaacgcaatgtataataagatgtggcatcagacccaagaaagcctcggtgctgtactcgataaaggagcccagaagatgattgaaccacaaagaaatccgggtttcactttacaacattagcccac

SEQ ID NO: 359023 - DNA, 260 bp, Zea mays
ccttccgctcgagtctgctctagggtttttgccaagccgccgtcgccgtcgctctgccctcgtatccacctcccacgacaccgagacaccaagatgacggcgcagaccgcggaggagctcgccacccagatcgagcagcagaagctcgaggagcagaagaccgaggcagaggaagttgtggtggaggatgaggagccggaagatgaggacgatgacgatgatgacaaggatgatgatgaactcgatgagggggatcccag

SEQ ID NO: 359024 - DNA, 275 bp, Zea mays
  unsure (1)..(275): unsure at all n locations
agattctggtttcataatttttggagctaacctgagtaatccactgaatatgcttttgcctttactacaaacagttttccctcttgattatattcttataacaattattattatgtactttatttttacttcaatggttggaattcgaaatattggcatatggttcttttggattagattatatanaatcagaagaggtagaaccaggccccaagcactcctttttctctgcatgatacttctgcttattgtccttcacactagctacatgattt

SEQ ID NO: 359025 - DNA, 234 bp, Zea mays
acttaggctggccagtagggcaggccgagccaggtgcaggtcgcaaacacgccccaagtcgacgtagcgggggatggctgcgacggccggcgtcggcggtggtggaggggctaacgcggcggtggcagagcagatagcacaggcagtgcggtccacctccaatctcctccagctcatggagcagtcctcccccgctcaggttcacttggtgaaactacccaagaacctgttgga

SEQ ID NO: 359026 - DNA, 264 bp, Zea mays
cgcagatcccgaatggccatgcctaccgccgcctgcaggtcggggccggatgcactgcaagctacggccccgagcaccgggctgaactgaagaggtgtcgaggtcgccattaatcctcaacaaccagctgccaccaacgctatatgctcaccatcgccagcaacttggtggcatctgatggctggcgatgctataaatggaaactggcatcttataaacagatggaacgtacgaaagttgcatcagagaggttgtcattaagat

SEQ ID NO: 359027 - DNA, 253 bp, Zea mays
cagttgcatgcatctcagtgattgtcagtgcttcaggtgttgtggatgcatcaggcaataaagtatatggtagagttggattagataatttctcccttgcgttgaagtggagtaaaattggcaacttccatatgtctttgattcagggagtgattcgggttctcctgaacacagtatgcatgccgtatttgaactcacggcttgggaatggattgatcttgcccgtggtccatggtttcacacttcaagacgt

SEQ ID NO: 359028 - DNA, 267 bp, Zea mays
ctcgctccccacgccacgcatcgcctcgtcggaacggaaggcggcacgctgcgagcacgggagggagggagcggggatgaggatgctgtcgaaggcgtgctcgattgtggcctcctccctaccgcgctgctcctcctccgccgccgcccccacggtcgcccttctctctcacctatgagggggcagccgtccttgctgccaagcgtgcggaagcaatggcccgggaagccactgctgtatggaatcggcaccctgttggtcatgcca

SEQ ID NO: 359029 - DNA, 264 bp, Zea mays
atagagaagactgcaagctagagatgggcatggctttgtgcttcaggacctgggcatcctttccagaagcatcgcagtgtattattagctaactggaatttgaggagtaagaaatatttcatgtaaagcccttagcaaatagaagatagttcattattgaaactattgcttgtagtcctctagaatggctgcctggcatcacttctcccattctagcaacctccaggcctctcaccagagagactaaagagcctctggaggttc

SEQ ID NO: 359030 - DNA, 265 bp, Zea mays
tgaacgagggcgcgtacgcttacagcgccggcggtggctcggagccgtacggggcgcgcggcacgacccctgcgcggtcgggatccgcgctgtttgatgactatgggcggtcgatcagtgccccatctgatgactatgggcggtcgatcagtgccccatctggatgggaggagcagcagccgtggggcagtggcggcggtggcggagggagtggagctatggggtgatcgcaaaggcccttccaaaggcggaaacgcgtgaggtt

SEQ ID NO: 359031 - DNA, 108 bp, Zea mays
caattttgcacgtggtcttggcccaatatcattagcaggagaggatgatcacgataggagagctgacgatttcaagatactctataaggcctatgcgacagaagtact

SEQ ID NO: 359032 - DNA, 142 bp, Zea mays
caaagcggtgtccaacttccggaagcacagctcgaagcagatccggaccctcgtgagatcgctcatcgagtatgctctgaatcacagaggctggaaacgcacggttgacgtgtggatcgctcggcgcggagaggccgtcgta

SEQ ID NO: 359033 - DNA, 110 bp, Zea mays
cctttttaagagacgggacccctcaccactctgtaggtcccgaatgcccgaaccttaggatcgccggcgaaccaccggagctgagccccataaacatcactgtacgacac

SEQ ID NO: 359034 - DNA, 132 bp, Zea mays
agaacatcgtgaggtttttagggtactgcttccaagaggaagggaggttcttcatctacgagtatgtgcttaacaacagccttaataaattttggtacaaagcatcttctcaatgccagaagctagagtggg

SEQ ID NO: 359035 - DNA, 143 bp, Zea mays
ccagttgtggatgcattatgccaagttggccgggttgatgaagctttagctgtgtttgatgacatgaacgaaaagggtatgtcgcctgagcagtattcctatgactccttaatatctgggcttctgaaagctgatatgtttga

SEQ ID NO: 359036 - DNA, 230 bp, Zea mays
ttggatttgaaagcttctacacgggacaccgagcctcgtagacgaagcacaggaaaccagcgaaatcatagagcaaggaagcaagcagcagggagccatggcgttgctccttcccaagctcacaacgccgtcctgcaagttgcccccaagtcccctcctcaagccccagctcgctcagccggtccacggcggcggcaagattcaaggctcgtcttccggtctgttgcggc

SEQ ID NO: 359037 - DNA, 236 bp, Zea mays
cctatttttcccccttcctctactcgacgaattccgttccataggctatataggatctcttaatctttcccagccgccgcgagccgaggaggaaaggatggagttcgggaggaagcccttgagccttgtggagctctgcgtgcggaaggccatcgacaacctccgctacatgggcagcgtcgacggcgtcgagatggatctgctcagcgcatcttgccggaatgcacgatggagca

SEQ ID NO: 359038 - DNA, 183 bp, Zea mays
atatgctgctgcacactatgcttgaggccggcgtctccccggatactgtttcttatcgtcacattgtggatgcctttgccagtgccggaaacctctcccgtgcagccgagctattctccgaaatggcagccacggggcacacggcggatgctgctgcttatctgggactcatggaagcacaca

SEQ ID NO: 359039 - DNA, 178 bp, Zea mays
cctcgctagtcgccagctactgccgatctctgaaccgattcctgcagaaaagaaattctagctcttcccctttccaaattaaacatcgcgtcgatcgtgtgatgctttgcttttgcgtttctcaattgatctcttgctactttgtggtggccggcgggtacgtacctgctgcaatcgc

SEQ ID NO: 359040 - DNA, 182 bp, Zea mays
accctgtctctaaaaaaataaaaataaagcaagcatatactaggttaatccagatggagttaggagggtttataagggcagacacatcctagtaaagaggaaatagagcaactaatgctgttttagtgtaataaggaatgattataatgatgaactttagtcataaagaaaaggtgaaatta

SEQ ID NO: 359041 - DNA, 179 bp, Zea mays
tgttgaattcattaataaagagatggaaataggcaatgcggggttttattcgagtatatcttgtaagtgagaaacggcttagcaaccatgtctttagtgaacttacagattcaactgctgacttgtgcttctctgagatttcattcaactcagttgtacaacttctgagcttttatgta

SEQ ID NO: 359042 - DNA, 270 bp, Zea mays
ctaatccggtcatgtcactggttgcatttttggcctcttcaattggacccagagttgcagcatcatgcgcacatgcagcattatcttttttgactagagacgaggattccagggtgagttcagaaggctcacatgctggtggtctgggcaatggtgcaaatccaaattttcggaaccataatggtgcttcaccatccatttctccagaaaatgttacatatgctgccatgcttggtctgtcagcagcagcaatgaagtctaagctctttg

SEQ ID NO: 359043 - DNA, 283 bp, Zea mays
ctagaatccagaaagaagcacgtctcttatgatgattactattggaaaagaaaaatgatgctcatggtggaagcaactggaaaggttcaggagtttaccctaagaggtccagagatctcaggaagccttagtcttccagctcacagccttccccaggatggcctggcctctctgttctatgtgatggggtctagcattccttaaaattttgctgtcagcaagaatatatgggaacaatcctagcatcacattcaaaataggcctggcctgcacaattgcagaa

SEQ ID NO: 359044 - DNA, 269 bp, Zea mays
cttcttatctcttcgtacgtagcttctgcttgattttctccggacatcgatttgtctatgctcgctcaatcacaggcctggccttatctgccgctgctcctgatttttttcagccgcgcgtcgtgcttatcttccctgcgcgcgccgtctttccagtagcgcgcagcgcgctcttcttccagccgcgcgcaccgctcctctctcccctgtcacgcgcgcgagttcttctgcgggtcgcgtgccgggatcctggccgcgctccgtgaagg

SEQ ID NO: 359045 - DNA, 257 bp, Zea mays
ccacgatcttgcttctagtccccaggctcaggaaatctcttcccagcatctggggtgtccacccaggagactagcttgggggacccactggaggaagcgatctcttcaactttcccaagatctcccgtgaatttctggcagacctagggctagatctcaggcatcaatctcaggacagcgctggttcctggatcctacgccgcctccagtgataagatgtggtggcctagagcacccccacaccgacggaaatacac

SEQ ID NO: 359046 - DNA, 263 bp, Zea mays
gaaaaacgttcactttctcgagcaagtgtcgagggctttcgggaaggacgacgagatcatcgtgggctgccaaagcggcaagaggtctctcatggcggcgaccgagctctgctccgctgtaagctaggggatggccggcccgactccatcacctcctcctcacaaattcgctcttgccgttctgcgactcgatgccagtcaatccaatcactgctaccgtgttttcagggcttcaccgctgtcaccgacatcgccggcggatt

SEQ ID NO: 359047 - DNA, 252 bp, Zea mays
ctcgttgccctcgacaccaagaccggcgccaaggctcttgaggatgctgagaaaaacatacttacattgaggcatacacttgctggtgatggagaagtggaaccaaatcaagagcaggttttgcagatagcccttgagatttgcaaggagggtgttctttccctctttgttcagaatcttccttcattgggttgggaggctagaaaggatcttgtccactgctggtgtattttgttgagacagaaggttgat

SEQ ID NO: 359048 - DNA, 256 bp, Zea mays
cccacggcagctgagcacgtcgagctgcctcggtgtttctatccgccatggtccgcccagccgaggtcttgcccagctcgcctggccgctgcgcagccctctcagctccatctcccagctcgccaatttcctggctggagctcgctctgctctctcccatgacgcgcgctggtgcccagctcggcctccgcttcttcctgttcgcgcttgggatccagcgcgtccagccccagcgccgtctgtcatccccagcttt

SEQ ID NO: 359049 - DNA, 254 bp, Zea mays
caatttactaaggaacaacaggctcaccaactgatgtcaaacataagaaccccacatcagactgatacgatatggtactactttgaatctgttactagtaccatcttgacagaggatacatgctcccaaaacgtttgttaccacacttaaaaatcactgccatcattaagcatcagtttcaaaattatagccattcatgatttacgttttccagatgactatcattagtctagtcctttgaatttgtaagggga

SEQ ID NO: 359050 - DNA, 257 bp, Zea mays
ctctggcatcggctgcaccgattccgtcataaagatcacgagcgctccttactcggctcgtttcgccgtgggcaatttttccacgcttcaaatccatgctgcttgtcccgtgtgcgctcgctcttcgtccatcgggtttcgggcgtgctcgcgtttgccgtcgagtcgtcgaacccgtcatcccctgctgaaccacacctcgccagctcgctccagacacgatctcgttgtcgttccgtgcgtcgtcaagaaattcc

SEQ ID NO: 359051 - DNA, 254 bp, Zea mays
cgccggatctcctctgcgcgcccagccgtttctccctgcaagttccagcctcctgcgtgctcctgctgctctgctctcattgccgagctccctttcgcgctgagctctctgcccacgctaagctcgctctttccttgttttccacgcgcacgactccgccgtccacgtcagcttgccagacctgctactttatatatatatatgttaccttcccgtattatcatcaagcccgtcgaacctcgttcttctctgct

SEQ ID NO: 359052 - DNA, 228 bp, Zea mays
atttgacaagcctctgagggttgatggtagtttgtcttacctgaaaaaagtactgcacatgtatcctgactgcagtttagtgagaaaccaacttggatccctgctgctgtggagtggagattggatggcttctcacaaagcaataagggttacctctctgtcacatgggcacacatccagtatgggcctaagatcaccacatcacatacaagcctgtgcaatggtttc

SEQ ID NO: 359053 - DNA, 233 bp, Zea mays
atgctcgagccgaatacggctcgagcacttgatgtggccatcaaatagtcagtctgatgatggttgcaacagagccctagatgattgtcagctcctcacatgtgggcaggaagaaaccatccgacgctgggatgttaaatctggcaaatgtcatcatgtttacgagaagtctgccactggtttgatatcatgttccttgttccccgattggaagccattatcttgtttagctg

SEQ ID NO: 359054 - DNA, 153 bp, Zea mays
cttttccgggccttgacccatagttacctttacactccagtcgacggataagaagaatgttcagcggctggctaaacagtctcaactgctgcagctattcaaattagtgttggagatgcaatttatagagataaaatactcaagaggctatcg

SEQ ID NO: 359055 - DNA, 263 bp, Zea mays
cgagatttggtaacgatgcagtagacaataggaaccttggtgagttcgtctccgccaatgttccaactgttgggaaattcattagcgacttctccagaagcgaacaccatctgtacctgctctatctgttatttcatatgtcatgcgatgcctccaaaggtctgaattcaaagctaaccatggagagtgggtcaaaactgtaaaacctaacctaggccctggcatccgagagcgggtgcatgaagccattgcatcagaagatg

SEQ ID NO: 359056 - DNA, 130 bp, Zea mays
ctcaagccgctccgctcttgcctcacctcccggtccatcctcgctagtcacgcgtgcctcagctcgacagcagccttccctcgcgacagggtgagcacccttccccaagctacgctgtttctgacccacg

SEQ ID NO: 359057 - DNA, 251 bp, Zea mays
cctcatagaggcttcaaatacttgtactcggttttcaaagactcggtattcaaagatgatgtaaattatcggatatgtttggtgcaccattggacaggttatcaaacatgttatttagagaggtttgtaattatactacttatcgatgtatttggtatgcacattggatactacgtacagtaatggccagaacttgtcgttgggaaggcaaaaaaaaatgagagtatagtggagaaaaaaagggggggggg

SEQ ID NO: 359058 - DNA, 254 bp, Zea mays
ttactatctgcccattacagaaaggtttgctaatccctgctctagacaattcatggaactggtgcttcctggtaccccctttcagagatgctactagaagaagatatacatgggttgttctagcactgctttatgataaatctgcctcattttattctgtttccatactgccatcattcgtgcctcttgctttaaactactttatctctcaaccatttacccattatccaggatccaaacctgggttccatgtg

SEQ ID NO: 359059 - DNA, 214 bp, Zea mays
cttgtgtaggacacttttgcagtttgacactaagataacttctgtgtgcaattttctatgcttttttaaaaactagtttcatttcattttcatgagatgtttggtttataagatctgaggatggttataaatactgtaagtattgtaatgttatgaatgcaggttatttgacagctgtttatgattatatcattcctgataatgctatgtggat

SEQ ID NO: 359060 - DNA, 143 bp, Zea mays
gcagagcatggggaacttaacgtccctggaggagctacggttagagagcatagttggtcggtgtatgtgccacccaatccctagtggcagagcttggcaagctaacaaggttgaaggtggtcagcagcaccttttcagaggag

SEQ ID NO: 359061 - DNA, 122 bp, Zea mays
cgctgacggtaatgcgcggtattcttgaacgtggattggatgccactggaagggcggatctctgaggaatatgacgcagccgctggtgctgcctggggtgatgacgagttggatattgctga

SEQ ID NO: 359062 - DNA, 263 bp, Zea mays
tccaaccgcgcgtcccgctgccggccgagctccctggccgccgcgccgcggactccagcgctcagtgcccagcttccagcaccgtggctttctagctccctctctcttctccatttccctcaagctcgccgtggccacagggcctctggattccatatcactggtgtcctcttctccggccggttcgagtcggccgccgtcgcttagcttcagctcgttcctggccagattccctgctcggcgtccctctctgctcgttgggt

SEQ ID NO: 359063 - DNA, 263 bp, Zea mays
tctcgagccgattcggctcgagctcggagcctcacacgggcggacgagcgggagcttctcacaatctcccctgccgtgccacgtccctgccgccgcgcttagcttcgcatcttcccctcctcctcctcctccttcctcggccaagcgaggagcgaggcgcgggcgcgagcgcgtcgttgagatggattcggaggcggtgcagcacggccttctccctctgtctgcctgtgctcctaccgccaacagctgcgcgcattacagcc

SEQ ID NO: 359064 - DNA, 258 bp, Zea mays
cggccatccagcctctggcgagcgtgcggccagtcaccagcaccagcatggacagcgccatagagtgtggagtgcccttgattcggtgctgctcctgatttgagtctgactgtcgacggagatgctggcgataccacagctgggctcgcagcgatgctggccagtggtgacaacctcaagcctcatccataagccttccttcatctgcatctcaccatcttctaaccatgtggtaaatagggccacaacccatctagg

SEQ ID NO: 359065 - DNA, 225 bp, Zea mays
gtcatccttaattaccgtaataatacgaaggcggccatgattgttgttgcagtagtactggcgctgctactgctgttctatggggcgggacacgccgaatgtgtcacggcgaccatcccccagaacagcacaacacggccgacatgctctccctgatcgacttgagaaaggatatcaacttcgatccaggatgttccctcacatcctggaacactaattataaca

SEQ ID NO: 359066 - DNA, 251 bp, Zea mays
cttctccctcggctcgcccaagctccttcttcctcccccaactcggcgcctcgatctctctcctccctccacctctctccagccgcgcgtctccctgctctctgcgttcttcttcctccctggctcctactcacccaacgacgccgtcggccggatctcctctgctctctctgctcgccctggcccgccgtgctctgctcgtcacggccgcgtgagcgccgagctctctgccgcggcttccttcctcttcc

SEQ ID NO: 359067 - DNA, 249 bp, Zea mays
gcagatacaacgcgacacgccgatgcaacttggatcgatcttgtctgccttctcgtcgtatacatactagaatccatccaagcctatgcgtacttagaacacaagaacgctgtgctgtgcttgcagattcacatgtatgtacactagccacggacgacgccagaacagatatggataccggcatcttccatattccatccaacgaagacaaagcggggggccccgaactaatggccttctcggccgagg

SEQ ID NO: 359068 - DNA, 247 bp, Zea mays
gcaaaagcaccgtgcttttctaaaagatcatgtagttttcaaagaggccatacatattgagaatggttctgttatttcgaagattcatcaaacatacagaataggctatcttaaggatgttattctgccacgaatattggatgatgccactctagcaagtatttaacacaatgatacattcaaataatgcttctgttatttccatgctaaaggatgatgcaccctttataagtcaactatttgctag

SEQ ID NO: 359069 - DNA, 258 bp, Zea mays
ctcgagccgccctcctcccctttggcgtcctccagatcttgccttcgcccgcatcgacgtagacgacgggggcatgacaggtcggttggtggagcggggctagaggccatcgatggtggttgtggcgacgtgctgctgggaagacgaggcaactctctcctccagcacaccctgtggtggagacttgccatacatatgacgcagctgaagctgcagagggcgcgcctgtgccgacgacggaagcaaagaagctggcgt

SEQ ID NO: 359070 - DNA, 283 bp, Zea mays
cgagctctctgctcacgctcagcttgctctttccttgtttaccgcgcgcacgaattttatctgctcgccacagcgtgtcgagctcccgcactatcatcgcttctatcgcaagctcgttagccacagttatcttgaccgcgtcagctcgccagacctacaactctatatacgccaccctctcgtatcgttgtcgagcccgtcgaacctcgttcttctctgctcgctctcgtcgaataccaaatcccggatattagataaaaataagcgaggcccctgtgtatcg

SEQ ID NO: 359071 - DNA, 275 bp, Zea mays
gagccttcgaatcgggttcaatcccgtcgatctttctgcccgccgccgccacgggactccagaagttgccttcgattcggccggggccgtggacgcggggatcgggctcggagaggcggcggggcgtctcctggcggccgtggactggtagcgcgaggcctaccctgcgtacgacgacttcctcgcgctccccgccttcgatctcttctgccctaccgtccgcttcctcctcgaccgcttcgtcttcaagtgggttgcaatgaggcttatacatg

SEQ ID NO: 359072 - DNA, 245 bp, Zea mays
gtattggtgcttatgagtttgagatagggagagtttccgtaatctgcagttttcctcaccttggttgcacatatcgattcttttttcgggttttgtcctggcgatcgatgttaacggaagtgtagcatagaaactaagcttggtatgaataattagcaggaaaagcttagcctttttgccagttactacaaaggtaactaaaaaaaaaaaaaaaaaaaaaaaaaaagggggggcccccgtttttt

SEQ ID NO: 359073 - DNA, 163 bp, Zea mays
gtatagttcagcacctaagtaagagcttgttactatacaaaaactgattattagtaagatgagatgtatagtttacaatcggtctaccggataaaccattagccttgctctaattttatatatatgtaagcataaatgtataaaaaagatgtttgcggaaaaa

SEQ ID NO: 359074 - DNA, 277 bp, Zea mays
aatgagcacggctcattttctctacgtgctggctgtggtcccttgctcaagctgtcgggcaccagatcgcctggcttcctggtcgtccagctcgctggtggagccctggccaaagcggcagcagcgccgaggtttccctctgcctcgcacgctcgactcccaagctttactctttttcccatcactcccagctcgacatcgacgtccgctgctcagcatggccggcctcgccgtaaactagctccggtctctggcagccgcggcgctcgtctgcttc

SEQ ID NO: 359075 - DNA, 244 bp, Zea mays
ttctggacataaattctttatttcaattattctttggtgcaatcatcttctgacatctttcactttattgatttgcagaactttgtatttcttcttttaaatattttcacacggtttggaattgaggttgggatgtcaaaacaattgcctgccccaacaattacaaaggatcatcctgtgagcgtcatttataaaatccttggtgctaattcttgcaacatcctcttggagctattccccatca

SEQ ID NO: 359076 - DNA, 280 bp, Zea mays
  unsure (1)..(280): unsure at all n locations
ataagataactaagatagaatctctacatacggaatcactaaatggttgtatattccaatataaattgcacatcatttcgtctggataagtcaacatgagaccacttttgctaggatatttgtatttgtagatattgggacacaaaactaaaaatattatgagtcttagctaaactccttcagaggcacatttatatangagcntacccgatttgtntttttagcttccagcacttccatattccgctcnatgtgtatttttttcttaatatcactgtac

SEQ ID NO: 359077 - DNA, 279 bp, Zea mays
gtttatgccaagtgatattttggttgtggagtttggcaaggttcagtgtccttgggcagggcatgcaaacctgcgtggagctgaagacaggccacgtatgattggtccatgcgttgctggcaccttggagtctctcttcctcatgctgtgagtgacacagctcttgagttcaagtcgatatacatcctctccccagccaatagctcggtctgcccttgtgcttagcgctccaacactcagtctggtgaccacgctcacccaactgctcacctcaccgtg

SEQ ID NO: 359078 - DNA, 266 bp, Zea mays
ataagcgggacggccgatcgggagctgctgggagctagttgggagccaaggcgtcgtcgtaggttgccgtctcgctgccgcccgccggccacagttgctgcggtgccgtcggccatatctgacggctgaccccttaccggcagttatcctcgtccctcacgcttccattcctgcgcctctcgaatctcgatggagggccgcctcttcgataagcccttgaacccgaataagctcctcaaggagcaattcgtgagcaacctgacggg

SEQ ID NO: 359079 - DNA, 287 bp, Zea mays
cttaacgccgccgcggatctgctccgcgcccccgacgccggtgattaggagcaggagcaagaggggttcggaatgacctgcagccaaccatctaccagcgactcagcgagcgagagcagacaccgccagacctccaccaaggggatggaccccaagtttctgaggaacttgaggtactcaaggaagggcaataagaagagttgtgaggctgagtcagaggagtgagatgatgcctgagtttgtggcgacaaatgcatctcttgtatcgttagggtcttagttgtgaa

SEQ ID NO: 359080 - DNA, 269 bp, Zea mays
ccgaaaccgagatctagtgcttgattcggtcgtttttgggcaccaaacacgtacttgggaccgccgccgccgccctacttccagtcccagctgctcaggtctccatcggctcgagccctttgccggcgacgagcactcacaacaccagatgcagccccataaaggtccctacccttgtcccccggcgctattggttcccctcgcggacgcggtagaagcacaaaagaagtagagcgcccccgcccttgctcccgtgatcgccgcctgcc

SEQ ID NO: 359081 - DNA, 110 bp, Zea mays
ggccgaggagcacttgggcatcccagccttgctgcttgccgaggacatggtggccttgaaggtgcctgaccggctgagcatcttgacctacgtgtcccagtattacaata

SEQ ID NO: 359082 - DNA, 256 bp, Zea mays
gctcaacgagaccgatggccgcccggggcttgtggaggatgaaggagacgacgaagacggtgaggacctcgtcatcgtcgccgacggaccagcgatggaggagcaggttggggagaggacccagcagcggcaggggcagaaggagagcgaaaggacggaggtgagcctggtaagacgatggcagcaccgaccggaaggatcgggtacagtggcggcggcccagggttccatcagcaacaccattccatgttcaagt

SEQ ID NO: 359083 - DNA, 266 bp, Zea mays
tagatccacccgattattggcttaggatcagaaaagggtttgaaagtttgaactctttccgcttcgaatgcggcgagtacatgtgcctcatatttgaagctggatcgagccaaagctacgaaatacttgacctcgaggtttcatctgttgaggactacatgattcagaaacttggttttgattttggcatcaataacctatcctgcatctccaaagctactcttagatttagtaatcggggatgcagccaagaagatgaagttgcc

SEQ ID NO: 359084 - DNA, 270 bp, Zea mays
gtgctgcgggaggtggtggtggcagcgtagtccatggccatgatgatgtgtctccagcttgagaaggccgaggtccaaatggagctccaccagttccactgagttttgctaagtcttctggatggcacactcctgtcgtaccacaaatcagaaccaatgcgtcaataggttaagggtgcaacattgtaacatactactgaaatatgtggttcaacatctctcagtaacaatctcctctggacatttgataaaatttgtgtagtaacggtg

SEQ ID NO: 359085 - DNA, 172 bp, Zea mays
ttaggaggtgacggtagaagaggaggaatacggggaggagatggcgctagatctccgtaggcatggcgtgggaggtggaagcggtagaagaggaggaatacggggggagagagagagagagagagagagagagagagtgagcgctagatccccatagacatggcgtgggaag

SEQ ID NO: 359086 - DNA, 255 bp, Zea mays
gtatcccctacgttcctctctattcgctgaccgagctccatctccttgctgaccatggcgccctgctctgctcgctaatagatctagacccgtgtcatcatcatcttaccatgggtgtcgacatcaatcgtctcgacaaccaccacatccacgactccaccgttccaataattttgccgcatcgccttttaaatccgagtccccgtccgtaggatcgtcgttgacctcacaacttcagctcgagttaattatgga

SEQ ID NO: 359087 - DNA, 182 bp, Zea mays
cacacacacacacacacacagacaagtggtttccaaagccaagtgtgtgtactaacaaccagctagctcgggcggcaacaagcagccatcatgtcggaggagagcaccaccacttcttcaaccaccacaagaagggcgaggaagcacccgccgagcgagtacgggtactccgagaaccgagt

SEQ ID NO: 359088 - DNA, 126 bp, Zea mays
acttgtctgagtattctatcctttcaaccgtggtgcactatttactgcattgggtgtcattcatggactctctcaggaattgctggatacattggctacctcttgtctattgtccaattctgaggg

SEQ ID NO: 359089 - DNA, 220 bp, Zea mays
cacgctgtacgttaagcatcggaatctcgcgctacgagtcaggcatgtctcagatcgcacagtacctcttgaggagagtctaatcatcactttatgacctccaaaggcctggaagttttgtgacccgatgccgtactctatttagagctttgaggaaagctggcgttaaaactagcgtcgtctccaatttcgatacccgtctacgccactcctgcaggcc

SEQ ID NO: 359090 - DNA, 175 bp, Zea mays
ttcccacatgctttgtgcgttcgtcctccagcccacctttgtggtgcccctctcactgctccagctcctttcaacacgagctgccgcaccggtggaacaacaacgcgctcggacttccccttgcctccaacccttctgtcgtctttctcctctctctaatctctagcgcatctca

SEQ ID NO: 359091 - DNA, 161 bp, Zea mays
ttagaccgtatgaacatggaccaagtattgcagacagtaatacaaatattggtcatgttcatggccctttctgatgataattctgaggatattatgcttgtagctgagaatccccgtgtttatgcacagttgatgattgtgtccagtagtggctttgatga

SEQ ID NO: 359092 - DNA, 175 bp, Zea mays
gtggcgtggcgtgtcgtgtgctctgtcgtgtcgtctcagcaggtgtcagtgcacctggtaatgttcgcctcctgccttcgatacgagatatgagggaagaaggcgcgtggggaaaggaggggtacatggtggtcggcagatcgtggagtagtgcgtgtcggtgaaggcggcggcg

SEQ ID NO: 359093 - DNA, 167 bp, Zea mays
aatcggaaagctaagcttgctcgcattgctacagaaagagggacatttgatggaaatcatggtgataagcatctaccccttcacccggcgagtcttccgaaagtgctggggaggacaactatataccccctgcaagttcattcactggtccttccaaaggcagactg

SEQ ID NO: 359094 - DNA, 174 bp, Zea mays
  unsure (1)..(174): unsure at all n locations
actcgagcctntcggtaatactcaaatataaactgtggataataatgaatgccttcaattttgattcttttaagtagcaacatggtagtttcattcatcagaatagtatgatgcttgtaagactgatattgagaatatttcgttcttgctttctggattgctgcataatgcctt

SEQ ID NO: 359095 - DNA, 176 bp, Zea mays
gtcaagaacagtttgtgttaatagtattgtatttgtattgtgcagaagtgggcatacaagttgcgataaagcctgaattccgcattaccccacctcctcaattgccaccagagatggtagagattcctcgcagcaccttcaactttgattttgagtatgagagaatgactcttgct

SEQ ID NO: 359096 - DNA, 175 bp, Zea mays
atttttacctcaaggaggttatgaacggcctcgattggattgccatcacgctagctggtctcggcaccataggtagtgctcaacacttggcttcatatgtataaaaagcaaaggcgtgagcaagagttgactcgaggcctcaagcatgggagggcaattgttgtatctacatgta

SEQ ID NO: 359097 - DNA, 185 bp, Zea mays
gcagcgagaggtaagagataaaggaaaggaaaggacaaaggagcggcggccttgtctatggcgtcgacggcggggtacctgagtcgcggcggtgcggcgcagacaggagccggtgttcagcctgctgctagccgcaggcggcccaaggacacgctcaactgggccgtccaccgccacctcttcta

SEQ ID NO: 359098 - DNA, 137 bp, Zea mays
ctagtgctagatcacgggcggccgctcgtgatctagtagcctctcttcaggttgtgtttctgctcaagtgaaccaagagcagcctcatgatggttctacgcctctgagagtagatgacaagaatggggattatgttt

SEQ ID NO: 359099 - DNA, 226 bp, Zea mays
gcttctccagttctccttccggcgcaccgtgattcaggcgttcagcgccacgctgccgtcgcgggctcccaggcctagcgtcgctcaccgagtctcagcgttcagcgccacgctgccgtcgctcgccgagtctcaggtgtcagtcaggaaccgaaccaccgaacaacacagataagtaccctattctctcacaaattgctcgtgatgtgatgtctatacaagtgtc

SEQ ID NO: 359100 - DNA, 240 bp, Zea mays
cctcgagccgattcggctcgaggtcggattaattttcagcttctctcgtgtggttctggggcgataagctcttcatcggccgtcgcgtccaatcttcagttcgccgactgactgtcgtgttccttattttcactcgtcggtcgacttcgtcacgacttagttcgtccatcgtgttggtcgctatcacatactgtacctattagctcggatcctgcccactcgtcgtcgcgtcgtttgccg

SEQ ID NO: 359101 - DNA, 205 bp, Zea mays
ccgctttagccgagctgccgtcggccatcctgtcgttgatcttcatcggcggggtccatcggcggagctcggtcgtcgcgcttaccgtggcggccggtgccttcagtctcgcgtgcgtcgtcatccccgagggctcggcggcgcgcctcgcggccgagttgctctccttcttctcgaccatcacggcgttcaacctcatcctgat

SEQ ID NO: 359102 - DNA, 253 bp, Zea mays
cgcggctgaagatggcgacagggcaggcgggcaaccagatgatgaacttcgccgaaccgccgcacacgttcggcggtgcgaaccagcaggtcttccaccacccgggccaagcagtgccgccattcctggtggcgatgcaacagcagcagcagttgctgctgccgcacatgaaccagccgttgcaccctctgcagagccagccgctgcatcaggcggcgacgctcagcatcgacatggccgggctgccggcgct

SEQ ID NO: 359103 - DNA, 262 bp, Zea mays
gctccccttcctcaccgcgcgcgtacgccgccgccgcgctcacctcatcgggttctaaacctgagtcagcggcctcccccggaggtccgccgctccgtgtgggactctaggcgtcgccggagccccctccaggggctagcggcggaggaagtcggaaaccgattacccctcccctccccttaccgggggagggagaaactagcggcggcggcgaatcaggtcagagtggggcacgatgaggatcatatcaagggaggcgtgt

SEQ ID NO: 359104 - DNA, 252 bp, Zea mays
atcagaggcaactattcttgtctcgggtctcgtaagaatctcgcacagacaagccagaatccattttgagcgatcaaggctgatggcgaggcacatcagtactggcagcgaacactccctgacgacatcgcacctgattgcaaagtgctgggacaggacgaaagtccgggacctggcagtctatgactcgcaggcctggcgattgaggatggcattgacacatcaatatggtctccaaaccagacactgggc

SEQ ID NO: 359105 - DNA, 255 bp, Zea mays
tggaaatggtgtccatgttcgaacgtcacgaccagggatacaaggcctctaagcattgctcgtggtatcttattgtaggacggtgcctgagcaaatcttttccgcgtagtcacttgtctaaatttgactgcttttaataaatttgcctgtttgatgctcagtatgcttggtgaactgccactttatttcagaaagtagcaggacgctttatttggtttgaacaattgctgccttatattccgacatgcttattct

SEQ ID NO: 359106 - DNA, 258 bp, Zea mays
cgtgaacttatctggttcctgctgagtccggttgccaacttctctgctgttcgcatcggttcttaaaacacagatgctgatcccatggaaagatcccgctaccagctgtcgcggatcatggccgctgggattgccgtctgactcaacggacagtgccatattactatgtctgtcgaccatgcctggctctttccattgtagtactcggcttagggacacattcatctgcaccatgattcgttgggcctggaactatgt

SEQ ID NO: 359107 - DNA, 264 bp, Zea mays
ataatagatcccttttctagttgtaagcatgaaacccaggaccggtggtatcaactaaaaaagggttctattttttcagattatgaacataccatggaaacatgaagcagggttttacttttatatatgctagcaattgttatctgttgtgttgctttacatttctgttacttactcttttgcaggtaaaatatacagactgtggagttagtcctcaggatctacatcatgtattcacaaagtttgctcatcctcaaagtggag

SEQ ID NO: 359108 - DNA, 240 bp, Zea mays
gccgcgcactcctctgctcggcgcctttcgtgctccccatgtctggtgccctgctgcccagcgccgcgcccctgctcctgtacattctagcagccgagtttcttcttccccggcacgtcgctctctctgccttgtcttctctcccctgcgcgctagtcgctcgtcttcctgcgagcgactctgctccctctgccctctcgctgacgggcgccctctctgcttctctccacgccgctgtca

SEQ ID NO: 359109 - DNA, 242 bp, Zea mays
accaagttcaatgttttgagttgtgtctatgaacttgggtggaggtggtgcatgagagccacgtatggtaaccctgttgtgctggcatctttgggattctcttcatcgagttgtggttaagcttgatggttccctcccccttgctctacatatattcggtggtgaaactgaattcatgacccctttctaattatcagcaggttcctaatatggagtgtccggtgcccagatacacaccctcc

SEQ ID NO: 359110 - DNA, 272 bp, Zea mays
gcccggcgtttctctggccgaccgagctccctcgccatggagttcccgatgctctgcccagccccaacgcttggcttccatcctagccgcgccctactcggcttctccggtgccggccgccgctccaagtcgccgttccagccgacctcattactcgttgctcctgatggctgattggaccttgtaatgttgcgacaacgacacgcaatggtgtcgctagttgatcacgtgatgcggaagtcaagctgagtcgaccacgagatgctgtttag

SEQ ID NO: 359111 - DNA, 275 bp, Zea mays
ctctcttctcctctccaaggtccctgccacccacacaaggcttggactcttgggccggccgggggggaagaagacaagacaaacgcagccgccggcatgatggcgatctgcagcgcgcacaccaccaccatctccctgcgctccccatgcacgacgaccgtctcgaacgcggcagctggcttggtgcagaagcaagtcatcttcttgaccagcatcaacaggaggagcggcagcagaaggcgtggaggaggggtgagcaggaccttactccaggt

SEQ ID NO: 359112 - DNA, 228 bp, Zea mays
caaggcaccacacctcttcctcctcttcctcctcctagcacagcaagcgcctgctccccgtcgtctgtgatcatgtcttgcagcatcggcaagtgcaactgcggctccagctgcggctgcgccagctgcagctgcaactggagcgcgcccgcccgcgacggcgatggcgcacggctatctcgacgacgacgacgacgaggcgtataagtataacagcagcgtctaaat

SEQ ID NO: 359113 - DNA, 266 bp, Zea mays
gagaaccgtgagcagagagacatggcgcgccaccaccagcagcgggcgctgctcctgttcccactcgtcttcctcctcctcctccttgccccgcccctcgccggcgcgtggggaaaggagggccacatcatggtctgaaagatcgccgagaagtacctgtcgaaaaaggcggcggcggcaaaaaggtgttgccgacataatccgccggagaggaattgtcggcggtgtgcccgtgggcgaaccaagtgcgctggcactaccatggg

SEQ ID NO: 359114 - DNA, 182 bp, Zea mays
gtggctgcaggctctttgggaacagtgatcctcaggacagcttaatgcctcctgatgcagtcaccccgccgccgcccacctcccaacctaactggcttactctctgcctcttccccgccggaggaagttctcaaattcatctgagcaacactgagaccagcggacggccctgtactaggcct

SEQ ID NO: 359115 - DNA, 249 bp, Zea mays
cggcacgtcgagcccactcagcagtcagcagcgacccgcaccttccggtcaagagttctcgagagctacaaacgatccatcctcaccaccattcgactccacagctggaggctgaagctccgcagtcacagcattcaaatcaatctctctctttctctctctctctcacaggaggtaagccatggcagatttgcctttggcaccggggctgatggaccttcgcaagtgcaatctctctccgaagccagc

SEQ ID NO: 359116 - DNA, 255 bp, Zea mays
ttgagacagagacgcaggagcgcggaggaaaaggaggcccagaccaccgacggggaaaaaacatcacgaacaccgttctccatagcgggagtagtgaggaaggaaagagagggggcggcctagggcttcgattccgcagccatggacgccgctgacgtgtggggccgctcgtcgtcctcgtcttcttcgtccgccgcagccgcgaggcccctgcaagacggcttacgatctgtacatggggatcgacgacgcgga

SEQ ID NO: 359117 - DNA, 259 bp, Zea mays
atgacctccatccgggcctcagccgtgtccgcagcactcgccgttcgtggtctcacggcaacacgcttccgtggccgtgatggaaatattttaaattgtactaaatgtctgttgcaatctgaatttctggttgttcagctaagcactggaagttatagggttggccatgttatgaccaaaagggaagagctccatgttgtgaaaccaacaacttcagttgatgacgcccttgagatgctggtgaagcataggactctgg

SEQ ID NO: 359118 - DNA, 258 bp, Zea mays
ctcacatgcttcgctcgccggcatggcgtccccttgaggttccacggcatcgaggccaggtgggacgcggtttcggtggacgagctgagcatcgagcgcgactaggtgctcgtcgtgaacggcctgttcagtctcggtaggatgcaggagcaggagcaggacgacgtggatagggatagccggccgagccctagggacactgtcctcggtaacgtccggaagatgcggcccgacgtgttcgtcctgtgcgtggagaac

SEQ ID NO: 359119 - DNA, 106 bp, Zea mays
cgccaaccagttcaagaactgcaaggcctgctccgagagcagtccgccgaataaggcctgggagaggaaaccagatagcaccaataggtgatgttgaatctgaaga

SEQ ID NO: 359120 - DNA, 258 bp, Zea mays
ctttaagagcatttatttcaaattctaattgatagaaataaatattctgatgtgattctattggctcgtgtcaataagtggtatgtaagttatgttccttgatggatgaagcattaatagagcaacgaatgatatttttttgaaattcctcttatctttatgagccaatatattttgcgtacggttgcaactgtagaaagtgagtaatgtttgatgactgactatgtgatctgaataatgttacttctcattgttgtg

SEQ ID NO: 359121 - DNA, 256 bp, Zea mays
cttaaaagctgtcttatagagaggtttggtgagttttggcaatttatttaattttacacttacatgatttaatttttaataattataaataatcttaccaaagtcattactttccaatggtagagttgtttttaaccacaacattgttgaacctctagtattacataatcttatctcaccttttcagtgttatttatgggcagtgtattccaagtattaactggagatatgaggagttttttttattactgctatt

SEQ ID NO: 359122 - DNA, 157 bp, Zea mays
acccagcaaccacaccatcttcttgctgtgagaggtctcaacccgggctacctcctgtaactactcactgccctggggtccgtgggcaagttgcccagggtgggggtgcctagccaggtgcagtccccgctccgcctagtcctcggcgtcacgcaat

SEQ ID NO: 359123 - DNA, 266 bp, Zea mays
gaaagacagcaacacaggtagagggacccagtgtgtgctggataagtggctgtggaaggtaagtatagacctacatctctgttggggaggtggtcagggcagaatggcctgggtgtttagcagcttctaggggtgagggtggcaggaccccaaaaccaaggccctctgcatcgttgttgtaataatcagctctggcatattcagctgcaactgtccctgtagaagaggtttctgagttttatgacccatgtaggagggtgttacct

SEQ ID NO: 359124 - DNA, 257 bp, Zea mays
aagcagtcagaatgcactcacctcagacacactggaaaacagtaagagaggagagaaagaagcctactgaggaagaaataagaaagatctgcagggatgaaaaggaagcgctggggcagaatgaggaatctcccaaacaggatttgattactatctggcaactgtcagatctgagtttctgtcctaaatatgagatggcaaattccctactctcataactgacccatttccatatttaaacacacacccacagtgtc

SEQ ID NO: 359125 - DNA, 226 bp, Zea mays
tacgaaaaccgaaaaagtctactaacagctatgacttgtgagaagaaatctggcttatggtctgcactagaatggcttggtacatcgtctatggacaaaacacgctattcgattaattgttgttaattagggaaaaaaaaaaaagggggggcccccagctttggatccctggtccccgggatttatttccggccgggtccctgtaggggtaccagtttccccctag

SEQ ID NO: 359126 - DNA, 147 bp, Zea mays
atcacacgttccttcccagctccacagtgtagcctcttcgcgacatgatctagatccaagtaatataagtattcttccaaccctgcaatatcatctccgcccgcactcctcctacaacaatctattgctcgtgccaaagtgatatgt

SEQ ID NO: 359127 - DNA, 283 bp, Zea mays
gccggatccgaggtcgtcctcgtctcttccccatctccggtcgccatgccccatcttcggcgttggtctgcacctcacctcaaactgctctgctcggccagggcaccgtcctcgaccctgcaatggtgtcggccgccgcagcacctgctccctgcacgctggccgcccctgctcgtccccatggcgtccctcgcctccctgtagctccagctcgcgctgacgccgtcgtttctcagctccacaggctcgcatctggacgtgcctctacagcttgtcttccttc

SEQ ID NO: 359128 - DNA, 284 bp, Zea mays
gttcggcaatcggttcagtcttcgtcgaacttctattcgccatgacgccaagctccttcaacactgccccaacctgttgtcgttgttctgtcgcctcgtttcgacgtcagtccctacgtgatgcctccaagttggaatcgcgctgacaaaataatccccaagagaagatgtccaaagattggatggtggtgtgcgtgaagtacggatagtatctgtcaagcgcttgacaaattgcctaagtcggagaatcattaccgatctcgcgaattcgagtcagctattgg

SEQ ID NO: 359129 - DNA, 267 bp, Zea mays
caacctccagcacttctctgaatgacgccgagattttctgcgaaaagctgatgcgcgagtctccaaggctcaagggactaggtccgatctgcatatgtgaagaacgagttcgagtgggacaatttgaagaaattatccttcaagatggttgatgaggccaacacaaagctcatgagggattacgtcgtcgaggtcagccacattgaagacgaaaactaaaacatcaagtggtttctctttgaactactatattttagaggcggtcga

SEQ ID NO: 359130 - DNA, 269 bp, Zea mays
gtatcggggaatctcggagtttgcgttaactgctcgtcgtcgagctcgtctattgcgcgcgcgagattctcggctcgccacggcgtgtcgagtctcctcgtcgagtctcgccgcacgtcctgtttcctgctcgccagcgtgccctctcagctcgctcgcctctaaaatccctatctcgtcgtcaacctcgccgcgacttagttcgtcgtcgcgtcgtttgccgtcgagtcgtcaaacacgtcatcctctgctaaaaccccacctcatca

SEQ ID NO: 359131 - DNA, 217 bp, Zea mays
gtctgttgcctcggcccacatcacgccttcgcctcgcgccaccgccgtccgccagttcagctcaccctcgccgccggacagatagaagaaaattattggcgctctgacaaatccaactgaggttttcttggactacagatgaagcgggctcgaagggcgtatgtgcaagagatgactgatgagggatgctagtgaaattgatgaacttgtgacgggc

SEQ ID NO: 359132 - DNA, 276 bp, Zea mays
aaaatctcgccgccgccgccgaagactctgtccatccctagccgtgcctgtctctccctcatcttcttccctgcaagcgcctagccccagctccttgttcctccctggccgagcgcatctccatggtggtcgagctccctcagccatggcgctggccgccgccgcgcccctactccctctcttcagtgaaccatcgccacgctctggtcgggctcgccttgccccaagctctaccaccgctcgagcgtcgcgtcccctcagttcttggccttggag

SEQ ID NO: 359133 - DNA, 279 bp, Zea mays
gtggttcccagttcgtccttgcagctcggccatgtcctcttcctccctgctcaattcccatggccggtgctctgctcggattctgcccgccaagctcccagccgagtctcctcccatggcttgagcctccctgttgctcgcgtcgtggcctggccccagctccggcccgtcgcggctcctatggcgctcggccatctctgcgcccgtccatggtggttccctgcgcgcctgaattctgctcggttccgtttgcagcgcccctgcgctcgtcgcggtgct

SEQ ID NO: 359134 - DNA, 274 bp, Zea mays
ggcagcgacacgatcgcgagcgcacgcacgtaagcacgttgtcggaagctcaagttagaagaagcaccagtgcctgatcgatggcggcccaggctctcctctccggccggcagctgctgggccgccccgtgcagtcggccgtctctaggtcgtcggcgaggaaggcgcccttcgtcgtcagggccagctccagccctccagccaagcaaggtgccgacagcagctgtggttcgcgtccaagcagtcctctcctacctcgatggcacgctgccgg

SEQ ID NO: 359135 - DNA, 273 bp, Zea mays
accagcttgtcagttggaagaagtgatacagttggacatgggaacagacgagcaacaaccaccagaaaatggcaacgaggatgatggacactgtgagactgaagacacggagatgtcaaagtccccttcaggtgacccgtctgttaccgagcaacgattccgatcactcaacgaagaaagaaacgttaagcagatccagaagacacctagagaattcgaatttagtgttccggtggtgccttttgattatgccgaagccagaaagaatctcgt

SEQ ID NO: 359136 - DNA, 270 bp, Zea mays
cggctcgagaaagaattccaaggacttggacgaaatatatgaatacggcgattataccatggaggaatccagtttcagcagaccaactgtcaaaagacttttggaggacgagctacgaaagctaaaacagctgaagcttccaaatgatgaggttgagagaatattagctgacctgggacatggtgcctgcctggacaaaagttcaacccagaacagcaaagcgaagaagggagaccaaaatcacatcagaggtatcaccaccacggctgc

SEQ ID NO: 359137 - DNA, 261 bp, Zea mays
aagcctccacgccggaatccatcgaacttgctccgtcccaaccccgcgcgtggtcctccttcgaaaccgtcccttgaagaggttcgccggatgctcgatgacttccgcccaaccgtcggcgcgccctccccctccgcaaccggagtcgccgctcctttttggacataatcaagaggagcagcgtcgcccagggtgccaacgctgggcagggggtgaccggcttcgattccgtcggagagagtctcaagcgctccccgctgc

SEQ ID NO: 359138 - DNA, 259 bp, Zea mays
cgcagtcccaacgaccccgtcgtcggtcgccctccatctcctcgccgctgcctctcgatctttgtacagtttctcttttcaataatcaatatgagccgtggtggcattgcctgtggtggtcaaagttctctgggctatctctttggaagcggtgagccccccaaaccagcagtggcaccagctgcaagtgctccacctgttgagaaaccatctgctgcaaagactgatgcggccaagcaggttgctgctggggttacca

SEQ ID NO: 359139 - DNA, 257 bp, Zea mays
ctcgcctcttcccgacttgccccctcgattcgatccgaacttacttcccaggttcttggccccgctccaccgtcgcccatggcagacgatgacaaccgagcggccttcatggagctgcagtcacggatgatagataccaccgagaagatccagcatgtcgttcccttgttcccgttctctgacccgtttcataggttccggtcgtgcctcatcttagggctttgtaattgtcgggtcttgaattgtccggcgggttg

SEQ ID NO: 359140 - DNA, 260 bp, Zea mays
caagaacctctcccgctacgacatcatcgacttcaaccaggacggcggcgtccggtgctacccgcacgtcaccgtcggcctccgcagccaccgcgacctgggcatcgaccctgcgcgcaccgcgcggaactacaccatgactcgacttccgcctctacatccgcgagatctaccgcctgccgcccgcagggtcagcatcccatacaaggcggcgaacagcaacgctgcggcagctgcgcccggcgcaccagctgagcagc

SEQ ID NO: 359141 - DNA, 251 bp, Zea mays
cggcaagcaggtcttccaggcggagtatgcgctcaccgaggcctacgacaagctgaggctgtccgcgtacgacgcgctcggtgcgtggaggaagacggtgcgcgaccgataggtgggctcacggcgtcggtcgacgcggtaagcagcaggccgccggaggggtcacggatgcttcgggcgcgttgcacgagaaggtggccggagctgggactgtggctgttgatgttctcaggaaggcgattgttgcagca

SEQ ID NO: 359142 - DNA, 255 bp, Zea mays
cgcagagtgcgctgaacaccggcatggacaccatcgactctctctcgcctcagatgcttcgccagcgccagggccaccagtctactgcatcatcatcatcatcagcttgggctattaccacagctaggatcggtcgccacctgtctactgcatcatcctgttccagcccgcggctgctcatcaagcagagggcgacggcggcatcggcatcggcaccggcaccggcaccggcacagcaagagaaagaggtcgtct

SEQ ID NO: 359143 - DNA, 167 bp, Zea mays
cgtgatgggattttatgttgtattgatgttgtcaacaatgtcgttcttcgccaaccccatacacatccagcggtgcttacagtggaaccagcaattcatggctaagaacgacattgtaagcaccgctggatgtttatcgctttggctgtttttctactgttcataac

SEQ ID NO: 359144 - DNA, 245 bp, Zea mays
ccaagtcgtacgcgggcgggcgcatgcagatcgaggcgtactacgacggaggcggcgcgcggccggacttccggtccaactcctacaacgccggcggcagcgaggatgggggacgtcgtcctacgcgtaccagtacgagtacggcggggcggcggcgggggcgggggaagagatgaacggagcaagtcgaagcggcggtggctggcgctggcggacccggacatggagcgcaacgccgggtggcg

SEQ ID NO: 359145 - DNA, 236 bp, Zea mays
gctcgagcgactcgagcggctcgagtacactatcacttcgacgtcacacgggcgctgcacacagacacatcaagcgtcggctctaatggcttactaccaggaggtggactactgttcggaggatgtgaggtcggtggcgccggccggcttcggcgctcacggcggtggcgttccagcagcacgtcgtcacaggagaagttcgaggaggtcgacacggtcgcacgtgtcggcgccaa

SEQ ID NO: 359146 - DNA, 176 bp, Zea mays
caggcccgtaccgaagaactgttctcctgcgttcgtttctctggtcgacggggactatcgggagagccgctgccgtacgtccagctgccacgggacttcatcgggccctttgccggtgcaggtggcgcacatctcagcgaccaggatgctgatagcgcttcattaggtctataaat

SEQ ID NO: 359147 - DNA, 125 bp, Zea mays
cgcgctacgtacagctacggcaattacggctcgagccacgaccgcccgcgtactcctctgccacgccggcgccggtgcctccgctggtgtggtggcggcgacttcgtgtgccactcgagtcatca

SEQ ID NO: 359148 - DNA, 134 bp, Zea mays
  unsure (1)..(134): unsure at all n locations
cggccagctcccgcccacgccgccggatctcgcaaagaaggtgttcgagagcatcaagcaggcccaggagacgtgcgccgganccggtgancggcgagtgcgtggccacgcgcgangaggtggaggagctcagc

SEQ ID NO: 359149 - DNA, 178 bp, Zea mays
  unsure (1)..(178): unsure at all n locations
ccaaatccgagatctagtgcttgattcgttcgttttcgggcatccactcgttcttgtgcttgtctccgccgcactacttctctcccagctgctcaggtctccatcggcctctcgncctttgccggcgacgagccctcccaacaccagatgcagccccataaaggtccctacccttgtc

SEQ ID NO: 359150 - DNA, 245 bp, Zea mays
cgaacgtgagcacaaacattcagcacaagatcaagaaacctgatctagataaccccatgaccatagggagtacagaagtacatatgtgtataagttgtaacctactaacctggtacatttctttgagttgtgttgcaagtactacattgaagcccagttatcaagagcatgttttatgattagttagaggattcacatcggtgacgatgaatatatttagactaatcattttactattggtatgt

SEQ ID NO: 359151 - DNA, 213 bp, Zea mays
atcgactccttactggagcagctaaggtaaccgactaaatagaataaaccgaatgcacaccaacaaaccccactaccgatacgagtcgatggacgccgagggcgagaagaagatgataaaccacaaaagctccgatggcgaggtgttcgaggtggaagaggcgatggcgatggagtcgaagaccatccgacacatgatcgaggataactgcgc

SEQ ID NO: 359152 - DNA, 134 bp, Zea mays
cacacgtacgtgagctacaaatacaacacaagctcgaacgtacaactccatctccgacgactccctaaccaccgacgtcataatacactacaataatccaccatcgcgtgaggcgagacagtgcacaaggggag

SEQ ID NO: 359153 - DNA, 144 bp, Zea mays
caccctactacatacctactactagacgccaaaaccgagctactatactacccccaaacaacagtacctaccatacaatcaatgccaatactacgcggtacgaggaacacgactgagggacagcgagatgagacagacacagat

SEQ ID NO: 359154 - DNA, 131 bp, Zea mays
agaacggcgacccagccataagatccaaggaagacaggcttgtaactgacaagttcgagaaacgaacctatgagaaacaggtcagacagcagggagagcacgacacgaaccaccgagacatgatggtcggt

SEQ ID NO: 359155 - DNA, 105 bp, Zea mays
gggcggatgaacctacaacctaccctacataccccgtacgaccctagatgagctacgcctaccacagactctacgctaccgagtggacctatccgactaccgcct

SEQ ID NO: 359156 - DNA, 128 bp, Zea mays
tccgcttgttattcctgagttccattacgcaatgtataacataggtgaggaagcttgggaactgtatctacagcctgattgcgctcccagggcaatcctgctgatgatgcagttcccaagcttcctca

SEQ ID NO: 359157 - DNA, 280 bp, Zea mays
accacgtgacaggattgtggactgctgctgcattcgcttgcgttatactataactgaagcaccatatgatgcatcaatccagcagaccagcaagttagcattctctagaattgccatggaattgtcagtcatgtgagtagttaaccgactcatttgcctgtatgacgaagcctctgttttccgtgtaaaataagaaaaggaagcatctgagaggccgcatacttgtgttcccatgaaaccctaccaacctgtaatggccgccaataaaacagtcacacgc

SEQ ID NO: 359158 - DNA, 287 bp, Zea mays
ggttatttggtgctttaggtgggattctattttatcttatctcatatgtttcattgcttctgttgcttgaatttcaagcgattgtccttagtagccctgctactgcaacactactaaagacagcttcttgtgactcccgttatcaatctggtcaatcgttgcaccaggagaggggagggtgagctgagaggggtctcatggagatggagggcagaggcctgtctgatttgttcaggaacaccagcgaggagatcttcctcaaggcagtgatgttgaactcgatggga

SEQ ID NO: 359159 - DNA, 121 bp, Zea mays
ggtgacactcaggtcccctctatcttcacagaaatcctcttccggcgaaaagccatgcacacatcgggaatcagatgttggtcagacaaatagttgtagccttaacaattccagagagcat

SEQ ID NO: 359160 - DNA, 291 bp, Zea mays
gaagactttgcctcaggaaggttgttatccgaattctctatactcaccactttattttttttctaggtgtccaaaacagagtaaagtttcaagactcttttgtttagaatcgtgcaaaggatcatctagcagtgcatttatcatggaggagatgaaaagaagatttaatgatgcatggggataattgagaaaacctactactgaagaaaaatgctttagctgagtctgaatgagtagcacatcttatggattttttgtttttcatagatctgtaattcacatgagggctac

SEQ ID NO: 359161 - DNA, 288 bp, Zea mays
atcatggacaaggttcattgacaccagacaccatatgggaagctcacggtctctcgaagccgcagcctttgtctcccttaatgggaagctctgcatcatccgtaacaatatgagtatcactattgttgatatattggacccaacaacagctactgaggtcgacagtgcgcgcatgtgggaggcttttgctcgaaaggggcagcacagatcatcattcatggcaaacctatggttaatcatcacaggtcgtaatctgaagacagacattatgcattgtcaggtgctcca

SEQ ID NO: 359162 - DNA, 166 bp, Zea mays
tcggaatcggctcaactcgacgtttttggttgataaaatgtacagtttctcatttcttttctgaaataaaccgtctatccagactgactaacgacaacgcagcaaaaaaagggaaaaaatgtgaatatcacacaaacagagcaaatgttaaacacaaaaagaaaag

SEQ ID NO: 359163 - DNA, 126 bp, Zea mays
tcataactcagaatccagaatgcctaagcagatccacgagaataaggacttccttctgacggcacggtcgataggatgcgcagtcggtgaacatcaagaggagcatagatgtcgttaagttgaagg

SEQ ID NO: 359164 - DNA, 128 bp, Zea mays
acacgccagtcagaaagtgagatcctagcaccgagtcgacgatacaagtctcacctccatcctccattactcctcatcctagatccctctctccgaaccccgccgctcgtcgcagatccgaagggcat

SEQ ID NO: 359165 - DNA, 196 bp, Zea mays
ccaagttgtgcagttgttgtctcaagcttgctgcctccctttgccagaactattgaatgtgaaagcacagttaagtaatgccacgcccagagaatccaaaagtgctgacatctcaatggagctaaataatcccagagcatgtgaaatcctaatgacgcatgcgtcttgagggacgaaacaggacaagtcagagatt

SEQ ID NO: 359166 - DNA, 191 bp, Zea mays
gctctggtcggcacttgtggcaagatgatgcttgttatcggcagaagtaagccagtgcatctcccatgtattttattttgctctaattttgagtcctgtcttgggctggtataagtattttacagggcaattgctggttcaattacaacatgatcatacgattgctgtatgcatgataccagcacatgcac

SEQ ID NO: 359167 - DNA, 301 bp, Zea mays
cttcaacggtgcacccttggctccccctcccctaacactgtagccgatttaggggctacagtgtgcccctatccccttcaccggcttcctcctcctcctcctctcgcctcccgattccttctctctcccgctaaatggatgggcacgctacgccggatttctcccccgcagccggttccttcgtccacacgaccgcgcgctcggaaaactccgcggagggcgaaggaggcgaaccaagggcgacgtatccgccgccggagaaggtagccctcgatccgccgtctcccgcgattcgtttgtc

SEQ ID NO: 359168 - DNA, 276 bp, Zea mays
acgaaggatatcttacaggtgctctttatgattcatgattgcactggctgatttgcagataataccattacaccagtcgtggggaggactactgttgtgccttaatttttgtatggtgcatttgccttgaaaaccatgacggagttgctgtcctgggaccccatgtaaacttgtgacattcacaaatgtcggtattggttctatagactatagtccggcgacattactggatacgagccacggcttctatataaaagtttcgtgctttctgtgctg

SEQ ID NO: 359169 - DNA, 272 bp, Zea mays
cataaaactaaaatgcattaagttgacatgtggcatgcatgttttaaatgtcttattctactgccgaactttctaatactccatttttatattatattgtctatctgtacgtgtggatggagataatgatattatgtgatgtgatgatggatggattagcttcgttgaatattacatgatattatgtgatggtgatattaagcggacattgcagtgttgatatatgcttcatatttttggattaaaaaaaaaaaaaaaaaaggggcggcccc

SEQ ID NO: 359170 - DNA, 196 bp, Zea mays
aaggaacccaacgcttgtgttcaagcagtgcttctcagggagccaaacccactaggacacaatcaaagaactgtagttcctagatcacagcatgcatctaatgtactgggtggaaatgagttggtgattgttggacctcgatatgctgatactgtgccacccattgcaacaagaggtctggaaaacagcaaggaga

SEQ ID NO: 359171 - DNA, 230 bp, Zea mays
cttcaatggatgaaattgatgacgatatatatagggatatcactcttgagccacataagcttgatgaagagattgttgaatctaatcttgagcttgaagcagactttgtacaatttaaatatgatgatcgatcacaaaagatgggaaatggacataaacagtgaacatgaagaagggtgtgctagatggaaaggaaaccggtcaagctgattgaataagaagaagtctct

SEQ ID NO: 359172 - DNA, 127 bp, Zea mays
gttacatctgttgtgtaatagattggtaagctttatgtagcatgatcttatggcagggaaatacgtctgtgatgataggttttccaggttgccatgtctaaatgcaagcgctacttccacacaagat

SEQ ID NO: 359173 - DNA, 300 bp, Zea mays
atacaatgcacaatttcagggaagattctatggtcgttgacgttggagaaccagccgactgggtgaagatcaatgtgcggcagactgtaagttcagtttgtattgttttgttagtcatgttgtgcagattattatgttttgattatagcctgtaccatgaatggtttttttacaaggtagctttgctagggaacttccactgagatttgaagttacactatttggttattgctttcctgcagaaagattgctttgaagtttatgcactagttccgggacttctaagagaggaggtgagga

SEQ ID NO: 359174 - DNA, 304 bp, Zea mays
  unsure (1)..(304): unsure at all n locations
cagaaaaaactcttagttcataaaatagtatttttcttctcttgttcatgcttcactctggtccatgttgtgatgaagttccagttcttgttgattgatacatctaatattacctctaaaaacagttgattttttcaccattaggaaaaacaatctttgttttcccgacactcctttccagtttatctgataatcgagtctttcatgatctgtaacatggttcttaaataataacattaataagatacgcagctctcgtgtgtgttcgcgaaaanagacattaataagatatggttgaagctga

SEQ ID NO: 359175 - DNA, 302 bp, Zea mays
cgaggctgttctggtcgtcggagtccctgtactacaaccccgcctggcacgcgatcgtctcttcttgggaaaccgtcgtctacagccccgttcttgatcttgacagatgggcgttcccgatctgcgctgtcctgttgtttttggcgttttattggcgtgcctcggtggaaggaggggaattgcccggtcactgctacctctgtacaacggggcttattacagaagctccagtcgcacaagaacagactgatccctcgaaccatgcgcacaatcacaccattagcgtgcacatatagttgtat

SEQ ID NO: 359176 - DNA, 260 bp, Zea mays
gctgttttctgaatccaggtttgggctttgggcttctcggctgccctcatgaaaaaacgcagtgtcaccacgaagggactaggttcagatgattcaaggtctgatgtcctagttgtggagtccaacaagcagctcaagctgggggcaacagaggcggtcatactgtcagcgttagagagtttctttgacgttgttttgaactaataattcagttcatatatgaccaaaaaaaaaagaaactgcgagattgttaagctagt

SEQ ID NO: 359177 - DNA, 293 bp, Zea mays
ctgaaagaggcatgcccaggtatttgtaggggaaattctccactttacatgccataacttcttgtacctccgctaactcctcttccccacattggataggagtgaccgagctcttactaatgttagttaccaaccctgtagcattttcgaaaatacgcaaaagctcctttgtcaaggccaattcatccgtcctagattgtagaaaaataacaacatcatcaacatataaggagatcctttggccatgacctctcctcaacaaaggttgcagataaccattcccactgccttac

SEQ ID NO: 359178 - DNA, 296 bp, Zea mays
ccatttcagaagtggataagtcaccatcacattcctctatggcatctccttcgccttcgcgtgcagtagagagtgttgcctctctggggcatcgagcaagtccatctattactccaccctcaacacgaatccattgcatgaaagcagcagcaaccactcctttgacctttgtgatagatcaatctactgctgaatttgtggggcgcgaatccccagtatcagcttttgtcccacccccaccaccattgcctccagaattatgtaccacgtgggacttctttgatcccattgatgct

SEQ ID NO: 359179 - DNA, 296 bp, Zea mays
gtaatcctctgctcttaatcttctagtactatttgggatcaatttgttgcaagctagcaaacatttactgtctactatgatatagtaataaattatacgccattactgtgttgcagtgctgcttttttgggacatatttactgtacttgctattaaatttattgagagtgcatgcccaatagtagtttgtttttacaccgtacacaatttattcttgttttatacgaacggcaaatttggtgctgtcttaatcctgagtcttttgtgtcttgaaaaacattctgttatacctacgg

SEQ ID NO: 359180 - DNA, 296 bp, Zea mays
ctagtatctctctgctccttccattccttgcgactccactgtcctcctccctcccacagatcttggcttccgtctcctacccccagcacaagcacttgcagctcaaagcagccagccagaagcctcggtctcggagtcggagggacgcagccagccggcgccgcgcctggcgggcgggagagtgcgcttcaggcggcttcagtccagtccagtccactcccgccaagacgcaaaagaaaacacagcgatgcaccaagacagtttcaggtcggtggtctgcagatccctctcgaaga

SEQ ID NO: 359181 - DNA, 281 bp, Zea mays
gcagcgcgtccgcggccctccgccctcgccctcgcccctccccacaactctcgcctcctcacccaacgccatcagcgctgcactccgctccatccctgtagcgcagaccttcgccaccgtccctgcccttcctcaccgcgcaatcaccgcccttcccgacgtgcctcggccgccatccacggcatcaccttccttctccacgcgcgcgcgccctcctctgtgcgtgctccgcccccgttctttgctcacccgatgctccgccacctccgtcgcgatagctc

SEQ ID NO: 359182 - DNA, 273 bp, Zea mays
cacagaaccagggcccatcacaggtccaacaacctaggatcttggtggagccccatccaaggtagaaggtaactcagtaatccatcgctatcttgcgaagcagcgcacagatgttggtgaagagattcagttcgtatggctgcttagtaggtcgtagcgtagttctctagcacctttattttgctttttcttgtttgagtcatggtggtggtataccggaggcggtgaggcgggattggaagtaaatatcatctgtaggggcgtatactgggg

SEQ ID NO: 359183 - DNA, 273 bp, Zea mays
gccgcccgtagtgtctacagctgcacggcgcggacggctgacttcatcgtcaagcctgaagatgccgccaagctaattaacatgtgggtcaaacaatccacaaaagatactgttacctcgctccttccggatggactaattgacaaatagtacaggacttgttattggcagcgcactgtattttaggggaagatggcttgacaggactgatacgaggagtgacgcggtacaaaaattctgctgtctggatcgaacttgtgttgacgttccttt

SEQ ID NO: 359184 - DNA, 287 bp, Zea mays
aatttaaaatactaagcttggaattgtgagggaattcaaataagaaattataaaagaaaaagaaaaaagagaaagaaacacctttgggcccaaattccgcgcttggaccactcactccacttccttccactccgcacggcccaaccaaccgcaaccccccattgctctctgcccgcggggccccaccgctcagctcgcgcgcaactgtgcgtggggtcagccgctgacgacttgggcccactagccaactcatttgatgtctcctcgtctgcgccacgttacaccac

SEQ ID NO: 359185 - DNA, 292 bp, Zea mays
cccatgtgatgttcttcatggcagcacactccgtgtgttaatggaaaaattctagattttaataatgcgacaattgatcatggatcattattagaaagtttaggccagctaccatcttaaaggtctatacgatgatttcaaaatcagtgtaagctcaaacagcgtcggtgagaagccaatgctctagatgtggcatctaaatagcacgtgttcgaagggtacgatcccaatcataagaaataagaaggatgacttgcttcgagcagctccattaagcgcatgccatagcgta

SEQ ID NO: 359186 - DNA, 274 bp, Zea mays
gcacgggttgcaattttagagagctctgaagccgcgaaccgatcatgaaggagcttgcagaaggctcctctagtggtagtatctcaagagacttcaccaatagcatggatgggcagattatgcttgatgattctgaggatgatgatgatgataatgatgatgatggggatgagaagggatttgattctgctgccctggcggcccttctgaaagcggcaactggtggatcctcaggtggggatatcacagttacttcacaagatggttctagaat

SEQ ID NO: 359187 - DNA, 275 bp, Zea mays
gggaggcttccactcttctttctccccgagcacccgccgtacgtctcctgcaccttcttccagtttctcccatttcggtttgtccactccctgtcattcctgccgcctcgacctccccgctctggaaggttcagatttagcctgggtgcatctgcagcttccggttcatggagagatggagcctgggtgccaaagtggtagctctcgcactcttgctgtctgctgcttctcatggaagaggtagttccgtgcgattctctgttggttgctgtttt

SEQ ID NO: 359188 - DNA, 282 bp, Zea mays
ccgcaacagcagcatttcgcgcctgagatggtgcctggctcctaggaagtcatgcacatgctcgttcaagctacgcccatgggcatgatgatggcctcgatgcccctgcaagcccaggctatggttgatcaccaacctgctcaaggtatggcgccatccgtccatgatggaggcgcagaagctcaacctggacacacgacgcatgacgacaccacaacctctgccactcggcccttcgttgacgcagcagcagccttcacaagctgatacgattataatggc

SEQ ID NO: 359189 - DNA, 280 bp, Zea mays
cttgtggactattcattgattctagctggatttctttttcataagagttttttctcgaaaaacgcagctgcacatctttatattaagaagaggggaatttaaggtccaagaggaccagtacaataaccaccctatggtggccagcaacaagcataataaaaccatccataggaaaaagatacaaagagacgaccaatgaaaaaattaagtcgagcttgctgcgcctagagcagcagcaaaaccaaggcttccgaggtgtttggcaccagcttgcacccac

SEQ ID NO: 359190 - DNA, 273 bp, Zea mays
ggggctttctactgtgtaaaatatggagaaatatgtgctgcaattttctatgtcaggtgttgtgttcaggtctttttcagttagctgaaatttagcctttgcgtttccacctcaagtttggtgctctgtaactgaaaacctgttcagggtgttgtttagtcaactttggagctctgtagtaattaataaaaccagaattgggttaagagttctatagaaaggtgaaagaccgagtgtaggagaaccagttttatacaagcagattgggctgtt

SEQ ID NO: 359191 - DNA, 267 bp, Zea mays
cgatgacgtctcccaactcgtccctgccttgtccatcgctgtcccatgcctcgctgtgctacgctagccgcagcagcacattacccctatgtcttacccttgtcgtgcttgcgtgctgttcgacaaaatgcccaacagcagcatcccggtgtctagtgtcatcgcttttggtgccctgctccattcctgcatgttgacgctatccttccggttttttttgccacacaaaacagcagccgcaacaactcctctatggcgtgtgctcca

SEQ ID NO: 359192 - DNA, 303 bp, Zea mays
taaaaggcttcgtcaaatatccaaggaggcacatcttagcctcgccatgctcgcatcatatctcaacgatgtacttccatctatgctgactgtgaaggcaaacaatggggaacttaaggagatcatgagattccaaaagttagctcgtgctgatctaaagaataatttgagtaagaagaaaatgaaggctctcatacctcaagcggttcgagcaacatacattgggggcctgcttgtgctctgtgctgggtcgatagttgtttcaggctcatcctttgatgctgaagagtttctgtctttcct

SEQ ID NO: 359193 - DNA, 311 bp, Zea mays
aacgaattgggatcgaaaaacatctccgttccccaccaccaccttcgctccttctgcttcgcccgtccccctccgtcgcgtcgactcccaagatggataagctcagtggttctgcacgtcttatgattgtttcagatcttgaccatacaatggtgaatgtcgtccaactcatatcttggtctgccttaagctatctgtatgtaaactcttcattcttttgggatggctacaacttgcaggttgatcatcatgacgaggagaactgtacttgcttaggtttggtgccctgtgggaatctgtttactgtgagg

SEQ ID NO: 359194 - DNA, 301 bp, Zea mays
tgaggaaacaacagacttttgctgtttttgttcaaaggtggtacccaaggatgagccccagcagtgaagtcagtcacgggaggatgttagcctcccactttaaaaacaatatacttttgtgcgggacggtgttttgcctcccgagtctgtaattataataatactttatgcactcatagtaccctggtattgtaataataatactctctctatattgaatgaatgtaaattaagttattgtaatttgcttccgcttattctttcctctgatgtgatgtaatatctgcatgacgggtgaaac

SEQ ID NO: 359195 - DNA, 299 bp, Zea mays
taggcgcgtgtagattactagttactataaatctgaaatgacatttcttataatctgcctacatcttattatacttgttcagttgttctaactatttctggtatgagctgtacttgttctaactatttatggcacgaatttcaagttgcgaagtcaagatttcggggaaacaaatgcccatttccacttcaaagcttcaaagctcgtgcgtgaactaggtccatcacaaaggagatgtgcgtgaacgcattacgcataccactacaaagctcgtgcgctttcaccaagtactatgactg

SEQ ID NO: 359196 - DNA, 276 bp, Zea mays
gaattgagtaacctgacgacattgcaggagctacccgaggaaggaaagacagacaagcaacaagtggaggcaagttgatggttcttatgacttgtactgttgatgtgtgtggaactagtttatctttagacttatatcgtcatgtgttcaactggtggagccacaaatttagcactgttgtaaattggaaatagtgagtgatatgatcctcggaaaaaaaaaaaaaaaaaaaaaataaaaggggggcccccgattagtggccccttcgccccggga

SEQ ID NO: 359197 - DNA, 291 bp, Zea mays
ggctttgagaaatactgcttccttgacttgtccttttgctttcattgaccaaacacactttcctttatcatcttgcaaaaggcatgctgtttgagcaagacataagttatacacataaattttatgatatgcgtggactgaaggctaaaaggctttttaaagctaccccaacttgcttgggataaaaggcttttgttgttgttgttgttgcatgaactgaaggatcttggtagaatttacagagaaatgctgtagcgatttgatctgttgcaatatcaatgattgagttag

SEQ ID NO: 359198 - DNA, 289 bp, Zea mays
aggagatgcaagtggacacacaaccatttcctgttaatacaatagatatcgcatgcaaaaagatcttagttcagcccaaaacgaccgataaaggcaaaagcaaagacatcatcattggcaatcctcgcatgtcaaatatatcacagaaggagattgctcgaaaggcttcggacgataaggctaaaaagttcggaggcaccggggggcaggcacaattaatgagccaagcacgacagcctggcctgagcatcacggacggtctgacacatacgtgcggacggtccggtgc

SEQ ID NO: 359199 - DNA, 282 bp, Zea mays
tcgcttctggttcgggtctcacctctcgcgatcaaagcagtagcgggttcagtggcttggcgaaggaaaaaaaaggaggaaaaaaaaatagcaaggctgtgcagcgaggagacgactcgactccaactgggaggcgaaaaataaaaaagaggataaggcgaggcccgaccgggcggccaccgcgctcccagatccgctccgctgccgtggagatccagctcccttgcgcgcctgagcgtggacgccggcgtctcgctcccggatcccgaccttggggttgca

SEQ ID NO: 359200 - DNA, 245 bp, Zea mays
atgtaattgctgctcttctgttcccccccgtctgtccctgatagtccctcgtcgtctccgcttcgcctcaccagccacgatgtcctcgttcgcgggacccctcgccggatccagctatcttccggctaataaatccggctgtcacaccacacggtggctgacagggtggaagtgggtccggcgccgtaatagttgcaagcggcctggtgctcaacgccgtcgtcgcttgtgtcgcgtcgctctag

SEQ ID NO: 359201 - DNA, 281 bp, Zea mays
agctatttgtaatattttttctttctgaccaaatgtttataatgtgcatccacaaaacatcttagttttattttggtcatatatatattttatattttttgttgatatattactattgtatgtatatgggccggtctgacacattaaggtattttgtgctatttggaccggcctggcacacataactaattgtgggccgtgccgtgggccgatgactgagcacacgtcctggcacgtcatgactcataattagatatgtgcttttgtgggccgtgctttta

SEQ ID NO: 359202 - DNA, 104 bp, Zea mays
  unsure (1)..(104): unsure at all n locations
cggctcgagcaaaactctgtttttcctccatgaattcaatttctttaggttccttcatcctcacaccattcnaagtccgcccttttcttcaaaccaaacaccaa

SEQ ID NO: 359203 - DNA, 248 bp, Zea mays
  unsure (1)..(248): unsure at all n locations
catggagcttgttctgatcaatttcccggtctttcagctgaaaatacattagtacagtaccatgcctcttgactgctgattctgagctgaaaatacattaattatctcctcgcgtaagaaggggcaagcagtctagttgatgctcatactgacngaagtaagccagcttgatggttcatagcaaaagtatacagcgatgacattttgatcgcgactggtagccgtgctcaacgtgtcaacatacctgg

SEQ ID NO: 359204 - DNA, 298 bp, Zea mays
gagcgggagaaacagcggaggagagagaaagaggaggaggagcgtgcacggagacgcgaggaggagaggcagcgggaggaggaagaaagagagagggaagaggaagaagaacggcggagggaggaggaagaaggtggaggcggacgtggtgacgagccagatagggaggacgagggcggtgacaagccgccataccggttgtccaagaaactgaagaaacgctaccatgcacgtgccggtatgttcagcaggagtggctgagcgagcaccgagcagagctggctctgctcgtacaata

SEQ ID NO: 359205 - DNA, 253 bp, Zea mays
gaccactgcaacgggctcatcttgttacacgaatgtgtagttaacccggccacacgacagtgggcgctgctgcccccacgcccaagcccaaatatgcctgagcacttttgtcactggatgtaccttgtctttgaccccacattgtcatcacattatgaggtattcctgatccctcaggtctcatacaattccaacttagaccctgcaatagaggaattggaatggccaccttcgccttgcatcgtacaagtgt

SEQ ID NO: 359206 - DNA, 259 bp, Zea mays
ctcagcatcaccggtgctggtgcgtgtgtaacgtggtcactgtgggtatcatcactaccctaccctaagccctatcagaacataagcaccccttggagatttgtgccgtctaaatgaatatagttggttcagcgtcgtgacaaaaaaaacacaaaacaaaagggggcccccccccaaggaaccccatcgacccggaatttattcccgaccgggaacctacaggggtcccactttccccaaaagggagccgtttaaaacc

SEQ ID NO: 359207 - DNA, 282 bp, Zea mays
aaaaaaaacaaggagagtgcttgaagcaggtgaaagggcaatttgttggtttgctaattagaagagaggttctgtcaggtcaggtcaggtagttgctatcattattcatgaggattttcaaacttaatagggggacagccatcatccatcatagtttgtatttggaacttggtatactgaactctgaaaattctttttgcagttcatctatgcttagggattaaaaacaaaaaaaaggggtggcccccgattatgaacctgttcacccgggaatttattccg

SEQ ID NO: 359208 - DNA, 143 bp, Zea mays
cggccacagcacctcgcaagcactcgcatcattccgcagcccacgccgggcgattcgcccgctacggctgccttgctcctccaatccgcgatcggggtacgtgatccaagcgcgatctcgcgggtcggcgcggaattgggaga

SEQ ID NO: 359209 - DNA, 196 bp, Zea mays
attaagagaaaggaatcctcttcaatttttggagctcacttttgggcttttgaagccgagcctttagattttgttcttttgttacgctgcggcacctaataaatgacttgccttctatgttttcgagaaacttacattattcttttttatataacaataatacttctattcagtaaaaaaaaaaataaagggcggc

SEQ ID NO: 359210 - DNA, 295 bp, Zea mays
cttctttgctgtcagtcactaccattttcagatgctttacgatcatgcaagtatattccatatccgagtatgatttatcgatatagcaattagcacatttgaatgttacaactataagaccttttagaattactccaattagacacagagtatttgcctgatattggaattcaagatttcataaactcaaacatcacgctatcagttcaggacaatgtgctgcagtagacttgcttggctgcaatggagtatgcatgaaatgttcataatttaagcatgggaagactattttagt

SEQ ID NO: 359211 - DNA, 109 bp, Zea mays
ctttgacatccacagggcatcaaaatcggttatttttagtgtgttcatcaattttggttgtgccaactttgatattgattcatgagatcacttgaaattacccgttgtt

SEQ ID NO: 359212 - DNA, 291 bp, Zea mays
atgaacaataccttacagccttcagctcctttttcatgcaagagttctccaataaatgaagatgactctgtggaccatgatgattcttcatcatttggtcaagctgctcagagtttagttaatatatcaaatcaagctgacctgggatctaatgatgcttcagaagataatttccatgtagagttacaagcgcttcataaggaatcagataaatctgaaagttttactgtgccaacacctgcacccactggtggtgcaatgcctgcatctagttattcagatcaaagcttc

SEQ ID NO: 359213 - DNA, 290 bp, Zea mays
  unsure (1)..(290): unsure at all n locations
cacaattggtgagccaagggcttcctttcccaatgaactgtcgcccctgaagctgaaattgcgccgaacaggcttcaaaccatacaagagatgttctgtggaagcgaaggagaatagggtgccggctagcgacgaggttggtaccaagaggattcgtcttgatagtgaagcatcaacatgagcgatttctacatggttaccgctcggacttcctctgccgccatgaagtttatgacaaagttgtatttacatctaaactagtataggacttaagancttgcaatgcaatg

SEQ ID NO: 359214 - DNA, 240 bp, Zea mays
gggaagcaacccctgaccactgtagttggtccaaagacgactgaaacaagtggaactgtcaaaaggttgtggcagcgcagtgctgcaactgcatcaaaaagtggtacggctgttgtgacaccattgcaaagcagtgtggttgtctccacgccgttccaaagcaacgtagctgtgaaaaagacatggcaaagaagtgtaactccagaacaccagctagagagtaatatgtctagccataag

SEQ ID NO: 359215 - DNA, 263 bp, Zea mays
ctctttgactatggcgtgcaagatgacgagagcccctcaggttcgaatgattcagatgtggttccagtcttggtagaaaaggttgctcttcctatcttgcaccaccgcatcgagcgctgctgggatgtattgagtacccaagggactagaaaggctgtggaagctagcaggatggtgatcggttatttaccaacatcaagcaaggatttgcatcgactactggctgccgtgagcagccgtctaacccaggcgtcggcgatctt

SEQ ID NO: 359216 - DNA, 251 bp, Zea mays
ctagatactaggcctgcaggtgacagcaacaccatttcagaaaatgcccaggaatcattgagttctttaccagaagaagagtcaaatgatgctagtgttaacacagaaaagcaggaacctggcatttcaaaatgcaaatctgtggacgaaattccaaaaacagtaactgtaaagagatgcaagaacgttgattcaaaaaaagtctccgcaaataacaataataatccaagatttactggcagtccagctct

SEQ ID NO: 359217 - DNA, 286 bp, Zea mays
gctgctgctgctgccaatggcgaccaagggagggaacgcaaggggcgttccggtgggggcgctgctggtggccgcgctcctccttagctccttggttcccacctccgcgtcctcgtaccccgcaagggtcgtgagcgggttcctctccaatgcggcgtcggcggtggtgaagcggctgtggtcgctcaaatccaccaccaagacagcagcgagcgggggaaagtctatggtgaagtacgagggcgggtacactgtggagacggtcttcgacggcagcaagctgggg

SEQ ID NO: 359218 - DNA, 266 bp, Zea mays
gttgagaaacaatacaatctatctgttgtttttggcgagttaattgatgaggtcctccgtgctgagtcgggggacaatgaagatggttatgatgtgcataaaacaactacaaaatcagatgatattcttgcctaatcgacagaaggatgtacgtgtccggccccccaaattgtacccgatatgtctactccagcatcccagcaggatacacagttgacagactcataggtacatgaattactgttaaggcaacaacatattcgtgt

SEQ ID NO: 359219 - DNA, 144 bp, Zea mays
accgcgagacttctctggaaaatgatgatggaaggataaggcagcagtttgagagatatagttcctccaagtcgcttgatgctagactaactggtgtcaataacttctaccccagtataaatgtcaggaagactcctgtaaccg

SEQ ID NO: 359220 - DNA, 299 bp, Zea mays
caactgtgctaccgccgccgcggtgcccagttcttcgccgcgccctcggcccttcggcggcagctagcacccagcaggagactggtgcagagcggtttcccaataaaatgtccggttccaagagaagcctccccccttggatgagtttttctaaagatggagaggacgattcacgcaagaagaagcatgcaggcacctcccaaaaggcccagaaagggcccgatttctccaaacttttggacggggtggtgtttgtgctgtcagggttcgtgaacccggagaggagcacgcttcgttca

SEQ ID NO: 359221 - DNA, 295 bp, Zea mays
attgtcagaagggaggcatctgttgatcaaactgaactatttcagagggttgtatcctcagtgtgtgttatcttatcacatgtcgcgcacgtacaagagtgcagcaagacgaccagctcatcctttgataatagaatacacactgaggatacaaccctctgaaatagttcagtttgatcaacagatgagctggtcgtcttgctacactcttgtacgtcggcaacatgtcatacgatacgacagtcagcagatgcttcaattcaagctcctatcatgtgtattatcagaagaggca

SEQ ID NO: 359222 - DNA, 298 bp, Zea mays
tgacgaagctgctgaggctggccaagtacggggtcgtcggacggagggaggttctggagtccggcgacatggcagtgctgttgcggaatgcgaaggccggggacaaggtgtcggctcgagcgctgctgcacctcatcctcgacggcgacgaaggggacgcctccaagaaagcttgtaggtactgatcactgcacattcaactccacacagaaaggttttggttctgatgattttcgtaagattcgtaatggtgcaatggtagggcctttggacttaaatgctaaagtgatagtagagt

SEQ ID NO: 359223 - DNA, 294 bp, Zea mays
atcagaaggaagtacattgggggttgcttgaagattctgttgaagagcaaatggagaaggcactagcagaatctgataaaatagaagctgaaagcaacgatgctgatgcagaagataacaagaaaaggaatacagaaggtggaaagcaaaatacttctcttgtgtggggacacttgctttcagctgcgaaggagcattgcttgcatcggggtcggctgactgtactgttaagctctgggatgtcgctttcagcacaaaagccctgaagacagaggacaccaaaggcagctcatc

SEQ ID NO: 359224 - DNA, 155 bp, Zea mays
  unsure (1)..(155): unsure at all n locations
gggtcgagtcgagcgctcgagccgatggngtgagaaaagaatcgccagagctatagacagctgagagactacaggaaagttcccagcgctaaggcattacgcccacggctatctgggaggggacaaggacggggagaagtacagtttcagccaaa

SEQ ID NO: 359225 - DNA, 294 bp, Zea mays
tttacattgtacagctgctgctgcttctttcggcaaggtttaactttgtaaatagatagctttcagttgggaagattgcatttctttcgctccaccaaacattaacaaaagaaatgcaatcttcccaactgaaagctatctatttacattgttaatgtttggtggagcgaaagttcttttgattctttagttgatgattttccgatttcccatcttttggtgatgaggattttatgcgttggtcttacaattgttaagatacaaaatcgctttcgcatttttctcaccaggaag

SEQ ID NO: 359226 - DNA, 294 bp, Zea mays
gaagaatgttcctttgtttgctgattatacttcggattttagtacgaaatatgcataagttcgataggtatctgttctatgatgtaggttgcacagcgcaatttgagagatctacttttgcaatgctgcatggatgcagcagctgatgttcgacagaattgcttgcacttcttggagacctttctagggtttgcccaatacatttgcatccacgccttcaagaatttcttactgttgcagcgagcaactgaagcctcaatctgtgaaggatgcggtagcagtagctaacaatgc

SEQ ID NO: 359227 - DNA, 302 bp, Zea mays
gagatcagcagctgaccagccactgcgtcgcaggctgcacgcgcacggcgctacgcaacagcacaagcagtgcgtgcgtgggggcgggcgtgagtgagtggctctcgtcagcgcgcggacccaggggcggcggcgatggggtagactatgcgcatcacgcggcgcccaatgcgaaccgtgtccccctcctcggcgacggggagacgtcaagggcgctctcggacctggcagagggcagcgacgtctagccatcgaacgtcggattggtcggtgtcataagacttcgaaaccatacgccggaa

SEQ ID NO: 359228 - DNA, 217 bp, Zea mays
  unsure (1)..(217): unsure at all n locations
cccattactggaatcaaacccaacttcaatgctaaagtcacctgcaagatcatctctagcttcagggccaatcttccaaagatccgctgggggcatgtccggttcattacagcaagctcagttcaggagccagttcattctgggatcaacacagngtatttaaggcggaaacaaatgtagctttgaaccagagagctgcaggtgcagatggatcact

SEQ ID NO: 359229 - DNA, 149 bp, Zea mays
gggccgtctcatccgagttaaggaagccatggtagcacaaggaggctgcggtgccaggtccccgagggacgcatcctctgcatcagtaactgtggcttcttcggcagcgtggcgaccatggacatgtgctccaagtgccacaaggagat

SEQ ID NO: 359230 - DNA, 274 bp, Zea mays
caatcatggaatttgcagcatgtgagatacgctgagataagatttgatgcatcattagtatatcgatataggaatggaacctgctatttgttagtaagctgagggatgaccatgtaacggctcaactagtttgaaatttagattcatattggctgaataaagatgtagatccttccatgttctacattttagtaaatatcatttcaattattttgctcaacacattgttattaaaacggcgtttaaacgacaaaacgatggttagagtttgaac

SEQ ID NO: 359231 - DNA, 296 bp, Zea mays
  unsure (1)..(296): unsure at all n locations
ttttgtagggaacacttgtcaggacaggcgccttggcgtgagtcgccataggaaggggatgaggcctccaaaagtttctgtggagcgacgaggacgaggacgccgtggtgagtgagtgagtggtgaacgagctccctgttcgttctccgcctcgctctcgtctcagaggcttagcagtttgcactccagactgatttcacttcagcccagagcaggaggcagttgatggaatgcgtggagctgctggagttctccgatcntcttctccatgacggcggcgantcgcantcgaccga

SEQ ID NO: 359232 - DNA, 292 bp, Zea mays
  unsure (1)..(292): unsure at all n locations
cccgcgtcttccaccaccctcgacctgcccccctacagctcctcctgcttctttcaggtgcccaggttttctcctgagcatgaagccattgggatgtgatgtgtgaggtgcacggagcaaaaaaaagggggaggggggacctccatcctctaatctgggaatcatcgacaaggtccttctttgttgatgacaatgacttggaagatggtaaggcctcaaaagaaagggagagattctcacagtcactcaggcntccaanagatcagnaataggcntccaaaagaaagggaga

SEQ ID NO: 359233 - DNA, 291 bp, Zea mays
cagacttgatgaagcatctgatagcgataatgaagatatggccatggaaggccgaatgggttctgctggggaaaggaatggcatcactacgtagttgcttctggcatgttggaattttggtagattaacatgcatttgtgtagcacctacctcgaccgcagaacaaggaaaccacattatggcaaaactgcatgccagaaaatggtgtcctggaaacggttgacgcctgaaatgggattttttggctacacaaaattgagcgcacgagcggcagatatgcaaatgttaaag

SEQ ID NO: 359234 - DNA, 291 bp, Zea mays
cataaaacatgtggttattactagctctgcatcccggaaacaacttggtggttctttcataggcaattggctattactagctgcaagatagtatttggtagtgatctggtagatactgttaatctcctttttttcaggataatatctagtggtactgacgataattttcaggacatcggttcaaccgagctctttcttccctattacagagcattttggtttgatgaagaatgaaaatatattgtgttgggctttgcctggttggtacatcaaagtcttaggatgtttgtg

SEQ ID NO: 359235 - DNA, 288 bp, Zea mays
catttgagcaaatcaagggcaagcactagattggttattttctaaagtttagaattgttagaggaaataaatctctaatctgttgagtgccctgagtattacatatgtcagatttacatggactgtgctctatgcccataacacctccgtagttgaatctcttgctacaacagccgttgagaatggaccgaaactctgagaacagcgaagagggaagacccttagtgaagatgtcagcaatttgtgagctcgtctagacgtgatgaacgcggacttccctgacagcaa

SEQ ID NO: 359236 - DNA, 289 bp, Zea mays
caggccaagtatctgcatacaatcaactgttactattgtaggagacgagatgaggagaggaatataattatgtgcaggagcataaaattatattcctctcctcatctcgtctcactactagggtatcagcacactcagacaggccaagtatctgcatacaatcaactgttactattgtatcatcaagcacattccaatgacgttcgctatggaaagctcactatacgcaagagtatgtcttaccgaattcgttattggttccgaacatcttagaagagaagttgatcgt

SEQ ID NO: 359237 - DNA, 100 bp, Zea mays
attccttctctccaagtcgttgtcttcttcctagcgtatcccagttcttctctgcgtagtagctaacagtatagtgtggacgagtggctccgcatcgaga

SEQ ID NO: 359238 - DNA, 283 bp, Zea mays
tgagctgataatggaaggtcaccatacacggatggaggacgcggatggaaggtccgtggccaaatccgatttgccccctcgcccgcgagatgccgccgcccaccgtgcccgcgattccgccccaatcacctctggttctcaagtatggggaggaagggaaggtggtggagcgagtgaacctcgccactcggcagctgcgcctactgccgaagcccgttgtccggatctgcggtctcctcgcgctcgacgtctcccgcgaccagctaaaggttagatactcgtc

SEQ ID NO: 359239 - DNA, 284 bp, Zea mays
tgcagaccgcattggcgacgctcaaagggaggtggcgtgtcattcagggagagctgtggaggcctgacaaacaccggctgccacggatcatctttgtctgctgcttgataaccaacatcatcatcgacatggaagggactccaagcagagacgaactggtttcaggcaaccatgaccttggctacaagcagcagttcagtgacgccgcagatgacaatgcaatcaagcagagagacgacctgtctcgacatgtcgacaatgcaatcaagcggagagacgatctg

SEQ ID NO: 359240 - DNA, 144 bp, Zea mays
ctcatagtctcatctcaccaagtcaccatccacccacctgctcgacccgcccccgtccacctctctccattcaatcacgccatcgccacggctcctccgcttctcagttctccctcgctgcgcccacaagcgccaaatcatttt

SEQ ID NO: 359241 - DNA, 295 bp, Zea mays
ctcgtgaacgacggcggcgcctagcggtgacatcgtcccctcgactcctcctccatccccgacgcggcggcgccagcgtgcagattagcttattaccaccatgggtagaagaaagcggtcgtcatgtcaacgagataaccataatgattctctagccagcaaaataatgagaactagaatcccagatcttcctgaggacatttggtctcatgtacattccctaatgccaatgcgtgatgctggccgtgctgctagcctatctcgtgcctttttacgttcctggagacgtcatcct

SEQ ID NO: 359242 - DNA, 131 bp, Zea mays
taagcgaggccgaggccgagacctcgaggcggtcgcgtggactctcggaacccgggaggaatccacagaaaaatccgcgcgagatgggccgaatctctgctcctggggcgagccggcgagctgcagttttc

SEQ ID NO: 359243 - DNA, 294 bp, Zea mays
aactaattcacatttggccatagcttggttggaggcaacatttcctgacctgttacatcaatcaacagataccagttttctgatgtcaaaagctcatgcatatgcgccattagatgattctctaacattacaggggcctctttgtaagtttgtgaggaaagtaatgaatctgaaagcaagagcagcagttgtgaaggaaaagctgtaggttttatgtacagttctgctggcaaagattcagttcttgtgactgcctggggtagtgggctgcttcaggttgatgctcttgcagat

SEQ ID NO: 359244 - DNA, 284 bp, Zea mays
gtaaaagatctgatcgacgatgggatgctatcttgtatggctccggatcaatgaagattaatggaacaaccaatcgaaggctcagagcaggctagttggtgcccggaagactctggccagaagatggaaatgggtaagcgtgtgaaggaaaaaagaaatagagggggatttctacaaaaaaacaaacataatgaagaggtatggatttcaggtgaaccacttaaaaaataaaaagggcatacccagtgccgtagcttcccgcactgtgcggggtcgtctgggga

SEQ ID NO: 359245 - DNA, 290 bp, Zea mays
gtggatattggtcagcgcattttgattattgatgctatgactgaggcggcacaggagcttgctgaaactaaaactgtgaagatagaacagcgacgtggtaacttgataactgacacttctccttcttggctggttccgagtaatataggacctcctggggcatgcccttggagagaggtatgcgaaccaggcacacttctaagttggtcacaccgttatgaaagagaggttccatctaaatcgggtcaattgaaatcaggaaaatctcgtaaatggggtcttggaaaagc

SEQ ID NO: 359246 - DNA, 293 bp, Zea mays
  unsure (1)..(293): unsure at all n locations
ataaggtcaatagcagagacacaggtcagcggtggaacatgcggtttcaacagttacagcaaggtggatgtcataaacaaccagactagctgcgtgtgcgtcccacagtacacatttanacgtggaagtacaggctgcacgcctgacttccagcaaccaagttgtgacttggatgaagcaggtgccacgaagcagtttcagttagtaacaatgagcgatgtggattggcctcaatgtgactatgaacagcatgacaacatacctaacaaccagtgccagcagctctgcctgac

SEQ ID NO: 359247 - DNA, 271 bp, Zea mays
gttcggagcgggcagcagcacacagcgccatctcaatcctagtcgatcttcttcgcgctctcaacgaagacatgaagctgaagcatggggatgagatagtcagctgctaagccacgtcctaagaagcggatggacaagcttgacatgtcttgtcgtgctattctgcagcacggagtagtgtgagtgcgaatgacatgagaatctgatggcgagatcttgtagatctgtctgagactcagacactgtgatgatcactgagctatgtattata

SEQ ID NO: 359248 - DNA, 280 bp, Zea mays
atggacacaccctgcaatgttaaactgccagagtccacctattcatatcaggaagacatggagcttaattcaaggctaacagtatatatggaagaaggaattgttcctgagtctccagtggttgaagttagccaccacgtctagagatggatgaagctgcagactttggagctgtgccaaagcgtggttctccaaagtcacgtgatgagagggctcatgccaatgtagctggaagtcacaaaggacctttgaactttgagaaaaacgatcagttgctttg

SEQ ID NO: 359249 - DNA, 277 bp, Zea mays
  unsure (1)..(277): unsure at all n locations
tagtcatacggcttctccttgccgcatagaactggtgttagcccgtctgctntgggccctcttccagtcacattcgaagtggtctcggtcgagtgttaatgcctcggcatctgatgtgtctactgtaaacagagaagtgcttctatggtcgtggtatagtcgcgacaaaatgatctcccggaaggccttgcgacaagtcaaggaggtgacacaattaacaggtcgataccgtgataccgctgatgtggagactgctcatgatcttaccatgtggtct

SEQ ID NO: 359250 - DNA, 182 bp, Zea mays
tctctctctctctcgtggcgacggcgacgactgggcggccgttgctgccgccctactcgccaggcgcctaggtattcttcggccccttcgccggcgacgagtgtcaccaggttcctcgtctccggagcgcagtgcaaagcagatcgatctcggcacagcaggggcctcacgacttgactccc

SEQ ID NO: 359251 - DNA, 195 bp, Zea mays
cagatacatgctgctttttttcgtggaagagtggtgaatttttgtcatccgaaggtcagtaggattattatgcattctcaagtgctgctattgatatttttgcagatagtaaattgccaaggctgttgtaatgggggcaaatggtcatcatgaacctcgcagcagatgtaatggcaccgtctgcaatggtaatat

SEQ ID NO: 359252 - DNA, 155 bp, Zea mays
atggaattggaagcagatggaaatagcaaattgttagactttaatggtggagccagtcagactaggtcaattgtccaactcaatggtgagcgatcctcgagaatcctttatgtcggaaacattgatagcaacgtcgaggattctgaattgaaatt

SEQ ID NO: 359253 - DNA, 248 bp, Zea mays
cagaccccacagagacccagaggggtggacgttggacgccggagcggcgaccgatacaattcatatagttccataactctatgccaaccttttggagtatctggagcgatacagcacttggcaggaatgatcgaatgagactcgaaggttattgtggctcttaataaaggtgttgatgccccttatttcaggttgcagattacggactggttgccgatctgtttgaggttctggatgagttactgaag

SEQ ID NO: 359254 - DNA, 174 bp, Zea mays
cgcaagcaagcaaccgtggccacgccgcggcgcgaccctgacgcccgccgtctccggcacccgataagcctcctccccacatgcctcgcgtggcttccgtggtccgtaggccggcgcggtttccttcaaagccactgcttcggctcctccttgtacttaagcgcaccggccccg

SEQ ID NO: 359255 - DNA, 179 bp, Zea mays
tgccaatagccactttgatgatgatcaactccaaatggacatggaattagcacatcagatgtcagttgctgaatcaagtacagatgccatgaacgacccaaaacattatagtggatcattcactagtgactctaacgctctaggggctctatcgagttttagtggatactcgcaccatt

SEQ ID NO: 359256 - DNA, 263 bp, Zea mays
atatcgtccttgcttttgcattggtcgttctctgtttttcgcgtcgatcggggtttgcgtcacggtgatggtgaaatagatggtcagatggaggtgaaaaggattggagggaacaatttgagtttggattgattgctaattggctgactgcttgagagagaggtcaggatgacgaggaggattggttggtgacttggcgccaccttgggcctcggatgtatagggggatttgagcataagttcttcaagtaagctactgcttt

SEQ ID NO: 359257 - DNA, 159 bp, Zea mays
caatcacaacatgttacatggcacattgtgattggcttgtttagctggatgacgggactcgctcaagtacctgggtcacagccgatgcgcgagttccagctcaacaagccaatcacaacatgttacatggcacattgtcttctatgcctcatagcagtg

SEQ ID NO: 359258 - DNA, 306 bp, Zea mays
gatccagatccttttctatctgtatattaacctccgcgtgatgaatatctatttccttggaactcccatttgtgtgttttgtctgttgtctgttaggcttataactgactatatgtaacaatccccaccaagatttttttggccactcctttggatagacttttttaggaatccatagcattttttagaacagtaaactatcaaattggtattaaataaatattcagatccagctgacagggttcatggaaaagaacacagtgaagttcatgaaggagctctggagccttctcctcagtgcgcaca

SEQ ID NO: 359259 - DNA, 152 bp, Zea mays
cgacactcgccgcgcaccaccaccagcgctgcggctcacggctacgcagcccgctctcccgaccgacccgtgacctcatctttgtgctattagaacatagagtagcgcttggatcgatcgacgactgagtccgctaaggttcggcccgatgg

SEQ ID NO: 359260 - DNA, 287 bp, Zea mays
  unsure (1)..(287): unsure at all n locations
ctgggaagaggaaggaggccagcttgccgctagggttagggtttcgggcgggagggacagaggcggggctgcagccatggcgctcaagttcctgaacaagaagggatggcacacggggtccctccgcaacatcgagcgggtatggaaggcggacaggcggaggaggcggacgccgcaagacggaggagctcaagaagcaggtcgcggccgagagggagaaggccgagttccgggccatgcaggagcgcgccggcctcaggccgcnnaggagaggctcgacttcctct

SEQ ID NO: 359261 - DNA, 130 bp, Zea mays
atcaagaattgcagggtattatttagaatggaaccttacatcttcaaatccttggcgaactatcttagactggaaggattcgctacagatacaagtatcaaagttgaggaaatacttgggctcttcctat

SEQ ID NO: 359262 - DNA, 286 bp, Zea mays
ggtgagtgaggggagggatgacatggttcttggggtttaaggctttagcgatagcttagcatatgacttggttatcagtatgtcctatgcatgtaggttatgaagctaagaggaaaatgaaaactagtatgggaagttttcttatcgatacgtaagacttattggcatcaattgagcttgttaagttgttacgccacttctgacaggctacagcctattgccctagtggaataatgccatttttcacactcaaatagggggtttgaatgcaatagaattaatagct

SEQ ID NO: 359263 - DNA, 181 bp, Zea mays
acttgttaaactagtagcctcccgttgtgtttaacttcatttccgggcccttgtgttttgggctgtatgatttcgctccttttgtactctggtagtggtactctatccaatacacctgccgttcgttactacttactacgatgattgtgttacgatcatcgtcagtttgttggccagccac

SEQ ID NO: 359264 - DNA, 237 bp, Zea mays
caccaagctcgcttggtcagatgacatgtcaagtgttttttatgtagtagctaattgtcactaactttttgtaaaaccagcggagctttaaagagttacatattcttatcaaacatgtaactctctacgaattatgtttctatctttacatattcgtttatacttcctaaatcacatctatttccttttttgtttatatagtacatagttgaccaaccttacaaaagagactactta

SEQ ID NO: 359265 - DNA, 147 bp, Zea mays
aacatcgtgcgtgaggttataaacaatttattcttcagcacgctgtttcgaagacaaactcgcatatatgttcgcagatattgtttcgactaatttcggtcgaatcatgccgaacaaattctcagtgccgaaatcagtttatttcgg

SEQ ID NO: 359266 - DNA, 146 bp, Zea mays
gttaattcaatgatgctatcctcgctgtcaagaactcaagataccatctgcacctgtatttgtttttacccaacaagaaagcacttgctgtagtaggtctctgttgtttcttgtaccgcactaccgctgctacaagttaagcatgg

SEQ ID NO: 359267 - DNA, 127 bp, Zea mays
gttggggctcagcttttgcaaaagctgcaatggctgctggtgcgtttaactccgatgttgaatttgcatctccattagacggtgatggtcatggaagccacacagctgcaattgctgctggaaacaa

SEQ ID NO: 359268 - DNA, 131 bp, Zea mays
aggaatgtgtattctagaggcgatcatctcctgaccatcggcatgtatcgtcacgatgtgtgacggtttgatgaggcttggatacatctacagcagtggtgtggagatgactcacttgccgagcaaccaag

SEQ ID NO: 359269 - DNA, 132 bp, Zea mays
caaacactactattggtattattgtctgtgtgactgcgatattcatagttcgatctcttaggtctatgattattgtgtgctgcaacttgatctgtctagatagataaagtacgtacgctctagacaaggggt

SEQ ID NO: 359270 - DNA, 187 bp, Zea mays
gagccgcggacgactccgtcaaagcgctcgtcgcctccaccgaccccaacgcgctgctcaacaccgtcaccgcggacgcgctcgcgaccccgtctgtggatgttggggccgacgtcgtcgctgacaactggggcgggtgcttcgacgacagcgagcagtactacgagtcgccatccgtcgtcgccga

SEQ ID NO: 359271 - DNA, 273 bp, Zea mays
cgtatctctaacttttaagatatttgtttatagttttcagtgtcgatattcaaggctatttaggcagcatagttcaagagtagtagcaacaaaatatgggaagataaacaatttttatgtagacgctgctcaactacaggtcatgtccgaaagaattccttacctttttagtaagtactgatgagacgttttcttctgcagcagcctacgacctgattcctctctagcagctatgtatgctctcttagcttcttcttcaccctctgcaccctc

SEQ ID NO: 359272 - DNA, 240 bp, Zea mays
cttcccataaaatcttctgatctgtaacgcattcgtcgacgcccacatccgcttcgctctcttgctcttttagtcccatctcccatcccacctggaggcgaatttcgtctggggaaaaagtcggcggccatggccgggcgagactccctcccggaggattctctcttcctcgggttggacagctccactcaatcactgaaagctacggtgctcaataatgagctcacaatagtagcttct

SEQ ID NO: 359273 - DNA, 267 bp, Zea mays
cctaactatggaagtgcctacccacagccaggatatggtcctcctggtcaggctactggtcaggctggttatgcctcctcagcagccagccagcctgcgtatggccaggcaggatacacccagccgcctacaaatcctccaggttatgagcagtctgcggcaccagcaacaacccagagcggctatgctgcgcccccagcaaatccacagcagcctgctgcagcaaaaggggtctcgccacagcctggtggtggtgctgctgcatat

SEQ ID NO: 359274 - DNA, 147 bp, Zea mays
ggtttcctgatcgggaccagcggcatacagtcccgtgtgtacccctcaggctccttgtgcgatcttcaatcagtcagcacacttggcatccgataggtacacacgggactcgataaagctgttccatcaatgccgtgctacgtgatt

SEQ ID NO: 359275 - DNA, 178 bp, Zea mays
ctgtatttactttgatgccagctgaaattcacgaaaacaacaacttggtgtatgcttctttcactgacaggattcatgcattttttcccttacattttatcctgtgctagtagagaacaagctgttacatatatattgtaataccgtttaatgttgtcatgtttcattcatgatttct

SEQ ID NO: 359276 - DNA, 295 bp, Zea mays
  unsure (1)..(295): unsure at all n locations
aaaaacttcatcttcaacaacgcctgtcaatagcagtccagtgtgcagagggtctggttcatatccattcattagcagctgaaagtcctgaatcatgtggcaccagcctcttaggaaacttcagatctgccaacatatttttggacgagaatantgtacaatttatcttcaatgtgaacttgtcaacatttcttggactttcaggtgcacaaaaacatacagtgttttcaattcattacaatggaccagaaaagtattattcagactcaagggatgttctggtcaacttcttaac

SEQ ID NO: 359277 - DNA, 143 bp, Zea mays
tcgatttacttatttttaaaccttttgccagaacttcgttggtctttccatatctgatggttacattgctactgggtctgaaacaaatgaggtatgcattccttagctaagcgtccacaaacttgtctggacatcggactcgt

SEQ ID NO: 359278 - DNA, 126 bp, Zea mays
cacatttcaatgatattcaggatcatgtgtcatctaaagggcgcagagcctcatcctttctctttggaagaggtctatcagcagacccacttaatatatgtaaaacgacggagggccggagccagt

SEQ ID NO: 359279 - DNA, 132 bp, Zea mays
tagttcgccctcacccgcaaataccgacactgtttgttcaccggcaaataacctctacctatgacgcattgataacaagtacacgagccataggatagaatttctctacatccaggacaacaagcagctacg

SEQ ID NO: 359280 - DNA, 141 bp, Zea mays
acaaaatactacaatatttgtagtaccatagtacacattgttattaggtaattaaacttgaaaaaagagttaatttcgcagttaaatgcagtgattaagattaacgcaagggcgagagagattagagctcccccgtgcgaa

SEQ ID NO: 359281 - DNA, 174 bp, Zea mays
aagttcgacctcacccgcgaataccgacactgtttgttcaccggcgagtaacctctagctaggacgccgtcttgccaactaacggttcccgcgatcaggagatctccagctatgtacggcggagaagagggttcggcaatcgtcatagatttgggctcttacagctgcagggcg

SEQ ID NO: 359282 - DNA, 176 bp, Zea mays
gactagcaaaaaagattttgaactcgctagcttctgctttaaaaaggtttcaatatccaatttctcatttcccaactttctctagtattgacattgtcctaaaaatttgggcaagtttttaaaattgtgatattagtaaaaaataacaacttgcaatggccataaaactgggacaa

SEQ ID NO: 359283 - DNA, 130 bp, Zea mays
tcggcccgtacgccggcgaggagcaccaccaggattttgtcccatttctccagttccaatggaacatagctctgcagaagattcagacattagcgattcagatattgctgagcacaaggatgagatttgt

SEQ ID NO: 359284 - DNA, 149 bp, Zea mays
tcggcccgtacgccggcgaggagcaccaacaggactttgtcccatttctccagttccaatggaacatagctctgtagaatattcagacattagcgattcagatattgctgagcactaggcggagatttgtgcccaacttgatcagggaa

SEQ ID NO: 359285 - DNA, 201 bp, Zea mays
cggcgctctactccactccgcttcacgccagatccaacctcaccagctcgccccatggccgtccactctccttgcgtgccgcgtctctcctctgccgggtggtcggcacgctacgcggtagttgcaaaggatgctcactcagcggagggcttaggctcagcacacacgcgagagaagccgcggtgcggctctcgttaagta

SEQ ID NO: 359286 - DNA, 274 bp, Zea mays
ttgtttctgtagttggtggagcgggcacagttctgggtgaatgaattggagcttatctatcatatgtatgcaaatgcaacgatgtctattgagataatcatatcgtcataccctggtcacctgtcacttgtttcaatactgtgtcctgatccacacttcaaacagagacatcacaactgaggagttctgcagcaaccattggtcgattcaatcatgtataatctatgtttaggcgcacacgtttcatacaatcagatgtactggaagtagcggt

SEQ ID NO: 359287 - DNA, 234 bp, Zea mays
gtctgggttcggtagaatcagaagtagtccttcggggttcaccagaatcaaggttgctagagggattgcaaagttccctcataatctctaaagttcctggcgagaaggttcctaggagcaattacaaaagtgcatcgtcaagaggagaagctcaatctcatggttgagtgaaggcaccacatagctaccttttgagggatagctctcgttgtacatagctgcagccttctagta

SEQ ID NO: 359288 - DNA, 151 bp, Zea mays
ccaagatcagttatatggttctcagctgttttgctacttgctgttaccccacctttacttctgtacagagacaagtccaaaggagcttctaagatgaacgtctggcaaccttattatcatgcatctgtcacagcagtctctgcctggctct

SEQ ID NO: 359289 - DNA, 287 bp, Zea mays
agatcgaaagcgagagtgatccggtttgaagttttctcttccacaacagcccgacatgaatcctggtctactgacctccggattcgatctcaacgagacatcgcagcactggctcagaggaggcgaagaggcgactacaccagtgatggcgtgccgacgcacgcagcgtcgccggccaccctccccgtcgcttactcaccgatccctacaacaccaattatagttggggaaggtggaactcctccctcttgggattcgataccaactccaaaaggtatttgaaaggg

SEQ ID NO: 359290 - DNA, 143 bp, Zea mays
gtacataatcacatgtggattagaaattcggaaaaaggaacaagtttaacaagtgcaacctgatctttggctacagaagcaagagtgcctagtgggatctggatttttggtgtagtttgaagattgttctaattctctcgaag

SEQ ID NO: 359291 - DNA, 103 bp, Zea mays
gtatacacgtcttggcttcaaatcgaactcctcccgcgatcgatcccaatcgaacgcatcaagccgatagcctaatggtggcacttctcgatgtcgggcgcca

SEQ ID NO: 359292 - DNA, 246 bp, Zea mays
gacggtggacgccctgctggctccgttcttcatcgtgttggcgaagtcgaccgatcgggtgatggtgagtaaggtgaaggcatgcgtgtttgagaggttactggagagtggcagtcgtttgcttgagatggtgaagaaaggggaggaggtggacaagggtgcgctgaggagaagctcgggaaatttgggttactgtttggatttagcaagaggttcctggatattggtgcgaatgcagcgacggtg

SEQ ID NO: 359293 - DNA, 149 bp, Zea mays
ggcacacagttctacttgatcacggaattctcctaccagatttaccaaggagaattctgcaaataaaatgcatggagatgtgatgggatcggctttatcttacaaagaaagtagacatttggacgaatggcatgattcttcccagatat

SEQ ID NO: 359294 - DNA, 295 bp, Zea mays
taagagagggcggccagtgctctccatccgtctagggggctccatccgcgccggagtcgatcgtacagccggcggcctccatccgcgtcggcagcctccatccgcaacagacagtgctaactggtaatggcacggggtgggaaacaacgcattactcgtagccagatgagtacttgtctgaggaccatattggagagaaaagtccccaaaaaatgttgcatcatctgaacaaaacataagtaataaagaagaccatttagatagcagaagcgataatgagtcccaaggtatgcac

SEQ ID NO: 359295 - DNA, 128 bp, Zea mays
tgcaagagtaacaacagactttagcttccaactagagttggcttttgcgcctcctgcattgacattgctaacaagttctcaggcaatattaattgtgtggtcaaaaagagctgttgtgccactatatt

SEQ ID NO: 359296 - DNA, 289 bp, Zea mays
aacagttcctcacaagaacagttcttaaagttaacaaccaacatagaagatggtcatcttcaagagaacaaaggtgatgccaatgagcaatcagatgatactccagagggaagccattcagataaatccgagcttcaacaggggaaccaaacacgatagacaaccaggaagccacataagaagaatcagacagcacaagacaggtggagaaccctcaagatgaggccagcaaccacagcagagaaagtaaagtgctggagaaggaaaatgagaaagaaataaatcgtga

SEQ ID NO: 359297 - DNA, 217 bp, Zea mays
aaaagcgggtcatagagaaaattatgcttgctacaggccattatgaaaaatgcacatatacaaacgcacacaaacagaaacgaggaactttttatgatactctgtactgaattattaaaattgattattgcattctgcatggttttgtgaattaatgaggttgcttatgtaatggtgtccctaacttgcagtggcatacgaagttgctgttttggtg

SEQ ID NO: 359298 - DNA, 286 bp, Zea mays
cttgcttgctaccacgcctcgcctcctcatctgctgccaccggcgtctctccttcccagctggggccctgagctgagagccgagccgggagcgaaactttgcgctgagattgagctgctcctctacttactactactagaaggcggcggcgtcgcgtcggcgtcggcaatggggtcggagacgttcgtggagatcctgctggccatcctgctgccgccggtcggcgtcttcctccgctacggcatcggggtaattaacactcagcttagcatctgattaattgatg

SEQ ID NO: 359299 - DNA, 140 bp, Zea mays
acctacaatacttgtctctttgttgttgctgtcttgtagtgccagcagcgatgcctccttgttcgtgctcggcaagtcggccggtgtgagcaaaatccgtacgtcatcgactccagtggtgccattctccgtggctctgc

SEQ ID NO: 359300 - DNA, 124 bp, Zea mays
tggtagaggcccaccacttcttccaaggccaggaggccatccagggcgacataactttggttacgggagattcgggaatgggcgtcatgttgaaggtttagtttcagatatgaagcttaataag

SEQ ID NO: 359301 - DNA, 99 bp, Zea mays
ccctcctgcaaactccgacttactctgtgtctgtgttgggactggtgttcagttcttcggtatgctactagtaaccatgatctttgctgttctgggttt

SEQ ID NO: 359302 - DNA, 169 bp, Zea mays
gcatctgctgcagtgctcctgtcaccagtgttgttgtaatctgatgttctgttcgagtatgagaagccaacaccagcagggctctcaacgaagagcatgtttgccactgccatcaagaaattatcagtcaacacgggatgtcttgatatctctgttgacgaagaatggc

SEQ ID NO: 359303 - DNA, 282 bp, Zea mays
gcaggggaggattatattgctagtgaagccactgctgaaccagaagatgctggtagagcttcttgcaatgtagatgacactgctgctttagatgagccacagccgcctaactgtgatctgtacttaggcaatgtgcaagatggaaatgctatagacactgttaacagtacactgcaagctcctcgatgtgatgctgcagaaggtggtggtcctgtgaatttcacaaccataattcctgttagagccagaggaccaacctttaagggaggagtgctgaaggat

SEQ ID NO: 359304 - DNA, 276 bp, Zea mays
atcagaagcttctcatgttaccctctcttctagtagtgatgtcagtcagtcagaaaggatactcaattgctcatctttttcaagcaatgggacatcaagtggttcatttggagtgaaacatattaatggtgctagtttgaagctcaatgtaagaatggatcgttctaaagcttatccagtcagaggctcaactggttgggatttctatgaaagcacaaacttctgattggaactccagagacatggcaaaaaacggcgctatctgaaatgtacgca

SEQ ID NO: 359305 - DNA, 286 bp, Zea mays
caaccctctccagcccgcgttcctcgctttccctcccaaaaccctagcgctgcttccaccagccacccagatctcatggcgcgctcgacctcactctccgaggcggaggcgggcatctcgctgctttgcctcctccctccctggattccgcggcgtcctcaagcaccgctatgccgacttcatcgtccatgaggttgcccgcgatggcgctctcgtccagctcacctcgttcgacctccccaccgagagcgttggtgtgaacgaagaggacaaagcggccccgtcg

SEQ ID NO: 359306 - DNA, 214 bp, Zea mays
gatataagttggattagttccctagtttatctaagtgaattcaattggtcacttttattgaatgctaggttgtgtagaagtatgtgtatacttgtcatgtacttatttaggagtgtttatgttccccacctctccttatgagagtttgcatttcatatcataacataagcatacatgtatttgtaattgacttgtagaacatctagaagaagtg

SEQ ID NO: 359307 - DNA, 132 bp, Zea mays
gatatcatcatttgttgtcagctaacggatcattccttgtgccttctaaatatgattgaaattgtcaatagcaaaatgttgaatacctagctattgaaaatttgcattgtcaaggtttcacgcaacataaag

SEQ ID NO: 359308 - DNA, 248 bp, Zea mays
agcagctccagccctctcggcatcgctttcctgtggcagcagcgtcctgtgccatcacctccctctcgcgtctaggctttggttcctagccgcgcctggtcttgtgccatcttcaccccgccgtggcgcccgtgcccgctcggtcttgtctgggcatcctgcaccaccgtgccgtcgtgcgctgctgtgagctccaacagcacgcgtcgtcctcactgcgacttcgcacgcatgtccctcatgcatcc

SEQ ID NO: 359309 - DNA, 273 bp, Zea mays
ccccttcaattttttaataagaaacaggatgtacaatcaaaacactaactattttacacatcagtggcattagacaaatttatacctcaatgtttagacgagtctttaaaacactctgtcagaatgtgtgcaagaatttgtttcgtgattcatctgtacccctcaaactcttattctcattcacgaaggaatcatcattgacccgatgcaactaaacatttgcagggagatcctggtatgaagggggtgtttgcaactcgcgtttctggttct

SEQ ID NO: 359310 - DNA, 270 bp, Zea mays
caggagggctggtacaaagactgagcctgatcggggaatatttgtaaagcacttcaagaatatcccaatggctgacatggaaattgttcttccagagaagaaaaatccatcactaacaccaatggattgggtcaagtttctcatttctgctgttatcgggttgcttatgacttgcaggtcactctagttggctctctgaaatgccatagctgatgtatgggttgtatagcaatctgtctggtgtgatggatatgtgctagatatcttcac

SEQ ID NO: 359311 - DNA, 145 bp, Zea mays
ctcgagccgctcgagccgcgggatgccgtgttgaaatttaggccaaatatcaatataacaccacaccatgcgaacgtgaaggattctcatttcaatgttgattttttcaagcagtttaatggtggttctgaatggtcttgataac

SEQ ID NO: 359312 - DNA, 294 bp, Zea mays
ctcgagccggactctagaaaaaaaaggaacatatttctatcctgggtttacactgcttattatgtgccatgtgtattgttgtacccgtgccttctcatgactccttaccaaaggatttgaggtgttaactcagattccattcatattgagaccattttgtgcttataggttgctgacttgctgatcagttactgtgtctgaaactattctcctttatgttttgctgcctcattatggaaacacctctgtatctgtaatgccattcaggctgcattagtcgccttgaagctcttg

SEQ ID NO: 359313 - DNA, 298 bp, Zea mays
cgagccgtcatttgcggaagacctcgtcggtatcactggcattcaaggtgccattaaacccacccctgctaatagagatggcagtaccaatggcgacgggaaggccaaggctaatgtagatactgctggatccagttctgtggcggcgaaagtgggtctgccgcgggaggttgagaggttttcttggccgtgggcttgtgtccttgcggctggggcagggttcaatactgaggactttgctggtagagtagccatgtttagttcggttgaggttgtgcctttgttgtcgatgaggtcg

SEQ ID NO: 359314 - DNA, 286 bp, Zea mays
cttgtgaggaaagccaagaatcgctacacctggataggtttcggcggagtctcaatatccttgcgagaactcaaggaaagggcgttaagggagaagtctggcttggctcctctgcaaaccgagcagcaatctgctgccacagtacgacttcttatctttcccttccatttgaactgatgtatctgattctggtctacaacaatttgtactgccttcgcccgaaaaaagatgcagttctaggtctgcctctagtcaaactatccagaattgacctaatttatagaat

SEQ ID NO: 359315 - DNA, 191 bp, Zea mays
tctaaataaggttaacaagctgattaagctggcctcatctttacaattgcatacttttattaattactgtattattccttgccagtttaattactgtatttgtcattaaactggcaaggaataatacagtcattaataacagtaagcaattgaaaagatgaggccatctaaataaggttaacaagctgatt

SEQ ID NO: 359316 - DNA, 287 bp, Zea mays
  unsure (1)..(287): unsure at all n locations
gttaaggtgcggagccgtggatgctgaggcatattctgtaatatctggtaaccttgtaagaacattgtggacaattggaacatccgagaaaactaatcccgatccactctgggataaagcaagaggtactgcttttcactccttgtccatctaacaccctcnattattcaagatgctattcctgatttctggaaactaaactatgagttctttacgaacgaacataatctggcagttctcaaggcctgggaagcaccttcaagatgagatcacagatatgagcacat

SEQ ID NO: 359317 - DNA, 283 bp, Zea mays
ataccattaacagacaaggtacagctaaggaagacagtggtgtggagccacaagaggagaacgttgtggatccagatcaaggtgtggatgacttttctgtactagatgagggtaatgtggtggcacagtgcaccagtgatcaattgagaacaaccatggaagataatgctgcagagatgcaagaggtggtggagcaagaaggtgccatttttgaaaagggtgtgacctcagatggcattactgttgaagatcaagacaaggaaatggacaatctgcaggcgat

SEQ ID NO: 359318 - DNA, 147 bp, Zea mays
caagaaaggcgtcttacggagcttggtcagaagatacttgaactatttgttctatctcatatatttagtgggattgaggttgcctataaagaagctgttgctttgaagaggcaagaggagcttattcgtgaagaggagctccttgag

SEQ ID NO: 359319 - DNA, 275 bp, Zea mays
tgaagcagcagcaacagttcgccgaagtcgagccacccctgctcccttcaaggtcgcttgctagcttctctttcaagccgacgtcgcgctcgccctggtgccgagaacccctccaacgctgccatctccagctcctccaagtccaggcgctgccacccaaccctcctgttcacatcgacgtcctcgcctcgccatcacatcatcgtcacgccgtcgtacgttctctagcttcttagcgcagaccatcctccaacgcgacgttttgcatccgtaga

SEQ ID NO: 359320 - DNA, 288 bp, Zea mays
cgctctcggcccggcaaccaaggcctacctccatgcccgcagctgctcgcccaggcccaaagttgaaatgcccaacggacaagtcaaagatactgcagcaaaggatcatgctccaaccatccagccaccgctgccgccgcccaagaggaagcgcaagacgccttatgactccgaggacgatgtgcccgaagtgtcccgtcgcatgagggacctcagggacatcggatccaaggcggtcgtcccaatggacttggccaatgctgctgcagtctctgctcccaagtacga

SEQ ID NO: 359321 - DNA, 141 bp, Zea mays
tagttaccgagttttttttcccctggatatataggggggtgatttatgtattgtgatggcatagcaacctgctataaggtcatggctgatttggtgtggttgttcgtgtttgatttgaggacaggtctagttcagaatttg

SEQ ID NO: 359322 - DNA, 202 bp, Zea mays
ggagcctgagttagattctggttctgcatgagcaataagttataaactgttcaggattcccttggtttgctgtcaatgttgttcgaaacttttgctgtcaatggtctttaaaaatttacttccctcgtaggcttttcatgttctggtactggatgtgcagttatcagaggcattgctacagagataggacttctagctgaaa

SEQ ID NO: 359323 - DNA, 299 bp, Zea mays
ctgcggcggccttcacgcacgagccttcgccgcctatacttgcgcttcgtcgagccggtgaattgtggtctaagaacaagagggaaggatctttctccagacttcgcaattttggacgacgaggtaaggaagtgtataatcgtgcatactcggttattgtttcttggtggcgactgcaattagctttagtttctcttagtgttagggtctgtttggataccaaggctaattgctagctagctaaaatttagctctagtacatccaacatgagagctaatagttgagatattttttagcc

SEQ ID NO: 359324 - DNA, 99 bp, Zea mays
tgacgaagttcagttgctgaagttggtgtttcagcgattacttgagagaaagatgagtccatagattcttgaaactcagatccaagataaccactggtt

SEQ ID NO: 359325 - DNA, 160 bp, Zea mays
tggcaagttgttccttgagtggtacaacgcccttgtctttcttcaagtacagcttgtcaccgtcgccccagtactggagagcttgaaatgcaagatagaggaaaggatcaaacagttctctaatattaggtcacagattgagaagatccgctttgagcta

SEQ ID NO: 359326 - DNA, 204 bp, Zea mays
cactagttaagtgcaagagctcagtcgtatccttggagtaattggtattgagatatgtagaaagtagtgtgtataaaggttttggtgttattgtcatgagcctattcatgttgtcatccattgtttagtagctcctactatatgtattatgaaatactcataggtgttctagtgtgcttgagagtaacagataccgtagtcttg

SEQ ID NO: 359327 - DNA, 273 bp, Zea mays
ccacccaccctgcgaacccggccgcgaaattctcctctcggattccgccgccgtcaaccgtcccctcgacgaggctgctgcgatagatttttcttaccattcgaatagttgatgagcgagaatacagagcaagaatcttgatggtgcgtgtggtccaacttggttaaggaaagctgactgcttgaagtgaccatgttggaccatcttgctatcattgcgtctgagttaggggacgacgcaacggattttgaggttgatggcatcgacaacctc

SEQ ID NO: 359328 - DNA, 106 bp, Zea mays
cacgtgacccgataagtgcgatggaaactgagcgacggtcagctaagaagaggcttgaccacttgttcaagaaacttgcggcagagaaagcggcttgtcggaacat

SEQ ID NO: 359329 - DNA, 270 bp, Zea mays
tgacaataagcttcgctgctgactctgcagatatccacctgcaatatagtgataaataatagaacatttgtgagatgtcgtggtgccccatcatgatttctttgcttgccttcaaattcttcctatgatatggctaacaaaatgaaatggtagattcaggtgacttcgcaaccttttgatgtttaggttagaacagtgtgatggtcaagttgtaaaaatggttgcaaaaatgctgaatacatgttgaagaaatggttgcacatatgattg

SEQ ID NO: 359330 - DNA, 300 bp, Zea mays
ccgaagggttcctgatcctcaacccagcactacggctaccacttctccgaagcagcagctgccatacgtcaaccaaaggcccttccaaagcagccctccagcgatgcctctgaggcagctggtgagatgcaggtgaatggttcaagtgcatcggatgctgtgactgaggttcctgttaatggtgctactgcaagcgatgctggacgcagtgagatccaagaacaatcagtggcggcctaagtgaaaccaagaccagctaagaactgggaagcaatctaagagagattcaggatctctagt

SEQ ID NO: 359331 - DNA, 299 bp, Zea mays
gacccctcgccaattgcgcgtgtggtctcggcgcctgatgttcagccgactcgcttcgtccctgcccccattcctgctactgttgcggcgcccgaggagtcacccaaggctgcccctgccgttgctgttgcggctcccgtcgggggtttgcccctgccttcgccaaggaggggaggcggggaggtagggatacggggtgcacggccgcctttactctccccgcctccgccaattggtgcactcgctcctccgccggtgaggatgtccttcgttgacgatgacatgactaggtccgcttg

SEQ ID NO: 359332 - DNA, 131 bp, Zea mays
gtcccagccaaagagcaagttgatgcactattaaaggaattgtttgcactttcaactgtcacgggtattttgagcacactgctggctacttgtgttattgttgaccaataaaatctataatttatctgaac

SEQ ID NO: 359333 - DNA, 288 bp, Zea mays
gctcgtactatggtcccggcgcacaacagtcatggtgatccgtcaaccacatgctggcttcattggagtagggccgagaacacactgacacccaaggatcaatggtttgttagttattattattagagtccggaagtaatgagtcccaagcagtagcaataagcatgcatgtatctgccgcgcgtgttagtgctaatggcaagtcctgctgcttctgtattattggccccgtcctgtagcttgtacatagagcgctcgcggttgggttgggccttgtgtaataaacct

SEQ ID NO: 359334 - DNA, 297 bp, Zea mays
ggtttgtagtcaacacaagcgctgaatccaaagatgtttatgaaaatcccaatggaagtacaactgctgcaaaacatgcaactaggagaccgttatcaccatatccaaattaccctgacttgaagcctccatcatccccaacaccatcaaaaccgacgaattaagagcaatgcaggacaataacatgtgtggaactcaaaaggtcagaagtagttgtctcctgcacaaacatttttgtatacttccaaccgtggatgtccaggagattgactgggatggcatggaagaggaccagca

SEQ ID NO: 359335 - DNA, 116 bp, Zea mays
atcaacgcgggcctgaagctagccgtgctcttggcgctacccgtgctgatcggcctctggctggggctaggcatcttgggcagcgcgctggacggtctcaggcacggcttcttcac

SEQ ID NO: 359336 - DNA, 287 bp, Zea mays
cctttgtactggccccaagttaaagaagcttggtccctccacttcgttcaagtttcaacagatcgcacttcaacgtgatgagttctcacgttcgatccattcggacaaccatgttagccacgagcatttccagtttatccggaagatgaatagggaacaactgtgggtgatggctaggtactggataatagagcctatgaatatggccctttttgtttggattgcttgtgttgctgtatccggtgcaattctcttccttgttatgactggaatgctgaatcgtgttt

SEQ ID NO: 359337 - DNA, 116 bp, Zea mays
aactggattgtggaatgctcctctttctcagtgttcgccaggaaggatagatccggaggcgcatcgtacgggtggagatttggaccaatccactgtaggattgatgcaccggcgtt

SEQ ID NO: 359338 - DNA, 160 bp, Zea mays
gatcccgatctccgcaccctgtccgattccagctccgtcctccccggatttcagttccaccgcgttgaggttttctttttttatctcctttgggtcctcttgttcccgaagcatggggactgggggttgaattcgtgtagagatccagatgattgcgctg

SEQ ID NO: 359339 - DNA, 291 bp, Zea mays
tctctctctacgaactccacctcgcgaacagccgctgcttgcctgccgtgttggagagaacggaagattagcgagcgagggagagggacagcaactccctcggtcgctttcgacggcctggatctccccgcacgcgggatcgtacgaccggcacgctgttctcgctttccaccgcatagtaaattgccaaggctgttgtaatgggggtcaacggtcatcacgaacctcgcagtagatgtaatggcaccgtctgccatggtagtgtaagatcactagatcattttggtgatg

SEQ ID NO: 359340 - DNA, 165 bp, Zea mays
gcctgacctcctcgagtcgtttccgcgggctgcttgttgccagtgtttgtttggttcacttcattcttctctcggactttgactctgtcaccagagcagagcacaacacagcactcagcacagccggacgagtcttcactgtatgggattgtaccgcaacgaatg

SEQ ID NO: 359341 - DNA, 129 bp, Zea mays
gggtcatttcagtcattaagcattggatctagttctgggtcagctgaagttggccaaggctcgaggactggacaagtgctcgaacagttgtccttcccacctcttttagacccagatattcctgacaac

SEQ ID NO: 359342 - DNA, 290 bp, Zea mays
  unsure (1)..(290): unsure at all n locations
gcggaacttcccgcagactattgtgatgtccatgcaggcgttgtgtcgctggatcggctgaacaaattcgtgacggacaccgagatcgacaccgcggccgtggagcgcatcgagagtggcggcgctgaggacacagtggccgtcaaggtgcaaggcagagtgttcgcttgggatgtgccagcggacgaggagatgaagggcaacaacaacaacagcagcaggccccgccatgaggtggcagagaatgacaanggaaatcgggcggagttggtgacagtgctgaggggcat

SEQ ID NO: 359343 - DNA, 298 bp, Zea mays
aattactgatcctagatgcaagttctaacttgcttaattgcatagatttgtgtgttgaacttgatctgcttccttttatgctatttattttgtgaactcaaataatcaactaatcttggaacgtactttcagagctggcataaactatcacgatagaatatgttcatactcataagttgattatttgagttcacaaaataatcaacttatgagtatgaacatattctatcgtgttgttttatgccaagtctgaaaagacgttccaacattagtttcaatgtctacatgttaaaacgtg

SEQ ID NO: 359344 - DNA, 304 bp, Zea mays
cgaaaaccaccttgaagaattttttttgcattcagaattttcagagctaagggagtcagaagatgtaagagtagtagacacttaaatgttagttattcttgatgtccaattattttcctccatagtggttgggttttcaatatgcatgcagctatcaaaagtttctgatcgatgctatggtcttacgctatcacctggagaagagataattgctgtggtccgcagtttggatctgaaccttttgaaccagatgtatcaagtcaggacacaaaaggcggtggtcgagttcatttggatggtggcc

SEQ ID NO: 359345 - DNA, 291 bp, Zea mays
atagattcctagtcctccactcctcctccacttgagagtgccccacgcagcccactgctgggcagaggccgcgcgcggcgccagcgccaccacccctttctcttctcccctctcccgtcacatcctccacccaatgtggcatataaatcccagatccagtgctcccacctccctcttgtttgtatagccaggcagccagcctcaccatgtgatctctcgcaggtgtttcttgtgttgttccatccttattttgcattgatgtcaaggtttttttttttttggccagaccat

SEQ ID NO: 359346 - DNA, 112 bp, Zea mays
gttccgctgaaagacaaacgagatgccattgctgtctgaatgagtggtgtaagattagtaaatcatattcgttacctcggctgatatttcacttgcttgggcttgccatgat

SEQ ID NO: 359347 - DNA, 298 bp, Zea mays
  unsure (1)..(298): unsure at all n locations
attcattatcatttttccctttttcacatttttaataatctgtaaattgggttgttcattttctagaaccaggctgagtattgatgttaatgttctctagacattgtcatttcagttgcttagatcagtaaaacttgataaataaatgtttgatgcaaatccaacaattagattgtttagtggtctaaatttaggagatttcatagacctacatctgtaaaggccataacttacatagaagattatctccataagatgtagcaagcactatccaaactanacaacctgtgcatgggta

SEQ ID NO: 359348 - DNA, 298 bp, Zea mays
acttttggggcgaagaattggatgaaaaacttgaacgatttgttagaaactatgtcagagatgtatatagtgatctttcagaaattatattgaagatgacaaagaggggcgtacaacgacatattggtgaggacttcgctgaggatctgcaagatgggttattaacatccaaagtttattttcttatcaaatctcttatggggtataggcatatgcaagatttgagatgcattgtttttgtcgaaagagttattacaagcattgtgttggaggcccttctgtcaactataatcaaatg

SEQ ID NO: 359349 - DNA, 294 bp, Zea mays
ctcgagccgctctactaactattaagcgtttattgtagactgtcacgcccccgcctccgctacgcccgaccttagaaaaccccgccgccgcgatcctcccaccgccgcgattctcaagcacgcaaatccctacgcgaatcgcgtcgtgcccgtttcaactgccgtgagccgcccgccgcatgcccagctgctacctctgcgaaatccctcgctcagctgctacctccgcgcaccagatccacgccaacatccgtgcctagatccagcgtacaggatgcccccgcctccctgtcc

SEQ ID NO: 359350 - DNA, 100 bp, Zea mays
accaacccgacaaggtaaaatactagtagaatattgtccagatacacaagtgactgggtacatagttaatatcgtagcaggtatacggtaactttctagg

SEQ ID NO: 359351 - DNA, 261 bp, Zea mays
  unsure (1)..(261): unsure at all n locations
acttttatgaatctcatcatcttcctgtgcctgtgcccctcggttgaaaaacaaatgtactttaaggttcaaatatcagcaaaatatgttgatgcatatggttgcgaaatcatcgatctgtgcataatattatttcataactttagtaactgcatgcatgtagaccttatgcaatcggcaacccttatatttgcatacaaattgcttattgcttatgaccattccctttttcaacagaaacttgtatntgtganttgagat

SEQ ID NO: 359352 - DNA, 292 bp, Zea mays
ggaggggatggaggaggccaacaggacggcagtggagagctgccaccgggtgctggcgctcctctccaacccgcacggccagctcgtccccagcccgagcccgatccttggcctccagctgttcccgaggtaccaccagtttgagggctcgtcgtctgaggatcctgtgcaggatccctacccagttccccaagaggttgctgctagagaagccgactgccggtatggaggggtcgacgtcgcagtcccctccgatcgtccagatggtccagccggtgtccgtgcgcccccc

SEQ ID NO: 359353 - DNA, 279 bp, Zea mays
aagcaatgccacctcttttttttaaataagctttctaggaaagtaagcaataatttagctgtgctgttgttaattgtttttggccgatcaatttgcatcactcattaaattttgaacatgtgtttacatgcatcttattcaaatttttatcgttcggaatgccaatttaaatttgaataagatgcatgtaaacacatgttcaaaatttaatgagtgatgcaaattttgaacatgtgtttacatgcatcttattcacatttatattggcattccgaacga

SEQ ID NO: 359354 - DNA, 282 bp, Zea mays
gtgaaatcgagttccgaatctctaactcgagctatttggctatttgatgcgtactaatttctactccgttttctagatccggccctgggtactagtgtttcgagatagcatctaatctgaattttttcgttagctgttagttatccgttctattgtgcagcaataccgatatgcagatttagctcgtagctctgtatgttcctccgttgctgtcataacggttataattgcgattatatggcgagctttacaatcttagttattatgatactctgctggtcg

SEQ ID NO: 359355 - DNA, 293 bp, Zea mays
cggagagggagtcgagagctctgccgccggcgaacggcagggcgtgcccttcgctctaggcggcccgctgttcgtccccttcatggtgggccccatcaccaccataccagagttcaacgtctcagccctccacgagctccaggccttggaagacgaattaggagacaccagagacgaattcagcaatgagctttgtgtcgatgagctcaaggtgctctctgaggaggagctggtggagcgcgccctgcaggaggctatggaggactcggattctggcactcaaccacaaccag

SEQ ID NO: 359356 - DNA, 292 bp, Zea mays
  unsure (1)..(292): unsure at all n locations
atctgcgtgttcggttccaagatcaacagcagccaagatggacaagtctggcaaagtgattgctaagtgggacagtagagctacaaaattttacacagaaatatgtgtagaagaggtcaatgcacggaacaggccacaacaattcctaaacgctgaaggttatgctaacctgataagaaagtttaaggaacgcactggtcgcacgtacacaagggatcaaatgaagaataggtgggatacgttgaagagaatgttcacccagtggaaaactcttaatganagggctactggt

SEQ ID NO: 359357 - DNA, 283 bp, Zea mays
agcgatgataaggctggaaatgtcaccacgctacaaaatctgctcagttacgatgcatctttggaagcgagtactgctgctggttccgtaacttgtcaaacaaacgttcttaacgcagacagtcttccgaatggccatcctgttgccgcagcgccacaagactccaggtcagcatgaaggattattcgcttctttttgcgagagaaagctagcgatagtgccgcagaggaagaagacgccggcgacgaaaactctctgaaaaatccgacagcttccactgtga

SEQ ID NO: 359358 - DNA, 282 bp, Zea mays
atgagggctccgttaatgaagataattttacagctgtgctttcaaaattaatcgatgcccccaacaaagaaaatgaaggctatggagaaagtggatgtgctgtgctttcacaatttagcgatggccccaacgaaggaagtgaaggatatggagaaagtggacattacaagcatgaagaaaaatctctagatgaatcagtgggatcactaaccattggcattattgattctgagttcatggattcaagtcctccaattcatgataaagaatcatgttctactc

SEQ ID NO: 359359 - DNA, 279 bp, Zea mays
tctcgagccgattcggctcgagcagagtgttcgtccagaagcatgtacccagattcggcacgacatccatacgatcttctgaaacagaacagaccaataaggattagccgaatgggtacagcttctgaatatttcactattcatcgtcagtatcaagcctcttcacaagaggaggttcctaagataagagtccacgatgtggtgtatggaagcatgaagacttgcagaaaatttgaggtcctatcatggagatctccaatacccccctactacagctat

SEQ ID NO: 359360 - DNA, 278 bp, Zea mays
gtcaatttagagatgatgtcgctggcctcatcatctaccggtctcactcggcgttcaaccgcagctaggaatgccctgcatccaaacatcttgatgttgttgttgtaggcactctgcccactggtgtcgatctggaggcgacgatcgatatagacactgggttgtcgttgataatctgcccagattgtagggacgtgagggtgtttgctgccactaccaagtttgggtctaatgagggaaagagatatttcaagtgtcctaggaagacttatggacat

SEQ ID NO: 359361 - DNA, 279 bp, Zea mays
  unsure (1)..(279): unsure at all n locations
tgacctccaagaattcaggtcttattttttattacagtatggggttgttctaataagctactggcatatgatggtaatacttgataaattcgtatggatgagggaaacctaagtcagctgttggtatgtgcatctgtgattaaatctgatgggttttgaatcagaaaaattatgacaaccatcttataaattttaggaaatagatatattattgtacttaaaactanattttctgaacagctcatcaaacttggaccttgacctanactcatttcaatt

SEQ ID NO: 359362 - DNA, 110 bp, Zea mays
agcttatgcctttcccttcgcttcgacaaaagctccaatagacacacacacctgcgttcctcactcacgccggcggcctgtatcactctcaccatggctgctggactggg

SEQ ID NO: 359363 - DNA, 110 bp, Zea mays
  unsure (1)..(110): unsure at all n locations
cgcaggggctggcgtacctccacaacgactgcaactgaagcatcgtgcaccgggacgtcaagtcctccaacatcctgttngaaggnagcttcgaagcgcanctgtccgac

SEQ ID NO: 359364 - DNA, 296 bp, Zea mays
cttattacatataatccattgaacttcatgtcttggtttgtccaattcgacatcgaagggctcgccatgtggggtgacgtcgacggggcttcacctgtcctattctatcattattgtgattactgactatgccattgtttgtgctactgctgcttatgttgcagtgccacaaaggcaagcgaacctttgatttggtccatgttctggtctaaccttgttgggtccacactccatgggtcactttcacattactactaccatatctgtgaggtaaccattgttacatgacctactca

SEQ ID NO: 359365 - DNA, 285 bp, Zea mays
gagaaagttcttaacaatttctgcagaaaggcgtttcaggattataaaaagaatgctttcttagaggctgacaagcagtgctcaaatgcgaacacaacatggagaagaagatccgagcggcatgcactgctcctggtgtcaaagtttctgcttgattcaggtcctggaaactgcacttgctgaatatgaaacatcttgtactggcccagccaaatggagaatgcttgctgcctttttaagacagtgtttggaaggacctatattggacctctgcttgaagttaat

SEQ ID NO: 359366 - DNA, 290 bp, Zea mays
  unsure (1)..(290): unsure at all n locations
accaccactactatgccgaaggcaagaaaatgaaggttctgacccaccggccacgatatattgagacggccgtagtgcctgaacttggtgaagggacttccttcgttgccgaagggaatcaagctgctctcactaaggctgaagccgaacgtcgactgcagcgccgaaggtgcctatagtcgaccgaagccaaagatgacgtggccaaagagccagagttggaaaaaaccatggtgatgccanaaattctgagcccaccggcagaggcagaattaccgaagtngataaag

SEQ ID NO: 359367 - DNA, 101 bp, Zea mays
ataaggtcaaacgatatgagcggcttgtaaatgttaattctagaattaacatttacaagctgctcatatcgtttgaccttattaaccgtaactttcagggg

SEQ ID NO: 359368 - DNA, 290 bp, Zea mays
  unsure (1)..(290): unsure at all n locations
ggttactactacaggtgtaagcttgcaaaacccagaggtttcatttgttccctcccccttggctggacaattttgtgagcgagtcctactatctggagtgccaaggttacatcttgatagttatgcaagccaaattcgtgtcaaaatgaatgtgtctcaacanattcctgagaagttccattggaaaatagaggtttgctttcataggaatgcctctatgggtttatgccagtgtgaggcgggtgagtggcaaggttttcaaggtgggatgtggactgctgtaagttctc

SEQ ID NO: 359369 - DNA, 290 bp, Zea mays
ctctcctgagccagcgcgtggagctctcccagacggccgccctcctcagccagctgcccacaacagtcagccgaccggcacagaccagcagccagtgcgagtgtggtgtgcccgtcaagtgcggcaagtgcggcagggcgaccgtcgacgcgggcaccctacgcaagccttcttctccagggggtcgtttgccagcgacgagcaccaccaggtgctttgtgctaggatagcagtgctatgtcacaagctcaagatgatcctttgcaagcaactgagcaggagggaagtgt

SEQ ID NO: 359370 - DNA, 286 bp, Zea mays
ctaattttctgaagttttatgttcttactttaattataactagttgattgcaataagatatcatgaggtgcgccgaggagaacaggggtctcctctccgcctcctccttcgacaggcaactgctgcggaaggaggtggtgaggagggtcaaggccgcggtggcgggacgtgagtgaagtgagctttgtcgagcctatatgtggaggtcggtcgtgaagctgggactaggacaagggcgagctgaaggctagaagctgtaaatgcacccttcaagagtcttcatagg

SEQ ID NO: 359371 - DNA, 285 bp, Zea mays
ctcgagccgagttttctcggctaaaaagagatcatagtcaagagtatacctatgtgtgaaggcgctatgctatttgcttgtttgctgggagaaagaaaagatagatgaaggaagtaagtcttccactactggagcaattgctggtggagtgggtgctggcgcagcttgctatttgctgttcctgctatcagttttgcctattggcggcacaggaaaccacaagatcattttttcaatgtatatggcttcaaagttagtctttgattattatctttcttgcaacat

SEQ ID NO: 359372 - DNA, 144 bp, Zea mays
tgcggcgactgggcgacagcgctgtctcagtacgcctggtgcccaggtatctctgccggcgacgagcacctgctagctgcaggggtattggactggaggtcgtctgtgctgaagcagcaccagcagacatcacagtatccgatg

SEQ ID NO: 359373 - DNA, 193 bp, Zea mays
gttcaagaaatcagcacaacagtttcatgctggatgaatgttctaatatctagatattggaaattaaatgtattgtgcagtaagtctagcatgaactcagaaaatcctgtgtggctatgaaatcagtatcagacttgagatcaagtatttcattgagttggacttggtggttaaacacaaaggcttcttgtgg

SEQ ID NO: 359374 - DNA, 232 bp, Zea mays
tggcgcttggttgacccggaacggacggcaagacaccgccgggggttcgctgcaaccgcacgcgtggtggccggtgtgggaaggagcccactgctcaagcagcgacgacttccgcaacttctcaggccaagttgtagggagggagggcagcaaagaaagcaagcaagaaagaagcgcacaagttcaacaccaatggcagccatatgaaatataagcaaagcagataaaaagc

SEQ ID NO: 359375 - DNA, 148 bp, Zea mays
cgcgagtgctggggaagactgcgtgatccatgtctgggaagtgtcagagttcgagaggaaacgcgaggagaacggagcgtgcaatccttttgttgcgatggtgtgcaacggttcgccggagccaacattagccgtggccagcagtgtg

SEQ ID NO: 359376 - DNA, 136 bp, Zea mays
caacaagaacatgtacaagagattctttagcatcaaaataggtgagtcgtcaatcctcaactgctcaagcctctgactcagactgaacctaagatgaggattgaggactcaccttttttgcactttggattttgtt

SEQ ID NO: 359377 - DNA, 158 bp, Zea mays
ataaaatattaaattttagtatttcttcaatgactctgccggtagctggagttgtgtttatttttaagtgaatttggttagacaatgatgttttcctacacttgtagccagtggcagagcttggacctgtatcaagcagaggccaaccattaaggagc

SEQ ID NO: 359378 - DNA, 297 bp, Zea mays
tagaaaactcaaaccctccaaccctagccggaatcaacgacccgcttcactcgctcggcgccgctcgagccttcctcctcggacgccagtgccacgccgcgccgccacccagcctccctcctcctcggacgctagccgccggcgccaagtattcgccgccgtccagaatggacattttggagggctctattgctgttcgtgtagggggaaaaacaaaaggaagtggattcctgttgaagatgatgaactgatcaaagcattggttgatgtttctttggatccgaggtggaggagtga

SEQ ID NO: 359379 - DNA, 290 bp, Zea mays
aaacagtcaaaatggatcaaccaagcaaacaaaataagctaagggccgatgaagttgcaagcatgaaatgtgtttcatgatccgattggctgtttccaggcttaaatcaagttgtttttgtccttccgtgggaacagatgaacgctatagttacttccttgcaaagcctggctaggtgcatgtaactaggagttagttgtatattacctaccctcacggtatcactgaatcccagtgttatgcggatgatgtagtcttcagaagacagcgcaagcacattgtcaggggtt

SEQ ID NO: 359380 - DNA, 290 bp, Zea mays
gtggcagcacacctcaggttcttgttccagttgctaatggttcagaggaaattgaagctgtcaatttgatagacgtgttgcgtagagcaggagcaaatgttatcgttgcgtcggtggaggagaagttacaaattgtgacccgtcgccataagtttaatcaattgctgatatgatgttggatgaagccattaaaatgcaatttgatttgattgtcatgccgggaggtttgcaaggtgctcagaagtttgctagtacaaagcaacttgttgacttactcaagaaacaagcag

SEQ ID NO: 359381 - DNA, 232 bp, Zea mays
tgcaggtcttgcagcaacgtctctctcctctgggcggtgggcgctcgatgttcttggctccttcacttggacttcgccccgtcggcgtccactgatcaattgatcatctgcagctttcacagaaacagtaaagttgctaaaaccaacagagtttttgattcttagtgcgatcaccatgaagttcctgattggtctcttcacacgcgctacttgatttcttgctcaggtagat

SEQ ID NO: 359382 - DNA, 267 bp, Zea mays
cgccggcggcaactccagcgtcgagccctacgtcgtcacccacaactgcatcctggcgcacgtgccgtcgccgccgtctacacccgcagctaccgtgccgaacagcagggcgtcgtcggcatcaacatctacaccttctggacctaccccttctccgcgctcccgccgacgtccaggccacgcagcgctcggtcaacttcatgatcggctggatggtcaaccgctggtgcatggagactaccctcaagtgatgaagagggtagtcgg

SEQ ID NO: 359383 - DNA, 183 bp, Zea mays
cgctccctcctgcaccccacgctcgccgacgagccgctcgacctcgtcgcagcttgccgagccatcatgcgccccggtgcggtggtcaacatcatccacgccgtcaatcgtttgttggtcctacgctcagtgcatgggtccttcaactggcgatggtggacaaccgtactaccacgacgcata

SEQ ID NO: 359384 - DNA, 289 bp, Zea mays
gcaacaacaacttgagtggggaagttccacaagagattgcagaaatgccatcacttaggcagttatcgctttccaataactgctttcagtggcctctgatccaacattcctatgggaactttgatcaggaaaatggtttcaatatttatgatatctcgggagaggtaatatgaatcaaagagctgagaatgggttggaatcaggttcttcttcacatgagaacaaaaaggacactagcaacctttctgctcgacttcattcacaatacgaagcaataaatccagcagca

SEQ ID NO: 359385 - DNA, 291 bp, Zea mays
agcaaaaggacatcttgatgaggggaacaggcaatactactttgaaaaatccctagatacagatctggtgtctgaccgatgcttcgatttacagcttgttggagatagtcagcgtgaggagcttccgaagttacctccagtgaggctcaagtccgctctaagctagtcaacatgaactgggaggacaagatcaatcaccatggatctggggccaagcaatctagtgctgatcatgcttttatgattgggtcttatctcgatgttcccattgggcaagagataacatcttca

SEQ ID NO: 359386 - DNA, 279 bp, Zea mays
cggagaggctaggcggggacggcctgcccctgcgcccctgccatcttgcgcggcgcagcatcggccaccgaggcgcggcttctcgattcttgaccatcctgctgttctgccttctccgtccgcgccttcgagaaggccacagagcgaaggaattgcagagttttcttggcgcgaaagaaggagagagagagagagagagagagagagagagagagagagagagagggacacgtatatgtatatccagaacgtatagaggacgggcgtgtttgggctcta

SEQ ID NO: 359387 - DNA, 296 bp, Zea mays
accactttcatgtgtggtctctttccccttgaccttgatagtgactgcacgcatagaagttccctttacatccttagtgtaaaggtgaagccttggagctttttagtgtcgagaggcaactgattagctctcaaaatggagattaactttcccatgttactgaaatgcaggagtttgttcatttgctctcctatttgattcatgtattcctggaccaagtcagttcatctcatatagaagaaatagatgaatgaccagaccaaatggattcctgcccaaatgcatgaccaactgtt

SEQ ID NO: 359388 - DNA, 304 bp, Zea mays
caaggctcagaatccttgtcacatccatgtcctgaagcagagcaacacattgccagataagccatcacctgctactgcttcttcaacagaacagccatctaccaatttacccgcaaccagttcagcatcaaggctagctgccttgcaaaagcttcctcagcattttctgaagtctctccaaacaaagaagtcgcttacgaaaaaggatgccgtggctataaacaagtggaggtttatgaagctaagggaacatatgcaaggcgatatcgatgatgaaaacgaagcatatgagaggtatacacag

SEQ ID NO: 359389 - DNA, 287 bp, Zea mays
cacagctgctgctggttgaaaaagcagcttatctgataagctggtgaaaagcagcttatgcttgttggctgcttttagtgtattctgagaagcagctgaactaataagctgctggagaagctagctgtttggcaaaacttctgcttaaatttgtgaagaagctgaaaataagctgacgccaaacagggccttagtctggtgtgttttgccctcctatgaattgctagagaggatttagcgaatttgtgcttggttgacctgggaactgaccacatgatgctagtcgt

SEQ ID NO: 359390 - DNA, 283 bp, Zea mays
caggaaatggaaaccattgaccatctcctcgtgagctatgtgtttgcaagaaattactggttcaagctgctgacaaaggttaacctccagaatttcactccttatgtctatgaagagaataccatgctctggtggaaaagatgtagtgatcagttgcatggaattgccagaaaaggactaaactcgcttatcagtcttgacctctggatattgtggaaacaccgaaacgcctgtgtttttgacggcctttctccctgccttaatgaagccatcaagagaaccg

SEQ ID NO: 359391 - DNA, 285 bp, Zea mays
ggcgtctcgctcccggatcccgaccttggggttgcagctgcttcagatccagcgttaccagatctgtgacccgctggcgcctgggcacatgacaccgacggttttaatggagtttgggcagcagaggccaatgaaacggggatacgacgaaatggtcttcagggcagcctcttcccgtggttatgcagagactgttggcgagtcgggagttgcagctggtagtcctcttcgtgttgattctgaggactcatctgtgccaaagcgcaagtgcatcagcctgaacag

SEQ ID NO: 359392 - DNA, 178 bp, Zea mays
cagcatatgtctcagaggcccacggtttctcactcctcttccatagcctgcggccttcactctcatctcctggtctccagtgagatgaaccctagctccaattggtccctttaatcaattacctcttaattagtaattacttaagatcaattagcctttcactcttccacacaacata

SEQ ID NO: 359393 - DNA, 305 bp, Zea mays
agaagcagcaaaaaaatgcaaaccaaaatgttccaactgtttctgtagaataacactgtatggacacctgcagacaccatggagtgtttattagaatgcttactctgagtagaagctgtccttttgcatgtactagttcttccattatattgtctaattacattcttatcatattcagcttgcagatctcattgattcccttccaaaaaggttattagttcttgttacacatcatcatcaggatcacattgagggtctttcagtcgttcagagatgcaatcctgatgctgttcttctgacacacc

SEQ ID NO: 359394 - DNA, 285 bp, Zea mays
gagaatcagtcttatggtaaatcctggtgaatattcatgggaggtcagcaagttctggcctgactaagtctggtaaaaaaagttgcttcatctcagatcatcaatggtgagaatgaggttcccgaaacgttatctcatagtattgctgacattcatctgcacaaatgtttgctacattgagcgcgtgggtttctcgattgcttacactgttgcagccgatgccattggtgtgaatcaggccaacaagggcatgatactctctatgttctattatggttatgtttt

SEQ ID NO: 359395 - DNA, 283 bp, Zea mays
gggggaggaagatttggccgtggaggtggcgggagattctctggtggtggccgtaggggcggcttcggtggtggcggaagacgcagaggtggtggtggcggcagggggaggcggcggcaatagatttaacaggaggaattagaagctgctgcagtcttagcggacgtgtcagtgacgtagttttgaggaagagggggacggaatattctcagtgttggctgcaattgtatcggggtttgtatatttgttagcgttcgtcaacgagaatacgacacacattgtt

SEQ ID NO: 359396 - DNA, 296 bp, Zea mays
agaagcttcccatgcctcaacagagccccagggaacccagagcatgctagcacttttgtcggttcatttcctgctgataatttctcagttggcgttagtttggcacaatcgtcagaaactcgcagcccaagctcttctacattggaagcagaccactcacagctttcatcccttagttcacaatatgttcttccaaagttggttgtcaataatattgatctcagtgatgagaccacagatctccttcaaatagaggcgtttgtgcggattcttgagagtgataagacagaagcatc

SEQ ID NO: 359397 - DNA, 102 bp, Zea mays
tgaattgcctaggtgctcgaggcaagttctgtggacgtttgatatgagacgtttcacaaaggtgcaccagactggggatgtctcacttctaccggacgtatg

SEQ ID NO: 359398 - DNA, 301 bp, Zea mays
taaacatgcaaacgtcgcaaaatgaacatggctctagttgtcaaccttgtcctgtggataaaaattatgagtacaatccatcatcaccactaacttgcttttgtgcggtgccacttggagtcggacttcgtctgaagagtccaggaatcacagattttcgtccctatgaagatgactttgagatcaacttaacctctttattgcaactgtttcggtatcagttaagtattgaacgctacatatgggaggttggtccaaggctaaatatgcacatgaagttatttccaagtaatcaagtcta

SEQ ID NO: 359399 - DNA, 272 bp, Zea mays
ctgaggccagggtattgtgatgtgcgaagagggcagcgttcaatctgcatctaatctatatgaagagtggagctaccgatcttgcgagacggatcctaaaacttggaaatgacgcactcaatggtgacacaaaagaggaactcagatccttgggtgatacaatagcttgtagagctccagatcccagtgcatggctttaagtatgtcagttacgtcgttcagcagcacccatattctctagccgcatggagttcctactataaggtggcatc

SEQ ID NO: 359400 - DNA, 298 bp, Zea mays
cagagttttgtgccatccccttcagactggtaccattgccaccagtttcttcacctcacgtagccaggaatttcgggagatttgctcgaccatgtggtgtttgttccatactcaactgatgctgaggacaaccttgccgtcgacccgttcaaccgcgtcttcctcgagcaatttcgcgcaagcactgaggtcatggtgaatccctcctgctctctgcgcccttgattggaactctactattctagtgtctcaggatcgggctcgccgggctgtgcatctcgccggcgcgtgttagtgc

SEQ ID NO: 359401 - DNA, 295 bp, Zea mays
gcgcatatcccttcttgggcgctgcatgatctctggcgtgtccttatcctgctaccttgtcccgtttaatcggaacacatgccttgatgtaggatgcagcatagcttgatacgctgctcgcgtagggtgtaacgggcggtgtcgtctagtcttctccgtccgtctcttcatgcctcggtaacgcacgaagcaaagtggaagtcataatgaagggcgcccaaacgacgtattgggtcaatggccttgactcggtattatgcgggtaaaagtagaatctgcacgttaaggcctgagg

SEQ ID NO: 359402 - DNA, 143 bp, Zea mays
cgctcttctattggttcatactcatattttgctgctgcaactattaatttcttatattggggctggtggctttttccagcagttcagttctatggatggatcgatgaatgggttgtaggcgagtttggtcctgcttatgattg

SEQ ID NO: 359403 - DNA, 244 bp, Zea mays
gagctggaggaggcctgcgaggccgaggctttgagagggcagagaggatcagcgactccctcgccacgctcgataaggagaacgatcggctgtcgacggcgctgcgtggtgctgagcttgactatgattcagtggattcggagttgcaggaggtgcttgagtctcgcattgctgcagaggaagaagctgctgccctcatggagctatttgcgaaggatgccactgtacacgctaattcagcgag

SEQ ID NO: 359404 - DNA, 301 bp, Zea mays
ggtcagtgtagtgtgagggcaaccaagaagacatcttcctctgtcaaaactggcaggcctttcagctgctgctttacctaccgtgcttgctagttgtgatacacagttggtgcctgtggctacagcaatggatatagttctactcgttatggacgcgaagggaagtcagttggggtttgactgcaaggcctaattgttaatgagatttgcactgatgaatgagatatcgttatggagcagcagacgaagccatcgagcaccgcgaaatccactcatgtaactgatggagtggactactgca

SEQ ID NO: 359405 - DNA, 148 bp, Zea mays
gtccaggcagaagcgcaggacggggcagcggcagcgtgagcaacgtcaccacccaagcggacggcaatcatggacgctaaccactcgtcgccgggcaggtcataggaatcatggcagcttaaactacgacatcgagagcacggaaggc

SEQ ID NO: 359406 - DNA, 179 bp, Zea mays
  unsure (1)..(179): unsure at all n locations
ttcggcacgagcgaagaaaccctggaaaaccagggccattaatactactcccagccgtcgactatctgctagtagancaccgccccgagatctccccttctctctcctcgcgccgttatcctctgtagctctttgatccggcaatggctgcgcccgcgcctgccaccaccggcgacctc

SEQ ID NO: 359407 - DNA, 304 bp, Zea mays
tgcaccgcgcacctagcctccgcccaatacctggatatagcctccaccacatgccccgcacctctctcgcacacccagcctctgtccagtctactctacagtggcggtcacggctcccccttccatagacggcacacgcaggcacaactttctccacccaatccccgcctccctcatggaaggaatacacgctgatgtcgagatgtatgggatccatgtggaagtcgtggaggggaagcgaaatccaagcctcaccactggccccttccatcctcggtgtcctcttaccatcgacggtgctctt

SEQ ID NO: 359408 - DNA, 291 bp, Zea mays
ggcagagcagttcctgtgctccatgctcggggataattccgagcttggcatgggtgttgtcagagacgtgctaggctttggatgcattgcttgatatatctggtgtgtcttcagttgaaaacatggagacaaaccatcaaagtgccagaaggaatgacactatgtcatctagatatgttttctggaaatgggctatcagtggagaatctgactgcagggaatagaagaagtctacgccagttgacagatgagatatccaacactgggctccagtctgaattaggacacgag

SEQ ID NO: 359409 - DNA, 293 bp, Zea mays
gttaactgaaaatagttgtaatagttatcagcttaacaatagtggtgctcctgctgctgatattccaaactctcctgcacttcagatggaaaatgaggagatgggaaagttacatgagacttctcacaatgaaaacagtgggtcagaggatgatcaaatgaatggtaggaagccttgccccattagtggtcgagacaatgagaagtttaacacttcagctgtacctccctcttgggaacagacaaaacaaaaaaatcctggtaccagaaatggaagttcaactccagacgatc

SEQ ID NO: 359410 - DNA, 153 bp, Zea mays
  unsure (1)..(153): unsure at all n locations
ggaggtagcgaggcggaggaggtagccggcgcaagaaggggaaccgaatcttggtacggnacacatagatttctttggtggaggcatgaggagggcaacatgaggaggctgcgtgtagcccaatagatctacatgctgttgagggagttgatg

SEQ ID NO: 359411 - DNA, 265 bp, Zea mays
cagatattgacctccccttaaagtttgatctgaattacccgcaattgccattggacaacaacataacgagccaatttatggattaaacatttgagaccatgttatgcactactatgatgggaatattttatatgttattgtttcataatttatccgtatatgcatgctacttagtggtttgtagccaagttgagctgcaaagggtaaaacagacaatcgccacagaccaccaactctcagatattggacaatcagtttacttgcc

SEQ ID NO: 359412 - DNA, 272 bp, Zea mays
  unsure (1)..(272): unsure at all n locations
gaacgtcggtcgtgaaggtcccaaaattgttccggtgggaaggagcagtgaagaccaaagaggacatcgctcatcacgtggtgtatgctcttatggcttcacttgtcggtgatgtcaaagttgtggaatcacggagacttgtcatatctgtggatggaaattcggcaacttggacgagaggagtggctatgtggaatgtgagaatgctacactgccccctccngatcaagactgacgcgccgccgcatacagggtgccgtaagaccaatccc

SEQ ID NO: 359413 - DNA, 271 bp, Zea mays
caaaagatggtcgtcaagcgggcgtcgtctaacaaacactaacgtagtgtttgtcccaggtaagccccggtgcatgcaaccccttccttgtgtttttaaattatttgtacacactttaagtctagtgaatgttcattaggtctaagtgagttgcttggaaaccttttgatgcattggctaaacttaatttaaaaaatgggtgtccctccactagcgatccattcgacccgggatttacttggggccaggtgctttaaggggatcaacgttt

SEQ ID NO: 359414 - DNA, 266 bp, Zea mays
ggcggcgacgacttttcgacgtcgtttctccttcttgacggtgcggcccagaagacctgcagtttgtgtgttcgttcgtgttgtggaggctcttcgtcgctccgcttggctcaatggtgtccgtgttgtggtggctcttcgtcactccgcttggctcgatggtgtccgggcctttgtcgctttaggcgtctgctcgctcccggagtacgacgttgttcatctatgctcgtggtgaagcatcggagctgcctcgtgtgggtgtgttg

SEQ ID NO: 359415 - DNA, 266 bp, Zea mays
catgtatgctccatattttagttttttatatgttgacctcagtagatacaaacatatttgctgtttgatgtttttgaaattatttagctcgtcttcaaaatgttgtctccaatcttattaaaaattctagtgatacatttaaaatgtgttcttcgggtcatttgtcttgatcaggcaatcctctctgtgttgtggctggaaaatggcttattctcagatattaagtatctactactatgttagttgattttgcatcattagttaac

SEQ ID NO: 359416 - DNA, 127 bp, Zea mays
cgagtcggcgaccgccacagctcgacggcagggtcgccactgctggccatcaccgacgaacaccaccaccggccgcggacgaagggacagccaagccctatcacaccgacgtcttccaccgtggaca

SEQ ID NO: 359417 - DNA, 250 bp, Zea mays
  unsure (1)..(250): unsure at all n locations
cagccgcatgccacgcaggccctatgacgcccgccatcctcatccaggagtcccctggtgcncagcggcccttccacccccgcagcgcggtcctgcccctctcccctcgcacaggcactcccttcctccatctccatgctcggcgcccgcaccatctccgctctggctccgctccacctccctaagcgcctccgagctaaccgagtccccccatagaccgaacgggatcttcgcgtccgacgcgcccatc

SEQ ID NO: 359418 - DNA, 262 bp, Zea mays
cccactttttgtgagatgtatgctagtttctgtttccgattagctggtgacctaccaaactttgtcaaagatgatgagaaaatcactttcaaacgactgcttttaaataaatgccaagaagaatttgaaagaggagaaagagagcaggctgaagcaaataaagcagaagaagagggtggagctaaacaatctgaaggcgagagagaggaaaaacggattcgagcacggagacgcatgctaggaaatattcggttaattggtg

SEQ ID NO: 359419 - DNA, 262 bp, Zea mays
gcttgcaaaacttttttggcccttcaaatgagttccacgcatcaagaagtcaagattccaggaggcctaaaataggagaggagggcgcacttgattcaatccatgtcaagtcaaaggctgctgcgaagtttgcacatgcaagtagaattagatggtgaggttgtgtctctgttcccatttttataacgactaggtgtttgaattcctaagattaaagtttatgtagattcttatttgtaattagatctctgttaggcatcta

SEQ ID NO: 359420 - DNA, 253 bp, Zea mays
cgcaggtttatgctagggggcagagtgaatgatgcgccccgaagcgatccacatggtcgattgattgaagaactagagatgtctttcagcgatgcagaagagccattggagcagcatgctatgggttcagagagagttcatggaatgtgcttgacaatcatccacagatcctgagtgataaaagtgcacatccatgtgaagaaagcctctcatcatttgagagtggacacctcaaatctgaacaaactcctca

SEQ ID NO: 359421 - DNA, 258 bp, Zea mays
ctagattacaatgttatatttgaccttgtggacagtcattttgggtgaactgtgaactaaactaatgatctcaatgtcttggagcttagacattttgttttaagttaagctgagctcagacattttgttttaagttaagctgctcgacattttacggcagtcatgtatagagctgaactcctatatgtatggcaatatgtatgactatcaaatttgtcgtctattcatctaaaaaaaaaaaaaaaaaaaaaaaagaaa

SEQ ID NO: 359422 - DNA, 260 bp, Zea mays
agccatcctcgcgtcgaatcctcgctgcagttttcgttccaaagttctcgccccgaatcctcgcccttccccaccgcaccttcggtgtctccaccacaatcaccgcggtggcttcaccgtgtccccgcaatcaccgtggcggccaatccactagctcgccttcctgccgggcgacgtcctcttcatcgcgcaccacctcggcacgctcttcgtcttcctgacctgctgccacctcgtccgccacagcgcctacgctctcc

SEQ ID NO: 359423 - DNA, 252 bp, Zea mays
ctcaaattcagaatcctgtggctcttgtggagaaccatcatctgtgtcggaggaacgcagaaggtgaaaagatgcttcctgatggccttatctggaggcggctcctcctcctcctatgcttctcactaaagatgattgctggattgacagtctctcaacccgccgtgcttcttctgcaagtttcttaggccgccttctccaagtgcctccaattccttacttcttatcatctttgttgaaatctagagagca

SEQ ID NO: 359424 - DNA, 275 bp, Zea mays
gggactgattcctcaacatccaactatgacagttttgattcaggaagttcttggagtggatcagaaggagatgatggtattgaaacctttttcagacgctgtggttttcagatactgtctagacagcacatatgaccggtcaagtttcttagaggtgcatcttctactgttaacaaagatgacttggtaaaacttgcagaccgagtctcgttatatagtggatgctcccaccacagaaaccaaatattaatgtcgaagagattgctcagagaggg

SEQ ID NO: 359425 - DNA, 158 bp, Zea mays
caagaagtcaactataacgctggtccgccctatgtaaacttcgggtttctgtatataaactactcgagttgtagcatatttattattctctttgttatgtaatatatgttttcacaaaccgatgaaagtatgaaacaaacagccgctacttcactctg

SEQ ID NO: 359426 - DNA, 171 bp, Zea mays
ggtgggttctttgcggcgctgccggcctcggacttcaacgaggccgggatgagctgggacgacgaggacgagatcgaccaaagcgtcgacgcctcctcgatggccatctcggcctccatggagaatgctgcgggcgcggtggcgggggcaagtggcgtcggcggtggcagc

SEQ ID NO: 359427 - DNA, 146 bp, Zea mays
gcaaaaggctactctcggagccggggttgaaccggagcggcgggcggccggccggcctcgcatcttcgccggaggaaaacaaaattaaaggcacagatggccgacccgtcagcatcatcggtgccgccggttgtcaccatgggatc

SEQ ID NO: 359428 - DNA, 191 bp, Zea mays
gacacgcacgcgggcatagcgacccgcagtgtcgccatgggcgtggccgtcacgttcgtggccatgaccgcgctctgtagcgcgccgtgcgcagcggagttgaacaggctgaactacccggccaggagtaacggatcgctgaagctgctcatcgtcggcgactgagtgtcgcatggagactcataaccagt

SEQ ID NO: 359429 - DNA, 125 bp, Zea mays
cttcctctacgatcgcatagttgtgccgagacatttaacagggctgtgggatcttgatctatatggaatggtcattggtgctgtgcgtaacctgtggcgagactcttcaccgtgctgacaagtat

SEQ ID NO: 359430 - DNA, 281 bp, Zea mays
caacaagcactagcagttgtgcccttgctgtgtttggttgggccctcctcttcctcttctccttctccagtcctgttggcatcgcgtacaagagggcagccagtggaccctcgctgccgccattgctggggtgggccgtgctccagccttgtgcggtagataggcctactagctgtagagtatagtggaggtggagtagtttttttcgcttccattggcctccatccacctctcctccactcgacctgcgcttcactacagcccactggcaggggaagggg

SEQ ID NO: 359431 - DNA, 155 bp, Zea mays
gattaatccatcaataggcagcgaccagagtaggagtagctaggagtgatggatcaatcaataggccaacaatcctagctactcctactctggtcgctcctagtcatagatccatccaatcctgttaattatcagaagagtttcagaagagtctt

SEQ ID NO: 359432 - DNA, 276 bp, Zea mays
cacaccttcacggtgagatctcttctgtgtccttggtctatataagatcaataaatatcaattttgcaatgccagctcaaatgattattcatgtcaatgttgatctaggtgcttccaaaggaaccaaagtccatctgtccgatctacatgaacgaggtaaccgacagctgttcatgcgtggaagggcttcaccatcttgaaaagtacagctggagaggggtcaattgctgatggtagctccatacttggttaaacgtaagaagcagcattttcatc

SEQ ID NO: 359433 - DNA, 146 bp, Zea mays
  unsure (1)..(146): unsure at all n locations
gataaaatgaggcatctagcanaggccttcgtcttccgcagtcttaaaaaacatgactaccaatatttcccaagtgtaatatatgtacaggaaccttcggactcggaataaagttgtacacaatatgaaaagcatggtcaggacga

SEQ ID NO: 359434 - DNA, 127 bp, Zea mays
ctcatcttctgctcgctggtgtaccctccctctgacccatgggttcggcggcggcggcaactcaggtggggacttactccgtgcggaactactacaacctgctgcaagaaacccccgatgtcgtcca

SEQ ID NO: 359435 - DNA, 265 bp, Zea mays
cttctttctgttctcctcgcgtgctctgtctctctcttcctctctgcctctctctctctctctcagcggcgactagggacagtcgctgcctcactacgtctggtgctcaggtattctttgccggggacgagcacccggggtaatggaatggatctcgttagtgctgaagcagcaccagcagaggtcaaaatatccgatggagaagtgaatctattccaagagaaggaaagcatagcaactgcaaaagaacgtgaggaggcagctg

SEQ ID NO: 359436 - DNA, 273 bp, Zea mays
cgaggatgatggacggaggatcggttcatgatattcttgtgcagagaaacaagaggctgtcgctaccgagacacggttaggatcgctctcgatgtcgctgacgcaatggccttcatgaacggctatggcatcgcgtaccgtgatctcaattcccggaagatcctgctggacaggcaagggaatgcttgccttggggatatgggcattgttaccccttgtagtaatgttggtgaggtcaccgagtacgagacatctggggtacgatggctggct

SEQ ID NO: 359437 - DNA, 267 bp, Zea mays
gtttttccccagacgtcaccagctgcttccacaccacgacatctctccttccattagtccaccctggacgttgccattgtcaagccatcgtcttcgaccttgctgtgcaggccgttgtgctgtctctgccggtctgctcgtcgtggcatggtcgtggaacctcctcagcgtcgtgcgcgtactccctctgcaccgagcacccactacaactcaccggtgctgaatctgctctcgcctggacgtcgtcgtctctgacttcagcagcag

SEQ ID NO: 359438 - DNA, 262 bp, Zea mays
cagcagtccactcgcgattactactgtgatccccaccacaccacctcccgtggagtggagtgcttcttggcgacctttctttgcatgtcaacgcagacaaaaagaacagcgccgccgcctccacgaccacgccggtcgccgagcctccgtctcctcccgaggtactgctactgcacttgcttatggttcttgctgctgctgatgcttcccgcctccacacgctcccaattgcaattggatagaattccttcccaattccaca

SEQ ID NO: 359439 - DNA, 141 bp, Zea mays
atgcggtctcgccaagttgccgtcttaccctcacgagagccaagcttattcccgtcggttttaggccgacgagaattaagtgttttcctgtagtaataactatgtccaaaaatatgttaaacaaacaataattgcaactgc

SEQ ID NO: 359440 - DNA, 267 bp, Zea mays
tgtttttgtaagtctagttttactgcttggatgacttcccttgtttccttgtgctctagagacctatatatgcctgcgttccttttgccatgcctcctttggtgatttactgatgctatcatgctgtgaaatgacagtcttgttggcaaagaacacaacagtgggcactgtcctaaaggttaaagaaaaaaattatggtactatcttgttttaaaatatttcttatattttccagtttgcgtaaaaacagctaagatctagtgtatg

SEQ ID NO: 359441 - DNA, 267 bp, Zea mays
ggctgctttgtttaaccaaactgaaattgctttcaacatttgccccatggtccatgagaataagagcaatttcagtttggttaaacaaagcagccaaatgcagcaaagtaaaattgctcttattctcatggaccatggggcaaatgttgaaagcccaaatcggcaaggggaaactcctttggactgtgctccggcaatgctgcaatacaaaatgcgccaacgggtggaagaactcgcggcttcggcacatgaagggaccactagggt

SEQ ID NO: 359442 - DNA, 266 bp, Zea mays
tgttaacaaccatttgttaccagaagtgggaagaaatacaagcgacgtctatgaggttgttccctgcagttgcattaagcgacccagttgtgtatcaacaccaggcccgattaatggaaagcattcccattgggcaggattctgttgaatcagcatctgcttgagttttgatggctatgctagagttgcagcttactcgagggcacagtcgtcaaatgtggcagcagttgtacactgggagttatgcaacatttaagatgacggaa

SEQ ID NO: 359443 - DNA, 275 bp, Zea mays
cttgtgacgaggttaggtctgaatcacaagatgtataacacatgttatctacatcactttttcctctgttggtgctgtcagatgataaagtgatgtagataacatgtgtgatacatcttgtgacgaggttaggtctgaatcattttcaggcgatgaagttgttatcaaaactacaattgatagcactgccagaacatttgttaatttgaaacatgagcaggttttgtcttcagaaatgtatacccgcatgcagcaatcaatgcaaaaagatggta

SEQ ID NO: 359444 - DNA, 275 bp, Zea mays
gtccaagcaaaccatttaaatgtgcctttgaactgcacccggtatgatatgcataggtaaatttgtagtttggtgacactctacttgttttgtttctgtagttggtggagcgggcacagttctgggtaaataatttggcgcatagtccccagccccacatttcaagaagagtcatcacagaagaagtctgctgcagccatcagtcgtcgaatcaatcataaacaatctatatgcaggcggacatgctttcatccaatcagctgtactggacgtag

SEQ ID NO: 359445 - DNA, 263 bp, Zea mays
agcagcaatggcgatggtcccatcaatttggatgataatgtccctggcactcgttgtgcccgtgggaatgacaatgacagcagcagaaatccttctggcaatggccactggaaccacaacatacgaggcgctggtagtggtggtgatgggaacaatagacatagcagtggtagcagcaaccactggaataataatccccgaaatagtagtagtagcaatggcgttggaggtcgaggtggttaccggggtcgccgtgaccatga

SEQ ID NO: 359446 - DNA, 263 bp, Zea mays
cgagggtcttcgccgcagtcgcctgtgcgcacaggcctagaggcagcgactgagatatccattccactcccgtcaatagtccgtcatgaccactgaccaggttgccttcacggagccgagctcatctatgacgttactgaaattgaaacttgaacggggatggggatccaaggaagaagatgacggatcgtgcaaataaggagccgctatgcccgcggaagacgaagaagcgaataagcgatatatctgcttccaaaaggcta

SEQ ID NO: 359447 - DNA, 273 bp, Zea mays
cccgtcgaccccgccggcgacgcccaacagcttccgaaccgggaagcggcgcaagggcgtgccgcaccggtcgccgttcggcagcctcgtgctggagttctagaaagcagcggttctataccatctataggtgttgccggatcggcctcggccggtctacatagatcatagccacccaagaaaaaaaaaacggagctagtagtagcaactatagcaagcaataaccaaggccccactgcacgcccgcgcttctggacgacgaggccggtgcaa

SEQ ID NO: 359448 - DNA, 204 bp, Zea mays
aattgcaattggaaaaggagaggctggaaaagaggcagcccgaagagaaagcaaggatcgaggcccaggtgaaggctgctgaagcagctgcacaacaaaagtttgaggaagaaatgaggatgaagagaagcaggaagggagcagcacgctgcacacgctgtgagagacgtgtatgacacaggctctaagggcggaactcagcaa

SEQ ID NO: 359449 - DNA, 276 bp, Zea mays
ttcagatagtggttgactggtaaatcagttgcagaaaaaagctgaagattacagaaatagtttgcaacaagaagcacaagcaaaagctcaagcattacactttgaagatgaattagctagaaaaagaatgccggtaacagccagagatatgcacagacgatactatcctcagcaagatcccttctcagagggactctacacgttcgatattgggcagaatgaccttgctggtgagttctattcaagaacagaggaccaggtcatcgtttccattcc

SEQ ID NO: 359450 - DNA, 268 bp, Zea mays
cgagtcataaattatgcacggatgttgcaattctgcccaaagtagtggtgggaaaagtagagcaaagtagggatgaaaacatagtacaaactgtggaaaatgaagcagaatctgttgacacaaaaacaagaacatctatttcagtggaacctatgtcccatggtcaggagatcagctcaactattcatacaagaaacactggtgcaagctgtgaaagtgatgagctgaaagaacagattctaagaacacagatgcttctttggataaa

SEQ ID NO: 359451 - DNA, 273 bp, Zea mays
gcggctgtaccagtgaaggagaagccgcacacgatgaatcgtcttgaacgttccagacgattcatcgtgtgcggctgtaccagtgaaggcgaagcgccaaagcgtgtgccctttacgccgcggaaggtctacaaacagggacatactcctatataggaagatgcaatgcaagagctgtggtgtacttttaattgtaggtgatgtagtagtgtatggtagtatcagcattttctgcattcatgaaatgcacacgcaggtggtgggaaatgtggg

SEQ ID NO: 359452 - DNA, 272 bp, Zea mays
ccaagatacgtcgggcattaaacaaacacaagtggttgacagtggaatctgatcacgccaataaatggccgaaccaaacagcaccttagcttcttgttatagacctagagctcatttttatctgatatgatacctataaaccaacagagtctatatcattttattgcttgtgaaaacatactcttttcctagtatgaccatggaaaatttagtacgaaactgattcaacaaggatctactgagcttacaggtttttgttgttccttgagtgt

SEQ ID NO: 359453 - DNA, 260 bp, Zea mays
ctcgagccgaatcggctcgattagtctgttgtttcctacaatcaacctcctcagtcgccgacatcaacagcagcagcagcgatgctaaatagtagtggtggatctggttctaactactctggtggcgagatcctacctccaccatttttttatctttattatctgtgattctgcaatccacatgtttgattttttacttagtttctctttgagacggtcgccatgtttggttagcacatctagaatgcattacaattgga

SEQ ID NO: 359454 - DNA, 269 bp, Zea mays
gcctctcctctcgtttgcctgcgccgccgcgatcgccaatcggcatggctcttcccaaaccccgcccgccaacgccgacggctcagcggccacgggcacctcctcgtcgcgaatagactcgccatcgctaaaggccgcgctcgcaatggctctcatccactacaaccgcctccctggcaaagccaacgccaccgcgggcacatcacccccgtctctcctccactggaagcgcaaggccaaggaccggaagcgcgaaatcctccgcctcc

SEQ ID NO: 359455 - DNA, 265 bp, Zea mays
cggctcgaggggagatccttgggatgatgagttccagttggcgaactcgatagccttgttaagttacccggtacacgtgcacatccatctgaggccattaaggcaaggattggtgcatgtgggcctgataacttgggagggctgtcacacggcacgacgcgtagctcctgtcgtgggtgacgtgctcgtctacccctggacgtgcatgtctaccccccgtgtattttatgcgcattgatcatgttatttatattaatgaaatgga

SEQ ID NO: 359456 - DNA, 326 bp, Zea mays
  unsure (1)..(326): unsure at all n locations
cgctgcaagcaaccaacttaagcacaggatttatgaggaaacgtctgcaggtctgtaccagatgcttctagctctgctagctagtattnctagcgtagttgactcaaaagctaaatccagtcatgctcgctgtgcttacaatatggatgtaacgactacagaagatcactcgtagacattcgacccctgctctagattcccaagccaaggagttaaaatccttgaccgagtcaatcaatcgtaccagggaacccataaacattaccagagacgatagttttcctccagcaccgcccactggaagaccatgtccctcctgttacgag

SEQ ID NO: 359457 - DNA, 219 bp, Zea mays
catgattgtgttggcaagtgtatgtgttctactccctcgggacttaattataagttgctttgatttgtttagtttagttccattttactatacatctagatatatagtacattatttgtctagatagacacatagcgaattgcatgtataaaaaagtcaaaacgatttataatttagaacagaggagtactagtttgtggcgagcttgcttatcgcaac

SEQ ID NO: 359458 - DNA, 246 bp, Zea mays
tgaggctattctggatggccgaggaaaaaggatctgcgcgcggctgctctccctactatttttttatcgttctccgcgactaaacaggacaactgctcgatgtcctcttgtttatcgcttggctataccgttctgtttgctataattatccgttcgcgtgatgtgaagttctggttacattgctcgagttctaataaagtactgttttgacttgcctaaacaataactaagagataggcgggccgc

SEQ ID NO: 359459 - DNA, 152 bp, Zea mays
atactctctccctcgccgccggccacctcggcctgctcccacgcgtaacgtcggattattcccacgcgccaactcggactcgtaccaggcgtcatctccgtgacaaatcactgaactagggagatcatcgctcatatcgtctgatggaggag

SEQ ID NO: 359460 - DNA, 240 bp, Zea mays
ctaatactgtctgatataactagttgctttttctctctatggtaagaatctgcaattaaatttgacatccattggttatatattttttccttgttcagttaccatacatgttgccatctgaaaaggcattttcagctgttgtatctgctacttggcatcttcaacaaagtcgggatagtagtttatgatggaaaggggctgttcagtgatgctcgtgtttggtggtaagcttttttatgc

SEQ ID NO: 359461 - DNA, 274 bp, Zea mays
gccgacgacgacgatggcaagcctcctccggcgatctgccgtacccgcgcgccactcctcctcctcccgcgccatttcgccgccgccggctccgcccccgccttgtcccgctcgttctcccgcttcaacccccgagacgacagctctatgttcgatccacgcgagccgccggtgaactggggcgtgacatagttccggagaagaaggcttacgttgtggagagattcgggaagtatctcaagaccctcggctccgggttccacctcctgatccc

SEQ ID NO: 359462 - DNA, 115 bp, Zea mays
tggagacgttgtaatatgcactatgttatgtgttttggactatgtgttgtggaacttgtattttggactttgtttgtggacattgtacgacgaactatgttctgtggatgtcttt

SEQ ID NO: 359463 - DNA, 296 bp, Zea mays
accgctacaagcaccagtgtacacccactgattctacaccccctgcaatggttgttgttgctgttggtaggagcgaccccgcgagcgtgacacagacaaagcagccttcggtgccagtctccataaggatgctaatgataggtcctcaacacaaccttattgggccatccattcttgagcgtgtatgatgacctgcatgcaggtaggattggatctcccctggccaccttcaaaccacttatctggtctcaaggttcttcatggccttgactctcaaagatcagagtattcttgtc

SEQ ID NO: 359464 - DNA, 196 bp, Zea mays
cagtctagggttcagggttctggagatgggaatctaatatctcaatgagatttatgatggtgggtatctgcacatcctgtctaatcctttgtcgagtcttcctggtgttcaagattaattgtacctggaaaaaggtgtaccatcctcactctacattaatctgacaacgcggtaataatgtaatccgataatggtc

SEQ ID NO: 359465 - DNA, 287 bp, Zea mays
tgccgcacctcactgttgcatgttccgctgcgcgcgtgccaggcgttcggcgaaatgtctaggtggggtgctgcgcacgaaccgcacgccgtggtgcccaccgggtgcttgctgcttttgcgcaccctgtcgtcgtcgtcattcattccggaaccccgtgttttgtgtggagaagaaggcaagtcgttcaacgctcgtcgatgttcggagcgatgcacaaatcggaatcaccgtcgttcttgcaaacgccgtttgggtttgatatggaccgagagatgacgatcgtg

SEQ ID NO: 359466 - DNA, 112 bp, Zea mays
tcgaaacatttccagttactatagctgatcaatgaatgttacgtgcttcccttgattttcggtactcagggacaaatgactggtgtggatttttgatatagtaaatatgtgt

SEQ ID NO: 359467 - DNA, 137 bp, Zea mays
gtgcttgcttttggttgcttgctgtaaaaaggtgaactgaactgaagagatttagccaaactgtacagtctagaacttcggtgcatatgttgcattcgagtatgttaatgtgtatgggtggagcagtagttcagaca

SEQ ID NO: 359468 - DNA, 273 bp, Zea mays
  unsure (1)..(273): unsure at all n locations
tcgcgactcctctccgactctccgcacaggactccaaccgcctcgccgttgcatcgccgcgggcgtcaacctaggctgctgccggtaccggtgcgtccccagccatggctcggccgccgcaggaggcgatcgacaccttcgtagcatcaccggcgccgacgccgtcaccgcagtccgcgtgctcgagcttggagaagatgggagctctcaactgggccaaagtagttcatgagcaccaagggtggcgcccatnagctgtatctggctccatgc

SEQ ID NO: 359469 - DNA, 133 bp, Zea mays
gatgaatgcaactgctggactctcatctgtcatggcaccatctcctgtctttgcttctggggcagattataagcagagtaggcgttgtacaatagagggttgctcatggcggaataggaagagagtctgcacg

SEQ ID NO: 359470 - DNA, 144 bp, Zea mays
cttgcctttgagctccttggttgacgtgcgatgtttctcctgacctgtgcctgcaggcgtactcgcgttcccgataggtgatcagatgagagccattcgagcacggatccatctcgggagcccaggcgatctgatcgtccgtgg

SEQ ID NO: 359471 - DNA, 267 bp, Zea mays
tcctcgcctcaacgccgccacccaatccaaccgcctggacgccacaaccccgcgacacgtacggcgccgacgctccatccagctacctcgacgcctcaatccatccaaccgcctcggtgtctgctcctcaatacctggcctgttcaacatgccccctggaacgatggatggggcacggtcatgcagataccttcgtgaggtcccaattactgactatgaaccggagttggctttagatgtgatgcagaacaacctaatgttgagtag

SEQ ID NO: 359472 - DNA, 158 bp, Zea mays
ttgccattgagctccttggttcacgtgcaatgtttctttgccctccgattttacaggacctcgcgttacattccgtgagaagaggtagatcctacttcagaccgcatgtagccaagaactagagaatgtaaagagcctatatatttgttaattaaaga

SEQ ID NO: 359473 - DNA, 263 bp, Zea mays
ggcaaaggcaagatctccttcccagatattttagtcacagtgaagagcaacaggatttaatgatgcattatgatacgagacgttggcaattaaggagttatgttaccttggccggtggaggaaggatgcatggactggcaataggagcttttgtggacaaactatcttaacccattggcaaaggcaagatctccttcccagatattttagtctgtaatcaatttggattaaaggtaaacaatataggcttataaggtgaacta

SEQ ID NO: 359474 - DNA, 228 bp, Zea mays
attgcttggtttggatgttggtagtgttctggaagtgatcaactgttttccggtccctatcagggaagaggatgctgaagcatatgcagatggtgccaattatcagcttgagatgatgaggtgtctgagggcgttaatgctgacaacaatatcattggatggtagcagtctttcatgcttggatctcttcaaactgtcgaactgattgaaacattctatgaactatca

SEQ ID NO: 359475 - DNA, 254 bp, Zea mays
caggtgcgaaacaaggcgagaacagcattcggacatccgggacatggatcggtgatgattgattgtgttgtcgacttacatgccatatggcgtcctcgcatctcatcaagtcgtcgagtctctgtgactcgtatcagagattgggtgggtgcacactgcttgagatgagatcatttctacgtggaggcatgctgacaagagtcacgcatccagcattggctgaagtgctttggtcgcatggatgtaggcatcac

SEQ ID NO: 359476 - DNA, 152 bp, Zea mays
  unsure (1)..(152): unsure at all n locations
gtcccgtgctccctccgctagttcntccaattcgttcgccagctcctcggtcgtcgcttcacccagagagcaggagccgactcgtccctggcggtcccgagcccgagccgcatcccgtccgcgtccaacggttgaatcacgagtaggactac

SEQ ID NO: 359477 - DNA, 259 bp, Zea mays
agcatgtctttagttttgattaaacttggatgtgttcaatgtactgttttcagtttgttaactgttaatgtgtgacttcaccagatcaatgttaactgtcataatctctattatgttttggaaccttggtttgtaagcaataagcattacccttctctacaaatattacaattatgattgaaatgttagttatgtataaactcatgtatgaagttgatgttgaccatctggcatcactatgtggttaaatagtaagtat

SEQ ID NO: 359478 - DNA, 262 bp, Zea mays
ctcgagccgctcccatctctccccctctccctctcgtggccacgactgccgctgccgcactacgccaggtgtccaagtcatctccagcccattcgccggcgacgagcaccccactagatcgaccgagatatgacggcctgtggcatctaggggacgagctccgcgggcagccccaggtggtagaggaccgccagttatcgctcatgaagaccaaactggcagaaatcaccatgtccaggggcgataagatgaacgatctcga

SEQ ID NO: 359479 - DNA, 290 bp, Zea mays
aaagataataaatgtaaaagtcctgatgatgcggagatgggtccagcgaaaggaaagaagcccaataaaagacagaaaattgttgttctcaactagtaaccttgtcttctgtaaaactaagaacaagggcttgacggcagtggtgaatgtggtggtgctgtgatatcagaagttaaggagggactctctctggtcttttttaatttgtcacggtttagtttaaaaatgaccaggggacaaatattcgagaagggaggtgtatttttttcatggtgtgcaatgttcaggcc

SEQ ID NO: 359480 - DNA, 175 bp, Zea mays
ctggaagagcataggagacgtgctcatttgtttggcgaggaaggctatgcagctgaatttcgcgatgaggctattgaggcagttggatgacacattcatcagaaccattgaggattggctcccaacaatgaactggaaaaaagcaagagaattctttcagcgtgttcgccgaaga

SEQ ID NO: 359481 - DNA, 283 bp, Zea mays
ggatcacccacgcggaggaccagtgatcgatcctgctaaatggcgattgaaggatgggggatgagaagcgagaactcgttcgtgatttatcacagagcccagaaagtgctcctgacaggctccagtcatggacccggcgagagattgtagagactctttgttctgatcttggaagggagatgaaatctactggtgtatccaagcagagaatgctagattatctatttaggttggtgctggaaagaatcatctggtccagtggaacatgtgcaagagcaagaga

SEQ ID NO: 359482 - DNA, 142 bp, Zea mays
ggaaattgtctctctcttatgactacaactggagctaaaggtggtccggttaacatgaatccagataacatcattaacaaggccagcaagagctagaaggaaagcgtgttccacggatggtttctgggaagactttaccgag

SEQ ID NO: 359483 - DNA, 284 bp, Zea mays
tcttaatttaggaatttaaagaaaggaaaagttaactttcagacaattggagacgtgtgttcgatgggggggtattttgtgctgaccactcatcacacatatgcatggcgccccagcccacgcacagccgcccctgcccgaccgacgaccgctggtgccgtccgctccacgcctgcgaccactccacaataggtggcaagtttgaccatgtagatcgtttgttccaaagcatggagagcgcttacataaatagcttatcaaatacaagtgacgtcaaagagctt

SEQ ID NO: 359484 - DNA, 287 bp, Zea mays
gtcatccgcgagggatagctggagaagactaaacccccaaccaccgccgccgtggccgccggcggcgatcgcctccggttttcctcgaggctgatcaacccctgcccgttcggctgtctgcctgtctcgggatgcacttggatttctgaccgtgtgctgctctaccgtccagattggtacccggagatggatctgttcttccgtacaagattggggatctcgcggagtccaagtcctttttgaatggttacaggggcgcgtggtttcgttgcaaggtacataatatg

SEQ ID NO: 359485 - DNA, 113 bp, Zea mays
gttgtctcgtaaccgacggcatatcatctgatagcattacagctggccatgagcttgccaacttccaacgggtatatataccttgcaatgcaggtatgcgattatcacctcat

SEQ ID NO: 359486 - DNA, 273 bp, Zea mays
caagtgggtgattaattctatagataagattcggagactatgtatacggaaaggtagaaaggacgtatatggtggcaattgccttgtgtcgtgggacattgtgacaatgcctttggatctcggtgggcttgggatttctaacctgctgtaccagagttgggctctgccagctaaatggctatggctagtctaaactgatcctaccaagccgtggtctggtttggacttgcctattcaacaaattgtcaagagattctttactgcttctattgt

SEQ ID NO: 359487 - DNA, 112 bp, Zea mays
aagtacaggcatcagctgagcgactgagcttagatattagagtctatccaggccgtgatcatggagattcaatattccacgactacaaggtcttcataaacccaagtacaac

SEQ ID NO: 359488 - DNA, 273 bp, Zea mays
gggatgttagagggggtccccctggtcgtagaccacgcagagaatttgtatggagctatggtttgccagattcagttggagaaaagagagagagatcagaggatcgcagaggcagggacttcgttcgacgcgactggggtcacgatgatgatgaggatttccagcagactaggcgtcatggcacccggagacatcgcagtctctctggctgggcgcgttcttcgcggtgtcgtggaggtccgggggattgcatcagttcgagcggcagaaaca

SEQ ID NO: 359489 - DNA, 104 bp, Zea mays
atatgtacaaacctagcctgtgtttcggagatgccatttttctacttgttcggctgaacctgaatgtacgttcagaactggtgcaccaatgcaccccatgtccc

SEQ ID NO: 359490 - DNA, 105 bp, Zea mays
ctcgagccgtgctacctgctggccgctgccctttccttcccggaatggtatcgtgcgacctgtagtcgtcgccagccacctcgctccctcctagacgacacccag

SEQ ID NO: 359491 - DNA, 250 bp, Zea mays
aaccacactcttgcaccgagctagcagccaagatggcgaccaaatacctggctctttgcctccttgttctctttagcataggcatgggcatggccaccgctgctgcaaaccgcaaactgggttatggccccgggggaggaggtggcggtggtggtagcggtggcggtggaggcggtggttacggaggaccaggctatgggtccggatcagggtatggtgagggcggtggcagcggaggctgctgctgagg

SEQ ID NO: 359492 - DNA, 269 bp, Zea mays
ggtggacgaggcgcgggagcaagctgttgtccacagcctccgtgtgcaggagagccacacactgtccgtgcaggagaagaagcactgcgaaaaggattcggggaaaatgctcgcgcacctggttaggagcaagtcgagcgatgcagataatctgagccagtgcagctccgcgttccagtgcgaaagggctgggagctcgtattctggtgacgaaggcagctcgggcaatgctaggaggcagtactctcagaccgtctccgcgtcgccat

SEQ ID NO: 359493 - DNA, 120 bp, Zea mays
tcggcttcagctcgagggacgaatctggtgagcgtatcattgctggagctggtaagcttcaccttgagatttgcctgacggatctgcacgaggacttcatcggaggtgctgcaattattg

SEQ ID NO: 359494 - DNA, 264 bp, Zea mays
cgtggctacggaccccatcgtgttcgaggcgttcgaccgcctcgacggcgacgccaagcccgtcgtggctacggaccccatcgtgttcgaggcgttcggcaagggcggcttccacgccagctccgaagtgctgctggagaccgccggcgggaaggggcgctggacgtactacaagctgctcggcgtctacctcaggaagcagcataggagaaaccaagttttctggaactactgatgctaatcagttcagcgactagggtagtg

SEQ ID NO: 359495 - DNA, 117 bp, Zea mays
gttgttagtgtactaaaaacgatagctgtattcatttttgctcatgctgctcttattctgcagcataacaaacttcctgcagaataagagcagcatgaaaaaaaatgaatacagcta

SEQ ID NO: 359496 - DNA, 279 bp, Zea mays
gcggcagcaggtctcgcgcggagaggatggcgtggctatggaggaggggttgacggagggggaggccaagggcgaggggggagagaaggagcaggagccgtttgcggtggccacttccggcgccttctacatgcacgatgaccggtttcaggaggagaaccagagcagacgcaggcgaatgtttggtgtgaggaagttatgggatgttaaagacaatcaagcttgggtgcatgacagatttgaggagatgaacttgcatgatgatttctatgaagacca

SEQ ID NO: 359497 - DNA, 130 bp, Zea mays
  unsure (1)..(130): unsure at all n locations
agaacgtcaaaaaacgtctgtacaatattatattaagaagaccttctcacacaggtcaanaagaccttccacgacagtcgagaaagactctaaatcctnnnncnancanccccacccatacacaatggca

SEQ ID NO: 359498 - DNA, 282 bp, Zea mays
ctgagggtttatcaagagaagagttaggtcgcatggtagcttcacgttggactggagaaagtgtaagtgaggttagtaaagatgataagaagggacatgaagatgagcaagaaataccagaacctgcaaaagaagcacttgaagacgaattagaaattccagaacctgctgaagaaaattatgatggttatcattcagaagttgaggatgacaggcataaatatgaagatgaagagtttgatcatgagtcagaagatgaatatgttgatgaccatgatgagc

SEQ ID NO: 359499 - DNA, 280 bp, Zea mays
ccgtcttgcagcagcaccatggtggccttcgacttggagcactgcgatgactccatgccgtgcccctctgcttcctccatgcccgagtccgagatcctcctgcggctcgttcatcgcggacatgggcacagagcctgtacgctcggagtgctgacctcaacatgctgctcggcttgggcaatgaccccctcagacccagccatcgcttgccactgaaccaccatcggattggcttccagctccccctcgcacgtctcccaggagctaagtccgtccgccg

SEQ ID NO: 359500 - DNA, 285 bp, Zea mays
gctccacgcagattcaacaatggaccaagaggtactggagttggacttctcagcgatgacaactccagctccacgcagattcaacaatggaccaagaggtactaggagggaaagcatgagtaggcgagaaccagctagcagacgagacacgaatgcaagccatgaaagggaaaaggctctagaggcattgcttatggagaaggagcaaaaggaagcagagctccaaaggaaagtcgaggagtcaaagcagaaggaagccttcctggaaagtgagcttgccaacat

SEQ ID NO: 359501 - DNA, 293 bp, Zea mays
cggactttcccatccgcaattcccgccgaagaagctcccccgttgctgccgccttctctcttacttcacaatctgcccacgctgcgagggaggggctggtcatggaggcgcccaggccgagctccaggtatccttggaagcccacgtgtttgtactacacccagggcaaatgcacaatgatgaatgatgcaatgcatctggagaagttcagtcacaatttgaagatggaccttccagtgaatgcatcagccacagataaatccaagcctcagaaactggaatatttattgatt

SEQ ID NO: 359502 - DNA, 291 bp, Zea mays
agtaaaaaaatattgaaaaataaacaacaatcaggattcgaactctggctggttagttcaaaaacaacacttagaccactaagctaattgtccttctgtgttcttaggtgtgccgtggtctatatggaccacccactgggtccgcctctgtgcagagccaattagccagatactggtccaactcgctgacatcagacatctgatgcatgcataagcattgttcctaaaatgatctatgccacattcaaatcagcttggttagttggtttgtatctagcgatgcaagttggt

SEQ ID NO: 359503 - DNA, 288 bp, Zea mays
atttgtaaagagcctcaaccctatgattcatgcagatgcagtctcacacaatgatatagaaggacattgctgtgctctatttgagaaggaaaaggcaaaacttaaagatcaattgaccctttcctcccggcgtgtctctttgtcagcaagcatatggcatcctgagggagccgaaccaacagtaaattacctttgtttgacagcacattttattgataaaaactggaaagttcaccgaatgataatcaagtttggcatgtttcggtcctcacctactgatgtggaaag

SEQ ID NO: 359504 - DNA, 103 bp, Zea mays
gaaccaagccaccgatactgacctctgcatccatccatggcgatcatgagcagcgtcattggcaatgccgccgctatgtcttctgcgctagaagctgcttagg

SEQ ID NO: 359505 - DNA, 269 bp, Zea mays
gaaacaggggggtgagcgacgagctgcgccgacgcagaggagggagcggacgtggagcttgcgctgacgcagaggagcgcgatgagatgcactgcgtcagtcacggatgatgaggcggcggacgcggcggcctggatgaagcagtgcggtcgccggttggaaagccgctgagatgtgaacaaaaccgcagcgagcagaccggtgttgctgtcacacattgtaaggagggcactgagagctctattgtctggtcttctcttagtggaaag

SEQ ID NO: 359506 - DNA, 279 bp, Zea mays
ggatgcataagcagagcaagttcttaaaggaacagaggtcaccaacttgctgcctaaattctaacaggtacttgctgtacctaaactgtatgcactggcaattgaaaaacgcagcaaccatatcacaagacaagacaagaccacacgttacagctcagaaacggttccattatacctaccattgaaaattgctgcaagtattatgtgtattgtaactgtactgctgtacaccagttataatctcattatcttctcttgtggttgagttggccatttggg

SEQ ID NO: 359507 - DNA, 296 bp, Zea mays
ctcgagccgctaaagtacacttcgattttctcagtttgttgctcagtgcgggtgtcgcggtccccgttttttccaggatcacaacgttgttggacgaatgcgcatctaccttcgcagttatctggaatttggagttacagtccacgttcgcatgaattggaactttcaactgccaaaacatacaattatctggattttggagttatagtccacgttctaaaaaattggaactttcaactgccaaaacatacaaaatagtcctcaaactgaagacaatcttcaaaatgaagaccaga

SEQ ID NO: 359508 - DNA, 296 bp, Zea mays
gctaaaagcaattacctgagttgcaatcatgaagtaacaacggcagtcattttttctccaccaagcaagcacgaccgagaataattgatttttctaacctctttgttttcttattttgatatataagcaattggagcaactcatccttgatttctggacggaagaagatgattatgaattgaccgtgtcttgtccgggagtctgagagtgagacactcggagcagatcctagccacggaagcaatcgatgcttccccaccacgttaatcttcccgtaaccacaaattatggcctcc

SEQ ID NO: 359509 - DNA, 288 bp, Zea mays
cagggagattaccttcggtcgtcctggctgaccatcacagccaggccggggacggtgatcgccttccccccctacgccttgcgatctatctcctgttcctctcatcctcttgactctcccctgcgtactcccaagagaagcagcggcagactacatcagataaccaaaatatgagaaatgttgtcaagtgttgcaaattgtgagctggttcctttaaatagtctagtactgtgataccaacatcaaataatttgttgaacctgtgatgtaaattactccatgacagaa

SEQ ID NO: 359510 - DNA, 288 bp, Zea mays
cagagttccatttctctcgtttgggaggaggaggcgcgcgccggtgcccgaccgtcgaccagccgctacgacgcggcaccaggataggtgctcctgagctacgaacccacaccccacggccaaactgttgcgtgcgccccggccttagcatgaggtggccgctggcgatctcgactcgccgccgccccctccttttcgtccttctcatcgccctctacacgattcctaggacattttcgtcgaggcttgtcacactcgatactgtagagatatttactactcatgaat

SEQ ID NO: 359511 - DNA, 281 bp, Zea mays
agatattttagatttcattgaggaacaagatgaagaacagctggatgatgaggaagaagatccacatgatgatgcagatgtgatagatcgtggggatgcaactgatgagcccactgacgagggagaaaatgcagcagctgctgatatctttgatagcttagatgattatgagtgactcggtgatgggcatggccattgagagagaggaactgggtgatgtactgctgtttaggggttgttatttgactagtgtgtgctgtagttttatgtggattatgtgt

SEQ ID NO: 359512 - DNA, 285 bp, Zea mays
atctggttgaactcagtccatgagcttcttcatactcaagttagcagtgctgaacagcaattccctcaatacagtttgccccaaattctaaaagatgaaaacctggtggggttaaaggaagaaagagagcagttaaaggaatggttgattcccaatgcatatgtcaacatgacaaatataccagctctcaaggtggtaactttgtcgggtatgggtgggatgggaaagaccaccctgctcactagtgtgtatgataagctgaaagatatcttcgaaatccatgct

SEQ ID NO: 359513 - DNA, 281 bp, Zea mays
tgcactttgttgccaggactgttttgtagtcttagtgctttgttgtaatcagattcatcttgtccttatattatagccgttagcaaagtaattcaaataaaattttgcagtttgtttgcaatctgtaaacagttttaacattatttttttgctctaaatatgttctctcattagttcaaaggtcaatgtgcactgaatatgttttaccttaattcaaggagattatgttcttctttatttttgggaaaacaaagattatctcagatttgaccttcatccgt

SEQ ID NO: 359514 - DNA, 279 bp, Zea mays
attctggaagcaccccactccaatccactctacatgtcccacgctcagacccgggtccctcaccgccgtctctcgcgctccggtaaccgcctccacctccgcacctgacccctccgcctccgcctccttgaaaattccttttgctgctccaacctgcgaactagttcactgtactcttgcttgcttataacgtagcgtgcggtggacggggtttgccagcgacttcaagaaaggtagatataatttgattcgaagatgaatggtgcagaggaggaggag

SEQ ID NO: 359515 - DNA, 169 bp, Zea mays
gctcaggggttgtccggaggaaggatggcttcgacctgcaagaatagtggcattgggagcatggtgggatcttactgcaaagggccctggaaggcgctgctcagcccaaggaacacaaaacaagcctaaggatggaaagacggaaatcgagacttgggctaagaacagg

SEQ ID NO: 359516 - DNA, 127 bp, Zea mays
tctgctcggggccttggggcgcttcttgggccgagccctaggtagcccggaactccgatctcggccaccaccaccctcgcctatcccagaagttcagctgctagtcgatcaggatggccggggaaat

SEQ ID NO: 359517 - DNA, 278 bp, Zea mays
gaactttcaggatattacatgataccgtgactccatgagtatcaaagatccacagacattagactgatgtaatatcctgaaagttctacaaaagaatcaatattgagcctatccaaggactgaatgacgtcaagcatgggccaatttacatcatattggctctgtactgtataacaaagaaatgagaggaactccagggtattacatcagtctaatgtctgtggatctttgatactcatggagtcacggtgtcatgtaaaaatgtcaaactgaacatc

SEQ ID NO: 359518 - DNA, 274 bp, Zea mays
tttgttgttaacatagtgtataacatttgatgtcgtaatttgttttggaagaaaatttaatctcaacatagaattttttactgacaggtttatggtcttttaatatctacaggttgtggaaactgagatcattgtaactcaatgagagctctaaattagcatatagatgccactagaaccaatctggaaatactgtgagaggccagcaagaatggagtcatggaacatcggcaggaggagtgcagcagcggcaaccgatgtatcccttgaacaa

SEQ ID NO: 359519 - DNA, 148 bp, Zea mays
gaagagagagggagcacccttccgaagccacgccaccgacatcgcctcgtgacccgacgcactgcgccagggacccagccagctagctacatccactgatccacgcgcattccccgtaccaccgccaccgcgccgcgtcacggaggag

SEQ ID NO: 359520 - DNA, 280 bp, Zea mays
cgaaaatactcacattaggtgtctctgtttatgaaagagaccgcaggtatcgaagatgcagtcaggattctaaagacactacttagcacagttgcttgtgatagacggcgaggatattgggcattgaggctatccattgatttcgagcatatgggtcgtccaaatgagagcctatccacagctgaaggaggggcaactgatccatgggtccgtgctggttcaaagttcgctctgcaaaggagagttctgcgtttaagcaaacctccacgacgctggaaag

SEQ ID NO: 359521 - DNA, 289 bp, Zea mays
gcgagttgcaaagatgaactctttctggccgccaactgctgctgctgcagccgccgccgccgccaatagaccaccggggccattctttggtgcaatgccattcagcatgggtgttgtgccacccacggatgccgcctctatgcttgtgaacccaatgcagggaagctaccctgttagggcgcacactccgatgcaagaagcaaaggctcctatggctacatcaccattccaggggagtctctcgaaggacaaaacactaggcaatgctgctggtgctgaatcaagccag

SEQ ID NO: 359522 - DNA, 105 bp, Zea mays
caagcaagtttaccaagtatgaacacaggagtacaaacctctggagcacctgcgcctcaaggaacaaactttggtgttcgaacaacacagcaaaatgtcacaaat

SEQ ID NO: 359523 - DNA, 285 bp, Zea mays
ctcggtttaaaataactaaattttagtcagttcggtttatcttacggatccaaccagagccaccattttgtctttggaaaaaatagaattccttagaagaaaaatagagttttccccactactggatctggttcttctcgtgtaaattaatacgtcaggatgtatttattgtctgcatacgaaactgagcgtcgtcagtttctaactgaccgatgggatgactctcaggcaggcagggcacagagaggagttgggttggtgatgtgtcgcaatcacatcatcaca

SEQ ID NO: 359524 - DNA, 285 bp, Zea mays
cagtgaaaaagcacccatattctctagtaatgtcagaattctatcacaccactccaaaggacaagagaccatctgtgtttggcatgactgcttcacctgttaacctgaagggagtgactagccaagaagattgtgctatcaagatacggaatcttgagagtaaactggattgcatagtctgtacgatcaaagatcggaaagagctggagaacatgttcccatgcctttggaagtcattgtccactacgacaaagcagccactcttttatctttccatgaacaaat

SEQ ID NO: 359525 - DNA, 281 bp, Zea mays
gaaacagtgcatgtttttttatctagatcacatacatgcttacagcttatatacccattgtttgcattgtaaaacaagaatatgtaagccatatagactcgtgatgagattcactcgctattgtctgttcttcagatttcttcatggcttttcagtcctagacacagcaacccctatacttttcttgaactaagtttggaaggtatttacaaaagtagtaagaggattaggttccttaataccttcagattcatgcaccgcactcatatttcatgttcgaa

SEQ ID NO: 359526 - DNA, 279 bp, Zea mays
  unsure (1)..(279): unsure at all n locations
catattttatgaattgtgagctaaacagatagttgttgacttgctgttctgctgtccaaacacatgtctactgtctgaaaatagctcattttgtagttacatttgcatcaggctttgatgattgctgtacaaggatgatatggcctcccgcccattcctgtctggtattcagaagcangtnttggcgctgtacaggggattcccttcgacagcacgccttatcgctcccngaagaacgccgcaggatcgagtctgttatcttggcagagttccgtgaca

SEQ ID NO: 359527 - DNA, 282 bp, Zea mays
ttgtgaccacgcatggtgaaaatcttcttcatcccaaccgataggctggtaatctgagggcgcaaacgcctcgggataccgtccaactgtgcatcagattaccagcctatcggttgggatgaagaagattgtgaccacgcatggtgaaaactacattagggtttggaagtttcgcatgaaaagttcgtaaaaagggcgagatgatggtaatctatttatctggtgtaacctgtactgtagtctactgaataagatggcgtggtaccgtggtgtgtcacctgc

SEQ ID NO: 359528 - DNA, 279 bp, Zea mays
cactcttctctgtgtaacgacttcctccctttcctgccgcaccacgcaatcaccggggcggaggcggctgccggcgagcacttgggcgtctccggccaccgcctgcctcgttgtggctccccgttgactcccgcgatttgttacccgctggcgctgccgcacacagctcaaaaggagtagcagcgcccctggttgccggttggaggtcaaggatgagcgggaggaagaatgcgggcaaggtttccccctggttgctcgtcctcatctgtttagggtgct

SEQ ID NO: 359529 - DNA, 272 bp, Zea mays
cgcgactccagcctcccctaaatccgctcgcgcccagcgaggtaggcggggtcgcagcgagcgaagattccctccgaatcctctcctccaaaaacttccgatccgcttacgatggctacgcagcagcagcacgcggggccggcgtccgggtcggcgtcggcgtcgagctctagctcggggctgcaccttcccgcctcgccctcggccttcggggacaccacccacaccaaggttttcgtgggcggtctcgcctgggagaccaaagcggcagg

SEQ ID NO: 359530 - DNA, 307 bp, Zea mays
cgccgccctctgctcccgcggccatggcaccaagattagtggtcacatagttcgtcttcctgcgacggctcaattcgcggaggcgcggcatggcgactccgtcgctgccgacgcagattgtggagttcaattacaaggcgatagaggacaagctcaagagactggctctcgaagtgagccaccatgagaacaacattaggttcctcaaatcccaattcaatagctgttgagagccgtgcgtcgacctgggaatgaaacttgggaattaccattcatccgtggccgctgttgtaaataatgatacttc

SEQ ID NO: 359531 - DNA, 280 bp, Zea mays
atttctgctaacttgtcagtagagcagctaggaaaagtcaagggtgtaattgagtgccccaacccagacaatgacatacggaggtttgatgctaacatgcgcttgttcctccctataattgacaatgaaaaaagtcctttgactatcaacaatacacttcttcagtcatgttaccttcgatacactgaatgggcttgtggagttgcagtttacacaggcaattgaaacaaaatctggaataattaggggagctgcggagcccaagttcactgctgctgat

SEQ ID NO: 359532 - DNA, 222 bp, Zea mays
cacagatccccagggccaagattttggtgatgaagactatccataatacttcagacaagaatcagctcaacagtgaggatctggagacttatgccaagctgttctgccatcctctttcctattcacagattcaagcccttgcagcacttttcggttgggcagtcccagatgacttgggtggagcggccaccatggtctgctaatttgatgaatgggtgttgg

SEQ ID NO: 359533 - DNA, 275 bp, Zea mays
ccaaacttgaaaaatggcacggatcctcttttgatgccatttaattcctacatggcagattggagcagcgataagataacttacaccactctgaacactccaaaaataagcacagaacttccagtcaagttacaccatgacaaaagtagtagctttgaagcaccaaacctgaaggagcatgaatcagtctttgcaacacatgaaatgacggtagaagcaacaagaaaagaagacgaacacacatcaaaatctagttttacttcctacaatggagt

SEQ ID NO: 359534 - DNA, 105 bp, Zea mays
caccatctccaaagtccaaaccctaaccctagcgcccccaactcgtcgccgggagatggccatggacgcggagggcggcaagcggagtgatcgcgcagttctcct

SEQ ID NO: 359535 - DNA, 147 bp, Zea mays
tgaggagaggagccgcgaaaccgcgggaaggacagggacaggaagggaaaacgggagaagagagggtgacaggcaccggctgagaaaggaatggacggacgagagcgaccgctcgacgcgcgtcagagaaatgtagactgacgacca

SEQ ID NO: 359536 - DNA, 288 bp, Zea mays
ttcttctgtggtgacccatcgacgccgcagtgggtcgaccaacaccatcaccacatggagattcacaggtatgtatcctggcatgcagattcaccggtatgtatcccatcatctctattctatgcaatggtttgttgaactttttttattcagggttgcaattggatctacattattgaagagatttaggaaaccatcaccgaacaacaacctattagaggttcacagttagttatgcttcttttcaattgtgctgggaaatattgctgaaatattctatcctgaaaa

SEQ ID NO: 359537 - DNA, 146 bp, Zea mays
gcgcggtggccagcatcgtccggccgggttcgtcgggaagcgacccaaccccacgcccgcttccaacctcgttctgaccgacggcgaccgccgtgccgcgccaccgctatacttacatctgctccatcatccctcgcccgccgcga

SEQ ID NO: 359538 - DNA, 279 bp, Zea mays
cttatgctttgtaacaacattgtgaaaacataaagaaacaaagagtcaatgcagttggtgcattccatgttaataggcatctatccccattttgcccgatgaaatatgtccagggtttttgaaattatcagcattgtatgacaaatgatgccatttccctccaattttcttttgtttgctttcaagcaattgcatcggcatgtttcaatctattgctcttgaaaacataggatgcaatcatttttgtgtaatcatgaatcaacttactgattcatcgac

SEQ ID NO: 359539 - DNA, 277 bp, Zea mays
ggcgccctagccccaacgctcagctccctacccggccgcgcccctggtggttgagctcgccgagcttccttttctatcgctcgtcctcgcccattcggcgccctcatctcaagccgctccagcctctctaatcgccactctcccctatccccttgctgttagcacatggcgagctaaccccatgtgccagtagagttcgtcattccctaagcagcacctccctccatggatgcctcgttgtcgacttgtgcagttcatattatcggatttggtggag

SEQ ID NO: 359540 - DNA, 299 bp, Zea mays
ggagaacccgtggttgcccagagatagccagccggtagccagaacacaagaggttgccggggatcatctactcgccagtggatcagataccaccaatctttcaagtgctgaaactctggcaactacaattgtcgatccgattaaattacggcgacaggtatttcgccgtagaagaaaggagcggagggttcaggagctgcttcagatggataagaagattgaacttcagatgcggaatgcagcaataaatagctcaaggaactttaacaataaagttagaggaagctacaacatatgga

SEQ ID NO: 359541 - DNA, 155 bp, Zea mays
tcaaatcctaggcgaacccgatccaggaacaccgccaacgccgacgggtggtggagctccgcttcgaccgcgcttctccagccatggctgaacccgagatggaggtggccgtagcgacagctgcaccagccggtcagaagagagagatggaggaa

SEQ ID NO: 359542 - DNA, 207 bp, Zea mays
ggcgaacacgccgcggtcctcgtcgtgtgaagtaagaactctgctagagaggaaatcgctggttcatcatcatcctcctcagctggtggggtcagtagaagttctgtcactggatctggtttcagtgtctcagaccttgccccaccacggaaagcccttttcacctaccccataggagctggagagatgttagaagatggctctgag

SEQ ID NO: 359543 - DNA, 137 bp, Zea mays
ctagcgagttcggcagtagaaaccctacaaaaagacaccgccctacccttcgctagcggaaccacactcccctcgatggggtacgggtttcggggattgacgtccggaatgcgcgcgttctggaaacagctggaagt

SEQ ID NO: 359544 - DNA, 293 bp, Zea mays
cttgaattttgttcatttttaggccgaaacgtttcctaatttccgccgttgattctgctgagtgtttgtgttggccttggtttgcatgatggatacttttggttattgttcgtcccagaatttatcgcagtaatttcatgagatgttagatcatgtactcctgttggatcagggtgagtttgaacttaggagggcattgtgttttcacaattactacctttggggccatcgcagctataatcgccattcagggtgcagcactgatccattttggtagttctatacatttgtgt

SEQ ID NO: 359545 - DNA, 292 bp, Zea mays
gcaagtacccagctgaaaacagattatgctgttgtacttgtgtcttgtatgtgaatttacaatagaatttgtctccttttgtttgtttaaatgcatgagtagtattgatccagggtttcagagaacctgaactaataaataaataaataaataatcctagtgaaagtaggccttttggaatttctttcaaaggatagaaatgcctgcaggctgcagctatatatccaagccatctggtaaggtgagtccatatacttttaattgattttgacgttgttctgatgagcgcact

SEQ ID NO: 359546 - DNA, 293 bp, Zea mays
tttattttggatttctcagtagtcaaagatagaaaacaagaatgactctctagagtgcacatgagatatagaaaaactgttggacagtggaaagatataggaaatgatttatatgcaaatgacactccaaatgatgatttagagagtgggttttagactgactcttggagatgctctaatgaatgtgttcgctgaagcagcatggctttcgaaaaatacagggataaggcttgcctcgcttattccttctcccgactccattcttgtgggagccgtcagcataggtctctttt

SEQ ID NO: 359547 - DNA, 289 bp, Zea mays
cgagcagggaggttgtggccccgcgggaccgggaccccagcgtcgccgtgctcgccgtcgctatctgtgggccgcagggggaggaggtccttaggatacagaagctggtggagcgcttcgtgggtggccgcatgatggtggagttgatggtcctgatggaaggcctcgacgcagctctggggctgggcatccgcagtgtcaccatggttacgggttacggccctctctacaagcatatgcttggcatatggcgcccgtctaggaagaaggtggcagatatgatgaatca

SEQ ID NO: 359548 - DNA, 293 bp, Zea mays
ctctctactcgacctccctcatcgctgcatctggacatacgccgctgctcgccgctctccctggtgtgcgagcttgccggcacccagtcctcctctccacgtcagagtcctcgtctcaccatcaagacatcgtcgtcgcgccgtcgtgtcgtcgcacgttctctagcttcttagcgcacaccatcctccaactcgacgtctttgcatccgtggaacttgctggcgtcgttgggtaattgcaccttggtaattggcatggttgcgtgtgtgtttagattaatcggtagcatagt

SEQ ID NO: 359549 - DNA, 300 bp, Zea mays
cctccctcgcaagagaagatgtgtcccatcaagttccagcaaatccaacggcctcagttacattttttcaagtgggaagccacaaaagggcagatacgttgacaataacagtaggaaaagcaggtccctcactagagaggagatactatcagattgtcacaagctggtgaaggagcttctttctgagcatgaatatggattcaacatcggaattttcaaacgccgtttttcccaggagtatggatacgagctcgaacaccggaagctcgggtatctggaccttgaaacgctgctgcatat

SEQ ID NO: 359550 - DNA, 113 bp, Zea mays
acagaagctccccctaagcggcaccgtgttccatgaacggatgacttctaggcacttggctgagactgttctcttcccactagaacagtctcagccaagtgcctagaagtcat

SEQ ID NO: 359551 - DNA, 276 bp, Zea mays
catagattcagcagccaaagagattggcatcactagcactgaggctggagatgcaaaagtgagtaaaaattctaaccggaaccaatctgccatgaatgtcactgagaatcctccccaatactcagcaaagtttagtgataagatgccttattgtcatataaagttctgggatgaatcgagggagctgcagctctagcctcaaggagtcaccacatattcgacaacccaatatagttcctcctgtcgataagacaggagacaggtcatcacccaaca

SEQ ID NO: 359552 - DNA, 303 bp, Zea mays
tgcatattgcaaatctttggatgagttccctcagagtggagcaacaattgtccactggataaaaaagttcccgttcttgtgcagtgaccgtgaatacatctttggaggacgcatatgggaatctgggaagacttactattgtgttactaaggtacatgtccatagtgttttatgaaccgatacttctactcatgtaatgttaatgctccctccattatctgaaaaaagcattcatatcattttataactgacaaaggtgaaatgctttgtcccctttccatttcctgctcaatggctatgctt

SEQ ID NO: 359553 - DNA, 304 bp, Zea mays
ctctttttgtagtgtcaagaaagtagaaaatatttttagtttgttgtagatggcaagcaaaacatcggcctgttgatccatctttttgccttgagtaatagttagttgtatgtatcatacttgatgatttccaatggaatgcaataaccaaatatcttctgttcttcattcttgttgttaataacgattagatagtgattttctgaggtagtttgttcatcatgtctctctcgttttcaatgtcatgccttgtagagaaaagaagctacaagacgacggaaacctgaagaacattatcttggaa

SEQ ID NO: 359554 - DNA, 150 bp, Zea mays
ttctggttcccgtggcctcagaagaccatatcgtcccagttaatattgctgccagcaatttatgaagcgcatccgatggcacttgtattcattttatgtacagtttaatggaatacttgttcctctatgtattctctgtactaagtacac

SEQ ID NO: 359555 - DNA, 306 bp, Zea mays
actcgagcgaatcggctcgagcggctcgaggtgacgctgacacattagtttagggaacaataaaccagccttggagattgctctctatgttcgattcagtgtttcggccccttgttactttgcttctgtgtggggggctggtacatatacatatagcatacttgcaagacactgaagggctgtaaggaaccaaagaacccccagaacaaaaaaatgaaagcaagggctgtaaaaaaaatctcactatgaactgaatagaagcaagcatcccttggcctctccaaaagagctgttcacatatggcag

SEQ ID NO: 359556 - DNA, 138 bp, Zea mays
atctatcttcaagccaggcgtctccttatccctacgacgccgctcacctgtgctcatcttccagccgggctgtacgcccagcagcatagcaaaccatgctctccactcggatccccaagccctcgactccagctttgc

SEQ ID NO: 359557 - DNA, 293 bp, Zea mays
ttcaagtaaagattgtctatttcaaccacaccaaaagttaagaaaattattaagttggtgaattgacaaaagaaatgaagcaagtttttaggtgttgaagtataagtgattcgcccaacttttcccatcagcttgacttttagtttgggggtttactaacctacacatagcaggcatcagatatagcatattacaataagctaggtatgtgtttgtattcttagttcttttagtatattacataagctacatccctcgtgatgccttaatctaggttatatctcaatgatgat

SEQ ID NO: 359558 - DNA, 121 bp, Zea mays
aacaaatcacctgagtaccctggctcaatttttgttaagaatttacctttcgaagcaactcttgttcgaccatttcaacagttcagcaagtttggtgctattaaatctggtggtgtacaag

SEQ ID NO: 359559 - DNA, 264 bp, Zea mays
acacaatcgagataagtcatggtagttagagcccccctatattctttctagtgtcttaagttccaagacttaatcatatattttaccagggagtttagtgataataacatgtataatacttataccttacaatcactaaactccctggtcaaatatatgattaagtcttggaacttaagacactagaaagaatataggggggctctaactaccatggagtttagtgattataaggaataagtattatccatgtttttatcaagt

SEQ ID NO: 359560 - DNA, 291 bp, Zea mays
gcatatcgtctccgtgttgacccccaaattaaaggggaagacgattctatgtcagataatgatgattctggaagtgttgatgaggatgaggatgctagccgaagtgatgatggatctgatggttcccaaaagttaaaatttcttgagaatgaaagcagtatgactcgaaggaaggagaaaaatgcacatggaagtccaaataaatgtagtgaaattgatgaaagttattcaggtgaaaaatggcttttggcattgatggaaggcgagtattcagatctaagcattgatgag

SEQ ID NO: 359561 - DNA, 282 bp, Zea mays
ccgaccgccggatacctgacgctggcgggcggcggcggcggcggcggcgaagacatccgttgcggctgcgacgaatccaagtaaccggggcccttgccgaactggcaggcgagataggtcccccgattcaagcggagatggttcactgatttcccttcgccgccgccaattcgatcgggctcgcggctcgccgtctctgctctccccaaccggcaccaagccagccaatggcgctcgaggaggcacagcggccactgtccgccggcgtagcctagcgcctaa

SEQ ID NO: 359562 - DNA, 105 bp, Zea mays
agaagatggattcatgcaatatgttctcactctggtccatccagggtgagaagatggattcatgcaatatgttctgatcattttgcatgaatccatcttctcacc

SEQ ID NO: 359563 - DNA, 277 bp, Zea mays
caacgcgaatcatccttcttccgtcaccagacagacggtagagagtcgaacaatcgccggctcgacgcccctcttccgacgccgcccgccttcacggtcctcggccgccgatcttccagagcggttcgacaccgttctcgccacggtcgacatcactgccgccgccgccgccgccgccgccgccgccgccggatagttggcatcgttgtcgacctctttctccccttcttccacccaggaggcaacatgtcgtcgctcgccgctgcgagagcggata

SEQ ID NO: 359564 - DNA, 256 bp, Zea mays
ctcagatatcttataatatctggggattttggatactagtatgggaattcctgttccaaaaatgtatgtttttggtttaggctcattttttcgaacaacactgtaacactacttgtaatttcagtaagatgatagatatacggagactcgaagtataagggaggataaataagtaactcccacaaccaacacttagtactagataactacaaggaaatacacccccacattagatcagctcactatcagtatgtgt

SEQ ID NO: 359565 - DNA, 192 bp, Zea mays
acgagacttgggaacttgagagacaagatagaagaagatacagaaacttgccgccggaacctttcctggcgagcagcacctctccctcgttcgtttgagtacgcacctcacgccatcggagatcctcggtggccacggggcacaacacgcatgcacggcagacggcgagcacacaactggcgaagggcagcg

SEQ ID NO: 359566 - DNA, 279 bp, Zea mays
accgacggcgacattgctgctacacggactgctcaagctgatgatgaccacctcacgagagggatctcggatgccagacacggcggcggagcacgagcacgcgacagacgaggctacgggcgtaccaaacgtagccacaacactgtggaaactgcggcgaggaccgcggcaccaacagcacgaaacagagagagaagcacaagaaggagacgacatcaagagagcagaccaagaacccacgagaagcgactctagacgaaagccagcggcaataggaaa

SEQ ID NO: 359567 - DNA, 282 bp, Zea mays
ctgcgacctggccgttttttcactgtgccgcatgagcagaaagcatcatatccaccttcacaaggtgattaacaatggaaaccattgtcgaagctcgtagtggttctgctctgggaaagggagcatgatccgaatttacttccgtcctgtgcggctaaaggtgtagctgtgtgaaatttccggggtgcacctcatgttatgaaggtggatagataccctgtgtatagcatggctacacgcactattgatggagcgagtgatgttttgtcgtatctgggctct

SEQ ID NO: 359568 - DNA, 297 bp, Zea mays
tgtcaattgatgggctaaaaagggctttaagcaatgcagatagagtgactaataagaaccagtcccagggtataagatttctttcccatgttacagctaatatggacaatatggtaccaaaagccccaaccacggctctaggaatcaacagtgatcgaaggccggcttaaacaaaagtttgtcatcatctggcgccaaagccttgcccaaggagggattgcgaaaaccacaacaggatgttaaaaggcaaaagatgaacaatcctacagagaatattgttgagcttgatgcggtcag

SEQ ID NO: 359569 - DNA, 143 bp, Zea mays
  unsure (1)..(143): unsure at all n locations
aagcggacgntagaacaaggatctagggcaacgtggcgaggcactcccgagggggaaaggcgactttgcttccagtgccacgaacgagtgggctatataaaggcgctcgagatccagatctgggccgatgcgccgccctcgct

SEQ ID NO: 359570 - DNA, 149 bp, Zea mays
ctgagaatgacattgatcgagctaggctagcggcgtcatctgagactgcagtgaaagatgtcagatagaacaccagcatatctgattcatatggatcatagtcgaatcctgaggatggtagccaagcccttgatttgacaatagaagta

SEQ ID NO: 359571 - DNA, 141 bp, Zea mays
cgcatagcgtacaaagatcaattcagctgttaaggaggatgttatttcagtggctaagaccgaatgacacatgctatgcttctgttttcagttctgttgactcatctgagcttggcagacagctgatccattggtcataaa

SEQ ID NO: 359572 - DNA, 287 bp, Zea mays
cacttcaccggctcaccgcgctgcatctgctatcttctatggcggcggctcacctcttctgatctgcaccggtcgcctatcgcgccgcgcacccacggacccttgctacccgtcgccgcgccaaccccgacacgggaacgtatctggtgctcatctgggtacggtgctcatgtgcacatcgcccccgggccacaccatcgagaagattcttcccctgccgcgcgtcggtcagccccgatggatcgctggccatgctcgggcgtcctagtccaggatggcgccaccga

SEQ ID NO: 359573 - DNA, 293 bp, Zea mays
tggcgtcgtacgacgcgccgggcttcggtgtcgggtcgggtacccgtagtacgggagcggtggagctctgctctagggctgtctatgtagagaatagagccctcgtgtcgtgtagatctcgtattagccttgcgtttcagcatgaatgaatgactaagactactagttcagtacacaaccacaacgcagccagccggcttctatactataccgtgaatgacattcgacgaataaacaggctacacggttattgtttgcttgcttgcttgcttgcttctggtatgttctgatag

SEQ ID NO: 359574 - DNA, 147 bp, Zea mays
ccttgtcacttcttcgatctgacaggcaatataagggaactcccaggctgccaagttatcttcgttggcctcacattcagactgatcaagttcatggtctaagtttgagagagataggtggtttcactaagcattgcgagctccctc

SEQ ID NO: 359575 - DNA, 292 bp, Zea mays
cacgttcccacgaaagaactatttcctcctctggatggtcgaggggatgaacggcgagcgggccagatcacgcccagctattcgcagcgagcagcatactccgtggctctcaagcagcagcagcgtggcaaaggaaatgcaggctgttcaaatcccactcgacgccacctcccgccaccatcggttgacacttcacccaccaacgcaaatcatgccaaccacggggggtcccctctgctgaacgcagggagggtacaagcttcgctgcgcaagtccctgtcgttcctggtcc

SEQ ID NO: 359576 - DNA, 149 bp, Zea mays
gattatgtcaaggctgtaatcatcttcccagcaagcgcggtcatgcttacaaccaggatttaaacaggtgctttggcagagacctgatctgctactaacacctgtttaaatcctggttgtaatgcctactgctgctggaagatgattat

SEQ ID NO: 359577 - DNA, 283 bp, Zea mays
cgtcgacacaagcgggcgaggggacccggggcggaagatgagagagaagaccgtctctctcttctcggcgtccccgatccccaacctctcgtctgttgcctgctgccctgctgcctgcaaaaaggagtttgtcatggcgttaagcgcatcttcaagagctgaaggacttccagaagaaccccccacatcatgcatgcaagtcctgctgtgaggacagtttcatggcagcaacattatgggacactgacattcctatgctgtggtgtttttagtgacatcattt

SEQ ID NO: 359578 - DNA, 154 bp, Zea mays
gttggcgacattggattgtgggatgttggtaccaaagacaaactcgttgtaaggaacttcaaagtctgggacctcagtaaatgtacgatgattctccatgcatcactggttaaggatccagctgtgtcatttaatcgcataatatggagtcctg

SEQ ID NO: 359579 - DNA, 291 bp, Zea mays
caatgggacagttcagaggtagtgagggagtacttaagggctgtgctgagtggaaagctccctggccattatgccacagctgtggagtgtcccatttctaggtgaagagatggggttcccttaattaggtaatctccatttatgttcccatttataatatgtttagttatctattttccattcttttgctcatgacaggcctactctcctgttggaaaatttgtctgattcaaaaaaagatgtaggcagttattatgcatctgtgtggagatattcaccaaatatgtaata

SEQ ID NO: 359580 - DNA, 293 bp, Zea mays
aaataactcaaaggagagaccagatgtttggattgaaagtcctgataagtcaatcataatatctgtaacaagtgacattcgtacaatccagtctgaggtatttgctgctccatactgtttgaggttctcccgtattcagcgagtgagatatgatcagccatggcatgagtgccttgatgtgcaggcatttgtggacattgtgcattcaaataatggtacaatacaaagggtggcagatgataatagcctgaagaatgatgacacaaaacattcaagaacaaacataaaagtag

SEQ ID NO: 359581 - DNA, 297 bp, Zea mays
  unsure (1)..(297): unsure at all n locations
cgcagttcgagtggtggtgtgaagctcgagccacagttgcaagcgttgaggagcttgggtgctatcaagatggagcaccaaagctacagacccatctgttttactacagcagcagcaacatatgttgcagctgtctaagcagaacccccaggctgccgctgctcagttgagcctcctacaacaacagcagcgtttcttacaactgcagcagcagcaacaacagcagcagattctcaagaacctgcctttgcagaaanaacaaattgcagcagcagcaacaacagcaacaacaacaac

SEQ ID NO: 359582 - DNA, 295 bp, Zea mays
aatctgtatcctcttctgatcagatgtttgttgagggagatgaagagatttcagcaatcattttggacactgtaaagcgtttagcccaaattcctaaaggagctgaagtcatattcccaccagatggtcaaggatctgtgcaacttggtaaagtggcagctcatgaatgttcattggcacggattcgtattctatctttgatagccaagctcttcactgtttcaagttatactgctactgctattcgtgattcaaccttctgtagcatatttgaagaggaaatatagatagaaga

SEQ ID NO: 359583 - DNA, 292 bp, Zea mays
gatggggccctgcaaaatgcagtagcactttgctgcagaacagggaggattttgtcgctattcttttttatgcttcgtggtgccctttttctaaaattttcaggacagattttcaaaaactgtcatcctttttcccaacaattgctcatttttcttttgtagaatctaatatcaaaccaaggtgcgtctttctaagacagataaacactgctgttagatttaactatatttagtatgcaactcaaacttcaatatctgaattgcagagtattgtcaaggtatggattcgtgc

SEQ ID NO: 359584 - DNA, 157 bp, Zea mays
gaacacagtgtttcgtcaatgttttctgaacaacttatgttatgtgcctgatttttaaaggagtcacttgacaaccagtgttcaaatcttttcagctttaatagtaactaactgatcattaagtgcaattttctatgcaagcaaccatgttacatga

SEQ ID NO: 359585 - DNA, 156 bp, Zea mays
ctcgagccgttttgatggagtgagcccttccattagtttgacgaagaggttgtttctagatgagttgatcagttggagtaaggcgggagcgaagcatttagacagtttgggaattattgtcactttaaatagggtctcgtagggcccatcaggctt

SEQ ID NO: 359586 - DNA, 302 bp, Zea mays
atagtgcctaagtctgaatttcagtgattgtgacaaacttgggagcttccttgtgcctaatccataaggttttgaactgtggtgtatatagtggagttgaagcccatatgatgttgaacaagtttattcaagtgagtttgacatgatcgtacacagaaattggagaaaagagaattgcaaaactccgtgtcaggtttaaggtgtgctgtttcaaataactgaaaccgaaaattcagtacatagtgccaaattcggagctctgttgtggtcaatctatatggtgttggactaaaggttctatg

SEQ ID NO: 359587 - DNA, 155 bp, Zea mays
caaagggacagacatcagatgcgttgtcgaaattgacagagcttgcaccagaaacagcgtgccttcttactttggacaaggacggaaatgccatttcagagacagagatcagcactcaattacttcagagacatgatgtcatcaagattgtgcct

SEQ ID NO: 359588 - DNA, 154 bp, Zea mays
  unsure (1)..(154): unsure at all n locations
agtgttgctggtacaaataagcttttgaatagaatttacatggtatctttattaaattttctgtgttgtacatagtactcagaaaacatttgtatatctaatccgactangatttggagtaacttctcaactgagacggcacctttttgtgtga

SEQ ID NO: 359589 - DNA, 301 bp, Zea mays
acctgctcctgctctccacacgccgccggagaaacgcggcggaacgccagcacgggctgcacggcaggtcggcactcggtagcacatccctcccggtggtccggccctccgccgtcccagcacgacagcacttccggcgaccaggtcctaggctcccagcgtccggcggtcccagcagtccagcacgacagtgacagcacttcgggaccacggctccgcgcgttctgctgtgcagggagggaaaatcctgtttggaggatctgccattgaatcagaatgaaactttgtgcaaccaacaatt

SEQ ID NO: 359590 - DNA, 168 bp, Zea mays
tgtgtacaagcttaaaattacagatcataatacttctcttgcagtttacggcttctcatggattgtactctttgtatggtcttcttttcaagctttactgcatcctagagtcgacagctgcgtttgtagtctcagggctgatggtatgagatgctctaggtatatatg

SEQ ID NO: 359591 - DNA, 296 bp, Zea mays
  unsure (1)..(296): unsure at all n locations
attggacggcttccggtcccggcggcgtgttcgcttctcttccggtcagcttttccctcgtcctgagccgacgccgatcgagcgtcgtgtgtgtgtagctagctataccttgctctgggcagcatcagtcgctgcctgcctagtggctgctggcgctagtggggcagagacgctgagacgccaccaccgatactggaaggcaaggagccaaggagggagggggaagggaagggggagagagagganttggcacgggcgggtgcggtggaaactgtgccacgcagccgcgcgcgcgc

SEQ ID NO: 359592 - DNA, 295 bp, Zea mays
  unsure (1)..(295): unsure at all n locations
ccttgttctataaaaagtttaggaccaattagtgtaagcctttaagaatgaccttaaaatgctatactgttgtgttttgatgtgtttgacagtagctttttgtattccattgttactttagcactgtcttaccttttggatcatgttttataaatgtttgatctttaatgtgaaatccttttttctcatgtcccctgaattccatattatagattattagattttgatcaaagccacgtgggtntaaattttctttgtataactaaagcagtctgatggagtcaccttctggtgg

SEQ ID NO: 359593 - DNA, 205 bp, Zea mays
gaagctgatgctgtcaaaagatcatttgctggtgactcgtgcaggtaattattatagcaattctgccacttcgataaaaatcctaaggactgagggaacctataaggattcttttttcgaggcacctgattagttgatatttctgcaaccatagatagtcatagctgtgatttgattgtttcatgcctacttgaatgtagaattt

SEQ ID NO: 359594 - DNA, 271 bp, Zea mays
gcagcagctgcagctcagggatcctaggacagtgcttggagacgagcaactgctgtggcactttgtatcatggaacagaaataatgaagcgtgttctttgtgacacttgacatgcaaatgtttgtgttctgtaaccgttgaatatatgggacgatgctatgatggtgtaatagatggtagagagggtacacccctgatactaatgatgcactattgcatctctgttgtacaagtttgcatgaaaataacgacgagggtcagtatgaggcat

SEQ ID NO: 359595 - DNA, 178 bp, Zea mays
ctactgtactgcaccgcaacagcgcggcggcacagtagcgcaaacgaaggctccacaactccgccttcattccccaatccatcctcgccgcccggcgcacgcctttccccacctcgactcgacgcgacgtcggcccgacccgatcctcggcacggaatcttctattggataatgtggc

SEQ ID NO: 359596 - DNA, 279 bp, Zea mays
aaactgcggacttgtcctttcagtgcaagttgtaaatattacaatagttcacttgccaaaaagtcgctacctcttccagagaagcatgaacaaggagaacagcaaacaagcatggttgcttatgggagttgcacaccaagttctcaacaaatgtatcggtatcaaattgcaataagcagcactactactgaaacaccacccatccatagctgtgagccaattgttgagatgccaccaagcccagaatatgaaatacaatgaaacacctaatgagcaaga

SEQ ID NO: 359597 - DNA, 195 bp, Zea mays
agcagaagcaccggccgggtgaccgccgccgccggccgtttcgattcatttgccggccgctgcgcgtccctcatacctcaccgccggcgccgcgccgtcctctcacctatcgccacgcgcgttcccgcccgccccttcgacctccatctactgcctcgcggcgttgcttcccgatgtcgttccgaggtcgtggaa

SEQ ID NO: 359598 - DNA, 115 bp, Zea mays
cttatatctggaccatgtactagatcataggcattacttcggtgtctatcctgccagtgaaagagcctggacgattttacgttgatagctatatggggatttctcgaggtataaa

SEQ ID NO: 359599 - DNA, 251 bp, Zea mays
cgaggatgcattgaagggcgagcgcagggcactgcagtgcacgcatgaactgacctgacgacgacgcgcgccacagtccatagcttctcagtcagacatcgcaatggaggtcgcttccatgctactggtgatggtttcgctagagacactgcttctcgtacgtggcgccggtgacggagcggctatccgtctgaccagcgatgtcggcggcgttgatgcagaccttgagacggagatggcgaaggcgatgg

SEQ ID NO: 359600 - DNA, 273 bp, Zea mays
ttcgtttgctcgtagaaatgttggtaataatgctgcaccatcattgtaaggagtgccattcctcgtggctagccgctgacgtggttctccatagcatagggacgatgcgttgcataagcgcagagagatcattgtccctaatgctggcagaccccatccacggacagctgtgaccaattgggctcctgacaatgatatgcgcagcaactagcagtacggtcatgccgatgatacgtttgctcgtcgacatgtcggtgatcatgctgcaccagc

SEQ ID NO: 359601 - DNA, 300 bp, Zea mays
agcaattggaagaggtcaggagcagtttgcatgctgaaattgcagaagtacgtgcagagaaggagacagctctatcagagttacatatgtctcagacttccatcaggaacttagagagtgtggtagaaaagcaaactgagaacatcttaactctagagaaagctaatgataagttaaacaataaaatatgtatcttgacagagcaagtagaacaagccaaggctgagctgcataaggaggtagcggcaatacaagaagagaaggatacagcactaacacaattaagacagtcagagtttt

SEQ ID NO: 359602 - DNA, 113 bp, Zea mays
gacattactccctggacctgcattttttagtgatgcatttcagagtctgatatatcatttgagcatcaatatgcatgagcatatgactccttttgcaaccccatcatccagga

SEQ ID NO: 359603 - DNA, 291 bp, Zea mays
atctcgcccccacgcccgcgtatctcgcccaacgcacactgtgcccctgccccacgctcgagcaggtagccgcagctcccgccggatccttccccacgcccaagcaggcaaccacggatctcgaccactcctgagcagtcatcgcggatctcgcccctgctgtgcccccgatgcatggctcctcattctcctctcggaatcgctccctccctccgcgttcggcaccgtgcacccccctcgcctcgcatggccgccacgggggtcagccgaggctggcgggaatacagggcc

SEQ ID NO: 359604 - DNA, 280 bp, Zea mays
cttggatctcagcaacaacaatattggagggaccataccagatggtctaccactcacaatgcagagatttttcctttcagctaacaactaagtggtagccttccaagtacattgtcatcccttacacttttgacaagcatgtcactcaatagcaatcatttgtagtggagcgacaccagatgtattcacaactcggggtggacaaacttaagattattctgcaatcaatttgaccggccgttgccaccttcatgggaaattgacatcatgactacctaca

SEQ ID NO: 359605 - DNA, 106 bp, Zea mays
tggcggtgacggtggcggtcgttatggttctgaacgtggtggtgaacgatactctggcagtagccgacatagcagcactatcgtaatcacgatcgctacagccgtg

SEQ ID NO: 359606 - DNA, 288 bp, Zea mays
aacaccaaaacgctaaaacgtggttttaacctctaattagcgttttgacgtttaaacgtggttttaataacactgacactgggtctgccctttcttttaatagttttgtgacttaggtaaatgtgtttgttcttcaacaagtcattccatacaggtgaatttttgttgcttttcttaagttgagtaatgtcaccattcttcaaatatttcttgtttatttcctgccaaatgacagttccatttttccaccttccaccatcatttgcataacatgctgatattcaatct

SEQ ID NO: 359607 - DNA, 109 bp, Zea mays
cttttattgatgttaaacaattacttttggatgctcctgaaacatgcttctatgcatgatacaattcgatattgcatactaaagatgggttagctcatcagttagaaga

SEQ ID NO: 359608 - DNA, 110 bp, Zea mays
acggattctatatccaagcatgaccagggtattatacacttaatctctgccctaggctatgagtgggcattgtcttcagttctcagtgttggtgttggtctaaattttcg

SEQ ID NO: 359609 - DNA, 109 bp, Zea mays
ggtactataaatcctcctaatggatggaaggcatactatgcagctacaaaagccatcattaatcttaacgcggagttctacaatatcatcagggaagggtccttgccag

SEQ ID NO: 359610 - DNA, 101 bp, Zea mays
gaaaggattgatcgtgatcgaagtggcaggatcgacatataacagctgcgcgatacacgtctcagtctcggatattctatgtctctaactgtccatgatct

SEQ ID NO: 359611 - DNA, 99 bp, Zea mays
tggagtactcgacgcgccgtcactgaatcctcagatcacggctagccgtaatcacgccactctgctgactcccggcgagcagtgtaacattttccttca

SEQ ID NO: 359612 - DNA, 100 bp, Zea mays
ggccatataaaccaggaagggtttcccaggaaggcagcagggtatgagtttgatgataataggcctcagcacaatattccagacagtcagcatttgccaa

SEQ ID NO: 359613 - DNA, 100 bp, Zea mays
gaagggaatatgcttcttcactgactttcttgtcgttcgggagaaccaacaaacatttgatcttgaaggggacagtggaagcccataatcttaacaggac

SEQ ID NO: 359614 - DNA, 100 bp, Zea mays
aacacgatgtctgctgcctacgcctgcttcctggaccacgccgtgggcagcctttctgaagggaaatacgcagattttgaggtggtaccttctacatcgt

SEQ ID NO: 359615 - DNA, 100 bp, Zea mays
tggctactgaatattgcgtggcgcatggaggaggaaagcgctgttccgtgcccggctgcaccaagagtgctcgttgccgcatgactgctgtgtgaagcac

SEQ ID NO: 359616 - DNA, 106 bp, Zea mays
gcgaacgagatagtaagtcctgaagcaacaagatttcttcagtttttggtgcagaattctttcgctacatataaatttgatcgtacagttctgattctgaccgaca

SEQ ID NO: 359617 - DNA, 281 bp, Zea mays
gggaataaacgacatcatgaggaaaatgacgaacaatacgatttaaagcgtgcaaacacacgtgatcaacgtgtgcatttggaaaaatcttcaggcagtgggcgtatggattctatgatttgagagagcaagacctgatcgtagttgtagtccaagtaaaatccactcaagaagttcacctagcacaagttcttatcatgataaagatcaaaacgggaatggatctaaagtggtcaatcatggaaagagagaaatgccatatgatgagagaaatagtcgac

SEQ ID NO: 359618 - DNA, 322 bp, Zea mays
  unsure (1)..(322): unsure at all n locations
aactccctcggtgaggcagcganggagcctccttgacggcgcccctcgacgtgcgtaccggcgagattccacctccattatggacggcgcgcggagcggagctgcacctcctattgggcggacgtgcgcgatacacgagccgcagcctactcccgctatgtctttgaggagggaacgctgtgcaacctcatcttactttcgacgctagatcttggacagtaaagtcccgcagtgacttgccagttgccactgccagagcggtcaccgaatctgaggtctgagcccagcgggccgcggcggctatgtcctcatcctcctcctt

SEQ ID NO: 359619 - DNA, 294 bp, Zea mays
aaaacatcgaatgctaatggtattgaggtcccaataacagggcatcagtctctacattttaagtaagaagattctgttatttgcttgacatagtccctagatttgtaatcgcggtcaagatatcttaggctgttacgttctatcagactgacattgaaccttatagttgtaatggtgcctacgattttctgtcatggtctagtgatgttttggttagcttatgttctgtcatgttgacatgcggaatcatgtaattttcttgtcgcggtaataaaattgggcacaccagtggtg

SEQ ID NO: 359620 - DNA, 164 bp, Zea mays
ctttgacatccacagggcatcaaaatcggttatttttagtgtgatcatcaattttggttgtgccaactttgatattgattcatgagatcacttgaaattacccgttgttaataagtaaatatatattgacagtaaaaaaaaaaaaaaaaaagggcggccgccga

SEQ ID NO: 359621 - DNA, 230 bp, Zea mays
taattatgttcttggagctgagagcattagaaaaaactgtgatgaaaataatgcagatgtcatggaaactggaagcataagtgagagacatgatgggctgaaaatcgaagaagataatgagaaattgcagcagccatttattgaagatgccaattctcaaacagggagtggttcatcagttaatgagcggacaaattctgggttttctcgtggttcatcagaggctgggt

SEQ ID NO: 359622 - DNA, 213 bp, Zea mays
tgaggagcgaaatccgtgaaatctaggtgaagaagagatggagcacgtcgtcgtcatggttgcagctttgcttttgtcgtcgtggagcctccaccagcgccgtgtagcagtgagcccctcgctagtagtccgttgttttttgcatccctagtgcttgataaaatgttgaaccgttgtgtgtcgttaatcgcagccactgtcaacgttgtgcct

SEQ ID NO: 359623 - DNA, 193 bp, Zea mays
attgtgagctacttctcagcagaaattacacgaggaatctggaaacctgtcccaatgaatggacttgaatggcctagtccctttacttcagcttcaatggaatgaagagaagcaccgggactaggccattcaattccattcattgaagctgaagtaaaggaaattcttgcctctggtggtgaacagattaaga

SEQ ID NO: 359624 - DNA, 291 bp, Zea mays
gggtgacgccacgcgtgactttggcaccaagggaatgaattggaggatttgtcaacggatcaggtcgagatcgacgcagatccttctagtacaaacgctgaagagtcaactgtcaaacagggagacgagatttccgagcttccaggtaagggtgccagtgtgctctactgtgttcttcctgagagaagcagcggttctgttgcaagtacatctagtaggcaagaccaagattcagtggatctgccatctgaaggggctggggagctatattgcttattccacccaggaatg

SEQ ID NO: 359625 - DNA, 285 bp, Zea mays
ttctattctacctgcagcgcaccacatgggcccagcaatagcagcgtcacatggtggtggccatcgtcacgtcgagctagagatgtcaatgggtaattccccatcgggttatagcatcccagacccatccccatcatgtttgatacatccccatacccatacccatacccatcatgggtacaaaactcatcccatacccatctccattcgggtttcgggtccccaatgggtccccatccccaattaaggaataactaggtactaacatctagccaaattatccag

SEQ ID NO: 359626 - DNA, 283 bp, Zea mays
gtccgccgatggcgccaaccaagcggactcattgctgcaggcaggcgtactgctggatctgaatctcctggggttccagatgacgccgcttcttcgcttgagtaaccaccgcgaaaataaatgaatgacgccgtaatcagacgcgaaaacaaacgacctcattaccacaacactgttctgatatttttgggtcctgagagagccacttgagttcacaataaatgtagtacccatcactggaaaaaaaaaaaaaaaaaagaaaaaaaaaaaaaggggggggccc

SEQ ID NO: 359627 - DNA, 287 bp, Zea mays
cgctcgagcagcagcagcagcgacgccttcgctgtgtcgcgctcgtcagaacgggcctcacgacgtcgatctgcgcagagtctacgcgtcatcgtcgaaacccgcgcccttgtcgacgtcacgcctcgcgcatcgctcgtcggcaaagagcccaaactaatggaccgagagaggatgatcgtgcaagtgatgtggtgccaaccacaaggtgcagtcggtggacgacccaaggaaggatggacttaaccagtggatgctcgccaagcgagtacctcccccagcaaaca

SEQ ID NO: 359628 - DNA, 284 bp, Zea mays
gtgaaaaccgtgaccaacagactgtcgttcccacttcatcttcaggtgggtttcatcaatttccttccaagggatatgtaaagaagacatacctatggattattgaacataaatatggtggaaatttggatttgtgtacaagcttgtattcctccgtaaatctggttctgagatacatgtagggttgctggcctgcaaggaacattgagtaaattctactgagctgccactgtcaaaactgagtgaatgcctatgggcaatttctcattggcagcatctaagca

SEQ ID NO: 359629 - DNA, 278 bp, Zea mays
gggaagatttccctgatgtcagctgcttactttacaaacaaatacgccagaacttgtactatgcttattgtcggagcctcaacctgaggtcagagctgctgctgtttttgcacttgggactctcctggatactacatcatcaaatggcgctgatgatgattctgactatgatgaaaaggtgaaagctgaaataaatgtagttcgaagccttctgcagatatcttcagatgccagtccccttgttcgatctgaggttgctatagccttactcgctttgc

SEQ ID NO: 359630 - DNA, 218 bp, Zea mays
gtgaaacattcgactgaagtgttttatgcaggctctctatggaaggtgagtgtccaggcattcaatgatgaggatcctcatgggcgacgcactcttggactttttctccaccggcgcaaggctgagttgttagatcccttgaggaaggctcacttgtacgtcgaccccgggaaaaggtcactgcgcgctatcagctcatctgtccatcaaagagggag

SEQ ID NO: 359631 - DNA, 145 bp, Zea mays
agagatagtgccatcatgatttgttccggctggtcaggtgcgtcttcgacactttctggtactgccagtagatcccatacctcctcgatggcatgtaactgtaccgtgctggcacatttgtgaccgggaaaccatttctctgcac

SEQ ID NO: 359632 - DNA, 126 bp, Zea mays
gagcttgaacagagatcagacccttaaaggatatactttaaaagtttatggacaggttgaaacaagtagccaagtttgaggacgggaattgtaatttacccatccaaatttattgacgtatcgaaa

SEQ ID NO: 359633 - DNA, 147 bp, Zea mays
tgttcgagccgaatacggctcgagcggactcgagctagatcctctgtatacttctacccgccggcacccaatacccctacccgttctatgaccaccgatctatcccctcccgtcctccgccacctctgctgagagcgagaagagatg

SEQ ID NO: 359634 - DNA, 134 bp, Zea mays
tgtaagtactacataaatgtactacttgtattttttaataatcaatgcttcaaaagtctatatagatgctgactggtgtcagggttttcccattattgtaagtttgttacaagcaagtgctttccctcacacaa

SEQ ID NO: 359635 - DNA, 141 bp, Zea mays
tgtaggaagtgatggtctagtgaagctatggacaattaagacaaatgaatgcattgctacttatgataagcatgatgggaaggtaagatatcattgccatgcatcaaggaagagttatttttctgtcttattgctggaggg

SEQ ID NO: 359636 - DNA, 138 bp, Zea mays
gaaggatctgacactgagattaatgttccaaactattctgacctagaagcactgatacttgatctggacctgattccatgggatcaagaatctgacttcatccaaccagaagtttcaaggtttcagtatcctgaaagc

SEQ ID NO: 359637 - DNA, 172 bp, Zea mays
cacccctgtgctagctgctacgtgctgtccatgcactgctgctgagtgtccatgtttgtggagctgctggcaccatatgggttctcctttatcatgtgtcgatgagctccactgcatctgccatatattcatcgccttggacttgattcagtgaagtcttcccctctgccct

SEQ ID NO: 359638 - DNA, 133 bp, Zea mays
tcttgatgacgctcgagcatatcggtcttcggcttatgatggtaacagagactactaccttccaccacagaacatgaatgagaatgctgcagccaactggtccgctctggcttatgatagtaacagaaaccac

SEQ ID NO: 359639 - DNA, 273 bp, Zea mays
attatcgtcgcttccaaaattgagaatatggctgcgtttggaaagccttagattctagcattgggtaacatgtctattatcccacattatctaagtttaactagatactcatattttatgaaaaaaaatgtactgaaaaatcacgaggtgctagatgttgcgctagcagcagcatcatagcacatcttgtctattccagttacaaatgtgcatattgtagaatatttttgtaacatactgctgctcccttccattcgttttggttttggcaat

SEQ ID NO: 359640 - DNA, 189 bp, Zea mays
gagcggctcaagcagttgtctctcttccagatcccctacctcctctttgtgccctcggcttagccaccaccttggccggtgctccttgcacgtcgggataggaggatgccgaccaagttctagatgaagagcaactgatttgcttcccttggatggattccactgttgagccattcaaaatttgagatg

SEQ ID NO: 359641 - DNA, 213 bp, Zea mays
agtcctacttggggagggtcccaatcgtgcttcatttgtagtttcaccatcaaaagaggccttgagtactgtttctcaagtcctgaagattcaacaacagttttggccagttttaggtccaacatacgcatcactacaggcgcagaggggtcggtttcttccaatcatagtaatgagctgaagaaaaggaagcgtccaggaggaggaccaggg

SEQ ID NO: 359642 - DNA, 278 bp, Zea mays
gtgaagagcacatacttggcaccacaaatatggtgtatgaaaatcaagaaccagtgtatgagggggaggtggttcttgctaagcagcttgacaagatggaggaaagcagtccttccgtggatgacaaggccacagaacatcattgggagttgatcgataattttctgtggtccaatgctaaccagctgactgtctatggtctcttctgcttacaagagcaacttaaggaaaatgagctttgtgtcttcttccttaagttcctcttgtaagcagaagag

SEQ ID NO: 359643 - DNA, 277 bp, Zea mays
  unsure (1)..(277): unsure at all n locations
ttctcgagcgaatcggctcagggctcgagggggcgctctctcagcaggggccttgatgaattttctgcatctctgggacngcttaagtgatgtgcagctgcatcctgatattgaagacagacacatttgtaccatagcgccagatggtaactactcagcaaaagttgcttatgaagggctcttccagggatcgtgctcctttcttcaccacaaaagaatctggaaatcctggatgccacccaagtgccatttcttcctgtggctggtggcacatgat

SEQ ID NO: 359644 - DNA, 270 bp, Zea mays
cgagtgggctgtgcgttgagaaagacgtgttgtgcaggttggactgcttccagagtcatccgaacctacgtccgagcctatattatcatttggtttgaatcgcggaacgatgtcgtccgtcactacgttgttctaataatatactaacacgtgggatcagctcactccgcaagaaagtgcaagaccacttcgtccggagccaggccacgatggatgagccaaaccatcaaaccaaacacgctgtaaatgtcaagtacagcgggccacaat

SEQ ID NO: 359645 - DNA, 267 bp, Zea mays
atgagtactctggctctttgtacagcccaatcatttgtctctgccccagccattcattttcaggaattatgctaactcattaagcgatatgtgccttgtaccaaatgatttatgcactgcatcggagtgttttgttttggctgctccatatcttgcttagtcttgtcttcagagaaaagggacaagcaccagcatcgcttgagcctttcttggccgaaatttgcttctccgggatcctggtgattcttacatcgtcatgctatagaa

SEQ ID NO: 359646 - DNA, 130 bp, Zea mays
ctcgagccgctcgagccgttcagactatcacgagctgaagtacaaatccaggtcgcagtttagtacaccggtgatcttgaaagatggccaaattagtttaatgggtgagggctccccaagcattgttggg

SEQ ID NO: 359647 - DNA, 151 bp, Zea mays
ctcgagccgcgttccttctcccctctcctaatgtcagccgtgcagcctctccactgcgcccacttcttatactcccaccttctgctccctctcacggacgcttcgctctagtcggacggtttcgaggaactcccgggctcgaggagatcgg

SEQ ID NO: 359648 - DNA, 214 bp, Zea mays
tccaataccaggctgatttggtattggatccaattcaattccaccatctccaattccaacatccaaacggagcattagagatgttcaatgacccggattggggatttgggatcctgagcactctggtgaagctcgaagagagtgaccacatacgccatggtagccacacatcccagtcccccgagctcgtagtagtcgccgccaccgtgacggg

SEQ ID NO: 359649 - DNA, 123 bp, Zea mays
taaaagtaatgccaacacagagccagatatattaccttctataacagggccaaaaacttctctaagtccactgtctgtaaaaactgctggggagtctggagatttgccacattaactatgagg

SEQ ID NO: 359650 - DNA, 219 bp, Zea mays
ctagaattggtaccaaggcaaagaagtatgggcaaacaacttgaatccttgagcagagggttaggcactaagattccaatccaaatttatgatggaaagcgaaggccagaaccccctattcaggtcgcaaagtttgcatcagagggtgggatcatactcaggcaacatattccaatatttccacactggaaggagtacaagaagcaagagaacgagggt

SEQ ID NO: 359651 - DNA, 141 bp, Zea mays
ctggacaaattatgaatatgcctacttctgtatcataatttcatgttgcctaccctgtcggcctttttcctttgcaaagattgctgttgttttgtagtctaaaacagtggctatcaatctttattaaagggcggtcattgt

SEQ ID NO: 359652 - DNA, 303 bp, Zea mays
gttcggctcgcggcgaccatggcactcgttagccccagcttcaagataaccaatcaaatgtgtgccaggggtatgccacttgaatgccaatttcctcataggctaccatctgtagcttgttcaatgttgttaaacacacaaccttcacaacggtaggttgtttttggtgccttctactttttctattggtatacacagttctttttacctcaaaactatagttagggatgatttgtaatgacgaaaatagtgattgttgcctaatctatttctattatgctacaacgtatcatggagttgatg

SEQ ID NO: 359653 - DNA, 276 bp, Zea mays
gcgacggtgggtgcggatgtggggggtaggctttgctggctcgccatggcgctccccgtggcttggatctctggtgtggtggtcgcacatatggctgcgaggcgagcggtgcttgatcactgctgcttggatctccggcacggtggtcgtcgcctcatcgtcgggtgagcaggtatgtgaggggtggatccgtcgatggacgcttccacatctaatagcgtcgagacaatggctcgagcaccaggcggcacccaccatcgggaaggaggcagcgat

SEQ ID NO: 359654 - DNA, 133 bp, Zea mays
cgcgctcctaccccggcccccaattccaatctcgccgccgccgggttgccgtcctgtgctccgcttcgaaccgccgcaccgctaggaacagcccgtgctggagctgggggaacgaacatctcaacctccgtca

SEQ ID NO: 359655 - DNA, 281 bp, Zea mays
cgcccccgccccctcaccctcaccccccgacgccgacgccctaggcggctacgcaggtcccgagggacgggcccttcatcttcgtcagtctattcgccgggcgacgagcacccgccagaaagaagatcagcggtttgttggagtatcgatggtggtgatttcgtagcgtggtgttgcagtttggttggagcttggagtttaggggaagatttggtgatgagcagccgcagcctgccgccgaaggatcgcaggatgcgtactgaacgcacctcataccgtga

SEQ ID NO: 359656 - DNA, 107 bp, Zea mays
atcatttcagtgcagctgacgatcgattgacgctgctacctccaaatgcccatcctgaagatgagcttattgttgcgaactagtctagcctctgtgatgagtgggtg

SEQ ID NO: 359657 - DNA, 246 bp, Zea mays
gcagctatgtcctcctggatcccaaggaaagagctgaactacggacttcacgttggatgaaaggtgaaggaggaaccagctcgttcttatgttgggtctgtccagcaccaaggcagttgcccgaatgaaggagacgaccctctttggccgtgcaggggggctgcatacccagatcttgacttctgcagggggttcaaaaagtatagacgagacctggtggttgggcgcgcaggctacgagttggtg

SEQ ID NO: 359658 - DNA, 322 bp, Zea mays
ctgagcaaaagggtatgcatagtggaatctcagataaccttacccgaatttggatgaagaaatacttgtttgagcagaatccaataatgctctatcaacagacatatgctcggcataaatcatgttttcattgtgtctcatcctggaggacagtgaagcatgaggactggagtgcccactggttgttttcagatccactattggattctgctcaaacaagtatttcttctgagcaaaagggtatgcatagtggaatctcagataaccttacccgaatttggatgaagtgcatagagaattgccactccaagacattgcggca

SEQ ID NO: 359659 - DNA, 323 bp, Zea mays
gtccgtgctcacagatccacacttcatccatgagcacctgagccgtggccagcagaagctgctgctctttgcgactgacaggggaaacgacaggtcgctcgccatggtgctcgcggacaacaacgcatccatgtaccagctgtcaaggcccgcggcgtctcggagcgtcttcgtgcacaattcttgcaatggcctgctctgcctaggtgacagcacaggagctgtcgaggtgctgaacccaacgactggtgaatctttaatgttgccgatgccaatgtacacggcagggagcagccagttctcgtcctgcaattggcactgct

SEQ ID NO: 359660 - DNA, 124 bp, Zea mays
gattgacgacgttggcaatagggtgtcatgggtcgctgtggccggtccatcatcgcaggtggacgcgatgggggagtcggaactggacgatactgggtcaaaggctagttctaacagcaatgtc

SEQ ID NO: 359661 - DNA, 117 bp, Zea mays
atcgtcgtgctggctttgttgagacctgatgtcggaatggtttccgcacagggtgacgaggagccgtctcctgctgtcttaggggaaacactgttctttgctctgcgtgtcctgcta

SEQ ID NO: 359662 - DNA, 99 bp, Zea mays
gcaacccttacatattttacagttgtggagaggatggcttggtacaacattttgacttaagaaggcgattcagcaacaaagcttttcacctgcgattct

SEQ ID NO: 359663 - DNA, 307 bp, Zea mays
tgccgtgccgggtttcgggccgcccgacaagtccgacccgtttggacatgtataagttgttgcctttttcgccggtgttgctttattttggtggtggtcttgttatcatcttcgtgagtgttgaggttttcttttttgttttattttctattgtatttggttctttatctatcaaaatatgcctggcatgcttttaatttttttaaaaagaagtgcatggggataacgattcaagtattcaacacactgtgtcgtatcattaggaagcacgggaatctgacagctgccaagctgagtgagttccctt

SEQ ID NO: 359664 - DNA, 305 bp, Zea mays
gtctcttaaagctagtctactgatttggctaaactctcgatagcttctttctcgttttctttggtcccgcttgtaatttctttttttcacttcaaaaagtttcaataaaatcgcgctgtaggggtttcccctacagccctctccccctcaaaaaacattttgtaacacataatcagcttacttatatgaatctttttatttggagccataaattttgaacacccttttaagggctcaaatttgctagaccagacagcttgtttagcagttgtacagttaatcccttcatttcagcaacaaaaaca

SEQ ID NO: 359665 - DNA, 298 bp, Zea mays
gctggaagtattttaaggtggtcactgttgcttctagaaaggaacttggggttatggagacaaaagccaagtgcaagttctgtcatagatcttatttgtaccatcaagggggcatcactacaacactaaaccgacacctagacaagtgcacacagtatttgaacaagctggcacaagctaagaaaaatcttgctcaaggtagtctctcctttacttgagatggtggacctgttgttgttaatcccactgaatatgatcatgagcacactagagtcttaattgccaagatgataattgt

SEQ ID NO: 359666 - DNA, 145 bp, Zea mays
ggacaggaaagaattgcttcaatggtatgagcctgcataatatcagtgacaacccaaatccttatgaacaggcaatatcacatcattgggaaaaccttatctgcttttgatgaggataattacaaaccttgctttggttttggag

SEQ ID NO: 359667 - DNA, 172 bp, Zea mays
attgtggacaggcttctacaatagcattaacatcatactgcggcggtgctattttgccaactgcgcggatagactcccttgctatcggaaaaatagcactgcagcagtatgatgttaatgctattgtggacaggcttctacaatttcttgaaatggataaggattatgtgac

SEQ ID NO: 359668 - DNA, 205 bp, Zea mays
tgttgttactgtattatgaccatggttctgcatgaataatcttaatttcgactaaactgcgttggatgctcccacaggagtttgatgacatgtccggcatctagtatatgctggaaaccttgcaggtccatatggtaaaggaaatcagtggcgaagtctatctttttctcctcctgccgtacgtccgttccagcttacgaagcgc

SEQ ID NO: 359669 - DNA, 294 bp, Zea mays
ggcatcaggttcctggtcctctttcaacaataacagcacaggcagtgcaagcagcacgggaagcactaatagcagtgctctctacaaagtagatcatgaagcagattgtctggattatgagatcctgtgggaagaccttgtcattggagaacaaatagtatacgtaattgcttctccttttgtgaatggttgcttgatcatatggaattttttgttcatggtttcatatttggtttgcttcaaatggacacagcttcatctttcttttgtgccgtttattaattgttcttcggc

SEQ ID NO: 359670 - DNA, 271 bp, Zea mays
ccaacgttcccgtcctgatgagcttgatcctggaccggagcacctgcgaagaatgccaataagagctagacgagctagccaggaagagctagaaagtacaagagaaaaggaatgatcaaccaacaaagacatcacccttttgaggttcaagtaacacccgtgttcagaacaacgagaaacagaaagacacaaggctgagacctgtactcgtagaagcaggcggtatgctcattgtcaggcttgtcccaattatgccacccagcaggctcta

SEQ ID NO: 359671 - DNA, 292 bp, Zea mays
attttatcaagctcgctcgccgtcacactgcgccaccagcggcgatcccgccatggcctcctggctcaaggtcgccgaagacttgctcgaagtcgtcgaccggagggccaagatcgtggaacagaactgtcggatgagcagtctacctctcaccttcaggaccaaacaaccaagaagtgcaagcaaagaagggaaagccgagggagaagggtccattgaagctcactaatgccgatggtggcaacaagatatctgctcagaaggaaaagaggagtaggcaacggccgcgaga

SEQ ID NO: 359672 - DNA, 295 bp, Zea mays
cttttgtcagagaaatgctacataatgcaaaagctgacattgcaactttacgagttgacaagaacagtagccttgttttacagactgcactgaagctatcgtctggtgatgataatgaattgcatcatataatatcaatacttcttggttatgagaatataaaactgtacagacgagagattacagtgaaaaaatggacgagattgttactttacttgaagaaagtgcttatagtcatctcttggaggtgattgtggaggttgccccagacgaattgcgcaatggtatgcttgca

SEQ ID NO: 359673 - DNA, 105 bp, Zea mays
tgggaagctttgctagcttcatgtaaggttcacggaaatttggggttaggaagaatagcagctaagaagattctggaaattacaccacatgattattctgcatac

SEQ ID NO: 359674 - DNA, 101 bp, Zea mays
agagatccaggtttcccagacacctactttcgaggacaaaaccatcaatgaattggttgaaattgatctacatatattccatgaaggtagatggtggttcc

SEQ ID NO: 359675 - DNA, 277 bp, Zea mays
caggtttctgagctggaagaagaggtagagacgcagaagcttgtaatatccgagactgcagagggaaaacgagaggctatcaggcagctgtgcttctccattgaacactaccgcagcgggtatcagcagctgaggcactgttgcaaggccacaggccatcgttggtgatggcaacctgataaagtgaacaatgctggtttgccaatgaactgcacagttctgggtctgttctgtttttagccttgttctttcacaacatgtgccgtgcagcctggta

SEQ ID NO: 359676 - DNA, 273 bp, Zea mays
gacgccatcgggacgacccgctcgccgccgcgtccgggcagctcgttgtcggcgtcgagtcacagtaccgcgtggtgtaccgccttgtcaactccatctacgttctgggtgtcaccaccgcaggctctgacatgctgcccctgctgtcaacgcctctcccgtcgccgacgctgtcaaccagtccgtctccgtcgtcgttgcagcctgccgtggcgtcgacgtcacccctgagaaggtgcaccgcaagtaccctgaggtctatctcgctctcga

SEQ ID NO: 359677 - DNA, 166 bp, Zea mays
gaaacatcagaaagaaaatatcaactagactagatcgaattttaaacatggcgcctcctcctccagcgctggcagaggcgactgctgccttccacccaagcctgtggggcgatttcttcctgacttaccagccgccaactgcgcctcagcaagcatgcatgaaaga

SEQ ID NO: 359678 - DNA, 294 bp, Zea mays
cccggaggtgggactgggaggcaccgtgtcgtcgtcgtcccctttcccttctctactccgccgccgctcgctcgccggtgaagagcaaatgctgctgctgttacggcagcggctctgttggcgccgcgtatctccgacttacctcgcgcctttgtaggatctgtggagactcgtgagtacgtgacccccacggtggatgaggataggcgggcctcgtccggcagcctgtgctctctgggacgggacgcatagctggcaccagggttatgtccactgtccaccttcgaatgttga

SEQ ID NO: 359679 - DNA, 268 bp, Zea mays
tgcagccacttcattcctctcgtctcgaagtacgtactttagaaccctagatgcagcgacctggatggtgtcccatcgctgccgacggcctcgtgcgcgctcctccggtcgaagtcctggccgacaacgatcttgtttctaatgttttaaaactttttacaagaacttgcatatttctatattggatgtcaggtgctcaagtatggaagaacttgtttcgaattaatgttttaaaaccttttacaaaaaacaaagaaaaggggggccg

SEQ ID NO: 359680 - DNA, 286 bp, Zea mays
gtcagatcgtgacatgtctaaccatactaaagctagctactgggaagagcttccttgtgggatatacagcatgcatatgaaagacattggaaagcatggtgcatgcatgaaggaagggtggattgtggaagttaacacacataaatggatggcttcttcattgaatggattgatcaaatgggagaggaaactcacagttcctaccatggagaacattcctgttgacagagggaaccatcagttgtctcagagcttcataagctcaagagaacctgaagaaaatacg

SEQ ID NO: 359681 - DNA, 116 bp, Zea mays
ctaatctgaaatgaaacgtcatccacaaataggcaatgtgcttatttaaggtttcgtcatgtacctgtattctacaatccactattgtttccaaagacagcatttgatccttgttc

SEQ ID NO: 359682 - DNA, 304 bp, Zea mays
ttcagctcgacaactatatgttgatggacgattttaattgtatgccgttatgcagattcaccacttcgttcacagtttgaaggtggcactcgtgatgatgggttcagcgagagaaatcagttgcagaaaccagaacctagcgacctggtacctggatttcaagatcctggtactcgccaaggagtcaaggctagaaccttaagctatgatgccctggtacctgaatttgaacgagctggtggccgccaagaaaataacgcaagtaccttgagctatgaagacgaacttttccgcaaatttaaga

SEQ ID NO: 359683 - DNA, 257 bp, Zea mays
atagaccgatcatttcatctctaggatgggcatctagggtcttgattacaaaagttggcatcagagctttaccatctcctatgtcaatctcctccaacagatcaaccgatgtaggcccatgtccgaacttgtcgagatcctaaattcctcaattctgtaacactcagtggacttcggcactctctatgcggctacagaacgtctagactcgaatgccaaaccgtccatgctatatgccacataaatgtcgaccaaag

SEQ ID NO: 359684 - DNA, 277 bp, Zea mays
cgcaggcagcatctgcatctctcgcccacctccactccgcctactgctgctggtcgtagagagccgcgacaggaggcccttgtgcccgctcgacggccgcatccacaccgtagcaaccaccactcatggcagacgtgcacgcacctttggtgcgccgtacgacgaagaaggctccagtggtctacttgacgacgttccgatggctccgcgtgatccacgtggtcactgctcattcaactctgatctctatcaacatcttcctgggcgccatgtgcgt

SEQ ID NO: 359685 - DNA, 143 bp, Zea mays
cgacgcggtgacgatagagctgcccccgcaaggacaacggacatgagaggcggccgctgataggcgacggagacggacgaccaagagcggcgtcgatctaaaagcgttggcggcggtcatggccaccgcggaccggccccgga

SEQ ID NO: 359686 - DNA, 111 bp, Zea mays
ctctctcctctccaaactctctcgagctctcacccgtttggaagtgtggttggagatccgttcttcccggcgtgtttccagcaacttccttgtgctgtgtgaaagcttgtg

SEQ ID NO: 359687 - DNA, 103 bp, Zea mays
gagcttcagaccgggacggctccctgtactgtccgacgcgccgtcgcggatggccgtagccaccatgctggcatcaggacgtcctcgttaggctctgactgcc

SEQ ID NO: 359688 - DNA, 235 bp, Zea mays
tcctgaccggaccccgatcccgccggcgtctcgcggaatcgcgcggtgcaagcctatacgccaccccatctcacgtcgcgccgcatcgccgcggtttccggctgctagtactctcgggagctcggatcagaagggcgggctagggttcgccaatcgccagcgtgggtactgccgtcgcggcgccggcggccgagtcgtacgcggcgagctggacgcgttcctgcacaagctctcg

SEQ ID NO: 359689 - DNA, 297 bp, Zea mays
  unsure (1)..(297): unsure at all n locations
aaatagtgattggcacttaaggangagcttttgacttcttctatagctaacctcaggtttctgtggacaatactcggcatctggaagatatgttcaacagatataaagaacctgatgctgatatgataatagtggaagcgaatatctccaatgtggaatgatctacagggaatgtgcatgcaaacctttgcatatagtgctgtacctgatagtacctattagtggcaccaactttccaactattgctgatgcatatattacacatttattggtacagttgatcctcaagatattgtc

SEQ ID NO: 359690 - DNA, 299 bp, Zea mays
ctcatgcactggtggcactaggtccagtcagtagcaaaaaatgatctagcttattgtttcaagaaaatacctgttgtttggaaatattgaggtggataatttatctgaggtttgcttttctaattgtatataattttggtgcagagcaagggctagtgaagatattaaagctttaaatggacaggattgtccccgtccaatctcttgttgtctatttgcaaacaagattatttccattgtcaagagtagaaataaaaggacaagacctttggaaatttggcctttgcgtgtggatatgt

SEQ ID NO: 359691 - DNA, 289 bp, Zea mays
tcaagtcctgaaaaactacagactagttaatcagactacttacgatatgtagctatcaccacttggaatgtcgtttactggcacattctgttctttcacaagttattggttatttcatttgttccagtttcgctttagggatgtatgctctgattttggtttagggtttagggaaaacctaatgagttccaactttaattacgccactggataaaatggtatgtatttcaaacagttgtgtggttcgtgtaaagcctctatgtgcatgtgtggttggttgctgcagaac

SEQ ID NO: 359692 - DNA, 292 bp, Zea mays
cacgcttacatgcgctcgcccttggccgcgtgtctttctcctccctcctctgccagcaccggcctcgccctggctatggtccgaccaacacctctgcgttgtctctgtgtctcggccggccgcgcgttccctgtccgtaccatcgccctctgtgtgcacggcaagctctccccttgtcgtttctcctctagctcgcaggatcggtcatcctccttctctcctacctcgccggtggagagcttttcttgtgctagttggtctgtccgtctcgctgagcatctcgccatcgacg

SEQ ID NO: 359693 - DNA, 215 bp, Zea mays
taactctggcccctcacctgctccccttctgtccagcccacgggagggcgactagggtaggggcgacggagtcccgcgcctgcaaatcaccatccttccgatcagcgcgagtccaggcgtggtgtgagcgcgccttctcagccgcctctctgcgtcgcttgccgactcgacaatgcagagtctcatctcacaacaatcatacgtactgacgagat

SEQ ID NO: 359694 - DNA, 278 bp, Zea mays
ttttggcttgttctcccactaacgcttggcgactcacgagtcgagggtttctctcctgcgcggcggctacctctctccacggcggcggcgggcgatcctgcagatcccgcggctccctccgcgattcgagtcagactcagatgggggaaggcacagagagcggcggcggggcgaccacagcgccgcctctgaggtatataaggtgctacaagtgcgggttctgcgacgtggtccggtccaagaagtgcttgctccgcgcccacgtgcttgagcaccac

SEQ ID NO: 359695 - DNA, 293 bp, Zea mays
tgtcacttgcatgcacgtgacgaacgccatggcgcttgccgttcgtctcatcggccgccgccggttcctcccgccgccgctcgccgccgccgttgctcacctctctgccgcttcccagagcccgtgccaccaccaccacccacttccgaccccctcgctcccgttgccccctcgtgagctccatcctttcgctctccactggcgaagttctcctggtactcccgctccggctccgggtctgatagcagtcccggcaccgctgccgcggacgctcgcggagaggacgtgtacat

SEQ ID NO: 359696 - DNA, 285 bp, Zea mays
gtcccgcgcagaggccgtggattactacgcagccacactggcccaggttgttggaagtgagaaggaggcgcagatgcgcatatgtgaggcttcgtgggatgggacctacgagttccgctgcgagatcgacgaggatgcatcgaaggagcttgcaaagatgcctggagtgttatctgttcaactagatatgggtaacaaatcagagaaggataatcacagcttgagtctctcgacagctaaccttgtaagcattagtgatggtgcatctacatcttcaagtgggaa

SEQ ID NO: 359697 - DNA, 147 bp, Zea mays
ctaatgtctcgcgtgggtgcgtaaattatacgtgcgacatggagatatggatacagtgggtgctgtcgtgtgtcatcggtgtgtacggcactccggatgatatgcttcgttccgttttactttccaacgctggtagataagctgacg

SEQ ID NO: 359698 - DNA, 285 bp, Zea mays
cctggccaggcctccggtggcatgtcgccaagagtgcatttgctcagggaacgagcttccattcatggcagcatcaaccaggtattcctggagttagacaggcttacattgttgtccattatagtttcaaacagtataccacagttgcttagctttgcctgggaagaatctagtttaagaaactgatagttcatcctaagctgataccaatggtgccatgtgccaaactgtgataagaacttgtggaagcaatgtatctttcattagccacggccaccgccgcac

SEQ ID NO: 359699 - DNA, 290 bp, Zea mays
cattcctgtaaagagttggagacctcctgctgggcaaatttcaagtcagtggagacagactaatctgtggagcatgtccagtatacagtcagatttgcagcagcgtctagcttttgagtttgataggcctagtggtagtgaaaagttacttcctgggcgcacttttattcatgcccaggaaagggaatctgatgacatgcatgacagaccaataactcctgcgggcatgatccacattatgagggagtcagatcccaatgggcatggtcagcccaccaatatggatccag

SEQ ID NO: 359700 - DNA, 242 bp, Zea mays
agtttcctttttcattccacgacatcccctgcatcatccttgccggtggcgacttcacctccacatcctgccagcggcgacttcaactccccatcctgccagcggcgactttacctcccatttcttgccggcagcaacttcacatccccttcagcactctgtcccaagatcaggatggctccagggaggatgggatcacgatgcaaaacggatgccctagcagacactactcctactgaata

SEQ ID NO: 359701 - DNA, 287 bp, Zea mays
ttagaagaagcttgaatatcatcgactcttctaagatcagcaacttgtgaaccaaactggatcttgaaggagaatactcgcagttttgttcacaagttgatgatcttagaagaagcttgaatatcatcgactcttcatgtaatgagatccgaacttctctcaagttgaaagaaataatgaagaaaatccttctccttgggaataatctgaaccagggaactgctagaggtgctgcagttggcttccggttggacagtctttagaaacttacagatacccgggcaaca

SEQ ID NO: 359702 - DNA, 160 bp, Zea mays
gttacctgattcctttgctaaggtggctagatgggtcattgcaaatacacttgtatattgacatccttgtttagtatattgttttgactacggatactgatggtcctgtcctgtcacattatttctaagctcttgccttatcatgggaaacaggctctaa

SEQ ID NO: 359703 - DNA, 142 bp, Zea mays
gttattgaaatgagatttctaagttatcaggatcaaaaacatatgctggtgcaacgctctcctcccaatatgattccagtgtaacccaacattaaattgggaggagagcgttggaccaacatatgttattgaaatgagattt

SEQ ID NO: 359704 - DNA, 293 bp, Zea mays
actttgagagatttgacatagcagatgatgagaccacagtcaatatcactcctgatgagtacccacaagttccaagtacgctgattccgtcaccacctaggcaggaagacattcctcaacaagaagaaccgtactacgctgccccctcccctgttcatggagaacctcaacaagggggaccagaggaccaagaggaacagaagatgaagcaaccaccgaaagcatcaaagcggaaagcacgttgggaagtcccacgagtaattatggacaataaccagatgatgatcccagga

SEQ ID NO: 359705 - DNA, 114 bp, Zea mays
ctcgcagcttgttgtcaaagttgcttcaggtccccacttttcaagtcacagataggaaaagcaacgctgaagatcaaacggagccagcgatttccgcacctgatctcatcaaac

SEQ ID NO: 359706 - DNA, 275 bp, Zea mays
gccaatcctcacatagctccactattgagactaaaggaaatcatcagggcttatggaggcagctttgctgcaagcttgctgaacttgccgagatggaagttaaacataggtgtaatcaagttctggaacttggatttcctttaggaggattagctaaactatttgctcaagattgggaaggtgatgttacagttgttatgccagccactcttgcgcagtattccaagatgatacaaaacccgtcttatgctgagcttcagaaggctgcgaatcaa

SEQ ID NO: 359707 - DNA, 291 bp, Zea mays
cgaccgtcccggccagcggcgacggcgagctgccttggggcctggcactccggcagagtcgcagagaacaaacggctgccacagtgccacggcttgctctgcggcgagccttgggcaccgaggcgcctcccatcctctaagctccaggattctcaagttttcaagttgttgcgcagttccttcttctcggggaaatcgatccggagagaatggaagagccggattgcccagaaggttccgttcccgaccgcggaggagagcggcggacggcttccctgccgctgccggccg

SEQ ID NO: 359708 - DNA, 239 bp, Zea mays
tgacaatgagtgaggtggacactggtagatctagtagcagggtcaaaggatgatttcttttaccaagtatgcttgcattcgtgaggcaaatcaatgatacattatttagagcgtgattggttgcctgctcggcccagcctgagcgtatccagtacattcaggcccatggcggcatgctaaagaggtgcaataggctattgtttggttactttgtttcatctcatgatggcccattagag

SEQ ID NO: 359709 - DNA, 202 bp, Zea mays
ccatcatcggcaacatccagcagcaggggttccgcgtggtgttcgacggcgacggacagcgcgtggggttcgcgcccaaaggctgctgagcgcccaggccggagtggtgaacccctcctccctcgagcgaggagagagagagaacgcgcgcggcggcgcagttaattaattagcgagtgattagctggtaatcaagtgagcc

SEQ ID NO: 359710 - DNA, 258 bp, Zea mays
ctgcatatgctttgggtgaaattgaggaaggcgctccaggtgatgtcaacctttcaaacatagcttacaacagcaccgttagagttcaaaggcatattcttagatataaaaaaccaggacagttcttctgttaatccatttcatgttgacttcactacctgttgtgtaaatggatgaaagcatttctgtttctatttgacacttgtgaataacattgcactgttctccaggtgcagatattgagaaggctggaattgt

SEQ ID NO: 359711 - DNA, 290 bp, Zea mays
caggcgtgtgccatcaaccaagcttgaaacttcttcccttctctttcccttctcctcccgccgccctcgcgctctcgcttcctctccaccaccgtcacagccaccgccaccgccacctcctctcgcgggggcaactgtgaggtgagggcgagacggggcgatgctggcgtggaaggagaaggtggcggaccgtctcgcccgcctcctcgccgactcccctgtctctccctccccttctcaggccgccgtcgagccatcgcaggctaaatcttttccaccagaacatttta

SEQ ID NO: 359712 - DNA, 293 bp, Zea mays
cccaaaatatctaaagaatatcttttccccctgcagaaaatatcaaacctttggatgtgtttgagcctgtctaccgtggggtttttttttatctgcctttacctctgtccatatccagtgaataggtgggatattttagcagtgagcagtgggcagtagagtatttgttggttttgtttgttgtctgcgatatgggatactggtgagctgagtatgggatatggatgaagtgcatcattgaggactagaagtctcgctccccattaataagtctcaaggtgagctggaatgtg

SEQ ID NO: 359713 - DNA, 107 bp, Zea mays
agcaatagcatcgtgttgcttgagggctcacttcgtgtaatttacagaatcagcctggtagcatgtgtagtgtaggggtcaggttcctaggagaattatgtatgtat

SEQ ID NO: 359714 - DNA, 197 bp, Zea mays
ctgcaatcagcaaggacatttgagcaagaactgccctgaaaacaaacatgacatcccatccaaagaggcaaccctttccagtagggtcgcgcccgtctggtaagagggtcgctgttaagttgcctgattaatccattctttcactgtgtctgcatgttgccgtagatgccagcagatcatgaagcgcccaattggtg

SEQ ID NO: 359715 - DNA, 184 bp, Zea mays
gaagaggtttggtaacacgagaattgtttatttatttgtataactattatttattcatgtggatagttgtaccctgcacaggttttaatcaatactttacttaatttacatggtaacaagatagagaggcccgcaaatagttaatctgggacaacatatctctgtactggccatagaggacaac

SEQ ID NO: 359716 - DNA, 294 bp, Zea mays
cttcttctgtctcctcccccttcctcacggtggagcgtgtgtcctatgttccgtccttgtccaggtggacaatccgatacaagcaattggggcatgcatatcagagaagccacgttctggcctttgctagtgcagatgtatgcatcttgcatttcgagtaggccatctattttttagggttggtaggattatgacatataataatgtttattgaacataactttatgtgcttttgaatttttttagaagtttaagttcaatttcttaggcctatatcccaaccaggataccgtt

SEQ ID NO: 359717 - DNA, 301 bp, Zea mays
gcgcgatgctgcaggaagaacctgaacgccgctatctacgccaactccctggtcgggatgggagtagcgtcgagcctgtaccattcttccagaggaggaatccggaggctcctgcgttgggccgactacactatgattgccaccacaactctgtgtttgtcgagagcagtaggcaacgagaacccaatttctcatggccgcttcagcgttgctcctgccgtttcagccactggtggtttcggctgtccacactggagtcatcagggggtgttcatttgcgagaagagcgtcgatggaaccg

SEQ ID NO: 359718 - DNA, 312 bp, Zea mays
cgatgtgctcatctcatgtgtggttctgtgactgttgagagagaggtgggcgaggcagccatacgaagttggtggtcggagccagatctgcttggatgcatagtgaaagggccggagatcggcacggcacctacctccggcggcgggcgacggctgcttcttctagatctggaaactaatgtttcttctccgatccagcagttttagcaaacaccatatatagcaatatgtggacatgctcattgtacctttccccctactaatcatgcaaaggtatcatctgaagaaagagaagacaggttcttggaagcc

SEQ ID NO: 359719 - DNA, 309 bp, Zea mays
gaactactctcaccattaactataacaaattttgtcaccaaaatttggtggctggtggatctacttaagaatcaaaagtcagacaaggtggacatcaccatccaaccggaggagcaggaagccatgaatgaacgttctagcagccaggtgacgcctgatgtctttgttcagttgatatagttgtctgattttttccttcttccaagttagaacggtctttcttgtacgtgtatttctacttcaccctcaacgaccgggtgctccgcgcgttcggcagccatgaccgcgtcacgtcatcaactttgacat

SEQ ID NO: 359720 - DNA, 307 bp, Zea mays
gcataaagtaagggaaggggcacaggtgcaggttattgaggatgatcatatcattatttgtggagtcaatagtcatctgatgtctatattgaaccaattgaataagtaccatgaatcatcaattcgcttaggtttagctacagcaaggaagcagaaaatccttcttctctccgatcttccaaggaagcagattgataaacttgcagatagcttggccaaagatttaaaccatattgatgtattcaccaagagttgtagtcttagcatgtcaacgtcatttgagagagcgcagcacacaaagcaaaat

SEQ ID NO: 359721 - DNA, 309 bp, Zea mays
ctaagaagcaagcaggacctgaagaagaaaaggaaactctagggaagatggaccaccatgtgaaaaaggctactataccagatagccttacagtgaagagacaaactgaagcttccagcaaagctctctctcattgtggaaatgatagaaagattgtcaggtacagcagcaggaaatatgatgactggagaagtaagcggacacctgatcacgaagagagcttcccacctgaaaagcaagtggaagttgcatatgaggagactgtagttattattccaagcaaaaagattctcataacgatcaaagcgg

SEQ ID NO: 359722 - DNA, 301 bp, Zea mays
ctcgagccgattcggctcgaggtgcctgcacaagctgaaaaagttgaaatatctatatatcacggaccgcagtggtcaactacacattggtggtttggatgcctgggtagcccctccaaatctccaaatattgaatacgcgatcgggttgctggttcaccacactgtcagcatcagcatggatgaatccatctcttcttcaggacctctccttatctaccaccgtgagggagttgcagcaggatgacattataattcttgggagtttgccagctctccgctactaaatctgatgattgttg

SEQ ID NO: 359723 - DNA, 286 bp, Zea mays
ggaagcagcagttttggatggtcaaattactgattttctggatgataacactgagtgatctctctcactggcctgggtgttggggtgtaaatcatgtcagttttcgtcaaaccacttactaatcgtttttaacaatgttttcaggtattgcctatcaggatcatctgattcgatgataagactatgggatctaggacaacagcgttgtgttcattcttatgctgtgcatactgattcagtttgggcgcttgcaaccactcattcgtttggtcatgtctacagtggt

SEQ ID NO: 359724 - DNA, 279 bp, Zea mays
  unsure (1)..(279): unsure at all n locations
cagcagcagattttactgcagcagcaacaattgcagcaacagcaacaattgcaccaacagcaacaaaatcagcaacagctaaataagatggctgcacaaatgccaaatctggcatcacatcagccgcaactgtctgatcagcagcttcaactgcaactgttacaaaaactgcaacagcagcagcagtcgttgctatcacaaccagctgttactcttgcacaattacccctaatccaagagcagcaaaagttgattattgatatgttctngcagttgtca

SEQ ID NO: 359725 - DNA, 288 bp, Zea mays
  unsure (1)..(288): unsure at all n locations
ccattttaagtgtattttattgataatgttttatctgcatcacctagcaaatggttgctttgtttttggatttatgtgatcctcttatgctttntcctcttataaatatatgtagtatgtactgctctgtaaataaaaacactgaatgcctgtggtctgtgcacaattatactccatgctttctattcagcttaatgcaaatctggtatactcagttgttaacagccagctgactattatgccctcagcctagggtacttgtagctgttgcaactctgtttttctaag

SEQ ID NO: 359726 - DNA, 284 bp, Zea mays
ggcaaaacagactcctaagcctatcaagtgctttaagtgtggaaaagaaggacattttgcgcacaactacaaagccaaaccaccaactcccttgccaaagcactcaagaccatttgctttcaatgctcattatgttctaagaaaagtagcaaatggacatgtcaaagttacattcctaggtccaccaggcaagagtagacctaagacaaatttgagttgcaagtctttgattgagaaattcatggtcctatgcaaaatagggccctcaaaattgaagcttgact

SEQ ID NO: 359727 - DNA, 271 bp, Zea mays
gaggatttggtcgtctgctgctactacattgactgtgctatgaaggccttcgcgatatctcctgcgcagtatattccaacacaccttcggattttgacttcaaacttgaaagtttagcccaagaatttgattccctatctgacttcgcggagatctcgccacaaatgttgacattgtcttcccagtgatccatgggaaatttggtgaagatggaggcattcaggagcttttggagaaagcaaatgttccatttgttgggacacctctaagg

SEQ ID NO: 359728 - DNA, 280 bp, Zea mays
caaacactgtattaaaattttgttgtccaacaaaatctattgcttccttttctagctattcatctttcgaaacctataactaatagatcagttatagataatattgcttcacacttttatttacatttacatttaacaaataccattactttcttgccacttctttatgaataatttttacatatacaacatgatgcaatacttgacgacgacaaggaaaatggtatagcagctacaattgaatctcccccaaaaaggttatactctgctacacaatatc

SEQ ID NO: 359729 - DNA, 218 bp, Zea mays
gaggaagaagaacgtttaagaaaagagaagcaagagaagagaataaaagaagctgagaagcaagctgctgatgaacagggaacacctgatgcctctccggatgtagattctaaggaaactcatgaccatgtgcaagaagatgaagacaaggtagccgaagagcatgatgtacatgcaccggaccatgatgatcatgcagcagaccatgataatcatgc

SEQ ID NO: 359730 - DNA, 268 bp, Zea mays
catcatcaggtttcggcgccggttacagcccgggtacgacgacgggcggcggtggcgtgcccagcggttacactccggggatgccgggcgccggttacggcgaagcgggaggagcggtgtcgcgcatcatgggagggggttccggcttgacggtgttgaaggccaacaaccccggtggcaactccatgtacgacggctacgacaatatggcgggctcaccgtcggcacggctccgctaccctgcggtggctgagccatgtcgtgcctc

SEQ ID NO: 359731 - DNA, 314 bp, Zea mays
caatattgaagagatgcttccgagaattaaaccttagacctgataagcagaagatcatattgaggctgatttgttccatattagatgcattccatttcatgaaacctgcaaatgatgcctcaggaaattctgatgctttgagtgaagatattgattcttcccttacattcttcttggtcacagtctcttctgataagcaacagtacatgcaaaaggtagtgtttccacaggttcaaaagttaataggatcagatccagagaaagtcaacgtcaacataaacctggtagcactgaacatacttaagttgctaccg

SEQ ID NO: 359732 - DNA, 320 bp, Zea mays
gtaaaaatgggcatgcttaagccaattggatcaatgtccatgactatagctttggaagtgttgtataccagcggatcatccagttgctagatgagatatgattctgtttcctacataagcagtctgaactgacacatcaagttccctcgcttctagttttcgtcaattatttttgttgaaggtgccgatttggagttggtcaggtatcctaatgcagatacagctagctttcttcatggggggtcatcgctcttcatcgtttacttgcaccgaagagggacattgaccattatcccttagccttgcatggtgtatgtagt

SEQ ID NO: 359733 - DNA, 314 bp, Zea mays
gaggccaggggcttcgtgttcggcccggcgatcgcgctggctattggcgctaagttcatacctctgcgcaagcaaggaagctcccaggtgagagattccatgaccatgcatgttctgtttttcttcttcttcttaacccatctccacactctgcactgtacccagctgttgcttttgtcgatctagtgcccagcctgtggcgacaccctgatcaagtatatgtttagcgaggagggttcttgcttagcccataatctctgacaccgccagagttgtttgtctggcctgcatgcagttgcagtcccgtgaatggg

SEQ ID NO: 359734 - DNA, 306 bp, Zea mays
ttctgatatgtggcgatagttatttttctgttaaagataaactgtttgaactaataacttgctgcagcttacccattaatttccataaatcatggtagagcaagatggtgtattgtaaatcttccttgagcctcacatggattaatacgatataatggttcataatttatccattatcttctaagaacccatggatgagctagtacagaactagatggtcttgcatgattaacaggcaagaagcatgaataatagcaatgcataactaggtagtaagaaatgcgaagagcatggaagtctcctaag

SEQ ID NO: 359735 - DNA, 161 bp, Zea mays
aggcgacaagatctcatggagagaagctatgcggaccccaggaaaggtgaagtcgtcgtgcgatggtggagatggccgatgggaggctccaccaaccctagggtgcggccaacaagacgctactcgccactgcgtgggtcggcagtgagatctcagggaga

SEQ ID NO: 359736 - DNA, 301 bp, Zea mays
taatcatggattaattaggcttaataaatgtaagttttcatctatgtaattagttttgtgattagactatatttaatactcgtaattgacatttaaacacccaatatgacacggactaaacttttagttagttgaaccaaacatagtcaaatccttgttcacaaaccgtggtcagtgcccaatgaatttgtttgtgctaaagttgtgggcttacaagttttgaacacctgtattggccatagggcctgtttgtttcggtttaatggccaaattttggctgttaaacgcttcgtttctcggt

SEQ ID NO: 359737 - DNA, 283 bp, Zea mays
tgctgtgttaattaatgctggacaagcaaatgctgcaactgtaagtgtttataagcaccatgtcatagtcatcagtagcagttatgaactcagtgactgatatttattgaagtgttaggctgactccagcagttcacccaaagcttacccataagcactgttttgcactgtagactgcactgttcgcagagtggagtttgaatatgggcatgagtatgggtaagttgttggagatagtcttagagtggacgcgctagcgagttcgcccaaaaggttaagctga

SEQ ID NO: 359738 - DNA, 287 bp, Zea mays
gcttcgacccgaagccgaaccgatcgagaggcccagccgccgcaaccggaggagagagagaggcggatacacaaacacgaaaccctagcaaggaagccctccacgcacagtcaagaagggagggggaggcgatggagtacccggcgacggccgccggatcggggagccacaagtactactacccgcagcagcactcgcactcacagccgcagcgcttcgccgcccgccgcgccccgctgctcggtgggtcaagcaatggatcccgcaggactcgcgtcctccggcgg

SEQ ID NO: 359739 - DNA, 108 bp, Zea mays
tccagatgagtctccgaaagttttggaaagtgacaaggccatggttcgtgaaaacgtacttggttttattgttcaagtgccccctttgttaagagcccagcttggaga

SEQ ID NO: 359740 - DNA, 281 bp, Zea mays
gagcaaataatggcaccccttacaatctgaacaccatcacacctgttggtgtcaataagaactcaagaacagctgaagcagttgacagcagacatcttcataaagtgggttctggcaatctcaatgggcactcatttgatcgtgccggtgaaggagccatgggattttcaagaagtggaagcggtcataactgtggtcaccagttaatgtggaataattcaaataacttccacggtcatcccaattctcctgtgctgtggcaaatcccggatcatttgtaa

SEQ ID NO: 359741 - DNA, 278 bp, Zea mays
atggcgggaatgcccaaccatgtataggccagggtggacaggcctcatttatagtgaattgaaggccttacttaggcctcctccaccttccctgctgctgctatgtcgtctagggtgttcgttgttttcaaggctacctccccaactcccatccacatactaatattattgcaattttggctttggcttgttgtaatcatgtctgtctgtgtgtgaactaattaaagggtttatcattatatacttttacaaaattaaccgcgtaaaatcaagtgtta

SEQ ID NO: 359742 - DNA, 272 bp, Zea mays
aacccccctgcctttttgctctcctgttcaccccttgtgcccgcgctctctcgtggcgacgacttgcgcgaccgccgccaacgccaggcacctaggtcttcgtcggtcctttcttcagagacgagcacccaacagggggctacaagattggttttgatggattatgacaagtctagaagaagtaactccaagaagaggacatattccaattctgatgccggaaggagaaaacggtaaaacactaggcatgatgacaatctatgttctctgag

SEQ ID NO: 359743 - DNA, 102 bp, Zea mays
  unsure (1)..(102): unsure at all n locations
agagcgctcaccgcaatgagcaattcatcagggcatgaacccagatgtctactagtccaccgaaacatagatcggnnagaagcagaaggatcatgagggagg

SEQ ID NO: 359744 - DNA, 271 bp, Zea mays
aaacaatcgcccggcctcctccccttccattctaggctccgcgtctcgctgtccccactccgtctcctccggctccgtctcatcccgatgccgctccttctcatcgtcgtcgtcccagtcccggagtcgctcccctcctctggctaagcgcatgtcaagctacattctgtgctattcaaaggccccaaggatgacgcaatggcaatgactatctaccaatggacatcgtggagctatcttccgatcatttgatgagaataaacctttgctg

SEQ ID NO: 359745 - DNA, 275 bp, Zea mays
tgaatggtaactgcaaacataaaattcttcttgctaatcttatcaagaactcaagatcatttaaatttagttggaggaattttttagagagaacccgtgaggaaaacattgcaaatacatctaatgaagcaggtgcagtaacctagtaacaaatctgaataacagattgttttatctaaaggtctgagtttgtgtaacatgcaatctatgcttatactgttttcacataagttaggaccttgtttattcttcctccctactccaaaattgacaca

SEQ ID NO: 359746 - DNA, 290 bp, Zea mays
tgaattccgaacctgcagctgcagatcacttagtctggttttctaactgtaggatcttatagtgcatgtttatgcggcttaaacccttgacaacatttcccacaaggtgaaggacctctcttgtacacattcttatgtatccccacacccctattttgcatgcttgtcagtccttaatctgcaaaccattatctagatttttaaaatgtgaattgaattattctgcaagttcatttagatatttttgaaaaagcaaacccaatatagattgcagtttcacaattcaacaa

SEQ ID NO: 359747 - DNA, 293 bp, Zea mays
ctaccgcgcatcctggaatcaaaaaagacgtcgacgactgcgagtgcgttggcacttggcagtggcacgggcgcgggcagtggcgccgatgtcgtcagcgctttccacggcagcacgaagtggacgggcttgcagcaaacggggcagcgcatgcggttctcgcggagccagtcgtccatgttgctcctgcacttggcacccttgcggagattaaatacaggaacatgacccctgaagcagctttggatcatgtacgatccattaggcctcgagtgcttttgcgccctcgcagt

SEQ ID NO: 359748 - DNA, 289 bp, Zea mays
tggccacgcaccagcagcggcggtcgcactccgcaccgatgttgtgggtgtagtaggtcgtgggctactggctcaggtggtggctgctgggtcaacgcacgctacctgttcgacgatttacctggccgccgaccgcaacttcgctgacatctctgttggcgcgctttcagaggagacgatggaacaaggggcaacgactctacaacctatttttcctgagaagaaatcggtgctcctctcctcatccactgatagtaaactcggaggtctgaaggccatcatctcgctc

SEQ ID NO: 359749 - DNA, 290 bp, Zea mays
gccagctggggaaaatgcttctgataaacaaaaggaaacagaaaactggatgaccctatgcaagcaactcagaaccgccatggttcacctactggtgctgttgctgaaagctgctctccctcagagtgtacggctttggataaactggaaaaagcctcacaaacagtagaaggtgcaagcagcattgttcaagatattgaagcactgtcaaccattctcacccctatcaaaatttggcttactaatactccaagttcaaccagggaactcaacattgaggagcaaatcag

SEQ ID NO: 359750 - DNA, 222 bp, Zea mays
aacttagtgagttcttatccagcaaataagattatgtaatccaggattacataggtccaaagcttgggacagcaatttgtttagagtcctgtataatctagctgtcacgtcgcaggactcacgtggagaaagatgaagggatctgcatcgtttagggtttaaaaaaaaaaaaaaaaaaaaaaaggggggccgccaactaataaccccgtcaacccgggaatt

SEQ ID NO: 359751 - DNA, 284 bp, Zea mays
agaatgcgtcagagagtgttggtgcaacgcaaaaaggtaacagaccattatcagtgaaggttccatctcgagtagcttctccaagaagacgacttgcatccgatggcattgatactatatctaaaagcatggattttgctgagaaagataagaaactcatgacagtgtcagttccatcacgtggaatgccaccaagaagaacagcaagatctgacagtgctgatataatgtcaaaaagtatggattttcctttacaagtgttttctacaagagagtactaggac

SEQ ID NO: 359752 - DNA, 132 bp, Zea mays
aaggctccttcacgtccaattgtactgctgcatgcctggagcaacagacctggtgttcagaagactgttcagcgtagcaaagtccagccacatggacatgcaagtgaacagaatgggacttacagtacatag

SEQ ID NO: 359753 - DNA, 280 bp, Zea mays
tatttgcatttgaatgttgtgcatatagaacatggaaaatgctatattatacacttattcagataacaatgaagataaggccacatgaacaaacttatatattgctatctgagtaagtgtataatatagcattttccctgttctatatgcatttgaatgttgtgcataaaaacgaacctcaattttttctactcatgtgatatgtatatatggagatctaagtgaagcacatgatgttactgtcaaagtgcttgtttacatgcattatatgatgatgaag

SEQ ID NO: 359754 - DNA, 275 bp, Zea mays
agcaacttgaaagaaaagagggtacatgcacagggaacatcattgagaagacttgggtaaagctcctaaaggatgctacatcaggaaggaaatgtaatggcatggaggagaccatacatgctgttatagataaggcaggatttgcctctggctaccccaaagatgcatcttccaatgtcgtagaaggggttttcactttatcttgttacgaaaacccagctatcactgcttgcagagaagtgctaatgaggaacccagcttcttgagtgaactga

SEQ ID NO: 359755 - DNA, 277 bp, Zea mays
gtctaggccaaatccaggggaccaggcactcgatccgcctgtgcccaggtgcgatgttcctgccccgactggcggtgggatgacgactgtgaggtatcgggcgatggcggatttgcgacgccagcgaacacagatgatgtcaacgacgtcagcccacgaaagtccatgattcgatgagattggggggggggggtgaggtctccccaagggaggagacatcacccctccatgggagggttggcggcgatatttagggagagaagatgaggggcgggga

SEQ ID NO: 359756 - DNA, 172 bp, Zea mays
gcaatgttgtaaatttgatatcggatcctgggaacactaagtcaatctttcacaacagctactgaaagattgacttagtgttcccagattgatataaatttaaaattgacacacagacaccacctaggctaaagggagagcaaacatctaagctaatacgagaacactaagt

SEQ ID NO: 359757 - DNA, 278 bp, Zea mays
agacggtgttgcttctccaccgtctcgtggttgtggtggtggacaatcaatcacgagacggtgttgcttctccaccagaccaccactacgcacggtcatctactgctgcacgctcggagttcaaggttgtttgcactgaggattctggagaggcaccctcgccttgtaactctgtttgagcatggtctgatgagtaatctttacttgtctaacgagttcgtacctaaacggaagcctcgaagatgtccttgtgtgtgtgtgtgcagaaaagaggcgga

SEQ ID NO: 359758 - DNA, 299 bp, Zea mays
atctaccagcaatattggtttgcttcggtatgtaaatcctactcatgagttgtacataagtgggcttgataccacaatatctgcagaagaggttgacagtataaacctaagccaaaaacaggggatccagtcgttgagtctttcatggactagagatgctcagagatctgtggaggacatggaagtcctgggaaagctagtgccacctgatactttaaaatgctttgagctaagaggttatgatagtatgagctttccaacatgggttatgggcatcacgctctatcttcctcgcctta

SEQ ID NO: 359759 - DNA, 302 bp, Zea mays
ctcgcctaaggtgtttctcggccgtcttctagtttctagccaactcaccgacatgtttcccatgtctgtgccccacgttcgtgtaaaaccagattacgccgctgtccgagactgccgtttgttgtcgttgtctttgaaattgtgatcacgctgccggcgtctcgcccatccgtggccaggacttggagaacgccgtggcgccgtcggtgaacaccgtctggaatgacctcaccatggcggacctagtctggagctggttgcgagcacgctcatgggttgttccgcttcgtggtgagccactg

SEQ ID NO: 359760 - DNA, 288 bp, Zea mays
atccggagccgcccagtgctcgcacaaccgctcccgactcgcaaccctccgtccgcccaaggggcgccgcaccatctccagcctccaggcctcgatccctaccggacaccgtggccctgctgtgttatctggctggagatccggccggagtggcattcctgctctcggtcaataagtactctggaatgtctttccgagctcaaatactgtacttctggagctggatatcagtattctgttaaggatacgcccaacctagggaagctgatgtgtctgcactctttcttg

SEQ ID NO: 359761 - DNA, 149 bp, Zea mays
ggtcactggtattttgaccactggtgcccactgaccagacccggtgctcggcttctccgctctcctcaatctccagcctctctttgtcgctcgctggccacccgctgcaccctccccatcaggtcagcagcgaggacgaatggagtacg

SEQ ID NO: 359762 - DNA, 290 bp, Zea mays
cttggtaattaattgcatttgcatcattaaacctggcttgactcatgtgttgcttgatagttcatttgttttgtctataaactatgtgggcgtcactctgtataggtccatgtacaattttccaattcttcctatcaagtttacaaaaacaggtgggtgcctgtccagctgtacctgactatgatttggggtgggtggggtctgaatctttttctttgttcttataatctcatggtgtagaatttctgctggttgggcctgatgacacttggaatctgattacttcttta

SEQ ID NO: 359763 - DNA, 135 bp, Zea mays
gtggatctatagcatattgtgactttggcatgatgggagatattccgtagcactatcgtgtggggcttatacaaatgcttgtacattatgttaatcgggactccttaggcttggcgaatgacttccattcactag

SEQ ID NO: 359764 - DNA, 286 bp, Zea mays
attgtcaactcacaaagaagaacctgaggatgataaatctccaagattggatttaagttcagtggaggatgcccagattatctccagtgcatccaactttcagagccaggattttatgctggagagctttcgacagagtgctgcttctttgcctaacagttcatcttctaacccttcaaatatcaatactggtgattctatgcctgtatattctgacataaatttgtcagttgatgctgtcaagcaatcagacttgaactcctggacaccaaaaaggccactgaaa

SEQ ID NO: 359765 - DNA, 167 bp, Zea mays
aagggcggccgaccttttgttttgaacaaggtgtatgcctcctccgatgagaataactagatcatgtaccatttgcagttcaaatgccatgggcctatctaaatatttgtgttgatgatgccagtggcaatttaccatgcatagcatattgtgggtagcacttatgg

SEQ ID NO: 359766 - DNA, 287 bp, Zea mays
ctcggatcttgcttccttcaggtacagacaacccttgtttttataggagttgtcagagaattgttttcgtgattaaacatgtgtgtttgtttagtgtctggtattgttatcatatacccttgtttttagttctatacattttccttaagcatgagtaatttgggggcatttttagtgaagcaattactggtatgtacatgcaattactggtatgtacatggttaatcaaataatttgcatcatggatgttgttttagtgattaatcactcagaaccgatttcctgat

SEQ ID NO: 359767 - DNA, 290 bp, Zea mays
  unsure (1)..(290): unsure at all n locations
ctaatgtgtcnggtgggtggtacaacttaaccgtgcgacattgagagctggacagagtgngtggtgtcgggtgggattggtgtgtccggaactccggatgatatgcttcgtcccgttttactttccaactctggtagatactctgacgtgatgtctgctccctgctgcgtgctcttgtctagtatctggactgctgccattgatgggcctggaccaataggcgtgggggttgcttcagtgtagggcgattttaaatggttcgagtacggacagcttggttggaatcctgc

SEQ ID NO: 359768 - DNA, 295 bp, Zea mays
ggcctggcgtccccagcgagggtgagggcgacgtcggggaccaacagccgtgtgtcctctctcctcgtgtgctccgtctgtctccacagttggtacaggccctctcgccaggtcgtttcgttgctttgaaccatcgaggatatatttttacatcctgctttttctatcaagatcaggtcgctgaagcacttggaacaatcgtagcttgcttttgaaacgttacatcccctaaaggaccagcacaaaaatttgctacatctaattggataaagtggcttggccaattcggtgagcc

SEQ ID NO: 359769 - DNA, 285 bp, Zea mays
  unsure (1)..(285): unsure at all n locations
ggcccgactccccggccccattcctgaccgtcagattacgatcgggaggctcaagcgcaccaactggcggcgccgccccgccgccggagagctctccggcgtcggtgcctcaccgtctcccgttataccggcgccttccgttcctcgaagaaggggggctatggtcgccagtcgtcacgcgctcgccgcacgagcaggagcacgagcagggactgctggccggttagcctccagatgggtagctgttctgcgcaacaactggacaagcgcngagggagaagggac

SEQ ID NO: 359770 - DNA, 290 bp, Zea mays
agccaattgtggccactttcagtgggcacctggaaagtctaaagagaagagctctaaagagaaacgtctgtgacttcatttttctcccaggaatccaggacattttgcttccaatgagtctggtacatcaccttgtcccagcatactgataacgtgggatgtatttgtggagaggtaagctgatcaagggcctgtttgggaggtctggctctgactggctccttgctctagtaaccggaggggccacaaaacgtgtcttcaccagctccccattgttttgaaaaggacag

SEQ ID NO: 359771 - DNA, 243 bp, Zea mays
tagccgccctagccctcagcgctttccgtttttacatatagtagcactctctcgctcgatccgctacatcggtcgcgcgcctagctctacaaagtttgaagctttgtagctctacatctacagagttcattagcatgaggcttcgcatttccatgtggcttacttggatagagcggcacgctcgtagtcgtcgtcgacgtcgtaatcatgatggagcttaccagcatctgacagtcacagctc

SEQ ID NO: 359772 - DNA, 288 bp, Zea mays
gtgaataccctgctcacgtcccggcgatcgcgtcggcggccacgtgctgtaacaacctggtatcagagctcgcgcgcctcggagtgggtcagtcgcgacggcgcccgttccagaaccctcggtgcagacccggtttgtacttgaggccatgcgagcaaggagaagggcgacggggatcggtgggatcggatgatggcgaagatcgatcggctgacggagaaggtcgttggagtggaggaggtacaacagaagctaatgatgcagtcggaattggcggcggctgtggct

SEQ ID NO: 359773 - DNA, 177 bp, Zea mays
cgacgggagtggttggccagactactcaagtttggtcatgggacaccggttataccaaacaccttccggtataacctacaggcctgacaggaaaattattgctgcactgtttgaagaagttaacgatcataggtatcaccaccacggaattggacaattgctgcacgcgaccagctc

SEQ ID NO: 359774 - DNA, 153 bp, Zea mays
gaaaccaatagcttttaacggtacagctgtacaaacgatcgattacttatgtacttttctgcagacaaagtatgtaaagcatgccattcatgtctttcacttgaaacaaaatcctgctggttatcattcaggtagtgttgttggacaaggctt

SEQ ID NO: 359775 - DNA, 289 bp, Zea mays
attcagtgtagcagggtagcaggggattcggtgtagcagagtttcagttgagttgagttcagttcagttaaaatgagttcagttcagttgctatgttggtcttcagttaacatcacaatgtttcatgcaggcacccccgaatcccctgcgtccagcacctcatccaaccatgcgttctgtaggttcaaagaagtaaaaaacggatgtcattcgtcagttgtggaaatgaagcactacgacttgtgcacaatgaatttgaatgaagtgttgtcgagagtagaagagatgt

SEQ ID NO: 359776 - DNA, 298 bp, Zea mays
  unsure (1)..(298): unsure at all n locations
ctcccgtcgctcctctcctccacgcctccctcgctcgctcgccccctcgtccggtcgtccctccctcgctcgtcttggcatccccgcaaggaatgtcccttccgtagcgtcccttgcttcttccccaccccatcctgtattagtgcgttctctgccgctttattttccggtttcttgggctctttcgccgccttggatcttggttgcctcatccggttcataggattagcattgaanggttatccaatattcagtgaaaactagctactgaagaataggagtagcaatacctttgatg

SEQ ID NO: 359777 - DNA, 160 bp, Zea mays
ttgagttcttgaagaaaacctattcaaaactcattttccccatttttttttaaagatcaaagcacacctcacattacctttggcaccattgttggttatggagcattggcctgtctaatttcatgcggaagggcctccagctgatgttcttaggtggtct

SEQ ID NO: 359778 - DNA, 267 bp, Zea mays
ctaataactccaagtcagctttgaatatggctgtcgtatttggacaatgcatcaacctcatcaaataagctcatcttaactcgtggtttgattttcggatgtgtgatcatagcatccctggcttatacagcagctagtaacatggttgagctttcattgcagtatactccccgtatgttttactactatcaggagctgattgttactgcggctgcctccgttcttctgtacatcacggcttcatgctaccgataaacacgagaagca

SEQ ID NO: 359779 - DNA, 137 bp, Zea mays
ctcgagccgattcggctcgagtaacgctacaggtggtccgcttcacttccgaacaaacctatcccgagagccgtctcctcatcaccgctgcttcattacctagacgtcgctattcatggcctacagcgacagccgtc

SEQ ID NO: 359780 - DNA, 243 bp, Zea mays
ctgcctgcaggtttaaatttgaagatattacagcttcatctttggtgttggttctcaaggaagctgtttcctcacagtatcatgctttcaaaggctataaactctggtactggaatagcagagaagcacctttcacaggagagcctgctgttttctccaaagaccaaagaaggattcttatatccaatctgcagccctgcacagaatattcgttccgtattatttcatttactgaggatggta

SEQ ID NO: 359781 - DNA, 220 bp, Zea mays
ggaggtagacttcatcaagcccactcatgacaaacaggactttgagaagtcacagctgttccagaagctgatcaaccgcctgaaggagatgactaacgagtactgggaactttacagtgacaagattggatacatgaaaaagccacgcgtgagtgcagctcctcttcctcctccagtaatgctgccgatagcaaatggcactgctgaaccatcagatagg

SEQ ID NO: 359782 - DNA, 191 bp, Zea mays
cgtgtccaggcgggggaggctggacctgcgcacgtggtggaacgagcagaggttctgggtgctcaacgccctcaccgcccagctcttcagctgcgtcacgccgcccaggagctgctcggcgcacgtgccttggacttcgacctcaccagcaaggctgccgtcgaggggatcctgtaccagggcggcgtgtt

SEQ ID NO: 359783 - DNA, 181 bp, Zea mays
ggtctatcacatataatctaatcagtttccatgagtaatacgggatctgcagtgtattctgatgatgtgtgttaattcgccaaccttgttatttcagacaagtgcttgttcttttgtgctactttgcatgtcctgttgatgttataccctgatttaaggctgatcttcatttcccttgcga

SEQ ID NO: 359784 - DNA, 208 bp, Zea mays
gcgcttggtcttttggttgtacttcttagcatgaagttgaaagttgtgcataaattttggtcgcatatatgaacaggaacatgttggagatggagtagagttgctggatgatgatatgtttgtgttgctattgttcaaaaattcaccaaactctacttcagtgagtgcacgtggatgcgaggagtagactgcctcgatggcgaggcag

SEQ ID NO: 359785 - DNA, 292 bp, Zea mays
caagatggtcgtgcatcatacttcttccatagaagttgtgagccctacatcgatgagaatgacgtaaataacttggaagagaattgggagcgctagatcgatcatcctggatgccacactgacgggttgcaaggaagtgtttgccctgtatgcagacatgccgagtgataaaagatctcaggaaactgattggagattacatcagtatcatttacaatacacagtgatggcagagtcagagatagtggcgtcagaaatattccttgcatcacggaacagtctgtgtgaattg

SEQ ID NO: 359786 - DNA, 287 bp, Zea mays
ctccgatagccgcatcctcccttgcgaaccgcgtgcgtcatggcaacacgggcgaggcggtggggagtctggtggacgcgcatcacggtgagacgaacgggggcaagggcaagggatatattttccatccggggcggatgtggagaggttcttcaaactctgtgaccctggtgagtgcgctcgatctctggtcttccgtggtttttctgcttgggtttcgttgctttggtgggggattggatcattggaagctaaatttggagaaatctcccttttctctgtctcct

SEQ ID NO: 359787 - DNA, 251 bp, Zea mays
  unsure (1)..(251): unsure at all n locations
catgaacaagatcgcctcttcggctgtggccgntgccaaacaacacctggttcaggactatttagcgaggcgacaggtatattccagaggatgcaggactgcagtcacgcgctgacttgttctcctacctcacgctgatcagagcatacatagaggctaagctgcacactgaggtagaagaaccatgtggacaatgctgaggagcgacacgacaggaagcgactgattctcgcggttttaaagtgtatatg

SEQ ID NO: 359788 - DNA, 270 bp, Zea mays
gaaggtcgtctgtaccacgccgtggatgcgccacccagtaccgcgccgtggatggcagacatcccaatcctatcgtctgcggattccgattaacgcgcgaacccgtgacatggttgtatctctgctcgccgctcgatactccagttccggttaaacctagcacccgccacttcgtcagactcagacgtcagtgacacgcgcagttgccgacggccgttgcacatccggatccggccaacagccagccacgcagtgtcgcggtcgtcgggt

SEQ ID NO: 359789 - DNA, 270 bp, Zea mays
gagtggaggagaggagagccgaatgcgagcgcgatccatggctccaaatcgaatccaaagaaactagtagaagtaatgcgggcgagggatttgcacccgctgtgctgcctccccgccgccgacggaggaccccctccgcctccccttggtcatgcaccgccggccgtggctgggctgctctacaagtggaccaacatcggcaagggctggcgcccgcgctggttcgccatccgcggtgccgtcctcgcctactccaagattccacacaac

SEQ ID NO: 359790 - DNA, 240 bp, Zea mays
  unsure (1)..(240): unsure at all n locations
caaagggcgaattgctgttattgatcctatgaaaaagcgggctgcaagatctggtcagggtgtcncacttggtggtattggtgcaggaagtattggaagaagctacaaaggtgatttccaacgttggcaattgtttccaggatcttgtgaagataatgctgtattggctaatcaattgtctgccttcatttcccgccaagatggtagaaaatattcgacagtgttgcatcctgggaaaca

SEQ ID NO: 359791 - DNA, 301 bp, Zea mays
ttcgagacgagatgtgatgtcgattcgagcatcgacacagcaatctcccttgcttcagccaacagcctgactatcttgcatccttcaatgtcagacgcagccttgctgctgatcttcttgaactgcttctgtgccttcttggccaagcgagcgtaagactgaaccttggcctgaagagacacgttgtctcctctcttgagggccagctgcatctcctggacgctgaccctgagctctgcaaagttctcttgcatggcgttgcagaggtcaagcaggacaagggagcgatcgagctcctcct

SEQ ID NO: 359792 - DNA, 309 bp, Zea mays
cgagggcctgtgcagcgccaagagctacgccaaggctaacccgctgctgatccaggtgccggtgctgggaaccaccaggaagttctggcggctatccgacaaggccacaaggatcacgcgaaagctcgcgctgatcttgaggagccaccacgccgtcggcaagcacctcgccacgcccctgcaggtgtctaatgtctggatcgggagcaccggtggcagagtcaagctaagatgcgtcacttcaccgccaagggcttcggcatcgagcgcgtgagagacgactacaggcagctgtccaggctcctgcac

SEQ ID NO: 359793 - DNA, 147 bp, Zea mays
gtggagatagcttccatatgagttgacaaggaccagaggccagatgtctcgtacgcgatcacccactacaggttgcttgtggagcagcttgagagatgcgatctgaacgtgtcgcagaacagcgttaagttggccttctggattaac

SEQ ID NO: 359794 - DNA, 105 bp, Zea mays
ccgtgtcgtaccatgtcaactcctaagtagaagaattgaagaaactaccagcagccgctgtctggtatacacgctgaaaaactgaagcggataaagaaagaaagg

SEQ ID NO: 359795 - DNA, 302 bp, Zea mays
agcaaagagacatggcactagacagcacaagccagagtgtgctgcagtagcatagtgtttctgccacatctggacatatgcgctgttattaagcctgcatcccaagccacatctgccatcttacacagcatacagacgagaatagattcattttaccactgcatcccagaccacatctgccactttgcactgttattaagcctgtgttacagacacgagacgcacagcgaagaaactaaccactgtaaagtacgatttccagcatcagttggcgtctgcatcatgggtgtactgcggctgag

SEQ ID NO: 359796 - DNA, 278 bp, Zea mays
cgtcatcctgcaccgctgcggcctcccgcgccgtcgagagtgagcgagttcgggagcgctaccgctaccagacatggagcttagctggagcgggagcccgtgtgagctggttgggagtcctagcaaacaggcattctaaccctaatcgagtggtgccttccctgagccgtcggctatggacaagttcctcgtgccggcgccgcctcattgtggcgaggagcccgcgccgcctcctaggagacaccggtggaggcgcatcatcgcggacttggacggcc

SEQ ID NO: 359797 - DNA, 294 bp, Zea mays
gtagatgcctctccgtgtttctcgcgcgaaacttgtttacgagttaaggcagtatgcgcatcaagctttgttaaatcaggagaaggtcgagttagcttggtgttgattttgttttaatcttgtcgcatcagttttgttacaattgttgcttagtcatggtaacgactcatcaagtgcttgttcttgtgtggtttattagtttatttgtatggttatggttgattagtatgatatttgagctggcggaattaggagtctgccgtgcagcagtattctggccgccttggcgatact

SEQ ID NO: 359798 - DNA, 272 bp, Zea mays
cgacaacgatgacgggctcggagggcctccattgtgatgcgatgcgaaggctgtggacagaaaataggaaaacgttttgggatttgtctcgtctgtccgctccgctccccctacatttctttgctgtttagtacataattctagatttacagaaaagacaaagtttactcttttctggatcaaaaaaaaaaaaaaagggggcccgccgactaatgacctcttcgcccggggatttattccgggccggttacctgagggtgtacaattttccc

SEQ ID NO: 359799 - DNA, 294 bp, Zea mays
ctgagacatgagcgccactgctgttgatgggcagcgaaaggtgataccatattggacaaatctttatcaaaatcctgggtcgactccagcagcagcacagaatggtgccacgaaggttgctaacaacaatcaggacttctcttctggtaccttcggttttggcacacctggggtgtacaacattagcccaactgtcccagcaaatggggccacgacagcaggtgctatcaacaacggcactgcatcaactgcctcttctactctcccctcacaatctggcaaagactatgattt

SEQ ID NO: 359800 - DNA, 299 bp, Zea mays
gcacgttgctgctgctggtgctgccctcatgccctggtggtcgactggtatcggtacccgtacttgcgtcgctttattttaccctatcttcgccggtgaggtttccggccgttcggtacaggtagtctatgtcaaacactcgttttatttcttgtcatactatattcttctgcttcctgttcgtaccggcggcgtgtgcctttgcggtggcgctcctggatctgggtgcagcgagcgcccgtcagcttctccctccccatgccacctcgtcaacgccccccggcacctggcagattcgc

SEQ ID NO: 359801 - DNA, 294 bp, Zea mays
agttattccagtcagtgcagttcttgcagacaaggatgtcatgctgtgtatcagaccatgggaacatggtagtatgaccaaatctctatacttttctctgctctcttttcttctttccaacttttctccgctttaaggttttccaatcaaggtataaaattgcttacgtgctgacgtcaaaacttagaattagggtcatgttcatgttcaaattgaagcatcaaataaccatatagtgccgccggccaacagcagcatcatagatcaatattgattgtcttgcaaagtgccgcc

SEQ ID NO: 359802 - DNA, 300 bp, Zea mays
caagctaaagaagctgcagtacatgcgtgctggtacaatatccctggcaaaggaatcatcaacatcttactcttcagcgtctaggttgccaaacctatgcaaatcttgtaaactagttggtgttgagatgccatcagggattgatgaactgacaccattgcacacgcttggtgttgtcaatgctggtattggagggggcaaggccactctaaaagagctgaagaagattacccaattgcgcaacttggagtgtccggtgtcaacaagaaaaataacaaggaattctgtgctgccatctca

SEQ ID NO: 359803 - DNA, 298 bp, Zea mays
aagagtgagagacactgtcaagataatgcgactcaatcattagatggtgtcgatagaaaaatgaagtcaaaagaagcatttgataactttgacttggttcattcacattttgatgaatacattaaatctgaggaagaagttgactttgataaaaaggtcgtaagtcaatacggcgaagactacaatagaattataggaaattttgctgcaagtatgaatcagaaaaacatctctacttgggacagtgatcttatgaatttagtgaaagataaatatggagatccagtgtgcgacgaga

SEQ ID NO: 359804 - DNA, 289 bp, Zea mays
gaactccaaaggggtgcgcccatttccttgtttgaaacctcggggcatttacaacttaaaggaggtaataaaagttatccatgtgagatttgagaaggcaaaggaagaggtagattcagatttggcagtttttgcaggagacttggttagcgtaatggaaaagtatgcagactctcatcctgagtggaaagatgccctggaggacttgctaatacttgcacgtacctgctgtgtcatgacacctggggaattctggcttcagtgtgaaggtatagtgcaagatttggat

SEQ ID NO: 359805 - DNA, 284 bp, Zea mays
ggtgtttttcagctttcattctgttagagtgttatttacgttactgtgtatatctcccttgtaatgggccttggcctacaacactcaactatatatatacactcccaagcctggttagggttagggtttcactctccaactcattcagtacatcacaataaacgatataattatcagaaaaaggtttgtgcttaacttaggaaaaaaagaacaaggaaaataggctactaatttatctgaagtaacagaaagggatgtgagtctatagagtttatgtagagata

SEQ ID NO: 359806 - DNA, 227 bp, Zea mays
acgaacacgaagatcccctggatggaggtggagctctcagaggcttatgatctagaactctatctcatactacggattccacagggtgaggagagatacgagcagggtcccaccggcgatgcgggtcccatcttcggcattgggagcaatccgcctactcggacacgaaggttctctgaggcggtgtagctatagatcatgcgggcaacgggaaggacgatagtacg

SEQ ID NO: 359807 - DNA, 286 bp, Zea mays
cgaaatattcaattaggcttgttttgttgttcagaagattttaaatatgctgcttcattcagttgactgaattttccaaaaattctcacaactaggattttttaaaatccgctttctgaaatcatctaaaagaaagcagtgactcacaaattagtagagaattttgtgaaattattcaaaaaaattcaaagtattcaatgagtcactgagatctttgaataatcgatgatgcttcattgctctttcaaacaagtgttacaggagtcatttataaaaccgtggaaaa

SEQ ID NO: 359808 - DNA, 130 bp, Zea mays
cccaaacccacgaaaccctcctgcctcgccgccgcttcctcatcctcccgccgcttagtcccggacccggaccaaccttcgtgaggacgggaattggactaagggggtaggatgccgccaaagaaagcgg

SEQ ID NO: 359809 - DNA, 212 bp, Zea mays
gtgcttgtcaccatttggggtcttcgtctaggattatttttattgatgaggattttgcaatggggtgaagaccgaaggtttgacaaaatgcgtgataatttggggaaattagcagttttttggattttccaggctgtgtgggtttggtctgtcagcttgcccgtcactgttgtgaatgcaagtgacagaaacccctcgattgaagccaggga

SEQ ID NO: 359810 - DNA, 211 bp, Zea mays
ggacaaccagttgaaatggatgctgtttcaattattgcaacattcccttctgaaattcgggaagaggtccttttgacatctcctgacaccctcttagctacactcacacctgcactagttgctgaggccaacatgttaagggagagatttgctcatcggtatcacagtagctctctttttggtatgaactccaggaacaggagaggtgagt

SEQ ID NO: 359811 - DNA, 293 bp, Zea mays
tgataaaagaagccattgaaaaaagggcatcttattttagaaagaactctgatactcttactttacaaggagttcggcgtactttggaagaagatctcaagcttcagaagaaagctttagatgcctataagaattttattactacaggagtggacaagattttgcaagaacctgcaaatgggacaaagaaaaaaagtaaaaatggatcttccaaggatactgacaaaacaagtaaaggctctaaaagagtccatgaagaatcagatagctctgaattaaatgatagacagagt

SEQ ID NO: 359812 - DNA, 170 bp, Zea mays
gtctcctgacctccacgctcgggtcgggcgcgtgaacccctcgccgccgtcgcagccgcagttccatcgccggagggtgagagggacgaggaagaggagggcaagatgaagacgaccaaggggggcaaggcgatgaaccccaccgacgccttccgcgcagagcagcggaa

SEQ ID NO: 359813 - DNA, 126 bp, Zea mays
cgctcgagccgaatcggctcgagccgtgatgaggctgcattagtagactcgcaaaaggttttcacaaagtttgtacgataatgcctcaaatagtgcttatgtctcctggcttctagcaaccttaat

SEQ ID NO: 359814 - DNA, 117 bp, Zea mays
cgagcaagtgtgagtgaggaggtttgcctgcccatctccatcggccatcgctgcctccccagtctccacatccgcacacattttgcatcctcgcggtggcaccagcgaccgctgggg

SEQ ID NO: 359815 - DNA, 304 bp, Zea mays
agctatttcaatgagctcataaatagaagcatgatccggtggatagagctctctagtagaagcaagattcgagatggttgtggtattcatgatatggtgcttgatcttatccgcactttgtcaggtgaagtaaacttggtcacggtatcagatgtggagcagatgatgtaccacatcatcatcatattcaccagtcagaagcattagcgctcgaagattagccttccacaaaaaaagaagcattgaacacaaccctggcacagaaataggacaggtgagatcattcaatgctttcaactgctct

SEQ ID NO: 359816 - DNA, 145 bp, Zea mays
ccagaattcattgatgatcaatatatggagaagcttgaatacatatcattatgtgatagagcttttgtttgcttatgtcatctgattgggatgataatctgtttatcttaaaattagtaactaatgtctactacaacttctggct

SEQ ID NO: 359817 - DNA, 150 bp, Zea mays
cccaaacccacgaaaccctcctgcatcgccgccgcttcctcatactcctgccgcttaataccgcatccggagcaaccttcgtgaggacgggaatttgactaagggggtaggatgccgccaaagatagcggcgccatcgaaggcggattgg

SEQ ID NO: 359818 - DNA, 137 bp, Zea mays
ctctaacctcaaattcttggatcctacgcacaatgtggctattggtgtcataacaaagtcattcaactgaaaggttgtgtccccgttttttccattgaacaatttgtcaaaatatatccgcctgctgtccgatttca

SEQ ID NO: 359819 - DNA, 107 bp, Zea mays
accaatctcttcatttggccaaagcgaatgatggcgaggagcctgaattactgaggcgtgcctccagcggcgacgccagcactcactctgatgcgatacctgcaaca

SEQ ID NO: 359820 - DNA, 290 bp, Zea mays
atcgagtatcacttggaatgaagaagtcatactttgattctgatctgactgctgacacaaatgatgatgaaagtgctcttatggacatcagcgttgcccctcagatggttgaatatcataacagaaatttagttcaccctaaagcagaaccaagggcttctgttctgcctcttcaggtttccttggatgaatcggaaggttccgacctagaggataatattagtaatacatgtcttgaaattgctaatggaactgaagcaaatgctaaaaagagtgataaacagttaaag

SEQ ID NO: 359821 - DNA, 111 bp, Zea mays
aacgcgggaccttggtcctagctacagctggctcgacataagggcagaatgcggatttttacaggcctgcgaattgcgttcgatagcttcctcatgacacgatgaatgaac

SEQ ID NO: 359822 - DNA, 273 bp, Zea mays
atccattgttagaggttcaggcggttctgatgtggtgtggtcatcatctctagacagctcaggagcaaatgacagggaatcggggtggaatgccccctgctcctagaaatgtcatatgtaatgctggcatctacaaggctttctggtcagtttcggtttacattgttgtacaagagatagcagctattgtgatcccactgttacatgaaccccagctcccccagaagtattagtgtgtttacttgggtaggttatgaattatctactgtagtg

SEQ ID NO: 359823 - DNA, 275 bp, Zea mays
gcggcacaccgcgccgcttcttctcctcctcctcctcctcctccttccgagccgagagaaaggctgctgccagagggacgaggacgagcgaggatccttccgagcgatggagcagtacgaggtggtggagcagatcggccgggggcctacggctccgcctacctcgtcctccacaaggccgagcgcaagaggtacgtcatgaagaagatccgcctctccaagcagaacgacaagttccagcggaccgcttaccaggagatgtccctgatggcaag

SEQ ID NO: 359824 - DNA, 99 bp, Zea mays
gcttctagtacgtcgtctacggcggccccgaacctggcgtctgccctacgaaccgcaccagcgacactagaatagcctcggcgccgtcatccctcgcgt

SEQ ID NO: 359825 - DNA, 265 bp, Zea mays
atgatctggagctttgaaggcatagccacctgttgtcagcagctgctgccgtgttgctagaataaagttggtggcgatcgatcgatcgatctgtggtgattggtgtccctctctgtgtgtttgtgtttagttcccagtgtttgtgaggaagtcagttatgtttgagtgaggggggggggggggggtaattcccctttggggaaaacccgaaatttgcaatggggaagttttccaccccggggggtaaaaccccgaaatgaaaccg

SEQ ID NO: 359826 - DNA, 105 bp, Zea mays
gtttcatcagcctctaccaaagagcctaggggttgtaatgtctttatatttaaaccactaaagtgcagtttctcctgcactcttgttactccaccctctcttccc

SEQ ID NO: 359827 - DNA, 281 bp, Zea mays
cttggagaatccagagcttcaacaagccttcgagaatcagtatctagatggtgatggtgatgataatcaagatgctcaacctgttattgttgcctagtgtgcatgtggccgtgtaggattttatcattgtatctgtatttcgtatgtatggctgtattactcaactaaactctcgaaacattgaactgattactatttttgagctggttgtactcttttcccttctgaccaaaggtttttaatgaggcagccacaaaacagctcaattttatttggtcata

SEQ ID NO: 359828 - DNA, 281 bp, Zea mays
atccagtgctattttgctaaggatacagtcagcaggctgctgccagttatgactatgacggttggtgcctagttgaaggctagttgtaccatatcttatgctggttgctctctcttcaactgggcactccggagctagagagtacacatgcctcgactttaagtcctgcatttttttgtgatgctacctggtttgcttcattatgcgctttgtctgcattagaagcttgttttcataaattgcattgttgttctcctcccaggaatcctcacctactatag

SEQ ID NO: 359829 - DNA, 283 bp, Zea mays
agcaagcaaagatatactttgcaaaggaaatttcagatatgtacgcggagctgcgggaggcagaggcacccaggtcgaagttgtaatgatcaattcaaggagaagcgacatatacaggcttacagatcatatgtctagaagaaacgtaatctttttactggcgtagcaaataatggttcctgcaaatcatatagatgaatgctgttttcccttgtccaacgtgccaagccacgttagcctcaacgaaagatactagatagagagaagaaaaagatattctgca

SEQ ID NO: 359830 - DNA, 273 bp, Zea mays
gtccagacccctctcctctcacgcgtcccgcgagctccgtcaccgccgccgctggcgatatgtcatcggtgacccgccctcagcgggaggccgactttgcacgcttctcgtcgtccatacccatcgtcatcgacaacggcgcttctaccttccgcatcgggtgggccggcgatgcggagcgcgcctttcgttccgcaatgtcgtgcagatgccgcgccaacgcagcactggtgaaactgtctcaattgttggggacactgaccatctctaatg

SEQ ID NO: 359831 - DNA, 133 bp, Zea mays
agcggagttgttgggttgggctcccatcgagttctactccggtgtttcttcgtacatttctctccagccggtgtgctcagtttggatatctagtattgaagtggtttagagagattggagaatgtataaattc

SEQ ID NO: 359832 - DNA, 279 bp, Zea mays
tggggtgccatgcagaggtgggctgccatctcaagcctgctctcgattgcactcatctgttctgtcaagtgtgagaatacagtccaggaataagtgctgagcatgagttaggctaagctaggatttctgcacacagagccttttatggccgccatgctattgcttgacttggtttaaatacagctagatcatgcgttggatcctgggaagctgtggagcaatactaggccacggcatgctgacgcttctcatggacaccttactttctgtctttaattg

SEQ ID NO: 359833 - DNA, 298 bp, Zea mays
caagctagcaccaagtagtagttgctggctctccaacagcagcagcagcaggcagtagaagctgcagagacaagatagatcgaggaagaaggccgcatttcgagctagcttagctatagagagcgggcgcagctagcaatggcgaacagcagcaggaggtgtcttcgtgttcatgaactttgaccccgtgtacgagcgcctcagagctgagcggtcgtccaaggaggggtcggccacgctggacgcgtacctgagccacaagcacgacaagctgctcgccaagctgctccagcctgac

SEQ ID NO: 359834 - DNA, 289 bp, Zea mays
gacgaatttcttctccaaggccgacgcttgttttccccctacttcatctcctccacgctgcaaggcagtaggcaagtccctgcatcctgctcgacctccgcctcctgtcgtcgtcctcgtcggcagcaagccgcgccggacactctgtgctttggcgcgtcgcgtccaggactcccatggctgcctccctggcgtacctagcgcagagccgcgacgccagttcgcgtagccacgtggatctccttgcgtcgcgcccttggcatgctcgacgtaatgccgcagcaagtag

SEQ ID NO: 359835 - DNA, 219 bp, Zea mays
aaattatgctttacattgtaatatattgctatttaactatagatcattgttgagagatcacaaaactgaacaatgatctatagttaaatctcaatacataaattatgctttacattgtaatatattgaaatatggttccgttatgctccctccctctcatgtgttttgtgccgtttttctaccgtgttgatgtaatagatgaaagaaatgcatgttctc

SEQ ID NO: 359836 - DNA, 272 bp, Zea mays
caagatagtagtgttcagccaatctttgaaatcaccagccatacactgtcaaagttctgacagctttgaatgcatgcacagagtgtggccaagatttcattttggattctatgtcaagatatatagcagcagatgtcagggatgctgtaaacatagtggacgagttataccccgactctaacatgcaaattgtgcggatgttcattctgctgtcatgataatccttctacaaatggagctcattacgagcacggatgtagtcaggaatctct

SEQ ID NO: 359837 - DNA, 290 bp, Zea mays
aaaaatcccgtccctatccgccacggcacactcatcgccatgcccgccgccatgccctctccgccggggccgcctcctcgcttctatccctctccgctgccacgctccgacccagcagccctccaccaccgccgcccgcggcctcctcctccgcggccgtgctccccggttgtcaagcgtgtcccggacggtggcgggtggctcctctgtcaccagtccggcccccgcgtggcgctctccacctctatggacggtctccgctggagcgccccagtatcccccgacccact

SEQ ID NO: 359838 - DNA, 284 bp, Zea mays
agaggctcagttgctgttgctgccacttcgtccgcctgtactagatggtcctggtacacgaccacgatttacacgatatgcacggaaatcagtcaacttatcagggaacttgacaaagcaaagctcagatcgatgattggtcttgcacataagatctcaaattataaaaatattcttaggtttctgctcagcagccaacacactgtgaggattaccaccagtagagaacagagaattaagacgagtctcttcagcaagtaaatcagacaacgccttagccattg

SEQ ID NO: 359839 - DNA, 283 bp, Zea mays
tggatcatgttgcttctatggctgtctcatgtttgatactggacattagaatatgctccatgtagaaactattactctgaaataatgtttagatgggtatgtaggtttgcactttgcacagatatatcaatgacaataggatgatgacctgattgagtttagatccagtaaaaacattatttcagagtaatagtttctacatggatcatgttgcttctatggctgtctcatgtttgatactggacattagaatatgctcctttcaagttattgcgtaaaagaa

SEQ ID NO: 359840 - DNA, 180 bp, Zea mays
gtacgtcgctcttcagctcgcgccgcaaacgtgcgcgcaacccagctggcatcgacgcctgcaccggacgtcgatgccgagctacttcggcaccttttacggcgatgagcaccagcaggtagctggtaatggagattgacagcctcagagtaggatttgatcgagttgctcagcaacgtt

SEQ ID NO: 359841 - DNA, 138 bp, Zea mays
ctcccgacgctggcaatcccctcccgtgctccgccatcagtaatggtctctcgtcgtccgacacctcatgctgaaaccgatacgagatggagtcccatgatgatcaggccggtaatcggcatcgatctcggcatgacc

SEQ ID NO: 359842 - DNA, 257 bp, Zea mays
atcacaacagcttttacctttgtgtgcaaaagcaatgcaagaaaacaacgcagagctcaccagggagtctgttgatgttttcatttagtgcttaactcaaaatgctgagtcgtataagcagtgggttagcgtttatcttatctataacgttaacagatctgggggccttatcattggtggaactcactgcgatgtcgggtttactgggcgcaagattatcattgacagctacggtggctagggctttcatggtagta

SEQ ID NO: 359843 - DNA, 153 bp, Zea mays
acgtgtaagctcgaggagtcgacgttcaagttccacggtgcggcgagagctcgcagccatggagagcaagagcccatggtcgctgcggctgctagtttgctgcgcggcaatggtggccgtcgcgcttctctcccagcaaggaggccaggccgc

SEQ ID NO: 359844 - DNA, 269 bp, Zea mays
ctcgagccgtggaagaaggttctgagcttccacgcaagggatagcgctgcggccacaaagggagggcggcaacagaagcagcaggaagaggcgataagctgcagctcgggcaagctgagcttcaagtgggacgtgggcagctcctcctcgtgcccttccatgttcttcaacatactctgctgtcgtccatgagccagcagagtatgttgaagaacatggaaggagacgaggatgaggaggaagcctgctgctgcaggacggcgcagtgg

SEQ ID NO: 359845 - DNA, 265 bp, Zea mays
tctcgacgaatcggctcgaggagaaacatccggatattattcccaatagctcagtcccatgaaggaaggttttcttatagttcttgctcatcagatggattcctttcgtccaaagagagcactatacagcaaagtagcatccacaaccgtgacaagtgtaatggagcgccctgtgcatgtatcagacgaaacatcttatgaagctgcccctaaggcacataaatcagcagaggaccatgatgatagatcgatacctccacttata

SEQ ID NO: 359846 - DNA, 143 bp, Zea mays
gcggcgcgcgtgggtcaagcagctagctttccagctgcaactagtagtctggctttgggctttggcagtcgaaataggagttatctccccgcgcaccggcagataagatgagaccgaccgcctctcattttgattttggcatc

SEQ ID NO: 359847 - DNA, 293 bp, Zea mays
caagagctaaggcacagccgttgggacggccgaggacgggtcgttgagtatgctgatgaggagtactccgtatctccaggcacctccgaattttctagccaggtggaagggcagagcaatggtgtgacctccaagggtgggtatgtatcagagtactcccatactggtccagcccgaagagaagcaaacaatttgggtcctaagaatcgtgcagcagctccagcgaggatgcgataccaacatgacagccattctgctcatgtcccgctcgagaggatgtgaatcaacacgta

SEQ ID NO: 359848 - DNA, 153 bp, Zea mays
caaaatataagggattctaggtgtacaaactctataaaatgtaacattcacatgcatacctaccaggctaccgttaatgtccatcaccaatccaaacatgataatcaaggagggttacatgtgtcatttgttttactatataatatgtcctaa

SEQ ID NO: 359849 - DNA, 156 bp, Zea mays
gctcaaccgctgcttgcattcgctgcatgtactctgccatgatgttcaggcacttgcaattcccatcttttgctcaccgagcggagacggcagttacagcgtgtcattgcagtaggcaagtgcagaaccaaagatttgggcggcaccagcatcacc

SEQ ID NO: 359850 - DNA, 290 bp, Zea mays
cggaaacctcatgatggtcagccttgccctggcgggaagcagcttcctccatttattcgagtgctgaacaaataacattttcaaatgtgttcaatgaattaatgtattgttgcttatttcaaaataattagaaagatcacttagcagggctgaatccaaattccctatggaatatcaactaattaagttggaatcttaattaaatgattaatggaatagacttctaatagatgaaattagctatatttctctctattccatattcttttcgtggatttgtgtcattgacc

SEQ ID NO: 359851 - DNA, 149 bp, Zea mays
attcatgtgtattgcaagcgagagctcctctcccactgccaccaagtaggcactgtccagagcgacgtgcgctgtctacctgtgtgtgtgatgaccacaaccagcaagtgcaccccagcatagccacgacattctagggagttgctggg

SEQ ID NO: 359852 - DNA, 100 bp, Zea mays
cacgcgcctcgtcttccaggccctcgccgccgacgtgtccggccgtaacggagggtgctacctcgatatcccgtccgatgtcctccaccaaaccctccct

SEQ ID NO: 359853 - DNA, 131 bp, Zea mays
attgaagtctgacactcttgctctacactgtatgtttcgccttggggggaaaatgaccaagtatttcctaaggttaggataacgcaatactgggattttcagatgcgcagagcacgccagaacctcagcac

SEQ ID NO: 359854 - DNA, 290 bp, Zea mays
acgtaatgatggaaaatcacgcaacaccagatgacgtgatccatgagatgactgctgcacaggtcctacagaagcaactgtttgatgcacacgaaccaaatttactggatgaaaatgatatgcatatatttggatcaaaaccgatggccgacccattggacttggtctgctgtagtacttgcaagaagccagtcaaagccagccaatatgcaattcatacagggcaatgtagttcagggaaggtaaacacaaatggttcagtgggtgtggatcatgccaatcctacaaag

SEQ ID NO: 359855 - DNA, 292 bp, Zea mays
acacagaatgtgtctctcagcattcacagaatggaagcccatgggatatggcttctcaacggagtgtctctgtgccctctggaatcgatattccaccaaatggagtctcaccgtgttcttcttgtgctgattctgaggtttcttctgtttcatggttttgtggctctggggatagcgctatgatgcatggaagtggaaaagacacatactttacaagaaagagctgttatactcgctgggagcgattggcatcttcaagaaagaatgggaaaatactgccaaatcaatcagt

SEQ ID NO: 359856 - DNA, 290 bp, Zea mays
actcgagcgtgcttgctgttctagtgttctgcgaaaccgagcacccaaacggcgaaaccccaacttaagctatttgtattcggatctaatatagctacaattgtatacagccattgtgtctactaatttcggttttcgttttaaaaattatgcggctgttctttactggatcggccccattattcgtgctgctttggtctttgcgtcctggagcattaatttcccttctgatttgggtagaggatgatgcttctcgccaagctcggggcgccgagcgttccaggttgttt

SEQ ID NO: 359857 - DNA, 244 bp, Zea mays
cctcgatccgcttctcctcctctgcccgcctacctggagcggggagcgggaagcgcggcggcgggagcccggcattccgatccgcttctccgcgcgcaacaccggcctgccgcgaatgattcatgggaagccctgtacgtgactactggatccactaccaagctcttcaagttccaggatccattcctctttatcgggcaagagctcttggcctctgtggattatcaggctgatgcacaactcg

SEQ ID NO: 359858 - DNA, 287 bp, Zea mays
ctggatgatgcttcagccgagacaccaaccagtggaactgggaagctgtcttcccatgccgcagaagaagcggagacatggtgcccgtggctggtcggtagtacacagcagtttctgtactatctccctcggggagaggtgttctctatgcatcctggttgccagttcctaaactacggtaacggaagcatatcctacacagcgttggacgcacagacagttacctcaaacaagcagcggagcggccatggacggagtcgatcgaaacctccagcagcggcctggaa

SEQ ID NO: 359859 - DNA, 285 bp, Zea mays
agaacgcctcagttgttcctcttgctctatcatgaatgcttctgttatacaatgggatgtcgttctcttggatgtgccaaagttttctctccccttagtctgaataacaattcctggtggatgtatgtatgtattctcttggatgtgcgatggttttccccttggatgtgcgaaacacatttactcctcaccgcaatctgcgcctccactctcgacccctcctccttcctcctctccctagggacccttctccccaacacgcaggggtagcgtaggaggtgttgt

SEQ ID NO: 359860 - DNA, 248 bp, Zea mays
tcttatccgccggtgatcggatcggatgctcgcagtacacgatctctgctttcttctcggcgtcctcgcagtttcgcgttgagccaagatagccctagcttaaaccctccgcctccgccggcatgctgcgcctcctccaaaccctcctgccgctccgagcgctacgcctcaacgcctgtcccggtttcgccagtggtctccggctcctcgtctagggcctcgtcggccgcgtcctcggactctgagtc

SEQ ID NO: 359861 - DNA, 152 bp, Zea mays
agccgcgattgcgcggtgatgtcactcgacccgatcacctcttcagatctccccggccggttcatctgtcggatcctggttgtcgctcccatgtcaagcttggttgacgtgcccgcgacagcgctacgtctaggagctgcactctatcctgg

SEQ ID NO: 359862 - DNA, 279 bp, Zea mays
tgcagagctataatcactatctaaatttacacgagatcttttgctcccatcattggagctgttgttatctgttaccatgttatgtgcatcatttcggttgatggcgaagagagtgccagatgtgctccagcttgaagtccatttcgtcatacctattgtggaagctctcatttgacgcttcgagaagcatatcaccatctgcttcgctcgatcggaccatgaacaatcatttgtatatgccttgaagaggatgaccttgtggttgtctgtggaccattg

SEQ ID NO: 359863 - DNA, 278 bp, Zea mays
ggtgtgattctctgagacagcctctgctccaaatgtgtcagcttatgctccatcatttgctttcaaagtgggatccagagaaacaggataagctgacacatttggtgcagagggtgcttcagagaatgacagctgtgcaagtgcaaacttgaggggatttacactgctgcttgtttgaggtgtttgttgttggccaaagacatcaaaagatgcccaatcaccaccactgacagaaggagcacttttcctttgttcaagaacaggctgtggtgctactg

SEQ ID NO: 359864 - DNA, 270 bp, Zea mays
agtggattggagtggagatcccgccggaagcggtggcaggaaccgcccctgctgttgcgggttctgcggtgctgacatcggtgaaagatgaggaggatcaggcttgcctgtttgcttgttatctttgtgcaagtgcaatgggcggcccttggaacgcatgatgtgtacatcgtgatcatggaaggggatccggacgttagctacagacgcggtgtccaaggatttccagcaaccgctgtggattcggacgaggatattgatctaaccagc

SEQ ID NO: 359865 - DNA, 278 bp, Zea mays
cgacgccgacttcctgctgcccccgtggctctgcgctctccagttccttgggaaggaacgcgcgtgggaacggccggggatcaggacgattaaggacaacaaggaattgattcgagcacctttggtggctggggtggtgacgttgtgcaggccaaacgggctcggagatctcttcttggttctaaaggatccaaccgactcaatcggtgcttcagttcacaagaaagttcttttggaggagaataatggccatgatatctcaattgggtgtgctgttg

SEQ ID NO: 359866 - DNA, 285 bp, Zea mays
gttagtatatagttcggattttgtatgactaactggaaatgtatcatggcttaagtgtcgcactgtcaccatagtagaatgtaccgtgcctgctattggtttcttgtcatttttcatgttatcgtccaggcaaaagttatgctgcttcagttacggcattaacatgcgaatgcaaactgcaaactgatatctagtttcttgttgtggctgcttgtacatgccttcattgtcgatgacttagtaagcatatatatctgctacaaaagattttaagtaacactctgt

SEQ ID NO: 359867 - DNA, 152 bp, Zea mays
cgccagccgatcccctctacctcacggcgccctctcccatggccgtcggcactcaccgcaatggacgccgatcttacttcctacagtacgtcacgacatcgtatccctccttcccgtggacgcctgctgcacgcgttgtcactcccctgagc

SEQ ID NO: 359868 - DNA, 229 bp, Zea mays
atctccgccggctcaacctcaacgcgggtagcacgaccaccaccagtccaccaccacgcccacctcaccctctctcctcctcttctatagtcaaaccagccccctccttccacaaaccttcgcagacggggccaaccggcaaggacgcagctttttccgtatccttctgggttctaacttctacttctttccccacctcgccttcgttccgaccgaaaccaaatcgcga

SEQ ID NO: 359869 - DNA, 278 bp, Zea mays
ataatctgcaagcttcgttttcagaagcatgcagtagcattcaacatctttctcaaaaacctcagtctatttctgctgagaaggctgatgaaagcactcgtgttcttggaaatcttgaagtggattgcggagaagcaggtagaaaaattcaagtgaaaattgtgcagtctcagaagaagggcaaaatattggaatcgacatggaagaacgaacacgagaagacaatatatcaaatataaggttcatggatcagcaaccattttacttggacagtgcca

SEQ ID NO: 359870 - DNA, 270 bp, Zea mays
cggccgtgatggcggcggctgcgcgtcatattcggcaacaacaactgagtttggagccacgagatctttgtcgccggcaacagtcccggagtcgcacaggttcggatccatggaggcacaaatcactgcatcggccacagatacgagtcgcctcctcgatcttccttcgctagatgttctgcttcgccggcggtcttgttgctaaaggcgaccccgcactgtgcatccgttccaagccaactcctccaccagtcagttcaatttctacag

SEQ ID NO: 359871 - DNA, 263 bp, Zea mays
agcagatcgacggcttcaccgcggatcgaccagcagatcaacgccgcccttcagaccctcaggattcaactgtatcagctcaagatcaatatttttttaaatgagtaagcttgcaaatatgttctcggctctttgtctggatgctgaagcaatgaagatgttggccgagctgaagtaccacaggcgtcttccagcacagacaaaatgctgcagcaaacctgataaaatgagcagatgacccactgcagtaactatgagaggca

SEQ ID NO: 359872 - DNA, 270 bp, Zea mays
catcagcctgcttgctcttgcttacattgttaccatcgtgaattcttacctgttcgaagggcaccctatcttatgaacaatcctagcttgtaccatgcagaaggcccagtgatgtttggtgcacagaactacaatacaagaggcatgaatggtatgatgcgacgcagtcacatgagggccaccctgagtaaacaaactgcacagacttgtgaaccgattgtcaatggcgctccttttactatttgctacaattgctatgaagtgctgcag

SEQ ID NO: 359873 - DNA, 241 bp, Zea mays
gtaggtcgccgcctcttttcctctccactcgtccgcgggacgcgacgcgacgacaccggagggttttctgcggggatttgtttgtcgccaactcgccggcagccaagatgaggccggtcttcgtggggacacctggactaatgacacccccactcggagctcgaccgcctcttctaacgctacggcagggtcgagcgcatcgacatcaagtcagggaataccagggcaaaacatagcttcc

SEQ ID NO: 359874 - DNA, 265 bp, Zea mays
gcaagtttaaaggatatccacacagttaaattgaacaaaggatttgggaaagctaatattaagcgacaattacaagatgttgctgaaggggtagcagcatcagttcttcagccatcctttcctgaaaaaccagctgcattctctgggatcacatcgattcacatggagcagtaattgatgtgaaagttcagggtgaagggaataatcagtcagacaaaacaagccaggggattcaagtcttagatgacatcgataaacttcagat

SEQ ID NO: 359875 - DNA, 264 bp, Zea mays
gaactgaaccagaacacggctgtgacgacggcggcgatcagttttgacgctggccggagtgaaactgtgagcgtgatatcgtgagtctaacatctggtattcggagcgaggctggagcccacgcacgactacttcacccgagctcaggcgaagggcgtagcaatggcgccgcgcggaacgaagaccgatggcgcagatcatggctaaaattgaggaaggtaacaaggagacccatcggcgtatggagaccgtccaagcctccct

SEQ ID NO: 359876 - DNA, 219 bp, Zea mays
atactcagcatggttgcggggacagtgcagataccatttgggagaggtcagtcgacttctctttatgccgatgtggtgatgttgattgtattgaggtctgtgatatcagggagtggctgccaaaatcaaaaatggactataagctgtggaagcttgttcttttgctaggagaatcttatttggcacttggagaggcatacaagaatgatgggcagcttc

SEQ ID NO: 359877 - DNA, 273 bp, Zea mays
gacgagctttcacctcctaagctccagagcgatatcttctcggcgcagtcaagcatgagaccaagtgctagatccctttgggctaagcaaccatttgagcaattgttcggcatgtcaagtgcagagctcagtaaaggtgacttcaatcttccaggcagatcaggtggcgtggccaaggacgatttctcctataagggatctgagacgaagcctcttcagtccctcaggctctgcatcatgaagctccttaagctagagggatcagggtggctg

SEQ ID NO: 359878 - DNA, 152 bp, Zea mays
cccacgtgtccgcccacgcgtccgggacaaaatttttcgttgtatgcgaaactggagctccaaacatggaaatgctgctgaaagtgatttatgagctgtacacggacttcgttttgaagaatccgttctatgagatggagatgccgatccgg

SEQ ID NO: 359879 - DNA, 171 bp, Zea mays
gttttgagttctgacctttcaacttgcagatgctaaacatactaaacaagtgtgagagaaatactacagacatttacgaatgtcacacattttttctaatactgattcatatcatattacaagtatactctacttatatttcccttatttttagcggtggagttcaattgt

SEQ ID NO: 359880 - DNA, 282 bp, Zea mays
attaaagtcggcgtccagtccgtcggctgctgctacgccaccgaatccgcatctcctcgccggtcgcgcacgggcaaagcagcgatggcagcagcgacggcagttggcggacacgacagggtggaggctgcggcgtcgtccgcgggggctgtgctggccgtcgccgttgcctcgcagagcttgataggcctgctcgctcttgcggttcaaactgtaaattgtgtagcagaaatatataatgaagaccagcaggaaatatacaagttattatatggaagaatc

SEQ ID NO: 359881 - DNA, 275 bp, Zea mays
aaacgggaaaaggcccaagcaaagcgcggggatgatctggatccccatgtcagagatgatcttattgtacctgtttcaaatttccgagggtcccgccttgcatctggagcagtaccttcaccatatgaacagaatggatctcagagagaaaggtacaaccaaactcggaaagctccaagagtatcatcatcaggttccagcattgctgctgctatcgttgaggctgaacaagatcttgaagcacaggagcgtgaaaataaagaagagttgaagtc

SEQ ID NO: 359882 - DNA, 274 bp, Zea mays
aaaaaaacagcatcagggcggtacgtaatttccctggccggttgcggccgacgacctcttcgagagaacgaacgattcttcctcccgtttgcttcccctgcccgcactctgcctcgtcaatctcgctccgcgtcccgcttccgctgttgctttcgtcgccatctcgctccggtccccgccgctgctccaagtgggagccaagtcatctctctggccgaagatccaggttgagtcggcgtcgccggcagaggcaagagactccggcgcgatgtcg

SEQ ID NO: 359883 - DNA, 278 bp, Zea mays
cccacgcgtccggcgactcggcgcgtaggaggaagaactctccctcggcgcggtggcggcctctcccacaacttttcctaattgaattcgatctcccttccctatccggcatcagcgcgcaccaccactagcgaatcccgtttggtcatcaagaagacgtacggctgtctccaatcgaagttccagtcccactccaacatcggagagagagcacatgtcagtctgacttgcgaactccttccctctcctccttcccccaggtcaggagtcccagatcg

SEQ ID NO: 359884 - DNA, 150 bp, Zea mays
cctcgccctttcccctcttgcccgagtcgctagcctccctgccccgcctcctcccgtggaccacttcctccaccttcgcttccatagcaggctaacagctgagcgaggtcaactctttcggcggcggagagaaagggtgaggatcgggga

SEQ ID NO: 359885 - DNA, 314 bp, Zea mays
gcaccagcagcggtgacagagaattcttttcggcgcatattccccggttacatgattcggctcgcttgcttgggctctcgctcttctctgcttttctagaattgtggctcgtccgacctcgagtgattctgcagaagtattcattctactggcgtgctgagcaggtgcaggagctctaataagtctagtgcgcacttcagtcatcagccaagtgattgaaaagggcaagtcagctgaaatattggttccgagggctctgtagttgcttatccacgctcgcctatgcctttgcgctgatcttgacaactcaaagc

SEQ ID NO: 359886 - DNA, 322 bp, Zea mays
cccgaagcgaggcttgcctcattgcctgtctcgctctcgcgcgaccggagcagagcagcagtacagagtggagccaggtcgcctcgcctcctcaactccctctgccccagccctgtgcgccatcgcgcggcccacacgtgcggcttgccggattcgcgccgacgcggcagacccagacaggtcagcttcggatcgaggaagaggaggcggtggaagcgaggagtcaactaaacttgccagccatggacggatcggccgcggagctggaagcggcggaacgggtggtgatgcgatgggagtatgggactcgcccttggcgtgc

SEQ ID NO: 359887 - DNA, 318 bp, Zea mays
cccacgcgtccgaaactcccttccctccatcggtccatccatcctaacagaaacaggacgcgcacgagacgaaaccgccgccgcccatggccgactccggcgccctcgtcgtgacggaggcgcggcagcagcacccgctgagccagatcgcggcgagcgggacgcaccggctgctgctcaaacagtgggtcaaggaggaggacctgctggcgcgccgcgtggcgctacgggaggcccgcctcgacggcgtccgcaaggagatcgccttcatctactgagccttcttcgccttccacgccgcttccgtgctgctgctct

SEQ ID NO: 359888 - DNA, 313 bp, Zea mays
catccctcgctctctctcgcgcgcgcgctcgtgctccttcgtgctgctcgccccgcccccgccgccctgccctccccaccgtcgtcaccggcgtggggggaacgacatggtaagcgactccgacgtccgcggcgcgacccactactctccttcgcctagctcgccaatgattctggtagtagtactagtatccacacaagctagctgattctgtttggggggcagactacttccaggcgccttgcggacaggaagacagccaagttccagaagaacatcacgaggcggggttccgtgccggaaaccgccgtca

SEQ ID NO: 359889 - DNA, 273 bp, Zea mays
cgattgtcccctagctgggatggtattgtgctgatactgtcatcttgtcatttcttgtttggctgacctacactgaatattttggtttcatgtttctatcaaagttgtttagcatggaaacgaatctggagattacttgtcggttcattgggtattaattcatcataattatatgacatggattcctagaccaaaatttgggtaattgtttattacggaagcttggttgttaaagtttacaactgtcgaacagctttagcacaagatgacaag

SEQ ID NO: 359890 - DNA, 102 bp, Zea mays
cacgagtaccgcctgatcagctgaccgcggacagccggacaccatcacatcaaacctccaccgccgtcaatataagcgacagctgcaggagggcccgggccg

SEQ ID NO: 359891 - DNA, 316 bp, Zea mays
aacattttccccccattattttcttacatgtttgtgggtttcgttctccattcgttacgatgaaatggtctgatgctaaatttgggagatggttcttgtgcacttagcgtggcctgttgcggacgggacacttttggtggtgtggaaccttaatccaactgggtcttgcaagctgtccatgtaatttctgcatatccctgtgatgagcattttagtaatctgagagtgctcacggtcacttggtgctccctcctcatcgctcacgatgggagaggttgaaggaaccaatgtctctgcactacattgctgagatgtg

SEQ ID NO: 359892 - DNA, 248 bp, Zea mays
cacactcttgcaccgagctagcagccaagatggcgaccaaacacctggctctttgcctccttgttctctttagcataggcatgggcatggccaccgctgctgcaaaccgcaaactgggttatggccccgggggatgacgtggcggtggtggtagcggtggcggtggaggcggtggttacggaggaccaggctatgggtccggatcagggtatggtgatggcggtggcagcggaggtgctgctggaggg

SEQ ID NO: 359893 - DNA, 253 bp, Zea mays
cccacgcgtccgatctcgcccgtattcgcagctctccgcttcttgcatctcaaactctcaatacgtctcgtctccaaccactcaactacagcgcgtccgatgacttcctcggtcaacatgatgatgcctcacgagatgttccgccggaccagtgccgctccggcgccgcaccaaacggtctccgtgccggcgccagagaagctgcggttgtcggaactcaactggaatggcgacctgggcgaagggggcttcg

SEQ ID NO: 359894 - DNA, 251 bp, Zea mays
gagcggagtaggtgggcggggttctcctccactcccgctccagctttctctggcccgatcgatgctacattcccgcggcgagccgctcgccttcctccgcgggccttgggctacccaacccatcgccgagccgcctcgcgcggtcccccctccatcttcgcccggctctctcgcctcggaggacggacagagaaagagaggatgagaagggactcctcgacccgcgtcccgcgctcgggctattggaccga

SEQ ID NO: 359895 - DNA, 118 bp, Zea mays
ccgtgttctccgtgctcaacagccggacccgcatcgagccggacgacccggacgcggacaggtggagtcggtgcgcggcgagatcgacttccggcacgtggacttcgcgtacccgacg

SEQ ID NO: 359896 - DNA, 261 bp, Zea mays
tggctctatccccgtttggctcaagcagctgcccagccttgtctaccgttcaaagcccaaacgaaaaaaaaaatactcaaaccatagcttcgtaaaccctcgccgccgccgccgatgacatcggaggagcacccctcgtctgcgtcctcggacggcagcaccaccatcagctccgacgaacatcttcatccctcgccatcaccttcgacgtccttcgactctcctcctgaatccgacgactccgccgcatcctcgctgctc

SEQ ID NO: 359897 - DNA, 263 bp, Zea mays
ttcacatcgcatcaagcttgatttacttcgatccaagaaagccacctgctaatcacctcacctgagataccaaacgttcacgaaccgccagccgaagcctgaagccacagctaaggagcgagatccatggggaactcatacagcgggggtggctcggcgccggcgccggcggcactggaagtgcgctgcacctgtgcttcttcctgctggtgctgctcctcttcctggcctgctcgtggtacagagctacgagtcggccgcgg

SEQ ID NO: 359898 - DNA, 295 bp, Zea mays
gcctacattcctgacttcccctcctacgcgcagacgccgtcccaccgccgggatgccgccggcgatcccaagcctggtccacccgtcccgtgtgcggattctccacccgggcggaagcatattcacgggccggtggtgtactggatgctgcgggaccaacgtctcgcggacaactgggccctcctccacgcggccgaactcgccgctgcgtccacccccgctgcgccgctcgccatcgctttcacgctattcccacggcctttcctcctaggcgcgcacctccgccagctaggtt

SEQ ID NO: 359899 - DNA, 307 bp, Zea mays
ctctaatacagaggttggtattgtatgttagtgtaggatgcgctgctcgcattgcactgttattgtgcttctgtttggtggaaataaagattggtcgaaatctgagggccagattgaaagccatataactgatgggattggaggggctaaattttattttttgattaattttaaataagaaggagaatctagcccctccggtttctcgctcccaatctagtcctgaatgttcacaagcccccatttgaatttagccgggtaaccccattaattaggaggtctattgaggcgtttttatgggtatgtg

SEQ ID NO: 359900 - DNA, 302 bp, Zea mays
agcttccttttaaccgttcacagtgatttatttccactctggttgtatgacagttgggacctagtttagagcttctcaactagtccctccggttcaaatatatcttgttgtaggattactgcaagtcaaagcttttttaacattgatcatcaatacgtaaagaatacacagacaaacaatgaaagatagttgtacctagattcatccttagaagtactctcagtatttaaatattgtaatttaataaaaaaaatggtagtccaagttgtacattgcaaactgtggtttttccaaatgtcatg

SEQ ID NO: 359901 - DNA, 295 bp, Zea mays
ggctggaactgaagcagaaaatgtttatcatgttggacaagtggtcaaatgtagaattatcaatgtgatcccagcttcaaggaaactaaatgttagttttgtcatatcccataataggattgctccaatagacactccaaagttgggcagtattgtctctggagatgtggaccgggttagtcctgcagctgttgatgttagtgtaaatggcatctccaaggggacgatactgaatgaacatttggcagaccatcatggtcaagctgctcagttcaagaatgtgttgaaacctggg

SEQ ID NO: 359902 - DNA, 298 bp, Zea mays
ctggcttccatgtgtacactcctttaccagatccgaccgacgaatgaaacttggcttttttttgcatccacaatgccgcagcttggcacatgttcattgcctggagctgcaatctatggcacttcaactaggagatttggaggtgaaatcaagtaggatttgtcagtatacatctagaagcagggcatatcatgagatcgacatacctctacggctctacgaaaagttggccatggccactcaaccttatgttttccaaggccgtacggaaaatgttatatgtctctgagcaatgatt

SEQ ID NO: 359903 - DNA, 298 bp, Zea mays
gctgttttaggtgaggaggtctacatttttgaagtaccaactaccagcatagggtaagggatcatgcaggcaaccgtaagactgtctccagcagcgtcctctaaattccgtcctctaaagattaggagtcacgcacagaagtactttttgaaggttcaaaagaatggaacaggtgagcatttgcccccacctaggccaaagcgaaaggctgcccatccatatccacacaagtcctcaaaaaaggcccttcaagttgtcttaccacaacaagtttcgcacataatggagcaaggctgtg

SEQ ID NO: 359904 - DNA, 190 bp, Zea mays
cccacgcgtccgcccacgcgtccgagctgctcacgtgtcacgctcagctcggcagctcaacccagttaggtcagctgaaacaccgtgttcctcgtctcgcgtcttcttctactcctccctcgttcgcgttgatgcgagcgaaacagatcaaaaaggagattcgagagagagaataaaaaacaggaaacaa

SEQ ID NO: 359905 - DNA, 288 bp, Zea mays
gaaaatccctggaggtgagatatatattctaatattatttgtgcacggaatggttcagcagaatcagtagctttttgcattatttcggttacccaaggaagtttgcaattgaacgaaacgactccccttctggtctcataaacatttactgttttattcacaactgggcaccatgcttttcctgagttgaaatgcctgaacttctgaagttaggagttaggatgcatacaaaagttgagaaacatttgtgattaagaccatcagttttcatggaagttctgtgatctt

SEQ ID NO: 359906 - DNA, 287 bp, Zea mays
ctcgtccagtcgtccggcggtcggcctaagacagctgcccagcgcccagcagccgcgacaaaccagcgcaacgccccacgacggagccagcgcccagcgactgagccgcgacggagccagcagcccagcgcctaagcccgaagttccggtttcttgccttcgtggtaagttcatcctagataagaacatgcattgtcctatcacagtcatgttacgtagctagctcttcttgctattcgtttccagttgattggatctcttgtctttgtcatgttgtccccatcgac

SEQ ID NO: 359907 - DNA, 269 bp, Zea mays
tgatttgcaccttaatgcacctgtttctgttgattcccaaaaccaagaacaacacatgacagggaaggaccatttggcagtgtgttctagaatctttgctactcagttacagacggacactgcaaatcctgctattgatcataaaccaggaactgcccagtttgaaccatctgcttccttgccccagaattcaggcaaggatgctactgcactaccttctgaggttgacaatgctgctccaaatagggcatcaagccggaggaggaaag

SEQ ID NO: 359908 - DNA, 279 bp, Zea mays
cccacgcgtccggacttcccgagggcgcccggcccgagagcaccgagcacgcttctcccaaactgcactgctccgtccacggcgaggggaggctgggacgcaaagcaaaaaggcaataaagccagcggccaggggcaggaccaggagccggcgtcggtggaggctgaggcagaggcgccgaagcggccgcggcatgggggttgtgcggacacgcagagcctggaggccgaggtagtagagatgcgcggcgccgtgctgctcgatggcgcgtggtcgtgg

SEQ ID NO: 359909 - DNA, 122 bp, Zea mays
ggacgcgtgggtgcgagtgttcttgtcctactacctgctggtccaacggtggatggcgtccgagcagggcggaggcgtgttcgatcagggggggcatagcgctcagctcacccgcctcgacg

SEQ ID NO: 359910 - DNA, 167 bp, Zea mays
gtggatggtcagtatgtcagcaaagaaccatattactccagtgcacttccaattcaggatcctagcacacctggcatttttgctcagccaattgcatatggaactgaactagtacctgcctactcatgggacccttttgttcttctggatgggggtcagggggaaac

SEQ ID NO: 359911 - DNA, 285 bp, Zea mays
gcaggagaccaccccaatcccccacggacattcgtcgcgaacccttatctgcacgccgcgccatggccgcagccgccgcggtcgcccacctctccatccacggccgcctccgccgctcaccggagcatcggccgtccatcaccaccaccaccacctcctcctcctcttcctcgtccgctcaccgcccgtccctgctgcggtgccgcgcgttcaagcaggatgccggcgacggcgacccggctgatgccgacgcgcggaaccgatgaaggggccgctgtacaagct

SEQ ID NO: 359912 - DNA, 289 bp, Zea mays
cagttcccttcccacattcccacacccgcctgccttccttcccgtcgccttcttccccgctcctccgtgtcccactcccgtacgtgatacgccctcgggctcggagaaggaaaagcccgctctggcaccagctcctcgcatcgcatctcccctgccagggaccaggcatccctcgtcccggtacgtcgtgcctcctcacctccctttttccaaactctcgtctgctgctttacttcgccccgcccagccccgctggcgaggttgagtttattggtgctgccgggaccgg

SEQ ID NO: 359913 - DNA, 287 bp, Zea mays
cagccacacaattattgcttgccagtactgaaaagagagactcatagtatgttgcgatggcctcctataagaaatgctaccatttgttataaaaatgcagaatcatattccttttggttcaccaaataactagagtttcttcagaaattatgaaacagcttcttaaacatgatgataatgatgttttgtcttacataacaatttatagtcttacatttgtctgttgcctggttaaatttgggtatcagctatcatttcaattaactgtaatgtaaatttttttccgt

SEQ ID NO: 359914 - DNA, 290 bp, Zea mays
actagttctagatcgcgagctgccgccctttttttttttttttaccaaacaacttcaggaataagttctaaaaggtaacagcagccaggttgttgatatccgtcaagcccacggatttgacagccaaactgcctcagagatacaaaacagcacattacaaacaactccagcaatataacacattacgatttacgcctgcacgaatgcacgatgctacaaatgtttggacctattatgtccagctagtgcattctgcctaaaaaacatctagcgaaacaagggtcgcaacg

SEQ ID NO: 359915 - DNA, 146 bp, Zea mays
gtccttacaaggctgctcctttttcacggaaagacattgactcgattaatgatgagacattcgggtcttctgaattatcaaatgaggatagagcagaagaagaaaggaagcggagggcatcttttgagttgatgagaaaagagcaa

SEQ ID NO: 359916 - DNA, 246 bp, Zea mays
cccaattctgaaataagagaacctttattactgttcactcagaggacccgcctccctgaattcctcgccgccgtcttcgtccaccagaaccatggcctccgacaccgcctcggcagttccgtcgtctgtggtctcagctgccgaggagacgctcggatataccgaatccgtaagggaccatctctcccatctgctcgcggcggcggcggcggaccccgacgccgtggccgagctcccaccccttct

SEQ ID NO: 359917 - DNA, 99 bp, Zea mays
gcacagctaacccaatcccaaatcaatcttccatggcgccggctaccttgctactggcgagacttgccgttgcgtgctcgctggcgctcggcgtcatgg

SEQ ID NO: 359918 - DNA, 272 bp, Zea mays
tcttgctcagcttcttccccacccacccccaatctattccctaaccctagtcgccatggaccgcgacggtggcccggcgttccaccggaacgaggctatctccgccgtgcaggacgtcgaccagtactacggcgaggacgacgatttcgacgagctctacaacgacgtcaacgtcggcaacggcttcctccgcaatgcccatccgccgccgccgcccgcgcagagtaatcaccaccaccagcagcagctccctccaacgctcgcgcagagaa

SEQ ID NO: 359919 - DNA, 262 bp, Zea mays
cttcgtccttccccaatcacctcgaaacactacccctgtcaaatcgcccactggtcaccaggccgtgcaaaagtccaagctttttcgacaggaatcctcctccgcttctgcttggcttgcgatgcttgtttgaatgcgcgggcctgcggtgaggcgacacggcgccggacggttgcatgctgattgatggtagccgatggagagtagacgaggagggtcggtggcagaagatgcgagcagggcgatgacgagctttgggcca

SEQ ID NO: 359920 - DNA, 157 bp, Zea mays
gcgtcttctccacctacggtacggcgcttggtgccttgcgagacatggccaagaacgcggtgcaaaccgtcaggcgcggtgctgtgcgtgggtggtcggtcttgctgtggcgaagtgggcgttcggtggtcgtttcgtcgacgacgaacaggctggg

SEQ ID NO: 359921 - DNA, 262 bp, Zea mays
catccgatcagatctcacgccccgtgcagcctaaaacttttatcttcatccgttttactttatttttagcttggattagttggggttttgaacattgctagtgtcgtgtgattgggaaggctaatgtgatgccttcgatgcagagttttcaatgaatgccttggtgcaaacgtacgattgtgtaataatgccttctattgatcagcgactccaatagtccaatgtgcaagtattcttaaaaaaaaaaaaaaagggcggccgc

SEQ ID NO: 359922 - DNA, 264 bp, Zea mays
gcaccagctgcaccagccaaagcccaggaccggctgaccgccagtggccgaccgcgtgtaccccgccgcgaaccgagacccgcgtccaggcgctgcgggcaacagcaacggcgcgcaggcgtcgtcgttgcgtgcggcgaagtcgcaggtgtaccagctggcccgtgtagcgtccgcagccccctctaacgcagctcggggcggtcgtggcggtgcaggttgtggtggtggttgtggtgggcgctggtggtggtggtcgtggtg

SEQ ID NO: 359923 - DNA, 265 bp, Zea mays
gtcgatcgaagtcaggctgagaaaggcgtcgtcgatagatcgatcaaccctgaaacgatagcgctatcgactattcagtatatatataggatgcggaaggcgaaggctctctacggtattgccgccgccgtcgccttgatggcggtgcttgagcttaggctcgtcggcgccaactttgtgagcgactgcgacatcacgtgggagccgaagaacgccaagacagacgagggaggcaaccacctcacgctgtccctcgtcagcaact

SEQ ID NO: 359924 - DNA, 245 bp, Zea mays
cccacgcgtccgcggtcgtagccgccgtgctcctcctctcctccccggtcgctgcgtcgggtttctgcgtgtagcgttcggaccagccgacagcgggtgctgcagagagcgatcgacttcgcgtgcagcccgcagcaggcgccgactgcacgcccatcctgcaggacggcgggtggtacaacccggacaccgccgccgcgcagtggtcctggtccggcaacacctagtaccagaacaacaaggcc

SEQ ID NO: 359925 - DNA, 277 bp, Zea mays
caccacgccagacgcacaaagcggacgacagtcacgtctagccccgccggagtcggagcaagcctagacacacacagaaatcatcaatggcggctagctcggctcctcgtcgcgttccttgccttgtgctctggtttctcggccgtccacgggcagaagttcaacgccatcttcagcttcggcgactccatgtccgacaccggcaacctgtgcgtgaacggtccccccgccggcctgacgctcacccagccgccctacggcgagaccttcttcggcc

SEQ ID NO: 359926 - DNA, 290 bp, Zea mays
gtagtgcccggggtcggacgtgcgcgtccgcatggtgccatggaaagcgcgggagagatccgttttaggccacgccagctacagtgctacagcgagctggactcttgcctgccggtacgagccaacgagtcgaacgcatacactccagtggcagctacggtgatggcctccatgagcccagtcgcctccggcaccccctgctcgcgtcgcgagtttccctgtacggctgctggtgcaggcatgtgcactctgtgcgcgccagctcgctgtggccgttaccgttaggtccc

SEQ ID NO: 359927 - DNA, 256 bp, Zea mays
ggaccgggttctgctgcagcaaattgatgcatacaatgacttcttgaagagttttgcaaagcttgctcgctctgcttggacaagatttgatttatggtcaatgggcattgggcttttacttatgatattgtcagttatcattcaggcatccatgcttgtaaatatgaccataagccaatcttcagatcagaaaagttctggttcaagcatcattcgtagactttcccttgctttttctttagtcgtgattcgagca

SEQ ID NO: 359928 - DNA, 305 bp, Zea mays
ggggccgtcgcagaattcgcgccaccgcccgcgatggcttcgtcctcgaaggcctccgattcctcccaacgatccaaacggtcggatcaggggatgggcaaggacgccgctgccgcctctgttgtcccgatccacgcgaacctgacgcagctgatacggcaagtccaatcggggcgcctcgcgtacatcaaggagaaattggaggtgaacaggaaaacgctgcagaggcactcctgctcgctgttcgacgtggcagcggcggcggaggtggcgtcgaggggcaccgatggcggcaaccgctgtca

SEQ ID NO: 359929 - DNA, 293 bp, Zea mays
cgcctttcaactctggtgaaggtgctgctgttgtggcctgcgccatggaaccgtttccccagcttgcggctgcgtccacaggttgcgtgcacgcgtcgggctccggactgtgacgccgacgaggggatctcaggcgcccaactggtccggggtgaggcgcacgcccgcaggatgccaaccgagcagaggcgctacatgcccccggcccattttcttccggcggagtcggaatcgtcctccttccctgacgagcttcgcttgcgtcctgagaggcaagttggacttttgaagca

SEQ ID NO: 359930 - DNA, 283 bp, Zea mays
gttggatgtatgaatatgtcatcaatatatttgtcattaaacttaatttttttatactaaggttctgtttgaatgcactagagctaatagttagctgttagaattagctggtggcatccaaacaactcagctaatagtttgactagtagctacttttagttggagacatccagagttccaaacacccccaactaaatagttcagctaactattagatgcaccctcgatacctattagttcattagctgattcaacctacctaaaatcagctaaggtgctgttt

SEQ ID NO: 359931 - DNA, 284 bp, Zea mays
agcaaggaacacactatctagctaaacaagcacacaacagaagcagcagggtaccaagctagcaacctggtcttcatggagctcctcccatgcatcgccacgctcctcatcctcctgatctccagctccctggcagcagcgacgtcgcctgtggggacaatcgagcgcgtaactaagcaacagatcctggcaagcattccgccgggcgggggcccgcccgtgctcttcctcacgtcgccttccggcaagtacgcggcctacttcgtgcggacgcacaccgtgcc

SEQ ID NO: 359932 - DNA, 279 bp, Zea mays
cagaccgtgggagaaaactttattcgccgaaacgccttgccacctcgccgccaccgcccagcaaacaggcgcgacgacctctagtctacgtcgtcgccaccggcgtcaccggtcagcggcgccatataagtagacgctcggctcgtcctcctcccagactcgccagcctccggctccgacacgtggcccagccgcacctcgtgctcccctcggcgaggcccctcctccccgccggcgccactccatcgctccgcgccgtcgccgtccggtcggggtctc

SEQ ID NO: 359933 - DNA, 289 bp, Zea mays
ggcggcggccgacgccgacgccctagctcacgtcttcgtcggtcccttcccagccttcgtcgcgtccttcgccgtcgacgagaacacacgagggtttctggtggctctttggatgcactcttgaagtgtaggagtatatatacctttcaaccaaaggggaaaaaaaatccagagtaggtctgattccaaattttctgctggaaggaattcaaggaaacacttgcaggactgaagaatagagaaacatgtcgtctggtggtgtgaaagatttttaccggcagaaaaagaa

SEQ ID NO: 359934 - DNA, 291 bp, Zea mays
tggaggaaggtggaggagaacccatcagcggaggcgacgaggaagaggaggaggacgtcgatggcctcgccagcttccttgagtcggagatcctctccggatccagcgacgaagatcctattgaccaatcgaattggttgcagcggcaggagcagcggcacagaaggaggaaggtgatgctgcgaagaataagcggaagcagggttcaggatcggacggggatggctgcagcggcagcgagggagagcagaccaagatggcgaggagggaggagaagcggaggcaggcgaa

SEQ ID NO: 359935 - DNA, 316 bp, Zea mays
ggccttcccactccactcgccctcctctcctagcgtcggtgagccggtgcgctgcagtccccgctccccttccgcgtcgccgcgaaggaggtcttccgggagcacggggacgacggagtgccctaggattccatcacgccgccaagcaccagtcccgcagccagggatttcttctccgaccccgaccttcatgtacttcttgcgggtgtaagcatttcgctgcacttggagacgcttatttggagtatttgaagtatgagttggctctctgtcctgtcagttatgtgcctgtgcttcataaaaaagagctacattt

SEQ ID NO: 359936 - DNA, 315 bp, Zea mays
aaagggaaagcatttgccctgtaagaaaagggtcatgtgaagagcgacacacggacattatgagcaatgggctgcctcctgacagcagcgaaacaacaaagaagcaagcatgtgtaggagccatggacaacacccaaagcatggaaccttcaatcacaggagtgcaaagtgaagtggaaaagaataactccattaagaaaccctgtgaacctgctagtgaaaatatcttaagcaagaagctactctatgagacaaacagcaatacctcaaggaagagagtaactgaagaagctaagatcaacaacccaagcaaga

SEQ ID NO: 359937 - DNA, 305 bp, Zea mays
cccactcgtccgcccacgcgtccgatcggtggttttagttttgtatatccatgtatattagagtgatgtatcaagcatcttataaatgaattatgtctacaatcggccaacttttattttgattgaggtaaattccatggaagcatcttgggtctgctgcttgatctttatagttcacactttggatggttctggagccataatagaccagattcaatggatggatttttttggctaaaggctattgtcgtcctgagtcctgacggtgctgttcctttttatagttcacatagatgtgaatttta

SEQ ID NO: 359938 - DNA, 263 bp, Zea mays
  unsure (1)..(263): unsure at all n locations
gcttggcttctgccctgccgtgtagccatggagccagaaagaggcctgatcgcatatgaagggccgcctccagactcgacggacctgctgtcgagcgcgtggtgcagctcggctatccaagttcttgacacaggaggacacaaggagtgctcgatggccctggtggagcatccggtcatggcgcttggcaacgacaggaacgacgntgttgcaaagagcgaccgnagcattgnggnttacaacagcagcgtcagcacggccca

SEQ ID NO: 359939 - DNA, 285 bp, Zea mays
cgcacgcgtccggggactgcgactaaaagggatgcccaaaataagaagtattgatcgagacttctgtgggagtgggagtgggagtcagcaatcgtcacacacattgtttttcccaaggttaacaaggtttgttttgaatgatatgccaaacctagaagattgggtcactaaggtgtcaggtgcaagtgatccgtatggccaggaggaattcatgtttcccaagcttgtcaagttgacaatttggaactgccccaagcttaagctgaagcctatccccccaagagc

SEQ ID NO: 359940 - DNA, 167 bp, Zea mays
agccgagggactacatcacgggcctgcgcctgtacctggactcgctgcggaagaaggcgcccgccaggctcgcgtcgggcgcgcacgtcctgggcaacgtgctggtgcacgagaccgcggtcatcggggacggctgcctcatcgggcccgacgtcgcggtcgggcca

SEQ ID NO: 359941 - DNA, 293 bp, Zea mays
cgaaagcatagtcccacccaagcagagccagggccagagctggccgaagagccctcacctgctcggatgccggacgcgccaccttcttgagccccttcttcttgacgatgaagctggcgccgatgaagaggctggaggagagcgcgagcagcaggcccttgatgttgtccggcgacatccccgtgtacgactccacccatctccccaccagctgcgctccccccatcacgtcgccggccagcgtcctcactgactcctcgccctcctccgtcgggcgcggcggcggcggcggc

SEQ ID NO: 359942 - DNA, 113 bp, Zea mays
ctggtgatgaacttatgatgtatggggaaggtgaaggcatgagctttggatgtgatgacataaaggagattgaagctggaggtgtgagatacagaagaggaacaagtgatgac

SEQ ID NO: 359943 - DNA, 286 bp, Zea mays
atagaaggagatttgaggccgccgcgtgcgatgcccgctgcgccgccgccaacatctcgctgcaggggaagtatctcgtcgacatgctccacctgccctcccatgggtccgcccctggccggcctctaactcagctacaacaccctctagcggcatccagcaggagctggttgcagatcccgcagatggggccaagaccgtgcgcaaccggtcttcaccaccgtcgaccagctgcacccctagatgcatggccacactcttaccatccgcgtcatctctgcctgca

SEQ ID NO: 359944 - DNA, 289 bp, Zea mays
cggacgcgtggcttggctacctctgtctgtctgtgtcttgtccagtccgggtctccagggctccggcaccggcaggcagagagctaccaaaccccaccaccacgaacggccgccgccgacgagacgggggcgcatggcgactgcatcctccttcaccgccatcttcttcagcagcgccttcgcggcctgcttcgcggaggtgtgcaccattcctttggacacagccaaagtgcggctccagctgcaaaggaaggcaccactaccgtcgccaccagtggctgcagcagct

SEQ ID NO: 359945 - DNA, 282 bp, Zea mays
catgcccattgtgcaagttcaacatcgtcaagagcaatctccacagagaagaggtctaggtcaataaggaaaaaaataataatcatggcagcacatttcggcatgtcccatcccagctgtgctcgtcagtattgccacatttgccaactggagttgtgattacctgtcttgtagtcaagtcataaaagtcactggtgatgcgcaggtggttgcaatgtcggttctcgtgaatattccttgtaacagtttgctgcaggggctgtacattctcgttctgctcga

SEQ ID NO: 359946 - DNA, 284 bp, Zea mays
gagccatacccgcccgctccttttctcatagtcatccgggaaacattctctctctggcgacgacggccatggtgcagcagcagcagcagcaacagcacagaatctacatcttgcagttcaggaagggcgtgccggagcaggaggtgtcatgcaaggtgtcgcagcccaagggcggcggccggcggccggtcatgtactactaccaggaccacggcagcggcggcggcaagaacggcaagaaggtgcaacgtagggcgctgggcctgcggcgtttcttgggcatg

SEQ ID NO: 359947 - DNA, 317 bp, Zea mays
agatgaagagcctcatcagtagaggaagaatactctggttcagaagaagatgaagagcctcatcagtagaggaagatgcagaaaaataaatgctataggtaatggttatcgtaaggagaataacattaaaacacgagccacgggtgaaaccctcagggccctcgcactgatgcagtcagcgcgcactgccacgagttcatgatcgttatgaaggtaaccaacccactgcctgccctcatatcgtcaggctgtgggttcctgttgttaccagttatgcgccacaatcctcactaatcccatgctggagagacttttgg

SEQ ID NO: 359948 - DNA, 307 bp, Zea mays
gtgattgactttttgggaagatggaaaaggttcaagttccaacgtgaagaagagaatatagatggtttagatccatctggaatgattattctacaaaaagagagatcttggatcgaacaagggtgcaaagtgggcgagcaggttattccattggcaaggaatttcaatggtgtgaacgctgatattgaatcacaaaatgtgccattgcaaaccctgaaaactgaatcggaccagcatggttaaattaaggtggcctttgggaagggggttatttggagcagttctatttatcaagtaaaatatttta

SEQ ID NO: 359949 - DNA, 144 bp, Zea mays
ggaaagatgactccggacgacagagcgcatggtgcaaacggttgtaccgccaaaaggccaaagcagcaggttcctgctcccatcatctggttttttccgtgcgttgtgaaggcacaacaccagcgcgaaagttctagatcgcga

SEQ ID NO: 359950 - DNA, 298 bp, Zea mays
cccaggcgtccgccacgcgtccggcggacggatcacgcgcggacaagagaggccgcggggatgatggcgctccacgatgccctccgcaacgtctgcctcatctccgactggacgtactccgtcttcttgagcatccgtcctcgcccgctgttccgcggcgggaacgggtgcaaggtcggcgacgacaacggcagcctgatgctgatgtgggatgtcggcttctgtcagctcgcgggttgcggagtgcctggtaggacatggacggcgaggacccggtgcgcaaggccttcatcaagat

SEQ ID NO: 359951 - DNA, 299 bp, Zea mays
  unsure (1)..(299): unsure at all n locations
gtcgtcctcaaggccgacgagctgaacggggtgcgcatcgaccgcgtcgacgccggtggctacgacagcagcgtcactcggncggaacctcctgcgaggtctccgtgggcggcgtcctgtacgccggcgaggcgaagcatttcgtggtccacctgcacgtgccagctgctttgccatcgtcgtcagcaaagggcggttactactgcgatggcctcggcgcctgtgaccgttactaccatcatcgccacgagcagcacctgctcgccgtcgactactcgtaccgcaaccatcccagcgcg

SEQ ID NO: 359952 - DNA, 301 bp, Zea mays
cggacgcgtgggcgcagccgccgaggcgaggcagagcatccagcaatccgccacgctcgtcgctcgcccggtcgccccctccacccactgccgcttcagctctctcgctccctgcgttctccaaaccctaaccgccgacgggatgctctcgacggcttcggtgccctccacctcgttcgccgccgctttcctctcctcccgcgctcgccgccggcgccgcgccccctggctgcggtccgtcgccgcagccgccgcgtccggggtgggggacggagatgtggagcggttcgctaccagcagc

SEQ ID NO: 359953 - DNA, 299 bp, Zea mays
actgcgtatatagccaacagagccattctctaccgatcgactaaacgcaaggcaagcaccccagcttgtggctctgtgcgtctgattgggaaattgcttggtcgctccaccgatcctctgcggcggccctgcgcgtgctcgtctcgtccctctgtctcgggagcgcctggatttccgaggtgcgtggaaattggatggcaacagccggtagcccatcaagaactgcgctgccgtcgtcgccgccagctccgtcgtcctgcaagctcgccgccgcctgctgcttcgtcctgatcgtcccc

SEQ ID NO: 359954 - DNA, 149 bp, Zea mays
ctttttataccgcgtcgccggcccgacgcaaagcttctcctctttctgcgcctgccagtcgtcgctccttgatcagcgagtcccggagtggaagatcgggcctttttagctccttgtggtggttggtggttgtgtttggggagttgcac

SEQ ID NO: 359955 - DNA, 307 bp, Zea mays
ggcatcatcacccagccgctgcccctcggcgcggtcgccctcctcggcctcggcgccgccgtgctcagccgcacgctcacgttcgccgcggccttctcggccttcggcgacccgatcccctggctcatcgcgctcgccttcttcttcgcgagggggttcatcaagaccggcctcggctcccgcgtcgcctacgccttcgtcgccgccttcgggtcctcctccctcggcctcggctactcgctcgtcttcgccgaggcgctcctcgcccccgccatcccctccgtctcggcgcgcgctggcggcatct

SEQ ID NO: 359956 - DNA, 194 bp, Zea mays
  unsure (1)..(194): unsure at all n locations
tgaatcagctagatggaagtctagtataattgcaaagtgaatcagttagattatagtagctactataatctttaagagacacttggatgatattgccactttggctttgcttcggggggatcctnttggcagtttttgaacatggttgctatcgcgttactttgcttcttgataaaaagaataaagtccggaaa

SEQ ID NO: 359957 - DNA, 306 bp, Zea mays
tgaagaggcgattcaaaattttagatgatgctataccatttttccccttcccaacacaagtagagattgttgttgcttcatgcattatacataattgggtcatagaagatgggggcgatgagttcattgtacctgaggccgaagatgagctacctagtattaatcatcaaagatcatcgcatggacaagcaatggaacatgcctttatggttaactttagacaacaaattgctaatgccatgtgggaagaccgtcaacaatatcaaaatactacatgaatgctatgttatctgctatcactatgta

SEQ ID NO: 359958 - DNA, 278 bp, Zea mays
ctcactcgttcgctcacgtgtccgactagttctagatcgctatctgccgcccttttttttttttttttttaaaccacataatggacggtaattatttattgttaaataacaacgtcaattccggaaagccataacgactaatatatagctgccactcctgtcatcactcaaccagaggggtcaccacatgcccaagattcagcacgacgccacttcgttccatcgctccacgaaggcgaacaagaacggccggtccgccacgatatccacaggcggat

SEQ ID NO: 359959 - DNA, 306 bp, Zea mays
cccacgcgtccgcggttacgatttggcacagctaattactctggaaccaccatgcgtaattcgggaccgtgtttttatcttttattttagctgggttcgggatctggaaaacgatcagcttttggcctcttagtttctctcaaacaaagtacggggctttatgggagaagatgtgataatggtattgggcattgagctcttgatacatgagttgcgatgtgctgaagctgctggatgttgcatcaactggctggcaagggcgttatgaacttatggcactagggtgcggttgtggttagatgctgc

SEQ ID NO: 359960 - DNA, 298 bp, Zea mays
cagaagctatcaagttgggccatccttcagcgagaggagctgcgaccgttggttgtggagggttcgcgactcttggtgcgaacggccacggtctttttttcccgggtgcatgggtggcgatctagtcttcggatcgactgtcgctagactgggaaagttgctgcgtttatgtttgtttgttttttttagtttggctatgtgcattaggcagaggccggaagtttgtgtaccaagactatgtatcctcttgatgtatcgctcttggtaacctttaatataaagcttcctttatcgaaaa

SEQ ID NO: 359961 - DNA, 293 bp, Zea mays
cccacgcgtccgcgacgactcgagctcgacacacgaaacagacatggccgccgtcgccgctctttcctgccccgcgcctccgcgtgtgttccgctgcgccaagacgctgcctgctccctccgccgccacatccagccgcggaagggtcggctacggctcctcctacgcccgccggtggcagtgccgccgctggacccaccggccggacgctacgacgacgcggatcaggcgggcaacgcgcgccgcacggcggtggtgagggtgaactgcggctactctccccgcgctgaaac

SEQ ID NO: 359962 - DNA, 116 bp, Zea mays
ctcacgtctctggcgcataccctccgcctcgttgacgcccagctcgtgtggatcgtcgtcgagccgggcaaccgcacagacgccgtcgccgcggtgctctcccgctccaacctcga

SEQ ID NO: 359963 - DNA, 285 bp, Zea mays
atagaaccggcggtctaccactcagatccgtcccctgtgcagtgcaggattggacatttttttttctggtcgccagtagctatctccaataactatacctcgttgctgcgagttcccaagttcgttgctgcccttcgtgttgctggctcatgctccctgcgtaactgcattcagagattagaaatcttttcttccagattctagatgtgtgggtgattagcaagatgctggagactcccactctcttcggttccagctcgatgtcgagaaaaggtttctttcgcc

SEQ ID NO: 359964 - DNA, 286 bp, Zea mays
cccacgcgtccgctctccaactctccttgcccggctgccccacacctctgctcttccctctcgcctcccgccgttacagcttgcagctccatccccaacccccgtcgctctctccctgagccgtcgccttcgccttcgctgcgagatctagggtttacgccgcgcatcgggtaccgcgcacgcaccgaccgaccacccggcggtcggcgccgctagacgcgggctcgctctcaggtggttgagcgtggccggagaaggggaggggcgacactgctcgtgggtgggt

SEQ ID NO: 359965 - DNA, 329 bp, Zea mays
cccacgcgtccgactattttggtactcgtgatagtgcttttctgtattgcacattgaacgctaaaacaagtcccatatgaatcatttagtattacttataagcaagcattagataagttccatgcgctttctctgatttgcagctggaacctaagcatgatcagaaattaatataaacttttgcttatagcataacacccttgtttcttgcaggttttgcatggtgatgcagttcttgatgaattattggactgtaccatattgagtggggatgtcattatacgacatcttgcacagcttctaagtccgaaatatgtagtatttctggt

SEQ ID NO: 359966 - DNA, 327 bp, Zea mays
gagaacaatatactccgccagggcgtcctacaagagaagaggagccggcagagaataagaagaccagaagttgacacactcttcctgttcttcgcgccgcgcattttctgtcctcttcttcactagatacagacaggggagagagagggagccgaggaggagaagatccctctcaccgtcatctgctggccaatctaatctccgtcgtctgcatctgggtctgctcccgtccatggcctagtgacggaggattgtatctctgtccatgtggatggcgataaattagtacttgtttataggtgttgctgtgtggttggttggccttgt

SEQ ID NO: 359967 - DNA, 317 bp, Zea mays
ctcaaatcctgtcaaatttgtgcctgcttctgtcctttgtgtccaaatactagttgccatggcttgacaagtacgaaccatttaacatgttgaaatttcctatgccgtgctatttcctacccattatcaatcaactaatgactcgtgccttttacatgcacctaactatctgtaaacgatggatgttcagatctgcaggttctgacgaaccgaaccgttggggtttcaaatcttcttttgcagactccgatcccaactcaaaacacagagaactctgaaagctaatcggcaatggataaccacatccatagtcagcc

SEQ ID NO: 359968 - DNA, 300 bp, Zea mays
gcgatgatgaaggtttctttggtgaatgatggccccgtgacaatgcaaatcgactcaccctcactgcaaggtgctgctcagtcaagcaatggttatgatgatttggttgcggatggtgaagcaagagtagctaaagagacgtgttaaaattctgggtctcttgctgacctagggtttagggttctccatcacatctttctcattcagatttttttggtgcagttggatctgaaagccctcctgctgtgcacttggtatgaactttgcgtctatctggtaggctggtcacaaagaaaatat

SEQ ID NO: 359969 - DNA, 111 bp, Zea mays
ggcccccaaacccggaacgcagcgaaacgacagccatgcttctccagccggttcccaccgccaccctcgccgctcgaccgagatcaagcgaagttcgcttcccctttcgtt

SEQ ID NO: 359970 - DNA, 146 bp, Zea mays
tgcagctctgcaagctacagaggccaccacgagtacacgaagccacgccctccgagagaaagagagagagaaaaccatagcacggtaatgcccccggaccccacagcagctagagccagctccgccgtgagcgcggcatcagcagc

SEQ ID NO: 359971 - DNA, 129 bp, Zea mays
ccgacatgatgctgcagatccactacctctggctcatgccgctccaggttggcgttgctctgggcctgctgtacacgtaccttggccccccggtgacgtcggctctgatcggcgttgccggcgtgatgg

SEQ ID NO: 359972 - DNA, 289 bp, Zea mays
cggaccgtggttgttttaagcaaaaatctgtatcggttattcggtttggatttcattcagattactagctcaaatttcagaaaccgttagtgtgcgtacatcataaaccaatgcggtgccccttctggctcctaggaacacctcgcttcaatctcgcaggacaactccagctatgaactccatccacacacacacaaaaaaaagatggtggtatttcctaaccactcagaacctgtgatcccaggtaacatgggctaggtagccgaatgtgtgcacgtgatgagttgca

SEQ ID NO: 359973 - DNA, 293 bp, Zea mays
ggagagagaactgtgagcaccataccaggatccgatccttgtgaacagagagtaggggtagtcaccaccgaagaattacgattgttggttgcgccgggagcctgcgtcgcggaatcaggggtcgaaagcagtatcctgttgattcgcatgtcggtgaccgtgtggaagccattgccggtgacggacgccacgccagtacatgccccgtcaacgccgtttctcacctatgccggtggtcagggtccatggaatagtggcgaagatgaagccggtgtccccgtgaatcactcgct

SEQ ID NO: 359974 - DNA, 322 bp, Zea mays
cagatctctccggcctgctcctcggctcctcgctcctcctgcgccgccgcggaggcagatacaccctctggatcaagccccgctgcatctcagctgtggcttcctgcaggctggggactttggctgcttcctgcaggctggaggagtttctgaatggccaatcccaggcatgcggtggacgtcagctcctccatgtcggagctgaccgtagaagcagcgccttcatcgattgaggcccaagtcccccagcagggtgcgtatccctcacaagcgggcaaccgcgggcgccatttgatctttttcataggggagttatttcgta

SEQ ID NO: 359975 - DNA, 322 bp, Zea mays
cctgctgttccaaggtacacgttcccagagtagctaaaaatttgtttacatattagcagagatgatatcagatcaagaaagaaactgaagatattattgatcaagaaagaaactgaacttgaaaataatgcttcgacttagcagagccttgggaatgggtccagacaaccggttgttctcaaggtacctgaacagttgttgtattggtgaattgaaggaatcttaattcaaccaatttggctgcctcatgcttttactatgcaagaaagatgtcaactttataataaaatccaactttacgttagctgacgaattatgactt

SEQ ID NO: 359976 - DNA, 100 bp, Zea mays
gcaggcgcgtcgagcccgtccgcaccgccaccagcatgggcgctctgcccctggacgccctgtacgacatccagctccgcctcccggccaaggaactctg

SEQ ID NO: 359977 - DNA, 303 bp, Zea mays
ccctcacctactcctctccctctccctctggcagcgccgcctcgccggcggttgcctgcctgcaccttcgccccccgtctcgacctcgacgcggcctccgttcctccgcgagacgcagcatggatgtgcgccctgccaatgcggccgacgactcgtctctcggagacctgttcccgcaccagcccgccggtttggagagtgacgagagcaacacagaatggctctctggttacgtagaggactgcttttcgagctccacgtcgtacacaaatcccgtctctgcaatggcaagcgagggtgtcg

SEQ ID NO: 359978 - DNA, 299 bp, Zea mays
acgggccgctggacacccaaatccagtggttcaggcagctgctcccctccgtgtgcgggaagggtacgtgtacgtcgatgcatgcataaacaccattaattacgcggcgttaactggcatgtattggtgccttggtggccgggcagcagattgcaagaactacctgtccaagtccctgttcgtggtgggcgagttcggcggcaacgactacaacgcggcgctcttctcggggcggtccatggcggaggtgagagggtacgtgcccatggtggtgagcaagctcgtccgcggcctggagg

SEQ ID NO: 359979 - DNA, 313 bp, Zea mays
tgaaggttgtaatgatgatgccgtgctgaatactgttcaaacacatgatgtgttgccaaattgtaccttggtgccatcctcatcacagctaaatactgaagtaccgaagaacaatgcagtgggtctggccgattatactgtagcaggaattgctcgagttattgacaaagcaaagagttacagtggccagataaaacatgctgatcaaactgaaggtgcttatattatttccgcatcgaaggcatgtggtgatagatctttaaatgggagtgatatgtcacgtgctgtggatgagctacatgcaagtcgcgac

SEQ ID NO: 359980 - DNA, 304 bp, Zea mays
caccgaggacaccgtgcgctgcttccagtcggcccatgtcgggctggagagccacaaggagctgggcatcgtcccggctctctcccgcaacggctacacgatggtcagcttccgggacttcatccgctccgcctactcgctgcagcgggcacgggtgacacccgtgagcaggagcacaaccgggcggaacctcggctcgtcatggtcctgcggcgcaactcgaggcaactcaagaacgaggccgacgccatcgccgccgcggccggtgtcggcttcgaggtggtggctgcgggaccagacgacg

SEQ ID NO: 359981 - DNA, 308 bp, Zea mays
cacaaccacggtggcaatgatagaatgcagccgaacatcatcgttgggcatcgacgtcgccgtcgtccgagcaccgacggcagtaagaaaccctgttgccggcatcagccagtcccaagcgcaacgacggcagaccaacaagtacgatggcggcggcgtcatcatccccgggaggaggacaagctggaggacctgctgcggacgagttgtttccctagctccccagttctttaggaggaggacctacgcaatcagaagatggccaggtacggtttcggtttgggacaacaatgtgtcgcaggacgacc

SEQ ID NO: 359982 - DNA, 285 bp, Zea mays
  unsure (1)..(285): unsure at all n locations
cccacgcgtccgatcctatgctggtggtgtagagacagacagagagagccgggagagaaaagagaagaggaccaaatctgagaggtggaagccatggcaaaggtgaaacagaaggtggcaacggaggatatccttgaaggagatgatgagagaacatcttcggagaacaactctgtaccacctgtgattctcgacctcaacgagggtttcggtgangggaacgatgaaggggaagccagcgatgatggtgacgacaaccaggaggaggacggcgacgacggcggt

SEQ ID NO: 359983 - DNA, 280 bp, Zea mays
gtggctcttcctcctcctatgctgtgactcgaggagtatggcggatggggctattgtggtagccatttgccagtacggcggagagttcacttctggccccagtggtagtctgatatacagaggtggagaagcacatgccgttgatgttactcatgattcatcgctggagagcttcaaggatgagctgtccaaggtgttccatgttgatgtcactgacatgtcactcaagtactttcttcccagtagatatgaaacactcatcacgatatcatgtgaccgg

SEQ ID NO: 359984 - DNA, 292 bp, Zea mays
cccacgcgtccgggggttcaatctatgatccttcttactactcgtcactgttcgaggatgttcgaaacaatgcatgcaatcatcagggtgataaacaaagtggtagtaatgacagtggttcaacatccgcgggccagtcaccacgacttaaatcttttgcttgtagatctcttctggctaatgatgtggaaagtggactaagaagaccgttgaactcctaggataaaacagcgggctcatgttgaaggtggaccatattttggtaacctaaatcctgtagccatctttctct

SEQ ID NO: 359985 - DNA, 104 bp, Zea mays
cccacgcgtccgtggaccgtggcgctggccaaggccgacgggagctgcgaggcgcacatcgtgctgtgccgcgtgctgatgggccggccggaggctgtcccggc

SEQ ID NO: 359986 - DNA, 129 bp, Zea mays
cccacgcgtccgaaaccgtgcgctaaaccaaccagttgacactgttgatgatatatttcagcataaaccatatccctccctggattcaacctcatcccggtcaacaccatgccttgatggttccttctc

SEQ ID NO: 359987 - DNA, 117 bp, Zea mays
cagctactaacactgtctctagctcacacagctcgtctgtacagcacatagctagtgaacgaaaacgaccatagcgtcccaggccatcgaaagccaccgtaccggcactgaggtcgt

SEQ ID NO: 359988 - DNA, 289 bp, Zea mays
atcaggcaaacgatacagcccttccctcttcaatcctctcgtcatttcctctcgcttctgctcagctgcaacccagcgcgtagatcttattcttggacgagaactctcctcaagctctccgatttctgttctcgcgccgcttagcaattcaaccccgaaattcttttgcggcgcaatcttcacctgaatcttgggtcgtagccaagaagatgaacaaagacaaagctccgatgccgggagacggcggccccagcgacggcttgccgccgcagtccacgcgccgtgtcgg

SEQ ID NO: 359989 - DNA, 131 bp, Zea mays
gctgtatgtacctcactgttggtgcactattttagttattgctaatcacaggggatgcaatcggcatctgtgttgattactatggggacaaatgaggcgtggaaccaattctacaacgcaaacttgtaacc

SEQ ID NO: 359990 - DNA, 303 bp, Zea mays
gagaagcagccaagcaagagcctttccgagtgtgtggagcagcagcagcagcagccgtaaggtcttcggaaaggtggcgatcgtcacgggcgccgccagcaaactgggcgaggccatcgcgaggaagttcgtcgacaacggcgccaaggtcatcctcgccgacatcaaccgccactcctgcgagaacatagtagcggctctcaacaagaccaaccatggccccgcggtggctcacgcgatgcgcatcgacgtcagcgaacccgacagtatcctggccaccgtcgaggaggcgaagaaggtcta

SEQ ID NO: 359991 - DNA, 298 bp, Zea mays
gccttcgcggcgctgcctgcgcagtactacgagctagcacagcaacaccaggaccaggagcctcttcccacacttccgctctccctctctctctttcctctcgagaatggttgtgtaggcgggcgcaggagggagggaggagagagaggggagctagctagggttttgcgtcgccgccttctgttacccttaggctctgaacccctccggtccggtgcggcggcggattaggctccgatggggaagtctccggcgaagtggatcaagtccgtgctcttcgggaaaaggtcgtcgtcga

SEQ ID NO: 359992 - DNA, 306 bp, Zea mays
ccacgcgtccggcggtggccggcacgcatggcggcagagaagcaggcggcgatggacgggcggaaggacggggtggcgcgggaggtcatccggatggaacgggaggccgtcatccccatcctcaagcccaagctcgtcatgcgcctcgcgtatctcatagagcatgaagctgatcggaacgagttcctgaagctgtgcaagaaggtggagtacaccatccgggcctggtacctcctccagttcgaagacctcatggcaagccttcgatttgtctttgttcttttacttctgtttgattgctcaagg

SEQ ID NO: 359993 - DNA, 288 bp, Zea mays
  unsure (1)..(288): unsure at all n locations
cagccacagcgcagantgtgtgtgggtgtgtgtctgcgccagagaccaaacaccaacctccccccaccctcgacccatccccacctcgccgccgccgccgccgccgcacggtctccttccccgagatttgaatgcgttaagaagtgcatggggagaaaggatgccagagttgcgtagtgggagtcggcagtctcggttgagggcaaagaaggttgaggatcttgtggttcaagaccctactgacaacttggttgtggcggcacctacggtggcaggaagacgtggtag

SEQ ID NO: 359994 - DNA, 128 bp, Zea mays
cccacgcgtccgcctgctgaaagaaaggacggcctgtcagatacgagtcacggagaagagcttcgccctggccagctacatttttgcaagattttttggttgccaatagtaaagatccacacttgggc

SEQ ID NO: 359995 - DNA, 296 bp, Zea mays
cccacgcgtccggacgaattagttctcctgatattgccccaactgattttgacgatgatgatagagaagagaacggtgatgatggaagcaaggagtcgtcttctgttgatgatcactccccagatgtaaggccaaaaagatctcggaggtggcccatgccacgccgttcccctgctaaggccattggcaataccgacaatagcattgaggataatgacgactcaggaggtgctagggactttatgactgcttctccgctgcggggagagatgcttgcatgggggaaaaatggcacc

SEQ ID NO: 359996 - DNA, 100 bp, Zea mays
ctatggttgaatcggaacccattttccgtttgcctagattcttaatttctggtgctgtatccagctgaaactagtagatctatgatcttgtggctgcagc

SEQ ID NO: 359997 - DNA, 288 bp, Zea mays
ggcaattctccaggctccagcagtccaccaccatggcattgcgtgccatgagaccgctgctgcctgctgccaccttcgtcatggttgcaatggcctcctggggagcgcacggcggtgccagcgatgatgccagttctctacttgccttcaaggcagagctcgctggcagcggctccggtgtgctggcctcctggaacggcacagccggcgtctgcagatgggaaggcgtggcgtgcagcggcggcggccaggtggtgtcgctgagcctgccctcctacgggctcggcg

SEQ ID NO: 359998 - DNA, 282 bp, Zea mays
cggacgcgtggctgtatcgtgggtcgaccacgagtccgctgctcttcgtttctttgtagttccagctgaaaccttctcgccgtacccagttctgttcaattatctgttgattctggtctctgtttcgatgccagttttggttcggttataggctgctagctgttgattctgctttctgtttcgcttctgtttacgacacctgaaccagtttttggtaccggtgggggagcactgtcccaatggctggccgccgttcgccgtcgggggatcccggtctcggtc

SEQ ID NO: 359999 - DNA, 137 bp, Zea mays
gacgcacggcgcaccgcacacctcactgccgctcccttctcgtatcctctcctctcctctcctcggcggatccggcaccgacccatcggccctctggtcgctccttccgccggaatcgctgctcctctctgtgctgt

SEQ ID NO: 360000 - DNA, 137 bp, Zea mays
cggacgcgtggcaaagagccggagccgcgaccgacgactcatcagacatggcgaaccggcggcggtggggaagccctcttctgcgtcgaccgttgcactgacatcggttctggccctggcttcgggtgtcctcctct

SEQ ID NO: 360001 - DNA, 216 bp, Zea mays
gaaacaatcaaccagcaacactcctctcctataacatagtacagcgaaagtaactcacattggaacttccaatgggtgtctcggcctggtcctgccttgcttcctctcctcctcccagtgccgtccctgtggcacccatgggtggcttgttcccacagttctaagaccattcgtgccccaaagcgaaggaggatgtgcagtcaattgtggcacagg

SEQ ID NO: 360002 - DNA, 154 bp, Zea mays
cccacgcgtccgcatggagataatgaacaatgggatcttcaaaagtccggtgcacagggttgtgacgaatgcagagaaagagagactctcactcgccatgttctacggcgtggaaggccagagagtgcttgagccagcgcttggtttgctgggg

SEQ ID NO: 360003 - DNA, 168 bp, Zea mays
cagtcgattagcgagtcggaggtccacacctgtgcccctttgacacccttggcgcgctagggttttcctgtcccaccccgctcgtgtgctgccttttcggtgtcgagtttgcctcctaggtttcggtcccggccatttcagccccagagggtagtcatagcaacaaac

SEQ ID NO: 360004 - DNA, 124 bp, Zea mays
tccacgcgtccggcgacggtggcacagcatgattggctggacgagttggcctctgcaattatgcctgagacgagcaaattgtcctaccgggttacggcacgagattgtaaccgcgcaagtaatc

SEQ ID NO: 360005 - DNA, 169 bp, Zea mays
gtctccggatccgtcgccgtctggtctccgtgtgctctcgtcggcgtcggcgtcggcggcgtctgactgaacccctcggcttccgcggcgtcgggtctctggtgctgctgctactgctgctgcgtgcaaggctgttatggccaccaagaagaaccttggcaacctcggc

SEQ ID NO: 360006 - DNA, 287 bp, Zea mays
  unsure (1)..(287): unsure at all n locations
ggctggagcccaaggtgatcatcccgaacccgaaccggcgcgcgccgtccatgtccatggacttggacgctccatgctgcggtcacggcgccgcggacgcgccggcaagcaggtgcttggacgacgccaccaaatgcgacgcccgcgtggcgcccgaccagaggctcgggtggccgctgctccgccgctcgaacgccgccgncgncgccgcctcagctgccactgcacagacgcccggcggcaagaatcatgatgcgcggaacagtccgcggtgcactgggtgatga

SEQ ID NO: 360007 - DNA, 129 bp, Zea mays
atacccggagtgtatgaaaactctcctcatgacaagtacagagttttcatacccggagtgtagaactctgtactgtactcggatccttcctttttcatccaagtgggttttattttatcaaccgtatct

SEQ ID NO: 360008 - DNA, 284 bp, Zea mays
agctatgcttgtacgtcttggatctgaggcctcgctcaaggaacgaaccaagtctggagttttctggtgattggataaaactttggcagctgcaagtctaataatctgaagctatggacacacaaatgtcttagagaaggtctatttacgcggagaacacgttggatgcagctatataaatactctatcaagtggagtatggatataagcatgcaaatgtgttctattttgatggctgggatggaattggtgcatctgctgctctcaaggaagcagcaaaacgc

SEQ ID NO: 360009 - DNA, 280 bp, Zea mays
atgagtcaatgacatgtggggtccatggtatatatctaaagtttggatcttttaatggtatagatccaattgttccttatatttgtggttcttagtctaaaatcacattgaagagggagacggacccaagtgatgcagttcatgtgttatctgtatcagtctctatttttataagctgtcatatattttctcgaaactatcttgtgtcgattttgtgtgaagtgtatttttaatggcacgggccatgcatttccttggaaacgaaacgaccatgtggact

SEQ ID NO: 360010 - DNA, 102 bp, Zea mays
gccacgcgtccggagtcaccgtcggtgttggggcctcgcgtgtgacacagctcgatcgctccagagtccagaccaccaggagactctctcaaacagcataag

SEQ ID NO: 360011 - DNA, 281 bp, Zea mays
gcgccccctccgacaccggtcctccggcctgctcaggctacctatagctctatataccaccgtgcccccggccgccgcgcaggtaggagatccaagggtccgaacaaaagggccggcggcggcgagccaggcagccagctaaagcgatccatatatacatatatactatcgagcaacaagacagataggcagacagacagagagacgccaagcccaccagggccggggaagctaagagaggagagctaaggaaggaaaggaaggaagatgatgagcaagga

SEQ ID NO: 360012 - DNA, 282 bp, Zea mays
tgttctccaaaaacagagtctgtaggtgttttgtccattactcctgtcaagtttggagactttgatgaagttccaggtctatcattaccttcagattcatacagagaccataatacttctagaggccacagacatactgaagatgttgcacatttaaaaaatgtgcaaaaagatgcaagtgaactcaaaccggagacagacacttgtactacaattgatgaggcatctccaattatggtacaaggaacagagacacccaatcatgatagtggtttgatagcc

SEQ ID NO: 360013 - DNA, 266 bp, Zea mays
gcaataatgcatgaacagagtaatcaatgttattactggaacactgttactggagaaacgtcttgggacataccaaatggattagcttcaggagctgcgactgcatctgttccttctgatgtgggctattcaatagaagctcaagcccatgttcttcctcacagcacacttgaagcgtacccaagtgacatgtctgtcgggaatggcacatcaacttttgctaattttggaatggcatgtggaagtgcacaggttactcaagatgc

SEQ ID NO: 360014 - DNA, 273 bp, Zea mays
ccacgcgtccggcgaaatctgctggttctggaatgttaactagttcccacaaactttagcgctgtcgtgatgtgtatgatgtggttccaatatgtaagattttttttacagttattctctttattttcttgttttgtgtttgattacacgatatcacaccctgaactctactgtaattaaaaaccattttcttggtatctcgtactgtaagtagccacagtttaactgaaaaaaaaaaaaagaaaggcgggagggaaaaaaaaagggcggccg

SEQ ID NO: 360015 - DNA, 107 bp, Zea mays
tcttggcaagcttcacgagtcccttgttatggatgtgaaatggattttacaatggcaagatgctattcttggccgcagtcaacaagacagcatcttgttcatattgc

SEQ ID NO: 360016 - DNA, 320 bp, Zea mays
aagaatgtagcgtcccctgatgctctgctggcaatgatgcttgcgtgtctgcagagcaaagaggcagagagcctgaacaattcgtttggcccttttcttgtgcttggcagcctgatcagatgccaatgcgatcccatatctccccatatctgatagggaaaataaaatctctccgcgtctgctgcactaccggctggtggttgtgctcgccagcgcggttgaatcccatctcacctcccctcatctgccgtcgtccggtgactgacaggacgaggctccttttccgcaccagcagcgccctctccacttgatgatggcct

SEQ ID NO: 360017 - DNA, 320 bp, Zea mays
cgaacgttgtgaggccaagcagattaatttggaggccaaggtgatatgcagctcaaacattgggagagccctgacccaagaagctgcactgactgatgggaacatcctcattgttgggagatcaagaaatgcgtaccataggagccattttgagattgcaaactactgcttcatgcatgctccaaaaaactgctcggtgatcgctgttggaaggcaaggcgtacacagagtagtactcggttgagactcggtcatttgatgcagatagcaccatctcctcaagctcaacatggagcaggagattcgcgcggcttcagaag

SEQ ID NO: 360018 - DNA, 310 bp, Zea mays
cccacgcgtccggcggtagtggtcatgtcatgccgaccatgaactgcgcgcatatccagcaaggtcaacggctgccaccacggacgaaggaacattcttcttccattactggcctataaatacattgcgttgttttagttggtgtttcattccctggctggctcgacgtgatcgtcgcagtaatatccatcaaccgccatggcctcctgcatgccgtcgtcgaccttgttccggaggctgctgctggtgctccagctcgcggtggcggcgctgacgaccctgggcgcgcaggcgcactgcagtacgggta

SEQ ID NO: 360019 - DNA, 308 bp, Zea mays
atcatcttcttcgtccaagggtcggcgccgcgcgcgtggataacaatgatggagacggaggaggagcagcagcagcgctctacgcggcgttggcaacggctccagcgagcggcctccgtggaggtgctggtggtgcctgcaggtgcagacgacgcagcagcaggcggcggtgacgacgacgaccttgaggtcacaagggatcctacggtcgtcaggggctggcgacggttgaaggccgtgtccatggtggtcttcagcggcggcgcccgacccaacaccaccaccaccacgacgacgatggaaatgga

SEQ ID NO: 360020 - DNA, 310 bp, Zea mays
ggctactaaatgctgatcaaatccttgtatatatttttgttcctacttgctaggacctttagacatcccaagatttgacaatcgcaggtttaattcacacaaggaacaaataataaaggatgttgagctaaagtttgccttcccaaggcaaaccatacatcttacaagggactggatcctaaggacagttaataataggtggcgagcatacaaatctaagttgaagaaacaatacttcaatcgtgacgagagaactctaaaagaaatcctaagagagaagccactaacgactaatgaacatcaatggaga

SEQ ID NO: 360021 - DNA, 314 bp, Zea mays
cccacgcgtccgggcagaagttgttcaacggattgaggggatacgacgtttctacagctgggaataggcaccttatgtggaacagcagtgcaggttgagaggaacaaactttgagccaaggaacacgaggatacaaattttactgtgagcatacactactgttacaagcatttcttgttgtctgaaaaagacactcacgttccatcacttggttgtttgcgataccgtttgcagggccgttcctgacttttcaggggcccagtgcgaaatctgatacggaggcccatccgcacacaaatatatataattataca

SEQ ID NO: 360022 - DNA, 311 bp, Zea mays
cggacgcgtgggcggacgcgtgggttcggttcgacaaaaaaagaaccttcgaagtccagctacgtatgcattccttttgtgtgagggaatcactagtcaggatctgctgttttattgctcgcaccatcactgtatttaccgaagaaaaaatacgtatggcgtgcgtgtcatcactgtatcggttctgttacctttgtgtttcccttccgtctaggctgttctggacaacactagaatcaatccagctgtcatcggtgacatcgtcgttgggacggtgcttggccctagttcccagcgtgcaaacgagtgca

SEQ ID NO: 360023 - DNA, 314 bp, Zea mays
cacagtgttacatgatgagcttgatgacctagaaagccaaagactttctataaaagaaagaaaggatgctgtcaagaagaaaaagaaagacacacagaaagcagagtaagttgagaattgctcacaatgttagctttcataagtgtagtgagtttgataattatatggatgctgaaaaaatccatcttagaagagctagatataataaagaataaatactagtgctatcttgcttgaattttggaaaaggccacttgctgatctgtgttatatccagccttgcctcatctttcattcccttcgtacattgtgat

SEQ ID NO: 360024 - DNA, 110 bp, Zea mays
tccgtgtgctacgcaccgtggtggccggcccggtctgggaccacgtcctctcctactggcgcgcgacatggcggccccggacagggcgctcttcctgaggtacgaggaca

SEQ ID NO: 360025 - DNA, 304 bp, Zea mays
ctccgcccttggggtcctgcccccaaggtgacggtggtgcccgtcgccggcttgaccggcgtgtgtggcgccggggtcctggtcatgttgtgctgcttcctgctgcagactcaaggaggagccagaagcagcgaggacgagcggtacgtgccggtgcgcagggtggtgtaccggtccgtgacaccggcggcggcgagtgcagcgacgacggcagacgcagcggcagcggcggcatcgtacgagccgttcgaggtgtgcgaggtgtggcggtgctgcgcgccgtcgtcgtcgtcgtccaacggca

SEQ ID NO: 360026 - DNA, 313 bp, Zea mays
aagacccgacgttgcctcctcctgcagcagcagcgtaaccagaggggggtacgtcaagccgtttcgagagaggtttagggtggtggtagcagtatgggttgcggtgcgggcttcgtggtggccgtggtcgtagcgtgcgcgctcctggccagcaacaagtggcgggctgcgcggcggttggccggcacggccgcaggtcccggtggtggtggtggtgccgtccgtggcgtcaccggcgtgccgaggttgccggcggtgcaggcagtaccgcgtgtggcggtgccgccgtgccgggcgtggccagtgtcaccgt

SEQ ID NO: 360027 - DNA, 310 bp, Zea mays
cttcatcttattagttcttgaaccgggaatctgggttgcactgttcggttctttcgtggggaattccgcttcttgctgtacggggtcgttttggtagagttggttcgcgtctggtctgtacttatgccagcgtgctgtttaatactttatcgttctaggcgattccaggcacgaacaggaacagtagattgcgtgggatgcgtggctcatgttatcttccgtttgctgtcctgtgaacctgtgtgtgtgtgtggaactgtcaatgtgcggccctactgcattctgacgtagttcgttcgctgtctgcaga

SEQ ID NO: 360028 - DNA, 305 bp, Zea mays
cggacgcgtggacaaaatatgaaccgattgtaggcagaaggtaattggttttgaccaaattatcaactagatggctctacatgaaatggcgcactgaattggctgtgagcctgtctgtcaatgtacgaaacaacggcgggcgtgaagcggtggtcgggaaggaatcagcgagtagcagcaatgcgtcagacagctacgtcagacagctatgtatcttcttctgcaatcccattctgacttaattaataaaacaacctttataatagtattataaagactcgatcgtctctaaagtctgaagcaaa

SEQ ID NO: 360029 - DNA, 302 bp, Zea mays
cccacgcgtccggtagcattttgtatgctcatccagattcaagaatcgaggaactaggaatactcaatacaagatgatggcctcatggtgtctttgatgtcagttcacaagaaacatctttccatatccctttgcaccgtatgctttcattactactgcggaaggctatgaagaaatgttttggagaggatggacattcagatgtgcaatccaatgagttctttcctcagatacttagaagttgtgagccctatggatttgcttcaattgttatggagcatccactgagagtgagagtattt

SEQ ID NO: 360030 - DNA, 292 bp, Zea mays
ctagaccgtggggcgtgtgcggcgcggcgaagttcctgtggttcctgatgatggatgtagcgcaagtgtgccgcagccgtggcgctgatggcgttcgctgtcatcgtttccggcgtcggcgttcgcgtccgggttcccggctgggtgcaccatcagcgttcccgaatccgtgggcggcattccaggagctgtctggctgtcacatgggggaggagcggcatggcctggccggggtcaaggactacctgatgcacttcggctagctgccggcggctccggcgtcgtccccctt

SEQ ID NO: 360031 - DNA, 312 bp, Zea mays
tcagcatttgtttcagcaaaccagtcccctttcttcacgccacggtcactgtctgcccgtgtcccagagcacactgaccctgagaacaattgctcctccaatggtattgtgctgaaaatcagtgatatactctctggtgattccttcacaccacaggaggagttaccatcagctagcgttggggtcttgccgtcagatgtgtctcctcctattagcctgtgcacttcaagcaactttggcactccagcaattgtctacaacaatcccagctttgtttctactttcaatggcccatgccaaggcagttcatca

SEQ ID NO: 360032 - DNA, 291 bp, Zea mays
caggtcgggtgtgccgtgcgcgcgcgtatgggagtggcgtggtcgtccggcggcgccgtgcgggcgataacggggacaggtcgggcgctggcgctgtcgccgtcggcagcgccgggagcctcgggctgcgcatcgggcaggcggtcttctcgtcggcatcgctggtgttcatgtcggtcggtgtcgagttcttcagctagagcggcttctggttgctggtgacgatcatggggctggtcatcccctggagctgcacgctggccatgatcgacgtgtagtccgtgttcgtgg

SEQ ID NO: 360033 - DNA, 249 bp, Zea mays
cccacgcgtccgggcaaaggaaaaccggcagagccaaaccagagacgcggcaccgacgcggaaagaccaacaacggcggggccgcgacatcgcgaggccaaggcaaaagccagacgcgaggagtcccttgcagcataggcagcttcctcccaacggagcggtcggccaaggtcttcaacgggggggtgaatccgggggggggagtcctcgaggcgatggttgccgccaaagtcgccggccaacaagccc

SEQ ID NO: 360034 - DNA, 312 bp, Zea mays
ccgggaaactgggatggtcaaaaccagtcctctacctctgtgataatccgtcttcaaggtgaggtaatttccttgaaggatgcacagcggcgtcttgaagaggaggtatctcggcatgttgagggtaaaaaagtgcctcagcatgagctttcacacctcaaagatagccaaggtgacattgacaggaagcagctttcggtcaaggggccaattccaggagtggatttccatgtaggatcagtccaatcagttgctccagaagttaggggttgaaatgttggacctaaaggggcccttaaaaatcctggatgt

SEQ ID NO: 360035 - DNA, 296 bp, Zea mays
agcaatccttacttccattgatagacgatcgagtcgtgtgcgcaacaaccgagctagctaggatggcaggatgctgggcagtgttgctgccatcggcgctgctcgtgtggatcgtttgctgcaactgtaagtatacctctgcctttcctacccaattaaaaaaatatatatacattacgatcttatgctggttgccagcactactacagcccctacagggagttttcaaccgacactgtatgtatggaaatgaaattaaagaaaatacaagtccatggtctggtaaacacaacacg

SEQ ID NO: 360036 - DNA, 286 bp, Zea mays
gcaggattgtgcaagatttgcacagaaaatgcgtcaatgggcattgggcaatctatccctgctactttggtatgtatcatattcggtttttgggttctgcggataccactatttggatatttgaaggcagcaaagaactgctcagtagctttgaaatcacagtgcctttttatcctcttattgttgcgaaaacttcaggatgaaatattatgtccgtttctcatcagagagccactcttttgtgcgctagttcattttctagtaatctatataatgattacatttc

SEQ ID NO: 360037 - DNA, 304 bp, Zea mays
accttttgaattttagaacactctgcttgcacttcatatgcattagtgcatatgcactacaaatttaaaatctctctctatatatttttgaattttataaaactctgcttgtatccattttaatttgagaagattgtgcatgctaattaccatttaaaatctctcactctctctctctatatatatatggtttggatacacaaccaagctttagttcatcagatgttttagaagctgcatatgttaggtcatatcagcaaaaaaatgagtttgcatagcagttgttgcccataacttttactat

SEQ ID NO: 360038 - DNA, 299 bp, Zea mays
gagcaacggaatcccaattcccaaagggacaaggcaaagctaacttctccttcttcccatccttcctcatcccgtcggatcaatgccagcgggagcaaattcgaagccgctgccgaaattgtggccggttgaccggtgtttccagcccatccccccgttgcacgcggcgaggtagaggagtttccgccgtcaactccatccgatcggcgtagggtcgcggggtgccgacaactttggtccccgctccccacttgggcgccacggtcgctgcgcatgccgcgggctcccgcgcccactgg

SEQ ID NO: 360039 - DNA, 300 bp, Zea mays
aatgggaatcccgtgttggagcgatcgaatcgcgttccgccgattcgactcgcgccatgtccgatttctcctctgctcttcactccgacgtggaagcgcacctcacagcagctgacgccgccaccgactccaaccttctccagatcgaagccgagctggacccccgcgtgtcggcgctcgaatcctcagtgcacgccctcgatctgtggtgtcctcgcgtggattcatcgatcgaggggctccacgcgtcggtggatttcatcagcaccgaagtgtccaagatggggattctatggaacc

SEQ ID NO: 360040 - DNA, 291 bp, Zea mays
cccacgcgtccgcccacgcgtccgtagactgtcatcccttcctccttccccacgcgtacacactcccacggcggcagccaccatcccggagctcgagaccagcggccagcgtcaccaggagggtgacgggcccgctactcagtcgagcgccactcccatggcggacaagatctccacgatcgtcctctaggtttgacttgaatgctagatatgctacaggaagattccgaaagtcctctgcaagatccaagaccagattatcatcaagacgatctcgttcgacgagaagag

SEQ ID NO: 360041 - DNA, 197 bp, Zea mays
gtgacaagttgtgccgggacgagttgaagttgaggaagagcagaggggtcggttccaggagtgtttggtggcgggacgcaaggaagcgcacgggtgggcagccaggggtgtgtgtggtcggctgtggggttggcagttgtcacggagggttcagagagacgacggcgtcaggatgagggtggtgttgtggagggttt

SEQ ID NO: 360042 - DNA, 307 bp, Zea mays
ctgacatcacagatgggaggcatactaacaaatcgaagggggcatttaactcgtactttccagtgattggcgataggtccgttttttctttgtaaaagtggccgtgttactgtattatgcattcacagcatatgtatcggacattctttaagtttgattatatttctctgtaacaatgaatcgaggcaagatgggctctggccctgctgggctccacctccaatatgtagatccgaggaacaggagggaaagaacaatgatatactccctcattccggattataatgtgtttttgtttgcttttcta

SEQ ID NO: 360043 - DNA, 260 bp, Zea mays
ccagttcccacctcctggttcgcgaataccccctcgaatttcgttgttcttccacggggtattccacggttgcgtctcctttgttgtggtcctcacagggcatttcgtcctgagcagtgggcactgggcaggatacggattaaagtgcggagacctgcaatctccgctcttcggtctggtccggattctcgcggtcttcgcgttccaaggaaaagattatgggagatgcctagcagcaaaaggccccgagatttaacata

SEQ ID NO: 360044 - DNA, 186 bp, Zea mays
gtcatcagttgcgtatgcacaagtcagtaggtatagtaaactagtctgcggagtgtgtatatgtagcaaactagtaacgaagggagaatggcgccacacactggcaccgccagtgtcatacgggtacagcacagtagctaacaccaagttggacgtcacagccgtcgtggataagggctatgtcgg

SEQ ID NO: 360045 - DNA, 104 bp, Zea mays
ctgaccgtggtgcggtccggccgtctcgtgcgtgcaggtccacgcccgtggttcagggtttgcgcatgttgtgtttgtgcgtcgactcccaacacggcgttccc

SEQ ID NO: 360046 - DNA, 284 bp, Zea mays
cccacgcgtccgcccacgcgtccgaaacaaaccacgaagaaccagcgtgaggcgacggcggcggcggcggctacatcagcggctacctacgaggctacgacacgaagatcagcgtggagaacatcaggttttcaccggtactcacgtccttctcctctgactccttctcacatgtcgatggagagtggatctgcttttcaccgctgcaacttctgcctgcaagagctcttgctgctggtggaacatagtagctaggtgaggaggagaaccagcccggcgatcag

SEQ ID NO: 360047 - DNA, 279 bp, Zea mays
cccacgcgtccggccgccgccccgttcagcgtcacacgaacgcacgcagcgatgatcctccttcccaattcaagccgccgccccgagtttctagctagcgtcgtgcgtgcgttcatcgcctagctctcagctctcatgtgtgcatcctctatccaaatccatcgtgaatcatcgctccccaagttgttgtggtcaagccggcggttccaggcaatgtgctaagaatcctaagtaggagtgaagaccaaggagacaactcaaatcgtcgcactgctagaa

SEQ ID NO: 360048 - DNA, 278 bp, Zea mays
cccaaacgctagcctcattcaccctacgggatcacaccagatcgtcaaccgccctcatcccctctctcctcacgccaatccaaaccctagccatcgccgccatcgccgagtaccaggcctccggggaacgcctcatcggcctgcatgtcgatccacaccgccctgctccgtgcgtcaccctccccacggaggcgaaggcgccctgcgctggagatcgcgggatggttccacgcggctcctaggctaccagctggccatacggatcttgccaagatcgc

SEQ ID NO: 360049 - DNA, 300 bp, Zea mays
ctcctcctgcgttggctggtggtcatggctagagctccgctggtcctcgcggtggtgtgcgcgtgcgccgccgccgccggctccgccaatgcaccggggaggaagatggtcggcgtgtacgaggtcgaggcgggcggtttgtgcgtcggcgtcaccaactgggcgcgccaccatcagctccgttgtggtgccggactccaaagggggttttgctgacgtggtgcttggctactgcaccattggaggatacgtgagtcgtagaagctacttcggagcggttgtcggacgagtggccaacag

SEQ ID NO: 360050 - DNA, 296 bp, Zea mays
attcacaacaaaaccctagctactgcttcgtctgccgaattccccctccgctcgcttcgcacgccgcccgtcgccgcggcgggtctgcgattgtccctcccgctgcaaggagcacatgcttctcgccgcgccgttagcccgccgccgccaccaccggttcaccttcagctatgtcttgtcagcgaggtctcacgaattagtgcatgggattgcaggtcgacaggcgcagcagtccgccgggaagcgcgcccgcaccgacggcagccggcgtgaggacgactgggtttgcccagctg

SEQ ID NO: 360051 - DNA, 191 bp, Zea mays
atcaaccagaaccatacaattcttgccaaagcagaatctatttaacggcgacaacacgaccaaagcgtggcattgttccttccttctttccttcagcagtgtccgcgaggataggcttgtgtcgtgtcggcgacgtcgtgctcgccgtctcgtcgatggcatttgcggcggcggccggtgacgcggggaag

SEQ ID NO: 360052 - DNA, 278 bp, Zea mays
cagacggtggtgtagcaaccaaagcaaatctaggagccagagcatgagtgttgatcactcaatgagcaagagtatgagcatcagactaagaagaagcccaatgaaaaggtcaattagcaccacaaagaggtcagttagcaggagccctgttcaccataatcgcagtggaagtcgtgtcggtgctcccaaaaaagcgtgagaggagttcagcagaaggcagagcatcagcaggagcctgtaggagctcagcaagagccaccagagatgaagcagagccc

SEQ ID NO: 360053 - DNA, 228 bp, Zea mays
gcagctcgtgtatacgtccaacggcttgatctgtgacgactatgacggcttgtgcatcaccaaggtcggcttctccgacgtcctcgtcggtcatcagctcttgttggtgctggtcctggtcatcctggcaccctgcgggccgtgctgctgctgtgctcctgcgtcagtgttttcatccccatggtgcagtacggcgtgatggcgccggtgtagcagtttgtcgtcgtc

SEQ ID NO: 360054 - DNA, 280 bp, Zea mays
gagaccgtgtcggtaagcaaagcacaccagctcatttgcatcggccgttcggcgtgcgtgcatggtcaaccaaagactcgtttccttacttgtggtcctgttcgtaccttccttccgttggaagccttctgccgtaagcacggctgcttggctgcgttctgatggcagttggaggctgcgtgtgtgtagcgtcgccctctccgtcgtcggtcgaatcgtggtcgtggaggactagcggtgtgctgcgtccgcagtcgttaggtgcagcttcgttggctat

SEQ ID NO: 360055 - DNA, 273 bp, Zea mays
ccttccttggaaactatctctcccgcttgaatcgggcacgaagcgatgcgtatggaaaccgccgccacgatctcgcctagcccatgttcatcttccccgaagagagcccacgaagcagttttctcacccactcgcgcccagctcagctagaaccgcctgcgtcccggcctctgcccgggcgctcgtctggctcggcagcctgcctgcgcggcggcgtggccagccagccagcccgcggcggcgcggcttgtggccctgttcggtcagcaagtc

SEQ ID NO: 360056 - DNA, 268 bp, Zea mays
cattaaccagctgagtagcagaggcattgacatagcaatggcagcccgccatggcagcaggagaacaagggcagatcaatggctgtttggtgggaagtggaggggaaccgtaaaggagacaaggcatcctccgcctgtccctgaggccaagcttccaaatcccgttcccgttcagaaggacgaaggcgtctgccttgagaagcctcgggtgcagagagaggtcgccgacgtcgcgcccggaaggagatctatgccggagatggagatc

SEQ ID NO: 360057 - DNA, 272 bp, Zea mays
cccacgcgtccgcccactcgtccgcccacgcgtccggtagaattgtagctgtgtgcctatctttgcttgcccacagccaagaaaaaagaattgatgtctgcacgtgatgtgctagcagtaagatatctggattgtggaagtcaatgcccatttgctaaatcgagctggaaaaaaaaaaaaaaaaaaaaaaaaaaaaaaaaaaaaaaaaaaaaaaaaaaaacaaaaaaaaaaaaaaccaaaaaaaaaaagggggggcccctctgggggttcca

SEQ ID NO: 360058 - DNA, 263 bp, Zea mays
cggaccgtggggtgcgagtgtgagcaagctactgagagaactcggaacgttgcttgacagcttgagtaggtaaataatctatggcgcgccaacagtggagcagcggcggcctcgcggtcgcggtgctggccgtgctgtcgtccgtgctcatctgctcgggccacccggtgccgggcgggctccccctgctgccgcacttctacggccacgcgtgcccgcagatggaggccatcgtggggtccctcgtggcgaaggcgcacgcg

SEQ ID NO: 360059 - DNA, 325 bp, Zea mays
cggacgcgtgggcggacgcgtgggcggacgcgtgggcggacgcgtgggcggacgcgtgggcggacgcgtgggtagactacgacagcgtccggcgaagaggcggaggcgaaactgaggaagagctcggcacgcgacttcccgcggaagcagcagttatgccgccatgtttgtctgtttgattgttctgaggtctcctgaacatgccagcatttattccttgagattataacccctggtgtagcgctcaagcagggctgtttgcggatcacagtatttattttatgccttcaggctcgaatcaaaaagataatgcaagcagatgagg

SEQ ID NO: 360060 - DNA, 327 bp, Zea mays
gcgagcagtctcctctcctgctgcaactgcagccatgccgtcgtccacgatgcgcctgctgtccaggcgcaccgtcacgcctccaccgcgcccacgccaccgcattccgctcaccacctgggacatctgctttctctccgccgactacatccagaagggcctcctctacgccaagccgccgtttcccaccgaccgcctcctcgaccacctccagtcctcgctcgcccaggcgctcgacgcctactaccccgtcgccggccgcttcgtcacggaccagcaccgcgacgccaacggtcacgtcctcggctgctcggtctccatcgactg

SEQ ID NO: 360061 - DNA, 297 bp, Zea mays
cggacgcgtgggtgccgccatagtaatatcctcgcccatgtcctcagcaatggccaagcggcgctggtggatgacgaccagtgcatgccgcacatacccgtgatttcatcgtgggtgctcggtgaccagagtagctgatgtgcatgcaatccttcgacgaagctgtgcattgccatcggggcactaatcgtcgcgtgcagcgctgcagcgtccaaatctaccagtaagattttccccttctgtgtccataaggcctccgcgtcccttgtgccgtttgtagcactagaatgtggcctc

SEQ ID NO: 360062 - DNA, 322 bp, Zea mays
gctggtttgcctcccacacaaagggtaaaacggccggaacgctaaaatctcacccctccgcttggaagttggtacccatcgccgcctccatcgctacacatcacgacgcagcgcccgattccgccggccagctacgatgcagagctccctcgcccggtcgccggtactggccggatgcggcgagagacgtggcctggcagccgtggcactgtgccgcgctgaggcggcggcgctcttgtggacggcgtccagggctgctgtagtgccgtacaccgggatgtacccggatgtgaataagccctcgtggctgcggcagcgcgct

SEQ ID NO: 360063 - DNA, 282 bp, Zea mays
tttcctctccccgccaatccgccaccatttccagttccgaccgacctcgaaaccctagcccccagaccatcccactcgcaaccgccatgccggacctcccctgcgacggcgatggcgtctgtatggtctgccgcgtcgcatccccgccggaggtcgacctcctcacctgctccacctgcaccacgccctggcactctccgtgcctctccaagcctgttctatctggggatcctgagaccgacaagcaaatccgtagagcaacaaagcgtgttcatttgtctg

SEQ ID NO: 360064 - DNA, 287 bp, Zea mays
ggggctgtatatgaaaggcgtgttactgatcttctcttggaagatttcctctcttatgggccacaaaaagaatcttgcaaggtctccaagccattacttagacgggcaggagatggtagagtccttaattggactacagaagatgacgattccctttgcacattgcaagaggcctttcaacgtgtcagtcctcgcctgggatttaacattgagctgaagtttgatgacagcattatgtatcacaggaaagaccttcagtgtgctcttaaagctgtattgcaagtaca

SEQ ID NO: 360065 - DNA, 110 bp, Zea mays
ggaccgtggcaaggtacagattgtagttctggtactgtgccatctcaaggaaacgaaggctcaagcttattggaacctggacttggtgatggaatctgcactggggttac

SEQ ID NO: 360066 - DNA, 296 bp, Zea mays
cccacgcgtccgcccacgcgtccgccacgcgtccgggaggctgcagatgaagaggaaaccgtacagggatggtggcgactcaggcaaccggggcgacaaagtcaacgaactaattgaaaaattgaattaaagcagagttgttcgcttcggactaatctatagagacaaaaatactgtataagtagtagaaactggtacggattaagaccaagcgaacagacttgtctctctctagttgtgattttgtggtggagtgatggatctgttaaaaaaaaagaaaaaaaaaaaaagggcgg

SEQ ID NO: 360067 - DNA, 302 bp, Zea mays
ctttccttcacagcgtagtggtgccagttcccacctctccgtcctcaagcagcgcgtcgagctcgagcccgagacagctgcacagcagcagcagcggcgagtggcacgccgtggtgcggcggaacgtcaagtcctcgctgctgctggtcgtggtgctctccaccgtcttcgtcttctccgtcctgcagtcgtcgcacggcttcggcgcaacgacgcctgaccagcaagcgctgacgcagacgcagacgcagacgcagacgcagacgcagagcacggaccatggagccgtcggtcgttttgtg

SEQ ID NO: 360068 - DNA, 296 bp, Zea mays
cccccggcgatggtcgtgtgcaaatgccgaaagccggcaggacacgggctgattcgggatctgggggtgcaaggtgagtgggtcggcggcggcacgaaaagctccagtttggggcctgtatgtgttcaccgcgggcgtcgaggtttgctggctcgaggcatttcgtcgaccccccgccaccatgttattgcgacgagggtttactgcttcgtccatcaggtccccgtctgtggcgtgtgcatatgcttcccggaacatcagctatgtgtggtgaagaactatgctgaatgggttgt

SEQ ID NO: 360069 - DNA, 116 bp, Zea mays
gtgtgcttgtggtggccatgggcaactgctttggctccaacgtggcggaggtgggggccgtcaaggcgatggcgcaacccatcacgcgcacccgcgaggtacgtacgtcgtaccta

SEQ ID NO: 360070 - DNA, 103 bp, Zea mays
cccacgcgtccggtctcatgtggctggacctcaatagcaaccgactcagaggcgagatcccgcgacggctcggccggcagctcgggtcgaccccgctcagcgg

SEQ ID NO: 360071 - DNA, 117 bp, Zea mays
aacatcggccagagatccaaaccatgaaatggagcataagactgcgacgtggccgttttttcactgtgccgcatgagcagaaagcaacatatcgacctccacaaggtgatgtaacaa

SEQ ID NO: 360072 - DNA, 293 bp, Zea mays
gcgccagatcagagagggagagagagaacagagggtttgaggtgtggtgaagggaggcgcactcgtcccgtctggtatcgtctcccccggcagtgaaggagtagaaggaaggagagtaggagtgggttgtggaggggagaatgcgtgtcggctgcgggcgggacgacgacgacgaggtgtcccggaagctcaagagcatggacgtggacaagctggagaacggctgcggggaggagagcccgcggcccgccgtcaagtaccacggctggaaggccatgccgttcatcatcggg

SEQ ID NO: 360073 - DNA, 112 bp, Zea mays
atcagaagccatcttacatgtttacagatagggagcatcgtgagccatttgaatactcagaggatcttacaagcttgactgttggggcagaggatccagaaaatgtaatttc

SEQ ID NO: 360074 - DNA, 235 bp, Zea mays
  unsure (1)..(235): unsure at all n locations
gagcaatatatctcaactcactatacctgtcctcgaatggttgtgactgacacttccagcagcagatacaaccattcgnaggacagtaatatgattgagaaaaatgccgggaatgttcatcacgatgaaggttgtgatcaagtggaagaattattcacagaattctccactgatccaactactgctgatcagcttgtacagaacgacncagctatttttactgatctgaggtcgt

SEQ ID NO: 360075 - DNA, 313 bp, Zea mays
ctttcgcagacgccgctcttcgctcgctcaccgccgcttccttccacgggccatttcgtctccgtcgcccatgctcacctccttcaactctgtgaacccgcgatccgacgtgtagttccgccgtactgcgcggcgacggcccaccggcgaggagccgccgacctatgcccctcggccagtccggcattggctaacccccaaatgcctcccgccgctaactatccgcagcctgtacatacacagacatacagacatacacaccgtaccggatgttgaagcggagaatcgatcccgacgcttcgccgccgctgtc

SEQ ID NO: 360076 - DNA, 137 bp, Zea mays
cccacgcgtccgcccacgcgtccgggttgaagctctgctccaccctctcgctagcggttcctataaataaagcaagagcccctcgtcgatcctcacctccacagctagcatcgatccgccattgctcaccgcacaag

SEQ ID NO: 360077 - DNA, 286 bp, Zea mays
gagtaagagacccggcggacaagcaaacctctccccccaccttcgttgcggaatttcatcgccttcggcttgagccaattgacttgacctcactccctcccgaagctcatctgggtgttggcctcatcccctgcacaagctgaggaatggggcaaaaggactccaagccttcaaatggatatggctactcttctgattacgggggtacttcatcgggatataacttgagaaatactggaagtacgtcctccagttatggcgcgaggtatgtgccttcttcagagaa

SEQ ID NO: 360078 - DNA, 288 bp, Zea mays
atttaatttaatttaatgctacttgcaagaatgcatagtgtacactatataattccatgctacgaactttacacttggaaattacctgattttagttgtggcggccctggacctctgtaacacaaatggagaggcatatgtaaacaccttacttgtagcttgtgtgttagtagttccatctgacttcaatgaggataaaggcagtgcaaaaggtctcaaaggtccaaactctatagtctccggtggtaactcatttttcacttgtttcaatgtgccattgataactta

SEQ ID NO: 360079 - DNA, 286 bp, Zea mays
cggacgcgtgggctgacgcgtgggtcgatattcctccttccttccttccttccttcctcgtgaaggcgtcgagtgagtcctgcgttcttgctctcctctgctaagcacttgtctcaggacgaccccctcgtattcgcgtgctcttgccttcacacccgggacgggagttccttgctaggggagagagcttcccttgctcgtgtcctcactcactcactcattcaccgacggtcccagtggactgaggtgagacttcggtcggagccggccggacggaacatacagg

SEQ ID NO: 360080 - DNA, 284 bp, Zea mays
cgcgactgaccagcagctggatgctatgatcagcagctacgggaactacacggtgaccgaggacgacgtggccaacgcggcggtgtacctggcgtccgacgctggcaagaacgtcaatggccaaaacatcgtcctcaatggcaagttcggtctttagaagtgtggccgccaacttcagacacccccatgcacactggtgggcgacttccattcatgccccgttgtttcctgaataaattgtgtggctgtcggtgagccacatacgtgtgttttcatttctcttt

SEQ ID NO: 360081 - DNA, 276 bp, Zea mays
gtgcttggttcttgggctttgctaggagattagaacagttttcaagtgagcctaggatccatgtgaacgatttgaatatctcgcctcttgtcttgcaagtgttctcatctgctgttaatacaaaatcagcaagagctagtattttgttcttccttgtccttgccatagcatgtggtttcgtgctgctgcccattcgttcgatgatggtttttatatgatggggttgtggaaagcgcttgcggatgtagcccttcatgtttgggaaattcgtacgct

SEQ ID NO: 360082 - DNA, 321 bp, Zea mays
cttgctttcgaccattgtgacacggacacaccgccaccaatatttttatctaacacgattaagaagtaggaatgcaatgttcctttaagcattttcctttgggtttggagggggacccaagaaatgctacatgctttatttgcttctaatgaaaatgattgatctgtcatcggttccaagtgatagatctgtcggctaatcgtctcaaggagaaggatccatccctgattctgtacctgcacttaaaagcgcacaatgtcgaaagagaacttgacatcagatgcaatttctctgtcctagaaaatatgcctcaaactttct

SEQ ID NO: 360083 - DNA, 316 bp, Zea mays
cagagatggacatattggcacacagacagacaccattaacgtgccagaaccaaagcaagtccaaaaacccaggcgaaagatgaattcttctgtaattcctgagaggaaagatggggtaactaccaggagttgtgcagaaacccttccttcggttcccaatcagatacagggagcatcattcccacactcttcaggagatgctggatgccagaatgcaccagccgaggcacttgttctgcgacaacaagcaggagcaggacaaggcgaaacatctgatggtttgcctggatctgccctgacgtcgctgtttcaacat

SEQ ID NO: 360084 - DNA, 314 bp, Zea mays
cccacgcgtccgcgaaaccaaaatgtagctggttgtctcaacagttgtttccattctgaggattatatagataccacaagacctctttgtaattctatgattagtggactataaacacatgcaagggtagggtaataaactttgtgagcacaaaagacatgtaccaaggtcattcaaggccattcccggttgattttaacgaactgtctgatgaaactgtaagaatgcaatatggagatataaaagattttgatgatccgaattcatatggttgtgtattcatattaccgacaaagcactatgctgacttgttt

SEQ ID NO: 360085 - DNA, 276 bp, Zea mays
tcttcctgcaaaaccatcagatctatcataactctctctacctcatcttcgtttgcgtacgcttgttgacctgatatggctccgatctgtttgaggatgatctctgcgtcgttgttctcctggctccctgccactgttttcctgttgctctcgctctccgtcgccgcacttacgctctcccatgctaagaattatctgacttatgttatccacaatgactacttcgacatcgagaactacggcaatcccgcatgcctggattgtcatgtgtctttt

SEQ ID NO: 360086 - DNA, 125 bp, Zea mays
gtccgacttttattctgaagggtggttactgaacgtcagcgcatgctgctggaagaatttgcagtagaggaagctgcgaaagaacataacacttttgtagcaggaaattggtgggagctagttgc

SEQ ID NO: 360087 - DNA, 124 bp, Zea mays
cattagagtacttgaggatatacaacagtttcttaattgatggaaggttgaaggactgcgtggatttgttagaaagcatggaacaaaatggactgcttgatatgaggaagatacaccatgccag

SEQ ID NO: 360088 - DNA, 120 bp, Zea mays
cacgcgtccgccactcttcctaacatatcaagctcatatcctcatatctccatcaagtcttgctgtctctaatagcaacgcaacaagatggataagctcgcattctgaagcgtcgtctac

SEQ ID NO: 360089 - DNA, 160 bp, Zea mays
aatagctttggtgcaaacaagcaagcagcagagcagatcaagtaaaggtagcaatttgagtagtgtgcaagctaagatggggcaacaagaaaaggaagtgatcccgctgatgaccccgtacaagatgggacatctggagctctcccaccgcgtggtgctg

SEQ ID NO: 360090 - DNA, 101 bp, Zea mays
tccacgcgtccggtgtcgctggtcgtggacgtggcggatgtggatgatgagccgttccagtactacggcgagctcaacctgctgctcagcgactggtacca

SEQ ID NO: 360091 - DNA, 296 bp, Zea mays
cccacgcgtccgtgtaactctctttactggtgtgaatggctcctcactgcaacctctcgttgctcacagagtaaaaaaaattactctcatctgtgtgcaagcagtctatcaaaagaggcatgattggggcagccaacttttgacaacacctggaagcacatcagtgccttctgtctcattactggaaactgtaggttgcttgataaatccaaaatttccttggaactgcaaagtagtaggttatcttcagcagagaaagatctattgcttattccgtggaattgtcatatctgtac

SEQ ID NO: 360092 - DNA, 291 bp, Zea mays
ccttcgatcccgctttgtttgtcgtcttcgcccgctcccgaagctccgacctttcccccactttcccttggcgtctactgccttgtccggtgtagaaaacaacgggtttcgtttgtgttggtttgctgcggtttttttccgctcctgggagttcaatccctgctccatctcttaagagcactcctcccctcccactcagtgtgctttgctgttcactttggattccgcggctttgtttcgggttctttattaggaaggttcggttcctgggttgggaaggtcccccttccg

SEQ ID NO: 360093 - DNA, 290 bp, Zea mays
tcggcacagtggttcctactccgtaagagaagttgttcatttggcttcaatcaaagatgttatatagatcttgcaagtagcatgtccatataggaaatttttttcagtaacgtggatagttggaacaacccatggcatttctgcccctgttttgcaccagcttttgttatccttttcaatgttaacaattatccaaagggtctatgctttgtgggttagatgtaaaaagatttatgtaactctcatgtaccacatgattttgtaatatgataatatcatgcttttacaaa

SEQ ID NO: 360094 - DNA, 184 bp, Zea mays
ctaaagtttagtccaggttttggatgccaaatgggaggactaaacatgagctgattataaaactaattacataaacagtggctaattcgcgaaacaaatctatttggcctaattagtctactattagcacttgtttactgtagcgaaacatgagctaattatagatattatgctaataaattgc

SEQ ID NO: 360095 - DNA, 293 bp, Zea mays
ctagttctagatcgcgagcggccgcccttttttttttttttttgtttttttttttttttccaaacatataatacgtgatatatattagaaatcatgacccatacaggttacaacagggcctggacaaaatcacatattgctggatgtggggaaatcggtctgctaatcacagtgattgtgtgtgatacgtgtatacattatcaagtgagatgtcatgtgccgtaacacctcaatgatctgaccttgttcagctatcttctatgacctcactctggcaagcctttcccttatct

SEQ ID NO: 360096 - DNA, 292 bp, Zea mays
tgcagctccattcgtccctccacctcacccgccggccatctctcgatttctttttgtgtgctcagttttttctttgtgtgtcatgagtttcagaacttgattgggatggtttttgtgccatgagaattagggtttgatagggatgatttgggtatcagttcttacggtcactggaatttgcatattgtcatagtctaatgccattaaattttgagggtagcgatattgttttcaacctattgaatagggtatatgatgatgttggcaagcgctggagcaggtaatattttgt

SEQ ID NO: 360097 - DNA, 167 bp, Zea mays
tgcagaatagcaacaccaaattgggacccatttgacgagctgaagatgcatttgtacttttcattaccatgggaggtctacatagtttacataaagcactggctgatgtatattgatacatgcgattgtcatattgatatcaaattgacttctgtcggatgtcactc

SEQ ID NO: 360098 - DNA, 449 bp, Zea mays
caccaagcaagtgcactgcagttctctgcagcatgctgccgtattatggtggctattattggtcagagtacgttgaacagtatcacagagcacgccggctagagaacgagaagcggcggctggagaacgagaagcgtgcgctggagaggcaactagcggagaagacgagggacgctcaggtgtcctccacccaggtcttcacgctgcagcacaaggtgcgagagctggagcagaggaacaccggactgtccggggacctggcgaacgaaagggaggacacgaggaaggccggcctgctgttcatggttgccgccgacaggtaccaagaggaagcccagaagcaaatcagggccaaggcagaggaactggccgacacgaggaaggcgggcctggcgctgatgaacaccgccgacacctaccaacaagcggcgaggaagcagatgaaggag

SEQ ID NO: 360099 - DNA, 450 bp, Zea mays
cttggttgatacaagagtttgtttgtttttaatcatgcaatttctcactttgacttgagctttcctattattttgcagatgcttggcaacatagtagtttttgtcaaggcaatgccatcattgtttgccccgttttatgaggacttctttgtaaacgcttcagatctgtaccagacgagggctttgaagcttgaaatactgaccactattgccacagagtcatctattcccgccatttttgaagaatttcaggtaattgcttgtggctgcaatggacagtatatctgctgagttcttggaaattgcaatgttctattaacggcttttccttaaaaaagttgcattaagtttttaacatctaacaagaaatcttagctaaatgtttgctagatcttgagatcatgtattgacagtatggcgtcgtgtctatcttaagacatgtaatttcac

SEQ ID NO: 360100 - DNA, 340 bp, Zea mays
ctgttcggcaacgccctcttaccacatctgaatctcacccacccacccccgcgcccgccgccaaagcatggcgccggcgatggggctgaagcggcctgcggctgctgcggcggcggcgggaggcggggcagcagcagcgcagacggtcacgctgtccgcgccggccgtgcgtggaccggtgcgcgccgccgtgaggcatgccgaggccaccgccccggccgccaaggtcccggcgacggcggcagcgacggcggagatcgctagggacggggtgctgtgcctggatgaggtcgacgggaggcggtggagctacgtggtcgacgccgccggcgccgcggtc

SEQ ID NO: 360101 - DNA, 318 bp, Zea mays
gaagaagataaaggctagcttcgccaacgtgggcgcctattcaaacgaagataacttcatacgaggtgaccctgagggtgttatcgagtggatcagcggtgaagccgaagcttttgaggagattttaagtgatcgtggggatgtctgcgtgttctctggtgcgagaggagtttcagccatcttggagatggcaggttgcaatcatgttaaaaccttggcccaggccgaagctgccctctccgtggatgacacaaaagatccctcggccgaagcaagtttaatgggcggaaaatttttcactgacatctgagaaaatgg

SEQ ID NO: 360102 - DNA, 226 bp, Zea mays
ggaaatcacatgtcttgatgttccaagttataagggtatcattggtcttcagcgggatatggtaatggtctccaacgggatgtggacatgttgtagttattagttgcaatgcaccaaagtagtggcggacttaggatttgaacctcgggtattctaagacataaaaaatggtatgtaataccatatacagttcagtaacacatatatataatggtaggcgtttcgg

SEQ ID NO: 360103 - DNA, 315 bp, Zea mays
attgaaatgaatgtcggagacatagaagatgctaagactgacaggcattatcctggagaggtttcatatggtgctgctttaaggcttcgtcgtgcgaactcctacattagcaagtgtagagaagctgctaccttagccaccagcgccacgattaaaccagcaatacgtggaaactgtgagcaagtgaggatgatgattcggcaacaagcatatctaggtcaaaatgtggaactcgcaagtcccagcgcaagcactgctccaagtgagaacaaagagattgaaattgtaatagcatggaaaaaagctcatcagtgg

SEQ ID NO: 360104 - DNA, 271 bp, Zea mays
atccgccacgcgtccgccaaattagagattcaaaggttgagacagaaaaggttcagaaaggaaaagaagaagaagaacgtttcgaattcaaggagcctgcatctaggcaaatgaaggaaaaagagaggtggctgtggtctagtcgctcgtggaatcaacaaggagtctggcagcagcactgatggttttgttccatatgaatggaaacgtacggtcttttcctggctggttggtctggatgttctatcagtcaacactaagcatgaatgta

SEQ ID NO: 360105 - DNA, 231 bp, Zea mays
cacacggcgcacaccaagccggctgcgccaacaactggggcttcggcgcttcgcttcgcgttccatccacaaagatatggcgcaagactctgaccaagcaggcgctggaccacctcctccggcgcccacgacgactagggtggcgggcaccatgacgctcagcagcatcctcaccgtggcgggcatcctcctgctcttcgtcatcttcgccttcggcatcgtgaccctcca

SEQ ID NO: 360106 - DNA, 171 bp, Zea mays
ccacgcgtccggacgaggttctagcacaaccaattccgaaggccaaactgttgtaaaacactggaggtgcaccacaaccaagagacagtgaagtacttgtataattatactgtttgtgtcatatgtatttggtgtaggaaaataaagaaactccattgcccgttcttgttc

SEQ ID NO: 360107 - DNA, 228 bp, Zea mays
caaatcgcaaccaatcgccgagttgcttgtgttaaatagctcttcgcgtacgacacggcaagctggctgcgacggcgactttctcatctgctcactgctctgcttctccactccgctccgctggcagctcaggccatggcgacacaggcgctggcgccgtccctccggctcctcctgctgctaccgctgctcgccgccgccgccgccgccgccgcgttgtctcaccca

SEQ ID NO: 360108 - DNA, 296 bp, Zea mays
cccacgcgtccggactttctcatctgctcactgctctgcttctccactccgctccgctggcagcgcaggccatggcgacacaggcgctggcgccctccctccgcctcctcctgctgctaccgctgctcgccgccgccgccgccgccgccgcgttgtctcacccagcgcacgagttctgcgcggtcgggggtgacgcctccggctgcggcggcggaggagacggcacgaggatcctgatcaaggggtcgggacggtggtcgaacgcgcacctcgcggaggaggccgacgtctacatc

SEQ ID NO: 360109 - DNA, 292 bp, Zea mays
  unsure (1)..(292): unsure at all n locations
gtcaaagttcgacaatgtcctcatcgatgcacctggaagtgctgccaacatacagggcacggatttgccagtgaaagctggtattggcgctggaacaatctccccatcggcaacatctacttgtaggaactctgtagatgggcattctaacgctggtgctttagctgctggagacacaaatctggatttaaggtctcagccgccaacaagtccatggagctgcttacttggagggcttgtttgtgtntcttgtttgtgaaggaggattgtaggaaatacgatgattcagaga

SEQ ID NO: 360110 - DNA, 284 bp, Zea mays
  unsure (1)..(284): unsure at all n locations
cggacggtgggttcctgtcacccccatgttgactgctgcccgccaggccgccagagagggaggattaggaaaggggggaaagagagacggacggcttctcgtagagtgggtaagactcacatgatgcaattagctccatctttccctcttctccttttgcgggcatactcttctcctccgcctggctagatccttctttcctcgtcccggattagctcccaatctcgccaatgtgttncaggttgctggccgtggaacatttcttcagttgggcccactctctg

SEQ ID NO: 360111 - DNA, 287 bp, Zea mays
ctcctcgcgcatttctcactcgaccaccacttcggcaccgcagcgtccgaatccctccgaaccccgacccaagcgcgctgtccggcggtcctcatcgaacccgccctgatccctagcgctcgcgtgctccactctacctacggagggagcccgcccagccggccgcctgtgcgttggacctggccgcggcctcgcacgcagatgatggtggcggagaagccggcgccgggggtgttgggacgtgcacgatgcggcggacgacgagcaggagccggcgtcgccgtcgt

SEQ ID NO: 360112 - DNA, 283 bp, Zea mays
cggacgcgtgggtgcagcgctgcttagtgagctgcaggagctgtcagcgggtgtgcttgagagaaacaagggctactacaacacatcccagggacggccagatacgtcggtgggatatacttactcttctcgtggtgggaacactggagggaggtgggatactcgctcatctggatcaagtgatcgggatggggaacctgatcgtgagtctcagacacaggggcgtggtgcagggggcagtacagacgcaattggcagaacacggagcatgatggcctacttg

SEQ ID NO: 360113 - DNA, 101 bp, Zea mays
gtcacggggtgcccaagcagttccagggtcgcctccatgtggtgcccaagcactcagattggttctccccaaggacaattcataagcttgaaaagcaagta

SEQ ID NO: 360114 - DNA, 311 bp, Zea mays
cataatcctaccggtgccgcagagcgagctcatggagtccgtggccgggcagcgtgcaggtgcagcagctcatgtacttcgttccccagcacgacggcctagcggcgcagctcgtcgctccgtggttcggctacagctggagcgtgccgtgcgcggtgttctacccgcaggcggtgggttcagctcaggagcaccagcaagcttcagagcctctggatcacaaacgcgcgcatagggaaaggtccctgacaggttcgaacatggcctccagcgccgcgtcggggcgcagaactcggacaccgcgcagtccc

SEQ ID NO: 360115 - DNA, 244 bp, Zea mays
ctgccggcgccctgtaaccgccgccgccaatggacgccacccgccgtcgccgctgttgccgtggagatccatccattgccgtagtcgatgtggccgcgccagccgagggtgcaccggccgatggcgcgccggccaagagcatcctagccatggtggcgaactagggcgcgccgaccaagggtgcatcggccgatggcgcaccagccacgtgcgcgtcacagaggggcgcgccggctgagagcgt

SEQ ID NO: 360116 - DNA, 286 bp, Zea mays
gcacgcaacactgtctcgctcctcccctcttctacctcgatccatcacctttgcatagcatatatagcgcacagctcactgcaggcagacgaaacaccatctcatcacatcacatcagagcagagcagagcagagcatcacccgatcccgatcccgctattcccagcctgcagtagcagcagcagtcgcgccgccctgcccatcgatccatctggctatcatacctgtcgacatggaaggcggactgagcccggagctgcacgcggcggctgagccggtgcggtcg

SEQ ID NO: 360117 - DNA, 286 bp, Zea mays
gcactggataacttggaggcagacacttcctcataccactgcagcgttgtccgagccttagctctggaacaaatagatccctccctggctattggtttttactgtcgtgacaaaggtgaaccgttgtagtttctcggatgcccattcggtcatgttttttcaagctctaatccctatgttttctatttgcatctttttatgcagacgactttgatgatttctgttctcgggcctctgagttggcggagaaggccaatggcgcgccactctttactgttgtgcagtc

SEQ ID NO: 360118 - DNA, 100 bp, Zea mays
aagaccgtgggtcgaccacgcgtctggagcaaatgttgatcagtaatccgtcacgtgtcaaggagtacctaccaatcaccggtctggctgaattcaataa

SEQ ID NO: 360119 - DNA, 281 bp, Zea mays
cccacgcgtccggaaacaaccatgttgtgctgcgataagagcgtactggaaatgtgatgtgtaatttgcatctttttaatgtcatgtaacagtaagaccccatatgtatgactcatagttctttttttctttccctaagctaggttctaagtgaagacataccacatagacttatcaatatcgataaaaaggattagattagtataaacatatttacctatcactaaaaattgtatattgactttttagaaataatctgtgcgtattgataatgtttgctc

SEQ ID NO: 360120 - DNA, 120 bp, Zea mays
cgtcggttcacttctccaggtaaggaaagggttcgtactcatggcgccgccgcagccaaagtcgggccttttcgttggcatcaacaagggtcatgtcgtcaccaagcgcgagctgcctcc

SEQ ID NO: 360121 - DNA, 309 bp, Zea mays
tgcccctatagcacatttctacctattttgatgattaagtgtccaatacatcatcatgaaataactagtttcatatgagtatgagcataggtccacatgaaggcaatttgaaggtttcaagtccaaaaaagttgaaataggagcctgaaaatgcaatttggagcaaaatggtaaaactatgaggtttgcactcttagacatgttgcataggtccattacaatgtttctagcacttgcacttgatttctaatctcttttgtagtaaagagtgcattttggacttggtttggaccaattcagaaccctggt

SEQ ID NO: 360122 - DNA, 303 bp, Zea mays
aagatttggcaatcgcttatctttgactcaataccttatgacctcgaaaaggtttgaacccgttaggggctaaagatgccaaaggttgctgtggagaagttcgtgagtttatctattctgataatgggactgtaaccatggtatatcatgtgaatatttaaaggaactgatagagagatacaatcaatctcaaatgaacttaaggataataagggtcaacatgagatatgttgttctaaaattgaaaccataaagggtaaatggcttccaactatgtggattcattcgtaactttccagaaat

SEQ ID NO: 360123 - DNA, 303 bp, Zea mays
cccacgcgtccgcccacgcgtccggtttctggttctagtgaaggaatttgatccacatacttgtacttggtcgattgtcaggacttatgggaaaccaccggtttctcgtggaggtcaaacagtgactcttgttggaacgacgctagttttgtttggtggtgaagatgcagaacggtgtctcttgaatgacttgcacatccttgatcttgaaaccatgacatgggatgatgtggatgcaattggtttttataatggatcaagaacagaatgtcacaggccagaaaggcgctgacactgtccgtc

SEQ ID NO: 360124 - DNA, 302 bp, Zea mays
cccacgcgtccgaataaaataaaataatttctgctcgctcctatttcacgcctagggcttggcgggagcctccacgtgagggagtgttccaatacaattggattgctcatgtcttttcatcaacttaatcttttgtattgaactggtcggtgcatgcaactcaatgcatataaatatcttttaagtgtttcatcagggcgagaaagcatgtctgttagcatataagcatgaaaatgtgttctgtttacatgttgaggttgcttctaatgtttacctttgaaatacttgtttggcatcttatt

SEQ ID NO: 360125 - DNA, 114 bp, Zea mays
acaagagcaaggggaagttctccggcatcctgcacaagggcttcaagcctgacaagcggagatgcacacgccgccgtccgcgagccacgatgcgctccaccctcgacccgcaat

SEQ ID NO: 360126 - DNA, 310 bp, Zea mays
ggccacgggggtcagctcatgaatattgccggcgacggtacagcaacggtgggggccgagggggcatttaccctaggctgcctgcctgtgcacgagcaaccgtgaacgccagcgggctgtcaggatcgacttctctgcagaaggccaccgtcgaattctgtttttttacccggtacgtggcctatccatttggtgccgcgtatctgctttgcgtcatcagaagctaaagacgaaatcgacggagacggatcaccagcgctcttctcgtgtggccaactgctggacccgtgctctgctcgtctgccgccgg

SEQ ID NO: 360127 - DNA, 304 bp, Zea mays
cttgtctacttcattgtttactatctcgacgtcttgatttccatgttaccttttttataggatctcttaaattgtttcattactggctcattgcattccatgggcgctgcatttcctggtttttgatatctattctatcttgccttatggatacacccatgaacttgtgacaggattgtccgctcatatctcctacattatggatagcaatatacattaaatgcttctgatatggcaaatgctactgtgccccccagcaatcgccaaaatggtcatgcaggatctctcgaaacgtatggtctta

SEQ ID NO: 360128 - DNA, 322 bp, Zea mays
cagaaatggagcttttggaccatctgtggtatcctcagtttctcatcagaatggatccattgtaacaggtggggtctaacatagcacaggccgaacaggctcagagtaatttcccatccagaccccatcgaccggtttctgtgacgtcaaggaatcattttgtccatcttctctaaggtaaacaccaccttcagatgtttccggaaagatctggagacatgagtggtgtcaaggcagcaaaattgtcttcttttaaaccacaagcttacatgaacctctacaatcatggcgatattgcagcatctgctgctgccaatatagc

SEQ ID NO: 360129 - DNA, 312 bp, Zea mays
gcaatagttatcttcaatactatgtttggactaagctcaaactattggatggcattaatcacacgatgcctgcttggaatcatgtgtggttatctcgggccaattaaggcttatgctacagaagtgtgccgaaaagaatacaatcatctggctttggcagttgtaagatgctcaataatattgcttttttgattcttcattctgaaaccccaatgttcatgagttgctactgccgatccaccaggtttcttcctcacgaggcattggtctcattattggtccagctattggtggttatcttgcgcacctgca

SEQ ID NO: 360130 - DNA, 307 bp, Zea mays
gacacaaatggagatcttccaactccatctgatgatcctgccttcgctactcacatgcttcttctccacactcctactcacacagctgatggctgcgggggcggcggaggcgacggtgaaagtgagcactaccccgatcttccctgagatcccactgggccaggctagaaaggacttccaagtgctgctgcgcgtcgaggcgccggcggcggttgtgcgtcccgaggcgcgcgtccccatcgacgtcgtcgccgtccttgacgtcagcggtagcatgaatgacccagctgcagtgccgccggagagg

SEQ ID NO: 360131 - DNA, 304 bp, Zea mays
gtctaaggtattctgtgtgtccaaaacatgactcccctagatagtagttctatttcaaaaattatttggtttacaaagtacaccatgaagaacattatatcatcaaagcatcacttcagctttgtgtgttgaagagatttctgtgtccttagtgttcttaatgtactttcacaattcctagtcgatacgttggctgaaacatctgccaagattctttagctggttcatgaggatgaggtcctttaggtcctacgtcctagctacctgcaatttttaagagcatgtggtatacatacttttgttt

SEQ ID NO: 360132 - DNA, 101 bp, Zea mays
gatgttcaactgtacaagatctcttagtccaattttagctcatcatgtcaccacttcttgatcccatgctagctctacatattgtgtatgaggctagcttg

SEQ ID NO: 360133 - DNA, 106 bp, Zea mays
cagagcacttgcgtccaatggcacgttcaattgctctgggtaatcctttgtagtgcaatcatcaacttctaattcaacacatcacttgcttccaatggcacgttca

SEQ ID NO: 360134 - DNA, 308 bp, Zea mays
cccacgcgtccgcccacgcgtccggttctagatcgcgggcggccgctcgcgatctagaactaggttttctcgaagaagggaaggcagcctcttcctcgtcgccggcgacgtcaccctcagcggctatcagggatgccggtcagggacgtagataccgccacgccttcctcccagcacttccccagggctgcacagttaagcgcgacggctgcacacggctgcaaggtacagctcgacggctgctggtaggggcatcaccgcatcatccctgcacggtaggctcttgacccctgcacaatacggctgga

SEQ ID NO: 360135 - DNA, 106 bp, Zea mays
cctaattaccagctacagccagcatccgatccagcgcccgcctctgctccccatggactccgaccaggagtccgtcgacgactgggtcgtcctcgcctcgtcctcc

SEQ ID NO: 360136 - DNA, 106 bp, Zea mays
cccacgcgtccgcgtaaacaccatcagagtgtacacaagaacacgtacgcggcgcacggcgtcgttagtcaccaagcgggccatcggcaatggcgagcacgcaagc

SEQ ID NO: 360137 - DNA, 267 bp, Zea mays
ccacgcgtccgcaagcattaaggcatttgattggttgaagtgtatttactgggatcgccagaccaattcaattcctgatgttcaagcagaactgaggttgagactgcatgaaattgctcgctttctgaaggagaataattcacaagaatcaaaaccagggtctaaaaggaaacgttctgagaaactggtatcgaaagccatgaagtatgtcagacggctttactacgcttgtccctctgaggtggtctctgttctattggaccttat

SEQ ID NO: 360138 - DNA, 264 bp, Zea mays
cccacgcgtccgaaagactgctggtggcttgctgatggttccaggcctgttaaagagcttgactctgctgttggatatgcactgttggatcctacatgggcttcccaagacaatacatcaacagccataggtaacattgttgcccttctgcattccttttttagcaatcttccacaagagtggctggaatctactcatactgtcatcaaacaccttcggccagtcaattcagttgccatgttaagaatcgccttccgcatattg

SEQ ID NO: 360139 - DNA, 269 bp, Zea mays
ggtgcccgctgctgtgcatcgctcgctcaccaccaccaatcgccaccccgtgcggccagcgcgctgccatcccgcggaggactggaggagcacgcatatccgagcgttccctgccgcgtcgcatggactcatgctgtcgcgggcacgctcccgcatcgcctccaaccgggtgcctgcctagcctggcgattttcttcctcgcgtagcccattccgcagcacaaatagcgcgtcactttcccaatttctatcgcgtgccccccttccgat

SEQ ID NO: 360140 - DNA, 197 bp, Zea mays
cgaacaagccacgcgccccgcctgccccggccgggccggcaggcggcgcggcgtgggcctcgccctcctggaggaggccctgctgggcctgttcgccgcggctgtggtggccatcgccgtggccaagctgagcggcaagcggtagcgcctcccaccggggcccccgggcgcccccgtggttggagactgggctgcag

SEQ ID NO: 360141 - DNA, 306 bp, Zea mays
cccacgcgtcagccacgcgtccgctcagttgaaactagtgatccagagcagcaacctaattagtccaggccagcatcctgagtggaatactattaatgcacttacagtacttcaatctgttgtaagacccttccagtatttcttgaatccaaaagttgtgaaagagcctgttccacaacagttggagcaaattgcagcagagattcttgtaccattgcaagtgacattccatcagttctctgacaaggttcttttgtcaccctgatggactaacttggaatatgagcagctcctactcatcacatg

SEQ ID NO: 360142 - DNA, 304 bp, Zea mays
cccacgcgtccgcgccacggaagttcttggtggtgggaagttttatgttcagacagtgggtgaccagagggtggcttcaattcaacagcagcttgcatctttgaaactttaagatgcaccagtcattggtgcctttaatcctgtgaagggagagatagtcctctcacaatttagccttgacaactcctggaacagagctatggtatgtcgcatgtgtacggttactaaatgtttatgatgaaatcaactaatctttatgggccatagtcaatagttgaattgtgtcttgcactcttgctatctt

SEQ ID NO: 360143 - DNA, 311 bp, Zea mays
ccacgcgtccgaatgagcttcagggaaggccgccgccgcctactcctcgtcctcctcttcctggggtgtcgacaagccgcggcagctcccacggtcggagacgaccaagatttcctcttttccgaggggagcacgagcacgagcaccaacgccgaccccgacctgacggttcgcacacacatcgataatttgccaacttctgcataagttcgtagcagcctctgaaacatttcggccaaaatgaggatagcttttctcgtgctgttggttctctccctgtttctcctccctaatgggatcggcaaaagctt

SEQ ID NO: 360144 - DNA, 305 bp, Zea mays
cccacgcgtccggcgcaaggaagcttggaagttggttccctctgcaccacttttcgagtctgaaacacactttccagctctcctccgacaaagactcagaccgccggcggcatgctcctcctcgacggcgaccttgtcctctcctcctccggaagcaccggcgctgcctctcgcacgagcgacagcgggagggagctcgtggcggcgctcttggagagccccgggatccgccacgcggtcgaccggctgaaggtcgcgccggagaggcggatctcggcagggcaggagggggcgccgaagcacgt

SEQ ID NO: 360145 - DNA, 317 bp, Zea mays
cccacgcgtccgggcgatgccaagccggacaaatccaacaaagatgccgatgctctcctgcgccgacccgtgctcttccacgcccactcccagggcggactccgcgtcgtcgccaccgacctccactccttcgcttggcatcgctccctcgacctcgacggcctccgcgacctccaagatgacgttggcatcgctggctcctgctccgacttcctcgactacctctattcttccttgtcttccgaccaagtcaggctcttcttccctgcacgggccctaggtcctgatactgctgagcttgtggctaccaaggcaaa

SEQ ID NO: 360146 - DNA, 310 bp, Zea mays
tgcatgtctacagctgacaaaccatggagtggacgaagcggtggtgtagcggatgaaagacaccacgatgcagttttcagctccccactggacaataaggccaaggtggcggtccgagggaacggctttgaaggattcgggcatcactacagcagagcgtccaacggcaagctggactgggcagagagcatgatcctcatcacgcagccagtcaaggacaggaacatggagatgtggcctacaaatccacccacgtttaggtctgcagtacacatcctggcctctctctgtctatactagtcagtcattt

SEQ ID NO: 360147 - DNA, 310 bp, Zea mays
ttcccgggtcggcccgcgcgtccgctggtttgcggcgggttgtctcgtgccgtgggtccgcggcgccgtgctggcggggctccgcgcagcgcgtggcggggccgctgctgcccgtgcgccgcggcgtcgtgcggggcgtgctcttggtccgggctcgggtccctggtcaccaccagcaagtagctggccgtcgcgtcgggcccgctggcgtgcgcggtggtgtgcgcgtgggagacttcgcggccacgccgcggcgccaacagtctcggggtgctgcgtgggtgttcgtgtggtgggtcacggacccgtg

SEQ ID NO: 360148 - DNA, 314 bp, Zea mays
cagacgcgtgggcgagatgtgtatcccagggtactgaaacattggaatcgccacctcgtcccaccgccgccgccattcatccgtgagacagttaaccagactagccgccgccttgaggttacatcttatgctgtgattgaggatggctcccacatctgcatatccattgagggcgctggcacctactgcatgcacacggtcagccacacgtggaaccgggtcggcgagtggacactacccttccgtggcgagattgagtacgtgcccgagctcaaactctggtttggcacctctgccgagtctgggcagctggc

SEQ ID NO: 360149 - DNA, 274 bp, Zea mays
ggtccggggttcgcgggtccgcccgcgcgtccggccggttctggtgcctgtgcgtctgctccgcctcgcgtgggcgtgcgccccgagtccgcgtgcgccgctcggcactcgcgctggtcggtcgctcgctcgtgcagcgcgccgcttggtgcagcgaaggaaccgtgccactcaacctcgccggcgtcgtgcacgccgagtctgactcgggcgtcgcgagcgtggcggcgtggtcggtgggtcggtcgccgaagcggggctgctgcggcgccgg

SEQ ID NO: 360150 - DNA, 308 bp, Zea mays
gagagcaacaacagaacctgaccttgagtcattctttggcatgccttctcgatcaagtagtctaccgagatcatacaacaacacaacaacgaatcctttcgatgttcaacctggcaatgctggttctggtggtgtaaggaggacaccttctggttcaggttttccctttactcagccttcatcaagcaatcttatggatggcctatcttctatatttggagcacctttaccatctgctgtatttcaagaagtggatggagagagtgaagagagaaggaaggcaagattggaacgacaccaaagaacaa

SEQ ID NO: 360151 - DNA, 117 bp, Zea mays
cccacgcggccgagagactgagagacttgaagcgcaagaacaggcgccgcgcgtgccggcgatggagagggacgtcgtgctctccgcacccgaggccgctgggtcctcgtcctcccc

SEQ ID NO: 360152 - DNA, 300 bp, Zea mays
ccacgcgtccgcgaagagaactggcacgcggggggggtgagtgtcgaggtccgcatgcccatctccatcggccatcgctggctccccagtcgccacgtccgcacacgtttttacccctcgcggcaagccgaccgaccgccggggcgcacagcgtcgcgcggagcaacgccgtcacgtcaggtgcgtcgcgacgatctcctggtccgcctcgtcttcctggcaggccgcgctatagtaagcgggccgcgggatcatcagcccagcttcagatcagtcgatgcgggctgttccagggtttag

SEQ ID NO: 360153 - DNA, 111 bp, Zea mays
gccgttagtggttgtggtgcggggtcatttgcggcgtaggtgcctgttgctgagaacccagccccacagcagtggagtgcgaggactgccgcgttgctgcaaccagcaggg

SEQ ID NO: 360154 - DNA, 114 bp, Zea mays
acaacggatgtatcctgcccgaagagctctggcacgcgctcgtcaaggctggtatagaaattgatgatgaagagcttgcaagatttgttgagcatgtggataaggacaatgatg

SEQ ID NO: 360155 - DNA, 272 bp, Zea mays
cggcgcgtggccggcggtagtttagggggcccgtgaggcgtgggggcacgggcacccgcacaaggtgcgctgccagtgccagcactcagtcgaacgccgagacccgggaggagcaaacagccggaaaggacggagacgggagaacggacaggcaaggaaggagggacgtcgcgacaagggggaggacccgggagggggaggcccggaggatggaggagggcaggacgccgcggcgacgggcggccccagcgtcacatgcggcggcggcggcg

SEQ ID NO: 360156 - DNA, 105 bp, Zea mays
  unsure (1)..(105): unsure at all n locations
nccaaacgaccgctcaagttgagggattctccggtatccagccctggtcagatcagttcttgatggggttaatgtgtgcatttttgcctatggtcaaactggttc

SEQ ID NO: 360157 - DNA, 106 bp, Zea mays
gccgggacgctgggtgatgctactagatcaggggaacagatgcttgaggtagtagatcgtattttctggagttcggtcgtccgtcgcattttctggagttcagcgg

SEQ ID NO: 360158 - DNA, 295 bp, Zea mays
ggaaagggcgtggcgagcggtgccggcggaggtcgacaggggggctacaggtagaaaggcgactccgccgctccagctgaaaatggcgaaatgatttgccttccccagaatccagctcagacagacgccgccctccgctgctctgctctgttcctcttcctccttgccccctgagcaggcgagttgacagcccgggaaccattcgaacaggccgagcccgcccgcctccattgctcgcgtgcgtcaggaaacggtttaaatgcaaacagtgatcctgcaaaaccgccttccattg

SEQ ID NO: 360159 - DNA, 293 bp, Zea mays
ctccagcttcatcgaggtgctgcagaacatcccgtccccgaccttcaagctccccgacctcgtcagcaacttcgccaagaagggactcgacgtggacgacctcgtcacgctctccgccgcgcactccttcggccaggcgcactgctccttcgtcaacggccgcctctaccccaccgtcgaccccaccatgaacgccacctacgccgccgggctcaagacggtgtgcccgccgcctggcagcggcggcggcgacccggtcatcagcaacaaccgggtcacggaccccaacgcgc

SEQ ID NO: 360160 - DNA, 307 bp, Zea mays
gacccacgcgtccgccacgcgtcctccacgcgtccgcggacgcgtgggctgctcggcaccagcgtcatcttcaccggtgtcacgaaagcctacctccggtccgggcagcgagtaaaccgcccggccggcgcgcgtcgttggatatatgatgagtggacgtgacagagtgtcccattatttcttaatttcgtcattttcctccttccttctaataagacttctctctcaccctcggccccaccttcacgtgtgattggaggtgtttgtcgcttttgtaataattataatgcaggatggcatgttgcat

SEQ ID NO: 360161 - DNA, 175 bp, Zea mays
ggcggcgtcgtcagcactacgccaggacccggccaccgccgtcgccgcgttccaggtcagcgtcggccaggccggaaccaccaaccgcaccgtcaaggtgcgaagaacttcacgctgctggtgacggggccaggatacacctgcggccccggcaaggtcgtcccctccaccatct

SEQ ID NO: 360162 - DNA, 175 bp, Zea mays
cctcggacgtcccgtcccggactccgactcccggctcgctctcgcagcaagctcgaatctgcacgccgccgccgccgccgccgccggcccacgcccacgggccctaggggtgggcgcttggcttctgagaacatgtaacgggtgttgatacgaaaatagggtcctggctgaccgg

SEQ ID NO: 360163 - DNA, 177 bp, Zea mays
gatcgatcgggcgcgcaccctgactcacgactgggcgcacacatattcctccaatttttttttctgcgcatggaaactagggttggccctctgccggctgcccagatcctctctttcttgacctcttcttccgcttcctgcagatcttctgtatatctattaaggaggcttctccat

SEQ ID NO: 360164 - DNA, 174 bp, Zea mays
ctgagagggaatcctgctccctcttgctccgcgcccggcgcgcggcggctttggtatccgtgcgggtgtttctgtccggcgtttacttgccgggccagcgcggcattggaggagggagatcggaggcgtgatcgatggggaactgcgtggcgagcgggggcacgacgacggtca

SEQ ID NO: 360165 - DNA, 164 bp, Zea mays
  unsure (1)..(164): unsure at all n locations
cgggctnggtgagcctagtggcctagccagtgggatgcttgaaatattcattacaaggaattttattctttgcattcaatgtactgattcgggtcttctcccaggttgagggtctgatgaagctgatggaaggcgagcatgtggggccattcaacctgggtaac

SEQ ID NO: 360166 - DNA, 303 bp, Zea mays
ggccttggtgattctggttccatactctacaaaacagggcctattattggtcctggagggcatagcaatggggggagtccatataactcccaaattcaagatatggaccctgcggacaaatccgcatcaaataaaaaaccaaggttgctttatacatcagcagaactagccgctatggaggtgaacgcaatggagtgtcttaggcggttgcttaggagatctggtgaagcactctttctgcttcaacttatttgccagcataatgttgcccgcttggctcagacactgggcaatgatttacac

SEQ ID NO: 360167 - DNA, 305 bp, Zea mays
gtgcacttcacctgagggcgctctcggattcccaccggatttgatgcgcgcaccttcagcttcaaattctcggcctttttgccgcctggcaaaagctgctgtgtcatagcttttgtttcttcttaaggtggacgagatcactgtgcgcccgaattatttccgcacttgtttaacccacgggctgttttatgtgttgcttttgaattgctcgatcccttttgctgctcctcgtcttcttcatgggaatgtatgtttcctctgctcggccttgctctctgctgtgctctgctgtaacggacgcagcc

SEQ ID NO: 360168 - DNA, 133 bp, Zea mays
tcattctcgccttcgacttcccaggagcgcccagcgccgcggagcttctagaacacgcgactggggcgagctagacgaagctaaggaggcgcgaggggtgacgatgcggggcaggtgacggtgcggcgtggtg

SEQ ID NO: 360169 - DNA, 312 bp, Zea mays
agaagaagaagcagcagcagctgcagctgcagggcagcaggcatggagcctcatcacgcaaacaagccaaggccaaagctcagcgcgacgaagcactccaagttcatctcctgcaagctctacatttccgaatcccgcaacgctacggccgtggacgcatggagcgtgcgagcaagagtgacccccaggtggtcgtcgtcagccagttcggggaccatcactacaaccgtttccgctacacgcttgtctcctacatcgtcgtcgtcgacggcggcggatcgtcggcggctggagaggcgacagtagtacata

SEQ ID NO: 360170 - DNA, 314 bp, Zea mays
cacctccctgctcgaatccagcgctcacccgcgccgcgtcgagacatgtcgaagaaaatcgtggtgaagctggacctgcacgacaacaaggacaagcagaaggcgctgaaggccatctccgtgctcgtcggtacgtatcgtatcacagttaattaacagcggacgactgagcttccgtttcccgcgcccaccatccatcatccatcctcccccacccaggcatcgacgccgtgtcggtggacatggcggcgcacaagatgacggtgatcgggacggtggacccggtgcaggtggtgagcaagctgcgcacaagt

SEQ ID NO: 360171 - DNA, 144 bp, Zea mays
acccgaccttgcctcctcctgcagcagcagcagcataaccagagtgcggcaagccgtttcgagagacagctttaggctactgctagtgctagcagtatggcttacgctgcggcttcctggtggccgtggtcgttgcgtgctcac

SEQ ID NO: 360172 - DNA, 298 bp, Zea mays
ccttcctgtcctgctggtcgatcgtacattcttcagcaccggtactgctattcagagcattgccatcagctatggagctcttattcgtaggtggttactgggcggaacttctgttgcacagcacacgaacacgatgatatcccgtgctgctatgaactcgcttccttgctgtggcttcctgccattctttgccagcgttggtgctctaatgaccaagctctgtggctgcactatgattccagaccgtttttctggttggcaatctatccttagacaaagtgctaacctccgtggagaa

SEQ ID NO: 360173 - DNA, 320 bp, Zea mays
ccgtccccccctccatccgcgcccgcctgctcctcgtcctccctccacccgtctcctaatcccttcctcccgccgcagcagcgagagcagagagcagagcggaacgagcaaatcttggggggtgtcgcacccgctctccccgtgctgctggtggattcgttcaaggcgggggccgcctgcctgcacgcacgcttttccgtaccctggtcgccggttgggttgggttggatttggttgcgaggtgttgttgggggtgggcgctcgggtggcggagtgggtacttccccggttggcctcttgctgggcccggtggggcgtgt

SEQ ID NO: 360174 - DNA, 316 bp, Zea mays
agggtttgtgtgagtgtgttagtgagagagaaccatggcgacgcagcggttcacggcggcgctggtggcctgcctcctcgtgctcctggcgctgccggcgcgcgggggcaacatcacggccatcctcgccggggtacaaggagtacaagctatacaagcagtacctgtcggagacgaaggtgtgcgacgagatcaagtcgcggcagtcgacgtcgatgtccgtcctggtgctgtccaacgacgccatgacgacgctgggctccgacgccggggactcgctcgccgccatcaagaacgcgctgcggctccagtcggt

SEQ ID NO: 360175 - DNA, 319 bp, Zea mays
cccacgcgtccgacgaatggagaaggaaaggggggatcgggcaaaggagaagcgggagaaggataaacggaaggggaaggaggagaaagagaaggtggacgaagaggcgaaggggaaagtgactgcggtgatgaaggtggatgggacggagaaggaggtcaagccgacccggcggccagctggggccagcgcggagacgcccatcctagcggtgccggtggtggccgtgccttgcttcatcgcgcctccagggtttgcgggccagtttgcaatgactcatcaagcagctttggcaagtgttacagcacaggcacaaatg

SEQ ID NO: 360176 - DNA, 313 bp, Zea mays
ctacacttgaatcatatggcttcgggctcctctttttcaatcattgacacttaaaactccagataatatgctttggcaacaaatttaaatttttaacactttgccatacacagtgatgggcaacatatatagtgtaaaagggattatggtgctaacattgtaacatcaaattttatccatcggatccaccataatctatggttgaattcaatcttgtatggggacaaaatataggagttctttagaaagtagtctatgagattgatagatgaagacatctttaaaccatgagctaaccttaattgagattagc

SEQ ID NO: 360177 - DNA, 297 bp, Zea mays
ctgacgcgtgggtgtaatgaattgttaaccaaacccaattgcagaagacattcatccactaattcgtcacatgatccaccttagttcataagtttataccaccctacttataggtcacttggtcagtagctgcaacttgcaagtgatttagggtttaataaaaaatttctggtagtaaagttgaaaggtatggtttgaggagagtgaatggtatcatgtcgaattacagtacattacaatttacaagtaaattgattagtcctctcgtctgttgattagtcgcatgtttttcctgtg

SEQ ID NO: 360178 - DNA, 292 bp, Zea mays
tttccctccctttcgtcgcatgcttcaccaccaagtcttgtagcttcctctccccgcccgaaagccaaggatccatcgctccaactccaagcctctcaattccaactccatcgcaacagcctatcgagtccccgaacagtcctgcgcgcgtccgcaatggcggagacggccggcgcggctccagcacagcagcccgctagagtagctacgacgacgacgaacagcgatgtctccacgtgggcgtggctgcagcaggtcctcgcgctgctgttcccgtccagcctcgccgcga

SEQ ID NO: 360179 - DNA, 290 bp, Zea mays
gcacgctgcccccgcgctcgcctccgcccccgatccagatccaggtactcttcctttcgccgcggctgagaagcaactctccctctctgtcctcttcctgtcgccgcactcattttctcttgccggtaaggagtggagatccgcgtccatcttctattgattaggataccgggtggaatagggaacggccatacaccatggcggatttctccaaggaatcttgcccttctgtgaagaacattttacttctggattctgaaggaaagcgtgttgctgtaaagtatttctca

SEQ ID NO: 360180 - DNA, 299 bp, Zea mays
aagccgacctcattgagagtgaccaagacctcgagcgaaattctctgagcgagagcacgagcgatggagagcaaggtagaagcagaagcagtgcagctggcggggaagaagaagaagagcaccttcccgtcgtgggccgccgacgacgggggagtggaggccgccagcatgggcatcatggcgtcgtcgccttctgccgcctctccagcagccatcgtctccgccttcctcgcgcccccgctgtcgctgctgcgtcacgtcggttctctctgcgccggctacctggggctcgacggcgg

SEQ ID NO: 360181 - DNA, 308 bp, Zea mays
ggcgaaccgccctccggtccgccctaccgcccggtcgggccaggcggcgtgtcaatctccgagatccacagggacgcagaacgctgccgatggtgaagccgaggaacacccgcacctcggctccagatccgcccgtaaacgccgttcggcttccgtggcacccaccggcgccggcggtccctgcggccgttctgatctcgctcgctgcgctactcatccgcgtgctggtttccgtggggccctactccggtcagggtgcggcgccaaagttcgacgactatgaggcgcacggcactggatggagctca

SEQ ID NO: 360182 - DNA, 301 bp, Zea mays
ccggaccacatccctatttcatcttggtaccccgtccgtctccgatttcagaagcacggcgggctccccggcagcctctaccgagcagaaagctgagttctaccccagaaccgaggcatggaggacgaagaaaacatcgagggagaactgttgctcgtggagtcacaactccacgacatccaaggacaaattaaaacattactcgatcgccaagaggagttgtatgaacgccaggcacagttgaaggctttgctcgaagcatctaaattgaccagaaatacaacaattaacacatcttcag

SEQ ID NO: 360183 - DNA, 289 bp, Zea mays
ggccgacctgcgcgcgttgccggagcccgccgtcatcgtcggcgtcgccacgggcgcgttcctcttccttgctgacctaatccggcgcatcgacgtgcgtctcgtggtcgacctcgtgcgcgtcgagtcctatggggcgggcacagagtccagcggcaagccacgtatcacggccgacctcaaagtcgacgtggccgggaagcatgtggtcgtggtgaggagctctacccttactcgtgatcgtgaaccgcttttgtgtggctgacgtgtccttttgcccttatagtgt

SEQ ID NO: 360184 - DNA, 300 bp, Zea mays
cccacgcgtccggtttttgccacgccgccgccgctctgccccttccaccccaccgatataccaagatgacggcgcaggctgcggaggagctcgccgcccagatcgagcagcagaagctcgaggagcagaagaccgaggcagaagaggttgtggtggaggaggatgacgaggatgatgaggatgacgatgatgatgacaaggatgatgatgaactggatggacaagaaggggatgggagtggcaagtcgaagcaaagcaggagtgagaagaagagccgcaaggccgtgctgaagcttggca

SEQ ID NO: 360185 - DNA, 292 bp, Zea mays
cccacgcgtccggtttgctgatatggctgacaggggcgtggcaccatgtgcagacgtacaacacacttctggatgggctgctcaaggctggccacgtgacaaatgcattcaggatgttcaggtacctgcagagggcggggcttcccgtaggcattgtgacttacaacacaatgatcaacgggctgtgcaagtcaggcaaagtgggctatgccgcatggtccttaaggagctggggaggacagagcatgccccgaacgctgtcacgtacacaacagttatggagtgctgcttt

SEQ ID NO: 360186 - DNA, 293 bp, Zea mays
cagactgatatatctgtgagatttatattgatttgagtggatgaagatgagtagatatgatgtgcaaattgactaccatttctttctgcgattgtttctttcatctgttaataacatgcagagaaaataaactgatgaggcgttctgaaatcttatactggaattctgcggggtcctcgttcttgaacggagcaaaattaaaggaattaggaggaacatttttttaagaactcaatagtactccatgagatggggggaagggaccggatcttagctggactttcccaggatag

SEQ ID NO: 360187 - DNA, 338 bp, Zea mays
cagcaacttatggtccatgaggtgacaagtagaagttcagcttctaatgcagaattggagtactcctcagaggtgcatttgtttcccaatgcagtttttttacttctattctttttcatagttagatcatgagcctttcatcaactagggggttggggcatagtgagaaaacgttagcaaaagcatctcttataaaaggtggctgtagggagtgcaacatcttgtgatttttaactgaatactggctgcatacctgaaaccctttccccacggagaattgagtaaatagactggagcctatctgcatgtatataatttgggatgttttataatgtttg

SEQ ID NO: 360188 - DNA, 328 bp, Zea mays
ggtagaagggagaaggatgtcaacttgaccatgggagccagcgagttcttcaatctttacaacgacactgccaagagtcgcctcccacgagtgatgccaagttttcctgtggtgagcttggttgatccagatgtcatttgcttccgcctcgaggacaagttccgtgaccctttctggatggttcaagtcaacatgcggaataagttgctgctgtcaagttccatctatatcaacgaagaagaagaagaaggataccctcctaaaagggactgcaggaactatttcatttttcatgacttcattgccagcaagttctcctcttagttgg

SEQ ID NO: 360189 - DNA, 328 bp, Zea mays
ctgggctatagacgctagaacacatcctgtgctgtgagaaacctaaaccttgtgttcagcgatttgacggcctccgttatccgaagaaacaacttcaaccagacatgtggcgagcgaggtgattagctagtgacaagtgttgatctaagggagatcgttttgagcatgctatgatggagctctactccggatatcttgaagatcatttcaacctccacaagctaagctccgcctcgccgccgcagtacatgacgccggcggcgtcgcccgcgcagtacatgacgccggcgcccctcaggatggggtacgggcggccggcgcccgtgac

SEQ ID NO: 360190 - DNA, 319 bp, Zea mays
ccgtttcgttcctcaccagctcctccttccagaaccccagagtctccgaccctcgattccgaaacctaccggatttgcggctgctggagtcgccgtcgtcgtgggaaaccgatcaggtggcaaagttgagtaaagcacaagggtggactgtgtggtgctcataaggaacaaccctcttcttttctggcgggagaataccaaatggcccagctgttgcaccatcaggattctgggttctatgacaaggaattacatgggtgccgatggggtattcttcaattctttggatttcgccgtcgccagcggtccgcaaagatgc

SEQ ID NO: 360191 - DNA, 284 bp, Zea mays
gcccttcttcagcctttcctcccggacctggtgtctccgtgcccgtacgtgccttctccggcctgcagtctcctccaccggccaccgctgcctcgcaattgggcaaggcaatcagaccgctcccatcaaccgccctgaccgcgcgagggagatcaaacgcggaggccgtccatccctcccgcgtcatcgtgatgccaggcctcgccgcagccgagcaggacgccgtctcgctggtgcagcgcgtcagccgcatcctcaaccgccgcttcaccgacatcgtcgcg

SEQ ID NO: 360192 - DNA, 295 bp, Zea mays
cggacgcgtggcgtgacgcgtggggccaaaaaaccacttgctaggtgttacatttcagagttggagttgggaccatggagccttaagttgcttgtcaacttattgtctagtttgtgttttgtacccgtgagtgtttttcttctcctcgtcacagtctcacaaattacttggaaatgtacgtttagccttttggttattttctgcagagatgatactctatattacatgttctgtttatactgggacatggaataccatctattaacatgttaaatgacttattgtacatgctggt

SEQ ID NO: 360193 - DNA, 292 bp, Zea mays
agaccgtggtgtcggtcgctgggaggacaggtgacggaacggtgatatgaggcggtggttatgttgtaactgccactatgacgtcactgaagatgaccacgccaaggaacaggccaaagctcagagcaataagaccgactccaagcagaagtcttcaaagcctcctggttcttatggacgagtatatcatgccactttggacgatgggagacaagcagcagttaaaaaaacttgatgcatctgaaaatgagcctaatgatgagtttctcaaacaggtctcactggcatcaaa

SEQ ID NO: 360194 - DNA, 294 bp, Zea mays
catcaacaacacagatcgatttcgatctaaaggcaatggcgattgctgcgttagagctgctctacgtgctgggaagcttggtggcgctacggctggcatggcaggtgctggagtagggctggctgatcccgcggaggctgggccgggcgctgcgggccgagggcctccgcggcacggcgtaccgcttcccggccggcgacgccaaggacgaggagcgtctcctggcggctgcgcgggccaagccgatgccttcgctctcgcacgctatcagcggtcgggtgggaccggtcgtcc

SEQ ID NO: 360195 - DNA, 286 bp, Zea mays
ccgtaccgcccccaagtgcttcagagaagccggccggccggcaaagaagttaatttagctgatcgagctctcgacctctcgtgccgtgtgtgcagtgtattcttcttcctcctcctgtcgtcgcctagagctagctctttatcaaattaaacactttttgtcaaatcagttcgttctggaatccgttatagttgcctgctgccgtcctcttcaagtagtgcaacaagaaacagggagctttctttatcttttctagcagttggatagggttagggttttccgttct

SEQ ID NO: 360196 - DNA, 289 bp, Zea mays
gttctagatcgcgggcggccgctcgcgatctagaactacccacgcgtccgtgctggcctctgttgtctaaaaagccttactagtctttatcgtggaaggtcaggtgataaatccttattgcattgataatttatggttcatcattggaaatcctttctgtaaggtacttgtgatgttacattatactttccataagtacgataggtaaatcttcagattcattactttctgttatatcttctcataatatgttatttcagttgtccaaccatccagatcctccatcaag

SEQ ID NO: 360197 - DNA, 167 bp, Zea mays
gtcggacgtcagcgtcgtcctgccctactgcggtcgcgcgtcgtagtgctcttagcgcacgaacgtcgagagtagcgaggtgagctgccggtagtgccgggatgggctggcagctgatgggacgttcgacgtaagccgggcacgcgaggagagggcaacgcgtcaga

SEQ ID NO: 360198 - DNA, 282 bp, Zea mays
cacaatccaaattttgcaccaaacattgaggatggtactgagactgaaaagcctaatacatcagatgtgaatcatgatgctggcaaaacctggcatgagtatggtgttgggttttctggacagttcgatcctgaagcaagagatcctcacatctatgatattgatggcaaagaacatttgtctttgcctaatggtgtagcaggtgctcccttggaaaggcagatgaaatttacagttgagaataatggtgtagatgatgaaacctatactggcatgttccaa

SEQ ID NO: 360199 - DNA, 288 bp, Zea mays
cgaagaggagcctcggttgcagttgcagtagcatcccaagttccaacctccaaatccaaagtgggttccagttccagatagaggaagcccaacggcggctgcggcggcgacggccgacgtgctcagagacgcggcgtggaggggcgcgccgccgtggcttcgtgcagggggtcggcccgaccgtggtgcccgtgagaggttgacgtcggtgatgggggaaccgccgccggaccggaggaggctgtaccaggtttggaagggaagcaataaattcctcttcggcgggcg

SEQ ID NO: 360200 - DNA, 286 bp, Zea mays
ctcccgtttgctacgactgggtgggctacgccgccgccgctgccgctgccgctgctctacggtgctgagtcctttgccgatttcttccccggcgaagagcgccaccagtagatccgcccctgctgaaaacgcactcgatggcgtccgctacggggggctcctcctcggagatggcggtggaccacgcgacggggctgggcaccgtggagaagccgcggtttgatgctctgatgccgagtgagatgagcggcgggaggacccagttccggaaagtgaccgtgccgca

SEQ ID NO: 360201 - DNA, 285 bp, Zea mays
cagacgcgtgggtgcggacactactgcccgcactgacccaccatctcgcctcctcgtctctgttgcagcgccggaaggctcccatgggcgccagcagtgacctggacctgacggcggtggccgccgccaagccgcggaatggcaggccgtgcatggccgtgctggggcgagccagtgccggctcttgacgaccccggcatcctcgtccaccccagctccgacttggccgcccaggcgctcgtctcgtccacgcaacagtaccgagatgtgtaccaaaagtcggtc

SEQ ID NO: 360202 - DNA, 188 bp, Zea mays
cccacgcgtccgccaggatcattgtagcaaggaaggaggaagccatggtgtaaatgggcaagcaaggtatggctatctattgctccctgagtctctagcaagttgttttgttaccagattgtggtctccctgggttgggatgtggttggtacaactcttgcacgcttatttcatgtgtgaactactgc

SEQ ID NO: 360203 - DNA, 136 bp, Zea mays
aattcggatccgcctccatggctgccgcttcgcagctcctctctctgttcttcctcctcctcctccctgcttgtgatgccatctactgcgacgaagacgactgctacgacctcctaggggttaagcaggacgcgaa

SEQ ID NO: 360204 - DNA, 183 bp, Zea mays
cccacgcgtccgcccacgcgtccaggcaggatgggaggtgatggaactgttgcataatccagataattccattgaggcatccaagaagggtatcaacaccaggatcttctaccttgagaacttgttcacatctaccaatggcgtacaagatgaaaggcgtattcaagggcctcaaggtcatct

SEQ ID NO: 360205 - DNA, 303 bp, Zea mays
gttttaactactcggccgcgcactgatggatgcggccttgcctcgcagccccattcgccacgcgctccgttgctgaagcccccgcccgcaccgtccaggaggtactgcatgcacttctcggtgtccagcttaatctaggcgtcgcttaccgcttagcttttggcttgctttttgattttctaattctaggtagctgctggagggtcatgttcactggtgagtcagattgatttcttttctttggacatatcgtctcgccttggccatatttctgtagaatacaactatctgagctagagttac

SEQ ID NO: 360206 - DNA, 301 bp, Zea mays
acccgccgcaccctcgctagccacctcctctccgtcgtcgcagcaccgtagctaggccgtggtcgcatcgttacatcctcccaaccgaggcaccacagctactcctcctcttccccccactgttgccataagcaggcgccagaggaggcatgcactgcggcgaggcatggagacggcggttaaaccctagcgagaaagctcggggtgaggcagcggatgctgctgtaggtcctcgagggccggctccgcgcccgcgcaaggcgctcatcgacctcgtcacgcttctcgtataaataaacag

SEQ ID NO: 360207 - DNA, 122 bp, Zea mays
cgcctccaatacaagctgcatgttcacgaggtaccccctgacgtctccgcgcacagcgcgccatactttactcctctgaggatggtctcttcctgtataggcgcaccctcgaaggggatctt

SEQ ID NO: 360208 - DNA, 302 bp, Zea mays
ctcactcttgccgggtccttagtacagatcagcacggcaacaagtcggtagaccgagcgacaagaaagcaatttcctgctcatagcttcctgttcagctcgtagtgcctgaacgatgggaactcagacaagccgtttgagcaggagtcagacgcagtgcatagacgcttgggtcgtgacgactcctacaataaagtggcatgccagagcttcaacatgactaagatcgtgatattgttccgcgaagatcacaacgaagtccacgtagactacgtattgctcgtttacgaaacatgacgttac

SEQ ID NO: 360209 - DNA, 283 bp, Zea mays
ctacgaatctcctacgaatccccaatcctccagtcgatctgatcccccaaacccacagctctcatcgtcgccgacggcaggcacaccatgcggaccgacgatgcaggctgcggcgggttccacgaggtgttcgactccgtggggcgctccatctccttccgcacgggggccggacccttggacgacccgccgcgtcgctgtcgtcgtcgtgtgggctcgggggcggtgcgtgggggtttagggagcggatcagcaaccggctgcggcagtcccgggggatggg

SEQ ID NO: 360210 - DNA, 103 bp, Zea mays
aacaagttcgtcgttgctcgcacgtcaaaagtcaccgagaccctcctcaagtacattccgatcgaagccatcccggtgaagtacggcggcctgaagcgcgacg

SEQ ID NO: 360211 - DNA, 113 bp, Zea mays
gaagatttctacaaggagaaaagtaatacaaacccgcagttccttttcctaagttgaggagctggctgtaactattacatgatgaagttatgggagcatcagcataaacatat

SEQ ID NO: 360212 - DNA, 282 bp, Zea mays
caacgcgtccgctccatgaaccagtagcctctctccaatccccatctcctcttcctggggttttcggtcagtgtcttggcttgtatcggggtcgcaatggtgaaggacggcggcgtgaagaaggtggcggtggcggcgccggcgccggaagaagcgacgccaaccggcctgaccgcgacgccgaccctcaccgtgaagctaccggcaccagaggcgcgggagaagtgctataagaagacggtgggggaggatgcgacgttcctggagatcgctaaggactac

SEQ ID NO: 360213 - DNA, 316 bp, Zea mays
gggtatggctgatgctattgtggatctcgtgagtagcggaacgaccttgcgtgagaataacctaaaggaagttggtggtggagtagttctggaaagccaggtaaactttctcgaacacacatgcatgtgtcgggcacacactcttcagtaggcaatattttacagttggtggttcctttgacaaagagaaaagtttacccctttcctgtttcctaagatatgaaattctatgcaggccactcttgtagcaagtaggaaatctctgcacaagcgtaaaggtgtgctggaggttactcatgagttgcttgaaagatta

SEQ ID NO: 360214 - DNA, 309 bp, Zea mays
gcagtgtgggaggaagtactactgccacgccgtggccgcgctggccgtcgtgttcgcagcggccgtcgtcgtcgctgccgaccggcgcctgtcgctggtggttggcgccgcggtggcgcccgacgaggtgagtctgctccggaaggtggccggtctggtgtgggacggcggtggcagctcgtaccagcacgtgtggccgccagtggcgtttgggtggcaggttgtgctggggtcactggtcggattcttcggtgccgcgtttgggagcgtcggcggggttggtggcggcggggtcttcgtgccggtgct

SEQ ID NO: 360215 - DNA, 310 bp, Zea mays
gattcaagcacttccatccaggctccaaaatctgaacctatttttacctcagtggtggacaatggcttgaaagataagaatgagtctagcagagcccgagacgcaaatcctgtacagagtttttctagaggaaactcctcccaacaaccttctgtagaggattttgaaaatatcttttctaagccgcagtctggcagatatgctgatgtccatgttgacattggctcagataaatatagtgggaatggtataaacgaccagtcacctagatctgatgaatccgaagatgagatatggcttacagcttctg

SEQ ID NO: 360216 - DNA, 308 bp, Zea mays
accacggggccgtcttgctttctgccacctcgccgcctcatgccccgcgcccccagcatctcagggttttgggacgcaggcatttggagcactaggtgcagttttcccaaatgcagcaggtgttcaagcagcaacagctgcatatcaaggaggtggggctcctcctggttttcaagggccacctggatttcaggttggccaagcaactacccagacaagcactgcagtggcagcagctggttatcaggctggggcagctgggcagggccaggtgcctggtgctcagattggaggcactggttttcagg

SEQ ID NO: 360217 - DNA, 322 bp, Zea mays
ctcacagaggtggatgctgttgtgtcatcctccacactggtggatgatcccatggaggttggcatgcaaaccaaagaggttagtgctgctgcggatgatctcatagaggtgggtgctgccctggtaccatctgcacaggatcacacagcagtggctgcttgcctggttaacgatgactgcaatatagttatcactggtggtgtgcataggtcggatgaccaaactgttcaggagtttgggggtgactcccttgacgctgatgaggttgctcccttggtaaatgatgtacaagatgacagtgcaaggattgatatggatgttg

SEQ ID NO: 360218 - DNA, 320 bp, Zea mays
agtgaccattataagaaaaatcattgattattacttggttcatctttatgactttatccaacttattataggttttcacgtatttttgttatgagtgcaaggtgcagtttctgtatctaactacccctttcttaacatcatgtggctattctattactttgttttgtgtatataattaccaaacacatgtttgctactagatttatcggcatgaataattgatgagacaaactcaatgttaaacgtctttctttgagttttcttcattgatagagtcaaaggcataaagataggtgtgtgtttcatttcttcattgatta

SEQ ID NO: 360219 - DNA, 311 bp, Zea mays
ggaagaacaagaagaatgcagcagcataagcaatgcaaggaaggaacaggaaaatgaagatctaagtcccctatctgtgcttgaacacaccacctctctaagcgagagttgctggtcttctgagtgttcggacagcagcggtgggggtaaggtttatccatcactttttgatgttaaaaatggtcaggggaatttcttgattaacccagcatcagttgatatcgaggcaaagacaacagactcagcctcttcggcatcagcagatacatcggatgtttcagatatcacccaatgctctaaaagatcaagac

SEQ ID NO: 360220 - DNA, 312 bp, Zea mays
tgctgtcatttttttgggttcatttgtggttgcttcggtggtgatttgcctccggcgcatcggatttctatgccggttaatcggtttgtgcgaggagagcctggatcgatcggatcgtctgcctattgttcctttctttgttgactggtcagttacgctgtgccctagttttgttcaggacctgtacctgttcaatatagtttccgttgcataatctgtaacccttatgcaccctattttctccatctagtcttctttgtgctgaatcgggccaggtgtttgctacctacatttacagaaaaatgtttcgtt

SEQ ID NO: 360221 - DNA, 274 bp, Zea mays
ctgacgcgtggctgctgcccctcaaaagcctttgtacaaggtgcaggagctgttgtgatatcctcaccagctgaagctagcacaacagctcctgcaatcagtgccaaaaggaccactgctgcccctcaaaagcctttgtacaagttcttaatctatggcaggactggatggattggtggcctccttgggaagatttgtgacaagcaagggataccatatgaatatgggaaaggacgcttggaggagcgctctcagctgttggaggacattagaa

SEQ ID NO: 360222 - DNA, 274 bp, Zea mays
tcccacgcgtccgtgcccaggttggccactacataggcatcgatgcctctgcatcgggtgtcaactatgcccgtgagctatgggagaacaggaggaaacctttcactgctgaattcatcgagttggatccttctgatgatggttttgaagctcaagtgcaggaaaagggcatccaagcagatatggtttgctgtatgcagcacttgcagatagttatgctttgagaatgaagaacaggcaaagaagcttctgaacaatgtatcatcacttctca

SEQ ID NO: 360223 - DNA, 266 bp, Zea mays
cagacggtgggcgagacgcgtggggagaagagggaagaaatgtctgctaacgacggcgccggcgacacgaagatgagggcgatcgtcgtcgtagaggaaggcgagatgagcgactaccggcgggacgcgaagcagggcaagtgctgcgagtacacgctggacggctccgtcgacatgaagggccggccggcggtcaaggggaaatcaggagggtggcttgccggtgctctaatcctcgtgaaccagggcctggcgacgctggcttt

SEQ ID NO: 360224 - DNA, 313 bp, Zea mays
cggacgcgtggcggacgcgtggatgttacaaaacttacttgaagttatttcatcgcttcatgtaagattagctggtgaagttatggcaagatggctgcaatccgaaaggtggcacacactcagcacctgaacacgttcatccattccagcttctggtcaaaacaattgacatgcatgcatgcatgtggaatttccgcgtatgtccaacttaaatgttgcaaccggtgtaaggtggttagtaaatatgcacttgactatggcaacatctagtttccagcttacttgaaagttgaaactgcaactacaattggaa

SEQ ID NO: 360225 - DNA, 297 bp, Zea mays
gaagaaagcagtccagcctgcctctgcctgtttcgtgtgtctgaggatctcctgatctccttcctccctgtccttctcctcccctccccggctacggaggtgctggtgggtgctacggaggagtactacgacgacgaggagaaggaggaggagactctgcgcggctgctgacaaagagtgcagaattgccaagactagtacgccgacgaccaccagcagcagctgtccgggttccatggagggcggcgacggcgagacgacggtgtccgggttcggcgtcggcggcgtggacaccaa

SEQ ID NO: 360226 - DNA, 281 bp, Zea mays
  unsure (1)..(281): unsure at all n locations
cccacgcgtccgcccacgcgtccgcgctgaactaaaaccgtgttggaatttatgagttatagtgttgacccataaattccaacacggttttagttcagcggagacgtaaatatgaaactttaaaggacttaaaaactangatgaaaaaaaatcggcaagcaacactttcgttcctctgaacctcccttcagttgagggagtataaacttgtgtatgtccctgctcttctccaaagaccaaaccaataccgtgtcatcctctcatgacaaaagctgtgaatg

SEQ ID NO: 360227 - DNA, 276 bp, Zea mays
gtgcaaaagaaggtctttagtttcaccaagatcggcagatcgccaacatccgtctgcctctcctctccggtgccggcgactgacacaccacagggtcatctgcacaccaatagggtctgcgacaatgtctggacattcattctaacagatgcaaccttcaagagcgctgagattcaagaaacaccgagcaagatgggtctcaatgcggtggtagccgcctgctacgtctttccagtacttgtctctgtgctcgcagtccgcttcttctacgtactg

SEQ ID NO: 360228 - DNA, 103 bp, Zea mays
agccattgcgccccaaagccgtcgcgggtgctgctgcggaggcctgggaccgaaattgaactgcggttggtgaggtggcggcggaccaggttgctgcaggggc

SEQ ID NO: 360229 - DNA, 278 bp, Zea mays
gaaaacttggagaccacaaaatctcaggaaatgtcaatggggcatgagtgggtcggcttatctgcaattgtctgtgcttcgtactgcatgctgaaagaatgtgtcaagggctcaaggcttactacagcaggtcgcgcaaagcgtcccggacgcgcaattttcgtggtcggacgcgagcgccaaaatgaggaggctgcgcaaaacaaagcgtattcttgtgtcgaggagtttactgcacatagtgcatatattaaatcatcactatacattttagatct

SEQ ID NO: 360230 - DNA, 270 bp, Zea mays
cggacgcgtggcaaacccagatctaggatcttctaagttcaggaaaaattttgaagctcgggccttttgctttcttcctctaccaatcaataatagcataccagtgcatgtaaatgcttattttgaactctcttcaaatcgaagggatatctggatcggaaatgacatggctggtggaggaagagtacggtcagaatggaatttagcgctgcttgaagatgtcgttgctcctgcttatgggcacctgcttgcagctgttgctgaagagct

SEQ ID NO: 360231 - DNA, 277 bp, Zea mays
ccacgcgtccgcgaggaggagctcgcggaggagagggcaagagtcaggaaactatacgagaagttgaaagcggatatagaggcggccaagaatgacgagaatgtttgtgagctagctggtcaaaagacagacgtcagaatcacgatgcttacgtggagatcatcgaagacggcgacggcgttgaggagattccggcgctggtgtacgtagcccgcgagaagcggagggcgtggcgtcaccagttcaaggccggcgctctcaacgccgtgctgcgagt

SEQ ID NO: 360232 - DNA, 271 bp, Zea mays
gagcgattgctgcggcggaagtaagaggcgatggggcactccaacgtgtggaactcgcaccccaagaactacgggcccggatcccgcgtctggtacgtgcgttcccttttgccatggtgcgtacgttaggggtttgattgggtttctctcccgcatgatagctttgaacgaatccaagttgtagggttagtattcttttcgctcggttgggatttaggttcctccgtcgatagggtttttgcagctgctgtcgtcgctaggatcgatggtg

SEQ ID NO: 360233 - DNA, 204 bp, Zea mays
gtcgtcgtcctgtctcgtctcatgtgtttcaaactgtaggcagcagaggatcgagatgcgtgtctgctttgttcgtgttcactgctgtcagtctgtcaccgagttcaataatttagctttgtttcatcgggaaattgaatggatgtctgttgttgttgaatctatttttaatttttgaataataataataatatagtttatttt

SEQ ID NO: 360234 - DNA, 305 bp, Zea mays
cccacgcgtccgctcgtctggatctctctcactcctttcgcgcaccccgttttccctggcattgaccggtagaacacgtgcccggacgccaattatctcgccctttcagatttgagaacaacaaggaggaaaagtaaacgcaagttcaggaaaggggagcctcaaaaggagagggagagtgagagggaggggaagtgcgctgcagtgctgcgcactgcgtctggggagaagagaagaaggtgccaaccacttcccaaggagaccgccagctctgctgctgcacgaccgaccagcccgtccactcg

SEQ ID NO: 360235 - DNA, 193 bp, Zea mays
cccacgcgtccggactcctgctcctattatccgcgtcgctcctcaaggcggagaggaggcaagaggaaggaagcgccgcgggagcgccagacagacagacgaaccgagcagcaccgccactaggaaaagccagcccaaaaccctagctccggcggggcaccgcgcagatccggtgctcccgcgcgatgtcaga

SEQ ID NO: 360236 - DNA, 113 bp, Zea mays
ggcggatccatccactctgacttgttccaagtccaaggctgcctgttcgaccccaggtgtggcgatcatcctccagttctcgcgcccgcgctcgaggaataacttaggcagag

SEQ ID NO: 360237 - DNA, 299 bp, Zea mays
ggaccccctgggtcatcagcagccgcggctggtgggagatgaagaaggtctacatggaccgccagaacgtcaccgtcaacgtcaagcgcttcgccgacctgctcagggcggcgcgtgctcgcctcaggaacaccacggcgtgcgccgccaagcccgcagcgccgctcaggtagacgctagctgctgattgggcttgggttaggtgtcaattactttagtcacacttgccgatttctttgtgctttcgtcctctttttggccgggggataaaaaaggagacgaggtcctgtaaatatgat

SEQ ID NO: 360238 - DNA, 99 bp, Zea mays
cggacgcgtggcgaaggactccgtgtggtggtatacgtctacgagctgattgacggcgaggtgaaggtggacaagatcgacttcaagaaagcagcgacg

SEQ ID NO: 360239 - DNA, 247 bp, Zea mays
gtgaccgtggacgtgacgcgtgggcggacgcgtgggcaaaactttcggcctttctggtcttacgtgtattgaatttaaagaaatgtaaggtagtgaggaatcaccagtttaaagatatttgcaatatgtttcacctgagatatttgagtctcaatgcggaatttattactgagatgccacgggagattcagaatctacaatttttgcaagtacttgacataagtaatcttgggcacaaagtaaagat

SEQ ID NO: 360240 - DNA, 239 bp, Zea mays
cccgagacctccagccgtccgcccctgaaccctcagccttctccgtcccgcctcggcactcgacggccgccggcacacaccgcgcagtctcgagacaggtaacccgctcccctctccgctgaactcctctcccaacaaggggccagcctcacccccaacgcccatctaagccaagtgcacggtgctgctagatcccgatgtcgttctgccaaccgccgagggagggttgcgctcgccgg

SEQ ID NO: 360241 - DNA, 233 bp, Zea mays
accttggctgataagtgaccactactcgggcaacccctcactgctattgccgcacataggagagtagtgttgcccctcttggatccacgctcccctcccggatctgtagcacggttggggggaggctggtgtccgctggcagaggggtgctaggctcaccacggaggggccctcatgtggagggaggcgggggagcacccgtgtggcacgccggccgaggaagggggagaaga

SEQ ID NO: 360242 - DNA, 280 bp, Zea mays
gccgcggctcgaatcgaattccaacacggcgccgagccgagtgagaaagccgcatcttccccagcccacttgtgacctaccgatctagacccgcgcttgccgccgtcgagtcgccggccaggccagccttcaccttgtcaccggcgaaatccacggcggtgaggcaaccggcagttgagagtgcgcctacagttggggggcggagatggggaagaagcagcacagcaaggaccgcatgttcatcacacggacggagtgggcgactgaatggggcggcgca

SEQ ID NO: 360243 - DNA, 237 bp, Zea mays
cccgctcgcgagacgtagctccagatcctcttccccacccacggcaccaccgcattaccctcagatccacccccgcgagcctcatttcagatccacccatgcgcttcccggtccttttcgccctgcagctggtcgccttggcggcggcagcttcggcggccgaggccgcggcgacgttatcctcgaggatggtgcaccgtctgtccgacgaggcccggctggaagcgggcccgcgca

SEQ ID NO: 360244 - DNA, 272 bp, Zea mays
gagcgttttccttgataaatttgtgtttcttcgagagtttattttttgtgttttctcttgagagattcgtgcgaaggacgtcgtcttcggtccattttcttgggtagtcgaattgctcttatacagcgtcaaagcatccaactttgacttctccgtggtggcttcttctactactctgtgttgtcgaggagacaatttaatctttatttaattgggttggatgcttgttcaagttgcagttgaaagggtagcagaagacaccattaatcctg

SEQ ID NO: 360245 - DNA, 271 bp, Zea mays
agcagaacaaggctcatctcgtcgttattgctgaggctccggccgagtagagctcaggccatgaacctctacatgcttacacaaacgtccctcctcctaccgctgctcctttgctgtgcctctgacaccgtccgctgctcggcagccccggacaccaacaccagcgcggaaacggacgcgctcgcgctgctcgagttcaagcgcgccgttagcgatccagggggagcgctgagcagctggaacgcgagcacccgtctctgccagtggaagg

SEQ ID NO: 360246 - DNA, 147 bp, Zea mays
gggctctagttttatgtaaaataaaggggaaaaatatgcctcccgaaacgaaaacacttccacagatgatagatgcccagttcgaacaagattttttttcgattcccctctccagcatcgcaatcgcatccatggcttcctcgtcta

SEQ ID NO: 360247 - DNA, 189 bp, Zea mays
cgttgcttttgtgtgatgatgaaactataaaacgccacaacggagcagtttatagtttcatcacaacaaaagaagaatctggaacgggaacggtggggaagaaactataaactgctccgttgtcgcattttctggatgattgtcatgatatagtttcgttctgtggaataaattactagattctaccgc

SEQ ID NO: 360248 - DNA, 155 bp, Zea mays
cttacatgtaaattattcctatcacgtatctaatgctttggtctcgactcgaaactagctgcctctagtgttgaagatcgaactaccctgttgtgtataaaaagtttacatggagtttcagctaatatattatggatgatagttgctattgtacc

SEQ ID NO: 360249 - DNA, 268 bp, Zea mays
cccacgcgtccggcaaagtacagatccatttgatgttccaatggctgactcagtaagaggcaaccctaaggatattgaagatgaagtagctaaagaatgggaacacacaatgctgcaggatagcatgggcaaggagttgaatgaattaaatcgacaacttgagcgaaaagagtctgagattgaaatgtatggatgtgatactgttgcacttaagcagcacttcggaaagaaacttatggagcttgaagaagaggaaaaagcagtacag

SEQ ID NO: 360250 - DNA, 278 bp, Zea mays
gcatgccacaacaaggagagatgctggagtgcaagcagtgaaaatagaacagcagcgcctttcgaaagccatcctaagctgctactagttttcccccgattccctgaagatatagcatttggaaaggacaggaagaagcaaggagttgcttgccaccatccaaagctcatagtgttacagagggaagacagcatgcgtgttattgttacttcagctaacttagtaccgaggcagtggcatctcataacaaacactgtgtggtggcaagacttcccttg

SEQ ID NO: 360251 - DNA, 273 bp, Zea mays
cccacgcgtccgggccgccctttttttttttttttttgctttgaagaatcttatacacattattcagatttctgcaacatacaacgaacagaagctggcgcttacttgcccaaaagttatggtaagggtagaaacaagaaaagatcatgtacaggtaaaacgtcaatatctccttttcccagctaattcaacaccatcctgaagggacgatctgcatcaattcggcaaaaagccaaggcaactcagaaagggtcagtggaacttgtggtactt

SEQ ID NO: 360252 - DNA, 275 bp, Zea mays
caccctcgcgctctaccactccggtcgtgtagctccccagcaggcaaccaccatcgcgcacccaccggccaccgcgtctacatttgccaatctctgcttgaagcgttctgcccactctttcaaccgagaagttcactattatcctgcgcatgttccctttccccctttcgtcgtggcacgcacgttaggagttcgaccgattgccggaacgtcttccgccgtcttctgcgccatcgaaagagcgatgaggtttgtggtgacgaaagtttgcagcg

SEQ ID NO: 360253 - DNA, 114 bp, Zea mays
cccacgcgtccggcttcttcgtgcgttgcctgcctatatatgcagcgtgatggggggcatgtccctccggcctggggcgttactagcttagctcatatacgtacgtacgcaggc

SEQ ID NO: 360254 - DNA, 105 bp, Zea mays
cgatctaattgttatgttacttcttgcttcctcctcactacccgatactaccgcatcaaactccaggtcctcaaaacaagaaactccaccagagctgtgcttcag

SEQ ID NO: 360255 - DNA, 307 bp, Zea mays
tcgacaggagttaattacacttactgatcaacagaccgaccagaaccaaaattacatgttccataggaaggtactaccaaacggctgcgcccatccgtgatcgccgtccggcccgaatccgaacagctcgtcggcatcgcgcgccgccgccatatagccagcgtcgtggtcgatccactccgggtcgcgccaagacgcttgcgtacgctcgtggaacgagaaagacgcggtgccgagcgggacgagcagctcggagaagtcctcgtcgagcggcgggatctcgacgatcgcctcgagctcgtcgtca

SEQ ID NO: 360256 - DNA, 311 bp, Zea mays
ggggaaggaagcagagagaccatggtccatggctctgctgctcctcctgctgccgttgcctggtgtggtaataactctctctatctctctctctgtccgctgctggcgttactgctgcagtgatgcgggatgtaaaggaggggtaaaaaagttcctttcgttttcgcctccctctttttttttgttttttttttgcatcttctccttcacctttccatatactactagtatgctctgtcgactgatgttcaaaaaaaaaagaaaaaaaaaaaaaaaaaaaaaaaaaaaaaaaaaagaaaagaacagaaaac

SEQ ID NO: 360257 - DNA, 100 bp, Zea mays
tccactcccgatcagcagctgatcgctcactcttgcagctcgattattctttagctgctctagctctagcctctagccctagctagtagctagccactcg

SEQ ID NO: 360258 - DNA, 298 bp, Zea mays
accaaatctaaaaaccaggttttaaaaaactagtgtggattcaaacacagcctttatcgggccatgttttattacgtccgataaagtcacccctctttcccgtcgtctaattcgggtccttgatgttgaatcttcccgtggaatccaaagattccggggcgaaagtgggcgcctttccttgctggttttggttggatcttgttgtgcgttctagttggcgaattgctctttttctggatctggtcatgtggcttctgtgattcatcctaaaaatttggggagacaaacaagcagtaat

SEQ ID NO: 360259 - DNA, 272 bp, Zea mays
ccagtatctccttctcggatattgaatcacacacggcaacgccgcaacgcgcagcgacctcgggtcctcgcactcgcaatcaagcatggggcccgccgttgggaagccagctttcggtgtcgccgtcgcgccgaagacgcaggcggaggagcggctcgccctcgcggagcacgccctgctccagtggactcgctcacccggcgccgactcgggcatctcggacgccgggccgagctacactactagacgcgtcgtgccggcggtcgacgacg

SEQ ID NO: 360260 - DNA, 279 bp, Zea mays
cggcaccggcgacggcgcctggttcgtggaggccaacgccgcgtgctcgctcgaggaggcccgccacctcgaccaccccatgctcatccccaaggagcagctgctgccggagccctcgccggacgtcaacccgctggacatgccgctcatgacgcaggtgacggagttctcgtgcggcggcttcgtggtggggctcatctccgtgcacacgatcgcggacggcctgggcgcggggcagctcatcaacacggtggcgacgtacgcgcggggcgccacgtc

SEQ ID NO: 360261 - DNA, 282 bp, Zea mays
ccgcccccaaaattctcgccccgcctcgctctccgtcgcgccattccagggaccctccatcgccgcccccgccatcatcgcgtcagcccgcgctccgtcgatggaaggcgccattccagggacccaccccaaccctgcgatcctcacccttccaaggatgccccgcacccatctcgtccaatccctcctcccgcctcacccgctcacaaggtcgacgacgacgaatctaaggacgccaacgccacccctctctgagctccctatggccactgcgggtgagtg

SEQ ID NO: 360262 - DNA, 285 bp, Zea mays
gcacctccgcgcgctccctcctcgcctcggcgcgccgctccccggtcaccacgctagccgccgccttcttcctcctcgcgctcgtcatgtacggcgaggacgcccgcaccatcgccgagctctccatcgacgactacctctacccggacgccgacctctacaacgtctccggcctgccgcccctcgcgctgcccccgctcacctgcgacctctccagcggcagatgggtcttcgacaacgtctccgttccggcgtaccgggagaaagactgcaccttcctcacca

SEQ ID NO: 360263 - DNA, 278 bp, Zea mays
caagtcctccatgactttcaatgccctcctcgccgcctacctcgacgccagcgacttcgacgcactcgccaccgcgttgcaggaaatcccgggcacacaccccactattgctcccaccatatactctcacaatatactcatcagtgcgctgtgcaagaagccggacctctcggccgccgtggatgtcatcacgctcatggagaagcgcggtattacccctgatatcatctctttcaacattctgctcaatgggttttacagcaatgatcgctttgatg

SEQ ID NO: 360264 - DNA, 284 bp, Zea mays
cccatgcgtccgcgcatttttcagactggcctgtttcgtgacgtcccaggactccaggagaagagaacaccctcgcccccctggggcatagtcgctgccgagccagtggtactggccgcgacggagcggtcagaagctgcggcggccggcgcggtttcggtttcggtttcggtttcctggctggcccgaggagtttgactcctctcctgatttgtggaaaagtggttctagtacagagttgtcttgatgccccgtcgctgtctgtctcctcacgctcgccggcg

SEQ ID NO: 360265 - DNA, 296 bp, Zea mays
cccacgcgtccgcccacgcgtccgggtctgtggagggtcatctatccggaaaactctggttaaagaagcagctgcttgtggcgcacacatctcatctttggtgtcacgaacaattcccggtccttcggatcctccttgacatcagttgccaagtactgctcaaagagagttccagccagctgctcggttcttgcagtgaacaatggcaaagtcgtttatcataaagatgctggtcacgggttgcaacatgaactgtaccaaagcaataccacgatacctgagacaccaaggaggag

SEQ ID NO: 360266 - DNA, 292 bp, Zea mays
ggaccgtggtgctcggcaagcgacgcacgccaccgacacctctcccgtggcgatcggagccgcgcgctagatccaacaccctcagcggaatcgcggcggattccggcgccggcagccccgctccggatctgcattccgcgcaggggcttctcctgactgcctcgcgccctcgtctctccaaatactctgcaagcaatggatcggcgcagtggccttggaagaagaaatcatctgatagatcatcaaatgcagactcgttgcagaattctaatcatgctgaacaggaagataa

SEQ ID NO: 360267 - DNA, 290 bp, Zea mays
ggaccgggtccacccccgctcctcctccggcaatccatcgctcgggttgtccctactgggcgacacgagggcggccagccactcccgaaacactctctgatctgtgcccagcctgcctccgcactttctccctcttccgttcagcaacagcggctgcggttttactctgtctgttgccgatatgtttggattgctgatctctctacaatttctggtggatcggatagtcagagtgatctgtgtggattggggtaactcggatcagctccgctcctttttctcggttctga

SEQ ID NO: 360268 - DNA, 296 bp, Zea mays
caaccccctagccgccactttgtttttctccctgtcttcttctcccacacggcagcagcccacaccttcttcctccctgcgcccagccttccccaagctctagcgtgcagggcagcagcgccccttctgctccatggccgagctcccttggagcagacgctcaccagcccaggcgtgggctccattttttccagggccgccgaactccatgtccatggcgtggagcagcagctcccattcctcggcgacatcctcctcgccgtcgtccatggcgcccctgctccttcttcctcgca

SEQ ID NO: 360269 - DNA, 124 bp, Zea mays
gagccacaacagccccactctgtctgagtgtttgtgcctgctacctgttcaaagtagggttcccaccgggacacaggccgcctccatcccatggcgcgcgccgtcgcctccaggctcgccgccg

SEQ ID NO: 360270 - DNA, 293 bp, Zea mays
ttcctttcaattattgtatttcagtcgagttgctaaacaacacgaactcctcagtcgtttgagttttgaggaggcaagcaagaggacccatcgatggcctccttgaaggaccactgtgccgtggtggcagttgtagtggcgatctgcttcgtcgtcctcgccgccgccctcccttcgcacgcgtcgacggcggtggacgagccggcgaagtataagcccagcagagcgccacgtccgtcccctgcatctgcatcatcctacgtcccgccgccggtccagcccgtgatcgtcgt

SEQ ID NO: 360271 - DNA, 311 bp, Zea mays
atcgcgagcggccgccctttttgttttttttttgagatgaaactgcctctttagcataaacaaccaaggtttacataaatgcaagctgcttgcacaagctgatttaaaagcgagaaaacgaagtagaaattgaaatgaaaccagacatacaatgtgacgatggaccagaatcgtcagatcagctcgacggtctctggccaccacattaaaaaccccaggctggaagtggaaagccgcagccgcagcacaacagctgcgtcgctggtgcaccgtcagcagtcagcacaagccgacagcgtctcacaagtcac

SEQ ID NO: 360272 - DNA, 283 bp, Zea mays
cagacgctggcgggacgcgtgggcgggacgcgtgggcgagcaagaaggggaagccaggttgtggttcgacaggcgtgagccctagcgaacttcccggcaacggcgatggagatgggagccgaggtgatcgaggtgtcgagcgacgaagacgaggagcctgtacccagcagtaccggtgtcgtgcggggctccgggtcgtggggtcccgacgtcaagccgcaggtggtgcggcgacgtcgatgtgaagccggtggttgttgtggcggcggcggtccaccccccg

SEQ ID NO: 360273 - DNA, 253 bp, Zea mays
aaactagatacgaatgctcctactgtcagctgggcagatcctaagaatgccaatgaagctacatctactgcacaggttcctttgagcactacatgacacaatgctaccttttatgtttcttgtattatgttactttatatggatgtgcgtatttgtctttaggttaaatctctatatgtcaaaaacctccccaagactgttactcaagagcagctgaaaaagctgtttgagcatgttggagaaattaccaaag

SEQ ID NO: 360274 - DNA, 301 bp, Zea mays
ttaacgcacaacggttatattttatcaaataatttatataccgtcgcaacgcatatatactagtagaatatatatgcgttgcgacggtatataaattctactagtataactttatttttcagctctgtttgtgaaggagttgacttggtcgcaacgttatggtagaagtgtttgacaaaagagcccggccaactgaatttcctaagcctgaacgctgatactgagtttggaccggcgataactgggcattttcaaaaatgtttggaacaaaactcttgggtgaattgtgaaatcaaaattt

SEQ ID NO: 360275 - DNA, 292 bp, Zea mays
cctcactcgtccgcctcactcgtccgggacgcgtgaggtgcgagtgtgcagcggcgagccggggctcggtcgacacctggtggtacatagctgagacgcagctgtctgagggatgggcagatgcgagctgctggttagagtccctggttagcatgggcggtttgttggtgtcgcacgggtgcgggacgtgtgtcgatcgacgactacatgccgggtggggagttgttcaagtcgtgggtgctgggtaaggtcgcgggctagcagtctcctgtcggtgtggtcgtcgtgtcgg

SEQ ID NO: 360276 - DNA, 275 bp, Zea mays
ggagactcgcagctagctgacacggccgagaagcagcttgcattgcaggcgtagtacgtacccagcagcagctagcagtagcagtccatcggagcgacgatggtgagaaggacggtgctggcggcgctggtggtggccggcgcgctcgccggcagcgcggcggcgcagtcagaggaggggttctacgactagtcctggccacaggcggagaagatcgtcaaggagtacgtggaagcgcacatccgcccacgcgggcgacgtcgggtccaggctgg

SEQ ID NO: 360277 - DNA, 319 bp, Zea mays
gccaaggctccggccacgcgtacgggcaagcgtccgcagcgcacatcgggtagcaagacacctaacattccagtgggcttaccgttgcatggaggcatcaggaggatgcgcttgtgcgtatcggcgacgttcattgtgctcagcgtcggctctgcagcgcacgggcgtcgagcatgcccccgccggctgtgggcatgaacaagtcgcgtctagagaatgcgtacgtggatctggaggcgctgaggcgcggcatcacggacgatgcgaagaagctgacggagaacttgtgtcggccgacagtgtgaactacgtcgggtgt

SEQ ID NO: 360278 - DNA, 316 bp, Zea mays
agcacgaagctaggctaggacggccgcgacacgctagccagccagctgctaggtcctgcggacgaggcgatgggtggcgccgacgtcgacgtcgggacggagctccgggtcgggctggcgggaggaggcgccgcggcggccaagaacgaaccatcgacctgaagctgaagctggctaccgctggcatggaggaggctgctgccggcgccaggccggagccggcagccgagaatggcaagagccccggcgaggcgccggccggcgatgccgagaaggcagctgggagcagggcacaggccgtggggtgggcagcagt

SEQ ID NO: 360279 - DNA, 315 bp, Zea mays
ctctcgcgcaaattattatgccgggaaagattatattcttcccctttagctttgagcccgataggccgaagctttcgcgttcttccccacagatatctggagccgtagcttctgtttggtatggccgtgggttgacatacatagtagtgtgcgggacgcgcaccaattggcacgctgcgctttccatccgctgcagctgcaagatgccttctttttagatctgtgctgccgtgccttcctcttcatggtaccctgtggttggagtcggtattagcgtttaatgaagctactttttcctcccttgccttttggatg

SEQ ID NO: 360280 - DNA, 308 bp, Zea mays
caaacgtaaggatacagagctagctgcttgaggtgggatcatgcaagactgcttaattacctacctatagcttaacttgaagcgcctgccgcagtttgtgcaaaactgcagcttcattttctctttcagctcataccttgagctgtttatttatttttgggatgtcgattatatgcgacgaatcagtcgaatttcaccttcattaattcagttggtcccacagttagcactctctgctgacagtgcaagcttcagggacgaagatgcaatgacggtgctctctgcctcctaaaacgggtacgtccaag

SEQ ID NO: 360281 - DNA, 304 bp, Zea mays
ctgggttcatatattcttttgacaggagttgcatgcattccaatagtcgctctccatttccctcatgctcagtcagcgaagagattcctggtccttattgtggcaacaggccttctcttcgttgttatgcagcctcctattaagctatcatgggtataccggtcggattttatcacagcggcacatttatctgatgatgacatttcaatatatgggtttgtagcatctaagccctcatggccgtcatggctgctcattgcaactgtggtacttacactagcagcagttacatccatcatcccag

SEQ ID NO: 360282 - DNA, 302 bp, Zea mays
cccacgcgtccgctcgggcagccgcctcctccatgacggcgcctggcgcccttctgcatcttcacctccacccgccagcccgagaagcaccgcagtaccgcaggaccgccatgacggaggcgactacaaccacccgaagccccaggccatcgccgccggagctcactcgttgctgctcacgcgtgcgtgcttatcgtccaagtcgccgccgccgtctcttgccgtggggctgctctcggtgctcgcgcagaggacgggaccgacgcctggaaccaccggatcggcggcatctctctcaggct

SEQ ID NO: 360283 - DNA, 285 bp, Zea mays
tgcgcctccactgcccctctccctgttaggcggcgacacaaggttgacgaggaggaagggttggctgggccaccgtcggcaccacgcgatgcacgagtgctaccgcgcctattagttccatagctccgagccgtcgacgctaggcggcagtgccctcgtctggacctgcccgctcccaggcggagcgccgccgacccgagatctgcctaggtcgctcgcctgctctggatgaccaaggtcacctccgcggacgctgagcagctgagctcctcccgcgaatgcgtg

SEQ ID NO: 360284 - DNA, 298 bp, Zea mays
gtctgcaactgcaactccacctcggccgtcggccttctcatcctcgtcaccaccggccacggccggcctccaccaccgcctgcccaccgctcgctactcttgtctgtctcccctccccccaagtggaagaagaatcgggctgttgctcactcagagctctctcagtgaggcgtgcctcactagtcactagccttgctgttatgccttccccgccgctcgccagagtccaccgccaccggacaggaagcatcacctagttcctgaccctgatgcccatggcaccggaccaccccttcga

SEQ ID NO: 360285 - DNA, 319 bp, Zea mays
gagaactggtgatgacttagcaacagcaggccactcaggcaattcttccaatggtccaccctcagcttcagaagaacaggaccattcaacaaactctaaagacaagctccaaaaagctagctctcaaaacacaaagaaggtttttggaaactcaacaaacggcaagcaaggtgcatctaatttggaacaggaatgtgcaaatgaagatgggtctcatgtgctagttgctgctgtgtacaaggatattgataatgaaagaagctctcaaaagattagggatgatgtatcagatgcacaactggatacagcttcatctgat

SEQ ID NO: 360286 - DNA, 149 bp, Zea mays
ctccgctttctagctatgcccttccttataggatgtgcaatagtgcagctgcgcaccgccgtctctcaccagccatggccatcaaatatgagccgcagccgctgcacatcctcttcttcgcgttcctcgcgccgggtcacctcatcccg

SEQ ID NO: 360287 - DNA, 134 bp, Zea mays
ggggaagcgagctagcgtcggagtcgcgtacccttggtgtcagagagtaaaaggcatcacaaggacagtaacagaaacctaataaggtcttcggcagcggcacaccatgcagcgatggacccgcaacgggatgc

SEQ ID NO: 360288 - DNA, 306 bp, Zea mays
gttatgttttctaatctgcttcatgttttatttctagatgatacactgtatgcaaacagctatgtgttgctccaaaaagtacaatgaaaagttgtcacagtaatttcggtcctaattaagtgccggtgcagattttgctcgctggcatctggtgataaacttatgatatgttttacacagggttagtactagcactgatggtacttgttagggtggcacactaaaggctctgttgaaaccctaagaagctaaatccatcgattatacactatttgtgattggcataattttatggattttttcccc

SEQ ID NO: 360289 - DNA, 159 bp, Zea mays
aagaaaacatccggtggccaaccaagtcagccacgtcagtcgaacctgcctatcattattgacagattttactttggcaaataattttgtggcacgttatatgtaaagatggtacagttttagcttcattgtccacaaatcttgttttgaacgattaag

SEQ ID NO: 360290 - DNA, 147 bp, Zea mays
ttcagacgacaaggcatagagaatctaaactccgttcaacatccctttcgtaggatggcctcctcagattatactgccaaggatatagaggagtctgtatttgagcttcctttgtttgctgagtcattcagtgaaatgcgtcaacac

SEQ ID NO: 360291 - DNA, 177 bp, Zea mays
tcggaatccgtcgagctcgagcgctcgagccgatcagatctccacgatatatctttagataaggagctccctccagaagcaactgatgagataaaaaatttgcgcaagaagtcacaaactgctgatggtgatacgttcatttcggaccctgtgcatgagaaaagagtcagaagaatc

SEQ ID NO: 360292 - DNA, 229 bp, Zea mays
tgctcattcaactgatctggtatcacaagttcctaatagcactgccctttatgaacctcttgagataaatgaaaaagaagggtcaaaatcaaactcggatgataaaactgttgagaagctaggttcaacaagtactgaatttgattgtgatttgcttgatagttcaaggaagtcaaatacggtcagttctgcagattcgaagggagaagacattacaccatcaacaaaa

SEQ ID NO: 360293 - DNA, 186 bp, Zea mays
  unsure (1)..(186): unsure at all n locations
ganatatacctctggtcctcattgcagcgttatgtcgtgatccttctaacccatttggcgactctgataaatgcaatcaagatgggaatgcatatatctcatttggccaatgggttggtgcaattattgtttacacatatgtattcanaatgcttgctccaccaccaggacagacctttgatggtt

SEQ ID NO: 360294 - DNA, 137 bp, Zea mays
actcgagccgaatcggctcgacgagctcgagctgaagcgaggcgtagccgcattgggttgtactagagctcctagtgttgcactactactatatggagcgcgatctccacacgcgcgtgaacgctaggtacgtacac

SEQ ID NO: 360295 - DNA, 133 bp, Zea mays
cgcggaatcttgatctatttgaaccttttctggcatttaggcgtgccctccttaagattgtagggtgtgaagacctcttgtagaacatttatttcaatctgcttctgcgctccggaagggattaaggttttct

SEQ ID NO: 360296 - DNA, 156 bp, Zea mays
ggaggatacagctgcggctgcttctatggcctttaagtacatatgtgaagactgtaggacaaagttctcagggtccctggatggcctcttccagatataccatattgcaatcagtggagttggtggttataaagtttcttcagaggactcgttgca

SEQ ID NO: 360297 - DNA, 111 bp, Zea mays
ctcgagcgaattcggctcgacctctacaatgaggaagcacaattttgaggggtactttgtactctcttgtgaaagagatcatagtgtccgcatgccattaattgagagtgg

SEQ ID NO: 360298 - DNA, 266 bp, Zea mays
cacaattaaagctaaaggttacttagctgacatgaaggagatctcggttgaactgaaggtccaacaactaaaggaaatacctcttgacaaagtattggtgatacaacagattgattttatgacatcaaaggcatggatgtctgcagataaacaagtggagagaaaggttgggcatttgatcagacaaatgattgcactagggtgtgtttagtttatggtagtgcagtttaagcaaaaaattgaccatgccaagtaaacttggcctt

SEQ ID NO: 360299 - DNA, 181 bp, Zea mays
ccccaaaactcaattgcctttatcaagctaatgagagaccaccagcctacaggaggagaggagtctgaattctgataaggtttcacttccccagttactcctgcaaataacatcacttttctattgtagataggcattttgtgatatcctttcaggttttgtgtgtatctaacagcatggc

SEQ ID NO: 360300 - DNA, 178 bp, Zea mays
gtaaatttaaatgcttcatttttaatttggatgtttctgctagatacctgtgatttggtaattagttattttgcatgtttgtcaactgtatatgtatgataatagataaaaaacatgctttttgtaaaaacccctaagatttgtatatgttcatctttaggcttctgaaagggagaga

SEQ ID NO: 360301 - DNA, 302 bp, Zea mays
ctaccgcctcagcacctgggggaacaacctcgcctctctcttcaggccttacctggagatcaccatctccgagtacggcgccgagcgcttccgccgcagcgacttcttcctcgccgctgaggcctacctctccgacgcctgctcccgccgcgcgcgcaagctccgggccgacctcggcaaggaccgcagtaacctccaagtctccgtcgacgacaacgacgaggtcaccgacgacttctccggggtcaccatctggtggtacgcgtccaacagcttgccaggcacaggtcatcagttctacc

SEQ ID NO: 360302 - DNA, 107 bp, Zea mays
agtgaagcttgccttttcatttatctgtgaatcctctattctagcaatttggttgttgcggtccttaacgttcttacatcacattagagatataaaggatccagagc

SEQ ID NO: 360303 - DNA, 281 bp, Zea mays
ggagaaggaaagagatctccctcttggctgtaacgcggagactggagcgagctctggcagtggatcaggactagttttgggagcctgatccatggaccgatcctcatccagacagggtaacaagaatgaaaacatcaaagctttcttgtgtacataggtttggatgtcttggggatggatggataaacatgaccgaggattcggagaccagaaaaaaaaaaagaaaaaaaaaaaaaaaaaaaacaaaaaaggaaaaaaacgaaaaaagacaaaaacaaaaa

SEQ ID NO: 360304 - DNA, 287 bp, Zea mays
gttcagaattcagctacgttgaacctgcggaacacaggcgcccttagatctccgtaagaaggcggaacctgtagaagacatggccggcgagatgagctgggtgggcaagaagatccacctctacaacgtcaccatgggtctctacatgctcattggtgggagcgctgcctattcaacatactggtgctgatcctgctctggttcaactgcttcaaagggtcccggttcgccactgatgtctacgaaagccactgaagggacgggtttttccgaggcgctaattacgg

SEQ ID NO: 360305 - DNA, 178 bp, Zea mays
atcataatcacagtattggatgtatgctttgcactagaaaataaaattaattatgctggagtggtgatttagtggtcaaaggggcaattgagttttagggtacgcaagaacgtgctatatatatagaattctagatgcataacggaatggattagcgaaaaagtcaaagcggcttaga

SEQ ID NO: 360306 - DNA, 284 bp, Zea mays
cttccggctcccgccgctctcccgccgccatcactcgccgctctcgcgctgccaaccgttgccttcaggctccagccgccggcacggcactgcgtacggggggattcacttccatccgacaccatctggccttctcttccatctcgtggtgtttgttcgtgcgcgtggattgttttgtccgtgtctggtgcccgtgcaagagcccctaagctggtgcgtccgccatgtttccccccaaagggcccaaccactacgggcagccgccgccttacggcgagcagcag

SEQ ID NO: 360307 - DNA, 271 bp, Zea mays
ggccgcaccgcgctgctcagcaggacacgtgaacacccagacacccactaagggaatcaagtctcgcctccctccacggtggagggaggaactttggcactagcccttggagccaggacaaaagactcgtgtctcaggcagactttactctggttactaagatcatctgtgcatgacggggagggtggaacaggtcccggaggagtcgtgaatggttctcaccaggacctgaatcgttgcttgtgtttgagaattggaggaatgagtcagc

SEQ ID NO: 360308 - DNA, 137 bp, Zea mays
aggaccttctccgtcggctcctgggacgacaccaactccatcatgttctcgtctgcccggcatggacgactacctgcagctgcagcaggactccgtcgcctcgagagtgcgtgcgaggcgtggctgcgcgactcacc

SEQ ID NO: 360309 - DNA, 301 bp, Zea mays
acaaacgagttctgttactatgccagctcgtgatcaatcactagagaagccaacaccagatgattcactggagaaggtgcagccagaagctgatacacgaaccatcgcctgacttgccacagcgtcgggaggcgggtgcaagggttcgacgcaccaactgccgtgagtggtccggactccggagtcggcgtactgtcgcgtgtgtgtctcggtctctgctgtgtggggtcggctgtcgcgtgtgtgtgccttgctgctgcagtgaagggtttatgtattgtagagtgtgatctcgtgacgg

SEQ ID NO: 360310 - DNA, 286 bp, Zea mays
ctcaccctttacattggttgcagtgatgatttgttaacgtcttctttcatgtaagtagcaaacagggctttactatcttttcatctcattaattcaattataaccattagcttaaaatttttgtcttacgaagtgtggtgtcttttatatttgaattagtaactgtatgtagtcatagataatagtacatgtcaccttaggtagtaggaagaattaccatttctttaaatcatttatctggatgtttatgtgttagtagcatgttcaagaagacggactatctaga

SEQ ID NO: 360311 - DNA, 114 bp, Zea mays
  unsure (1)..(114): unsure at all n locations
gccgggggtcagcagaaggattttcgtaataacatttacatgattaacgaggcgcatagactatactgcacattggctagcgatcatgcanatgttattacgaaaatccttctg

SEQ ID NO: 360312 - DNA, 275 bp, Zea mays
ggaaagttctgaaacatcttgtagaggtaattttgtattatatactctctcttgctgtgtctgtcttgtagttccttcctaaaagttgtttatgtgtgtatatacatatagagggagagagagagcagggggttcgggggaggagagagactagacagagatttttctcctgtacacatatatgtctcttatttgcagcaaacacaaacacacacattgtaacacaagtctcatgatacaatgtttaccttattacatgggatacactctatttt

SEQ ID NO: 360313 - DNA, 221 bp, Zea mays
  unsure (1)..(221): unsure at all n locations
gaggactcttctaaatatcatcctatgaacagctcttcagaaagcccattgaaagttaaactatttaacgtgaaatccattaactggaataattgagtttctatatatttacaataaattcactgagtaaataaaaaaaaaaaaaaaaaaaaaagaaaaaaaaaaaaaaaaaaaaaaaaaaaaaaataanaaaaacaaaagaaaaaaaaaaaaacgaaaaa

SEQ ID NO: 360314 - DNA, 261 bp, Zea mays
ccgtctcctccacctttcactttccagttcaagtcaaaccacgttcctcgcgatcgaggaggctcacgccaagcttgctaaccgctccccacctccctcactccctcgtctctccctctccccccgaatcctcgacacccaaagcccaaaccctagcacgggcagcggagtggatacgggcgaatggacctgcagctgcatgtctactacaaggcgctcgggctctcgttcgtcgacggactcagcaccgccatcggtaca

SEQ ID NO: 360315 - DNA, 261 bp, Zea mays
ctggttcctattcctgaaagtgtcagtgaaaacttagcggttaacattataaattataagcattgatcgataaggaaatacttttgtccaatgataaagctattgatatgatggtcttgatactagaccaaaatgtttgtttttgttgtactgaaattccgtttgtctgatcacgcacattctttaactaatccatccacaggggagaggaagtacagcgtgttcatcgtggttcttgcagttgtgctgcccactctagct

SEQ ID NO: 360316 - DNA, 273 bp, Zea mays
atactccgtctcctcgctctatcgcgctccattgattgctctcgcaacaaggactccatcgtcttatcgatggagttgttcgccgccggagaccgccgcttccccgatcctcccaggcacgacgctggtgcagaggactcgtcgatgctggtgatcagggacgcactgctgtcacagctccagaaggaccgacttcgccaggagatcatcctggccgagctcgccaggatagagcgtgccatggccctgcgcgccgccgacgccgagcgtgcc

SEQ ID NO: 360317 - DNA, 127 bp, Zea mays
attttgaagtttgaggaaatgattggtgaactggagaaggtacagcttgactgaaatctgatagcgatcatggagagaaatgtcactgtttcctttttgctctcttttgtactccgttgaaacccca

SEQ ID NO: 360318 - DNA, 134 bp, Zea mays
caccaaacccctgccagtgagtgcagagaactcgcagagccacagcaggcggtctcagccaccgtcccgctcacaggggcccaatgccaggtcacaacactaagaatatctttcaaaaaatgtgtctttttttt

SEQ ID NO: 360319 - DNA, 273 bp, Zea mays
gccgggtcccgaggagtttacaatggttcgattcgcgtcggttttggctctgatgtcgtgtgcctgtgtgcgcgcagcaacacgctgctgaagctgtcgatcccgcggataaagctgctgcggaaccggcgggagctgcagctgcgccagatgcgccgggacatcgccaagctcctagaggccggccaggaggccactgcccggatcaggggagtgtcctattgatctcaaagaagcaatatcaagtgtctgttttgccgctccaagatgtgc

SEQ ID NO: 360320 - DNA, 291 bp, Zea mays
  unsure (1)..(291): unsure at all n locations
ggaatatatagtaagaaacagtacactctgaaccatcataatttgaagatgctagttaaccccgggttgttacatgataaaaaaaagcacggttgcagtcgcctccaccaaatgtgtaatggctggcaatgaagctggagacgcaaaagcctagcgtctctccctaattaaatagagcaatgttaaaccacaaagaaaagcacggttgcagtcgcctccaccaaacaactcgggatgagcctggaaaaattgcaacatccaatcaaattcagctanaaaaacagctctatg

SEQ ID NO: 360321 - DNA, 287 bp, Zea mays
  unsure (1)..(287): unsure at all n locations
ctgccggatgagcgccatcattgagacctacgtcatggacagccggatcggtcagtttcncctccccggccctcagccctggtccagccttcacctggccctccctctccattctgtgctgcggcttctctcctctcctctcggaactcagcgaactactgacaagaccatggcctgtggaggggagaacaggaaagcactgtctcttgatcgcgcctcctccctcttctctcttcctctgtcatctctccactctccattctccattgtgtctctctgtccacttt

SEQ ID NO: 360322 - DNA, 247 bp, Zea mays
gttctgctggtgtctccgccgtttaatttgacctatgttatggagtgagtgatatatgtgccgtcactcctagtatatagtagtgagtgactagttggtatgtgtagtactgtactatcttttctccatatgcatgttttgccagcgcgtaatgaatgtaatgtcagtactgctactacgtgctctgctacttccaaaaaaaaggatatcaatgtatgcaagggcatgctgggtgacaaagcccaaa

SEQ ID NO: 360323 - DNA, 195 bp, Zea mays
gagaatgctcttcctggaggacatgatggtgttcaaacggcagccctcaagtcagcatacaccactgcagcagcagcagctacatctatctcatcgtcagttgcagctgctggaacaacacatgcattatggagccgtaagtgttgtcagttcagcgatctcagatggaattctagggactgtagcctgagatgc

SEQ ID NO: 360324 - DNA, 127 bp, Zea mays
cgtgatagtactaatttggtttcttattttaacatatcatttaggaatcataccatagtttgcataatggttaattttatgcctgcttcttctattatttactaatccctttagtttgggctgtgaa

SEQ ID NO: 360325 - DNA, 273 bp, Zea mays
ataagcttcaaccaatgctagcagtgatggaaggctgactgtagaacgtcctggatctgttgttccaggctctttgaactgccctgcactttctatacatgtattagataagaaagacaatgaggattccttgccagtctgccttgaggcaaatcctgtagaacacgctgcaggtgatatgaatggtgtcggtggtgccttttcaacaaaaggaacagaaataaggtgtacaagaggaacagaaactctttggttggatcgtatatctgcaaa

SEQ ID NO: 360326 - DNA, 169 bp, Zea mays
  unsure (1)..(169): unsure at all n locations
tcgcgcangtaaccacagagcgtcctttttgaaggtatatggttggagagaatcatgttcccagctctcggttccggattttgaccacggcttggaggctgtaaacaccactanaactgtgataactacccagggagggagaagctcgtggataggagcacatagattt

SEQ ID NO: 360327 - DNA, 287 bp, Zea mays
caattaactaaaacactcttatgtgcagttattgactctaccggttcttgctagctacccattctttccttcgttgtccgggttcgggctcatggtggtagtaaattgtgcatcttttctgaagaatacattctcggtgagtgcaccttttctgtttagagacacggcagggtttcactctgtgatgcctaagcaagccaggcttcctgtacagaacatgttgttcaaacaaattttccaagctttgcccaagaacttcacagggaagcttggagccaatggcagat

SEQ ID NO: 360328 - DNA, 285 bp, Zea mays
gccggagtcggacgcccccgggctcgcgcctcgccttccaacagtccaagcgccgcattcgcgcgtggccaactccaaagtctgaagttcgatccacatccaccgatccgcagaggcgcagactacaggtctctcctacagctgccatccccgtccgcctcgctccaccaccggtggtcgcacacacgtctggcgtagggacacagccgcacaggaagtccccccggccccttcgactgaagcctcctctgagtgggggcatctacctctccttccctttaggtt

SEQ ID NO: 360329 - DNA, 182 bp, Zea mays
atttatcaacaagttcttgttgactcagggcataatgagttcctgagacatgctcttttgggggctggggctttaggtagaagaatttcaaggacaagaattctcagcagagctcaagattgtaagaactcaacagaagctggtaaaaacatgggagcccggaggacaggctgctgtccagg

SEQ ID NO: 360330 - DNA, 151 bp, Zea mays
attttgaagtttgaggaaatgattggtgaactggagaaggtacagcttgactgaaatctgatagcgatcatggagagaaatgtcactgtttcctttttgctctcttttgtactccgttgaaaccccatcttttttttggtttccttcttga

SEQ ID NO: 360331 - DNA, 291 bp, Zea mays
gcatcatcgccgagcgtgcgtgctctagctctagcaatagcagcgaggagacgatcgaggatggatcagaacaacagcaacaggcagcagcagcaggcgccgccgccaccacccgcgggctacccgacggcaggcgcggagcagggacgcgggggaagacgacctcgcgcggggagaagggcttcatcgaaggatgcatcgcggcgctctgctgctgctggatctgcgagatgtgttgcgactaggcagcccccctcccctccctccgcccgccaggcttgacaggaacgg

SEQ ID NO: 360332 - DNA, 126 bp, Zea mays
ctattgtacatttttacaacagcattttcttaaacataatctgtgtttaatgattattgtccattgagcctgtactctgctttccataccaagtaaaacagcaataatctactttccacacaacag

SEQ ID NO: 360333 - DNA, 152 bp, Zea mays
gcgacggcagtggcggctgctgctcatcttcggccgacggtggtggcggctgctgctcatctccggccattcgacctggtcgtccgcctgaaacccgcctggagcctgtctgcctacccgaccagagtacccggtgctactgccgtccagcg

SEQ ID NO: 360334 - DNA, 283 bp, Zea mays
agatcctcaagttcagaaaaaatcatatggtgtttttggttctggcagtgcccatcttgggcatctgactgttggtaatcagcaactaaatgagagatggcatcaaagacaatctgattctttatccagtgtggaagttagagctggggtcattcagctatgatagtgcagcctgctctggaaaatcacagcagacatggagttgcacagaagggtcctcgcatagctaatgttgtacatagattcaagtgctctgttgaacctatagaattggtgctgtgtt

SEQ ID NO: 360335 - DNA, 150 bp, Zea mays
attggacactaccagtcagtggtggagctttcagcagaggtggtagaacacgtggagaagtataaggccactctgagacggttctttaagagtcgagggaaatggtgtgttgtatttgagagaaattataagagccatcacctccagcta

SEQ ID NO: 360336 - DNA, 277 bp, Zea mays
gcagcttcgccggcggcgcggcggctgcaaacagccaccaccaagtccgccagcgcggccacttggtccgtactttggcggcatcatcgtcgtccaacacgctgctgcggagtgacttcgatctccaggagggcctgacgacggacgtgaaaccgatgcagcgtcacgtagcggctggcgggcgggaaatgctggtcaacatcgacaacctcaagcgcctctgcatcgaccactacttcgaggaagagatctagggcgacatggcgacggccgcctg

SEQ ID NO: 360337 - DNA, 276 bp, Zea mays
gctcatgatatcatagatgacttggagtcagccgggattccagttgggattactggttacgtttctcttctgagagcatatgagaaggagaataagtcagaagaagtcaatggccttcttcaacagatacaaaagatagcatctaccatggatgatgttcatactgattcaccatttaccatcaataatattgccaaagtagtgaaatatgaaatgtccttcagtggttcatctttgtttgctgctttggctgatgaaattaaacattacaacccg

SEQ ID NO: 360338 - DNA, 273 bp, Zea mays
cacagattctggaactgtctaaagactataaggcaaaattttccctacagaaacctgacagcacaaggatatctgttgacagtgaaaagagggctggaaaacatggctttgatcagagcagaagcatttcgaacaatataagttgtagtgtgactggaggaaggaaccctaccttccaagttaaagatggagaggttggtcagcaagatgcaggtcatcagagtgcaaactttctagacataggaccaggttttcctactattcaagtgggaa

SEQ ID NO: 360339 - DNA, 296 bp, Zea mays
gaggaatccactcaccacatccaagtgaggaaagttcaggtctgatgtgccggtgggaattggtcgtctgagaaattttgatagcgccgcctgatgtgttatcatcattatatgtgtaattttactgttttaccaggagattgctacgtcgagttatatgttgtgtcgaattcacgtgtaggctctgaatcttgactgtgttcgttcattttcgcttgtttcacactgaagtgttataagctcaactttactgctttaaaaaaaaaaaaaaaacaaaaagaaaacaacaaaagaca

SEQ ID NO: 360340 - DNA, 286 bp, Zea mays
gcattatgaaggctacatctgtgctttgtaagtaccacttcaaaaaatcgttctgtttacttactacataatatttcagtgtctgtcatacattaaaaatacttgtcactgttttaagatcttgactcttcatttgtttcagaataactcttcttctgtattctgtcaactctttgctttatagcattttgttgtattcaaatgataatggtagcatttccatgcttgtgacagcatttttaagttattaatatattttatcaacctttccatcatgtctgttttc

SEQ ID NO: 360341 - DNA, 129 bp, Zea mays
gtctgacttagggcaatttgaatctgcacttggggtctgtctgtacagggactcatgtcattgtaatgatttcactcctaactgtgacatttatatcaaatgtgtgaataaatacataaagattggtac

SEQ ID NO: 360342 - DNA, 288 bp, Zea mays
ctataaaatcactgaagttgaactttccttctgctgcctcctcccttcaggatttgagtgctgcaggtggcagccctctacatcctactcttgtgtcaaggtctaatattcctgggtccccagaagctgatgtgcacttgagaaacttaaatggcgcatcttctcctcgtagtttggccaatcagaattctcatgtgcatgcaaaccgtcctggtcatgaggtatcgacgagtcaaacttcagaaaatgcaaatggttctgcaccagatgtttcgagggtatctctcg

SEQ ID NO: 360343 - DNA, 287 bp, Zea mays
ggggaagcttattcctgttcctaaacgtccattgggagaattctttgcatgctgctgtatctgcaaggggagcaaacaaggtagccattgcactgcaaaatcctttactccttgccgatttaagtagtgcatggtggagtgatcaaatatatcagagcatcttttgcctcttcccccagtttttgtcgcacatccctgacagttctgtttgtgcagcccctgatgacgcaacctctaatgataaggaagacaacaagcccgagccttgagatgtcagcaagattgat

SEQ ID NO: 360344 - DNA, 128 bp, Zea mays
cagatgtacattgacagaaattttcttagtcaatcctagattgatcatgatttgtgatttctatgcaggccttggtatgattgccttttaattgctgtacaatttcttttgatttctaacttctctgg

SEQ ID NO: 360345 - DNA, 289 bp, Zea mays
gccaaatcaggatcctcaaatggtggttgtgctttcttgtttgatggtgatcctgacttttctcacataaaacgttataattttttgtgtcgtatgttcagtgcagcagcggctagagctgcaacttctgatgaatcatttgcatatatggaaaaccagtcaaacatactgatggatcaaatagagcaagttattcaaaccaggccctctgacatagctgatcttattggtgctaattgtgatcgaacacaaaatccagttgacaatattgtcgctgaaggcattcaaa

SEQ ID NO: 360346 - DNA, 157 bp, Zea mays
atcatcttgcctttaatgtttggggtcctacacaaactattagcgcatttcagtatcctcttaccccgttgtttttaagtgttggattgctaaagcaagacttttgtcttcgagaatgtaagtcaaccaagtgttatctatgttgtaaaaatggata

SEQ ID NO: 360347 - DNA, 198 bp, Zea mays
agcgtacgagctcggaaagggctctgtcgagcgaatcggctcgagctcgaccgggaaggttctgtcgctaaaataactggcaacgagggactgttcttctcaggtcccgcattagtttttgaaggtggagaattccagattcacagctatctcagaaaacccagcgaatttcaagggaaaggtagtagtaatccgagg

SEQ ID NO: 360348 - DNA, 147 bp, Zea mays
ctctaaagtatcagaactgatagaaagaacatatatggtattgattaaccttggccatggaatgtggtctgaggtaggtcttcttgactgaagtattttatcacagcaacagagaagtaactattatagggcctgtgatcatttgca

SEQ ID NO: 360349 - DNA, 291 bp, Zea mays
cagcattatacacaacaacctcaggattatatggtttctcttcatgatcagcttcttgacactggcatacacatgatctgcagatctgatcactgtgttgttgacagatacttatcagtgaaggaaatgtatggatgtattctattaactgaatcagcatcaagcaaagcagggatagcactgccaagagatgtggctctcttttctgaccaggttgcaacagacacgacagatgttttaaaaaggtttctaaggaactgtgatggaacaaattcggaagctatcccacgg

SEQ ID NO: 360350 - DNA, 175 bp, Zea mays
ctggggcttgagctgaggatgggacgatgtgcccatggagggacacatcagagcacaagagaaggtggctacctgggggtgtcccagggactctgtcagtgccttcagcccagcagcaggagcttggagtttggggagtggggatgagtccgtcaagcacaactgttctctgagt

SEQ ID NO: 360351 - DNA, 277 bp, Zea mays
gtgcttcccgccgtcgtggagaggtcacgcggctggttcccgccgcttccggacggttcggccttccagcttccccttgagttcaccatgttttgtgacgcaagctagctgaaccctactgattgctctcccagcgcacggtggttgttgcgctgattcgttgtcttgtgagctgttctagggttccgagggaggaggatcagctgccgcgatgttcctcaggatctctcgtctcggggcgcggcttctgcgcgagtctggagcggagacgagagct

SEQ ID NO: 360352 - DNA, 272 bp, Zea mays
acagcgctcgacgagccgccatccagtcggccggccgtccggcgatatatctccccgaccgccacgcatgcgcgagacttgagttcgttgacacctatacatagaggcatggagacggtggcggcgagttacggcggcggcggcgaaaagagggagctgcagcagcagaacaagcaggcggcggcgggcgggtgcgggcaccagcacttccagatgccgttgcactacccgaggtacaggcgggaggactacgagggcatgcccgagtggca

SEQ ID NO: 360353 - DNA, 270 bp, Zea mays
agctgccatatgaaaaagacgccgcggccgagcacgagccacgggcagctgagaacagaacgcagcatggcggcgaagcatctccgaggctcctcctcgcatgatctcgcggaggctagagtcatcgaagaagagcacgatccatgaagcaaagcctaggccgagcagcgagcacacggataagcgcaggcgaagcacgggccacagggagaaggcgaggtccagcacagacaggagagagagatcgaggagaagcgtcgactgcttcga

SEQ ID NO: 360354 - DNA, 133 bp, Zea mays
  unsure (1)..(133): unsure at all n locations
cggcgaggtctatggcgtcgacggcggggtacctggcgcggcgggcggcgcagaaggagcgggtgcgcctgctctaccgcanggcgctcaaggacacgctcaactgggccgtccaccgccacctcttctacca

SEQ ID NO: 360355 - DNA, 182 bp, Zea mays
agacgatcggatcatgttacttgatattacttgctgttttagttatttagcacctccgtcaatccatgcatgcgtgacttagccatttgttgccatattcatactagtagcatagcattagataccagatagggtgtacatttgttaggtcttggatcaggagaccaatctatcttaataaa

SEQ ID NO: 360356 - DNA, 266 bp, Zea mays
ctcgagccgaatcggctcgactggctcgagcaccccagggccgaacacagtccgggaacaccctcgcgcgccgctcggcacgacgatgtcgtcgagcaggttctcgccggcgctgcaggcgtccgacctcaacgacttcatcgccccatcgcaggactgcatcatctccctcaacaagaacacctcctcctcctcccgacgcccccagaacaaacagacagagactacagtgagctcaaaacctccagaggaagcagtcaagattt

SEQ ID NO: 360357 - DNA, 292 bp, Zea mays
tatgatgcggaggtagacctttatataaaccatgcatttaacgtagcgtttttgctaaaatatggatgttggagcaagaaaattccttggttgtacagagtatggagatgaacctaccaagaggcaagaggataataacatgatcgagcacaaggatgaagcaaattgttccaacgaagatgaaactgtcgagaaaccaaagcattcaaacgctgtgcattctaagaaggagaagtccaaaaccaatggttgttgctcttgtggatctgcaaggaagcacaaggcgtcttgt

SEQ ID NO: 360358 - DNA, 191 bp, Zea mays
ctattatgccgcgtttctatccaagtgccatggccgttgtgatatggcacatgtgtcattgacgtaacataatgctgctgtgagctctccgctctctgtggttccaatgggctattcccatttgcaaatattgtgtccataagacgaatttcttgacgttgctgatcaatttctaatgttatcacaatgtc

SEQ ID NO: 360359 - DNA, 295 bp, Zea mays
  unsure (1)..(295): unsure at all n locations
tcgacgatggaagccccgggctcgccctacgcctcctcgccggaatccgcccccaagcgtgcccctcgcttcccaccgcagcagcagcctccctccgaggaaggacgtaactgccacgcgcctccctctcccttctccgtcccgtcgcgcgagcggngtgctggcagatgacaaggagaaaccaatacatttgaggtttctggtgtctaatgcgtcacaggatgtatcattggcaagggtggatcaactattaatgactttcagtcccaatctggggctcgtattcagttatcac

SEQ ID NO: 360360 - DNA, 288 bp, Zea mays
gttccttacacttatctgcaagaacaatacagatcatgctgaggtgaatccagaagccctcgactctattccttggttttgtggtacaacagatgcaagatcattcttcactatcttgaggaatgactgcaatctgcctaataagaagataggtgctctcggccttttggattcgggattcctcctcctccttctcctcctgatcacctcccactcccactcggccagccccacccaccgccggccccccacgcaacggggagcacaggagcagatcgatctagcctc

SEQ ID NO: 360361 - DNA, 303 bp, Zea mays
cgagaagggagaatctgcgccattctatgatttagctcctgttgctgacaactgtatggatcattcggagaaggagatcatcgctctaaatgatcactcgggaggtgaagctgcttctgattcgcaaagaagtccagaggcagtctgtgcgagacaattagcagctgtaccatcggatcaagctgctggcccagccaagagaagtccggagccatcggagcaggaatttgttggtattgttgatcattcacttgagcacgcttctgacgaccggaaagaaactgccagcgacagcgatcagtt

SEQ ID NO: 360362 - DNA, 297 bp, Zea mays
caccgagctgagaaaggacagaacaaagaaagatcttaacatcaaagctacagaagtggagattcaaaatctaacaaaaaagctaatgtcatggaataaatgaggttgatgtggagctaaaaagggactctatgtatgttgtgggtgaggcggttatcattcgcttgttatgtgaacattattgtgatgtggtttcatgttgtccaggtgccagtttaacaactttatgcaccaccatgtcgagactatcattgggtcgctgctggagagtaatactgatcaactgatcggccatgt

SEQ ID NO: 360363 - DNA, 297 bp, Zea mays
agctgctcacagctatacatcggcgcatcgccattaattagcagcggcttgctttggtttctgattgattagctggttgttgttcagttagttcgagtagtagacgatgtactctctaccaggagcaaccatgtctgctgcacctgcaagcatcatctcttcttcctccttcgtggagcctcttctccttgcagcagcttcgccggcggcggcggcggcagctgcaaacagccaccaccaagtccgccagcgcagcacttggtccgtactttggcggcatcatcgtcgtccaacacg

SEQ ID NO: 360364 - DNA, 300 bp, Zea mays
gcgccgttgacaggttccgtaggcaatttgctagcttagaagaaaatggagagaggaatgccgcgcttgacaggaaacatgtttctctcccaaggtaacatataccttcttttccttccaagtcattttttcggttgttgagattgataaatcagggtaatccattagctactcaataggatttatcaactagatataggatgatgatctgatgacgtgttggcctagggtgtcacagaaagatttgctcagacttgactgctgaccttgatttgctgcttgcaggacaacaaccgttca

SEQ ID NO: 360365 - DNA, 290 bp, Zea mays
caaaggagctcgtggagaaggcgcccatagtggtgcgcgcggggttgcctaaagaggaggccgaggcgctcgccgctaagctcaaggccgccggtgccgctgttgcactcgagtgatcccacgaagattggatatgggtataaagaggatgcaacgtatgctctacttgcgttgttgtagcttcggataagcctcaagcctaatcactgatacgagtgacagcattttcctgaatcgcacaataaggtgttcctgcacaatgttctatattactggcctggattggtttg

SEQ ID NO: 360366 - DNA, 291 bp, Zea mays
ccaccttcttcgtcgcttgtcgccttgccaattggcaccggcggatgccaatatgccgtcgcatatcccgtttctttctacacaaaccctacccactcctggtatgggcaccaggcggtggaggtgtctggccagtgtctctctttgcaaacgcggcctttcgtcaagagagcggcagcagctagcgacggcgggttcaaaaagtgctcctcccatttggatctgatacgagacatcgaggggtctctccctttgtacactgcacaccacggtttacaaaaccattttagc

SEQ ID NO: 360367 - DNA, 275 bp, Zea mays
gccatcggagcctcaggcttcttaaatggtgcagtctgatggactggatacactgcgattcacagaggaaatgcaccatgaagcttggagcaacgaagcataagctggtgtcactgactttagagttaggatggctcactgaccaggtcacatcaagtcactgtgttgagtgagcaaattttaggctgtctacttggtaccggagttaatttcagatgtgagaagcgatggaccaaatgcgttatgcttccccgaactgtgatatgcgctctctg

SEQ ID NO: 360368 - DNA, 271 bp, Zea mays
gggcggtcgttgctctcggatcaagagaaagggaggaaaaaaaaacagcgctttcattctgtggcctacggttcgcccgtctctcactggctgtgtggccactggccaagcgggacacggaactcgagctccgtttggggattccggatcacttcgaggtcacgaggctaaagggattctgatcatcacttaagctcaagatcatgagttggttaaacaaattattaagggttcagtaaacagatttcaaggggtcactagatggagctgg

SEQ ID NO: 360369 - DNA, 257 bp, Zea mays
tggggagctaggatcagagaccgtcagttttccttgagcccgcagaagttcgtgtttttcgtgtatggaatggtagatgagatgtatatgtattgttgtaagtttggagtggacaaagcttttgtgtttcttcttcctgtgttgctgctttatggctctatccttgaccatcatgtacataataaagtttgcgtaactagcatactgcatacatgtaagttacaagtacatgaacatggtgctcttatttgtatgct

SEQ ID NO: 360370 - DNA, 172 bp, Zea mays
  unsure (1)..(172): unsure at all n locations
gagaattgtacggataaaggagggagatcctattggccgtcatgttgttatagtggatgacttggtccagtctggcagtacttctantgaatgccaggtataagaattgtctatgacttgttttctttatgccgtgtatagtgattattgatgaccttcacattgatctggt

SEQ ID NO: 360371 - DNA, 122 bp, Zea mays
ctcgagccgccgactggagatatgtaaatttagttaactgttgctggcagtttgagttagttttttacccaactttggagcattgtggtaattactccaaggggaaatgggttagggattcc

SEQ ID NO: 360372 - DNA, 156 bp, Zea mays
cggacggtgacatggggtgatctgatgaccccattgtatattatatatggtatggtataaataaattccgcgacacatgtaacataccccttcagttctggaatcaacctcaatagcgtgaagctatgaagattaactgtatagtcatagtgcttg

SEQ ID NO: 360373 - DNA, 269 bp, Zea mays
gggaccggatgttccttgttttgccgttgcgacgattgccagatatctttcgggaaaaatggtacctacggaatgattttatagacagttctaaaaattatacgagttatctttttatcagtacatggccagagtatgtaccggtgctgccattagtatataccagctaacgatggtttctctactgcagacggcataattgctgatgacagtaagcgctatctgtacactggtgctgatttggatcacagcgagggcgaacatgactt

SEQ ID NO: 360374 - DNA, 287 bp, Zea mays
tgaagaaatgcttcttcagacgatgcaatttggcacagcgtgtccatgggtcagactcacacccgcaagcaaaagatatagctcagtctcattgagaaggagcaattgtggcccaaaatgttcggtgtcccaattggaattgaagagtagagtgagagcaaaacgaagccgtatccagcagaggcatcgaggaccataatggagttggctaaggtgggcacgctgtgtacgttgacccaagagggtttgccccttggtactggggttcgattcgcggttgaccctga

SEQ ID NO: 360375 - DNA, 111 bp, Zea mays
gacgccccgaggaagcagcacggctgtgagtccagcacagccagcactgggaccccgtcctgagctgagcggttaccaccagccgcaggcctgcggaggcgctagtccacc

SEQ ID NO: 360376 - DNA, 270 bp, Zea mays
tgctcgagccgcgcgcacaggcacgaagcgtcggtcgccctgcaataaggctgttgggccctggcacgcagccaacggaggggccactgctctacggcgtgcattccgccacccgtgaagccacatcgtggttactcccccagccgccaatcaaacctaccagttccagccagagccagccctgcccttccccatggcggcctccgtgcagctcaacgtagatctgcaggaagtaggacgacgtacgagagggcagagctcgaggcgctc

SEQ ID NO: 360377 - DNA, 132 bp, Zea mays
ggtacaacacactcaagaataaagtaaaaggatagtcaggatccagatgtttcttttctagcatttaatgtgtgtgaactcagaacactaccatgaaagaacacttccccccaaaactggatagagaggaag

SEQ ID NO: 360378 - DNA, 276 bp, Zea mays
cgatgcgccgaggccctgctgctcattccgcagccataccggattcccggattctccttgctcatgcgtacttctcctcagcgccgcccgcccagttctaggacccgcgcgccgcctggcctcgcccgagccgctcgccctgatcatgctcccagttcgtccatatctcacatcacgtccaacactacgctgctgctactcctatcccacacgcatagcactagcacctgacagatcgaagggatccacattctagctcttggagcatgctgccat

SEQ ID NO: 360379 - DNA, 261 bp, Zea mays
ggctcgaggcatccgtctccggctctctgacaatttcttcccagcacccctcgccctcatgctctggccgccgtccctgcttctcatggcggatctctggccccttcctgcagccggccgtcgtttcccctcgtgctcttggagccggtcgtcctcaccgtgagccccttctgttttccccatccggccgtcgttcttcagcccaggtcatcgcggtactctaagtccaacgcgccgttgtccactgcaagctcgccggct

SEQ ID NO: 360380 - DNA, 265 bp, Zea mays
ctgatgtccgatgtctactattgggtgctggaactcttggatgtgatgtcgctcgcattcttatggactgtggtgtacggaagataacagtagttgatagtggtcatgtagttgtgtcaaatttagcgagacaatcatctatacttctgatgaccgtggtgctccaaaagcaactgcaatacttgggcatctagtggagagatgtccttcagtggatgcacaaggcattaaaatggaaatacctatgcctgggcatcctgtgtct

SEQ ID NO: 360381 - DNA, 265 bp, Zea mays
ccgagggcgacctgtccacggtggcggacgtgctgagcctggccctgtcgtgcgccgcgtccgatccggcggaccggcctgacatggacagcgtgctttcagccttgctgaagatgagcaaggtctgtggaagagacagatgcctgctgcaaaaacgcgaactgaaattcgtgctgcaagatctgttcaagcaaagggagaaccctgcttctgatgagtaccacccggacgccggacgggacgccaaagtgtcatagattcgggc

SEQ ID NO: 360382 - DNA, 270 bp, Zea mays
catagccgcacctccttccgcaagtgctaccagcacggggtcaggtcaacaatgatttgtgcggagacattttcagttgtcgttgagatgtttggtcctgctgctactatccacatgatttgtagcgagaatggagtgggtggtgagcacaagatcttcttctctcttatggaggtcatcacaatgatgacgaggaagaacaagccattagatagataggacagctgagctgttggtcgggattagtgtgaagaggtggaaaggaaagat

SEQ ID NO: 360383 - DNA, 207 bp, Zea mays
caatcatgtatatacgtgtgcctgcagttgaagttctgtgcatgtctgagcctgctttcgtattcatgagatacatcaacataatgggagaaaagttttagataagcagcattgtaagttcatgtagagtttgggatgtcaaagtattaacgaagggtactgtccaacatacttttacttgggtcatattacttgttatgatctgat

SEQ ID NO: 360384 - DNA, 270 bp, Zea mays
tttctctcttcttccttgctgtgcactactcaaaccaaccataacttctcttgttctcgttctcttccctgcgtgaaccgcggaccaagatgaagcgggcgttggggactttgggatttgaaagcctacatattattatttctctacttcaggcgtggtgagtcgcttctcgtcctcggctgagcgcgcgagttcatcatgcgattttcgctgtctgtgctgggagggaagggatctgtggggctgcagcccatccgggctgagggttga

SEQ ID NO: 360385 - DNA, 257 bp, Zea mays
cagctcaccacggcgcagaatacgcagcccacgaaggcgacgaaaagctgccgcaccaccagcagaagagagcgacgctccgcgcgaccgagcgactccctagtccgtcgttatcagtctctctatctctcttcgcctccggatctcgcatgcgcggctaccaccgccgcgcccgacggtgaatggtgaggagttagcgaactgcctggaccctgagtgctggacgtcggcgatgtggcgagatcgcactggtgggg

SEQ ID NO: 360386 - DNA, 269 bp, Zea mays
accgtcgccgcctcccttccctcgtctctctcccctcaactctcctcattctccacaggctgagcagcagccgccccattctgcggttcaatcaccgctcacgcagaacccctccgccctccgctcctgtcgagctcgctctctacctgcaccagcctcgctcgccctctgctcgccgcagcgatggggaggggaaagctcaacggaaagcccaccggccgccgcaacttctgaactctagaggagatcgtgctggtacttcaggtcgc

SEQ ID NO: 360387 - DNA, 167 bp, Zea mays
atcacactgaattttattttagcccaatgccccttatctccttatgcaattgatatttttatattgaatattagaggattggtcattgtcatcaagtcgtctgtaatacagaaaacgataaatacaacctaacagttcaaacatgacgagttaaataaatgatggtt

SEQ ID NO: 360388 - DNA, 263 bp, Zea mays
ctctggccgtcaacgccaacgtggggtacgccgcggttcaagaactggctcggaactgcccagaactccaccaccttgacctcaccggctgcctccgcgtcggaagcgacggtgtcaggacattggccgagtactgccccgtgctgcgttcgctgcgggtgcggcactgccaccatgtggcggagtccagcctgagccgcttgcggaagcgcggcgtggacatcgacgtggagccgccgctactcaaggccctggtgctgctg

SEQ ID NO: 360389 - DNA, 263 bp, Zea mays
cggcacgctgcggaacaacaatggcgatgatgcctcctgcagcggcgtcatccctcgcctccactccccgcggcatcgccgctccgcctactcgcacggcatccctgtgcatccgcttaggtgtcgtgacggcgacgctgttcgctggactggcggcggcgtcgcagccagtggagcgtcacgccgcggtggtggtcgcgatggcgaagagggagcaggagctggaggggatccgggccatgacgacggaacagctggaggag

SEQ ID NO: 360390 - DNA, 261 bp, Zea mays
attccacaagcggaagataaagagaagaaaggaggcgcagaagattttgcaggagaaggagaggaagaagaaaatacaggaccgcaagatgaggaaagaagagaaggagattgctctgtatggtagagtactgacatcggataacagtgatggtgctggattagaaaacgaagatatcggcgatgatgaaatcaaaacctacgaagatgacgggaccagaactgtagtcaccaccagtgaaattactcctgaagaagatga

SEQ ID NO: 360391 - DNA, 263 bp, Zea mays
atcgagccgttttttttttgattttaaaccgtgcacacaaatttgtttcgtagatctgcaatcagagagcagtctttacaataccacaagtttgtagtctgacaagagactctaaacaggggttttaagctaaacaacacaaaacaaacaacagtaaattaaaggctcatgaggtactcaagcagctctttcttcttcctttcgtagtaaggtcgacgaatttccttgagttccatctctgcattacgacgttcttggctttt

SEQ ID NO: 360392 - DNA, 168 bp, Zea mays
atgagaattcaccagcatttcttatcacatcctaacctcaatgaggctgacgtgcgtagataactgagcatctaaccagcgatggatcattactagttggcgtattgtctttagccgggttttcccggttggagacgcaatgtcgcactctgcatcctctgtggcaga

SEQ ID NO: 360393 - DNA, 296 bp, Zea mays
tgcattgcaggagcaggccgcccccaccccggcatatgtccttggatcgccaagcgacagtgtcatggacggacaccgggaacgtacactcgctcccacggggttcctccgtttgtcttggcaggagtccagtagacgcgggaacttgcttggtttagcatctctgcttcgcctgtaatgcgcccacttttgagcttcgcggtgggcagcccgtggaggacgaggagcggtgggtgcagtgcacacaccaagccagagggttaactgcacgagtttatcttatttctttctttctg

SEQ ID NO: 360394 - DNA, 126 bp, Zea mays
cagacacagggtctgtatgtaccgtgtgtgtgataactagggtggtaatggatcacgatccacattacgctaaattaggaccctgaataaatgttagttcaacaaataaataggaatatagtttga

SEQ ID NO: 360395 - DNA, 125 bp, Zea mays
caatcactgagtaagccctaattacattttactcttgactccaggaaaagaaagcaagcttttatctaatctagagggaagtattcgtgagcaataaaaatcacttttttgagttgaataataat

SEQ ID NO: 360396 - DNA, 286 bp, Zea mays
atccacacaagcacttcgacgtcgcacgggcgctgcacacagacacaccaagcgtcggcaccaatggcttactaccaggaggtggactactgctcggaggaggtgaggtcggtggccccggccggcttcggccgccacggaggcggcgtccagcagcacgtcgtcaaggagaagttcgaggaggtcgacacggtctcacgcgccggcgccatccacgaccaccaccaccatggtcaccacggcggccacggcttcgtggtgcgcgagacgagggtcgaggaggaca

SEQ ID NO: 360397 - DNA, 116 bp, Zea mays
ctcgagacgaatcggctcgtgcatcgatctacaaacatacatagattctactactacacaatgacaaacatggggaagcatgcgaagatcggagagtagggtggatacgccggcga

SEQ ID NO: 360398 - DNA, 116 bp, Zea mays
aacctacagtaattttgcttaggtaattgtgcttatctatggagcacaggaaggctcttaggctttgttcctacaagtttctttgaattttagagtaaatggatgtgcctgactgt

SEQ ID NO: 360399 - DNA, 183 bp, Zea mays
tggcggcggcgggtaagcgggtggaggagaagggcctgttcgacaccatcttcggcgcgctgtacaaggaggagcagctgccggagccggactccgtcctgaacaaggtggggagcaacggcaaggccgccgccgccccggcgcgcaagaacgccgctgaagagggcggcaacggcgggctca

SEQ ID NO: 360400 - DNA, 274 bp, Zea mays
gagcgcggacagtggctgcacggccatacggacggtgcaacgcaacgacgaccacggcggctgcgccgtgtacgccctcgagtacacggtggtgtagatggcggacacacctgcactgcagatgatgactacctggaggcggcgtcgatcatgcttgacaccgctagcgtcgtcgtcccatccgctgctgctaggttcgacggcgccaccgctgatgagggacgacgacgactcaagatgataatgacagtactacaatgatagcagcatcgtc

SEQ ID NO: 360401 - DNA, 293 bp, Zea mays
tttcaagccacggagaactgcaggttaggaaggatgtgctgacaactaaaagctatcctgaaggaagtggcaataatcttgggaaatcagctctgccaccacaaggaagctgtggtagcagactaaatgcaggacatagaaatggtcaaggagatgaaaattcagacagtggttcaagctaccatgtgaatgctcgatcttctgagcaatacataaacacatcatcagttgggagccagctaagtgatacccctaaaagcgaagtctcagaatggagctcctcttgctttcat

SEQ ID NO: 360402 - DNA, 290 bp, Zea mays
cttcgcgggtgccagagttactggacttggattatgcctcagcagttagcagtgctggtgcgcagggagccgtaactgcaggtcatttcagaagatgccattctttggacattgaaaagaagcatgttaatttgatagatgagtagtcaaaaagctaatatccagtgggtagtttgatggaaaggaactagacaggtaaccctatttttccaaccagtggtgcgctttcgtttccatataaccgttgtgcgttaatatgttatcaaataatttatataccgtcgcaacgc

SEQ ID NO: 360403 - DNA, 289 bp, Zea mays
cctctactacctcgccggctagcttgctctaagtttcgccgttcatcatgcaccctcgccgacgagctcgggggcccttctcgtccgtccgtaggttccatggagctcgcccaggtcggcgttcctctccctcaagctcatctccatgccgcgtcaagctcttccccacagcagctggcccgtcgtcgttcttcagctccttaccatgctcagctgttcgtcgtcgttggtggataaatagaacggttaaatatattagttgcgataatttccttgtcgtggttaggat

SEQ ID NO: 360404 - DNA, 283 bp, Zea mays
cggctcgagggacgacgaggagggcggcgctgacgcgctcagctacgcggccttcgctcagccggctcactcgtctctggcttcggcgacggcaacaacctgaacgctctcgccatcgcctctcaagtctcacgagtctcgagagggttcctccgcagtcgaaatggagctagctagctagagcgtgacagtggcctcttctcgtctctgtacgtagtagcataccaataatactactcgtgaactctctttctgagcaaacagattccgtactctcttttct

SEQ ID NO: 360405 - DNA, 281 bp, Zea mays
gcggctgctgctgcgaatcccggagacgtgcgtcaatacgacgaaaagctacgtctaacctgggtctgcaggttctgccaatccaactgcacctgcagatcagacctggagagccacctgagaggcaaaaggcacaaagaaagatccagtgcctgctggaagaatgcaagaacatggcagtggtctatagctataggtcgccgaattcacagccaaaccttgcgacacaggaagaggacaacggccctgcttcagcatggaattgcagcctgtgccaagcc

SEQ ID NO: 360406 - DNA, 270 bp, Zea mays
ctgctagctgcagcttcctcgagatgtcttcctcgatatgggactgcaatgggggggacattcactgggacaattggccagtacatgcacagcatggacatgagcgacgggggcaagaaacaggaggcggcggcggacactacggtgctgctggatacgtatacaacgtgcatgcgcacggaggagctgctgctgctggcggcggtcctccagcatatcaccataatcgactgctggtggctacgcatacaaatggagcactcctcctcg

SEQ ID NO: 360407 - DNA, 255 bp, Zea mays
atcggccccagccgctgtacaagttactgtaggcaatggcttcttgtacaccggtggaagccaggatagaacctgatggtagtagctttgcagtttaattattgcctttggtttcttttgcaagataaatctatgagatgtaatgtggaacttgtttgacccaagttgtttaaactaaaatgcaaaacgatggatgtcgttgtgttgatttgcagcagagttttgcattttttttaaaaaaaaaaaagaagaaaa

SEQ ID NO: 360408 - DNA, 272 bp, Zea mays
attcggctcgagccgctcgagcggctcgagcggctcgagctcgagccgaatcggctcgaggagaataccaatccagttggtttaccccaccctcaattgactcactctcagcaaagcaccagcattgcttcagtcgcctccactccctcagcatcttcttcatccctatgctcaaccaacccttccacttggatacgcaagcatgattggctatccatctcttcaccaagctatgcatatctcccgcctgccgcttttcagcaaccatacat

SEQ ID NO: 360409 - DNA, 272 bp, Zea mays
ggaccgtggtccgcccgccgccggagttcgccggattcgtcttctctgtcgcgtccgtccggatctgaggatctccattttcttcgacccgcccgcggctgcttgtagtactagtacgtacgtgcactgttttcgtcgttgctggatccgatgaagactcaccccctccaagatctacgtttgcaatggatggatctgcgcatccgctgacttactagtccgcctgccaacaatgagagatacatggaggagcgggagccatgggcggttgt

SEQ ID NO: 360410 - DNA, 135 bp, Zea mays
tcggaatcggctcgatccgagcgattcggctcagaaccgaggtcccccaatcccccaaacatttttttgtcgaatcggtcgtgagatcctctccgacgagatggcggggaaggtagccaaggccacggccgccaa

SEQ ID NO: 360411 - DNA, 115 bp, Zea mays
atcaaggaatgcttgcttacggatttggcttcaaaaacagtggtttatggtactcatcagattgaattcctagctgccgccgatctcatccttgtcatgaaagatgggaggatag

SEQ ID NO: 360412 - DNA, 120 bp, Zea mays
atgataacttggcggaatgatatttcccataacatgattgctatatcagatatgtatggtgaagctcccaagagaatggcgattcattgttctaccggaggaccatcaggagagagcact

SEQ ID NO: 360413 - DNA, 122 bp, Zea mays
catgtatctggcgttgcaactgctctccttggttctggagaattcaatgttgcagagtataaggaagcaaaagttgatccaataactcaattctcaactcctatcacaagccatatgaacaa

SEQ ID NO: 360414 - DNA, 120 bp, Zea mays
ggcatcttcaagaaagaatgggaaaatactgccaaatcaatcagtgaaatataaaagcaaccagaagtcagctccaggagcaagatttgtgtctcacaaggagcaggccgcaatagacat

SEQ ID NO: 360415 - DNA, 241 bp, Zea mays
ctcgagcccttgactgtattgatgatgtagagtctcgaggttgtttcatgcagtttcttagttgtctcgtccttatcctatgagcaagtttaataatagagcccattgctggctctaactccttgtcacgtcatctagagccaacaataaacacacttatatgagatatgataaagttggctatagggttggcttttagattaatcccttgtctctctctttcaaaagagaaaagagaggt

SEQ ID NO: 360416 - DNA, 119 bp, Zea mays
acgacagctacctcgactacgtggacatgatgcagacgcagggcgggacgaaggggcagtgggtgccgatgcagcagtcgtggggcgccgtgtggaagatcaactccggctccggcctc

SEQ ID NO: 360417 - DNA, 122 bp, Zea mays
gactatgattcgtgtattattccttgggaacttgaacttatcatatagaagttgtaaatttttttgtcatttcgacttatgtgcacttcatcattgcctttatgatcatgtaattcagagaa

SEQ ID NO: 360418 - DNA, 242 bp, Zea mays
  unsure (1)..(242): unsure at all n locations
ctcgagccgggcaatcctgaggagtagatcctgtgatgggcaaaggctaatccgttacacgggactggacgctatgcaagggtttccgcaaggttcatgctgacagatcggantttgctcacgaagatttcctgcgagatagcaagcatctattgaagaggattgtcaggcgcaggtcctccccaacaaaacaatgcagcgttcagcctggctcttcttctggagagtcagcttggaccctg

SEQ ID NO: 360419 - DNA, 285 bp, Zea mays
cccaggtgttggtccaaaggtcgctgcctgcattgctctgttctcccttgatcaaaatcatgctattcccgtcgacacacatgtttggaaggttttagaagggtagacctagtgtagtagtgagagctatctcaatgagctaccaggtcacgagttcgaagcagtctctccgcatttgcaggggaaggcttgccttggttaatactttacctagacaccataatgtgggcgcattcggcactgggtctgccttcattgctaggttgctacacagtatctattacc

SEQ ID NO: 360420 - DNA, 160 bp, Zea mays
ctcttcgcgtcggtgtttttgttcaagcggctcacctgtcaccatgtcttcccctttgagccttcgtcgacgcggagcgtatgcgtattccaattcgaccttgtctatactgtctccgtttagacttcgagctggttcggtttcgacttcggctgatctg

SEQ ID NO: 360421 - DNA, 147 bp, Zea mays
aggcaacccgtgctgctgtgttcaagttgaccagtcgactgtggccatcagggagcactttggcaagtctaacagcgtgcttcagccaggatgccactgcatgccttcgttcaccggcaagcgggtagctaggcatctcacactcag

SEQ ID NO: 360422 - DNA, 132 bp, Zea mays
taggtcacactaaagcaatcaattgtgtagattggtcaccgactcatgggcatcttcttgcttctgctggaatggatcacacggttcatgtatgtcctgtatgggacaaagggaataccactgctcgtgttt

SEQ ID NO: 360423 - DNA, 273 bp, Zea mays
agacaagattattagtaggtgtatgtataggttgggaacatacatgcatggaagatggtaccacacacaccaagcagcattggagggagaggagattattattgaggtaattaattgtaacaaatatatatgcatacccaatcatctgacccaacagcaagcactgcactaatagcttatgtatggattcattgaggaactggagaagcagcgttcgtaggggaggtagacgcgacaggtggtttcatttcatagatcagacggaagcagaga

SEQ ID NO: 360424 - DNA, 156 bp, Zea mays
agataagattattagtaggtgtatgtataggttgggaacatacatgcatggtagatggtaccacacagaccaagcagcattggagggagaggagattattatcgaggtaattaattgtaacaaatatatatgcatagccaatcatctgacccaaca

SEQ ID NO: 360425 - DNA, 118 bp, Zea mays
ttctgatgttgagaggctgaaagagcagtatgcatgttgcacagaagatcagttggcttttgaaggctatcgaaagctcttgccatccagaaaggcacttcctgatgggcaggtcata

SEQ ID NO: 360426 - DNA, 149 bp, Zea mays
cgctgcttcgcgaccccagtcctctcccatggcggcgcgcccatcctctgctccctcttccctgatctcgcgcgcccctgattcctacttctgctccagcgcgcgggttcttccctgtcgcgtctggccgtcgtcaagctccatggtgt

SEQ ID NO: 360427 - DNA, 188 bp, Zea mays
gtcgccctgagcttattccgtgtgccacgacgtcttgtttacctccacgccaaggcatcaccgaagtacgtgaattaaccacgtgatgcggaagacgagccaagtcaaccccaagcgcgggctaatccgcaggatgaagctgataactaatctgaagatggatagacgaaacaagatcagaacaaaag

SEQ ID NO: 360428 - DNA, 105 bp, Zea mays
ctgtctcaagcaacgttcgagagagatacatgagctaccatttttcggggagccagtactttgtcatgtccatagatgctcatccctattctttatgtacgttgt

SEQ ID NO: 360429 - DNA, 296 bp, Zea mays
cgcctcggaggaaggccgcgcgacggacggcgcacgcgctcgccgtgcccatgctcatcaagaagatgttccgactgtccgacctggctacccagcttgccgtgtcggacgatgtggcggctcggaaaggcgcacagcgacggcgaggatgacggtgcggtgacgcggtgtcttgtcgaggcgctgggggttggggcgttccagaagcttctcctgctcttgcaggtcggctgcagggacgcaaccaaggagaaggccaccgagctgctcaagttgctcaaaagtacaagagcgta

SEQ ID NO: 360430 - DNA, 303 bp, Zea mays
ggaaaagtctggttttggtgctattgtttagaagcctgattgcctagtaaaagaaaggattggcgatgtgttagaaaatttagaataatactaccgtgcaaaagctgagttaggttggacgttcaacagctgggtcccacttgctaagattcacctagcttgggggatgatatagcaattccggggaggccaaatttgggggtttgggtttaaggtggattattggtttattagaatagtcatagagatcacaaaaggcgtgcatatccaggccatgacacgtcagacccagttaagtggttg

SEQ ID NO: 360431 - DNA, 303 bp, Zea mays
cggctcgagatcacaagcaggcacatctagcttgcttggtttctgattgattagcaggttgttgtttagcgttagttcgagtagacgatgtattctctaccaggagtcaatgtctactgcacctgcacgatgtccatgtgcatgttcatattgcatgttcatattgcagaagacgatgtcctacggaggttcatcgacggcgccacggcgacttcaagctatctctgagcaacgacgtcagagggctcctgggcctgcacgacatgtcccacctggacgtgggaggggaggaggcggcgctgc

SEQ ID NO: 360432 - DNA, 301 bp, Zea mays
gacgccacaaatcatatccctccactaactgctcatcaacttatcctagacgccattgttggggctatattgaacttcgaggagcaggaacaacacagtaacactcatcggccgtatgacccagccatcctagagaattacttgtcaaagacactgccttcgttcaagcagttggacgaatacaaatcgatcatggtccttatgctccgcgcgggacattggacgttgtatgttatcaattttcagaatcgatgcatacacattctagactccaatccatacggaccagaacttggtgaga

SEQ ID NO: 360433 - DNA, 294 bp, Zea mays
gtttgtgtaacattattgaaggcaagattccatctggtcaagacaacatcaaaagtgaagtcaatgaaaatttattctccaactaccctgttcttgatgttggaactggaaatggtcttcttttgcaagcattggctaagcaggggtactacccaaattttctcaatgatgtttaattagcttcctgttggaacgtggattactacgcaggtttacagacttaactggaacagattacagtaaaggagctgttgaacttgcaagaaacctagctgctcgtgatggcttctcttc

SEQ ID NO: 360434 - DNA, 116 bp, Zea mays
cttgccgcggagccctcttctctctaccgccgtctcgcctcatcacgccattaaaccccactcgcgcgcgagtgggctggcggcgagccctcacgcatccgagcaagccgaggagg

SEQ ID NO: 360435 - DNA, 205 bp, Zea mays
cgctcaccagccatacagcatgcctcctggtgcccaggccaccttgccagcaccacctcctacccttggtggcacagcgccatagccgaccgtgccaatccctcagatggctgtaaggcctgaactgcagcagcagcctggcgtctatcgaacaacagctgccgccacgcccgctccagcgcacagcgcagctccagctggatac

SEQ ID NO: 360436 - DNA, 306 bp, Zea mays
cgccggcgccgtgaccagccttatcgctcccgtcagggtagacgcaagtacccgtgctcaccactcgcgccgccgtctccctctcttcgcagccatggtgaagaggctcaggcgtaaggaagacgtctcctccgtttcgccgcccaaggcctccgcccctgggtctaccaagtccgtcaagttaaagaagggggtcacaaccgttccgaagaagttgaaggggctctacactgaatccgtgggcatcgctgaggcgtctgcttcggcgcagacaccggccccaaaatcaatcaagacgagtccggc

SEQ ID NO: 360437 - DNA, 307 bp, Zea mays
cggagcatgttagccctggaatatacatcttgcattgcttgccactaagattgcgaggtgctgaaggttctcctgcaagatgcatcctcatcaagtgacatgggatggtgtgaggacccaataatatggagctgggctagtgctgatccaatcgacactaatatgagctgaagatactacataaaacatgaacaatatggagttttaaaacctggactggggtccagtgtggattggcgtaacttagatcagctctgctccatttccttagttctcatggcgtggctggctgttgccttgtgcagtt

SEQ ID NO: 360438 - DNA, 292 bp, Zea mays
acattgtcagcttgatagcacaagaccgacaagtgatcatatgctcttgtggtgtccatcgctagagcagaagatccagaatcactggaagcaagcggtcctgaatctggctgtgaatgtcaagaaaatatgttctgagatggatggtggaccatttctcgtcgtgcctagccaggtacaaggaggtagacgacagacttctgtcgctagaaacgaacgtataacttacccgggagaagcttgagtcagctgcagccttcaaaccagtgactgggcaagcagccgtcctagt

SEQ ID NO: 360439 - DNA, 298 bp, Zea mays
cccgtttcccagtgcagaagccggcgaaacttccaagcccaaggacaggaaaaaaagctgtcacctttaactcgatcccctcttccccgcccgagtccgagcggcggcgccggagccgacagcttccggcaagcgggggctacttggtgcggcggactatttccgcggttttgtgccacagcgggactgaactgcccgcccaggctgccctgtcagggtcaccaaggttgaacaagactgaactaccgcgcttcagccttcaggatactgaactgccatctcagttagatgatacact

SEQ ID NO: 360440 - DNA, 285 bp, Zea mays
gttttgttccgctttctcagggttttctatcgtctcgtctcccatcgtcgtcgtcgcccgccgctgctaggtttggggtttccggtcgccaggacccaagccagctccgtcgggcgccctggggaactgctgggaggggcggtcgaccggcggtgcctctgcttcgggttctccgtaccgaagtccgaggggatcggatggcataagtggaacctttaagatagatggaaaggaacacatatcactggctggacatttgtcatccaaatcttgtgagaaagtgtg

SEQ ID NO: 360441 - DNA, 140 bp, Zea mays
aagctctcgctctccacgcagatccctcgcggtgctcccatggcgcgcttcctccaacgccggccggagtcctctggtggccataccgcttccctctgtgtagcgcgcagcatccctccgtctgttcgccggtgccatgg

SEQ ID NO: 360442 - DNA, 167 bp, Zea mays
atacgtggataatttggcagtcttaaactctagggaggagtcaatagaacatggaagggatgatgagatttctgagcagacaagtccacaaaagtcccttgaggaggaatatttggaaactgaaaagaagatcgtgactgccttcagcattgtagatcgcatgaaga

SEQ ID NO: 360443 - DNA, 127 bp, Zea mays
gcagcttcgccggctgtggcagcggctgcaaacagttaccaccaagtccgccagcgctgccactttgtccgtactttggcggtatcatcatcgtccaacacgctgctgcggagtgacttcgatctcc

SEQ ID NO: 360444 - DNA, 125 bp, Zea mays
ctcgagccgcttttgtgaatgattttgtaaagtgtttgcaaatatgtgcaaaacatcaataacatgtgtaggttttgtgaatgattttgttgtggtgcctgttgatggtttatgtatgtggatct

SEQ ID NO: 360445 - DNA, 275 bp, Zea mays
ctcgagccgcgcgaatgcgttgctgtgctctccagttttgtggctaatacaatactgatgtcgggtcgccatggttgatgttgttgtgaggaatttacttgaatgtgaggccgcaagcagcagatttgatttgggacgcacactgaaatggcagcggacgcagattttgggatggcgtgcgcgtccctgtcaagaatgggatggcgtgtgcgccggcgccaggcctgcctcgccttgcttgccggcggcagcgtgacacgtctggagggtggaga

SEQ ID NO: 360446 - DNA, 240 bp, Zea mays
cgctagggaggaaaacagagggatggttgggcgtcgaacagaaaggaatacctagggaaatcgccatgggaaacaggggcatcgacgacaggacgccaggaatcgcgagctacaggaggagaaactcggcacagcggctatggccgagcagagggccattccgtcgagctggaagccgcggcgccgagcagagcgagaggagcagatggccgtgctaaagcaccacggcaagacagggag

SEQ ID NO: 360447 - DNA, 278 bp, Zea mays
aaatcatcagctcccgaaatccaaattgaaacaggtaagatagaaccccacggaacccccctcccgagctgtttcctcccctgtgttttcatgagttttatgcaacaactttattcgaaatttcgaatacagttaaaagtttcttcttttggtgcacggttcatcaatcacagtgcttttctcccaaatggctggttgcagttgcaggcgattctgagctcgggttttgttccggggacggattcctgtgccggcggacgggatgtcaggccctctcg

SEQ ID NO: 360448 - DNA, 268 bp, Zea mays
gcaggtggaggcctcggagagagagcgccctcaaccacctgccagaacccgggcgacgcggccgacggccgggcgagcaagaagtgcgagaaggccgaagagaaggccaaggagattgcgaagatggtcgagatgctggtggagctggtccggcggatagagaagagcgagtcgtcgtgagcgcggtcggcggtttccagccaatggattctggtcaactggtggagattggctgacacctggagaaccgaaaccaaagaggctttgt

SEQ ID NO: 360449 - DNA, 274 bp, Zea mays
tgcgatatggccggacggacaagcacatgcacatgggcctcgttcagcctccactcatgtacgagcctagaagataatccaagagaacacacgacacgacgacacgactcctgcgatctgcacaaatcctgtgacccaattaatgagtgcatatacgacattctaacctggcatcgattctggcatggttagatgccatcacccaaaacagtacaattattcgctgctaagactctgacacggtgacatgtcgttgtcatcactggacaactag

SEQ ID NO: 360450 - DNA, 266 bp, Zea mays
gagaagggtcgtggtccagagctccttgggtcccatgaaactgccctgttctctgtggctgtggacagtcgtctccagctgcatctgttgccctcacggcgttctgttcctgtgtggctcctgctcctgctgtgtgtcgggcttattattgtgaccatcctgctgctccagagtgcctttccaggtttcctttagcttccctgcttcctgggaatcaggagcctggacactgcgtctctaagacagagtggaggctggactccctt

SEQ ID NO: 360451 - DNA, 217 bp, Zea mays
ggcatgcgccaccatgcccggtcggcttatgctttacaacatgaattgtttatttctggaatattgcacagaatatcggacctacaaggttagctgaggtagcagactacagaaagtgatgttgcagatagagggggaaagtgcgcctctgctgtagaataggtgtatgggtgatcagaagcaggtagctaaggggaagagaagttctgtgtgataa

SEQ ID NO: 360452 - DNA, 177 bp, Zea mays
tgccctgcacgttcttcgggacgccgtttccacaggagggccagaagaaggcgcctcgggtcatgctggtgttcttctgcatcccggtcggtcctggcaggagcagggtgatctgggcgttcccgaggaacgtcggggtctggctccaccacatcacgccacggtggctgtaccacg

SEQ ID NO: 360453 - DNA, 237 bp, Zea mays
gtggtgttataaatcacataattgcccacaataatacaaaatttggaattattttttagattgttggcttgtggaaagtaatttatgttcaaatcttgttcaattgatattgtctttcttgttgtcattgtatttgtgtaaagcattaacttttttaagaaccatggaatgaagtttaatgttatgataaaaaaaaaaaaaaaaaaaaaaaaaaaaaaaacaaaaagaaaaagaaag

SEQ ID NO: 360454 - DNA, 292 bp, Zea mays
ggaaataacaagattaggaagcttgtagagaggcaaattatcggattagatgctacctacaagcctgaaaagctgaccttatctggcttattttctgatgagaagaggaaagagctatctgcaagggcgagagaagctataaagcacaaatctgagcacagatgtacctagtagaactcacatcgaatgatactgtttatcagattgtaattactgatacttccgagctccaccctcagggaaaggtgattgattggatgcctgaagatgtccaaggcattggatttttttc

SEQ ID NO: 360455 - DNA, 291 bp, Zea mays
gttttaggataacagcatttcattgcatatgtggataagttctagaatattggctacacatataatcattttctataatgcatatgcattacaaaagttttctagctcctgaagtattatggagtttactagctccataatacataaatgttctacggataaacgtaatattctttctttttcagtactaaaattaattgtatatgttctctgaccactccctgtctgaaggagctaattttagtttacctctcttttgaaacagctttgttctggtattctggtgtaaca

SEQ ID NO: 360456 - DNA, 201 bp, Zea mays
gacacgtggaccgcaagctgaaacattgctgggatccaagctcacatgacgagtataacaagaagaaagaaaagaagtcaaagcacaaatcgaaaagaacatctaccgatgcccaactataggaagcatatggtccagcagtggctatgtgtaagagtacaacgggcctccaaatgatcgaaactgaactcaggcatctaa

SEQ ID NO: 360457 - DNA, 284 bp, Zea mays
gttcggctcgatgatctatgtacacatatatgtgtgcgtccatatcatcatcggaccggaataaagctagcaatctctcttcttcacgatcgagagatagcgcgcgtgcatgcatctataatacttaattacacgattgattcagctcggttgctaactcagctctgacacgcatccgtccatggccattacatgattttacatctctatctagctagctgtttgaatcatagcattttgcctctcccacagatgaatgatcattccgtttgcttccttataca

SEQ ID NO: 360458 - DNA, 266 bp, Zea mays
taggtgtcataaaatgtggggaagaaatgagtgcttcctccttgggtgaggtgagggagcagggctcgtgtgatttaacacgcgaagaaagaagtaaggacaaggtcacgtgcagtgattaggttatcaatcaatctatctacatgtatgcctctggtctttagaggaaccagcacgtgagctttgcaagagttactgatcttttgtaaattttgatgataggagccgagccgtcacagtgtgttgttgctgttacagttgagttt

SEQ ID NO: 360459 - DNA, 195 bp, Zea mays
cttccgctcgcctgacgcagtcgtcgccgttcctggcgctgcgatccggcatggacgactgcttcaccctctaggcgagtaggcagaggtcgtgctgggggaatggctgactattccgcagatgaatttgttatatttgttctgtatattgtaactcagagaaagttcgaagcgaacggaaacagtaggatttat

SEQ ID NO: 360460 - DNA, 267 bp, Zea mays
tccaccccctacccttcacccttttatgggtaatgctacattttctcagccaccttcaacaggggtcatgtacccaactcctggaaccgcaagagttcttccacctgtcaaattcccagttccttcattcaagcctggtgctaacattgggagccaggcatctattggagttcctggttgctatggaacatatggttctagtccatcggtttacactaataacgcacccgtgtcatctggaaatctagcagaaaatgacaatgttac

SEQ ID NO: 360461 - DNA, 252 bp, Zea mays
gaagcgggtcaagggacggttcataaaggccggtgaagcgtacgactatgatccgctaagccagactagaagctactgagccttgggagtgtgtgtgttgttgtcgtccagtgtcagcctcgcagtctccagccgctcgtcggttgcaggctgcgctacagccaagatcactggagagcacaacgatcgcattgcatcagagcctgcatctgaaaaaacgttaagaagagataccaagtgttgggatgaatg

SEQ ID NO: 360462 - DNA, 259 bp, Zea mays
taactggataccacaaaagctcgccgcaggtgtatacatccttagcacaagcactggtctatgtttgcctcaccaagcggacatggggatgaacaacatgtcagcacagctacaccaggtgaagacggaggccaagccgaggaagatgcagcaagtgcgatggagcaaggcgccagggcacgaccacgtcgacacagacagagtaacgtgcgtgtgtgtgggccggagtgggccgtgtaagagccattgggctgggctg

SEQ ID NO: 360463 - DNA, 257 bp, Zea mays
gactagttctaggtttgctggaggcacttggagtcgctgctggcatgtctgctggagctatgctaccagggcctgctattcctatactgtcccagtcattcttggtgtggcagcttatcttctccgccctgtgtttagtcaggacatattcggccagacaagtcattggttgcttcctagtagtttctggtgtgattcttgctgttgcaagtggagcggatgatggccagcttctttcagatgtacagttaatttgg

SEQ ID NO: 360464 - DNA, 276 bp, Zea mays
ctcttgtctccaagtttgtaaccctagccgccaagcttgaagctccagccgtgctcgtgtagggctgcaggccatccgagctccggcttccggcatccaccagacgtccttagaatacggtgcagcgagcagcaagtcgccgagcagccgagccaccgccgagcagccgagccgccgccgagcgccgagtcttctatgtttgcttctccggtgaaaggtgtttgctaggggaccatggaggagcacggagcggaagacctcctgtgcgaggcgatg

SEQ ID NO: 360465 - DNA, 273 bp, Zea mays
ctgatctctactgctccaagaaggtacgtagaagaataaagcttggtgtagtagtaatcaagtactcatttgaaggttccgtaacggttgtaactgcagttttgagatgctattgtttggtatgatcgagtagagggtctctagcatgcataattgaggttatttttgcaggacatgcaatgcaattcgttgcttcttttttatacaaggaagcaacgacaggtcatatgggtgtgtgtgtttgtttgtattgtaataacaattttaataatc

SEQ ID NO: 360466 - DNA, 264 bp, Zea mays
ctaacagttaattcaatgtctgatgctaaagagttgcatggggagtggaaagagtggcgccctactgaatgttcagtgttggaggatggtgagtcaggtccagaaaattggttttgttctttcctaactacagtcactgtgtctgtttctaatggaaaataccaagccagattgcccatgaaatctttattgcctaattcagcagaagttgtatcctttagcatatatgacattactctctctttcttgaaatattggtatagc

SEQ ID NO: 360467 - DNA, 261 bp, Zea mays
atccgctccaacccggtcgcgctccgcccacctccgtcttcattcttgtgggtaggtcgtggctcgccacggccagcttcgcatcggaggcgctctcgtgctgatatgctagggtctggttacgcgcggacgcacacgcagctactgcgggagaggtcgtaggctggtgtgttccccttatcgaattcgatgccgcacgaatccacggcgtctgcaaccctctgcgctgtcgcggcatgggcgccgagcctccgaggctcc

SEQ ID NO: 360468 - DNA, 292 bp, Zea mays
ctgattctcaagatacaaaaggcttcagactttttggatctggtgtttctagtgatgtgcagaccagctatgctgcaagaatcatggcaatatctgtgcttccctttatcattgttcagataccccaaatttttaggctccattctggccatcgtttgacagtcctgcttgggcttattgctgcagctctacttgtgctcgcttattgcctgtatcaggtctttcagccatgggtccagagaaggaggttagaatatgcaggactaaagcacgtcatgtctggactctacga

SEQ ID NO: 360469 - DNA, 223 bp, Zea mays
cgagaacctctccgccgaactcctgcagatctaattaacctccaccagctgcaccaattgccgctggcgatggatggtagcggacgagctctcgattgccgcagcttctggaaggccggcgcgtacgaagcccccactgctccgaccagggagttccaagatgtccttgagacgggagactacgaccgcgcgcgcgtgcaccccaagttcctccacaccaacg

SEQ ID NO: 360470 - DNA, 125 bp, Zea mays
acgctgcgggccgcggtcgagggttgaaggcgaactcaggaggaaatgaatgaaggggggattacatgtttgtacgctggtgattgttgaataatctgtgctgggtttcaactgcgcccggatgc

SEQ ID NO: 360471 - DNA, 274 bp, Zea mays
gccgaccgagaacatccgtctccgtgcgtcaccaagagaatggcggacggcgaagttgccgcgccggtgttctgtgatcgggggcaagctcgggggttcgctcaagatcggggatcacgtctgtggtatggccaaaccgtggaagtgcgtgctggtgaggaaatttctcgccgtcgcgcagcaatccatggatccgccgtgcgccgtggattgtgatccactgtgcacgtgacgcgtgaggacacgtgtcacccgaagatcatcagttacctgg

SEQ ID NO: 360472 - DNA, 196 bp, Zea mays
cagaaggagatgctaatgtgcaaggtgtgcacagagttttggtgagctccagaagttgtattccaaccttgctgtttatgtggaggagattgagacccatcatccgtgcggggaaactctgaaaagagtatttgagttcattgctgatgagaaggcagaagatctggaatccaagatcaagaagctaagagtagca

SEQ ID NO: 360473 - DNA, 194 bp, Zea mays
gcgagaaactgatggactgggacaagtgtaggaagctgaagtgggacattatcctcctcctgggggcaggattcgccatcgctgaaggcttcaggtcaagcggcctgaccgacatcctctctgacgggctccggttcctgaagggcgcacgacggtggtcattgtacctgtggcctgcgtcgtcagcggtgtcg

SEQ ID NO: 360474 - DNA, 282 bp, Zea mays
gaacgaacgacggctgcggcggcctcctctccaccacagcgccgtggcgagcaccaggacgagaacgcccggttcatggcgtaccacctggcggagctgggcaggtacggcaacggcaacgtgtcgctcaccctggggctgcagcgctccagcagcagcctctcggttccgcacgctcagcagaaaatccccggtgtcggaatcggtgtcggagacgacgacatctacaatgccaccgccgctcctctcggtgtcagcgtggcgtcgccggactacgagtca

SEQ ID NO: 360475 - DNA, 289 bp, Zea mays
gtgaaacggcgtcgaggcgaacgactgaacagcgtgcgagtaggtgggtcgttggtcccctgtcgttatcacgctcaccaatacgcgcgcgaaataagccacgcccagcagttcgttgacaaatactgtatgagtactaatgtactattatactatacggcacaaacggccaaacgccacacaggcgtggatcaaaattgtactcgtggcctttatatgcaccggcgctgcggtgtccgatgcaactgtgagcggcggctggttggctcggtgcgtacagcgccgatga

SEQ ID NO: 360476 - DNA, 114 bp, Zea mays
caaaaagagcggtggcgagtggtgttacattattgccacgtgaccacgtcgacggtggaagaaacattcgctgctcatggttcatgaatggcgagcggcggcgtggtggcgtct

SEQ ID NO: 360477 - DNA, 274 bp, Zea mays
gcggcggagaacggcgacgcccacgccacgccccggagatccgcgaggtcggcagcacggcagagaacggcttctactcggaggaacccagagcagaggaaggacgccggttgtggcgacgtggggatcctcgtggtgaacgcgtcgctcggattcctgagcaacttcgaggacgcctacaggctgtgggcgttcgtggccaagttcctggacgccgacttcgtggagaaggagaggtggaggtacacgcgctgaaccagaagaggtcgagtgt

SEQ ID NO: 360478 - DNA, 120 bp, Zea mays
gaagaatcgaagtcactagattatgatagactgtataaaggcctggaggtgtctagctgagtttgagaagcttgcaaattctagggttgtcgactctagtgtgctgaggggaatgaattt

SEQ ID NO: 360479 - DNA, 144 bp, Zea mays
cggcaagaacaaatcagattgtactgaaggcggaggtagtggtagtagaggaggcgcccatggtgccagtgcgtctgctcctactagggcagtgcctagtcttccacaatcaacccatattcgtccaagatcaactagaaaaag

SEQ ID NO: 360480 - DNA, 117 bp, Zea mays
  unsure (1)..(117): unsure at all n locations
cgttcccttcgcctccccattccgtaccgcgtcagatcgcnagactactccatggcggcgctcagactccgcaagaggcagcttgatctgattatgcggatgctgcacctcaacaag

SEQ ID NO: 360481 - DNA, 274 bp, Zea mays
ggcagataaaccaaaatacttgtcttttgatgatgaacttgtgcaggctgctggacaaattcatggacgtgaggattacagagaaccgacaagtgctaccggaaggttcttgagcactattgaactaaggattccaaatagttctttggggtctatcgtcggtgctggtggggtcaatctagcagagatccgtcaggtttctggtgcaagactgaggctacatgaggctcatgcgggtcctttagtgtctgtggtggagatccagggcacactg

SEQ ID NO: 360482 - DNA, 169 bp, Zea mays
caccatcctacactcatgcgccatacaccgtgataactttgcatcctcagcatggtgctcaaatcaggttgaagaagctttgaccatgatggtcatactgaatgctaaaacatgtactcctagtaacatattgtgattgttcacgtatacaggtttgaatttagctttg

SEQ ID NO: 360483 - DNA, 136 bp, Zea mays
ccagaactcaccctgctcgccagccttttgtcctccatccagtttcccctgcccccggctggccggcatactagatcgtagatactaccctctctcggtgtctcggttccccgtcctatcgagtgcgctctgtgga

SEQ ID NO: 360484 - DNA, 144 bp, Zea mays
cgtgcacgggcgggcaagcaccagaaaggtaaggtggaggctgcgcggcgggcgccagctgcagccaagagcccactagtagtagtagtagctagttcaccaccgcatgcttgcatcctttactttgccatatttgctagcgtt

SEQ ID NO: 360485 - DNA, 146 bp, Zea mays
agcgagcctagctttcatctgtttggattcatcatgtgcataggagcaactggcagcaaggatgttgaagacagtattgcaaggaattcttctgtattccgatgggtaacttcgtcttctctttttatatgtactcactgtttaca

SEQ ID NO: 360486 - DNA, 287 bp, Zea mays
ctcgagcacatgtccagcctctgtcctagcatttatgttacagaagaccgcttggaagactccgctgtcgcaagcgagagccattgtgcttgatcggactagtgacgtctaaggaacggggtgctctggtcagcacggccattcatgtacctctggctcagcgaagacaggatgtggaagggggtttgtcacaaaggaagggttgctggctatcatgtaagacagttcatttgaagccagcatcagaagggtggattgtgaaccctgctgcttagagcgtagtgagt

SEQ ID NO: 360487 - DNA, 262 bp, Zea mays
ctcctgagttaggatcacagcatgatttacagcgccctactcagagtggacagttacagtgtggtgcagttgatgggtccatctgcaggtgcacataagcctgtaagatctctctggctgtagcccagccacacaggtgtcttgtttttcccagatcctacatacaatgcgcacatggttattctctgtggctggaaacaaaggcaggggcactggacagaatcagataaagagataagcacaaaagaaagaaaagaaagag

SEQ ID NO: 360488 - DNA, 157 bp, Zea mays
acagcttcttggactggaccaaagagaaaggactttgtggaccctcggtgatggcttggggtgatgaatggtatttctatggacgctgccaaatgtctcatgttgtcatagctagaagtggtggtgtttttgtgattgtctcttgaactgcactggt

SEQ ID NO: 360489 - DNA, 305 bp, Zea mays
ctcaaatccatctgaatcgacatggttagcgctcgtcatggcagaccgcattccgacgctcctcatcccaacgacgacggtgacacttcgacactcctcccaacggtggcgacgatggtccggcgcgtgtcctcccagcggcggttacagttctccgacgcttgtccttacaacagcggcgatggcgctccgatgctcctcgtctcgatggggcaacaatgctgatcttgaagaaggcgaggatgctgctgctagttttcgagccgatccgatcctatcttcagcgccgcagatgccttacctgc

SEQ ID NO: 360490 - DNA, 207 bp, Zea mays
gagtgttcgggatatattttaaaatatttatctaatgtcttacctgtgaaggtgcaagcctgggggctgggtacaccatgagagctgtctcactgagtcactaggtcgccagttcgaagcagcctctctatgcatggcttgggaacttgtttagttaaattttggcaactgttcgcttctgtttgtacagatgctgtgagataattg

SEQ ID NO: 360491 - DNA, 252 bp, Zea mays
cctctcctctgcccctaacccgtccgttccggctcatccgccattttttccctgtcgcggtaagcgatatggttcggcgtccgtcttctaaatccgcccttcttcgtttcgatttttccggcgttctgggagcaagcttcggcttcatcgacggcgttcttggtcttttgcagctcgacatgtctccgttccagggatacagattcgatgcggttctctccggcgtccggtcgcggaagccgtgttcgcgac

SEQ ID NO: 360492 - DNA, 125 bp, Zea mays
attgaaagttgatgcacttatagagacccttgagaacgatgaacagacggttggggctgaacttgtaaggaacccttgagctatccagttagattgcttgcaagaaatgcagacgttaatggcag

SEQ ID NO: 360493 - DNA, 143 bp, Zea mays
gctatccgcgttaggacgttataaaatctaggaggactccgcgcgtcgctcaccatcagcggcacccgcgcactcgcttaactgacaccagtttccacggagcatatacgcagtgcctacatacccagctcactgggaccatg

SEQ ID NO: 360494 - DNA, 268 bp, Zea mays
ttcagtttcaaggagttaaataaaccaagctttccatcactacaagtgaccctcatcatcccgccccgtggcagatgggtgaccctaccctgcactgtccctgtgctcatgaactcccctgtacctttgaaaagcctctctcctgggccggatgtcagaggcctgtctgaatctgattggtctcttgcccaaggcttgggaattacctcccaagttgacatttcagtttcaaggagttaaataaacaaagctttctctaagaacaaac

SEQ ID NO: 360495 - DNA, 300 bp, Zea mays
tgctggtgaagctgtgtcttcttatttcagctactgcttggatggggcaggtgttctggagatggcaaagtggtgaagtatcatttacaacactggatatggagaacaggctatccagggtggaagggttcaagaagacagccaagatgcttcagctacagttggatgttttggataaaaagctagaaaatgagattgacaaagcaaaaggggtcattgctaagcaatttgaggataagggtaataagatatggaagaacatgaagattttggaagacgaaacggacaagttggacaagt

SEQ ID NO: 360496 - DNA, 157 bp, Zea mays
tcgcagatcggcagtaagaaacccgctataaactgtgattggatgcacattctcttagcttcttccacgaatgctgaccctacctagatgtgaagcttcgcagaatgcatagtcattcactgtagatcttactgaaatgcgtatgtgatttaatgta

SEQ ID NO: 360497 - DNA, 300 bp, Zea mays
catcaagttgcccattttggagatctatgataattaatctacggagattttggttaagcgttttatagtaaagtcaaagtccatatgaaggggaacatgtctcttgaagtgagtgggcctggtactgtacaaggttgtgagtaaaattgctcccaaacttgccctgtcagaattagtgtatgccgtttcagatctctaaaactgaattttcagtgtttttctttagactttggagctagttgatggttgatccaaggggtaaaagcttaagggttctgtggaggaatcatagagggttgt

SEQ ID NO: 360498 - DNA, 298 bp, Zea mays
cacaacaaggcaggaagagagctgcctgaagcggtgcctgaaggaggagaggaggagaagccacgaaccagcgacagcgaggatgtacaacgcgccgccaccgccgcaggacatgtcctactacgagcactgccagaggcggcacgaggagaagggctgcctctacggatgcatcttcactgcgctgtgctgcttctgctgctacgagacctgcgagtgctgcctcgactgcctctgctgctgctgcaactagccggggctagctccggaggacggtcgagacgcagcagatggaggt

SEQ ID NO: 360499 - DNA, 273 bp, Zea mays
tatttatctaatgataagttagttgagctgagctagtctcctcatatatgttcgacatatgaattctgtacacacctattgcttgaatgttcaccacaaccaaatctaaactttggtgcttgatttctctgcagcatgatgtggacgctggtaccttgaagaaggttgttctttctgatggtgcagtcgtaacagtgaagggtgctagagctgtgagcctccggttgccagcttgaattaccattcctctcaaccgtaccacttacaagggcg

SEQ ID NO: 360500 - DNA, 144 bp, Zea mays
gacctcatcacctccccttcgccgtgaaccctaaccccgcgctcctcgaaccctccttctcgtcgtaatcggcgcccgcttttacgggcccccatcgcctattctcttccacgcgtggttcaatcatggtggtcgtgggctccg

SEQ ID NO: 360501 - DNA, 182 bp, Zea mays
gagttgcttgatattttggttttatgattatggatgctgagttcgacacctgacatacatacatgctacagagtgtcaggagtatgtttactgccattgggaaattttgccctaatctcaaaccaaaatgattttttttttttaaagtgaaaatcaagtcagcaccatagggttttggtttg

SEQ ID NO: 360502 - DNA, 313 bp, Zea mays
gtgacgtgctgctcctcgccctcctccgaccagtgccgcgtcttgaagcttagcgaactcgcgcgctggttcgctcgctcttcatcatacttgactctgtcatcgtctccagctccggccgtcgtgagttcttgaatccgtgctgccacaagaggcaagcgcatcagcggtgcggtggtccggtaccaacatcgtaggattaggcgttccgaagacttccaatggctttttccgaccgagctgaacaccaccaggagcctcgtcccctccatcgcctcttctcaccaagcaacacgacgttaggagccctgtt

SEQ ID NO: 360503 - DNA, 109 bp, Zea mays
gatgagttgaacacattgagatcatttttctttctaggagaatacacataccgctagctggctggttacatgatgaattgggctggtgtgttgcccgtacttggttttt

SEQ ID NO: 360504 - DNA, 221 bp, Zea mays
tgctgaaccggggttgggttggaccctgttcgttttcgtcttagctagcactagaagtagcggtgatggggtgtgtgtggttgtgtccctgtccctggtggccgttgcgatctgtgtgtgctattatcgcttattcttttgtaccatatacgtacccacatactgcattgttcgtatgtataccttgtgtggagaggcgcctgttctatgaataaacacga

SEQ ID NO: 360505 - DNA, 302 bp, Zea mays
ccgccgctgccttcttttcctcgtgcgcatattcgcttgcagcggcgcggacaccatttcatacacaccggaaacgcgcacgaagtgaggagcagcaccaaacgctgctctgcttctcctctatttctccctcttgcggagccgcctcttgtgtgtaggggtgtgtcgagtctatggcggcggcggatacctcggaggcgtctgcggccgggatcgcgcttgcggaggccaatatcaactgggagaagttggacaagacgaggtttcatgtgattggagctatccggttacggcccagcaag

SEQ ID NO: 360506 - DNA, 287 bp, Zea mays
gctgcattttgttggcttcgattctcagaaacaagaggatgtgatagttgcagtggatggggaagggaagacttgtaggatcatcgactggcatggtaaggatgtgagattaatccattttattggtcaatcccaagaccgtctgcactgcatcggtgtcaatacgaaagcaggtcaagaccatatacacatcacgcggatgtcaatctgggttcttgaggactatgatacaaaagcatggatcctgaagcacagtgtgggctctttgcagttttttggattactgg

SEQ ID NO: 360507 - DNA, 292 bp, Zea mays
tgatgatcaagactaccttgaatcctactgattatgatagtgaactgggtagtattcctgctgtacaacgaggtatattggaaatcattcctatgctacgcccaacagttgtattgtctcccatgtggacacatctgcttcttgagctgctatgctatcttaatgggcacgaaggccccctccagaaaaataatgaacaaacgcccgatcataattctcaagcactggtagacggtgcaaagcatgctcttgttgaaagaagcaatctcaatggcgggggtacaaaactgga

SEQ ID NO: 360508 - DNA, 283 bp, Zea mays
ggcgcgagggtggcggtggtgctggagtcggagagcgggaggttctcctccttcggcaccccggaggccagccccatagtggacgctttacttctcgggagcgcgccgacggaccttgacaccagcgaacagacaaggcttccatcaccaacctgcagaacgaggtgttccagctggagaaagacaaggccatggaggacaagcggaggaaggagagcctggcgcggtccagcaggaaggtccagcaggcctcgaaggtggccaggtatgtttacggcagcgt

SEQ ID NO: 360509 - DNA, 288 bp, Zea mays
cggacgcgtggcgagacgcgtgggcggacgcgtggcggaccgtgggatttaacttatgcagacccctcaaagttcaggcttacgcaccaaagctcttttgtgagctcaacatgcaaactcttggagcaaaatcacaatcacgctctattttgtgagtcatttcatggctcctttctgtggctacaataagtttcatagactatgtaatactttcttctcagttaacacttaacatccacaaaatactttgtataaatgtactaaatattgaatatgaagagtttgtag

SEQ ID NO: 360510 - DNA, 320 bp, Zea mays
  unsure (1)..(320): unsure at all n locations
ctgaaaaccttcccgaataaaaaggtctctgaacaatctcttcaggtattgatagtctggtggatcttcagtttgtgcatgttggtactttagaattgtccagatgaccacggctccgccacgtgcaattgctccagcagtaggacaaagctctgggatggctcctgtggcaaacaacaatagacattcaggcactgaagagggaaggagaagcgggtggtcangtgtggacccaacgcgacgccaggcttccacaccagttatagatgcagggagcctagccaagcagaaaatccctgttcggcctgaggcatcgacat

SEQ ID NO: 360511 - DNA, 105 bp, Zea mays
ggcccaagtacgacggcaagtatctccatgcgcagtccgacggcttcttggtaatatgaggctggacaggacactgaccaatgttgtcatcccgaccttcgacat

SEQ ID NO: 360512 - DNA, 276 bp, Zea mays
attttctgtgcatgaagctctatgaccttcacgagttctacaacctcattttgttccctgattttatttgtatttattactgtttggtcaccctgtgatatatgttgtacaactgcatgtaaaccacgtcatgtgtacaattgtactgtttagattggttatacttaatgccatgtactggttacatggtttcttctgtcttgatccttgttattaaccaggtacaaacaatctttctgtaggcagcagttgccagagcctccaatggaattacac

SEQ ID NO: 360513 - DNA, 277 bp, Zea mays
ctatgcagatctgtttcagcttgccagcgccatagctattgaggaaacaggtgtgccccaaaatccctatggtctatggaagtgttgacgttattgcccttgactatgcccgccaaacgggaggcttcctgcgtcagtgataatggttttttgactgttcttaactcatgccaattttggttgagtctaacttataattaagaacctagagctattgtgtatgacagctgtggctgtcgaggcctagaacgatacgtactcaggacctagaacaata

SEQ ID NO: 360514 - DNA, 274 bp, Zea mays
gctattcatctacttgttttctgcatctaagtgctcggcactcaataaatcagtatatttgcaggtaagctgtccctatctttactttaaaagacgttagtttctgttttcccccccttatctttcaactttggcactctgatagaaatgtcatccttgggacatgtacaagaaaccacaccgttggatccctaaaacttgcttaagattcacctctctctctctctgcgttctgcggcaagcaggaaaagaattgggtgctaacgtatcatct

SEQ ID NO: 360515 - DNA, 300 bp, Zea mays
caacgctcatctacgtgtgggggggcatagcacctgcagccaccaccagcttgcattgcacatagcatttccaaggacgacgacgacacgcgcgcgggcagccatggacagcaaggtctgcgtctttcagctggcgctgctcggtgtcgcgctcgccgcactcgccggccctaacatcgccggcggcatcatggaggttgggctagccagtagtagggttaccggcgcggcgcacgctgcgcggcagatgatggctcaagcgacgacgacgatgtcggtgatgggattggaggtgcaccg

SEQ ID NO: 360516 - DNA, 269 bp, Zea mays
cgggcggtccgtcgtccggatcctcggcgtcaccgacgacccgccgccgccttcgtccgcctcctctactccggcgtgttcggcgaggatgaggatgacgacatgtaggagcacgctgtgcaggtgctggtgctggcgcacgcgtaccaggtgccctggcagaagcgggcgtgcgagttctccatcggctctctcctcaccgcggactctgtggtggacgttctgcagctggccggcctcttcaacgctccgcgccttcagctgcgctg

SEQ ID NO: 360517 - DNA, 292 bp, Zea mays
agacaattaaggtagctgtagaggccattacacattatggtatgaggttcaaacctgctactttccatgatctacgagaaccattgcttgcgaaggttgtcaaagagatagatggtgcgaagaaaaagaacgaggatgcatggagtcaatatggcttgttggtcacctgctctaattcctaaaagggaccaaaatagggcaaaacaattaatgacaaggggccttcattccttcaatctattcataagatagattaaaggaagaagattataagaatgatgagatcttcgaa

SEQ ID NO: 360518 - DNA, 294 bp, Zea mays
aaagagtacacaaaaccattcccaatcccatgttaaattgggtctgtccaaagaacctggagacatttgtgcaaatatcacacaatattcccatcgaaagaagcactttgcagaacatagtgcagtgaattgcaatgcagaccaacactgtttagcagtgatagatgattgcataaagcgatctggcctaaactctgctgctcctgattttgttcccttagctgttaggaaatcaaataccagcgatggttcctgttcttcatctggaacgaacgtatcgggaattctgaaaga

SEQ ID NO: 360519 - DNA, 259 bp, Zea mays
gaatgatgtaatgttgaagagagttgctgctttctcaaagcggctgcttcaggtggctcttcaacggcctcctcaatatggttgcggatgccttttcattctgtcagaagtccttaatgcaaagccaccattatgggggattgtgctccagaatgaatctgttgatgatggttatgaacactttgaagacattttagagattcccgaggactcttctgttgcctcagcagtgctacataaacataatgtaaaagtagct

SEQ ID NO: 360520 - DNA, 257 bp, Zea mays
gctgagttcaatccgcgacgatggtgatgacaatttggatgtgtatggtagtgggaggaatacatggtgacacttctatttctcgggagaccagcggccctcggcagccttgtaacttgtccacgtcacccttatgggatatggattgcgtggtattgaatccgtttaaatttataatgctcctgtaggaagtgagcggtgcctaccagcggctgagcagcacaacggggagatctagagtccaaccatggatatct

SEQ ID NO: 360521 - DNA, 251 bp, Zea mays
gtgatacagagcggcctcaaggagttcgagcgccggagcctgtcgagcggcatatttgctggattccgtggccgtggcgagtttgtggagaaatttaggttcggcatgaaatcagtgaagaagggcgatcaggaatccaaggatgttccaccagtgcatcgaactgaaattgttgcatatctggttcggcaatctgggccatttttagatcaacttggcatacagagagacctttgtgagagagtagtggg

SEQ ID NO: 360522 - DNA, 254 bp, Zea mays
gactagttctagatcgccacccgccgccctttttttttttttttttttttttttaaaaccaaagtgaattataactttgaacggaaatgtgaaacatagcaagttacatgcacatgatataactaagtaacaaatatgaaccactgaaaccaaccttcaacgctaaattcccacgtttcaactgttgagagccaatttggcgatggttaccaagcaaatcatttcctccttgaccagtataaataatttcatca

SEQ ID NO: 360523 - DNA, 100 bp, Zea mays
gcgctcgcgtgggcctacgggtcctccgcgttcgtcgtcgagaggatcaaactcgggaagctgaggatgcaaacgtgggcagtgccaagatacaacttcc

SEQ ID NO: 360524 - DNA, 261 bp, Zea mays
ggaagcgcaacccatgccttccgccgccgctgctcgaggaccgaagaaccggccaaagaggccaaagtctgtgaagcagggagctgagttacgggagcagaatctccaactgccggaacacgattacgaaattatagatactgaatctggagcagcggagaccgttcaacgtgataaaaaagcaaatgggatctttcaagacacatcacagagtgatgaagaagaaatagaagacgagtatgatgctcctagtaatgacac

SEQ ID NO: 360525 - DNA, 269 bp, Zea mays
actagttctagatcgcgagccgccgcccttttttttttttttttttttttttttttttttttttaatacaaaagagcaatacactaagaatataaccatttactaaaccagacatcaactctgtttcatctgggacatcacagcagattacaaaatagtctcagactctaagcgcggcagggcactacatcacaaatattgttcaaaaacaggtgcatttgacaactaaaaccaaattaaatattgaagtcgctgctattacagtagac

SEQ ID NO: 360526 - DNA, 292 bp, Zea mays
ctcaaggctataatatgggtgagagatcgctgcaaaaatggtttgatcaagagcttgaagttatggtgcatgtgcatgaagtccgaaatgagtacgaaaaacaaagccaactgcgtgctgcgcttggtgaggagcttgccattttgaaacaagaagatatacgggctggagttcgagccgatgatgccagggcagccgaagctgaccggcgagtacatcatcaccgagatgatggggctgagcctgaaccactccaagtggctggacctcgccatgatcttcgtcctcctct

SEQ ID NO: 360527 - DNA, 294 bp, Zea mays
tctaaatgcaccaactcaaggtcagcgtttgagtcgaagcatgaacacggtgacagagaagacatgcatagaagcggaagcaatacagagagttttgagtcaggtcccatcagctcatggttggctcgatcaaaccaagcaaaatctgctgcactttgtgacatcaacaagcaagatcacagtcattccaatactgttccagtttcatttgaccaaaaacagtgtcgtgcttctgatgccaaggaatctattgattctgcaccatgtagttcacttgcaaatgggggtgtagag

SEQ ID NO: 360528 - DNA, 300 bp, Zea mays
tggaatttttgctttttcatataacatatattatatatactatgcttcgcaagatgtaatttctgtattagcgtcactggaaattgctattgtaactgatgtataccctgcttaccagtaactacattgtttgctatatcatttactggattggcttgttctggtaacagggcttcactttatgtctctctatattcctaccatttctccggagctattctttccacactagagacagttgagtcgggttctaacttaaacacttaacttgtattcaattcttctgagaacacgtctcag

SEQ ID NO: 360529 - DNA, 300 bp, Zea mays
atttgatgacaaattcttccaccaagctcgaccagtctgtgaaagtataggaagggggttttgcaggtgagccaaaaaggtttagaaaattgtggggcagtaacagtacaacatttctgagaacagtgcatgtaaatcaggaaaaagatgctatagctttcgtggaggcttaagaaaaggcacctaggttttcggaagttcctccttgtgatgaaatggtggcatcccaagaggcaactgattcccgtttagaacaatgtctatgggtggggaattctctaggtcacgaaaatggtgcac

SEQ ID NO: 360530 - DNA, 267 bp, Zea mays
ggcgtgaacggacggctgcccgcccatgttctccccggcccaagaggcgcttctcatggtgcaccgccggatcctcgagactgacgctgacgacggcgacgaggacggcgagtatgggcccaggggcaaggatgccagggacagggggaagaccactacacgactcatcgtgcctaagcagcacgtaggatgcctgctcggcaaaggcggcaagatcatagagccaatgaggatggaaaccaagacgcacatcaggatcctgtcgcg

SEQ ID NO: 360531 - DNA, 295 bp, Zea mays
cggacggtggcagactgatccacaatttggaagctggatgcgtgagggaaatcaaacctgtttctgagggggaagaaagaaacagctcagcttttcggttggaacagatgaaagtaacattgtaaaactatataaacttcattagttatattgtaggaaactgattgcccttttggattcttgttctaaactactactgtgtttgtctctttcagtggcagggcttgctaagtgatacatcaaatgctgaatctggatctgatgttgatgattttggtgcatcatttgttcataa

SEQ ID NO: 360532 - DNA, 285 bp, Zea mays
atcaatatccatggtaggccgctcgctcctctccctcctgcacgccgtctcctccgctctggtggtcctgctgcagctgcatggcgccgccgtcgtggttgcgtctgatccgccctacacctgctgcgccggcgccgcccaacatcccgttctgctacgcggggctgcccatcgaccggcgtgtcgacgacctcgtctcgcggatgacggtggcggataagatctcgcagctcgtggaccagtccccggccatctcgcggctcggcgtgccggcgtacaattggt

SEQ ID NO: 360533 - DNA, 286 bp, Zea mays
gacttaaatccgatactatgtggtatgtgaatactaggttggcacacttattatgtatttaaatttatattggctgtactgtttacatacaacttcatattctacacttagtgtatttttagcctctatctgtgaactatatcatgtattcagctgtctctctttgggaggaggacgatgagcaggaagcggaagatgatagtggggcgtcggccgccgaccgtctaggccaacaggataagctaggggtagaagggcaagggcaggccgacgtgctacatgatga

SEQ ID NO: 360534 - DNA, 315 bp, Zea mays
ggcttgcaaatgcacagtacagcagtaacaatatcctcacattgtccgacccaaagataagtcaaactttggacaggatacttgggcgttcagctcctactgcagccccaaacaatcaatctgttactagtgacgcaactatggaagctccgaagaaatcaatagatcacctcagtggcattgaccctgttccctttgagccattgtctgcagatctctttgctaaaccacagagtaatgatcgacagagaaatgagaatgaaaaaaacaatgtagaagatggcagtcctatggcaaataatacagtgcctttac

SEQ ID NO: 360535 - DNA, 309 bp, Zea mays
cggacgcgtggcggacgcgtgggtttctacaaatcagactacttatgagaagttcagataccgctatgaccggagaacaaatccttacaaccttggagtgggccagaatttcaacgacgtcttgttttcaaggatacccagctcaaaacacgatttcagagcaaaagttaaggccgattcttcgaccttcgcgtcatccctcagtatgggacgggttctaagcccgcccaagacgagcgtggaccttgagatgggcatgaaaaggcaagcggtggccgcagaggacttggaagacttgcacagccagat

SEQ ID NO: 360536 - DNA, 303 bp, Zea mays
ggtttacatgaccgtcatggccgtagatcggtaaacggacggtcgagattaactagtggcgcgtatcgattcggtgtagtggggagccatccgatcttgatcggagaggtgcgctcaggtattgtttatttaaatctggtccgtagatctcgggatcaaaagctgttgtgcgtacccgttcacatgaaactctatctaatctggaccgctcagatcagatcttgcggccagggatcacagatacccctttgcccgaaccatttgtcacatgagcccctcgatttctataaacaataaccgcag

SEQ ID NO: 360537 - DNA, 319 bp, Zea mays
ggacggtgggttgatatgttcccacaaagttattcgctagcttgtagaattaaaatatttgcttttgtggccccataatgcatgtgtttctttgatgttcttagaatttgagtgcagaccatcacacagaaccaccaacatttaatatgctctgcttccgttctctaaggcattttgagtgtttacaccaataagtttggtttgcatttgatatgttcccacaaagttattcactagcttgtagaattaaaatatttgcttttgtgcccccataatgcatgtgtttctttgatgttcctagaatttgagtgtagaccat

SEQ ID NO: 360538 - DNA, 298 bp, Zea mays
cggacgcgtgggcggcggaccgccacccctccgcgccctatgcgcgactctgcagagggccgcagacctctccttctccttcgtcccctgcgccggccgctgcttcccgatcgacgcccgcgacggccgcgtcctcctggagagcgagaccatgggcggcgactttgcggtgtgcgaccctgtgtcccggcgataccactttctgccccgtatccccggacacccagccgctcagcgctgccgccgtctggagccgttcctcgttcccgccagtaacgaggagccggagacgtcgctg

SEQ ID NO: 360539 - DNA, 126 bp, Zea mays
gttacggtggatcctttcatatgtggcgagatgttggactggattctgaaaattggcagcctcagatagtcccgtccggtcatttcgcaactgtgtctgatttgacatgggcaagatctggccaat

SEQ ID NO: 360540 - DNA, 108 bp, Zea mays
ctcttctggatccaaactaataaacaccacgcgagtacgccgcgtgctacctctaggctcgagcttgacgcccgcgtgccatggctcccacggcaccgacgcagcggg

SEQ ID NO: 360541 - DNA, 311 bp, Zea mays
atttcagacaataatatgaagttaaataccaaaacagagaggttagtggcttatcaaaacttcactcatgagctggattgaaccccaaaagtaactaatagactggacccaaaaatagctaatggtctaaaatacataaaacactgcgttttatagtttagaacgccaaaacgctaaaacgtgattccaacctctaattagagttttggcgtttaaacgtagtttaaacgtagttttaataacactgtagtaaataaaagacagaatctcaccctgcaatgaagcttgaacttggtatagtaaagactatc

SEQ ID NO: 360542 - DNA, 314 bp, Zea mays
ggcggttccttgtataggggaagatatcatcatcctgtgcattgctgtgagagatacagagaactgttctgcaaacatggaatgtcagcaacagataattctaacagtgaaaaggttccttctgggactggaaaggctatacttagagtgtctgaggatcaagctcagatgttggtgaatgtgaccagtgaacttcctaacaatgaattgcttctccagaaacacttcatggctgtaatttcgtctgtttggagatcaaaatgtcaccgtgatacctcctgttttacgaacacttactctagtgcattacatgt

SEQ ID NO: 360543 - DNA, 312 bp, Zea mays
  unsure (1)..(312): unsure at all n locations
cgaccactggaggcgtcgggatgggcttgacgacgggggagccgagcaagtgatgttcaacatcaaccaactgtagggcgagggcatccgtcgtgttgcgctcgtgctcttaggcgagggcagcatcacgttcgtgttcccgagcagcggcaacagtcaccgtggcaacagtgagggccatgaacaaggtggagcgagcggtacgancggcggaggagaggggcgtcgcaacaggggcgggggcgctgggaacgcactaggcgccaacgtggaagggaaacggtgccatccatgcaggcgcaaacgacgcat

SEQ ID NO: 360544 - DNA, 277 bp, Zea mays
cggacgcgtggcggcggcaaccggaaacggcttcggcgcgcggcagtgtgtcacacgcggcaaggtaatgcccagttccatgtgcccaaccgaaggggttgatagggcatcgacgacggcgtggagggcgtggagggctaaagcctcggtgacgaatggggagacatatatgcaacaacaaatgtaccattgcatcaaccttccttgccattgcagcgtgatcaagcgttggcaatcataaacaagttgtcaaacaggagagttagctcttcgagca

SEQ ID NO: 360545 - DNA, 264 bp, Zea mays
gccgccgccgccaccaccgcctcacccaagctttcatttgtcatgctggttgcccccgccttatcgtgtaatgccatgttgcccccgcatcatcatctaagatttcgtttgtcgtccgcgctgcagtctgcttcccgtttcactcttatatttttttgttggacggagttgttttgcatcgtttcgatctgtaccgtactgtttcccctcttgttcataacggcggcgacacaaattcttgcgtgctgcgccgctcacgcaagg

SEQ ID NO: 360546 - DNA, 283 bp, Zea mays
caccgctcagcagtgacctcgttcccgtcctcctcgcatccctctcgtccgccagcggctggctcgcgccgccgacagtttctcggcccagatcgagacacgccccgcattctacaccaggtgccgaagccttcggcgatcaaagagattccagacagcagattcgtccgtgccctgctcctcgaaccatggggacctctgcccaggatcgctctctggagcgtatgacgatgcgagactactagtcatgatatttaccagcgtgttactgttatcgcgcgag

SEQ ID NO: 360547 - DNA, 250 bp, Zea mays
gcgacggcagcggccgtcagaacggccacttgctagggacggctcggctctgagttccaatcatgagaccagtaagcgtgcgtaccgtacgtacgtagacgcagagcgcgcgcgtgcgatgagacgagacgagatgcacgcattcaatacggttcactccattcctgtgtgcgcagtgcgacgcgcgcctctctctccctcactcactgtctgtcgctcactagcatatccatgttccattccgtcacac

SEQ ID NO: 360548 - DNA, 285 bp, Zea mays
tccacgcgtccggaagaatcgtagggtactgaagaaaatataatatcctaaacattatcttctattatccaatcgacattttgggtccagacttttggttgtcatttctacttcaacagaatattctcaccaatgaaaaaatatcctttttatgcctaagaaacgaagctgcaacacactagagctatcgtgctcgtggcaagacaaagccttcttttgtgatgatggaatccaacccgttcccctattctaaggcatccttacggaattctattgctatatgac

SEQ ID NO: 360549 - DNA, 238 bp, Zea mays
cgcagtacgtgccccagccgtatccctgcaacccctgcggcggcggcggcggctaccggatcgtctgcgaggaggacccctcctacgcctgcgccatcatgtgattatatgtccggtacgcgcccacaacccaccacaccagtgtcagtcatctcatcatgccgtgccgtgccgtgcctgccgtataatcgccgtacagattcatcatacacacacacacactcatattatatatata

SEQ ID NO: 360550 - DNA, 267 bp, Zea mays
ccgaggacagcgtcaggacgagacccaactacatgagcatgacggagtcgatcaaggctaagcagaaggcatgcagcgcccagaggacggtggcgctgaagcaatgtgatgataggaaagccatgagcgccgagttgaaggtcgctcaggtgtgactgtttcgtggaactccatgcagagatggagccgacttcgacatcctctctatgccctaggatgtgttgcttggtgtcttgccacattcttgagtggctcggtgctgcattc

SEQ ID NO: 360551 - DNA, 271 bp, Zea mays
cgccttttgtacaccatggaatttttagcaagtcagagttcatagagatgatggaggagcacaagcaccatgaactgcgacactaagaagtgacacatctttggaactgggttgtgatgctagaggtcattcacgtgctggcaatgatgcagcaatttggtattgtgtaattgttgctggtcgtccaggtgcagaattaagcaagaagagacaatttgtatttgaaactagattttgcggaaggctcaagacaaattgttaggtgatgttg

SEQ ID NO: 360552 - DNA, 266 bp, Zea mays
ctgtccgctccaggaatctattggatctcgctgtgttcccgttcaatcactcgcatttctctactaatcgtcacctcttggagaaattaatctttaaaggcgcttaatcatgaagtgttttgagttaaaccttcacggaacagagggaagctagagagcctcctcggattctctacgtgctgccgcgcgagaggggagagagtttccctttttccaatcaccctctcactggagtgcggcagcagtccagtctccattcccccagt

SEQ ID NO: 360553 - DNA, 124 bp, Zea mays
cccacgcgtccgatcataattaaggtagaatacaagcattcccccaatctcaccattattgacactccaggcctcatcctttcagctcctggccgtaaaaacagagttttgcagagccaggctt

SEQ ID NO: 360554 - DNA, 315 bp, Zea mays
tctaattgttcttcatctttgtcctttttgcaaagactgaaagttggtcagcaccacgtgtttcttcctgtataagaaagagtgatataggttaattaaaaatattaagtacacatactgatatctatatgggtgttattggatgtgttgaaaagtagttaccttgtcggagtcatcaattgcattgaaatttctcttgtatgatactctgaggttgtcaaagcaactgtaacatatcagattaaaagatgttataacaaaacattgtaaaatttctggatgatatgaaaagaaagaccataaaaagtagaccca

SEQ ID NO: 360555 - DNA, 305 bp, Zea mays
accaccttgtccccgtcgagcaccgagaccgcgactcctcaccgcactgcgccgctcgcgagaacctcgcgtaagcctcggcaagcagcatccgtcccgccgatcgcaatgccggaggacaaggagtacgcgcccctgccactcggccaggcggcggcgcctgaccccgaggaccccgtcaagtcgccgccgcgacccagctcgcctgccacgtccactcgcaaggcatgctttgctgttcttcaaagctgggtgtcaagaaaatttatgaccggatgtgtagttcttttcccaattgctgtcac

SEQ ID NO: 360556 - DNA, 255 bp, Zea mays
acagttcacaagacatcatctattaacacgaggcttcttcctcaaggcagtggtgcggcactaataggcaagagtgcacttttgggaaccggtgtctcagcatctcgtcctctcagctttaccgcctgggccacaccagctccaactacaccaaaacccatacgtgcaggaacaactggtgtccctggtcctgattaacaaggcaattgttccaaaggggacaactgctgagctccggaggaaaccattagccct

SEQ ID NO: 360557 - DNA, 109 bp, Zea mays
cttcgtatagaccggattaaaaccctaggccctagccaccgcccaccgtcgcctcagcaaatcgtcgtggcgtttcaccatgccgccctgctgctcccccagcacctcc

SEQ ID NO: 360558 - DNA, 272 bp, Zea mays
gctacttcaattggttttatcaagctcccctgaggagtcatgccctccagaggaggccttcttccttgcaaatgatcttcttgatattgtgcccgctgtcgagtcctttgctggctcaagatttgcacccagcatagtttctgctctgaagcaatggctgcctgtgctcttgttgggtcttgtatgccggtggctaattggatcacataatgaaatggcacccaacgtattccactttgctgactctgtcttaccactgtgggtcactgccg

SEQ ID NO: 360559 - DNA, 273 bp, Zea mays
cgcggcgcatcgtcgcctgcctcctgcaccgcgccaagttgggcccgcgcgtcactcggctgctgggaggcgggcggcacagcacacacagtgcgtaccttcgcctcggtgaattactgatacgaatcgccatcatgtaatcgtatttttttagtggctctctttggtgcgctgctccgtgtggacaggtgagactggttcgttgctttggttgcaggaaaataccttttaatcggatcagttgatgtaccgtccgaaaaaatgacgtgttta

SEQ ID NO: 360560 - DNA, 114 bp, Zea mays
cgaccgcctcacgttcgacgcgcaggtggaggagcgcgacatggtcgagaccttcgagcgcccttcgagatgtgcatccgggacggcgacgccagctgcgtcatgtgctcctac

SEQ ID NO: 360561 - DNA, 273 bp, Zea mays
cccacgcgtccgccggtctttaacaaatcataccagcattgtgcataggtcccacacaacactttgacaaccaatgaaacattgactactcaacgacacaagcgcacaaagtgtaattgcttcacactgctagttcctgcgtcctgcgtgatcagtccttagttgcaagcgtgcaaatgagcagtgtgcacttacacacttgcacctaaggctatctccagcaggttacctatctcactccttatttcaaactctaactctataaatggtgtc

SEQ ID NO: 360562 - DNA, 263 bp, Zea mays
ggagacgcgctgcggctgccgcatcggtcggtgtgcagttagttgtcctgttagtctatgctacgttgtctgcaataacggacgtgacccggggacaaaaaactgtttcgtcacgggtagctagagaatcacgtaatggctcttgttttcgtttgtgtcctataatgtatggctattggcctgtttcgagaggttaaaatttggaggtgctgcatcagattcgtaggatagaggcctattattggaaaacggtgaggatggtc

SEQ ID NO: 360563 - DNA, 263 bp, Zea mays
tgtagaacttgtttctgtacggatatggagcaatattcaacttgcttggcattcttgggactgtcctattccaaggtgtgcaccttcatttgaagttcagtttacattgatagatgatggcagctgcatttctagtgtactaggccactgcctgtatttatgcggctacactctagatgacaatgagaaatataattttgtatggtggtaccctcatgctttgcaagttgtacaaaaaaagacagacataacttcatagctta

SEQ ID NO: 360564 - DNA, 257 bp, Zea mays
cggacgcgtgggcggacgcgtgggcggacgcgtgggcggacgcgtgggcggcgccgaatcctcctccgccgccgacgcttccgcacatgtggagccacaggtggtcggaactggcgccggcaccaccgtcgacttcaagatctgcgcctcctgctcgtacaggggaactgcaatgaccatgaaacggatgctggaaacctcctttcctgggatccatgttgtcttggaaaattatcctccgccgttccccaaacgcg

SEQ ID NO: 360565 - DNA, 259 bp, Zea mays
caacctgcaagcacggcaaacattcctgaggttgaggttataaccgaagcaccttctggatttcaaactcctgtggagatcaatctggacatctctgatgccattgcagatactactgatggaaacacaggaacagatgaactagttaaagcagaaggtgttatccatcctgaaaacaaagagagttttctagaagatacatctaccacagaacctttagaagaggtggccaatgtagaagatcagcacaaccagcaag

SEQ ID NO: 360566 - DNA, 306 bp, Zea mays
cggaccgtgggcggacgcgtgggtgtttctaaaaaaaatttcagatttggcgtgcagaaaaaaaaaacatacatagatggccacaagtgcacaactcagtgataacacagagctgatgtttcagcggcctcaagaagaaactttgcacatcacattttcaccatagcacaccaatcaggtaccccaagtgtgattcccgccaaactgaatgctgttccaaggccatcactgaatagcaactgtgggagtccaacaggatcaaccctcgctactcatcaagtcataaggcaaactccatctcagctc

SEQ ID NO: 360567 - DNA, 325 bp, Zea mays
  unsure (1)..(325): unsure at all n locations
gtttattacagaagtggataaggccgttagatgggctagaaaccattatctgtcatcaacaactcttccttctatcaagggagacaagttagtcattccccatgagagtctggatatatcaattgagaggctgaaggaacatggtataacaactaagaaatcctctcaaaatctgaagggagggcaggttgcagttcgttccactaccgggtacccaaacggccacagggtaaaggagccccgccgggcagcaccacacaggtgatagacactgcaggtaatgccccacctgtggtgtctgaccgnggtgcgctattacctagct

SEQ ID NO: 360568 - DNA, 320 bp, Zea mays
cttggagatagcagcagcaaagaaacaacgcgatcactacctgtccaacattgaaaaatctcgcgcgttgaaacacattcaagagcgcaggaaaaagaggcagaagacagaaggagcagaagccagtaatgtcccagaaacaaaaactgcccgttcaattcctcaaaagaaaccagttgtggagacagatgccaaaactaaatccacgctttcaaaagacattttggctggcgttttcgggggttcatcatgaccacctcctatctttcggcatggattggtgcatgccaaactgaatggagtgctgcaagatcatcgag

SEQ ID NO: 360569 - DNA, 305 bp, Zea mays
  unsure (1)..(305): unsure at all n locations
ctcgtcagtagctgagtagccactgtgctcttgagaaggatgacgagccccatgcacgcgcggaaggctaagctcaagacccacttcatctccgccaaggcgaactcaagcataacgtcaccccgcgccgcgtcgtcctgctggctgccgccgctacctccgccttcctcctcctattcagcctccgcaccctccactctgccgcgtcacgcagcgccagagcaagcgccgctgccaccgttgccgctgtcattngctccacgtctccagcgtccgtcgccgccgaccacgccgaccagctggag

SEQ ID NO: 360570 - DNA, 292 bp, Zea mays
cagagctcctgccattacgttaaaaaaataatgctttacatttccaattatctacaataacgaaattttatgggacactctatcggtctaacatcctttaccctattgagatatatagatatgtgttcaacacaaaattctagcatattcaaatattgttgtttattgtagtctctttaccataaaaagctgacaaatgagagatgaaaagtttactttagtctatttttctttaactccgttttggtttgaagtcgtctgaagcttgagatttattaaggaattaatttta

SEQ ID NO: 360571 - DNA, 322 bp, Zea mays
gccaggatgaatacgataccggcttgcaaggctttgggggtatgagttatgaagcggagaaagccttgcaagccaggatgaatacgataccggcacaccaaccgcaagcagtttaagcagtctggtcaacatccacaagcttgcatcccactctcagttcagtgctgcgcctcgccctgcacctccggaaagacctgtgccggcgatggtgcggccacctgttcccaccacacaaataaccaacccagggataccgcggccagctgttcccacaacacaaacaaccaacccgatgttccaatcagccacatcttatgttcga

SEQ ID NO: 360572 - DNA, 321 bp, Zea mays
aagatcgagcttttaatttgctttgttcacgaattgttgtttttgcatgcaccatggacgacgacctgaaacatctgagggtcagcttctctggggtgaggcagggcggcgagacagtaccactaccatcacagcgaaggacgagttcacgcagaggctctcgcatttctgttttagcgagtgatgcggcagaggagtacgacgcggcgtacgcggccacggtggcagcagtcgcctacgccatcgccgcgcgagaggagaggctgtcagcgtctcaagagagcacgccgtatgctgccgcggacaggcttgcgcgtggaa

SEQ ID NO: 360573 - DNA, 315 bp, Zea mays
gcgaaggcgaagacgcaggcgccgagccgccgaccccacggtcccccaccccactcccgccgcgcctctccctccgcgtttccagatccccccgctcgcccgtgccgcggcattggcaccggcaccccgccgagcgcccgcaatgcgagccttctagcttcccgtagcacggacggaatcgcgagaggcatgcatcccaagcccgagggcggcgaactaacggggccgccgcggaggcgggctccccgcggtccggcaacttccggcagcggagcatgcacgccgcccccgcggatccggaggcggcgcgccggg

SEQ ID NO: 360574 - DNA, 105 bp, Zea mays
aaaagaggggtgttgcttctagttttttatatctacgaatcatgtaatttgttgagagtcatttgatgtgtatgtataaccaaacacttgaacttgtagtgcctt

SEQ ID NO: 360575 - DNA, 308 bp, Zea mays
ggtgtttctcaagcagctcaagtctggcctgctccttatctctggtgagccacgcttggttcgctgcctctgatcacagcataagttttgagttgaatgttagatgtaaatctttacgcgctggttggctcaatctgtgaactatattatttgtagagtttttaaagaatccgaattcagtctggactataggacctgcatgcgtgatataagggcatccgggctttggtgacaagggaattggaggggattgaaggggaggaaagttcatgctattcaaaattgaatagcaagggatttcctcccct

SEQ ID NO: 360576 - DNA, 315 bp, Zea mays
ctaatttaataagaggactgtacaagatgttaaagtgtaattaaattacttaatatctaatatggatatctgtgttcaatagtgtctctttccgtttgtactatggttgcattgtggtaattcaggttgttctgaacaatggtctagtgttgtttgtattctttaactttcagaattcaatgaaccacttaagctgcaaaacggatggcttttgtggtctgcaatcggcctgtttgttgcaatagttgctattgctttagcaggtgctgcaatgacatttctgaatggtgaaacaccacagagagagacagactc

SEQ ID NO: 360577 - DNA, 317 bp, Zea mays
cccacgcgtccgcccacgcgtccggaaaaataaaacggttcgagtaacgtacaacgtttactcccattcttttttccccctctaaacccaaaattcataccctatattagaagggaaaagggcatgttgagatgggttaagatagcacaattatcaaaaaagaattgtaaggaaaatcgaatgcagccgagcctattaaagtatcttcttgatgactccccatcttaaaccataatcgagtggacagtgagttatcgccgacccatacactcgtattcctcccaggccccagccagaccttgctattgggctgagac

SEQ ID NO: 360578 - DNA, 302 bp, Zea mays
cccacgcgtccgcgacaacttggagctcgataggcgggctggcgcatcgtaggatggggagcgcgggggaggaggagagggaggcccggagcgaggcggcgttcacggactccgcctccaccgacgggagcagctccagctccgacgccgcgtccaccgacgagtggctgcccgcggcgccggtgccggtgccggagccaggaagccgggcggctgcgcctccgacaccgacgtggccaggcagcagcacaagcacaagcgcagagcaccatcagagatggagatgatgaaggagcggttcg

SEQ ID NO: 360579 - DNA, 305 bp, Zea mays
ggacgcgtgggcttttttgtcgtaactagcaaacatgtccgtgcattgctatggaatccgatacgtataggaatctgattccgtatcatcgctggacgcgagatgttattccatgggtcatgagtccgggtcacatttgagatacagaggcattgaaatcggaccttgaatctgttatcgataggtgagttattctaactcgaatgaggtcataagttcatataaagtaaaaaatatgaggctgaagaaactctttactactcgggtagttagggagaggcaaaggggaaaaaagataaaatttt

SEQ ID NO: 360580 - DNA, 301 bp, Zea mays
cttatacctttcaacacacttaccaaaaggaaggcactattcaaggctagatttgaacaagcacttgaatcacaaaaattaaacatcaagaaaatagaaacccaactccgtcgtaagggtatcaatccagaggacccagttgctatggctagcatccagcgtgttgcctctacgttcttccgagccatagatgagcagcaaggtactccgtatattttccgtggggacacacaaccttctgctgggacctctgaaataaaagaaccacgtgatgaaccatctgaagatagtgatcaggagg

SEQ ID NO: 360581 - DNA, 123 bp, Zea mays
agaagaaatggaaaaaccaagtatgaggtggcaagggatgagactgtaaagcatgttcagcaagttttcaattctttgggcattcatgtcttagcacagactattagagatgttatttcacca

SEQ ID NO: 360582 - DNA, 117 bp, Zea mays
cgcctcaccccgcgcatctccctcgagctctccctctagggttttccgccggcaccctcagccgccgctgtcgagctctccctctcgtgtctccagtcggcctcgagctctccctct

SEQ ID NO: 360583 - DNA, 113 bp, Zea mays
cattcgccagtgtgcccacagtttggcacagtcatttggtttctttattacgtgaatcgaggaaagcatgctggtcaactcctagcgtttgtaattgtgcaattaataaactg

SEQ ID NO: 360584 - DNA, 297 bp, Zea mays
atcctgacacattatcctctccacctcttcagaatccggacctcggcagagtccagtactccagtcccttgtgcatctcggcctctccactctcctttccacgcccgtccagtcttctaatctgacccctcttctccagccggccggagatggtctcgctgcgatgcacaaccgcgcaccactccctcctcggctcgccgacctgcctcgcgcgcccgctgcggcgggcgtgccccgtcgtgcgcgctgccgtcgccgtggaggccggcgcgcaggccaaggtctcactcatccgaa

SEQ ID NO: 360585 - DNA, 323 bp, Zea mays
cagacagtccattgtcgaccacaaagcaggtttgtggaaagcttggaaaactatgtaggaatgtgatacctgcacatatactgtttgagttagctcgcaataacagagaagtccattcaaacgtcgacgggaattctgatctctttccaggtctatcgttatcttctatgtagatcctgcaaattcttgccttcgttaggtcttgttacgattcctgatattcctcatatcttagtagatcggcctaaagcgatatagtaagatgactaggaagttacggtcgtcattgtgcaatggctgggtatgaatttcttgatcatgat

SEQ ID NO: 360586 - DNA, 136 bp, Zea mays
gaaactgatgaagcaaggaagaaattctctaatgacgagatcgccttggcattagagaatttcttccttgcttcatcagtttcctcaacctgatgaagcaaggctgagattctctaatgctaatgcgatctcgtca

SEQ ID NO: 360587 - DNA, 317 bp, Zea mays
caaaggaggtggagaaagtggaggcgaagacggacggcggtgacagcgagggagctgagacgaagcagtccaagggcgcacagcagagccggcaaaggaagcccctgccgctgccggcgctgccaatgacgaggacgaggcaaagaagagcgacaaggccaaggacgccggcacggcggagcctgccgccgtgacgacggagaggtcccttcctttggcgccggcgccaaagcacgcgtacgagcatgagtaccgggcgccctactacgccgcgtccgcgcaccggatgctgagctaccacgcggcgcacgcagctc

SEQ ID NO: 360588 - DNA, 302 bp, Zea mays
cggaagcgtgggcggacgcgtgggcggacgcgtgggggagtggctacgtatcatgcggatcttgagtggaactccgaattttccctgaggcactaagatatgccaattgcttcacattagtggtgtaatggcatgcaatcacaattttacctattgacattgatacagatttgtgtcatttttggaaatataacatatgaatacatgttgaaataagatcaatttcatataacagcactgatgagtaatattctaagttatttagtaataaatagctcatgcttctacttccccgagataat

SEQ ID NO: 360589 - DNA, 313 bp, Zea mays
cggacggtgggactgacgcgtgggtgggaagccggcgcgcgctcacggacatcaagaacctcgtcggggttgccccgaacccctgcgccgtcgccaagaagcccgtgctgcagaagatcagaagggacgaaaagaagacagcgttgccaagcagccggccgatgacaaggaaattcgtcgcctccttggcgagcaaagagcaacctgaatgtcagccgaccagagctgatcaacggaaggaagcaatcggcgatggcaccgttgatatcgacgtggaactcgacgagccggtcgaagatagtgatagtgacat

SEQ ID NO: 360590 - DNA, 302 bp, Zea mays
cttttgatttttgagctggcgcgggacgcacaccgtgacaccgacacacccggtggttggccttggccccatccctttaccaacaaggattccaagtcagaagcgccaacagcgagcaagatgtatgcggcgtcctctcatccgggcaccagctccagtacctaccagcatggaggaatcccatggcatcgtcatcgtaggcggcggcatctgcggcgtcgccagcgctcttgcactccaccggaaaggaatcgcgagccttgtgctggagaagtcggaggctctgagagtagatggcggct

SEQ ID NO: 360591 - DNA, 299 bp, Zea mays
ccaagatcctgcccccgctgcatctgctacaacagccggcgtgcggctccagggacgccgcggcggcagagctggtgcggatgctggagcgcgccatggtgcgcgaccgggaggcaacgccgccttcgccgtgctactacgctgcgcgtgccgcctcggcgtaccgccacggcagcgcgccgaggaccttcgccgcgggcgggttccacgccccggctgtgagcgtgcggtcggtgatcccggtgtgcgccgccccgccgccgcagaccccggtcaaggaggaaaggacatgcccggcg

SEQ ID NO: 360592 - DNA, 294 bp, Zea mays
ggttttgggagcggcgcctgctgttcacggttctttgagatttcgattgcttttccattccagttccagtagaattcctcttctcttctattgtgcgagggcttcgctgttggatctttctctgtgaagagagtgcaagcagacgggcggtctgaactgatgccgtgttgattcgtctgcagttacatgccttccttcgggcgggcagccgagagaaagcagcaaattagtcggtacgtctgtcctatttgctcttaatatctttttgagtttgccaaagtactggtgctgtga

SEQ ID NO: 360593 - DNA, 285 bp, Zea mays
cccacgcgtccgcggaccgtggtcgtgctttggcggtcgagattcaccgactccagcagcagcatggtaggacgagcagcacgaggataagtcatagggggcggcggctgcagcggcgaggtcgtggtggtgggtcgtccggccggggccgagatcgacaccagggcaccgttccgatcggtcaatgaggccgtggccgtgttcggcgagatggtcctcgccgggggaggtctccgctggacgacgaggaccagtctcctccgtcaccgagcctacccggtcatc

SEQ ID NO: 360594 - DNA, 283 bp, Zea mays
ggaccgtggcggcacgcgtgggcgttgtggctctcaaaataaacatgatcttccaaagaagagttcagttaagtatgatatggaacgagattgacacaaggttgataggcatgctgttcatgaaaggaaatcaaaagctatgcctgaaggctatgaacagaagcaggaaatgaacgtaaaacccagagatatccatgtcgttcctgatggcattggccagttaggtgaaaaaaacagaaagaactactctgataaacctagtgagagaaggcacgtggataat

SEQ ID NO: 360595 - DNA, 277 bp, Zea mays
gaacgcacacgcacttccgcacccaggtgctggatgcgcccctggatccgggatccgatactgagtaccaggacttccagtttcggttcatcccggatgcgttcgagctccagatggtgcggcgttcccgtcggcggcggcggggcaaggaacggagacggtaaggtgacggaggaggttcttgagttcgagttcgacaaggtcaggattagcattgcgtccagggacgacgaggctgactgatacgcgccgccgaggagctccttctccggggcga

SEQ ID NO: 360596 - DNA, 197 bp, Zea mays
aacaagcatgaaacaagtacaatagtaggtgccttgttttgtgtcgtcttcagagccttcatgtagtaatcaagaagcaaagaaggctctgaagaggacacaaaacaaggccgcaacaagcatgaaacgaggtcaatagtaggggcataaaaaagaaaagaaatgaaataggatcaacaaatgaagctgaagaagta

SEQ ID NO: 360597 - DNA, 279 bp, Zea mays
aggttgttgagggtacataggttttgcactagatggcatagacttagcaacctttgcctctttgaagacatcttgactctgatcagtgtagggtcttcgagtcgtcctttctcgttcttgaaccaattccatgctcattggttcttgaggaacagaatgtgaggttgccagttctgaatcttgtgatgggtactgatgcacattttttcttgattttccttgttgagtagacactaagtgatcaccaggaagaggcttctttgttcgaggaactatgga

SEQ ID NO: 360598 - DNA, 311 bp, Zea mays
cggaccgtggggtcgtcatctaggtctaggcttcctcattcgaccgatctagtactactactactactccatcgattgacatgaatagttctcgatcatgccacttattaagtttattagctagcttgctcatcccttaattagctgccgacttttttagctagctatagatttcagtagctaatatactagcttgttggttctgattagagctgcaatatttcatgagtcgtcgtcgacgacgtaggtattacgtataggtacgtgatgctttgcgtctgcaatatttttgcatggcaatgcattactgc

SEQ ID NO: 360599 - DNA, 255 bp, Zea mays
atctggcccagtgtgtccttttggaagtgaattccaaaaggtttgctgggaaatcttagtggcaggatcagaacagggtatggaagctggacaagttggtcctcgattagtgactaagggtgaaaagatgactactgttgctaaagagtggcataatggtgcgtccagtaatgcagatggcaagtggcaacctgtaactgtaaccttagatgccgacctaagtgaagcaacttccctcaatgatggagtttaaga

SEQ ID NO: 360600 - DNA, 117 bp, Zea mays
aaacctctgacacaccgccgccgggccgcatccgctacaggctaccctcaccaccgcgcacaccgaagtagtagcaggcggtgccgcccccaatggcggcagactggttgtgggcgc

SEQ ID NO: 360601 - DNA, 310 bp, Zea mays
cagagctgcaggaagttcttaaaaggaaaaacatggtgatctctaaattgaagaaagacatgtctgctctgaagcatatggttgttgaattatcaagggctaaaagagtctcttctgccataagtccaatctgcactgatctgccagtgatgtcaaacaatgttctgtatgatatgagcagttctagctcatcagatccagaatccccagttgcactacgagaataccttgatgagcatcttgttgatagcactccaggagatggtgattctagacggagttgtgaagtatctgtagcaaaagcatctct

SEQ ID NO: 360602 - DNA, 305 bp, Zea mays
acagaatcaatcttcatctaagactgaaacattgcacagcgatgctcttattgggtccaaatcctcagcaggtgagaggtctagcatctttataatacagtgtcagctaagagtgtggtttaagtatggttgtttatgcacaacatatatgctaacagagcagcgtcactgaaatgtttcatctaatacatatcgggttttttttctgttgctgatggtagcagtatcattctctgactcacacaatgttttcttttttttctggattgttgtaggcattgcttcattatcggcacaaaaggtat

SEQ ID NO: 360603 - DNA, 312 bp, Zea mays
gcttaaataatgctgcaaaagggaatgacaagttgatcagaggcagcagcaagctacctgatacatatagttcacaaaacacaccaggaacatgcctacatactgctgtaaaagggagtggcaagttgatcagcggcagcagcaagctacctgatacagatccactggagtcaccttgcagcaactttactgaggtcgacatgattgtctcaccttcaccacttgtctcatggaacactggatcttgtatagttgagagcggaaagcagttgtttctcttgacaccactgccaaaaacaaaagcatgctcgt

SEQ ID NO: 360604 - DNA, 321 bp, Zea mays
gccgaaacccccggtctccgtcatccgaccccgcctcgacggcccagatccacttgccgccgctgccctcgtgctcctcactccctcgcctcctccggggccgcggctccgcggcgaagacagctgcgagcggggcggccatttctaggcggaagcgcgggcggctgggctagcagattgattggtttgagtggttgggtcggctctaggaaacgccccgccgcggcgatggggtgcttccattccacggcgaacggcaacaccctggctacgaggaccccgtgcacctcgcctcccagaccgccttcagcgttagtgagg

SEQ ID NO: 360605 - DNA, 314 bp, Zea mays
gaggaattggagtattgcgtcgcgtttgcatttgtcgcacgttagactgttagagatgctttctcgagtgcgaacttgcatgatcattttgaactctggtattttcctcaatgcatggtcgttttttctttgttgtaacgatgccttccaaagactgcatttccgtgcggttcaaacatcccagtcgatggcgacacgtgcctgtagtgtcttggccctgatcgttgggaaagggctagcctgacctggcgtgtagtcgtttttagggcgtttggctgactcggatatgtcggctgggtttcgtggatagacta

SEQ ID NO: 360606 - DNA, 308 bp, Zea mays
gagaagatgaccaagaccgccgtggacgcctggtaaggagttcaagaacaagagcgagctagccaaggggtcggcagattccaccgcctgatagctcacgtaaatacaccgtgtgtgcttgcagtttggctgacgctgaaggtttctgtcgagtgctgattgatccagggatgactgatgaatttgtgtgtcctattatgactgccaagtcgtttcaattattccaatgtgtgtcacttaattttctaattattatttttacacttgtccacttcatcatttacaagaaaaaaaggttctagtttgtc

SEQ ID NO: 360607 - DNA, 320 bp, Zea mays
gtcaaggagatgaaagcagaggcattgttgatgctacgaagatatgaagaagtgattcaactatgccaagagtctgtgaatctgactgaaagaaattcagttttattcaaagacaatggagaaccaaagaattccagagtctctgaacggatgcagttttctggaaggtattggcggccctacctcatttgcaagtcttatttcctttcaggcaagcttgatgaggctcttgaattgttaaagaaacatgaggaagtcacacctgtcaaagaaagtgaagtgaacacatatgaagaaaaattctcatcattgtcagcgac

SEQ ID NO: 360608 - DNA, 320 bp, Zea mays
cgaaaggacaacacattgcagatttgcagaagaaagctcagaaattagaggacgaactggctgctgcacggaaagtctcttcagaacgacaattagctgttacagacgtacgcgctcatcacctgttggctgcttgttcatgcaaatatgcaattggtggcttctctgatgaaagaattataaatgcagctgtacaaacattttcttcaactccaagactacaacgatagggtcaaaacagctgaacataggctgcagtctcttgttgacgctgccatggccgagcttgacatggccgaagatgctactaccagagatgg

SEQ ID NO: 360609 - DNA, 313 bp, Zea mays
tgccgttctgcatgcgttcggttcggtggagatagctatccaacggctgggttgctgccagttgcccagttcctttgtttttttgggtaggtttggttgaatggatgataatacttctgttgacgcgctaataccagtgagatagatgacgccgtagcacccactttagatttaacatatgaccacaattggagatcggaatattattgcaattgatggctaggcgtttggaagaagcatgttaaagctcatcatcatagtgatctttaattgtgcactttgacaacgcatattctggaacgggaatatatgc

SEQ ID NO: 360610 - DNA, 308 bp, Zea mays
ggaccgtggggtcgaggcagctgatggaccgggcggtccgagcgtggcggcgcaagtacccgacgtccatggtggaagattgcgccgtcgtgtgcctgtacctgaaccggcgggcctcacctgctcccgtcgagagcagcagcggcctgctcccagttcccgacgacgtgaggccggccgcgcgtttcacaggcagcagcttccgcatggctctgacgagcaacggccaggcggtgtcggaggaggggacgacggcggtgtggagagcgctggagggggtggcgcgggccaactccgtgatcaggctg

SEQ ID NO: 360611 - DNA, 308 bp, Zea mays
agccaatgagccatgggccaccagaatcttttgtctacgctttatgcccattccacacaatgtactttcttgcttaaaataattctcactggatggtgtacagcttttttttcaggaattcctgaagacacattgagaaattttatgtccaatgtcttgcctgctgtattgatcctggagtttctcagtgggaccaatttgattgttcaaacgtttgctctagaagtagtcgcccctgccatgcctccattccaaggttggggaccatttcattctttggcatcccaaactaaagtccttgtgagtgt

SEQ ID NO: 360612 - DNA, 217 bp, Zea mays
caaagctagaacaacaactcagagagagtttgatcgagcaatgatgtccctttggtgcttcaaaagcatactacgctgcggggacaggacaaagggacatcattgctcgatcaaacagcttcggatgtgttcaactaggtttgcttcgagaaatccccgcggcaaaactgggggcctacacagcgtatctgatgatggggtcgctggttttgtacac

SEQ ID NO: 360613 - DNA, 303 bp, Zea mays
ggaccgggttgcctagcacctgtctacgtgggatgtgttcacttggagactctttgggtgaagttccctctgctagatctactcaccacttttcgcagttacaaggctggatcacctctcattcctagtaacatcaaggacctgttgctacaacctgtatctcattctagggcaaagacggtcttcctgaaaaccacatctctgaacaaacacatcactgacaacttggaatcactctctttagttcttgacatggtaacggatgaactcgttatgttgatcaccagtaatgtccataagttg

SEQ ID NO: 360614 - DNA, 308 bp, Zea mays
aattttacatcttccagctgtttatgctttagcttggcatgtgcttgtgtagatcgcaggtaggtggcatgctcatgtttgtacttcaaattttgttaatattcagtttgctattcagtaatcaatatagctttgacaaactaaccaatatgtgatgtattatgagggaaacccatgaaattcaggaattgctgtagcaaactataccgaatccagataagcaaggctagtgatttgaaccaaataaagtcatttagacatttatctaattgtgctctgaatttctgattcaactattatagctgaat

SEQ ID NO: 360615 - DNA, 133 bp, Zea mays
gtccatttgcacttcctcgccaccgacgcttcgttggtacatctctctcttccccacgccatccccgacaagcggcacataacctctccggcggcgagacagatggagtcgacctccggcgaggatgctccga

SEQ ID NO: 360616 - DNA, 315 bp, Zea mays
cccacgcgtccgaccacgcgtccgcccacgcgtccgcggacggtgggtcagatatatggtaacaagttagacagttttatgagaaactttgagaaatcattcagcagcacattgacaacgcttcatcttgttaatgagatgcctgtctatggacaaggtccagttcctcaatgttcttctaagcatgaagactctgaagcttcaagcaagttgagcactggtggtacacaaaatctaacgcgtgacatcaagcaggagcgtttgaattcagtggaaagtcagcttgttctttatgctggcggctatcagcagatg

SEQ ID NO: 360617 - DNA, 305 bp, Zea mays
gctccttaatatcaggttggtcgtaccacagtcaaatctacagaagacctgattcttggcgttcccttgataactgtcaatctgttggacttgtacttaagtctcatgtatacacaattatacatatgaatatgttgtaagttgtgattagtcgattaggagtcttacattgaaaattttacatccagtcatctagctgcaaagcttgctatcttagcttttgaagctttagaaaaaagattgttagataaactgtctgtcccaagttcgcttgtcatgatatattatctacttcacatgtgttt

SEQ ID NO: 360618 - DNA, 108 bp, Zea mays
catttttgtattgtatgacgatgtttatacagttcttaatgggatccagcttaattcatgagcatatttctttgtatccatgatatatatattgcttaattgaatatc

SEQ ID NO: 360619 - DNA, 363 bp, Zea mays
  unsure (1)..(363): unsure at all n locations
cgtgatctggtacgcttgctggttccggttcggttttcccggttctgaccacgcttcctgtgacgaggcggagatggtcttgctgcacctcgtgccctataccggcttcatgtaccgcgatgtcctcctctgcccgctgctcgccgtccaattcacaaagctcaaggtcggtctggcggtggggtgcgccctcaaccacgctgtgctggacggcaccgccacgtggcacggcatggccacctgggccgatctctgccgcggcgtacccctggcgctgcagcccatccacgaccggtcccggtcccgctccgggcgcgttcggctggagcagccggcgnccgccgaggcccacgagaagacgga

SEQ ID NO: 360620 - DNA, 240 bp, Zea mays
cttaatgatgttttgtacatgtttctctataatgtagagatgagaatggatacaccttaataccaacatatggaaaaggaagatgtacttgctagaatgcttcaactagaaaaagagctgcatgacaagcagcagcttgagctcgaagtagaacggttgaatggtacactccaagtgatgaaacatttagagggagatgatgatgggggagatatccatgagaagatggagaagctgagc

SEQ ID NO: 360621 - DNA, 245 bp, Zea mays
gaagagtgcaaaaggaatggtttcagattttggggtttatacttcactaatcaatgaatttgtcaagaaaaagtcatctagagttaccatgataatggatagcttggtgggtaaagatacttattttgcttcctacctgtgacaacattagagcttcaaggttgacaaggcaacatgaatatgatttccacactcagattgatatatatggtaaaagtaccttattgggcagtgagcacacatac

SEQ ID NO: 360622 - DNA, 244 bp, Zea mays
cggacggtggacgtgacgcgtgggcggacgcgtgggacctgccctgatgatgatatggtgagccgcgaaggtgaagagagtacgttcccgttcatccatcgtccctagtgatgcgcggtgattagtctatgatgaagagtgaagaagactacacaccaacccacacacatttgatcgacccagcgacgtacccgccaattttttttcttcttctttcctttttgcccgcccccttttcttcatt

SEQ ID NO: 360623 - DNA, 238 bp, Zea mays
agaaatgaaagaggggaagtatttagaaaaatgaatagaagcatgggagatgacaggggcattgttggaatcagcctgttggccacgcgggccccagccccgactccccgagcaccatcagcaatttcagcagtctaccagtcctccctccgcggccgtctgctacttctgtgatctctcctcctcccccgtctttcgtctccggttgcgtccccgacgtcctcgcctgctgtgggag

SEQ ID NO: 360624 - DNA, 302 bp, Zea mays
ccttcaagtgctccaacctgtttgggtgctgctcctgcaagcagtgcttcaagtgccagtcctcgtgctgcaagggggcgtcgtcctgctgcaaatgccagtcgtcgtgctgtgagggtgaagacggcagcagctgctgcgggaggccaatgctgcacttttccgaagccagcttgctctgggtgttcgtgcgggtgcgcttggtcctgcagaaagtgtacagaatggtgtcgatgttccgggtgccgcaatccgtgctgtgccactggatgcttgtgttgactgttgaggttgaactagac

SEQ ID NO: 360625 - DNA, 260 bp, Zea mays
cacagtctccagtctccactgcatctaaaaaaaaacgtaaaacccccaacacggcgtagcgaagagaagaagagagaggaacgcgcgatcgatgtcggggtccggggatcgtcgccgcggggtcgctcgggttcccatagtggctgggaaaccaatgggaaaaagttcgaaaaacccggggaagccggggggagacagttgggcacatggagttccacaaatgtgacagctaacacagcaaggccaacatggggtggcag

SEQ ID NO: 360626 - DNA, 134 bp, Zea mays
catttattcattcatccactcgacccgtgtgtactgacggcctcgttattctccggagcagatgcctgagcgccggcgccgaggacttcatcgtgaagcccctgcagagcaatgacgtgcagcgcctccggaac

SEQ ID NO: 360627 - DNA, 281 bp, Zea mays
gtgggcacgcttgggcgaccgtcgtcccgccgccaccgtcgccgcctacgataggtggccaggtcttcttcgatctctccgccggagacgagcaccatcaggttcttgtggagtgactgttgctgagaagagaccaatgatgcaatctcgtgatgctgataaatatttgaacaaagctgacaacattaaccatgtgctcatgaactctggcgacatttctaaaattggtggtcactgcctgcatggtacacatggtttggggactcggctagattctgatg

SEQ ID NO: 360628 - DNA, 182 bp, Zea mays
atgaatgggaaacacatgctactgtactcgataagttgcttgcatgggagaaaaaactatgccatgaagtgaaggaattcgaggttatcaaagtgacatatcaacgaaagctggctgttcttaacaaaaaaaagcaaagtggtgctagttcttcatcagttgagaaaacaaagtccattgtt

SEQ ID NO: 360629 - DNA, 286 bp, Zea mays
gcgattgggtttggcgccgcgaattgggaatccgtcgggtccgcgcttcgtggcgtggccccgtcccgatcgcgttcaggtgacttcgggtgctttgatctgtgctgcatctggagcattttgtttcggaactagttttcgcgtacctggtggtcgtttccttttatttcttgcctccatgcgtgggcttcgatttggattcgatacgtgattgtctcagttcctggtttctagcttgtattgattactctggcgccagcatagtgctcccggctccaattggcag

SEQ ID NO: 360630 - DNA, 283 bp, Zea mays
gtcctcgaggtgttcgatgaaatttcgaggtgcgacggtggcatgtggtgcccaagcttctgttaccatctggcttcaccaccgacagagaggaaaatgtgttcaaggatgtggatgctatgttcaagggggcaatagtaggtgctaggagattctacaacagactcttatgtgatgttgtccactagaaaagagatgtgggatgtactggaggccaaatatagggtgcctaacatcgatagtgagttgtatatcatggagcattttcataaatatagaatga

SEQ ID NO: 360631 - DNA, 277 bp, Zea mays
ctgtccggtcaggtggttgtgaattatgattttggcaaaatgccacgcccaaacggctgtttcctctcctgcttctgttgtaaccactcgttgagttctgaatcttgtagagctcagcctgaactatccagaagtagtggaggagaaattggcaggtatttttggatgtaaattgggtctgtgttctcccatagatcgataaggtgggaagagaactttctgtagattacacaatccagtgctatactaatgctagtgcatgtgcaaccgttgcaga

SEQ ID NO: 360632 - DNA, 130 bp, Zea mays
ctcctccgagctactcaatagcaggaatcctgtgagaaagatagctaaaaggccagacacaattgttgtccgtggcgtgccttccaggtggtttgcagagacaagagtatcatccaaaccttccacgctg

SEQ ID NO: 360633 - DNA, 291 bp, Zea mays
aaaacaaaatctgtagttaaataaagcaatcctcctccatgtttgggtatgggatcacacatacaacacatatctcattgtggattcctttgatgctctacattatctcattgtgtacaaaagaataccctccgcaaatatcaagtctcctctatgtcatctagcatctataatttatatgaccgaatattaacgttgctactcttggcgcaacatgcccaatataacatgagaatcatgtaaacctaatctagataccatctggaaacatggacgacatgcgtctgatct

SEQ ID NO: 360634 - DNA, 99 bp, Zea mays
cggaccgtggccagaacagaggatgcttcagtgaacttattgctctcatggagagtggtcctggacttgaacgtgcacacatgggtatcttcacagaat

SEQ ID NO: 360635 - DNA, 113 bp, Zea mays
gcgagatcccattgcctgactttatagaagtagatactttacgcagtatagaggaggctggggaaaagtttggctatcccctaatggtcaaaagcaagagattagcatatgat

SEQ ID NO: 360636 - DNA, 213 bp, Zea mays
gcttctcatttctagctgcggatggactcaaaccagcaatcgccttctgttaaaacgaggagagcagtaccaaccaaaggtcctcgaccgcaagacaggaaaccggaacccccatggggagacaaaatccaaatggagtctagctggttgagggctcggaccctgctttgaataagcttctcatttctagctgcggatggactcaaaccagca

SEQ ID NO: 360637 - DNA, 263 bp, Zea mays
cgcatacaacttgataaagtctacgcgttctaacatattcagatatgctacattacataaaggtaccattagtactactaaattctaaacttccatacactcacatagttatgtatctattgcattctaataccgcaaatataaattaatacagacaaaactcactagcaacaaatttttagtttataacataaataaatgaagacaaaatggacttccactttgtcatagcatactagattcacagattttatgcatttaac

SEQ ID NO: 360638 - DNA, 273 bp, Zea mays
gggtgattaactagaaagtcctctcgggtgtgcgtgagtgaggacaaagtgcgcacaaaatattctttttgtttgtgcggatggtctatgatcgtagagggttgccagaaataaatatcgtcggtccatgagtatatggggtgtcacaataagtagtttcttcaattccttgtgaagaaatgacctgaaggggatcatttgcttcctagtaaattgggaaattttgtcaatcttatgcaactcaagttggtttctcatggaaactacttatgg

SEQ ID NO: 360639 - DNA, 249 bp, Zea mays
cggacgcgtgtcttaggacagatggagctctctgccccatggccgtcggcctccctggcatgtagcgccgtctcccatgacgctctgcccagcagcgcctcaaccttcaagcttctcccgacgccggcgccgttatcatcccttgccaggtccggcgcaggcacctgctcggctggacccgtcccgtcgccctcccccttcatcgccgccatcattggttccgtcgctgtcgcggccttcccggccgga

SEQ ID NO: 360640 - DNA, 139 bp, Zea mays
gattcacaagtgctcgtagcaaatctacaaaatccccaaccgcctctcaacaaagtctccccacggaggtacacagctacgcgcaaaccgggtctcgcgcgaagaatccgcatttccccttccccggaacggaacggaa

SEQ ID NO: 360641 - DNA, 161 bp, Zea mays
cctcagccttccgacatcaccgccgacgccatggccggctctccccgccacctctccctctttcccctgcgcctcctgttacttcttccgctgctcgctgcgggtaaacccgtcctcgaggacggttacacggtcaccaccttcgccgacctcaacccgct

SEQ ID NO: 360642 - DNA, 178 bp, Zea mays
aggtcggaagccagtatgctgatccatatgtggtactcataaagttcacaatactggcttccgacctggtaatgttcacaggagtcataatgcaaactttatgagtacgacatatggatcagcattgccaaaaaaaaaaaaaaaaaaaaaaaaaaaaaaaaaaaaaaaaaaaaagaaa

SEQ ID NO: 360643 - DNA, 283 bp, Zea mays
cgggtataaaagacatgatgagttttatagtctccgccagcagcttgactccatttccaagtcactgttgaattctgaatgggggctatcgggatcacagcataactttgaagattcagaaaatgccagcaagcagcaggacaaagaaaattcctctagaaatggtgtagcaaagaccattcatcctggagactctaaagaagaagtttttggtgatccgaaactcttggatcacatggataaggttgctttgatagcccatttcaataaatcaatgaatgag

SEQ ID NO: 360644 - DNA, 279 bp, Zea mays
gtcagtcagtcacagactccagcgagcgagggaccaaaaccctagctgaaccctcccggcccgcgcagaactgcgtccatggaggtggacccctcgccgtcgtcgcgctcgcccaggccgccgcctccgccgctggcggcgatgccgagctacttcgacccggagtcgtccggccgtcgggaggagtaccgccgctacaggaagaggttgtcttcttcaaatgtctctcctctgctgggaagatcactctccaagacctctggaccaaggctgttatat

SEQ ID NO: 360645 - DNA, 273 bp, Zea mays
ctcaaaaagtccaggtagaagcgcaggacgaggcagcggcacgtgtaggacgccacgacccaagcggacggcaataatggacgctaaccactcgccgccggcgcaccgtagaggcatcatggcagcttcaactacgacatcgagagcacggacggcacgtggcgctgcgcgggggcgtggcaggagcaggacccatcgtcggaggccctgctgcggtacgacgacgacggcccccgggagccgctgctgcgaaggcgcaccatgaacaccacc

SEQ ID NO: 360646 - DNA, 271 bp, Zea mays
tctaaactagagatgtctaggcgtggtaaatatgctaaacaaaggtaagttttggatctgcctcttattttgtgagtctattatatttctgattgttatagagtttatggaaatttaggaagggtcctttgaccggaactgccttcgacccgctgcctttgccaagtggtgttccagtgcctatgtgtttttgtggtgatccttgtaaggtcgataagtctgaagatcatgacacctatcgacagaggtattggatgtgtgctaactttgc

SEQ ID NO: 360647 - DNA, 293 bp, Zea mays
atttaaaaacatgggctaactgttagtcgcatgtatgtaaggccatgttctaaacctctaaaacaggacaactaataaaacgggatgactaataggccaactagttgctaactatatctcttattaaacagctattagttattactgtctacattgtttatagagtgaagtgtgaaataggatattgaaataaacaagacattagagatgtatagctgactaacaattagctttagaggtttgtctgccctagttcgttcagaagttgtagtctcggatgggcgtttggcggt

SEQ ID NO: 360648 - DNA, 281 bp, Zea mays
catgaacaagtcaaagtcttggaccacccaaaattgcaggatggatttcatgagaaatgggaccatggactagtagcagaacttaccatggagcatgtccaactgtgggccattgacacgattgttacatttgattcatatggagtatcaggtcatccaaaccacaaagatgttcatcatggcatatggttagttcagttgtctggtttaacactgcatgaattgctgaaatggtttgttaacattgggactccgatatgttgggcatcagacctgttgtt

SEQ ID NO: 360649 - DNA, 297 bp, Zea mays
cccacgcgtccggatcgatgcaatggacttgcttatatttgttatatatgtgctcttggtgtcactatttttgtggtattttcccagcgcaagtttacaaactcattttataaattatgttacagcacaggtaggctggcaggtgcgaattcggtttcagacaaaatttgcagcagacacaaacttgcaaaactgattccacgcagtttttgttcctcaaatcaattatgttattttgatgccgtttttttctaacagtcatcaccatcagggtggcatcatatgcttttcatttca

SEQ ID NO: 360650 - DNA, 282 bp, Zea mays
ataacccattgctatatcaaagcttaacaaaatcccataaggttgtttatattggtttattcttaaagttatttgtgtcactatattcttacctagcgaaagaagctataccattcaagtgttctaactcaggtggtgtacgatgtaccaaagctcaaccaaaatctcagttgtttctgttgctatatatttaccccgtgaaagaagctaggttaacataaatatacgatacaattggagtgttctacctcatttcatgtgcagtttactttttttatatat

SEQ ID NO: 360651 - DNA, 296 bp, Zea mays
  unsure (1)..(296): unsure at all n locations
cggacggtngggctgacgcgtgggcggacgcgtggggtaaaaaggaagtatcagggaactaatgactgctttgtgttcaccaacgtagatggttgtcctgttagttgccatccaagcgggatttcaagttaggtaatcaaatccaaggaaggtaatgcaggaattgtttaagcaataaactcatatcacctaatgcatcaagcaagtgaaaaagatttttaaaacacaaggaggtggcaaatgcaccgaggcttgccttcgtttataggtgctaataactattttacattttgctc

SEQ ID NO: 360652 - DNA, 284 bp, Zea mays
gcaatctgccactggacagatggtgggatctgaagatccaaagccgcaagccgaaaattttgttgctgcacctgtagtgctggatgcagtcaggcaagtagaaattgaactggagtccaaaactactgttgacagtgtcaggcgaacaaggctatagcacagagcagactgctcaagtggaagctctaattgaagcgtcatgtggacaacttaaggtgggaaggcaaattccagaagatggatctattgcttgtacaactactgagcactctatggttgtcgat

SEQ ID NO: 360653 - DNA, 284 bp, Zea mays
cttcttcagactcagagccatcgcgccgcggcatcctccgttcctgccccctctttctctagccgagctccttttctctctcctagagaggcttctcccttcctcctcgctcgcccccattgcctttgggctatatagagcgggattggattggaaacggagcccccggcgagtttgaaacccaaccaaaacccccacctttctcgcctcgtactcgcgcgctccccaccgcccgccaccgtcgccgcgtctggtctagaaccaaatgccgcgagatctgcgca

SEQ ID NO: 360654 - DNA, 297 bp, Zea mays
gaaagattcagacaatagtattggcagcagaggccgcgtgaacaatgaggaggaacgatggcatgatctcaacttcctgcatggttcagatttgcttcgtgtactctacatatcaggactaaggatcaaggagttgccgaatgaaattggcaacaagatccacttgcggtacttacgtgtagacaccgagcacctcaaggagctcccggccagcattgcgaggctgcccaacctgcagacactggatataagggacaccgaagtcgaggagatccacccgtccttctgggagataaa

SEQ ID NO: 360655 - DNA, 292 bp, Zea mays
aatgaataatcacagccatcgtaagtaggcgaagtataaactcgttccacgtgaatacccttttcttcaaagttctgaaaattagaagaaaagggtattcacgtggaaccagtttatactaattttcagaactttgaatagttttcggaggattttatgaagtcaatataggcataatagtcttgaatagatcacaatgtctcaactctcaatttgagaagagatgtgaagtatcataacacatatgtggctttaaattatggaaaggattcatgcagacttcaactgcacg

SEQ ID NO: 360656 - DNA, 285 bp, Zea mays
cagacgcgtggtgcacagcagtacagcaccacaacccaactcaaacctcaacatagacatggttttcggttcttcaagcaaaagaaagcgtgcggatgactcagaagatgatgatgtgcaagtcgtccatgaggtgcctgtagatatccaagatggtggtgcagacgcagacagtggtgacgaagatggagctgcggctactggtacgaaacatccacttctagatgacattaatattattggtgttccgagtggaaaaatgttggtagcacaaggagtggcagt

SEQ ID NO: 360657 - DNA, 126 bp, Zea mays
gtggaacgcgccgccgacgccaaggggcagccgatcatctttcagctgatcctccggaacaacgcggccacgcacctcgccgagaccatcgtctgcaactccgtccaggagctggagcccggagcc

SEQ ID NO: 360658 - DNA, 320 bp, Zea mays
caatttttagatttggcaccccagatccacatagaaagtttagtcctgaaaaactgcttgtgtcgtcttaagttgaagtggtcagatttgccaccatgtaactcttttgatagttgtaccctttggcccaagtttcttagcaatgtttctacctactgaattgaagtgtttaagataacaaattcattcactaattcccttgtctgctttgtgaagatgaggatctttctctaacagcttgtaggttcagaaatcacaagcgtatcttctatctcccgtcatgtggatatggctttgccgccaccagataacatatgttc

SEQ ID NO: 360659 - DNA, 315 bp, Zea mays
ccgcagctgggcgtggtgacgtcgctcaatgtccatgtcagcggcgccatagccgtctgggagtacacgcgtcaacaacgcaatcagcgttacttgttgcttgtttttgctccattgaccattgacgacgaagactactactactacctgggagggagagtagaaatcaacatgcagcactcacaggaaggagagaaagacctgggctgggctgggctgggccgacagtaatgaacgctagcccaccttcctttcccaccaccaagacgtacaagtcagactatattacttcatttatttgtgctaatatcgtaa

SEQ ID NO: 360660 - DNA, 241 bp, Zea mays
aagatgccttactaccagaagggttcaggtttcaaagtctccgcaatgattgtctgtggtataccgacaatggaggaggagtttctgcgttttgaagaggacaaggcgatgggctctggcaacctctcctctacactacagaaattgtacatgtgggagaagaagcttcttgaggaagttaagacagaggagacaatgcgggtactgtatgacagaaaacgtgaggagcctgaaatgttag

SEQ ID NO: 360661 - DNA, 306 bp, Zea mays
ggacgacgcggtagtcctcgcagcaaggccgaggcctgatgcagcagcagcggtcgtcgtcgtcaccttgcgccgcatgaacagcagcggcgacggcaggatgagctacgccgacaactccggcttccagcgggccatcgcttccgtcaccaagaatgccaggcaggaactggcggcggcgctctaccgcgcccgctgccgaccgagctccatggtcatcgccgatctgggctgcgccacggggcccaacgcgctgctcatggtgttggacgctgtcgatgccgtgctggcggtggcggatgagag

SEQ ID NO: 360662 - DNA, 303 bp, Zea mays
aacaagtctagcctttgccaaaatgatgaccgacagtccgtggcatctgaatgcacaaccgcacacgcaacaaatggaggacccttcctcaaacacagagaagcaactgtaaaatcaacctttatggcgaacattagggccaaactgcatattcctcgggagagtccttccgtgagaactaacgcgacaagttcaacgctggagagtgaaacattgacaattgatggcatctccaaacaagcaacgagattggcatctggcactggacctcagcagatccacaacttcaactctttttctgat

SEQ ID NO: 360663 - DNA, 299 bp, Zea mays
ctgaaaagggtgccaaaagagagggccagtgatgatgacggcgaatccgaaggacattccactcctgtgacgaggcgttctgctcgattggttaagaatcagtcaaaatcttaccgcatgtatcgtggagtcagtgacattgaggatgaagatgacaatgagggaacagctgcgcctcagggcaagagtggggacaacgacgatgaggatatggttcccgtctataaattgctcaagaggatgccaaatgagagatcgagtgaggacgacgatgaatcagatctggccaaagggcattc

SEQ ID NO: 360664 - DNA, 256 bp, Zea mays
ctccttcctcccgcgctccgactttgactacctcgctgacacactcatcccccaaccgtcttcatcttctccgccttccaatctgctcggcgtcctccggctctcgtgctctctcattctctttttcccctacggcgagaatgcggacatgttgcctttgttactctggatgccaccactgtcactggctccacgcctctctcgccggtcgttcagagtgatgggcttatgcacccggcgcaccgcatccagcagc

SEQ ID NO: 360665 - DNA, 150 bp, Zea mays
cctgaataatgtaggcgcagttaaacagcagcagcactgccgatctctttatttttcaatattgttatctagtggttcaggaccaaataagtaggccaggtgctgactgttgtatagtttttagcaacgacaataggccacaaactagaa

SEQ ID NO: 360666 - DNA, 300 bp, Zea mays
gccatggcaaccgtgttcctccgttccctcgccatggccatggccgacaccgcgctcccgcccacccacaagctcctccctacggtttccctgccgctcctcccctcgtccacccgcgccgcgccgctcctcctctgcgtcagccgccgcctgccgcccgcgcccctcgttgcctcctccgacgccgtcgagacgagcattgaatgggttgacgacgaggaggaggaggctggagaagccttcgacgaggagggtgaggatgttgacgaggaggtgctggcctcaggcgacgagggggaa

SEQ ID NO: 360667 - DNA, 272 bp, Zea mays
ttcagccgggatggaaggcttctggtcttcctgtcttcaaaacaagccgtggacagtggtgcacacaacgcaacggattccctgcatgtgatcaactggccttcggactggaaaattgatgaacaactcgatgttactcaagtggtacctgttgtaatgtgccctgaagacgacgacggcggctgttttccaggcctctactgttcatccgtgctacctgattcttggctctccgacggacgtacagtgatattgacatctgcttggagaag

SEQ ID NO: 360668 - DNA, 240 bp, Zea mays
cggacgcgtgggcggacgcgtgggctggatgttgggacttgggaagtatgtaagctgctgcttctcggtgtgtctgttgtcctggcgacatgagtgagtttctatctggatgatgagcgggtgttaggaggatgtcgaaactctacatagttcgaggagagcttgtgctctgtagttatttgcactgcggagttactcgtcaatttgtgctgtgtgatgtagctatatggttctatggat

SEQ ID NO: 360669 - DNA, 280 bp, Zea mays
gcaattgctgctggtgggcgacttgccacagcctcaactgccgcaaatcttttaaaagctgcacaatctaagaatgctgtgcacataagatctctaggagcaacatctttgaaatcttctgcaagctttgatcatgggacacaatctgggggctcccagcacctagaatctctaaatgctagcgcagttaatggtgtttcaggagtttctgcagttaatcaatcagggccacctgctggagcggaaactaagaaggcattgggtaccacactagcacctg

SEQ ID NO: 360670 - DNA, 276 bp, Zea mays
cggacggtgggttggtacacaaaatgtccatcctgacataatccagcaaccacccaatctggctgtccagagcaaccttatagctcccattgaaccacctggttctgatgaaaaggttactgtgctaccatctaactctggtgctcaggttccttctggatcacctgtacagcgtcctaaagaaatggccaatcacttggtttcaattccccccaatggcagtaacaaatttccattgcagtctactgttggtattgatcgtgttgaaggtacaca

SEQ ID NO: 360671 - DNA, 135 bp, Zea mays
actgcccgcccgggatcgagccgccgcattgccgcgtcccttctggagccgccgccgcccacgggggtaccggatctgacgagcaaaggccattacttatcctaagcaagatttctaattgggcggaagctttta

SEQ ID NO: 360672 - DNA, 329 bp, Zea mays
acttggtggccaacgccgggatctggtccagctgcttctttgaagagatcaccaacataaccgccttccataatgtgattgtaaggcatcatatcaaaccctgttatatatattatgtgcttttttttccaagccaatgatttgttgcacttatattaattaatttctctgttccaaattataatttgtttgatttctcgtgccaagtttgactggcctgccttattcaaaattttttgacagaaaaatatggaaaattcggagccatacttaagtggagtagtatattgttacaacatcacaataaaaagtaacgatggttataaatt

SEQ ID NO: 360673 - DNA, 324 bp, Zea mays
ccacgcttcagcagcagcgcagtaaatttcgccggcgcgttgggcagcagcagcagcagttggcagccaacgtcccgctcccccgcccgctattacttccccagctccgcgacaagctaggcgcgcgtcgtccttgtgctcctctgcagcaaaacgagcttccggcgcttcgggttcagttgcgacttgcgaggatggcgacgggcgagcaggcggaggacgccatcgtggcggacgtcgtcggcaacggcaagggcgaggaggtgcgcgccatgggcgacgacgctgagcagcagcgcgacggcggcaaggtcagcatgaaga

SEQ ID NO: 360674 - DNA, 323 bp, Zea mays
cgtggtccctatttcccggcgagcactaggctaccgccgccgccgtcaggtgccggtgcccagaccttcgtcgtgcccatttcaccggcgacgagcacccactagcccctgcccgcatgtgttgggaactggggatagagatggatcaccaccacccgcagcagcagcagcagcagtacggcgatccttaccgtgggctcatgacgtccccgcagcccgaccaccacctccacgctcttcagtaccatcagccgcagccgcagcaacagccggcgcttatgtctccaccgcagccacagccagcactgatgtctccacagccg

SEQ ID NO: 360675 - DNA, 178 bp, Zea mays
cttggtttctgatctgaagactttgcctaactcggaatgatcttgtgtttaggaatatatatgaatatctccgtcggggttggaagtttaatgaataattgaagtcatgtattgcatatggtgctgattgaagtcaaggctaatcatacccttgtgcaggctaggagttggtctgatg

SEQ ID NO: 360676 - DNA, 321 bp, Zea mays
ctgctttttagcagaggaatgcaaaatgttgagttgttgaccaaccctgtccgttttgatgtagctttctatacaatagtattaatgtttttcactagcgattagtcaatgtgtactggttatcttagcaaaatttagttgatattgtcgaagttccagattgaggccaccatccatagatggaaaatagacttttgtggtatttgtaccggatgtatttcaaattaaatattttattcgcttatgttgggatgctcataagagttcttttcaggaagcaagacattcggatttgtggtcaaagtataaatttatttgttc

SEQ ID NO: 360677 - DNA, 313 bp, Zea mays
gggacccgctggcgccgatgcgcaactacccgacgtacggcttcactgcccttggcgccggctccacgtcactgccgagccagccgatgctcccggtgttggcgccgtcctccctgcaccagcacccgctgctgaggcaccggcaggcggtgcaggctgccggtctcgcgtggcgcccaaggccgacgtgaaggtagagggcagcgttgccggcggcgggatcccgtcggtgtaccagcagatgatccgctgcgggctgcgtctgccccaccagatgtagatacttaacagtggagaggattagagtgattct

SEQ ID NO: 360678 - DNA, 314 bp, Zea mays
cttcggcccggcaggatggacatgcacatccacatggggtactgctgcccagagtcgttcaggatcctggcctccaactaccactccatcaccgaccacgacacgtaccctgagatagaagcgctgatcacggaggtgatggtgaccccagcagaggtcgctgaagtgctcatgaggaacgaagacaccgacgtcgcgcttgagggcctcatccagttcctcaatgggaagatagaccacgccaaggatgatagtcgtcaaggttaacatgtggaccatgtgagaccaaaggggacgagaaagagatgacgacg

SEQ ID NO: 360679 - DNA, 313 bp, Zea mays
cagagctgcaggaagtgaagacggaaaatattgacttggaagatggtgttctatgcgagaaagaggaggcactgttgagaactgattgttgtgaaagtgtcttgtcaacagccgggtccatagatgttaaacttgccgacataaagaaagaccttatggataattcagctgcaagccaggttacaaagatgaagagaaatatacttgaatgtaaaattgattactgccacatgacattcaagacaaaagctgagcttgctgcccacaagaagaacatgtgcacagtcaactcatgcagcaagcatttcagatc

SEQ ID NO: 360680 - DNA, 304 bp, Zea mays
cagcaatgtttgtggactgtaaatgttcagacaaaggagacatacacattctggctatttctgagattggtgtctgctatttctggtctgcaaatgttgtggatgacctgcgtaataagaagcccaccaagatcatattatctgagtcatctgtgtcaacaactcatcaagcattatcgatatttgctgcaaaacttcaaggagtggatgggcctaattctgcccatgtcctactggcttatgggtctgtagtgaaaccatcttttgataaacttttggtttgctatggtacagatattagttt

SEQ ID NO: 360681 - DNA, 247 bp, Zea mays
cctgagccaacacgtctttacatcagttctcgagtccaaacactcaacaatctagcaagatgctatgtaactgaacaacgggggttgttttcgcataggaaactgatactctgttgtggaataaaatcggttcaccattttatacacattttctctctcaagaattgtgttattaaacttgtaaaaatgcaatgtctctcatctcttcaaaaaaaaaaaaaaaaaaaaaaaaaaaaaaaacaaaaac

SEQ ID NO: 360682 - DNA, 110 bp, Zea mays
atctcactctccgctggtcgctcactcttggagctccacccttcactcggtcgtagtctgttatttgctctagggtcgatctagccgcgccactccttcgtgtagccagc

SEQ ID NO: 360683 - DNA, 300 bp, Zea mays
aatcgcgcaggcacgcgcaacgcaaaccacggccggacttgtctgctcccatcctcacctagtttcaaaatttcctctgttaaaccctacccacccgacgaatccctcgccagatccaaccagctcgccggaggaatacatcgggaggttagcgtggagagagagaagtaggcggctgagggagggttagagctgggcgacgccgtcgctgtcatggaagcgcaggcgacggcgacggcgacggtgaaggaggcgctcgcggcgctgtatcaccacccggacgacgccatccgcaccgcc

SEQ ID NO: 360684 - DNA, 312 bp, Zea mays
cccacgcgtccgcccacacgtccgcccacgcgtccgttttttttttttttttttttttttttttttttttcttttttttttttttgttttttttttttttacagaaattccatggaatacattaacagcagaaacagtcttgagattcagatggggaaacaaatgagcgcctcatcaaaaatacatgttccggctggaattacaactccaagcatgaataaaaaatgcgtctggaacatgatggtttcaaaaaaaatgaaaaaggatgatctacaagcacggccatgattgatcatggttcactttatttag

SEQ ID NO: 360685 - DNA, 316 bp, Zea mays
gtgcaagaatcctgtttcaaatacacagcctagaatgagctgtggtagtgcccaagaaaaaccaccaaagagaactctcttctcagcttatgtgggctaccaaaatgttcgtggggcttatgatgcttgcagatcaaaatttgggagtttcctctcacttgggcatgaccacaataagctcgacagactttttatgaagggcccagaaggacgtggagaggtggaagtagctgtctctggcattgcagatcagagcagtgggaagtcgaagaaagatccaggagatagctttcgagtccttgttcacagagcagct

SEQ ID NO: 360686 - DNA, 314 bp, Zea mays
cccacgcgtccggcaaagaagagatgggaaaggcagtcccgtgccttttacaatttgttccgccaacccgatagagttgaaaagctcgcacaaattattgaacgtttggagcaaggtgaactcaagcttcgtgtcagaacgctggaatcagaaagagcatttcaaagagttgccgctgtacagaaaacaattggatatgtgagttcagaattattaatatattgcttttttctatgttacttcatgctgaaccatgaaaagataaaggcaaacttgtctgctggatgatactgtcactaagtgcatgcaaattc

SEQ ID NO: 360687 - DNA, 180 bp, Zea mays
ggtagctgaaggctccttctcgtttaggtctatccacatggttttgctcggggaacgaaaattttgaaggatgaaacgagacgtagtgcacgtgctagattcagattgctactgttctgttttcatagatcattcagccttactttgtttaacttttagtgcttcttagctgggctaggt

SEQ ID NO: 360688 - DNA, 275 bp, Zea mays
catacaaactccagaatagtctagaccagcagttaggcgcggggagcactagaaccgcggctaccgagcacactcttacaacagcctgtttaaactctcatctcccacaaaatttgtacaacagcgcctaggaaaggaatggaagagagaagaaaaaaaaagcacaagattgcttgatcgacggcagcacggctggtggtggtggatggttgacgatggccaccatagcagccttgtgtgcggcaatctgatggtcatcaccacaacaaacggta

SEQ ID NO: 360689 - DNA, 307 bp, Zea mays
gaacatctccaaaggcagtgcaggagtcgttcgtcagcataagcaaattggtagcaacacgacaagggatgatgctaaaccaaaagtttttgcagcaccaaaagttgaaccatcagcggatgtgacggattctactaaagtcgcaagagatactaaccaagaaggtgaaaaggctgatgaagtggaaaaggcgaagtcctgtcaacttgaatttgggagttattgtccccggtctattgagcacaaaggaattatggaagattatatagtgaaaggcctaaagatcaactcctcgtagcacgctcat

SEQ ID NO: 360690 - DNA, 276 bp, Zea mays
atacactacctccgtcgcatgcgcatgccgcgcagtgcatggaatcatggccacgctctaccatcaccacctcctccccctgcagcgtctccccaactccccctgcctaccgcctcctcgcttccgcctccccacgaagccatcgatgcaccacaatcggcagctacgaccccgcgcgtcagccagcacaacggccacagtgtctgcgattgaggacatccgccggtggctcgtctctcatggcgcgggcgactgaggaatatccattccagccgc

SEQ ID NO: 360691 - DNA, 289 bp, Zea mays
ctttacttttgcttggttaatcttaattaaaggtaagctacgaatattataattgattggtctctacctgcatgcatgcaagttggttgggttcattcaattattatattcgttgcttacctttacttttgcttggttaatcttatttaaatcgtgtgagttatctattcttaacttgtgtatatatatgtgtgtacgtacgtagagcgtgatgtgtgtcttatctagtatattgttcatttgtacttgttcctctctagcatatggttcgtatcctttatgatgatga

SEQ ID NO: 360692 - DNA, 292 bp, Zea mays
ggtactaacttcattctgtctaccatcaatattttacagaatcacatatgatgaagatctgattacctcctgtgtctagatttctgaaaatcgcctcatgatctttgcttcgctgctagcgcttttgatatactcttctatgtctttgtgaccaggttatttcaagcttcagttaaatttgtatatataatctatcttacaagcaatgtcagtttgctgtctgcaggtatagagattaatgatgaagagctggcaagatttgttgagcatgtggataaggacaacaatggga

SEQ ID NO: 360693 - DNA, 99 bp, Zea mays
acgcggacggtgggtcgcctcaccaccattagagcgcgcgcgccaagctcgtggtgaggttttcgagatgaacgttatcgagaagatcctggatgcggc

SEQ ID NO: 360694 - DNA, 345 bp, Zea mays
atctaaacacaatggtttccatgaatattctaattcgaaatatggaaggagtggtgatggacgaatgggatttgcagaaaggtatttctctgcagatgctatggcttctggtacgaaaaaccaatcttggagaccagattctgaaccatgggattcatatgcttattctggatcaagaagcggtatgaatgtgaggagaggattagattctgtttcatcagacaatagaatggcaagaaatgaacggagtaatgatcaagtgggtccccggagaggttgggacaaaggtcagggaccctttaggttcggtgagggtccttctgcccgaagtgcatggcgggcctc

SEQ ID NO: 360695 - DNA, 208 bp, Zea mays
ggtgcccactcgtacgggagcccgggtagctcgtcgtcgtcgaggccaccggtgttccctgctggcccggagctccccccaggcggtggatgtctcgcaggagtcgccacggactctagctgtgctcgctctcttctgtcaactcagccatgggacgctgctggccacagcgccggccacggccacggccacgccgcgtcactgcccg

SEQ ID NO: 360696 - DNA, 339 bp, Zea mays
agcgaccgcgagacgcgatggggtgcggaggcatcggaggaggagggctgaaacatcaggaggccgggacattggatcggcggttttctcgccgcatggcgctggccagcgtctcacaggcggcggagatctccgacgctgggctctcggtgcctcctgtctgcttctgacaggagtcggtgaatggaccgtacctggagtagctttctcgctgtaactttcgtgtcccgtctagaaaccgccagacgcttggagcaaataaaccgtgaagaagaccgctgcgcttcctgacgtgtgttgctggccgttggaggagcatcgtgcggcaaaaacatgaag

SEQ ID NO: 360697 - DNA, 331 bp, Zea mays
cccacgcgtccgggcacctggcagcatttaaggttcagatgaaagcttaggctttatacattgtactccatttgttccaaattataagatgtttttacttttctagatacattttttgctatgcatctagctatacattatgtttacatacaaagtaaaagacatgtatctaagaatgccaaaacatcttataatttggaacggagtgattactaaagtgttgttaatttcatccagagtagcttgtgcctattgttgactgctaaatgcctcagatgcatgcataatttatttgtgtcagttatttgggttgattagttggatagcccct

SEQ ID NO: 360698 - DNA, 156 bp, Zea mays
gagcagcaggcggcggcgcggagtaacacgcggaggggaatgcgcacccgtgtgagcctctcgcccccgcgaaaccccaccgattctgattccgccggcgaaatcgggcgcctcgcagctcggccggctaagcggtggacggcagcgccgaggggt

SEQ ID NO: 360699 - DNA, 207 bp, Zea mays
cgtttcaaattccttcagttacaacttctgattctggtggtcaggtttctaacagtttcaacatggtccaagagaatcaattgagtatgtcaaacaatgtccgacaagtccaaaagattgacagatttagtgatccaagtgctaatgtcagcactcagagaatgaagaacaaggatggatgcgagccaggaatgcccattgagagag

SEQ ID NO: 360700 - DNA, 315 bp, Zea mays
ccctgctgcctgcaagaatggagagcatcatgcgcaaggtgaaggaggcgcggcgtgggatccggtacaggcagggcaggaacccgtcggactcagaggttgccgccgccgtgggcgtgtcggtagccaacgtgaggctggcgcgcaagtgctctcgcagggccgtctcgctctactcggaggtcgcgatcggacaggacgtcaagttcgcggaggtgatcccggacgagtcggcgtctccggacgaggcggcgctgttccggggccagctgagggagcggctgctgctggtgctgggcaggctgcccgcgcggg

SEQ ID NO: 360701 - DNA, 297 bp, Zea mays
ccattccccactctccagtctccactagcatcagtcgccgccgcctatcctcgagcgccatttccatcaacagcatccgcctctggcaagctagcgacacaactcatggcactccgcgcgctcgacaatacgaagcccgccgccgtcgaggagcggcccaagaaggtggctaaggtgggcgtccccgccgccgccgccaaggccgccgcctcccccgggagtggcggcaagaagaagaaggggaacgacgagaactcggcgccaagggccacggccgcggcggcggagcaggccgtc

SEQ ID NO: 360702 - DNA, 99 bp, Zea mays
agtaacattaatcacacactctactactcgacgttactaccagcagctagcttcaacagtagaagagagacagacgacgatggcgtcaccgaagccctc

SEQ ID NO: 360703 - DNA, 296 bp, Zea mays
ggagaatcccagtgatgatatattttcaaagttacagacatctactgcaaaggcaaatgccaaaactaaaaacgagaagttagatggttctgtagtatcctcatatcaggaagataccactaaaccatcttcagttctactagctcctgcagccaggccgcttgtcccgccgggttttgcaaatgcattcgctgacaagaagcttcagtcacagtcgtctaacatcacacatgagccgaagctagaggatgaccagtcagcaacagggttcacatctgaaagtaaagagaagggag

SEQ ID NO: 360704 - DNA, 100 bp, Zea mays
tgtttgccaagacttcttgcgtggacagtgcaaacgcatagcatgtaggtacgctcatgtattagcacagcctatcccaccaatgaaccatgttcccatg

SEQ ID NO: 360705 - DNA, 228 bp, Zea mays
atcggcgtcgccacgatgctactcctcccggggcgtccagtgctctcgccggcgctgcagtactccccctcgccgtcaccatcccgtctccgccccctcccttgcaccagcaacgcccccacatctgcttccaccgccgcagacgctgccacgccgtcgtccttctccgtcgaagactacctcgtgaacaggtgcaacctctacgccaacgtggccgcgcgcgtggcg

SEQ ID NO: 360706 - DNA, 312 bp, Zea mays
catttcttggaaatagcaagcacgggtctggtatagggtttaacattctttacttgtattgactttcgagcattactggtgacgtgctgagatatctaggcaactttcacgcacaaaaatgacagcttgcaaacgtttctatgtcgtttttatgcatctgattaccttaccattggttttctatattttaatgattctttgtacttctaactaataataagactagactaagcatacatacaagctgtataccaacgattcctcgctgcgtacaaacatgaattgctgctagcgaaggccagcacccttgcc

SEQ ID NO: 360707 - DNA, 314 bp, Zea mays
cttgcgttcttcgtgcacacacacggccgcatggcgtgccagtgggatgcagtcagcgaacggcgcgcgggcgtgaggcagtcgtgtgctgtgcgcgagaatgggaggggttgcaggaagccgggacgggagccatacgctggggcgcttgagccggattgctccagcttggacgcctcctctggatagctgatggactcgcttccctaactcaagagttgccatggtaagcgacgcttacgcatctgatcttggttgtgcttgctttgttcccctctccaagatagcaccttatgacgcgcagagttttagag

SEQ ID NO: 360708 - DNA, 293 bp, Zea mays
ggtttgagcgggagagggacgcagctagaggcggggggctctgctctatattacaatgcagcagtgaaggtgcgcacgcgagcgcaggccctccccccgtgcctctcggtttcctagatttggttgcctgccgacgtccgcctctacacagtttgctgcggcggcttgaaaaagaggagtttccctgcagatccatgctaaagctggcggggttgtgcttcgcggtggccatctgcctgtgcggcgttcggtcctgggcttgtagtggcagcggttgcagggggagtactgtg

SEQ ID NO: 360709 - DNA, 321 bp, Zea mays
cacacggtccagggctccaggcttccctccctcccctccacggcttcgctcgctcacccgccctcctgctctaagcccaaagctcccgtcccgagggcttcagagatcgcatctctggtccgcgggatccgatgagatgcgggggtgatctcgcagtccgacctcgtagcaggcatggctgaagcggccacttcttcgtcctcgtccggatccttcgccccgcgccgcctccatgacgccggtgtcgtcagggaatcgctcccgtacagtgttctcgccgcacccccgccgccgtctctgtctccggtgcaggtgcaggtt

SEQ ID NO: 360710 - DNA, 311 bp, Zea mays
agaaaaaatgcctatgtcgttccagccaccaaaatacttatgctagtatgtgttcttgtgatctgttggagttggaggctttaggcctatcatatacaatgtgattgtgtattttttgtcgtagcaactagcgagttttacttgaactgttcttgtaacattgcagagtagggctatgcatcatatatcaaaagcctttaccatagcatgttcaaagttggagaagattggaaacgtggaaaccgagcctgatgcagtagcctctgaatcaaagacccaaaaggaagcaatcgacctgaaggaactcaaac

SEQ ID NO: 360711 - DNA, 313 bp, Zea mays
gtaaaaatgtttctctcgaaattgaagtattctgtccaaccttagtgaatcttgatgcatgtatagaatataaaaccataatgtatagcctaggtgatactttccctggttcaaacttcaagatatatgccgtttaaattcctacagatcaaacatttttttgactttgaccatggatatgtaaaggattgcgtagattgactatgtaagatgttgctagatttatcatgaaaattactttcacaatatttaattatgtttattggagatcatatttttcgtagaaattgctagtcaaagtgtcaccttgtag

SEQ ID NO: 360712 - DNA, 303 bp, Zea mays
ctgacggtgggcttctatcaacattcaacagagaatatttttttccatactcattatgatatatttaggttgaggaaacaccggttcctgaggtcataaatgaagtgccgaataatgtaggagtggctccaccaatttcatctccctccgcaccaccggaggaggcaccaaagaagtcatatgcttcaattgtaaaagttatgaaagaatatcgaccaccagcacctgcagttccttccaggcctgcacccccgaaaacagagaagcaatcctctcctgcccccgctctggtcgctgatgctc

SEQ ID NO: 360713 - DNA, 302 bp, Zea mays
cccacgcgtccgcatggaaaccagctgcgcgcaggagtgcggcaaggcttggccgatgccctctgttgccgccatggcatctcccttccccaagctccagcgcgcacacggcagcagatcgtggtgcccctccctgcaatctcgagtttccccatggcgcctgtcctcgggcatgggcgagctcctctctgccctatgatttttccacggctgtgagctccccctggctgccattttccccaaccgtcgtcctcttgctctccggccatcagcagccagcagctctgctcgcccccttccat

SEQ ID NO: 360714 - DNA, 305 bp, Zea mays
cggacggtgggcggacgcgtgggcggacgcgtgggttgcagaggacatagcaacattcaccagaaagaaacaaaatcacaagtatggatcatatgttaaagcacataaggtggaattacacgctccagataaccacggttgggtcctttacaaagcaactgtttcttccagtgctgggcacacattaactggtatcaacattgtctgcacattgaaatttactggcgaaatcagtccagaatcagaagatggtagcatcttggtagaagatgtcgatggaacttcactgtatcaggcatcactag

SEQ ID NO: 360715 - DNA, 311 bp, Zea mays
gtcatctgattacattttttattgacaagcattgattgtggttttttcacaatactgtacatgattgcatggaatggaaaacatttgcggttagatgataagatcaaagctagcgaaattgttgcatgcagaatgaaactcacacatatgctgatcaaatctaagcaaaatagtgctgatccatgtaatgtggttaaaaaactagatgtgaatataaagaaatatagcgttagttcccgaaaggtgatcacaagtaagaatttgacgatgctgatgggactaatagatcaagagattgaagagattagtgc

SEQ ID NO: 360716 - DNA, 290 bp, Zea mays
cccacgcgtccgccaaaatttactgaagaggacaattccaaatcactagagggtactgctgaggcctccacacggaagataaagagcagatcagttctagaaaaaacaatcaagaaggagaaagaacacgtggaaaaagcaaaaaccaagaagctcaaacatactgaaaaggtttcagaagcactaaaaggtccttcagaagcttccttccccgcaccagctgggatggtagtccgcagtagctctaggattgccaataggaaatcaaagatggaagaagaggataatgg

SEQ ID NO: 360717 - DNA, 124 bp, Zea mays
gatgcaacaaacaacccatctggtttttttacccctggtgcagggctctctgggctcgagtgtagtcatctcctctgcaggctgtttcgacacgatgatcatggcgtcagccttttacaagttt

SEQ ID NO: 360718 - DNA, 292 bp, Zea mays
gttctagatcgcgagctgccgccctttttttttttttttttttttttttcaggatgaatacaaaatgttcttttttcctctgttaccgcggagtcaggcacactgtccaaaagtacatggaaacagaacaggtccaaccagagttattaccagactaagacgcacggaagcagattacgtacgatttacagaagcaaaggccatctggcgcagaactactaaattctcgactgatttcccccactggtcagcttgacaatcctcctcactaaaattgtgaatatcaggaaaa

SEQ ID NO: 360719 - DNA, 281 bp, Zea mays
ccaaaccgctccgccgccgccgctcgtcagcctccgttccaaccgccgcgccggcgacatgccgcccaaagagctgccggggttctactacgacccagagaagaatcgctacttccccatcaggggccccatcccgggcgctgccgcccgccgcggcacgccagcgccacctccggccgtggacacaacgggatgcagcaggaaaagggctaggcggccggagctgctcaacgccagggagatgtacggcggcggagtcatgttctccaataaagccgcca

SEQ ID NO: 360720 - DNA, 276 bp, Zea mays
cccacgcgtccggcaatcttcagcaattgtccaaacatctgcacgctaatcgttacaggttgcaggcgtctgtccggtgctggattcagaggttgttcaagttcatttcgttaccttgaagccgagtcttgcatgctttctccagacggtttgttggatatagctagtggcagtggactcaagtatctgaacttgcagaagttaagaagctccactggtctggatggcctgggtaaccttgcgctcgctaaaagcctctgcattctgaatctcagg

SEQ ID NO: 360721 - DNA, 323 bp, Zea mays
ctgggaagtacattagagtcatccgtcgatgtgcttgcatgctccagcaaaagtgttactgacatggtgaggatattccacaagttaataatcccaaccatactaaacctgtcttcaagtttgatgttcgatgaaagcattatcaggccagactgtgtaaaatatctcataccgcataggttcctccaaacacagcagctgcctctgaagagaatgaagcaaattctgttgtcattgcctgcagaaagcatgtatggttacgagcatacatggagtgccattgaaagcaataaaaggatcatcttacaatcaggatcagatca

SEQ ID NO: 360722 - DNA, 251 bp, Zea mays
ggagctgtccttgctacagagctcaagaacaatgccagcatgcacctcacacccagccacactcctgatctgatcattcatcttccaacggctgcatctgtttgctaccgctaccgccgttggaagttgaatgatgagatcagccttgttgctcgctgtgagtgcatctgtcagtgttgatcaatgtggtactcgccagtttattaccgtcaatgccctaaatgagtttgattcatagattactggtgttg

SEQ ID NO: 360723 - DNA, 305 bp, Zea mays
cccacacccagtgacagagacagaaggccgggcagggctacgcgacgcgacggagatggagcacacgaatcatcgccgccgccgtcaagctttggccaccgtgtcggcgacgacgacgctcctgctgcttctcgtctgcctcgcggcgttgacgacggcagaggcgctgcgcgagcacagggatgagggcggcgctacagcagtggcggagacggaagcgtctgcggcacaacgccgccggcggcaagcaatcgccggccgtgatggtgttcggggactcgtacgcggacacggggaacctgggc

SEQ ID NO: 360724 - DNA, 118 bp, Zea mays
gtgaaccacaggagattggtgctgaaaggagggctccccaggcgaatccacatccacatccagaggcagctacaaacacccatccggaggcagcgaagtacaggcaaccactatcgca

SEQ ID NO: 360725 - DNA, 140 bp, Zea mays
cgacaccgcaacacctgcgctccggcctgctctgtctttcaaacagcttcgtgtgttgctggcttgttgccgcagttccagcgccacccggcactgaagaatctggtgaccggccgggatcgagagccaagctcgagcag

SEQ ID NO: 360726 - DNA, 320 bp, Zea mays
agctccgcggcctaaggcagctgtccgacgccggtctagcctcgctcgctgctgccgcgccagcgatccgcaagctctccgttgcgtcctgcaccttcggacccaaggcattcgtcgccgtgctccagtcctgccccctcctcgaggacctctccgtcaagcgcctcaggggcctaccagacacggccggtgccaccacttccattgctgaggacatcaaatttccaccggcttcgtccctgcgttctgtttgcctcaaggatctatatagcgctctatgctttgtgccgcttgtggcatcctcaccagaactccgctcg

SEQ ID NO: 360727 - DNA, 315 bp, Zea mays
cggacgcgtggcgaatgaagagatactttgtccatgccgcaagtgtttgaatcggcttagtggacatagaggacaggtggaggaccacttatatcttcatgggatggctagtacatacactaggtggatgtatcatggagaagccatggatgacatgattaatgaaatggtgaccacgaggatgaacatgtgagtctcaatgatgatgttggtatgaatcaagatgaagaagatcctgatgataggattaatggtatggtagaggagttatacacagccgaagatcgagataaaaggaaatctatgtttggagat

SEQ ID NO: 360728 - DNA, 312 bp, Zea mays
ggcgctactcccttgccggtgaggttgttaacatctggtatcagattcggttccatcctggacactccttccccagttcctggttggcgtccacaactgcgatggaggtggcaatgcaacgggttctcgaggcgatggcacgtatggagctccgcttggccgcggcactggttggcagtggtggcgagcaggtccccgaatccttctcctacgccaccgcttcctccgccattgtgccacggtacgacgacagcgtgttcgactcttcggcggtccagcgtacgacggtgctcccatcgacgatgagttgta

SEQ ID NO: 360729 - DNA, 302 bp, Zea mays
cggacggtgggtcgttagtgcacaaggcatcgtcactattcacggattggcggtgtaccattcctcgaagcagccacgagttatcgtaatattccatgcaaagaaccttcaggccagtagtgtttttcctctttttcgatttcgttttctttttcttttctgcgggtatttataatgtgtaaagagtgcttgtggtgtggatggtctgcacggatggcctgcgtcctgtggtgcgtgtaattttgatgtgcatgtttgccgtgcagcacagacgacgatttcacgtctgcatggccaaaccc

SEQ ID NO: 360730 - DNA, 270 bp, Zea mays
caccacgcgtccggccaccgccgccgccgccgtcacggccaccttccgcaccctgatccagcacgcagcggcttgtgagcgcccccgtcccgctccccatcgtccggttccagagcctgcagcgccaccgcgtcggcctccgccgcttcgcgccaccgcgtgggcgcgccgtcctacccccgcccttcgccgccgaggacttctcttcctacgtagatgatttctccggggacgacggcgaggagcacttcgatgatgaagagggctctg

SEQ ID NO: 360731 - DNA, 294 bp, Zea mays
cccacgcgtccggaaaacgagggtggtttagctagctgttcgtcccgtgtcccgttccagtcctcgcccaccaccgcacgcggacaaaaccgctctccgatcctcacgacctcgccacactcccagcccagccggccagccctcctcagtcctcactcgcgcacaccacctccagtcagtccagttcccgcagtgcagcagcggccagcggctgcctaatctctccagccctttttcgtcccctagccacgccgcccaccgctgccgcgtcatccggccgtcgtcggctgcccc

SEQ ID NO: 360732 - DNA, 304 bp, Zea mays
cggacgcgtgggcgatcgcggcctccgttggcctggacctggcgtgtgcggggcgtggagacggacgcgtgcacgaaacccgtcgaatcggcgtgccccgaacggccgaaccggagacggaggagagagcacactggcacggcctgccatgcctcctgttcatgttgtacgatgcgcgggcgcggcgagcgaactcggctggaccagaccacaccacaccagggccagagccaggggtgcccctcacgtggcattggctcggcgtagagaacgtcctcccaatatctatgaatttactacaaca

SEQ ID NO: 360733 - DNA, 279 bp, Zea mays
gagactaggaccgaatcggagatcttaacaatcgatataaagcctcgcaggaagaagggaactaagatcacattccccgacaagggaaacgagcagccaaaccaactcccatgctttggtacagatcgttgtaccgcgcgatgaggtttctcttcaatctattctaagtttcgatcattattgaacaacacttcatggatatgcaaattttgaacttggttctctgatgcccacagaactgaaagtgtggtaaccttcgaccagttcttcatcttctgt

SEQ ID NO: 360734 - DNA, 298 bp, Zea mays
gggggcagcggcagcagccggaaagtgaggcaggcgtggtgaagggcagggggaggcttgcaccgcagagaagccagaggagcgttagtagtagaactgtagaagagcagagatgtatatggaggaagagccacgctacgagatccgaggagccatccaccgcccgcctaatccttgttcgctgctagattcgccagaccaccgaggcgctgctccccggatctacggggcggcggctgtgctcatcggaatccagagaggtggcggttgtttgccggggatctgcgccgcatgtctc

SEQ ID NO: 360735 - DNA, 292 bp, Zea mays
agggagttggcggggaggaggctgaacatctcgatgagctgagatgtcctgttcgtgatcagtttgttcttgcagctgcagacaacttgtcgattcgttgcttgaggagcagccatggacagaagaaaccgaccagctctgttggtgagtctctctctctctctcgtctcctcttcctctcctggattatatatatatatatattccttgattatttgcattcatgccatattgttgggttgctttagttgagcttgagcaggtcgtttggaaatcactgacgcttctgggc

SEQ ID NO: 360736 - DNA, 293 bp, Zea mays
cccacgcgtccgagaagtttgggccggatgtacaggaaggaaggaggagacagttcaattacatcggaagtcttttgcgtgatgcacaaccagaattgatggatactctaatacaagcttctaaggatggaaatgagaggaagttatataccttacttagtgaaggtaaactgttggtggaagaagaggaagaggaggaagaggacctacctgatggagaagaggagaatcaagagtatatgagaattgcagatagatggtttgacggcctcctctgcaaagacatttcagtt

SEQ ID NO: 360737 - DNA, 282 bp, Zea mays
cggacgcgtgggcggacgcgtggggttgaaatcttgctactggtatagcatatgcactgcagtacatcagggtatcgtattacactgataaacatgttctcaggcgtgctttgtttcactgtgcagagccaactttgtgggagatccgtgaagtgtgtagtagcaaaatatttgttgttaactttcaaacttggtgttcattagttacaacgtcatgattgataccttttaggacattcttggtgctatacaaccgtgcctttggtaggtttttggtgtgtg

SEQ ID NO: 360738 - DNA, 310 bp, Zea mays
atacaatttgttgctgctgtgtttacggccccgagtgtgaaactggtgaagtggtgaattgcccatccttgaaactatggatgtactgctgaggcaatgcatgctccaccagtttcacactcgggggcgtaaatacaatttgttgctgctgtgtttgttttttatttcgcttttgccttgtttttgaagatgaacgtatgatgatgaggtttgtaacagttttgggtctcgcagcactggactggaccctgactgcgattgttctatgtgttgccccttgctcggtgcgcggtgtgtatgttctgcatgc

SEQ ID NO: 360739 - DNA, 133 bp, Zea mays
cttgtgcagggtatttatattttctacgttccatctcgaccgaacccaggcaacagcagcaacaaatgcctgtgctttccggcctctacaagtattatttccatcttcaatggaccctacgaatgcgttcctg

SEQ ID NO: 360740 - DNA, 301 bp, Zea mays
atcaaaatgctgagaaggataaaactatgaatttaaatccagacctctactataattgggccacagcagacaaatatttagagaattatgaaagggcccttcgtggttttgaagttgcagctttaaaagatcccgggcttggtgctaatacagaagttcagaagatcatcagtctccttgataagcttgataatgcaatgaagggacaattacgatccaaaagattagcatcatttgtgtcatccttgagtggagtcaaattgaaatcatcgcacaagaaagccaccataagcactctatc

SEQ ID NO: 360741 - DNA, 304 bp, Zea mays
gccagtcgtacgatagcgcgactcgatggccaggcgtaggtacccaactgtcttcttccccttccttttagattccattgagattcgtcggaacttttatgcgagttccttttttattcagccgataattatgtcagtatcttgagataagatggatgaattggattcaacacagatatatttgttgtggatgtagccacctttcttgcttcgtgaattatttattgtggatgtaattccaatggaaaatatatattattgaggttagcttcagctgcgttccagttatatcgcagttactcct

SEQ ID NO: 360742 - DNA, 305 bp, Zea mays
gtctggttgtcactagaatttcctcatttggcatgcaataattacaattgatttgcctggtactctgattgaaatgggaaagttgagtgcttacatatgtcgatccacaatatttctttattgtcaagggcagagataaagtgaattgtgtggattcacaccaactgcaccttcagatctcttctgggtcgtttcatttcaaaaaatactggccatatccccctatatatctggtaaacatagattgaggactagatagatcaggataaacaaggcgtgttaattgttgacaaatataatataag

SEQ ID NO: 360743 - DNA, 294 bp, Zea mays
cgacgaacccgatgccgccccaccgtgccggaggggccgcagcggcggcgacacgagcgcgttcttcgcggcgacgctagtactttgggctgtgtgcgtggggttcgacatcggcgtgcggaggagacgcgagccggcgcccgtggccgccgacttcgccttcttccaggccgccaacaccgcagtccgcggctcggtctcccgcggtgcggtcttcgtcaacaccgccgtatcgcttctccagtcgtggctgacctccgtctccgctgcagtccatatttttacatgtaagga

SEQ ID NO: 360744 - DNA, 294 bp, Zea mays
catagaatgaattctcaatctgttcaaccatcagaaatggagtggtaacatggatgaacagattgagaacccattctatggttgaattactagagattttgatttagaaaaaatagaacgattagaggatgcaaagcaaaccacataaagggagaacacaactgatcgcctcatgtcccgagtttgtcagatgtgtaggaacaacacattcgagtttctaatgtattgattgtaattggtagctgctctgattatctatcttcgttctctctcggctcttgatgtgcaagcaag

SEQ ID NO: 360745 - DNA, 108 bp, Zea mays
ggagtgaacggcggctcagatgccgagaacgtctgttatctgcgcgacatcgcggacgcggataagttagtccgtgtgatgagatcatgtcctgctggcgccgacgcc

SEQ ID NO: 360746 - DNA, 289 bp, Zea mays
atgatgaacccataaaactgattcctgagtgcgatggtgtaaggatcctatctaactcaagtatggaatttctacaccgagtctcagactctaccacgtcaatttttggcattggaagcatgtccccagcggcattactgtatgatgctcgtgatcactatgacaggcaaagtgcaaaggcttatgacaactatcaattaatatcatcttcattgcctgaggcaattgaggcttgcatcgacgctgctggccatgagtttgatgtttcacgccagcgcacattgctgag

SEQ ID NO: 360747 - DNA, 111 bp, Zea mays
gccctatgatacaatcccccgaattgggcttagtactttaattactacacttctgcagttctggaattcgggagcctggaattcggaggcccaggaatcatgatgcagcag

SEQ ID NO: 360748 - DNA, 268 bp, Zea mays
cggaccgtgggtctgacgcgtgggtgacatgattcttgatttaatcataacaaagtctgtagaggagaactttgttactttgttagactctcgagaacttaactcaagtccacagaacaagatacgaagattatctatccaatgtggtgacggagaaccaccagctttggtgctagaagagtcaacatcgctatctcatgtcagatcagtgactatctttgggcatgggaagcaactgccatctctttcaaacatgaaggctcttcgc

SEQ ID NO: 360749 - DNA, 269 bp, Zea mays
catcaatcggtaatagacgatccttgtacgatgacagccataatcaagaacaaaagatgtccacgcttcgtacaaggatcgtggacatcttttgttcttgattatggctgtcatcgtactctgttgttaactccacaaggacagtcgatggtactttgattcacatctcagcccgattccgttgtcggattgcctagtgcctacacttgtttttttttattttaccgtttcggcttcatctctgtgggcaattaagctgatactcgtgt

SEQ ID NO: 360750 - DNA, 276 bp, Zea mays
cgtccgctgctatgtggacgaggttggcgcgggtcgtgcgttagcaggccgcccgtctgtgttttttttttcgtggtttcggagtggaggagcgtttgggtgggggacgtctgcctctgccaaaaatgatcggcgtccatatgcaggcgtcgtatctttggaatagctggatagcacgcacatggcaggcggcggattcgtggaggacatgatcagggagcagagcctcctggaggcgacgtgcggcgacctcttcggccacatcgacggcctcct

SEQ ID NO: 360751 - DNA, 265 bp, Zea mays
gtggcacctaagatgaactcagcagcagcatctgatgctccagaaggtactgaactaggtccaaattcttctcgatccgtacaaactcctttttctactgagccagcagaaggagaaacaaattcaaccaatgaagaatccaagtcgcaacagaaagttggccagtttggtactcaatcatttaaagataacaacaaagaagctgatggaacagtaaggtctaatatatcgagatcaactgaggaactccaagaaccaccttcga

SEQ ID NO: 360752 - DNA, 121 bp, Zea mays
ggcaagcagcgagcgctctcttaacgagtcagagagccggcaagtcaggagctgcaccaaggtaatcatgcaaggaatggcggttggcagggcagtggacttgacaaggttagatgggtat

SEQ ID NO: 360753 - DNA, 130 bp, Zea mays
ctcgcccccgaaccttggcgtctgcactaccaaccgcagcagcgacactagaatggccgcagcgccgtcatccctcgcgtcctcccacctctccccaatcgcagcggtgtccactcccgccgtcccacat

SEQ ID NO: 360754 - DNA, 266 bp, Zea mays
ggaccttgaagaacagaattgaagcctcaccagagtgttcacaaaaggcttcatcaatacctcttttgctctgtcatggaaaaggtgcttatctattgtgtatcttaacatgccaaatttctatcatagttccatgcttggcttgataagcatctttatatgttgggagggttctaagttctaacattccgcctggagacagtatggggtttatacacgaccattgtaaaggcgtaatatatcatggtaaaccaagttttgaatat

SEQ ID NO: 360755 - DNA, 111 bp, Zea mays
ggccactgcccaccacgttactcggtggcccagccagccaaaacccttctcggctctcgcccagcctgaccggaacgaaacgctgaggcagcatcttccccgccgtcctcc

SEQ ID NO: 360756 - DNA, 277 bp, Zea mays
gtaaaatcacaaagccagcccatcacctcagtcctcacactgacatttcactctcggctgctggagtgtcggccgctgccatctgcctgccgctcactcccacgcgccgcaatgtgccactccccactcggcgccgccaccaccaccgcggggtcgctagcgctcctcttcctcctgccgctagcctcggccgccgccgccggcggcgatcactgcagcgaatgcgacgcccaacatcacggcgctcatgtccaagggcgagtgcaaggcgttcgcg

SEQ ID NO: 360757 - DNA, 184 bp, Zea mays
cccacgagtccgcccacgcgtccggtgatgattcagtaagctcaaatacagataacagcagttctgacagtggaaatggtggtcattataccgagcgttccttgacgacagatacagagagtaccagaatgactcattcagaacaaggaagcacgtttccagatgtagacatcgtcagacaaac

SEQ ID NO: 360758 - DNA, 271 bp, Zea mays
gtgaaggtgtaaggtgctccgcgacgcaacggtgacaagggaagttcagctagagtggaggctgcaccggtgggacaagacgaggttcatgtccgtgcttcggcggtatgcgacaagcggcaacccgaggcattggtaacttgctaagacatttgtcccatggtctccacgcattgcgtgatcaaattcaccaggttaaccgcgcaggcatgagactttcccttctactgtctaaaccgcgtcagcttttgcgggttcttcacctttaggg

SEQ ID NO: 360759 - DNA, 267 bp, Zea mays
agaacaagcttactggtgttctcccaaagcagctttctaatctcccccacctcttgcaattcaatgtttcacataaccagctctctggggatctccctcccggtagcttctttgacaccatccccctatcttgtgtgtcggataatcctggcctttgtggcgcgaactcaattcatcttgtcctggtgtgctaccaaaaccaatcgtgctgaacccaaacacttcttccgatccaatatcaccaaccgagcttgtgcctgatggtgg

SEQ ID NO: 360760 - DNA, 263 bp, Zea mays
cccacgcgtccgcccacgcgtccggtggccgctatcgaggccggccgcatcccgctcccgcgctacgctggggaggagtcgtccgcggcgacgcccgagggctccggtgccgccggcccgtccacgcccaaggtcggaggaggagggagcgggcaccgacgcgaagaacggaagggcggcgtcggcgctgacgcggggaagagttgctctaaggccgagcaggagctgcgcaaggtcgtgccgtggacggaagatgagcacag

SEQ ID NO: 360761 - DNA, 265 bp, Zea mays
ctttctgctacaccatatctagctgagagaaatggtgacaaaccttccagacagctgacaccacccaaacaccgtgaatatagtggccttcggaggaaggatgaaaattctactaagccatccatgacacctgttaaaaatgtgcaaagtgtcaagaaaattagtggaaaaccaaaagctgagggtttcaaaggtgtaaatattctcagaatgtctcgcattgctaaattaaatttgcaaagggaaagggacaaggagaactaca

SEQ ID NO: 360762 - DNA, 250 bp, Zea mays
cccacgcgtccgggtagccttatcatttcaaaaggcttctagtgaacaggatattttcaattcctagtgagaacttgtgtaacagaggaatccaagtatttcatatcaaagtttaaaagtcttatcgagggttcgcggtatggatgtatcctgtttcaaatgatttctcctaatgtatgaatgaaaacggttaatggaaaaaaaaaaaaaaagggcggccgctcgcgatctagaactagatcgcgagcgg

SEQ ID NO: 360763 - DNA, 257 bp, Zea mays
atttgccaatttggtatcctgttaacagatctttctcggggggcatgtctttttgttttttcttgttcttatgctggctgacattaccaatttgctatcctttaaagccattactatctggggcattctggatctttgtgtttagtgcagtgattctggtgaaaatgtccttaactgagttctgttgattattagacttcccctggttcatggtgtctcacaggtatctctgatgtcggagttgccaaattgggaga

SEQ ID NO: 360764 - DNA, 291 bp, Zea mays
gccggaggcctttcagacggaggggaacagtatcaggtctgttgcaactgagctggcagtggatattgttgtcactggtagggatgtcaagttctaccgtcacaagttccctctgctgtccaaggagctcgggcctacagacgctggttgcctcgacaagcgaggagggcagcgacgaggtggacatctccgacatcccgggcgtcccggcggcgttcgatgtctgtgccaagttctgctacggcatggggggtgacgctcaacgcctacaacgtgctggccgcccggtgc

SEQ ID NO: 360765 - DNA, 282 bp, Zea mays
cccacgcgtccgcagaactagattagagatctgtactattctagttcaccgacctaacgcacttgatctaccgacagagtatcaggtaaatggcactattgggtagatcaagtgcgctaagttggtgaaccagaagactgcagaactagaatagagatctggactattggattggaccctcgttagatggtgtcccaaccggccggggagtggtggggatcttgatggacacgatggggtggcaaagccaagggattgagagtggatggcggcgataatttt

SEQ ID NO: 360766 - DNA, 184 bp, Zea mays
acggagccgttctgctggtcttcctagcgtgcgtcgatcatgtatgggttgctgtcctgatgccttcgccgcttcaccatttatctgaggtcttgagaagtgtcggttcccggtctgacgccttcgctgctggtgcgtcgacttcactctctcttcgagaaggatgaaccaatcctgtatcagg

SEQ ID NO: 360767 - DNA, 302 bp, Zea mays
accacgcgtccgggacgcgtggctgacgcggggcagctggaaccgctcgctcacacacaacaacattgtttctctcccatcccaactgcacaacgatgatgacccgaagaaactcccactcccacccccagaaccgctccctcgctctctccctcttgtcagctccacgatctgcacgtctaccagctcgctcgctccctccctcacctcaactccacgatctgctcgtccaccagctcacagatgcagataaatgagggcatttgacagcggatccgagcgggcgcaaaggaaggaaagca

SEQ ID NO: 360768 - DNA, 295 bp, Zea mays
tttctgtttccctcatgggtaacagaaatgaaggtgttcctgatagtgataaccgttctagcctcagtgttactacagatgaaatcagttattcaatctgcatcgtacaggttgaataactgatttcatctgtagtaacactgaggctagaaggttattcaacctgctgcgatgcagatttggcagtggatgaacatttacaatgcaccatgttttccagtgaagaagcgacagcctttctttctcaaagatggaaagaagcaatagccgccgatcacgtgaaacttgttgtgtc

SEQ ID NO: 360769 - DNA, 300 bp, Zea mays
cccacgcgtccggataatcttacgttcaatgataccatgatagcacttcaattgatgcgcacacagtttccaaagctggataaggttttggcgcagcattcattttgcagtcacaattgtatagcagtgtgaaggatagaacacaagttgacagagacttggagtcatttaagaaagacaaagtgttacggatattcaaacttagttctgggcaagatgatcatgcaatcatgttcatggatgattatttgaaacaggtctcttttgctattaaacggtcagggggtaaagaccaagatg

SEQ ID NO: 360770 - DNA, 299 bp, Zea mays
cccacgcgtccgcttatcttctatcgaggatgcacaaagatttgagtctatattcaaaatgccaagaagagccttcgactatgtctgcaatttggtgagagatgaaatgatggtgaggtcctgcagctataccttccttgatggcacagtgctgtgtttggaagaccgagtggccattgctctgcgaaggctgaactctggtgggtcactggtgaccgtacgatcctctgttggagtgaaccactcaaccgtgtcgctgataacctggaggttcatcgaggctatggaggagcgagcga

SEQ ID NO: 360771 - DNA, 296 bp, Zea mays
aaaacctcaccggctccattcgaccattccatcctttccttatcccctcccgcttcgtctcccttcctggcttcctttcttcgccatggcaaccatgtccctccgctgcctcgccatggccatggccgacaccgcgctcccgcccgcccacaagctcctccccacagtttccctcccgctcctctcctcgtccacccgcgccgcgccgctcctcctcttcgccaggcgccgcctgccgctcgcgcccctcgttacctcctccgacgccgttgaggccaagtcggcagacgaggagg

SEQ ID NO: 360772 - DNA, 286 bp, Zea mays
ccgcctcggcgacggcctcgtcacgtcctaccggcccaaggtgtactggaaggacgacgggtgccgggaggtgctgcacaccgtggcgggcaagggcggcgtcggcctcgtcctcaacgacgcgacgtcctcgtccgcccagccgtcgctggtcgacggcgccgagtgggccgtcagggacgccgactccgactcctacgacgccgtgcacgtggagctcgggtgcaccatagggaagctggacatctcgtacgtggtgacgctgtactcgctgagcatggcgacg

SEQ ID NO: 360773 - DNA, 285 bp, Zea mays
ggccgccctttttttttttttttttttttcacttgttcaaaaagatgctataataaaagagaatgcagacaatgcagtggccgcaccactatgtagtgtactgtacaaacatggttcagatttacaaagctaaggatagtagtaacagtctgaagctacatcttttttgttcatacgaccaacccttttcccactttttttctttttcgattttcgataggcacccgttggtagcaactagacgatcaaaagaagagagaaaaaaattaatatgtacagcacacc

SEQ ID NO: 360774 - DNA, 280 bp, Zea mays
ccgtcttccacgccgctgcagtgcacgtcctcctcaagtccctgctcgccgtcctccgcacgccgcacgccgcgctcgaccgactcgccgtatccctcccagaacccgacgcacccaagctccagatcaccctccactgcctcaatggtgtgaggaagacgtactggatcgtgtgcagcgcagagcccgaggtgcagtcgctgtcgctagaccggggacggttcccgagccgcctagccattcggccgcgggagctggcgcggctgttgtccaacttcca

SEQ ID NO: 360775 - DNA, 197 bp, Zea mays
tccgggcgcggctggccgtggcgctggtcctgccgtacaggtactcgacgccgatcctggcggcgacgggcatgtcgtggcggctcaaagggtcgcgcccggcgctggcgccaccgtgctccggcgggcgctggcagctgttcgtgtgcaaccaccggacgctgatcgacccggtgtacgtgtccgtagcgctggac

SEQ ID NO: 360776 - DNA, 265 bp, Zea mays
gcagtccgcagacgagagtggaagcggggcacagacaggaagagaagccagtggcgctgtccctctcgctcgcaggccccgggctcgtcgccgtttccggctgcgcaggatcctagaagctacccgcagccagcctcgcattcccggcgaaatcgttcttgggcgcgccgctgtgacgcaccgctggctgcgtcgcgtcggcgctccggcgcaactcgggtaggtccagcacgtcgctcgaggtggtcgcagcggggaagaaggg

SEQ ID NO: 360777 - DNA, 291 bp, Zea mays
ctttagaccaagaagcagcagtgtcaaccattctttcaaattcagagcaatcaacctcagtgtcgaccattatttccaatttagaccaacatgcaacagtgtcaaccatttagtcaatcattctttccccaaggttcgcttcttttcttttattaatcgtttgattattgtttgtttcagctatttatgtggcaacaaactcactagacatatacccccaggactagggaacatgagtagacttagctacttgtagattattgttaactaaataattgtgtgatgttgttg

SEQ ID NO: 360778 - DNA, 286 bp, Zea mays
cttgttttcctggctgctgctgctctgcgcctctgccccagttgctcaacaagaagcggaagaaggcgctgtttgacgctctggagaaggttaaatcgggtaaaagattgagctgcatttcttttctactgcggaacttcactgctgtcgttcgcaggcgaagtcgaatttgacgcgttttttttttgcgagttccgtgttcacagagctgatgactctggggttcatatcgctgctgctgaccgtgacgggaaggtacatcgcgcgcatctgcatcccggaggag

SEQ ID NO: 360779 - DNA, 291 bp, Zea mays
agggagaagacttcatctgcacgtgctgctgatgtgcattagaggatccgtgctgataatatacagctgacacccacaagatcgactggataagttcgagcctgacggcatcatgggttccggcgatttgagctcggagatggagaggacggttcttggcctgacgctgtgggtctggattgccatcggcgtggtcgcgcttctcgtggcaatcctgctgatgatctgcatttgggtggcgtcccgcctgaggaccaagagaaccatggacagcctgaggcagacgcagat

SEQ ID NO: 360780 - DNA, 307 bp, Zea mays
gaaaacacccaaaactacacaagctttggacatggtccaacccacagcagtgccaacagcaccttcctcagtcaaaactactgcaccagatcatgtcagcttgcccccgcccccattacctgctaaccagcagagtgttgctcaactttctgccccgttttcatctggcttgtctaatgtgggatcgaccatggaccctcctactatttcagcaaatccaccacaatcagcacaagcaaaaggataccttatccatcagatgccttcatcagctcctcagccatctcaacatccaaatatggcccta

SEQ ID NO: 360781 - DNA, 305 bp, Zea mays
atgacatccacacgaagaaaaggtttaatagactgcatagcacagcaaactgcaaagcatgagtctaatagatgccctgcaagtgatcctctggacaaaaagaaaaggaagctggttcttcagtactaggtattactaagtttgggtgccgaaatcttgtattgctgtatatcctttccttttttgctactctttctctgtatatcttggttcagcaactctgctgttgtcaacttcccccctaatctaattttgtagtcataggctttagggtggctagattggtttcagccttgcggggtata

SEQ ID NO: 360782 - DNA, 300 bp, Zea mays
ttcttgctgacagagtacccacaggtcctgcaccagcggcggcatgggaaagaagattcgcagcaccgatggcacctcgacgccggccaggtccatgaatcaggccgtgtcgctccgcaggagacctccgggatgacgcgcgtagacgatggctccctgctgagggtcaagcatttgcagaggctagcggcgtgggcgggcccggacgccggggtgctcccgatcggcgcgctgctggggcgccgcctcgccgcgagctccgaggccgccggagtacccctcaacgcggccactttcctt

SEQ ID NO: 360783 - DNA, 300 bp, Zea mays
ctcccttcgcgatgccgacgatttcctcgcgttgcctcccttcgcgccgccgcctccctcgcgtcggccgtcgcctccccccacatcggccgtcacccctcaccggtgagtatcgtcctctcgttcgctcgctctctagctgtttcctttctctgacgatgcggatccccgtcggatggtgtggatctaggcgaccaacctaccctcgacctcctctgctgatgcggatccccagcgggtgctgaccgtgacgggacctccccgtgaccgtgctctgctgcgtggtgcgcgccccgctcc

SEQ ID NO: 360784 - DNA, 316 bp, Zea mays
gaatgctatatcatgcctagcagaaaacaccaatcacgttgtggtctttgatgaggttctatctgtggctggaaaagatatctgtacaaaagacataccaaggattcgtggaggctgggccatacaggatgttttttatgcattttcccagcacaaggagcttgcacttctattcctggagtacactttatctatacttcacaaagaacctgtcataataaacagttctgagaagggggagagtacctctgagtcattggctgatgactgtattctacaggcaactatgtttgctctcaatgcatttatgagaggt

SEQ ID NO: 360785 - DNA, 307 bp, Zea mays
caccaagttctggtacacccactcaccctgttgcaacatcagtatatgcatcatctggcgcaccaaatgcaccattgatgtaccctccaccaccttatagttattccccatactatcctcctccaccatttcagccaccacctccaccaccactggctagtgttgatccctctcagagtattgcaactgcaccttgggctacccacagtgcagtgcctccaccaccaccacctttgtcctccacaaccgaccagcctactgctccctatggtgccgatgcagaatatgacaagtttatggcagatat

SEQ ID NO: 360786 - DNA, 304 bp, Zea mays
cccacgcgtccggtccatcgtgagcttctgatgccaattaggactaaacatgcttcctcgctgcgctcaagtgggagaacaagaaatcagcctagacactagtcatctgctgcaacagaaaatggtatagcacagtgctcctggactacatttcacctgtgcccaatacttgctggtagcagcaattcctgatcattagaaatcgtgtttgcgcctgcagcacccttattcacttaagagttccaagggagcaccaattctgccacggccagtcttcgttttcttcatcgcgacatttggtttc

SEQ ID NO: 360787 - DNA, 298 bp, Zea mays
gttgaaatttactaggtgatgccaacggagataatattgtttcacaatgttgttctttatagaagggcatgcatagtgcagtggtcattgagtcaccaggtcacgggtttgaaacatcctctttccatttgccggggaaggcttgcctcggtttatcgttccccatgcctcactcatgtggaagcctctgacactgggtctgcaccccttttaatgttgttctttataatattgcatctgaaataattagctctttatctatactagttagcatacatcagactctacataatactta

SEQ ID NO: 360788 - DNA, 304 bp, Zea mays
caaatggtgcgaggagtttgcttggaattcgggtgactctgctgaggttgaacgtgcctggaggaacgagcccagtatattgcagttgaatgaagaggaacttcttgggcaaggaatttgcgctggatgggctgatagagttgcaaggaggattcacacctatttgaaaccatcagaagacgatcgaaaggttcgagccgttcgttatcagtcttgtgcacttgatgatacaatatatctgcagcgatcatcatctgtcgcccaagttgccccagagcttgtagtttactcggagctacttagt

SEQ ID NO: 360789 - DNA, 304 bp, Zea mays
gttggaaacactctgaactctacattgcttgagaaggttatagactttctgtcaactatcatcgataatcaagatgtgaccaccattcttcttcagccattgataaaagtgggtttgatcaaccatactatcagtttgttagcaagtgagattgagaagctatcaaatgagggtaaattagacaggtcagattcccttgatttgatccttaatttcgttgaagaattatctgccatagacagctgttcaggagttatgtcagaaagtaatcagctgattcaagtgcttgaaagcatagttaagt

SEQ ID NO: 360790 - DNA, 305 bp, Zea mays
cccacgcgtccgcccggatccgcatggcgcctctgcagcccgcgccgctcggcctcccgtagccgacgcccggccccgtcccaggctcatctttgcacagagtcattggaggaagtttgatgtttcagcagtactgtgacctttattagatgtctttccgcagcattgtgcgtgatgtaagagatggctttgggagcttgtctcgaagagggtttgaggtgaagtttctgggccaccgccgaggcagatctcacggtgctgtccatgagctgtgtgatccagccccagtgatccagagcagttgc

SEQ ID NO: 360791 - DNA, 293 bp, Zea mays
cccacgcgtccggcgcgctcgacactttctctagctagttgctctactagatgtcgggtatagagctgcctgcaatctgccgctgacaagggactctctgaagcgactatgatgtcgtgcgctcctgtctttctgtcggcggtcgtggcctggcttgatcaggctggtacgcgcattgcggcaatcgctaccaggatatagagatgtcctggggcgactgtcgcggcaaggtagtttacggcgggcttgggctggaccttacgctggttctcactaccgtctccgtgttccag

SEQ ID NO: 360792 - DNA, 298 bp, Zea mays
tcttaagatttagatctaggattagttggtgtgcaaaaataagaatcgtggagtaaattagatattgcttggtggaggaaaagagaatgaagatatttcttcgattttaacctcaaccaccacaccctttattgttctgagcatcagacacgtttgttccctggaaaccaccgtagctcatccactcagccatacgcagcatgcccaggatgcaaagcttatcagccacgtcccaaccaaactcctacacgccatcttcttcccaggccgacaaccaaagcctgagcctaaaccagaa

SEQ ID NO: 360793 - DNA, 310 bp, Zea mays
cgccaaagtacatacgccacttgcgcctattccaccgatgcagtggctgtcagagaaagggactccacctgcatctcctaaacacagtacaccatgtttccagcaacaatttggtagcagtgggcaatctgatgagaagccaagccaagagcacgaggcttcagaccacagcagcaatctgctgcaggagagcgtgttcttctctgcggcacaagagctagcgaagatgtcccctcctcctccttgggtgccaaggcccaaatatccactgcttgatgttaaggcagttaagctacggaatggtccaagc

SEQ ID NO: 360794 - DNA, 303 bp, Zea mays
gaactaactcaatcaaagtgaggtgctgccccaaaagtcaacacttacccagaggccattaagggtccttcctcaaccaaatttagtaagggcaagcgagtttgttactagaattttgcgcttcgtttaagtatattgaagtctacaatatctggacaagtctaagatttgagacaaccgtgagttcttgaaaaataaattcgaaatgatttttattttactactgtatacgatggttagattgatgttggtaactgactaactgttatgaatactgcgatatatatttctatgtgctactga

SEQ ID NO: 360795 - DNA, 133 bp, Zea mays
ggttgatgaagatttatgtgagctgatctcacgaatcaggccagaagatgggaacacggagttctgggaacgccgttgtctgggagaaactctatactatctttgtgaagaagatagtaaagaagacggtcaa

SEQ ID NO: 360796 - DNA, 307 bp, Zea mays
ggccgcccttttttttttttttttgcgaacaatgcaactagtatttcattttggagttcactcagggaagtgtcatccttttgacatccaatctcgacaagtgaaattacagtactgatgtggattttgaacaccaaaattccatacagaaattggaatagctccaccgcaaccttttccatttaaacaggtcatcattgtcacaggatgacaactagtttgacactacttcagcttttgtaagtaaggagatgagaaaatttgtatatctacgaagaacaaggagaaacaatttatatcccaacca

SEQ ID NO: 360797 - DNA, 306 bp, Zea mays
atcctagacgcctcccatgcgggtggcagtgtggaggttgggtggggcaacctggacgaagaggatgaagacagagacctgcagaataaacggcttagagtacaacactttggcgaagaaggcccactgcattctggtcttctattttgcagagaaagcccacttcattctgaacacgaattggaatttggcttgtcccttttcccaaatgatggtagtgagagcctaagagatgccaataacgagatagtggatgatgcagaaaacccaggtgaaagaaattctgaaggtgttggaataagaatg

SEQ ID NO: 360798 - DNA, 295 bp, Zea mays
ccgaatctcgttccctcaagtttcaagtcctgccgtcctggctccatcgctgccgccggatgatccgcagccgcagcctcctcccaaccttctcacaaatcaatggtctgctcagccgtaacctggctgccaacgaggcgctgcagtggctggacgacgaactcgcgtcgctcgcgctccccaagctcgactcctacgcgtgcgcaaggttccttcagcgctgcatcgctcgtggtgacgcccgcgccggtcgcgccgtgcacgcgcgcgtcgtgcagcgcggaggggtggcgca

SEQ ID NO: 360799 - DNA, 234 bp, Zea mays
aaatgtacgggtaagctgagctcccagcacaggcacaacaaccgacgaccgtcacggcagtgtgggaactttcgccagatcggcctcctcgtcgcgagctcggaggggaggggagcacgccatcgtcgtcggagttgaagccgaagtagagccggctccgggtcgtcgaggtcggcttcgccgtggctgttcccgcgtcgtcgagaccgcggtcgacgagcgccgcctccgcat

SEQ ID NO: 360800 - DNA, 231 bp, Zea mays
cccacgcgtccgcccacgcgtccggagtgacaatgctcacccaggcgcgtgccggtgacggttccccgagagcgtgaggcggcggcggatctcgagagcaaaaggcggtggtggcctgagacgcgcgcgacgatagcctccggacacacgaccgacggctactcgctgatccggcggcggggcgacgatggctccccgattcggtggtgcggcggcggtggcaccctaatc

SEQ ID NO: 360801 - DNA, 289 bp, Zea mays
ccgaggagtaggaggacgcgatgaaggcgcacgctagctaccggcggcgctcaagaggcggagggggccgcgagtggcggtgcttgcgctcgtcctctgctccctgctcgtgcccttggccttcctcttcgaccgcgccccctccgggtacgtgacgacggaggagcggcaccgacaggaggtcgttctgccttcgttggatcacgtggagaagaggcgtcgcagtggcgctgacagtggacagcgacaggatgcgccggagaagatccccagaagtagtgcaggaacg

SEQ ID NO: 360802 - DNA, 312 bp, Zea mays
cccacgcgtccggcgggcgcacgcagcggcatcgcaggacgcagcaaagccctgaaaccgcccccacgtccccctccccgcaccgcagagccagtcagaacagtaacaccggagcggcagctgcagtggccgaggccggagcacgcaaggcatggatagataccaaagggtagagaagcctcggaatgacacaccaatcagccagaatgagattaggattactactcaggggaggatgaggaactatatcagctatgggatgtcgctgcttgaggaaaatggacacgatgagattagtatcaaggccatggg

SEQ ID NO: 360803 - DNA, 313 bp, Zea mays
ggtgtgggggtgctaatgtagtttcctagtttttagttcaagtaatttgctccctagatgtcagttcgtatgagaggatcacatgatgaaacttcatctgtcattcttcattgttatagtctgtaaaactctgactattggcttgtctgttcttaggttgaccttatgtcacaaaaaatatccagttttttccagtctttatttctaatgtttatctccctttacctatgagcagggaagagctacagcagctgaaaggaattggcgcgaggagagcagaatatattctggaattacgggaggactcaccaaa

SEQ ID NO: 360804 - DNA, 317 bp, Zea mays
cccacgcgtccgatagcattcaatcttcatgctgttttcaaagaagtatgcaccatcagttttctaatactctttccgttccaggttctaggttactttagctttgctctaagtcaaactctaactttggccaagtttttagaaaaatatgtcaacttctacaaattaaaataaatgcactaacaagacatgttatggagaattcatgtgatgttattgttggtgtatttttctataagtttgttcaaagttagagaaattggacttaggtaaagaaagcgacttgtaattagtaacagagggagtatcaaacatct

SEQ ID NO: 360805 - DNA, 314 bp, Zea mays
acagacatcaaatatgcagccaaaggttggtagagggagcggtggtgccgcagggccacaggcgggtggtaattatggcggtggccgtggaggacctgttggacctggtgccggtggtggagctggtggaggcggtggaaatttgtgaagaggtggtggaggcatggggaatagaggccctattggtaatatgaggaacaggatgggcccagctggtggtggtcgtgggataatgggaaatggggggatggttgcgccgccgccaccaatgatgcctccaggtggaatgctggggcagggttttgatcctactg

SEQ ID NO: 360806 - DNA, 310 bp, Zea mays
  unsure (1)..(310): unsure at all n locations
cccacgcgtccgcccacgcgtccgcgacaacagcctcgtccccgccgccgcgctccgcctcgtcgccgaccacccggcctgctacgacatccagggcggctacaaccgcgcctgggganactacttctactacggagggcctggcaggaacgtgcactgcccgtgatacatgatccggccggcgaccatgcatgcatggcgatggcatgaactgaatgaacgaagaagcagatacgtgcacagatacatatatatatatatactactacagagattcagagacggatcacagtatgcggccgtgccggag

SEQ ID NO: 360807 - DNA, 299 bp, Zea mays
ctgacattgcagtaattgctgcagatttgagcatcatgtctcacgtgatatagcgaaacacagtgttacttgctatatgttacttattttgccctttggataatctggctgatttactgtagttgtgatttgtaatatgatgcggtaacatagtggttaatgatgggcatgtgattcctttggctgtaacatttcaaattgatgtttgctaatggtagcttgttgctcatggttaaaatcatcatggatattgctcctggttggctatgtcctcctattagttcgtatatgcagaactt

SEQ ID NO: 360808 - DNA, 320 bp, Zea mays
cggacgctggttttcttggaccttttaccatttctttggcccatttcttttatctcccatttccgccagttcgcaatccctaatcctgatctaccttaagcgctcgtgagctctctccagtggctaaagattgcagatttgagttatagtccaagaaacgggtggtggtccgccatggatgtgatgtccgagcaatggctgaccgcggggagggatctattctgtatgccaaagagcccgccggtgccggtttcctggccgccggcgtccgccgcctatgcatagcgtgcgcatggcgtacacttcggacggcaccgctg

SEQ ID NO: 360809 - DNA, 319 bp, Zea mays
tgactctgttgctttgtcgcagctagtgagcattataagtatcacaaagtttttgagcttaagggaaacatcacttacagatggtgcactctgcaagtttgttggctctagtctggagtatcttgacgtttcagagactgtggtgcgatactgattatatttctatggtatcattagcaccagttattcaaagaaactgtaaattgaactgtctgaaaacagctggatgctgtagtcttctgttgcaatgtgctaatgtagaacatatcaatggtaacaagtatggagattttctacaggagttaggaactacctactg

SEQ ID NO: 360810 - DNA, 316 bp, Zea mays
cacatcttgctccgggccttgctttaaagcggtacttactatttagtgcttcgtcctctcacaaatctcatctctgctctcgctgttctcgcgactgttaggtaaaataggaaaagaagagatggataaagtcttcatttgttcgatatttcgttcgcattcagtcatcttcgtatcggtgcaggcgcaggctgctgctgctggcggctgctgcgggtttcagagcccagagagcagaggtatcagcatgagcggcggcggctcgctgcccgccctttccggacctgcctgctccagatcattgtccatcagcgag

SEQ ID NO: 360811 - DNA, 310 bp, Zea mays
ctcggcacaagtgatctgaaggttgtgctgcatggcatgggaggggtagctgtgaagatgattgttcacaagagcattcttgctgaaaatagtaccttttttgccgatagaatctcgaggcagtctccggtgtcatgcattgagggtccagattgtgaggatgttgagatttatgtcgagactgtttggtttatgtactgccatgacgtcaagcagaggcttatcaagcaggatgttccacgagttctgcgaatcttgaaggtcgcagaatcactaggcttccgtgcatgcatcacatcatgtttagact

SEQ ID NO: 360812 - DNA, 309 bp, Zea mays
cgcagatcccatcgaaattcacggccggcctaacccaagccggtcctccccgactcccggcgacgaccaatttctccctggtattgcatctctctgtgtctctgcaccttatcgctatccatttccttcgttcaagcaatcctgctccagcacggcggcgttctgggccggcgattaggcgatgctaggttcccgtgttagtccgtgtcttagttggtggtttcctgcgttaagtgatttccctgagctggataagcatccatgatggggtggttaggtgtacttttgccgtgagttgcctggccactg

SEQ ID NO: 360813 - DNA, 309 bp, Zea mays
cttgcttgcattgcatgtaagcatttctaaggccggccttgcgagagttgggcagctcgatcgcccatcgctagctacgagcagatcagcaggaatgcacgcatcactcggcatgtcaagctcaagcagcagcagcagcaggggttggtcgtcgtactcccccctgctcttcgccaccctgcttacactactactctgctcccagctcgccattgccaaggagcagtaccatgagttcgtggtgaaggaggcgactgtgacgcggctgtgcgggacgcagcagcagcggatcatgacggtgaacgggca

SEQ ID NO: 360814 - DNA, 321 bp, Zea mays
cagcgcgcaagttctggaagtggaagtggaagctttcgtttgttccctttcacccgccttcttgtcaattgctcccaatacccaaggtcccaacaactacaatccccttgacgcatttgcttcatttgcaccgccggcctctgagcttaccatcccttgtagcccagaagaacgcgcaccaaatgcttgcgacattgtcacaatggccgccacgtcgtacctagcttccttctcccgcgcttcgccagcaccagcggcggcgtctgcgtgcctgtgcaatgtccatgcctggccacccgcgctgcggcctcggcctcgccg

SEQ ID NO: 360815 - DNA, 320 bp, Zea mays
atggagtgatgctcatttcttcactgacaaatctaagtttccttgatctaggtggaattctcatgacagacaaaaccctacagtctttacaggtattgacaaaacttgagcatcttgatatatggggtagtgaaactacaaatgagggagcttctgctctgaaatcctttgcaaggctgctatccttgaatcttgcgttgacacgtgtcaaccatttatcaattcctccaaccacaagctatctaaatatgagcaactgcgaaattcattctatttgtgatgtggattctgaagttcctgttccactagaaaactttatt

SEQ ID NO: 360816 - DNA, 318 bp, Zea mays
cggaccgtgggcgcatccaaaagggagtgttctggcaccgatggctggcttggttgtgatgattcccatgccagacatgtatgtgtgtggatgtttctggactgcaaactgatgtgactctagcatcttattcaaagggaaacagcaaacacatacatgtctggcatgggaatcatcaccaccattacagacagactgtaagagctgagcatgcagttgaagatagctcccaacctagtcatgcttctgaagggaagtcgcatccaaaagggagtgttctggcaccgatggctggcttggttgtgaaagttttgcttg

SEQ ID NO: 360817 - DNA, 320 bp, Zea mays
ggcatgcagattgatggaagtgaagatagtgctgataaatcagttgaagaatatcctacaaaacgcagacgattgtttttttcaatggatgctaccacttcattgatggagcagttagctatcctgaccacagcagctagcccagatgttgctgctgctgctgctgatgccgcaattaaagcatttggcaatgaaaacccgcaagcaaggaaagcctttcgcctcaacgagcaagaatataagactaaggcttttgcttctaatcatgtccaacagattgaccacaaagttagcaataaggatacggcgatgcatggcca

SEQ ID NO: 360818 - DNA, 311 bp, Zea mays
atagcgtcatgctatcttaggttgtttggacagttccttaggatagtgaaatgtcttagataatggagatgatgttcactcaaacatttctcccgatagatatacaattgtaattacaccagaactgtacttacaattaagaacaacatcagctgtaacattagtagtaagaaacagttcagatagtgtgaagaagttcacctgttggcctgctatttcagatactgtgtgtgttcctgaaacttcatggagacttccatatctccaccaggcacatcaaagcagtcagctgtccgcaaaccttctcctgg

SEQ ID NO: 360819 - DNA, 312 bp, Zea mays
gccctgcgatgagtgctgctacgtccatggctgcttccgctccagtgacgcctaccaagagtgggagagacttttttggggtgttcaagggcctgaagcagacagtgacgaatgggtgggtggcggtaaggccgcctctagtggaggaggagattgacacaaagtaccttgtgcacaaggccaagcttgaggacttggagaaacatctggtgacagcatctcagcaggcagaggcatttgttaaagcttttgacgatctaagatcaacgacaggtctcttgggaatgtcattcatcaaactggctatgtttg

SEQ ID NO: 360820 - DNA, 309 bp, Zea mays
  unsure (1)..(309): unsure at all n locations
cacattttctgcattatctctaaatagccctttgtatatgttgaaaacatgtattttcttggtttgtatttccctttatttgatcaaagactcaaaataaacatctggtatcatcacggatanaattattacagcgaacattcagtgaggcattcttgagttgctcattgtggaggcatctaattgagtaacttgtgtcatgaacacatggtttggttttcctgaatcttttttggcagcattttgtgtctgaattttgaggatttgcctcttgtttcttggcacttcagattttgcaacttgacatct

SEQ ID NO: 360821 - DNA, 140 bp, Zea mays
cggaccgtgggcgcggacgaccgtggctggaacccgctccatgttgctgctcgcaagggagacctcaaggaggtccgacgtctcctggatgagggggggctggatgtgaatgcacctgcatggggaccaaaatgtcctgg

SEQ ID NO: 360822 - DNA, 108 bp, Zea mays
gttttgatctatcatatcctttggtaaaaactgcaaatctctcagcagtttcagtacagactcgaaaaggggaaagatttgcagttttgatctatcatatcctttggt

SEQ ID NO: 360823 - DNA, 283 bp, Zea mays
tcctcggctcctctcctcgcagaagaatttgttcccccaatttggagttggaaaagcggcgaccccagaaaacgggaggcctcgacctcgctagtctccgttccattcgaaaagccatcgcctggtgagcgagaaggggaaggtcgatggcgacgtgctcccgcccgctcttcgtctccaactcggcggcctccgcctcgccgtctcgggcgtcctttcgccgccttcacacggtcgcagtcgtatcgatttgggaaccctgccccacccaccactgcgggct

SEQ ID NO: 360824 - DNA, 276 bp, Zea mays
cggacggtgggcgtgacgcgtgggtggtcactgctgttggtggccacggcggttatccagggggcaagaagtttgtttctgcggaacagctcagggagacactgtcatacctccgtcacgagaaagcgctcatagtcaaattggttgacatcgttgacttcaatggaagtttcctggcacgtgtacgcgattttgctggtgctaatcctattatacttgtgataacaaaggttgatctccttcccagagatactgatttgaattgtataggcgact

SEQ ID NO: 360825 - DNA, 207 bp, Zea mays
gcgctttatagatagaaaagaatatatatactgtagaatagaaccacagaaatccatccagaaacaaccgagaagacctgcggtgctgcagggaagagagaactcagtggtgaagaagaaggaggaaaaatcaccatgctggaccatctcgtcgggctgctgaagctgcgcttggtgaggggggtgaacctcgccgtccgcgacttc

SEQ ID NO: 360826 - DNA, 303 bp, Zea mays
gagggagagcaccgagagcgacttccagaggtcccgccaggtgcgggagagcgcagaggtgcgcacggcgtcccggacgtcgaggcggacgaggatctcgtcctgcagctccgccgggagggaggagagccggtcgaccgcagccgccgcctgcttcgcctccatcacgcctccagttcaagagtctccgcctctccttttggcagcgactacagccgtacagcgtactaggctgccgccggcaaaggctccgtgcgtcggatcctctaacggtccagacacgtgatttgattatcggcctat

SEQ ID NO: 360827 - DNA, 304 bp, Zea mays
cggacgcgtggcgtgacgcgtggggaagccagcagctcgcggcgaatctcccttcttctccggtatccaccaccgcttcatctcggtaccgcgatgcgtcgacatagtcggcaccgccttccgccttccgccgcccagaccggcgaccggctacctgtctatgctgtcttcctgcctccaggatctcccacgacggcacgaattgcctccgcccgtggttgatttcggttaggccttgccttgccgcttaattcagatgaggtgttgttgaggtcttgaggacatcacgtcgtcactagtggac

SEQ ID NO: 360828 - DNA, 297 bp, Zea mays
aacgctttctctcctccgccgctgatcccctctcgatttgttgtgcctccagcccccgattcctaccgttgtagtccagtgatccaatcgacgtcgacgactccgcagccaccgctcctctcctctcgtcgattcttccgtctctcggcgtcgaatctcatccggccagtgaccacactctactggccgcccggaaggagttcttccaggattcgagccgttgctgccctcacctctgcaggcccagcgtcgagtggagatccaatcggaaattcaactgacttcgtcttttatcct

SEQ ID NO: 360829 - DNA, 211 bp, Zea mays
cccaggcgtccggttccaccgtatctatcagtatcagtcgacgccgacgctcctccatcctctgccgagtgccaggtcgccgttttttttttttgcaggtcttcgtcgctgtgctccaaggccggcgcgcgagggatccgaggggaaggatgatggcggcgatgcgcggcgcggtgcgggtgctgtgcggcgcggagaaggagcgggtggt

SEQ ID NO: 360830 - DNA, 316 bp, Zea mays
cccacgcgtccggaccaggcagagctctttgttctcagactatctcgccaaagtggggttttagggcttgctggtacagcttttgtgtctcagttgtctgcatctaatgtaaaatatgatggggagagctttcgacgttatggcatacttcttgtgcggcctatgcttgagttttcaaaagatgacatgtataagatatgtcaaggtagtaatcaaccctgggtggaagatccaacgaatactagtatgaagtatgctagaaaccgaattcgggtgtccttaagaaaattatccacccgaagtacctttctctcag

SEQ ID NO: 360831 - DNA, 317 bp, Zea mays
cttcgatcgagtctgagagatttggcaggaggagggaaacaaagcgaaagaccccatcttttttgtctttttggttcggtttcgtggttgcttcttttggaccccgcggaggagcccaccgtttctacaaaaacccaatctttgctgccttctcagcggtcgagatcgataggtttccagatctgaggctccgtgttctggctgtgagatcggaggcgcacaatccgagcacgcagctagtagggaaagtatccgagaaaagttgcagattttgctgggggcaacggaccagaacaagttactgcagaaggaaaggg

SEQ ID NO: 360832 - DNA, 219 bp, Zea mays
actagttctagatcgcgaggggccgcccttttttttttttttttttttttttttttttttgtagcgcaaaatcgatcacttgatagtattaacattacattgatgtagacatgctgtcatctttgtagctgtactctaggcaagcaacacgaatccagtggcttacatcattcatttgtatgctgtagtcatcttgtaatatatggcccatttctttgc

SEQ ID NO: 360833 - DNA, 311 bp, Zea mays
gtgtgcctaacaacctattttaacagacaaattcctccctttacactaatcttctaacatttttttacttctgatgcgagcatgtacttatattggtatttctatatagtagaagaaatttgctcttctacagcagcagcagcagcagcaaagtcatagccagcagcagcagcttcagcaacctgcgctctctggacagcaatctcaaagttcaaaccagcttctccatcagcatggaaaaccaggagttgggagcttgcctattgatggaaacttgccaaactcttttggatttcctgaacaaggatcaa

SEQ ID NO: 360834 - DNA, 302 bp, Zea mays
cggacgcgtggtacctggagcgccgggcgcacagatctgcccacccctggacgctaggcgctgcccagctcttccctgccagccggtcgcggcggcagccagccagcacggcagggctgctgttgcctgctcttgtcctccggcacagcgcagggtgtcggggtcgctcccagctggccatcctctcggcccccttgttgcacagcgaatttggtgaatccccctcccctctcacgctccaccactgatcatggggctactcagcattatccgcaagatcaagcgcaaggagaaggagatgc

SEQ ID NO: 360835 - DNA, 298 bp, Zea mays
attcaaccttcaggcctgaaatgatggaaatcgaccatcgtctcaaggcgctctatgttgacacaaacaagcttgagggcattgatagcccagtggaacaaatcatacagtggcttacaggaaatgggaaacacgatcaagaactaaacataatggccatagtgggcttcggaggtttaggcaaaactacccttgcaatgcaggtatacaataaattcaaggacaaatttgattgcacagcttttgtgtcagtgtcaagaggccccaacatcaagaaagttttgatggacttacttaa

SEQ ID NO: 360836 - DNA, 115 bp, Zea mays
gtccgcgaccgcgcgcggcaggaggtgtgcgtccgcagcgccgacgggtacccgatccggtgcgaggccgagagggaggtgctcggccagtggcgtccaagccgccatagaccgg

SEQ ID NO: 360837 - DNA, 312 bp, Zea mays
tcacacgcgtccgcggacgcgtgggttctgtatacaattcaggaaaggctgtttcttcccacagtatccataataaaaaaataaagtgccctataaagtgctcttgcccctatcctcgcattgcaagtctgaggtttgacctcacggcaatcatgtccacacaaggcatgacaaacagcaatagtgataggcatttgaaagatcatctccatagtgagaatcctaaagaaatgttgcagcctggaactttagacagtccttctcgtgttcatgaaatggatagcccctctagagagtcattggaagggtgtt

SEQ ID NO: 360838 - DNA, 306 bp, Zea mays
gcagacgcgtgggccggtccagtggtttggtcaccacaggttatatctacttggtttccttaaataatttttgtggcatttcatataatagcaaaaaagcttacttaatcaactgctattaatattataggctgtgcatgctgatgttgatttagacaatcacaatgaaccaattaatcctcctatcgatggtactcaatcaatgattggcgaagtcccaagtacagcttttacaggaagagaaaagggaaaatcaaaatctgtatcttttgctctatcggatgcttctggggtagctacccctat

SEQ ID NO: 360839 - DNA, 307 bp, Zea mays
cgcttaccgcgcgctctcttgtgcggcaattgggcgaccgccgccgccctaactcaggtgccgaggtcttcgccagtaacttcaacaggtcctcgcctggtccttcgctggcgaggagcatctccgccagtactatcacatcaacgcccggacaatgatttctttgatttcatcctttgtgaagtaaacagacatcactatagtcttgcggcagttgctgtcggtttgggactaggagttgccgggttatgcaaggcattgtatagtggtctgtccataccatgggtttctccaaagaatttgtttt

SEQ ID NO: 360840 - DNA, 295 bp, Zea mays
catttatttatttttttttttttgaaataatttgtttcaaatggaacactattaatctttcaccactgtcaatactcactcaatacatgtataatgtaacgtgctgagataacagtacagagtataaacacgtgccaaccctatcttattgcaagcaaattccgggggcagcaattcgacacaacaaaatacaacaatctccactgtgggatggaatacactcgctctatgcgtgcttctgcagctcctcgctgaacacggcagagtgccgcccttccacgcactgcagcaccag

SEQ ID NO: 360841 - DNA, 300 bp, Zea mays
gtgtaaagagggagatttgcatactgcctataacttatatcttgaaatgattgagaaaggtctggtaccaaatctttttatttgcagttctttagtgagttgtttctacaggaagggaaagtttgatgaggcaaatttagtgttgcaaaatcttgtgggtactgacatgattccagatatcagtgcgcccagacttgagatagggaaagtagcaaatttcattgatactgttgctggtggaaatcatcattctgcaaaaatcatgtggaacattgttatttttggtctatgcaaattggg

SEQ ID NO: 360842 - DNA, 287 bp, Zea mays
ctcgccgacgcgcctcgcgtcgtcgtcccgcctcggtcctcttctcgccctgccgatggatccggccgcccccgagcctgtccccgcacccgccactgacaccgatgccgagaccaatggttacgaggatcgctctgaattcgaggacgcggaggctgggggcgagggcgctggggccgggaccgagaccgggaccgggaccgggaccgggaccgggtccgggtccggaacgatgccggcgggcggtgtagcggagatgaaggagctgcccgaggagcttgccaagg

SEQ ID NO: 360843 - DNA, 281 bp, Zea mays
cccacgcgtccgggctattggaagtctgcaagtgtaaggaataaatctggaagtggtaatgataatctagtaacagaaacattggaggtagatgcacctgctaaccctagcaaatctggcagaaagcgtggtcggaaacctacatatgatcaagcactaccgaattcagagccattttcaaactgcaaagaattacagccatatggaatacactcaggacatggggttgtaggaaatgttcgtgtcactgtgccaatggatggtaccaatgttacatcacc

SEQ ID NO: 360844 - DNA, 109 bp, Zea mays
gcaaacacaactgatcgagctcctactggggaagctggtctctctgggattccaaacaacgctccactagatcttttcccgcaaggagcttccaatgctggaagtggtg

SEQ ID NO: 360845 - DNA, 300 bp, Zea mays
aacttcgggtgtatggggtaatggcaactcaggttggggtgatgctctggagaaacccaactggcgtggctcgagcaacgaccattactcgtcgaacaatagaaacagcggcttttttggtggatccagcaataggcaccagcaggaggatccaacccatgcatctggaaggaaacggaacagcggggagtactcacagcagtggaacagcaagcataggagacaggatgggcggtatcaaattagcagttgccggggacgaaatgacgaatggcgtccatggcactagatgacttgcag

SEQ ID NO: 360846 - DNA, 295 bp, Zea mays
cggacgcgtgggggttcccaatgcaaatgtaaagagagaaaggaagtacaaaagcgtgatgatgtttaccttttccaattgcatgccattgagcaattaaagcaaccgggggtatctaattagagctgaccctctccccacttgaagcacatttaatcatcccttttttgtgtggttctgcctaggaaggtcatttggatatgtgtgacaaccagcgcagtgccatttacattaggatggtaaattgtgcatcaagagaagatagggcttgatttctatgattgagcaaaggtga

SEQ ID NO: 360847 - DNA, 117 bp, Zea mays
atttggtcattaatgggaacttggctgtgttaccagtgtctggacaaaatagtgccaaagtggcatctgatacaatgtctgcatctgaaaatccagcatactgggcaagggtttgct

SEQ ID NO: 360848 - DNA, 294 bp, Zea mays
aattgacttgaataacactgcaagtatgatagtcaaagaagaaaggaaacttataacagtcgtgtttcctgatggccgtgacggacgcactttcacccttaaggcagaaactacagaagacctaaatgagtggagaagtgcattggagaatgctctggctcaggcacccagtgttgtgaatacagcgggacaacttccagtagtcagcactgacataacagaacctgttgaagctgctgttgaacaattgcattcttcgagagatgccatcttctccaattccggcaccatgtt

SEQ ID NO: 360849 - DNA, 289 bp, Zea mays
atgacaactactcccgggatagtggtcttcggcatccaactgccgacggccgctaccggtcacgggttttaaaggaacagcttccccaacgcttccgatgtcacttccagagcgcgtgtgccaattcgtgtgctacaaactcgtggcctgtccaagagcaaccgtctggtgcagcaactcctggtggaatggtctgggcttccacttgaacttgcaacatgggagaaccaggaggcgcttcgtcagtgctttccatttgcacctgcttggggacaagcaggcttcgaag

SEQ ID NO: 360850 - DNA, 312 bp, Zea mays
atttttcagaaagaagacgacgcacagatcatgccgtcttttttggtggatcaggtatgcattccgttacttattcctttcagtggttgcatggcgaggtgcatcaaaatcttgataatgttacattgttgtttcacctaaaaatcttatacataagatgaatcatcaaaagtttgcccttctgtatttcttcttggagaatgcaattttttttggataatggaataaatctacggcttccttctctaaagagaggaatcaaaccaaaactattataagttaaatcacaacaacggcagaaccaagtttgta

SEQ ID NO: 360851 - DNA, 308 bp, Zea mays
cggaccgtgggcggacgcgtgggtgaaaatgacatataatcagttgatttgtcgtgctttgccagtgtaaaaattatttagtgtttagttcagagtacatattttttacttgtaattgtctagacgtattttgtactcaattttacataccttgcattatttcatattttagatcagcaaacagtatgttgctacaattatttcgtattttgtaattcttggaaggcaaacagtatgttgctacaattttacataccagcaatatgtatgctatgtgtgtaataagcttctgaatagtggtaccacat

SEQ ID NO: 360852 - DNA, 311 bp, Zea mays
cggacgcgtggcattactgaattttttgacggcactgatcgatgccactattttacttgccgttggttcttccgtgcagaggacacggtcatcaatacgttggtgtcgattaatgttgatggccacaagcatgaccctagacgtgtttttcttccgaggaaaagaatgacaatgtgcttgattgcatcatctccaaggtcaagatagtccatgttgatccaaatatggatccaaaagctaaggcccaactgatagaacattgtgaactatactatgacatgtcttactctgttgcatattctacatttgct

SEQ ID NO: 360853 - DNA, 147 bp, Zea mays
gtagccattttaagggctacagtccgcccctatccccttcaccagcacctttccaaccttaggataaatgatgaagcatatccagtggtccctgtacgaatcaaacttgtgatacatgtgtattgaaattattaattttatttatgc

SEQ ID NO: 360854 - DNA, 304 bp, Zea mays
cggacgcgtggtaatgtcaaagtaggttcaaaatactagattatgtgaagtaaatggattcatggctataaaatagcagaaatctatatatgcgattaacaagtgtcaaacacatgataagtgtagaaagtatatatgagtaaattgaatgttggctgtttggaatgtgtccagttttagtatccatgtagttgagtgaagtaaacattgttttccgtagaaatgttatatataaaagttgtagctcacttctttatcttggttgtgtaaaaattgcatgaccataggtttagtagtttaggag

SEQ ID NO: 360855 - DNA, 300 bp, Zea mays
cgccctcttcctcctccttcgctgttgctgttgctgatgcttccgcttccgccgccgccgccgcggaaatcaaactaatctgatcgagaccacaccgttccagagagatcccccaaacaaaaaaagagcacgggatcgaaatggagctcgacggcaagtacagcaaggaccagagcctcaaatgcgaatgcctcctcttcgacctcgatgacacactatacccgttcaactccggcattgctgccgacataaagaagaacatccaagactatatggtgcacaagctcggcgttgacgagg

SEQ ID NO: 360856 - DNA, 301 bp, Zea mays
cccacgcgtccgggaccggctaggctacgaccgccccagcaaagccgtcgactggctcatccgtaacgctaaggccgccatcgacgagctttcggccgaccgggaagaggggcagcctgccgcggaggcagcggatgccactactaccgagccggccgagcaggtgacctcgacgtcctacgggttcgccatcggtggtgtggccggctccttcatgccacattcggtcggtgccgatgacgtctccggctccggctccggctccggctccggcaacgtcaagtctttgttcccctcgtcg

SEQ ID NO: 360857 - DNA, 238 bp, Zea mays
gacactcgcagcttatgcacaactgtctgcaaatggacatatcttggacatgcacacatgaaacagtggaaggaatctgattcacgtgatatggaggcatgcggatgggacaatgttttttgggaagaaatagggttgggagacctcctcgaaggaaattgtgcaaaaataggacgcagtgtcgcttttcctggtcatgctcttggttctggtttgacgcctactgctgcaaaggagt

SEQ ID NO: 360858 - DNA, 231 bp, Zea mays
tgtctctctcgatggaccactggatccaccgtatacctctcccctcggctttgataccacgtgttggaaccaaccgtcgaagatcgacggccgcgagtccgcgacgccggccggtggtgaccgcggacgctggaaactcaggaacgagagtatagagaagacacgagaaatttctctgcaaatgcgtgcaatcagcaccaatgcaatccttgttccttttatagagggatt

SEQ ID NO: 360859 - DNA, 231 bp, Zea mays
gtttgtgagacagttggtgcttcggtttttggccttcttttgtccaaataccatcctgtgacctgtttaaagattgctagtggtttaatgatatgcagtttccctgttctggtcatgttgggtcaactaatcaataaagtttcttgccatgcacttgattcctctagaactgccactgatgaatctatttgtgctgatcttttagatgtacgcaggatagttccaaatagc

SEQ ID NO: 360860 - DNA, 232 bp, Zea mays
atattgtagccacttgtggtttcatttttatgcttcctatgtacaacgtgggtgcacatatcgcttatcttggtaaccaatggtgtcggtaaggattttgtcatcaacaatggtgcatgctcttgttccacagtcatactggaagacgggatctcgctgatggaggtaggagggctgctgcaggagtgggatgacagcgaagagccagcaggacagcaggacagcatgccct

SEQ ID NO: 360861 - DNA, 290 bp, Zea mays
ctcttccgctcccgccgctctgcactccgcgccctcagccgcccccagctccaaatcgggggccgtcttgctttctgccacctcgccgcctcaggccccgcgcccccagcttctcagtctcagaaccctagctccaacccaaacaccaatgccaactctaactccaataccaccaccaatgcttctggctcatcatcgtcgcaacctgacaatatgccgcgcaagatatttgttggtaatgtgcatgctgatgtggacgtggaccgcctatataactattttgcacaatt

SEQ ID NO: 360862 - DNA, 289 bp, Zea mays
tggaggttgatgtggaagaagaaggggactcgacggtggccatggtggtggtttcggtagcgaatctggagttggaagtggtgtctacggcagtggtggagggtttggaggcggcggcggaggaggcctcggcagtgggcatggtggaggctttggctctggactgggtgtaggaagtggtagtacgcatgaaggtcttgatggtgtaggcatcaacggtggcggaggacttggtgccgggtatggtggaggttttggcgcaggagcgggtataggaggtggcattgga

SEQ ID NO: 360863 - DNA, 284 bp, Zea mays
tgccgcagaaatcataattcggtgttccattgcagcatactgggtagcatacaatattattacagcaacagagttccacctgaccaatacaactctggtactgcaaatctcttgcaacaaccaccctacgcacgatgctcataactcggtgtacaattccagactaaaaaaccctaacattacccaacccaatctacatgcatcacatcaagctttcgccagctatcgaagacctaacactcccacaccgacacctcgacccaacatcaccgcacctcgaatta

SEQ ID NO: 360864 - DNA, 287 bp, Zea mays
gtaagtttccagactccaatttttatggtaatcgaatttcagatggtcccattgtcaggcaggaggactatgccaagagttatctacctgggcctatttatggtgcttactcgttcattcatattgacaatgacatggaaatgcttgatagccttggtcagagttccaaaaatatggctgaggttgctgtagcagccaatatagtcgaaagacttgcaaaagagtgcactgagaagaggcagagaacacgtgttggtataatatctccttatacagctcaagtgatt

SEQ ID NO: 360865 - DNA, 102 bp, Zea mays
gtgcgccgttgatgcgtagtaccattcatataaaagccagtatccgaccgatcggtctccgtctgtctgctgaggatcaatgcgagtattgcctgttcatac

SEQ ID NO: 360866 - DNA, 309 bp, Zea mays
caattttcaggatggtggaggttccagtgcggctctgttggacaagaatgctggtgaagagatagaattggtggccggcgttcgggctctgcaggtaccattgacaggcaacggaagtgatgccagccatgaaagtgaaatgagaaagttcaatgaagtactaactgtcagagagaaaaacagtgaggttgatacacaagaagtcagtaaggagatggaacacactgatattgctgagttgcaggctgacattgtggatgaggcagcttttcttgattgctcgagtattgtcaacctggttgctggaga

SEQ ID NO: 360867 - DNA, 268 bp, Zea mays
aaaaaagattgtacaatcaggatctttcaaacgcgagggttcagattccgtagatgttggatcatcaaaacaaaagcaaacatttcatttgtctcgagatgaaaaaccaggagtactgaagccaataaaggaacagaatttaacagaaagaagggcttcttttagtttgaaaaaaccaaacattccttcatctccaaggtctgacagctggaatgagtcaggggaaaggaaaaatgatcagcatatttccaagtctggaaccaacata

SEQ ID NO: 360868 - DNA, 120 bp, Zea mays
cccacgcgtccgaaatatttatattgtcaaataaaagcaccagcaatggtacctccatgttcaaggttaaaattaaccgggaatcctacaaaattccattactatgcgtaattggtaagg

SEQ ID NO: 360869 - DNA, 166 bp, Zea mays
acaatgttaagttttgaacattgttcacgaccgctaccaattcccgagtaccaaattcctaggcaacaactttggcactcgggaattggtagcggacctgaacaatgttaagttttgagcatttaaatttacatttgtcatgataacatgttgcgagtttttattt

SEQ ID NO: 360870 - DNA, 279 bp, Zea mays
ggagaagagattattgcagcggtactattatttggattttcattgtgaatttcccaatagcaacattctaacttgctcaattgcaccctttactacggatgtgttatgccgtcctcaagtcactatggcccccaaaaaatgaaaacaacataaaagaactgtagcccaatgctgtaaaatccaacccccagcttgaacattcttaatggacagcacggatgaggatgcagatgaaggtagtagacctgagacaccgatgtcatatgaaatcctcccatc

SEQ ID NO: 360871 - DNA, 303 bp, Zea mays
acttcccagaatctactgctggagaacatactgaaataggaaataggcggctagatacaatatctgagggcattcattttgaagattttggaagtgattaatgaaacctttgatgacactgcacatggttgaggagtgatccatttgtacagactattttgggcagctaaatatctacaattgtggtcgtggaactagctgatttggtggccactgtttcttcttccgtgttaggttttgtgctcttagagtagaagcatggatggcttattattatgatcaaataatccgtattgaagggtg

SEQ ID NO: 360872 - DNA, 159 bp, Zea mays
tcccactcgtccgcggacgctggcgacgcgtggcggacgcgtgggccaacattcgacacaacagtaaggctggaatgtttttagattactgtactgtttaagctcatgttagctatccaaataagctcatcttgaggaataccaatctgtctctgctct

SEQ ID NO: 360873 - DNA, 259 bp, Zea mays
aggcgtcagattcttcctccctggttccccacggcggccagcagggagcaagccagcagccatggtgtccatccctcctccctcaacactggcccacaggcgcccaggcaagctttccccctggcgctcgctccctataggcgagcagcagcacccccttctcagcggcaggagcagcagctcctttcctccatggccatggcgccccctttttctcttccctgccgcggccaggaaacgcccagcccctcggctctct

SEQ ID NO: 360874 - DNA, 284 bp, Zea mays
gctctccactctccctggcagccgccgccaggaagcctccactccttctccctcttctctcctccccttgctcttctctggccgacgccacttgcgtgtgcaggcaggcaggccctggcgtccgcgcatcctcttctggccatgagctcccccacgcagtcgctgctctctccacgtcctctattccttcccatccccgatctcccctaatccgagcagaccggcagagccgggggggctgctatggcgctgcgacgggcgctcctcagatcggcagagacctc

SEQ ID NO: 360875 - DNA, 134 bp, Zea mays
ggtaagttttgcccagacagttcggtgtggctgcagggacatggaacgatctgttctgccatgtgaattgagattttgttgtattgttttgaactagcgaactgagcaatagaagaactagacaggtgtatttc

SEQ ID NO: 360876 - DNA, 312 bp, Zea mays
cggacctggcggacgcgtgagccgtatactattgatcatcccactctccccgttatcttcttcctgttatataggcgtcccgcagcagtagctgatcagtgcagcggcgaagaagcagcagcagaatgctttccgttccaggagcagcatgtagccgttgcaggctcgtcgcagccactgcgtgcttcctcctcgtcctcctgctgctgcatgtgcgcccagccacggccaccccgaccccgccccgcgccttcttcgtcttcggcgactcgctggtggacagcggcaacaacgactacctgtccacgacgg

SEQ ID NO: 360877 - DNA, 322 bp, Zea mays
actagttctagatcgcgagcagccgcccttttttttttttttttttttacaatcacataaaatccataacttactcaattaaagagataaacaatcatatcataatttgaccatatatagtccaaatatcacaacaatataaaatccgtagcttaataaattaaagaaatcaaataatataggattcattggaccgtgtcggctcaaacccgacccatatgtatgagctataccggggctcaacgggctagaatttggggtccggtctagatccgccttcgaaccgtggttcatattatttcgtgccggatcatgttgtggg

SEQ ID NO: 360878 - DNA, 145 bp, Zea mays
ggcgtgccttcgtcgtccgtgaccggtgcgtggcgtggtggccgtgccgaccgtccgtccaccccctctcctcttcccggcgccggcgacatgaggagggactcgcttggaggagtgggcgtagtgagggctcagctcagcacgg

SEQ ID NO: 360879 - DNA, 320 bp, Zea mays
gagaagggtggcatcaccaggaacttcccaggcaaagggcgccgccaagccgctggctcgacgggtccgaacacctgcagcgagggctaaaccaaagaggagaagccccctacctgactggtacccaagggtcccactccgtgacatcacatcaatcgtaaaggctcttgagaaaagaaatcgcctagaggaggatgcggctcggcaacacatccaatcgaatgaagattcttcacagcctgtggatccaacaactgcagaacatagtgatcctgattctcaaagcacgcaaactcaagaaacaccgggtgctgttgctt

SEQ ID NO: 360880 - DNA, 313 bp, Zea mays
atgaagtgagtgtgattttgttggggtttcactggtagtgaagcttgattacttagttaagttagacctaggttgttttgaatgtatgaaagtgtaaaaaccataccttttttcagtggatgttgacgtagcatctgagttacctaactgctactgcagcttttcatggagggtgttaaagcaaaacagtcacacgatgctttgcatttggaagtgtgctcgttgcaaagaaatttgcagcatgcaagcactttgatggatctgtgcaaccagaaacttatccacctggaggacaagctaagaggttggtcag

SEQ ID NO: 360881 - DNA, 154 bp, Zea mays
tgatattgcgatgtgccatgctcgctttcgccgagtggtagatgacgatgctgcctgagttgcggtggtgtggatgcgcagactcccggcatatcagaatccgcagtccccattggccggcctcatatccccttatccgcttggtgacccgccg

SEQ ID NO: 360882 - DNA, 271 bp, Zea mays
cgtaaacgcgcacagcacttcgacccggtcggccacggactgcccctaggcgttgacatccagatccatctcgctccgatctacattcgagaagtttgtctccggcatcgattccccagtctgaatcgttgccgacgtcttctttgggtggacggtcgaagtcacgcgcacgcacatcccacacttgttcctccccggcggtgcattcagcaacactgtcttcttctccgtgttggagcacctcgggccacaggggcggacccgtgaacga

SEQ ID NO: 360883 - DNA, 267 bp, Zea mays
gttgctgacaaattgagatcatcaaatcatagaataaaggttgcaatgttggatgtgattccagaaaacactcttcgtattgtagcactggttactggtccaattatacggttattttttgataaatataatatgttgcaaaatagcaaagacgtatacaagcccttgctttctcagatgaatagccggtcctgcatagttttcagtctagcatatgtggaatgtgctctttggccagcatcgctttcttcaactcctccaatagca

SEQ ID NO: 360884 - DNA, 265 bp, Zea mays
caaggtaatcaaatcaaccacctctaaccctaacataaacaggttgccggcattattacagttactttttttagaaacgtttaattaccttgtgccgacacacagtgtgggacatcggatcccagagagaaccagatgctttatcacagctacgattccttcaccgatgcatgtcggtggcagggcgatcggttcagaattggctctggttaaatgctcaatacgattcgatagtgttgttgctatccaaccgacattttgtttt

SEQ ID NO: 360885 - DNA, 255 bp, Zea mays
  unsure (1)..(255): unsure at all n locations
cccacgcgtccgcccacgcgtccgttccacacgaagactgatgcgatgaatttaaccagcatcattcttatggcgtctgggtcaccagntcttagacaggtttcaaacggtggaggttcaaacctttctaagagctggtgtcccagcgcccataagaatgatgctggttaaattccacacgaagactgatgcgatgaatgccttcatcaccaacaacaggagtttctgtctgaacagtcaagttagcatgcgtgt

SEQ ID NO: 360886 - DNA, 303 bp, Zea mays
ctgggaggctgtttccttggtcgtctcctgctttggtgatcagtggtatcaacacgggatcaaattgtggatatgagatgttccactcttctgccattgctgctgcgagggaggccttagtgtatggggtgccttcaattgcaatctcattgaattgaaggacgaaaccaaagacagtgacttcaaggatgcagctcaggcctgtttaccattgataaatgctgctttggatgacattgagaaaggaactttcctcagaggttgcctattgaatattggagttccaagtgcaccatctgcaaa

SEQ ID NO: 360887 - DNA, 299 bp, Zea mays
gaaagctggaagagtgtcatcaattgctaatagaaagcaatcgtattccggaagcagcattgatggccagatcttatcttcctagcaaagtccctgagattgtagcattgtggaaaaaggatctccagaaggtcttcctgtgctatgagactcctttgaatccattgtactcagttttatcttaaatctttctgcagatcctacttaggttaacttggtcctagcgcgtatctcaggataattgtcactgccttaagttacagactcaagcattattattggtttatatttatatttta

SEQ ID NO: 360888 - DNA, 280 bp, Zea mays
gtccagatggcactcaacggatcggtcgaattgacctagttccaccacttagtttggatggccacccaactacaaagtcctcaccaccaacatcaccattgaagtcaaggcagccatcagcacatgttcggtcattgtatgataaactgcagaatatgcctcaagttggtgtaatacactggctcttcagattgatcaacggttcagtattgagtggcagatgatgtatttgggttgctgaccccgagacttgcagacagatttctgcatctgtcaaact

SEQ ID NO: 360889 - DNA, 302 bp, Zea mays
cccacgcgtccggatgcgcctgagcaggacggaagcccgcctcgcgttcttcgacgtcgctggcagcgtcctgcactgctggaccatgcatgcccaaaaattaaagacgacgacgacgacgaccgctgctgctgctgggcactaaattaagctttgctgggtacgatgagttgatgatgcaattaattatttggttttgtcgtcttttcgtgcgtgagagggaagcaataataattaattgctgctgcttctgttgttgtgtgcacatgcatgtgagggtgtcaagtatgttcagcctcttg

SEQ ID NO: 360890 - DNA, 187 bp, Zea mays
ggggctggaactcggcatggggccgatggatgtcgagccaaagggacagaacggctcatcaggcggccacaacatcgttgctgctgccgtctcagttcctaccgccgccgctgccgctgccgccgctacggctactgctgcacgaagaccggctggtcgaccgggtccaagatgctcatcttcttcg

SEQ ID NO: 360891 - DNA, 298 bp, Zea mays
gtcaactggtgggcttatgattaatttggtgaataattctcagcgtacacatgaccctattcccagccctacgacatctgctcgcaagacgcaaaagatgtctcaacccattctctctgcatgtgtacctgcaccatctgctatgcattcacagcctttaactgcaccgatgcaaccatcatcttcaggagcaaaaaagggagctcaacccggcacaaaagtgaagaagaccaaaccaggccagaagatacctggtggctctgcagtcaaatctatgccatcttctgctggtcctggt

SEQ ID NO: 360892 - DNA, 300 bp, Zea mays
tgatgctcgggcccatcatgaaagtgagcagttcaacgatggaatgggtgtgaatggacggattggacagtatgatggctatgagaggaaacgccgtagatcttcatctgagaggaacctagacagacattaccatccagatggaaggtttcttcacagagagcttgatcgtggcgagatagatggatcagatctacgccatcagctccgcaggagaagaataaatgggccctcaacaaccattagcccagaacgggctaatggggaccgacatgggagggatgaaccctacagagaaag

SEQ ID NO: 360893 - DNA, 314 bp, Zea mays
tcgagccacgcgtccgggaatggcagaacacggaatgggcagaacagggaatggccgactactattgcagccttaataagtagtagagattatggcattcttaatacttctcttaccctttcatagtgccatgtagcagttgataatcagatgtgtgttcaccgtgaacttacttttccagaaatagcgatgcatattgaactatctattttctgatggagcttggttgacctgctgacttcatgattctgtgggtgatgggaattctaagaaaaatcattcaccagacgttaagaaaaggagaaagcgtatga

SEQ ID NO: 360894 - DNA, 258 bp, Zea mays
accacgcgtccgcggaccgtggccttgaaaggataaataagtttctatccaagctgtgttatctatgtctctgtcttccataaaatgtgtttgttagttgtgtctctgtcagttagctgttagttagttgtgtctttgtctccgattttctgtagggtgaagatgtgtctatccaagctgttggcaaaactgttgaaactattaactgtgtacctgttacttgttggcaaaattgtcaaaatgttacttgagttgtct

SEQ ID NO: 360895 - DNA, 229 bp, Zea mays
gaaggcagaggcacagggagggagccgacagccgagagcaccttccgattccgcccaagaaatctccacccaatctctctgtcctctcctcccttctcatcatttcgccatgctgccatcgcacctcaacggccactccgccctcgggcgccgtcgcccgcgcctctccgccgccgccggggagtctccggcggcagcgggggtagaagcggcggctccgctggaggag

SEQ ID NO: 360896 - DNA, 286 bp, Zea mays
atgtccgccgtcccctcgcccccagatctcgcgcacgcccacgatctcgtgcacgcccacgcgtgaacccagccccagttatgcccgcgccgagccctcacccacggatccgaggatctcctacccctctgcgccggatctgctcctcccttcgcccgagattgccgtcatcaatggaagtgccgaggatccgccggatcgcgccctcctcccctctgcgccggatccgtccgctcccccatctgtattggcagtgagggatgcggcgacctgtagtgcgacggcg

SEQ ID NO: 360897 - DNA, 334 bp, Zea mays
acttcgcctgcttccctccttgccgtgcgatccgcctccagagactcctttgactctggattcaatcgtggagcttggagcattcaaggttcactccctccgccatcactggaagatgggaccgcagaaggtcgagacgatgcggcggccgaggccgagagaggagaacggcggatcgacgccgccattgaccacctcgcccagtacggcttcgcaaagccccaaatccgcaaggtcatcaacgacctccttcagctgtacgggagagatggatgggtgttcctggaggagggatcatacagtatcgtgcttaaagtcctggaagaacaggcgc

SEQ ID NO: 360898 - DNA, 327 bp, Zea mays
cggacggtgggcgcgagcagccgcccttttttttttttttttttgcccatgcaaaactctgcaaacaaagagtcccattcccatcgaacccatgaacattacgcgtaccagcaggtgaaactgacatccatgctaagaggatcccggttccaggttaacagacaggaagcagaatacaaccatgacagaggcagagagcacgcaacaaaatgcaaaagaaaaaaggagagagagctccggttccattgcttcctttactcgcaggccaatttggtgtcgaagctactcaagcagatggcgaaacctggaaggccgagagcgggtatc

SEQ ID NO: 360899 - DNA, 195 bp, Zea mays
agccagtgtagatgaacagaaggtctggctgcagtaactgtacattgaaataatcccctgcataggctggtgcactggattatttcaatgtacagttactgcagccagtgtagatgaacattgaaataatccagtgcgccagcctatgcaggggaggaaaaaaaagaggtgagcttgattaaaaaaaaaacgaaa

SEQ ID NO: 360900 - DNA, 318 bp, Zea mays
actagttctagatcgcgagcggccaccctttttttttttttttacagtgaatcagtgcgagttcatcaacatgaaagaagcagcaacaagtacaagaccttcatcattcatccatcggccaagccaaatcacacacatatcccaggtgatgatgagttcttctaaaccaacatcagcagcactacctacctaccaaacacccaaggacacagctacaaaactagagctaaccatactatcgctttgatggtggcctcccatcgtcatcatcgtcaccatcatcatccccatcgtcgtcgtcttcttcttcttcgtcgc

SEQ ID NO: 360901 - DNA, 307 bp, Zea mays
gcgcgacgaccgggaggtgggcgatccctcgacactcgatagtcgacaccaaatacccggaccgcgaacggccgcccgcttcgcggtcgcgcaaaatgccgccgaaacccgcgccccagctcttccagtacatctccaacaagtcgcggaaaccaccgccgccaccagtcgcgcgggatctccggatctggtggttgtgttagggttgggcgcgagatgcacgagcacgagcgttgccgcgatttgctcggggtaaaactcgcgctccaggcaagtgggctgctgctgctgctgagagggggaggcg

SEQ ID NO: 360902 - DNA, 303 bp, Zea mays
ccactactttacaactctgttcctaatacaactatgcgtgcctgtttcgcttcacaattcgagaaaacaaagcatggaatcaaattgttgcttagtttttacacctaagaacatttcctaagtagcacacttcaatctttggttcgactgattgtttgcaattcaccaccatggcaccgtcatgttttggccattgttgtctgcagatcaacaatgcaggaatttcaggcgttcaccgtgatccagttttgtctgctgcggtcaaggataaggtacccttaatctaaagcaaaagaatacaaa

SEQ ID NO: 360903 - DNA, 303 bp, Zea mays
aacacttgatgatacatcatgaaagcaaatcaaggccccatctttgctagcaaggatgtcagactctataaaatccttgctagcaaagatggggccttgatttgttttcatgatgtaacacttgatgatacaactgatgttgccaagcgtaaggaatttgccaatcgaagaagaacctatgaagtggagtggtttaatgttactggatggtttgtagtggacttcacacacgaggaacttaaaacacttagagtgaagcagagatactcgtttagagatcaacaatacaatggtatgttttca

SEQ ID NO: 360904 - DNA, 286 bp, Zea mays
  unsure (1)..(286): unsure at all n locations
ctctctgttctctcatgtgcccactctatctgtaaatcgcacngcccgttgatcgctaagctgcngctcaacntcacggcgcaccgggacagcgacccgacccnggacgccgcgaacgcgggtagcagaggcggcagngccggagccgcagggacaacacgacggagccggagacggagccggggggctccaccgcgtncggcacggccaacgacggccnggacgcggacggagggcgcactnccacgccgacgaggcgcagctcaggaacggggataccagggcg

SEQ ID NO: 360905 - DNA, 289 bp, Zea mays
cccacgcgtccgcagtaataaaaagtctctttctcctgctgaacaggaccagcaagtgcttaagatgaccacaacagcactagataactgctttcttgtgcctaatctcgatgatctgatgcctaagcatgagcaaattgaataccatcaagctgatgattacccagccacttatgatcctcatatagcatcagattctcctgaggagaataatcatcacctaggggatgtcagtgaaaccctttgaattctacctgatgtattagaatcgccagcgaactccaacaaa

SEQ ID NO: 360906 - DNA, 223 bp, Zea mays
gcgagctcaggggccacttcgtcggtcactacctgagcgcgacggccaagatgtgggcgagcacgcacaacggcacgctcgccggcgcgatgtcggcggtggtggacgcgctcgacgagtgccagcgcgccggcggcacgggccatctctccgccttccccgccgagttcttcgaccgcttcgaagccatcaacccgtctgggcgccctactacaccatccac

SEQ ID NO: 360907 - DNA, 283 bp, Zea mays
cccacgcgtccgcaagctcgcccgcccgcagctcgcatcgtctaccctgcgcggctggcctagggtttaaccactcacagcagccgccgtgactctcgaaccatgtcagcgccgccgtcgctcaagcccccagcaacctccgcagcggcctatccgcgggcgtccgccgccccgagagccaccgggcattcgcggcgcctgtgctcttccaactcggcgcctccaatgctcagcctccgccgccgtcgccggagcttccactgagatggctgatgccccgctg

SEQ ID NO: 360908 - DNA, 277 bp, Zea mays
cccacgcgtccggaatctagaagtgatatcctttcctctggtgcaactagtccgaggacttacacacgacggagttctcctttgagttcacctttcagcagcaatgacagcatccacaaggatggcagtgacaactaccgactccgtactccatatgggagccctccaaagaatggattggagaaggcattttctgatgtcatgttgtatgcagttcctcccaggggtttctttccatcagattctaatgctggatcagtccattctatgtcttctg

SEQ ID NO: 360909 - DNA, 276 bp, Zea mays
cccacgcgtccgaaaaccctaacccaatctcgtttcccacgtctctcgctcccagtcccagatgggtctcttctcgtggtggaggggagggcgacgcggcggcgccccgccggaccagcaagcctcggcggttgcgggggtcgtggggaccgacgtggcagcttctggcacccacggggcggtggaggtgcggcggcagcggcaggctgcggacgcgacggtgttcgaattcgggtccgcggcggagtctggcgccgctgtgacgctcgccggcta

SEQ ID NO: 360910 - DNA, 274 bp, Zea mays
gccaccatctatttgaacagggagcacccccaccactccccaaacacaccactccaaacaaatccagacattggagattctacctgcgtgctatggaaactggcagatgagcagagtttgaacgtgagcagagccttggaggtgagggcgagcttggctgtggagggtgccggcgttgggcagaggacaggagcgagctcgccacctgggggcaaagaaagggcggccatggagaaaactgggaagcaagggcgcgacggccatgggcgagctg

SEQ ID NO: 360911 - DNA, 278 bp, Zea mays
gatgaaaatgatagtggcagtgagaaaaactataatggcagtgctaacggaagaccaagagatattgacaaggccactgcactaagagtagacagtgagcagctaattggtgtgtccaggaggcacacatcaaccgatttccatctgccttacattagatacagtaacgacagtgaagacgtatcactggatgatattgaggaatgtttcttaagaaggctagaatggaaatcagtgagggaaagtgttgatgaaggcgacagtagaaactctcctcc

SEQ ID NO: 360912 - DNA, 271 bp, Zea mays
ctgttctgttcctctttgcttttggattcacttaagcaatgctgctgctgtctatcctcaggactattaaacaataggtaattttgcttgtccacttactctttatctgttgctgtatatccactatagtcaaacggaagtttcttcgaatagtatcctgtgggaatgattgtgtattagttggtactttataggcttgcaaagtgcttggcagatatttatagttcgtcacaatgtgtggcaagcaagtaattccgtggataatttgttt

SEQ ID NO: 360913 - DNA, 225 bp, Zea mays
cccacgcgtccgtctatatgttagtgtttatgtatatgtggagatacggtacaaccatgacacccgtatataggcacaagagagctttatttgacgcgggactagacgacgaaggcttccggtagtaaagaaggctcgcttgtgcctatatacggcgctcattgttgtgccgtgactcgatatggtagtgcatatgcgtgtgtggggatcccatggcggccttgc

SEQ ID NO: 360914 - DNA, 143 bp, Zea mays
gattagagttattctctaatgattttgctttttatccatgtgtgccatataccgaactggattaaactaaatgaaaccatgattataaattgcctgagacaactggtcatgaaaatgtttatatcacctttatctacacgatc

SEQ ID NO: 360915 - DNA, 281 bp, Zea mays
ggcaacggggagctgctctgctcttccctctcgcacacatgcaccccctcgacggccctcatcctatctcgactgtggcttcgccagcacattgaggttcgacggatctaggccccatcggcttagatcttgccctccctcgccgggatgtacaccatggaggtggtggtccttctgggaggagagctgaaacctgcttgggcgttaggaggctacatggatagagagatgatgtaggtaatttagccttttcgccccaattatgctccagtatttgctga

SEQ ID NO: 360916 - DNA, 280 bp, Zea mays
gtccaggttcgcagttgactgcctctactacacctgccgagactagtaagcaagaagcagaagttcagccagataaaaatgttgagagttcaatcgatgttggaaatcctcagactaagctgcaagaagggtcaaaaattccatctgaagatattctcaaatcagaaagagaagccagaggaaaaggaacacccattgactgacctcagttcaaatgaggataagggtaatcacgaggaagctatggaacaaaaagatatgaaaaatgatgtaaagaagg

SEQ ID NO: 360917 - DNA, 314 bp, Zea mays
cggacgcgtgggcagatatctgttactgtagtaacggaatttgttcgctggaatgaggaagccataaccagatgcacactactgttttctcagcgcaggagcactgcgcgtcatttcatttaaggaagaaacctactactgttgcagctaacgtgagatccatatttgcatgcttgcttgatcaagtgagccaatacttaactgaagggcttgaccgtgctagagagagtttaaatgaggcgcagctttgcgggatagatatgtcatcgggacaagtgttagtaggagagtggcagctgctgctgcttctgcac

SEQ ID NO: 360918 - DNA, 314 bp, Zea mays
atttcatgtaatttctctctattgttcttgatctgttcaaccatttttgaattttattcagctatttttgtttatttttttcagacatttcagttttttcagctattcgtgttagttcagacattccatagttagccatctcgactggtgccagccaccttgttttttgttcagcaatttgtgatttttggttcagtcatttctaattttgttcagtcattcgcgtttgttatccatttcatgtaatttctctcagttgttcttgatctgttcagccatttactatttttattcagctatttttgtttgttttg

SEQ ID NO: 360919 - DNA, 324 bp, Zea mays
ggcgcacacccaatccagtacaaacagcagcagcttcgcctccacctccacgcgagccaagcgcccggcccggctcccgcagcgcaaaaccctagcctcgcccgccccaaacccttggcggctacggtctctgatcccggtccaatggcgtcgtcgccggacttgttccctaacgttgccttctccgacgtctctgccgccgcccccgcggccgaggccaccgccgcgttcgggctcggcgccaccaccggggccccgcgcctctgcctcgtcaagtccgggaaggaccaggcggagcccacggtcgacatcggactcgccgat

SEQ ID NO: 360920 - DNA, 319 bp, Zea mays
gttctagatcgccagcggccgccctttttttttttttttttatgacagaatgagccacagaagaatttacctccaaaaccagagcaaaagcactcgcagtcttgcaaagtgtatgcgtggtggcaagctggcctccaaaaccaacacgttatgtgttcgcatcacgtgataaattgtcagtccaaaccaaagcaacataatttactttttttttaaaagaagtggtcatccccctatcccagccctctagatgtccatgggtgcagcagcgtcatccgaggccctctccccctcctcctgcacggaggagctagcagca

SEQ ID NO: 360921 - DNA, 135 bp, Zea mays
ctcaggaccaaagtgccaggcaagaaaccccgcatgaggataggagacaggttgcatgttctggagctcggtgtcgcggcttacctcctcttctgtggatgctatgacattgcgttcgggaacaaccgctactac

SEQ ID NO: 360922 - DNA, 307 bp, Zea mays
actagttctagatcgcgagctgccgcccttttttttttttttttattgacatagctcacaaagcaagggcaccatacattatgtacattcgtattgtagtttggttgagcataagataagatagggcacacacgaccttattgtacttgtgcttcacctgcacaaacaagaggagataattcaactcccagagcacacaagtccttctgtagtgcctcagcacttttaaactgcaacccaaccattcctacactaagagctgcttcaatgtttatcatcctatcatcaataaaaacgcagcttgctg

SEQ ID NO: 360923 - DNA, 306 bp, Zea mays
cggaccgtgggagtcttttgtggcaactatctgtacatgccctgagagaagtccacaagagaacatttgcagctgatgagctgatcaaatccactacctgcagcactaacagatgtttcttatcttcatgctgcttctttactcccagtaaccaaggcaagaatagctctggagaggcgtaaatttcttaaaaatgcaaacatagctgttcagaggcaaatgacatggtcaaatttggcccatgagatgacagctgagttccgaagtctatgtgctgaagaggcttatttgcaacaagagttagag

SEQ ID NO: 360924 - DNA, 109 bp, Zea mays
gaaggccaagcagttcaaccagctcttgcaggttttcctgctaatcaagcagctgggctgcaagtacaatcttcactcaagcctgacattatggctactttggcaaaac

SEQ ID NO: 360925 - DNA, 309 bp, Zea mays
  unsure (1)..(309): unsure at all n locations
tgggaaccagcaattgttgaaaaataatggaagcgtggatgtctctgttcaggccaatagtgcctcagctgtacctgttccttcttccctactgggaatcggtggtccggctgcgcatatcgctgcgatgcatgcttttatgattcatcctcaaggcattcctcaacccttagtagcatcacccaactctggtgttcctcaatttggcagttttcagtctcagtctacaattcaaccaaattcacaatggccanatcagcaggaagtacaaaatgtctcacaaccacaagatgaaacnaactatcagac

SEQ ID NO: 360926 - DNA, 287 bp, Zea mays
agttgtcgctgctatttttcctgcagcgcacagcagcgccctcccacatgccctgactgagaaggatcagcagaatgtagtcatccgggagaatcgagaggcacaattgctgggcgatgcaggcaagctgtcattggatggtcagcaagggaacaatgtggtgcaggtagcagtactgggtagttcgagcaccgttggtgctagttatttgcagaacggtgacaaggggggtggattgttggtggctgaggagctaggacgttgtggcagcagtgatgtggggcaag

SEQ ID NO: 360927 - DNA, 178 bp, Zea mays
cagctctatcaagctgtgaattgaaagatttctatagtgtattcacgcgacgttttcataaactagtgtgagttatgtactctgaccagtgaccagtgcgaagtctgtgttgtctcaacaaaaaaaaaaaaaaaaaagataagaagaaaatgaaagtaaaaaataaaagggcggccgc

SEQ ID NO: 360928 - DNA, 239 bp, Zea mays
gggagttcgaataatcagtcctcagttcctcacgcatgtggcacgcgatgggccggatctgaggttgagacgttgagtgtgcgatcccgttggcatctcgacaaagtttggtgggtcccaccgcagatcccggcccggtaggtactagttccgccgtcccccctccctagtctccggggaggaccgtctcggccgagagagtgcgctcgtcgactccactcagctctctcgctcactct

SEQ ID NO: 360929 - DNA, 303 bp, Zea mays
cccacgcgtccgatgggaataggattcctcccccatggtttctctccaattcactgattgctcagaatccgctccatcttttgctactatcaatttgttttttccatttctgtatcattgaatactctgcataaggactattctgcagcagtgaatcaaaacttccaggcagcatgagtttttttgtttcaggttcgtgatgctcaaaatgatcagcaagctttaaagccagaccgaccttgcgatcgacaaagtcttttgtttgaaatatcttgtgtgtctattctatttattgttttgttt

SEQ ID NO: 360930 - DNA, 300 bp, Zea mays
gataagcattggccatatccatgattttgaccactaataatgttgcttatagttgacagaagctctcacttcacttctagatggagtccttttgatacttggggtgttcagtaagttggtgttcaattgcagtatgttgcataatttcatagctttcttaatatgccaattctgttgatggagctttatagacatgccaatttataaatggagcatgttgcagttagatgtagtctatttcagaattgagtgtacaaatagattttacttataatgtgttgcataataggactaagcttt

SEQ ID NO: 360931 - DNA, 296 bp, Zea mays
ccgatcgaggccatcccggtgaagtacggcggcctgaagcgcgacggcgacaccgagttctccgcggacgacggcgaggtcgcggaggtcaccgtcaagggaagctccacggagaccatcgagatcgaagccactgaggtacagcgctgacacgtgaaatgaacaaaagcggtttcttcagacaatatgcgcaggcttgggttcgcacttcgcagagttgccgaattacacgacccgacacggccgttccgtgtcgtttctttgcaggctgatgccacgctgacatgggaccttac

SEQ ID NO: 360932 - DNA, 294 bp, Zea mays
gtataccgaaagatttggcattcaataggagtgcattgaaaaaagctattcacgtgcctgaaccttggtttgtggcttatattgggtttcaactctagccgaccccatcttgtttgagactaaaaggctttgtttgtttttttgctatgcttgcgttaaaccttgtgtggtagcttttatttctgggagcctgtccttatggaaacatcgtaataggtgcatgtttcatggtgcatctccaagtttagctagagtttcattacctttttgagggcaactagagctttatatttc

SEQ ID NO: 360933 - DNA, 179 bp, Zea mays
tatttgtattactgttcttgggtctggtgttgtctagttgcgatgtcgtaagtgatgtgcttggtaggttttgagctatccttggcactggagtggtttgttgtggaatgcctcgtgcactgttgggagattgtgttctggatattggctcgtaactgaattgcacggttcctggtcta

SEQ ID NO: 360934 - DNA, 280 bp, Zea mays
gggcattcttgacacaatctcccgtgatatctgcttgtggtcatggcatcaagagctttacaaaatgcatagattgggataatggtaagccgtatcaacgctgttacatcagcattaagatttcaagggatgtacccttgtcgattgaaatgcatgacataaacctccagctgctgggagatcatcaacgtcagaatgctgtcacagctgcttgtgcagctctctgtctctggagtcaaggatgggatatctctgacggttctatccaagccggcttaga

SEQ ID NO: 360935 - DNA, 306 bp, Zea mays
gttctagatcgcgagcagctgccctttttttttttttttaaggatcaaatcaaacattttaatcgtgaaacattaccagccctacgtccacccacgaacacaacattaaaacaaaatcaacaaggaaaagggatacatcttggcctaccaatgcaagtgccacttatagtatatcaatcgcattaaccattaattcaaccttgtgctcatacctgacatgataataataacaacaacaaagaaagctttactctagattgtgtatgaacacttgtgtgagatataataaccaggtctccatgtcca

SEQ ID NO: 360936 - DNA, 283 bp, Zea mays
cccacgcgtccggtggcggacaggcgcccggcaagcctgggcatgtccccgggctccagctctgccatgcgcacgcagagtgctcagctatgctctgctgcatgcacgacagcgacgagcgacgaaggtgctcggccgcgacggcttcaacgatcgggaggatggatgcaatggcagacaatgaacaacgttggctgcacagtgactgtggcttcaccttctcgctggctccgcactggctctcacggtttagagtaaatcaaaccggctaatgtatccttgg

SEQ ID NO: 360937 - DNA, 286 bp, Zea mays
ggatcttgttccctgtgttcttttatcatttgatgatgagcagatattgatgcacagaggcaaagaatggaaatccagatacatcgaagcctcttactctcattccaaaagttccaaagaataatctggcaatgacatctgtcatgaatagttcagatgaagttagtgatgccaacactcaagttgcgataagagaagtattgagacccaaaatgttcaaattatggaagagtgcggtggactcgtctctggcattgctgctggatgacgccgaagcaaataatct

SEQ ID NO: 360938 - DNA, 100 bp, Zea mays
cgatggtttaacaatcatcccagagtatgattggaagttaatctctgaggagtggagtgcgacgcctggaaaaggtatatctgctgaaatcgcctttagc

SEQ ID NO: 360939 - DNA, 301 bp, Zea mays
cggacggtgggcggacgcgtggggacagatacggagcagccgcagtcccaccgaccccgccgccggtcgccctccatctcctcgccgctgcctctcgtttctcttctacaataatcaacatgagccgtggtggtagtgccggtggtggtcaaagttctctgggttatctctttggaagcggtgagccccccaaaccagcagtggcaccagctgcaagtgctccacctgttgagaaaccatctgctgcaaagactgatgcggccaagcacgttgctgctggggttaccagccaaaccaataa

SEQ ID NO: 360940 - DNA, 99 bp, Zea mays
ggtggcaccgctgatggggcagacagagagtaaaggaggcaagtaggcgactccggcgagataagtgcgggtgcggccatggcggacaagccgagccgc

SEQ ID NO: 360941 - DNA, 292 bp, Zea mays
cccacgcgtccgcgaggagctcatcaggaataggctcgaggaactccggagacggagggaggacgggtcgctccgggacgtggtgttctgtatgcgcggcgatcttgttaggaacatggggaacatgtgcaaccctgaacttcacaagggcaggctagaggttcctaagcctataaaggagtacattgaagaggtttctactcaactaagaatggtgtgcgaatctgacactgacgagttgctgttgtaagagtaacttgcctttgttcaggagaccaggcatgcctttggg

SEQ ID NO: 360942 - DNA, 287 bp, Zea mays
ctgtaatgttttttcccatgaacacagttgttatgttgtgtacacctgtacctttccttgttggagttggggttcccttttcagaaaatgttcaattctagatgtttctcctatatctatataaagctttgcatgaacctgtccagacacagttaactaaaaaatgaggcagcagactggtaagcgtccccgccaacacagggaatatgaaagagaagaaaagaaggatcaacgcaagaggccatttcccaatgctcatgaaagctctaataatgatgggttggttc

SEQ ID NO: 360943 - DNA, 284 bp, Zea mays
cgctgaggctgctccaccacctgcccagcagcagaagagcagcaagatggggatggggacggggctggccgtgggcgccgcggcggggctgctgggcggcctcgcgctggcggaaggggcgagctacgtggaggacaagttcgatgatcgcgtcgccgagacggtggaggaggagacgttcggcgacggagactacgatgacgattactagaatgacgcaggtgggagaggagatcatgatcatgcatacggaaccgaaatccaggcaacaagtcgaagtcgag

SEQ ID NO: 360944 - DNA, 302 bp, Zea mays
gatgcctgcattcaagtttgccccaaaaatccagcaaacttcaatgtcgacaatgttagagtggctaagctgctatggaggtggttagaaccatcccacggaccacagaagaattgtgctggcttcgtcagtgggcagataatattactcccccctcttccatcgacaatggtgcaattcaatgtgaacatggaaaggttccagcatctaaagtcacatcaatgaagcggttatcatctgtagcttggcagaaattacattcgaaatatggagggggacctatattgaacagtgacgatttt

SEQ ID NO: 360945 - DNA, 290 bp, Zea mays
gcgaacaagccaagccgccgcagaagcaggcagacgcgcacagagcggccatccactgccgtcctgttccgcacccaggctccagaaacgcacgcgcgctcgctccgcggagcagagcacttggccacttgactctgactgactgaagcggcggcggtcgcgatcagcccgctccatggcgcggtccaagaacggctgcctcaagatccttgtctgcttcggctccggatccgaatcctccgccggctccgacgccgacgaccaccccgacgaggagaacaacgccatat

SEQ ID NO: 360946 - DNA, 257 bp, Zea mays
aatctgaggtcagtgaaaaatgaagaacaagctggatctgaaaatgatgatgaagggaacagcagaccttcctttttgtccgtggaaaagggtgctggttccttggacaaggaactagctgccagtggatttaccaggaaagagaaagtggatatggataagtacatcgaggaagttgttgaagggcatgattccagctcagatgatgataatgatgaggacagttccgatgagcctgattgtgatcttaccccaag

SEQ ID NO: 360947 - DNA, 257 bp, Zea mays
cccacgcgtccgcgctcgctctcgctctcgctctcgtcaggcacaggcacgcacgcacgagtgaacacaggcgcgatctcctgctccctgcctccctcgttctcctctgcccgtgcgcgctccagggcacacacgtatggagcgtgcgagcaccgtcatggaggagggcggcggcggcggcgccgcgcgcggccgtggagcggtgggagggctacgtggactggaggaaccggccggcgaccaggggccggcacgcg

SEQ ID NO: 360948 - DNA, 251 bp, Zea mays
gaagatcaaggcaatcaagaagagatttgctgcaatcgtgaagcaaagagctgacatcaatataatagctagggtctggatgcgagtggaagctgctgcaactgcctgcagaccaatgcctgggtgtcctcttcctactccaacttcggccacctgaagacccttcggctgtggggggtgacagagctagggtctggatgtgggtggaagctgctgctacacatgccagaggggttgcggacctcatatcc

SEQ ID NO: 360949 - DNA, 332 bp, Zea mays
ctagagcatctaggatttccacttctgagacagagaatgggtattcgacgtttcccactaggcctgcacggagtatatctgtctcccgccgggcagttcaatctacaccagtgtctagcaacagcaggtcatcagtcctcaatgcaaacatttcctctgttagttcaagacctacaaccccaagcaagcggactgccactcttactgcatcgaagtcatctgttccattgtcacgtccagtgccaacacgctcatctacacccgtcaaagcccgtctgtctacaacaactaatacttgtccatatactccagtgaaaaatcgtcctcctgtg

SEQ ID NO: 360950 - DNA, 143 bp, Zea mays
  unsure (1)..(143): unsure at all n locations
gattactgttcattattacaggtataaaccattctgctatattaacatgaataaccaagtttgttttttcatgtattccagtttcctaggtaaaggacctgataggaagaaatatgaggatcaaatanaaaggttgaagttga

SEQ ID NO: 360951 - DNA, 322 bp, Zea mays
ccatcccccgtcgcccacctacttctccccgaatcagacccacgccttgttcccacccccggacgccttccctctgcagaggatacgtctggagtggaggttgggatctcttgtgggctcttccactcctcgctcctcgtcgaaggaggcgcctgggtgtggggcaagggcgacggaggccgcctcggcctcggtgacgagtcttccgccttcgtgccccactctaaccccaatctccgcgatctccgcctccttgcgcttggcggcatccactccgccgcgctgaccacttcctgtgacgtcttcacctggggttatggtg

SEQ ID NO: 360952 - DNA, 320 bp, Zea mays
aatttgtttgtcttttgtgtgtccgacaaacttttccatattaatgggttgtgaaattcaagtactatatagtatatactccggggattttagccccatccaatcccctccggttttctggcttccaaactagccatcaatcccatcatccaattcccttatcccaaactagccctaagaaaattgggtacagggaaaagaaatcccaacttggcctcccctctataagcatgcagaagctgaaaggctctcagcctgttgtccccgtagaatgctctcctttgtgattgcctgcacagcactgccataacacttgcaat

SEQ ID NO: 360953 - DNA, 99 bp, Zea mays
ctggtggggaagaacgctacctcacgtcccggatcccatccggcggccaaggggagttacacgctagccggcggtcggccagccgccgccaagcggctc

SEQ ID NO: 360954 - DNA, 230 bp, Zea mays
tgtgagcgtgggtccttgtctgtaaagaaatcccatatcactagaagaaattgacgcacgaccgatactaacggccaactagacgtttccttggttgttataccgtgcgtctgccgtttagatggccgttagtttcgttcgtgcttcgatatatggtgtggcgtccttgtctgtaaagaaatcccatatcactagaagacattgaagcgtcaatagtcatcaactgctat

SEQ ID NO: 360955 - DNA, 283 bp, Zea mays
  unsure (1)..(283): unsure at all n locations
agctacgataccacaagatgattgtgtccggaaggagaatgcatccagcatagatgtcgcagagtccctgtccagcaacaagtcatcagggtgcaagaacagcagtgagaagaacactactgacaccatggcggtgataaaagataagggactacaagcgaccaagaaacccgtggatttgttagcgcttagcctagggaagcttanagccaagctcaaggataggctgaacgccgagaagaagaaagaagcgaagaggctggcgcttgccanggtggacgag

SEQ ID NO: 360956 - DNA, 284 bp, Zea mays
aaaaattaaagaaactggcatcttctagctaaaagataaaatctggtttcttaaaaactgagttggttctaaacatagcctaaatttagctaggatttatagctagaacgttggattgctcctacccctcaacgtgtcggcgcggacggtcggacaaaagacttggtggatagctagtgttgtgcagtcggataagccttcaagcactcctacacatgtggccacatttcactcgcaaaaagctcacgagaattgaacgaaatagataatatctcagaaacata

SEQ ID NO: 360957 - DNA, 284 bp, Zea mays
cccacgcgtccgcccacgcgtccgaatcaggcatgcaatgagcttggtcaaacgtggatggagtctggtaagttgtaaatcacatttattgacacaaaaatttccataaaccacattcctattaatgaacaattaacagtatgcttttttcctacttttcttgcgcaatgctgccattgtatctcgttgtatacctgaatcacacctcaaatgtgccaaaccagcatcacctgtatagtgttttctccttgttttatgtcactagtcatcagtatccttcagcc

SEQ ID NO: 360958 - DNA, 274 bp, Zea mays
ggaccgtggcggctatgccgtgctgtttggtttcctacaccacctatttagcccatcaatgtatctacttgctcgctggtcgcactcgtctcgtcaagcgcacactttcagcccatcaatgtatctacttgctcgttggtcgcactcgtctcgtcaagcggctctgttgtccatttgttcatgttgtcgctgttcggacctgtcattataactcggtcgcgcggcaagttaacaacctccttcgctaagctgctgctcgcggatggaccggaaa

SEQ ID NO: 360959 - DNA, 279 bp, Zea mays
cgaaatcgggggactacgggttctccaagagtgacatgaggagattcggggccgacgagggccgccgggtttacaaggcactggaaaatgctgcagaccgtaagatcaaaatcaggattgtccagcactctggatttgctcctgattttgaccaagagagcgcagatctggctgcaggaagaccaaatgttgagaacgcaaccgttcttttcgaggactggtggggatctggtgttgtgcacgcaaaggtctggatatcagataagaaggatgtgtata

SEQ ID NO: 360960 - DNA, 282 bp, Zea mays
cagagggtgttgaattcatcgcttaaaaaagctgatgtcctggctctactaggatcgtatcgtcaactggcaatgcacagtccacttccagttgagctgttcaattctatgcgtactgaaaagtggctgtacacttcactgggattccgatctccatcagatgcaattctatttgatgatgcatgggtatctttgtctccaatagcaaatttaccattcatagatgatggtgactcttgccatggtttaggaatggagatacatggctacaaagatgaactg

SEQ ID NO: 360961 - DNA, 313 bp, Zea mays
aacagatcctctctggacgaacagaaaggttaccagcagcaccacggcgagatctccccttggcgggccaaaaccgacggcgagcttcaccggcgttggtcggctccaatctcttcgccgttttattttcctcccagatccggcggtgaccgtgctcctgttcgttcttctggtcttgattcgattgggaggggaaggggttccttcggtcttgggaaattcgaagacatgcctgcgctctacgcttacggagatggcgggtggccgtggtggtcatggtggcgtgtggtcgtcgtcgtcccggcgcgcccgc

SEQ ID NO: 360962 - DNA, 328 bp, Zea mays
gtcggcgatggctcttcggcgtcgagctgctctggctccggcggcggtctactggtatgcttcttccacccatctcgcaatgcgctgggcagtccacatgccccccatcccgcgtcagccacgacgcttcgtctcgccgcatgcacatctccggaggcgcccggcgtcgcatggcgtgctcatgtcgctggagtcccgggcgctggcggatccggcgagccctgcaacggcggagtcccgaacgcactcacatccctggagacacttggtgcctcgtgctgcccactccaggtctcaaactacactgataggttatagtttagtcagt

SEQ ID NO: 360963 - DNA, 331 bp, Zea mays
cccacgcgtccgcccacgcgtccggctgcggccgttggaattgatgaatcgcgaggagaaaaaatacggaccgcgctgccctactttacacatccgcgtccggttgttgttgggtacatgtacaatgtcacctcatcgcgtaaatcccgtattcgcagactcttcgggtaacaaagccttagagccttttccccttattggcctgtttggattatactagttgcttcaaacagtactgaagctgctgacatgttttgcttcaaacagatgaaattttatcaagttcatcaatgtgctgttgtctcaacttgtgtaagcaatgtttaagaaa

SEQ ID NO: 360964 - DNA, 323 bp, Zea mays
agactgtgtcatgaagaaccttctaagcagcaaattgataagcatgaagatgaagcacgtccacactattgtgataagcttgctgccagcacagctgatcccagctctgtgagtgttgtcaatgctgacagcatcctttcagattatatggaggatgatcttctattcccgactagacagacaagatcagaatgtgctctggatgttgagaatcaaatggaagaaactatacatgtatatgcagaggaaaacagacaagtttctggcgacggtggtcaggattatgaacttttagaagcttctttgaggtctagatgccgccg

SEQ ID NO: 360965 - DNA, 320 bp, Zea mays
cggacggtgggcgaatgctgctggctccaccactggcaatcaacacggatcagctgaggaggcaccgacgcctgatgcaccctcgaattccctggtgcagaacatctgcgactgattggtctatgggtttacagcactccgttctttttatttggctgcgcgtcatcttcgggactggtcatatgaaccgattggcatcaaagaatgatggtggtactgccacagattgggaccttcctactaatgagataatcagcttgaggaaaaggataaagaacatagaatatattgtcagtgagacaaataaatcacctctgtcg

SEQ ID NO: 360966 - DNA, 322 bp, Zea mays
cccacgcgtccgagaatttgacttgtacaaataatatccattgttttcggtggagtctcctattgctcagtggccagtgcttttaatgtgccacaagtaggcagcgttgttaaaacacatatatgcttatatgcaatacatcaagactcattttatttgtgacttcaagagaatctgctgcagcctgttcgaagatgctgcagcctgttcgaagatggcataatatgtacaattaaacaaatgtaactgttaaacaaatgtaatgtgttaaaactaataattgttagacgatggcatagccatctctttctcatgtttgtag

SEQ ID NO: 360967 - DNA, 318 bp, Zea mays
catcaactcgcaaaacccacagtcctgtccctacatctgcgtccagtcttatcctcttccttcgcggttgccgccgtcggcgacgacgaggatgtcgtagtcggggattgcctcgtgttcgacgacgacgctttcgaggaaccggacctggacctcccctcgtccccgtggccgtcggctagcgcctcacgccacggccggaggtcggaggcaggcgagagcgacagcctggtgccggagaggtggaggcatgccgaggaggagatcaacctgacgaagaaggataagcgccgcatcgcgcacgggctgcggttcggg

SEQ ID NO: 360968 - DNA, 316 bp, Zea mays
ggaatctagtgtatccaaggtggaggacaggtctcctgaggacaaggaaagatggtggaagaaggggctcaaagccatctctgagggcgaagctggctgttgtccttttggctggtggtcaggtactctgaattttgggaagtttctgctgcaatatatacatggtatttctcctaatatatacatggtatattaggaactatcagtgaattgaaaaataatatgtacaaggtatttctcctaatgttgtgcgcagggtactcgtctgggaagctcagatcctaagggatgtttcagtaagttgctttaacctgaa

SEQ ID NO: 360969 - DNA, 258 bp, Zea mays
gggctcggatgattccgacgccgacgaggatggcaccgacgccgccggcgatggcaggaggaagaggtgtcgcctctttgatgaccctgacctcgtgaggctcttcatgaggctgcgccgcgagtactaccacctcagcaccttccatggcaagccgtcggggtgcctcatgtacgacctcgcccacgcgatgcgcaagaacaccaacgagctcctttgaatcgcctgtgtcgcccttaccgaccagttcatccacga

SEQ ID NO: 360970 - DNA, 215 bp, Zea mays
cggacggtgggtttttggattaaaaaacatttttttttaaaaccgactttctagcagttcaaaactgaaagcatctctagacaaaaaaaaaaaaacggacaagccgggatagtacaacgactcagacagtggcgagcacagtcttacatggtatccttagcacaaaccaaaacagaagcacggaaaattacaggtaacataaaaaacatctgata

SEQ ID NO: 360971 - DNA, 220 bp, Zea mays
ggctaaagatatggtggattttctcgtattggtaaaccaaataatatgcaaatttaaatcgtcagctagcgccataatggagggaaaatttcctactaatgcaagtcgtttgtctgcgatattatcacaagatgcattttcagctggtcctgcaagcaatactgaggaaatgagagaactgcaagagctgcagaggacattatacacattcttgcatgct

SEQ ID NO: 360972 - DNA, 252 bp, Zea mays
cggaaaggaaaaaaaaaagaaacattcgccgcatttgccgcggagggcgtaattgagatttgtccttgccccctcggtgaaaactaaaaaacggcagcgccaagcgccgctcgtcttcttactgaattacccccctgcgtgggacgtacgactgtgtgtgcctgtacatacgggagggttgactgtggtggctggtggatcctaggatgggtgggggtacaaaggggattttctcctgcagctcaaccgttt

SEQ ID NO: 360973 - DNA, 327 bp, Zea mays
ctttactcccttgaaggcaatggtcgaatgagggctttccacataatggatccaaagggagtgcttgacacacttcttatttttcatgagaagaggcagggatctgaattggcacaatcatttaaacactattcagtttgtaccaagagtgccagcagtgataggataagtacagtacttggcagatgggaggggcattctgtgactaagaggagtggggtgtatggagcaacacttgctgaagcagatacagctgatgttctcaaaatgggctctaatggccaattgattcaggatactttatcaactaaaatcggaactggtaca

SEQ ID NO: 360974 - DNA, 288 bp, Zea mays
gcacggtctaggagcgcgcgatggtcggccgagtagaggcgatggaggggcagtgcggcgtggggtggagtagtgtgcagcgggcaagcagcgcggtggacggggcgagcaggggcacgttttgggcggggtgatgagtgggctagggttattaccctacaccactcgattggtgtccactacagggattagggcgtcatgaaggatgccatggacgcctcgcgaacgctatactcgtagaacctatggagtcgcctacgtcgtctattctctagcgccttagtgctt

SEQ ID NO: 360975 - DNA, 270 bp, Zea mays
cggtacgcgtggggcgggcaagtcattgactacagagaacccttttgtagttctcctgatactaattccaggaatgctgacagtcctgacctggaaggacgtatggcagcctgtagccattgccagtgaactgaatgataataaatcttccagtacagaggctaagtcaggaagctcctcatctcataaggaggatggatcaggcatcacagatggcagcggtccgttgagtagaaaacatacacacagtgtcgatctggggaacttaga

SEQ ID NO: 360976 - DNA, 274 bp, Zea mays
gactagttctagatcgctatctgccgccctttttttttttttttttttttcagctcaaataggtaggtagatattattagcaaataaagctccatcataataggttcacaaaacgaatgtctgatttatcttagtggcaaacgctggattcaaatacaactagaaccatgaaaaatggcctactgaagtgcaggcaagacgttcaactgatggcggaccgtgacaccatggcaggttgacatctctccacaggcacaccaacgcatccgaagaa

SEQ ID NO: 360977 - DNA, 276 bp, Zea mays
gagtcgcccatgccgaaccgaaggagcagaggagatcagttgatcttggaagctcattgagagctcgtcgtacatcttcttcacttaatgatgagattaacacacttcaagtggaaaatgaaagcatgtatgacaaacttcagcttgcagaagaaaggtttgatgatggagatgccaaatccatgcacatggagagagaggattctgatgctggcgatgcagcagaaaaagagccaattttgattaacaggaaagatgcagcgctagaacaaagaa

SEQ ID NO: 360978 - DNA, 303 bp, Zea mays
ggacgcgggttctaagatcgcgagcggccgcccttttttttttttttttaactacacaaatcacaagctagctgtttctgtgcaagatagatgtgtagtgacattatgaatttcccctcatctctaaatacaaatgtttggaacataaggacctgaatgctagaattaatcaaaatagttcatgatatcttttacaagcaacaataactgggtttctcctgacatgtctcctaaactttcaaacagaattccatccatcctagcttggactccacttagggaggtcatgtcctggagcactcc

SEQ ID NO: 360979 - DNA, 293 bp, Zea mays
atcgaccagagtcagccacggtccgggaccggggcgcaaatctgatcggcagggcaactacgtgacagctggataatggtcctgagacaggtcggactgggtataagatacaacaggcaaagcagctgcaacagcagcaaaggccaacatctgcttcagcttcgtcaaggcaatctgaaaaggaaagttcttgtgatgatgtagaaattgatgcaattcttgaggaagaggaggccctcattgcagctcacaggaaggagatcgagaatactatggagatcgtacgggaagaa

SEQ ID NO: 360980 - DNA, 203 bp, Zea mays
cccacgcgtccggccctttttttttttttttaattcatggtcttggaataatagagtaatattggtgccaaacgcacctgaacacacacaaaaagttgatgagcaagatatagttatcaattgctttggatcttatgtatgcagaagtgcatttcttgcataagtaagatccaaagcaattgataactagttctagatcgcga

SEQ ID NO: 360981 - DNA, 300 bp, Zea mays
atgacgccggacgtcgcctttgcgcgccacagcctcaacgagggcgaggaggtgccgcttcagtcgccggagtccctcgaggctttccggatgctcacgccttcctaccggaagaaggtggaggctgagccaggatacctggagcgcctcttcgcgacggcgacacgcccgagcctctcgagacgacgtgggccggccggctcccgctgcggctcgtgccgccgcgggactggccgccgcctggctgggaggtggacccggacgagctggagttcataagggaggcgcacagggcggcct

SEQ ID NO: 360982 - DNA, 300 bp, Zea mays
gtcgtatccgccccttcctcgttctgatgctgtaaggctgtgaaaattggcgatgcttagactggtgtcaatttgttattggatagtcctaattgttagctactcggcgcctggggtttttgggtaggcgaactatttttttagagttccgcatctctagcatcgcactcgggaattaggaccaagcgttaaagagcgtttacagaccagctagcactaggcaaggcttaatttcaggcacccacacataagtttaagcagttttacggacaacggtaccaagcaaggcctcagagtttt

SEQ ID NO: 360983 - DNA, 292 bp, Zea mays
gtcgaccatcgccgtagcatccatcctcgtcgctcgcggcagggagacgcccgccggcaatctggacgcgctcaaggcgatcctgggctcatcatttccgcagctagacaccgggcatgtgtactcctgctacagcgcaatgattcgggaggacgacaagtcgccgacgcatcgacgtcgacgtcgacgggggtggcgtcctcgggcgtctctgtcgccgcgcacgccggggggagcgggagtcccagccccccgggcgcttccgtgtccgtgggcgccaataatgccgctg

SEQ ID NO: 360984 - DNA, 292 bp, Zea mays
aaacgatgttggtaaaatcctcctgaatgctctgatctacaaggggataaaaatgaatcttcagaagaatacggttgcttcgatatttcatacttcagatgcacaatcaagtgaatcagctggtgacacagttgtagctcgaacatacctgttccgattgattgctgtcgatagttttgtagcctcctctacatttttccaggagcgcgacgcctacgaggtcgacaaggacgtggacccagaggtcggcgaattcgcagtcctctgggtccaggagcgcgacgcctacgag

SEQ ID NO: 360985 - DNA, 294 bp, Zea mays
gtcgttcaaaccaactgtgcagccagttcacaagcccatctcatctgtcctggagaagatccgccttcgtaagatggaggttctgaagaaatcaaatacttctattgaagacagtgatggcaatgatgctgttccggagccagtggttgatttggctgagcatttggatgtgcctcagtctaaagaagtggcacttgataaagacttgaggattgatggcgctgaaaaggagcttggagcaaatggccacagccttgatcgatgtgatagtgttcaagaggatgaggatggttt

SEQ ID NO: 360986 - DNA, 294 bp, Zea mays
gcattccaaacctggaagttatggactggtctcttaatctgcgttggttatggctgaaaaagactcaacctgattgcctgtggaactcctttgaagtccaagttcatcctaacgccgctgcaatttttgctgtttcaattcagtcaatagtgggcaatggaacaagcaccaaattttggacagatcgctggttagatggtaggagaattgtagagttggctcctaacttgtttgctgctgttaatagaaaagcagtgaggacgctggctgtccatgaagctgttatgggtgata

SEQ ID NO: 360987 - DNA, 290 bp, Zea mays
ataatcatgaattcctgatctggatggaattccaaaccaattccacaagctttcccaatcgccgctgccggcgcgcatggcaaacgcagccacctcgccgccgggccggcgctgtcaaggcccaccctcctaggcggcgtccggggcttcgacgcggctgtgtccctccgcctccacgcccttttcctcccggtgccgcgcctcctcctcaaggcgctcgaggtcgccggcgacggccgcatctggctccccgtccccatctccctgctcctcctctccgcgtcccccgc

SEQ ID NO: 360988 - DNA, 304 bp, Zea mays
cagcatgtgctagttgctaaccaaggaccgaatggcaatggctggtggtctccacagcatcattcttctctccttgctgattccagattgcacagaacatcctcatcccctcagcaacaggaacaacacaatcatgatgcacctattcttggaccaaggccatctcctttgcaccggacatcttcatacccgcaaaaggagcctcagtacaacccagatgaagtcattccagatgcaccatacatgtcaaaccatctacctggtgggccacccaattcagtgcctcgacaaccacatcagatga

SEQ ID NO: 360989 - DNA, 310 bp, Zea mays
aaataatttttgcgctctcgcgtcgatctgcttcaagcaagccccgaccggagccatggcttccgccaaggagagctatcgcgccgagctccgcgcctcctcccgccagctcagcgagcgctgcctctactccgccgctaaatgggccgccgagctgctcgtcggcgtagagctggatgcggccccggtcccttcggccgcgatggactccccatcctcctcgtccgcagcctccgcggggcggctattgcaccttcaccgtagcgggggttccagcttccgccaccgaccccgccccggcggcggcagt

SEQ ID NO: 360990 - DNA, 302 bp, Zea mays
gttcatacccacccagacccagatcacctcatcagatttgcatcgcaatgatctcctcgtccagtaaatggatggatgagcagtatgcattttgagctgtgaatccctgtgcgcagtgcgtccagctttttgagagcccaggtatcggattgttgacactagatgtcagcttcttgtgcagtaaactgaaaactcaacttctagatgcagtggatgaataactaaattgttagcgtcacagatgctcctagagagaaatagcaagtagagagagcagagagaaagctagtagtaaactggag

SEQ ID NO: 360991 - DNA, 300 bp, Zea mays
cctatgggagccctcgtccgtgtcctaccggcggcgatctcgatcgcgacgttggagaggcggcccacggcgtcgacgcgcacctcgtcagcgtacagcatcgccactcgaacaccgccagcttgggtgcgcgtaagcgaccaatgagtatttggtgaatgcggccatgccgtccccgtcgcacatgaacatgagcggctttgatggcgattcagtatagctacaccgccggcatgacatgcggagagtcctcaggtcatcggcgaccacggtgatggcggctttggtgtcatccgtcgt

SEQ ID NO: 360992 - DNA, 295 bp, Zea mays
atttttgttgaacagtagactcagtaatagtgaggtacagcaattttatccaatcaaattctgcgtattttggggtataatgctgccatcaatggagtggatccaagtaatatatgtgatgtattttaatgttgttgagtaactagcaggatatttttgttccatagcaatctctgctcgttttttagtagaaaaaggtacatagaagggaatggacataatctatcctctcttttttttaagaaagggttcttgcatattgtagcctggaggctcccgatttttccagatggaa

SEQ ID NO: 360993 - DNA, 302 bp, Zea mays
cggacgccacaagcccacaactctcgcgcaggcttctctcccatctccgcccttcccgaagcagcacggtgcaggccgcggacccgcgtttctccacagaatcccgctccacgcacgtcgcccccgtcgccggcgaggcggctgtgctgctgcgtactcccctggttccaactctgaaccggccaccctctcctgctccgcgacctcgagtaactttttgagtaccagtgatgcaaagggacacaagctctagcgatgtttctgcttctcatgtaggacgtgtaagacgtcgcaaacatcca

SEQ ID NO: 360994 - DNA, 179 bp, Zea mays
gctgttactttgtctccgcagccccacattctccgtctcgccacggtcgcggtcgtggtctcgctccggcaaacccaatggccgccgccgtccccaacggccacaccggcgccgccggagacgacgacgcaccatccgccgcttcgtcgtcgttggtgttcctgggcacggggtgatcg

SEQ ID NO: 360995 - DNA, 299 bp, Zea mays
actggccgcgccggttctgcgaagtgtacgacaccgggcttaaggatttcgtgcagaaggcgttcgcagacccggccactggaagccttcagtgtgtagatgatgggggtatacatacagagagacagggaattaagaaacaagtaaacgaaaaggataggtagaagagtggtttgctctctgttagtcatttgagacagggaattaagaaacaagtaaacgaaaaggataggtagaagagtggtttgctctctgttagtcatttgaggttttctttttttttcccctgttcttacttc

SEQ ID NO: 360996 - DNA, 298 bp, Zea mays
ctagttctagatcgcgagcggccgccctttttttttttttttttttttatttttttttttttttttaacaaaatactagctcttgctgattttgtattaacagcagatgagaacacttgcaagaggcgagatattcaaatcgttcacatggatcctaggctcacttgaaaactgttctaatctcctagcaaagcccaagaaccaaacacatatttaaactcaggtgcaaaatgtagtgttgaacacaacttccagatactgacagactgtatctagtgcgatttgacgtactcctgca

SEQ ID NO: 360997 - DNA, 302 bp, Zea mays
ggagtggcgcttcctcttactccctcgtcacctctcctccgttgccccgtccagcgccgctgtcgtcgccggcgagatctctgtcctcctcagcgcccggaatttcctggcttctgttaactgtgcggaacaattcataagctccgaggccgtcacatcctcgggcgtccttgagctctaccgcgcggtggccgccgcagccccaagtgggaaggcccgttacttagtcgacgcggcctcggcgctagtcgaggcatccgcgcgcgcggacctcgccgacggcgcgctgcggctgctcgagt

SEQ ID NO: 360998 - DNA, 281 bp, Zea mays
ctcgacgcgtggcgtgacgcgtgggcggacgcgtccgccagcgtcggacgtggcggacgcgtcgggagctcaccttccgtgccctgagtgtgcgccgagctggtcctggactcagggagatgactgtagctgtgaaggagctccgaccagctgggcaggagagtcgtcactgacagccccgtgtacgacggccgtggcgccgacgcccgcctcgtggctcgcatacagggagtcacggtcctggtcggtaacgcagacgccttgttcaccatggtgttcga

SEQ ID NO: 360999 - DNA, 292 bp, Zea mays
aggatatcctgtcagcagcttacacatttgtctatctccatgcttcctttctttagttggagactggattattttttgttgggataaacttagtacattatcagagcatcttaactctggatatgggtgcctttaagggatatccaataaacaaaatttaaacacatttggtttgtcgtataggtacaaagccagcacatgcttgggcaggtttgatcagtttcactaggaactgttcactaattgactgtctcagtaatacaattgaatagcctgcaactcagttagccat

SEQ ID NO: 361000 - DNA, 190 bp, Zea mays
gcagaattgcgtgccgcagttagcttgggcctttcgtttagtagtctaggaccgggtacaaaccgcttgttacctggtacgcacttgagctgattttagcgaccaactatctgcaaattctttttgccttccgaattttgattgtttcatcttttatctggcgtctgctttactaactagttttttgcgg

SEQ ID NO: 361001 - DNA, 322 bp, Zea mays
agaaaagatgagcacagatcaatctgcaaatgtccatgctgaactgtcaaaagagggtcagataaaacttggcaccgatcatccaattgctaaccatggagaaccagcaaaagggggtgatgaaaatatggaggaagatcctgaatacgaggaagatcctgaagaagtagaagtatatgaagatgacgaggacatggatgatgctcacgctgaagaacagattgcagaacagaatgagaacacaaacgacagagagattaagccaaaagaagtagcgacaacagatggtggaaataacaaaagtacaagacagcctgaagta

SEQ ID NO: 361002 - DNA, 322 bp, Zea mays
ctattagtgctccaaatcaagatatctttgattccaaagcttctcaggaacaccatgtcactaccatggatcaatctatagatctattttcaaatacgcttactgaaactccatctgctgataaggtgataccagcagctccttcaatggacaatgctgggtgggccacatttgatacacctccagaacaaaagcagcctgcactcactgggctttcttatgtttctgctacaagcatcgataaacaggctcttaatcatgatttgttttcatctgaatcaaatgatgagctaacatggttccggagctctaaggatgatgc

SEQ ID NO: 361003 - DNA, 309 bp, Zea mays
gtgccggtgccacttcttcgacgggtgccgggaccttcgaccgcagcagggtggcggttgtggggagcactgggttgacgaggtgctgaggaggaggtttctcagactggtgcggtggaaggagaagcgacggcgagtggatcgatctcttccaagttctagtttgatcgatttcaacagtgaggatgagatgcagcagctcagcatgtcgactgatttcctggtggagctatcagacggcatttttgccaaaagtgaagctggccactcatttgctacattttctcaccaagcagtagatttcatttt

SEQ ID NO: 361004 - DNA, 313 bp, Zea mays
cgcgtcatgcacgtcccgccctccgtgcctatcctccagggccagcacgctcccctcctcctcaccagactccgtcgtcgcgggtctggttgcccacctcaactccgaggaacgaggtctccgctacgctcgctctagagacaccgccttcctgtcctccgctcaccgtgcttatcctcggatccgcgactgccgcctcgctcccccaaatatcgccgacgcagggatccaagcccctgccatctattcagccgccacgacgcccacagggtttaccaactgacgggccaccaacaatgttgttccacaccct

SEQ ID NO: 361005 - DNA, 103 bp, Zea mays
agagcagttaattgctgtattgtgggaactctacccatggtaaggcgtgcataatggctgtgcaaagtacctttttacactatcgatcgactacactgtttat

SEQ ID NO: 361006 - DNA, 302 bp, Zea mays
cttctagagagccacataaaaaatgaaattattgagaaaagccagttagtccgggctctctcaaatagtgaggacaagttaccatcaagtgagcctttaacttccatgtctacggcttgtggggcttctacctttgaagtttggatgtcccttcctaagtgggcagcacaggttctgaagcatctagcgccagatatatcatacaggagtttggttgcacttggtattggttgtataaatggtactcctgttgcttcatttgagaggcgagatgcagaccgtcttcttttcttttgcacaag

SEQ ID NO: 361007 - DNA, 294 bp, Zea mays
cccacgcgtccgcccacgcgtccgtgagaaatcgctatcatgtgtcagctacaggggtggaaaggttcagcagctacgagtgcatttcgccctgctgaaccaaggaagattttggagatgcctgctgccacacgtgacattccagtatctcatgctgctgggaagcagtctcgtcccacgcttggtttcgatttgaatgttgcagatgaccaagctctcgaggaagattttccacagagttctgcacagactacctgttcagaatctggaaatacgagaagtcgagatggctcg

SEQ ID NO: 361008 - DNA, 293 bp, Zea mays
tggaaattcatcgctcagccatggcaatggaagtgaaattggacgctatcttggttgggctatggcaataatttttatgggtgggcgccttccccagattttgttaaacgtgagacttcacaaagtccgaacatttacttttcatgatttctcttgcagaaaattgttaaacatgagacttcacaatgtccgaacatttacttttcatgatttctcttgcagaaaatttacatttaaaaaagatttatcttggccgcgtttgtttcgttggaattgaattccattctaataat

SEQ ID NO: 361009 - DNA, 127 bp, Zea mays
cgcataaaccacccgctctacctctccacgcggccagcctgactcctccagaccagtcctcacccctgctcgccgcgaacgaagcacagctccttgcctccgtcaccgctctccgtggccggcgaaa

SEQ ID NO: 361010 - DNA, 306 bp, Zea mays
ggtagctggatgcaaactcgtgcccctgataactcctccggcagcggccggcagctatttgagtactatgctgcagccacacagcattgtccaattgaggaagaagcacaagaccagtcgtttgaggtcgctttggatttgcacaatctggaaatagacaacaacgacgccatttgtgtgttcgagaaagtagctcgtaactttgaggccgatatccgtaggacgaaagagaagatccataggtaccctgaatgcattcgagatctcggtgattactacactgtgccgaggattgtggccatcggt

SEQ ID NO: 361011 - DNA, 299 bp, Zea mays
cggacgcgtgggctcacgggcgctgcccgggttgcagctgtggaaggaggagtctgagagtaatctggggttcccaccattgtcggtattctcttcggctgatttccagaatgcagggtctgatagactctgctcttcgctagatggaaacatcgtcaggttgacctgggacagcaggacatcggctggcgagggcaggagcaggcgaaactcatctgagtcaataaggagcagaacatcggctggcgagcgcaggagcaggagaaattcatcggaatcactaaggagcagctggaaca

SEQ ID NO: 361012 - DNA, 300 bp, Zea mays
atccgctcaaaaccaattcaaaaggcttctgtttagagctggatactacttctctactggaccctttggaaaattttgagatcagaagaggatatgaccctcgtaaagactctgagtcacaaatatatcagagaattgattttcgcatgcctcccgagctacgatatcttctaaggctgaagaattctgagtctcgaaagtgggcagatatgtgcaagcttgaaacaatgccatcacagagtttcatctacctgcaattatatgaactgaaggatgattttattcaagcagaaattcgaa

SEQ ID NO: 361013 - DNA, 162 bp, Zea mays
ggacgccagaactgaaagagctaatattagaactttcaaaggctgagtcagagaaagaatcaaaattgaaagccattcttcagaatctgattcagctatttgttgagcatcacactgagtggaggcagctggtttctgttgttgctgagcttgatgtattga

SEQ ID NO: 361014 - DNA, 100 bp, Zea mays
atacatcacagctagctagcgtacagacgaataatctcttcttcacctcactagctaacaccagctagcagctcgatcgctctgtcctgcaataatggcc

SEQ ID NO: 361015 - DNA, 312 bp, Zea mays
  unsure (1)..(312): unsure at all n locations
gaacttgtatcttgaactgattttttcatattagaatggatcaggttgcctgaaaaaagttgtcctcaatgatcgttgagactttggtagtgacaagtatcatactctacgaatactaggacccatggattttcttgttttttagtttgttatgctctagaagctctanaactttatttacatgcctttttcttaagtatgtcgtttcattgttttcactgtatagtattcctttccattctaaattatatgacaattttgactttctagatacgaaacttttgctatgcattagaggcaacaactaatatg

SEQ ID NO: 361016 - DNA, 312 bp, Zea mays
atgacatctaattaattttggtgattccatccaaatttacttcaggtgattcgtattagaagtactggatcaattctaagtggttaatcatgataatcatgtattggcatctactctttcattagttgtattggctcgtctgtgcttgtggtctatggtgtattggtgttattgtgggccctctaatttttgagctaattgaataaccatatggctcaaggttgtggtaaggttaatgggtttctgtgttgccttgtatctatgcagccccatctaactcttgttccttgatggcataatgtttttttgggg

SEQ ID NO: 361017 - DNA, 311 bp, Zea mays
cctaaacaatggaccatcgattaagcatgaaactgacatggaaattcagtccctgtgcaaggaaagtgacacagatactaggaatctcattgacctgaatgaaaccttgccaataatcgacgatccagaaatagagtctcatgaatcaggtgaaattgttcctcatgaacccaatggcccttcacaggattctatcgctatagcagcagcagcagagacgttggtagaaatgtggaataatagtgatcggcctgcatatcaaccggacattttgcattggtttgctgacctagctatatccaaagataaca

SEQ ID NO: 361018 - DNA, 279 bp, Zea mays
cccacgcgtccggccgatgatgcctgctcgtcacaagtgaagggtttccagcacctgatcaacagctcggggctccacctgacgctgcaccacccgcagatcccctgctccccggcggcgctgcccggcgacctccccttctccgcggtgctcgcccacgacggctcgctgcatcgcggcgctcgccgcgcgcctcgccaagagcgcggcctctcggcccaccttgcttgacgagagcgcgcgctggtgtcgtcgatcgtcgtcccccgatgacgagtc

SEQ ID NO: 361019 - DNA, 294 bp, Zea mays
ggaccgtgggtcggcgcagtacgtgatgcggcgcgtggctccgcggcgggtgtggccgccgatcgcgttcggggcgtccatggcgtgctggacacgagcacgtgagccgcaccatctgcctcaccatctgccgccaccaccgcgtctgggaccgcctcttcaggatccttcaccaggaacagggtgcggacgttcctgatcgaggcgttcatgtgccacacgcacaacgcggcgttggcacacgcatgcacaacatcatctgcggcacgcggggcggatgggcgcgtacctgga

SEQ ID NO: 361020 - DNA, 298 bp, Zea mays
  unsure (1)..(298): unsure at all n locations
gttacaaagcgtatcaaattagttatgtttttttttggatcagttgatgtaggacttcagtattggttacatgttgatgtgaatcgaattcgattttatttatgatttcatgtgaatcaattaatgtaggacttgcatgttggttacttgttgatgtgaagtatgctgtaagtggtagctcaaagcgctttcaggagagaatgttctctcttgaccacttgatctatattctatagncagagaatatgaaagtaaaatctcttatatcatcaaacctttgaattttcagaggagaggt

SEQ ID NO: 361021 - DNA, 303 bp, Zea mays
ggaattcaaaacagcacactgatgacatcatttggaaccctggtcgctggccaagcgagtcaatgtgatgtaacgtacactcaaaccagattctttcggtagaatttatcctactatgggtgatgggtcattgggactcatagttgcccattggagcataccggcactagaataatttcagaaatgttcttatgcagattactccaaaatagtttacttttcagatgcaatatcaaatgggactgtgtgttaaactcgacacattgtaactggcccgctagaggatggatgaagatggagcat

SEQ ID NO: 361022 - DNA, 239 bp, Zea mays
tgtgacgctggtcccactgttacgctgggcttctataatacgcgatcccgcttccactctgctaccaccgggcacgccgccggtacaccgcgcattccatactcattagtgcctattctgctgacccctcgccatctccggcgggcgaatcgacaccatggccgccgcacgccctggtccgctccgacggtgccaacttcgtcgtccgtccccgccccctctaccgtgtcgtctgcgtc

SEQ ID NO: 361023 - DNA, 293 bp, Zea mays
gcaaccttcaggatgtgtcgctgtccaataattttcttcaagggcccaaaccaaactttacagctaagactgtggatttgaaatcagggaacgggttctgtcgagaagactctgggccatgcgatccgctggtgaccactctgcttgaggtggctttaggtttttggatacccattgcagcttgcgaagtgggcaggaaacaacccgtgcgatccatggcctggtatttcctcgcatcaaaatggatgtgactcaaatcaaattgcctcgccagaacttgtcgggaattattt

SEQ ID NO: 361024 - DNA, 200 bp, Zea mays
ctgaccgtggacggcattctcctcgctcctgctgccatcgtttttcctttttcctggacagccactgcaactgctcccaaatccttccacccggttactaaggtctcgctgctaacgtcgcgaatccacctctgtcgccaccaaggtcaagtccaagggcatcaagggtcacgagctaggcggtcccgaggtgctgcggt

SEQ ID NO: 361025 - DNA, 292 bp, Zea mays
  unsure (1)..(292): unsure at all n locations
gagaagaaggctactgaacgtcctccagaaagagaaaaaaaattagatgctccccatccccgcatgcagtttgatgatgtgcataaggtggagaaagcaaaaaaacgtgcggtagtcaaccaatcagaagctcgaaacagagttgaactgttcaggcatctatcctcagtatgtgcatggcactcagcttcctgacctcgagtcaaaattctttcaattagaaccaatgccatccttctgtatactnngttggtctccaatatttgtctggtgaagtatctggtggtaatga

SEQ ID NO: 361026 - DNA, 289 bp, Zea mays
agacctccccttctcttctctcgccttcaccacgcgccgcccgatccgccaccgcccgccgcagccagcaagccaaggccagatggcggcctcactcgtgtcctcgtttactgtgcccctcgtctccgccgtcctcggtgccgccatcgccctcgtcttccctcgccggctacctccgccgcaagcgcgccgccatcgcccacatccctcccaccgcgaccgccgccgtccccgggaccagccctaagcatgtccgccacctcaaccaggcccagtacaagaagggcca

SEQ ID NO: 361027 - DNA, 295 bp, Zea mays
gcacggcgtcctttttgaaaatggtttggtcatacacaaacttgtggggtgaaatttcggcttcggcctccttctgcgaggtggatttggatagcgcggcgcagaaaaatggcggcttcagctctccacctctgccgcctccccaagccatggcgggtgtgaagcttcagcagaggcagttgcgcccgatgagccatgtgggaccttttactgcgcccttcttcttctactcgccttcatcgttgcattcctgttcttttcgcttgtgcgaatggcagagctacgctactagggt

SEQ ID NO: 361028 - DNA, 310 bp, Zea mays
gatgcgccaacactgatagatttatcagatatttcggcactgggtgattataaaaagcttggtgacacaattgtcacagtcctccaagaatgtatgcaacagagtgggaactcacgtggtgcaattggtgttcagaccaaagcagaaattgatgagcttttgagatccaagcaaagtctgaaattggaaaagagtatgccaaaggaggatcttcatataaaacaagctgcggcattggttgtcaagttggaaggcaattcactgttctcctcagggaacatcgcaggagctgcagagatatactctgaag

SEQ ID NO: 361029 - DNA, 310 bp, Zea mays
ggagagctggtttgaaagctcttcgagcagacagcatcagtaaactgaagaaagcatttcctgaactggttcaagaggtagattctgtctccccaaataatatcttatgttcaagtgagctatgcatgtcagatttaatttatggagtgaagaatttactttgtaatcaagaacttccatctaacattaactgttgatatttttttatgttcaagtgtaaccttgcttaccactttcatgtgttctataaatccaggttacaaggccgtcaaatttccaggatttctacatatatgcatttcgttattgc

SEQ ID NO: 361030 - DNA, 303 bp, Zea mays
ggacggtgggctggagtcttggacatatggagtcattgagagccagagacagacaacaacctgtaaactggacccttgcgtgacgcgtgagagggaacagaacccgatgaaagcctgtcctgattctgacggatgtaggtacggtccatttatattttctcctctatattcttttcacctgccacgtaaataatctttctttctctatatctctattctagttctctctgaatcaaaccttatacccatcaccaaaatttaatatcattttgttctcagcatccctaacaaaagcaggcgcac

SEQ ID NO: 361031 - DNA, 297 bp, Zea mays
acttgattggtttggtagaggccgtgacaatttccggttgtttgaacagcctttggtacctgtagtaaatgccaaagatggtaaatggttaatcagcaaatcacttttccctgttggtaaacctggtggtcatggtgctatttggaaacttgcatatgatagaagtgtactccaatggttacaaaattgtggcaggaaaggtgcaactgtacgccaagtcagcaatgtggttgctgcaactgatttgaccatgatggcattggcaggaataggccttcgatgcaacaagaaattagg

SEQ ID NO: 361032 - DNA, 120 bp, Zea mays
ggagagcttgcaaagaagcttcatccagacacgaataaaggtgatgcggatgcagaaccgaagtttcaagaggttcagcgagcttatgagttctttaggaacattttcagggatagggat

SEQ ID NO: 361033 - DNA, 271 bp, Zea mays
gacgacgacgggcggcagcaccttgcggtaatcaggggtgctacacgggcggccaatggcggcggcggcggcggctgccggcggatggtccggggtcatacccgccacggtgcacgtccaagtgcggcgactgcagcccctggtacccggtgcacgtggccctgccgccgggcgtgcacgtcaccaccgagtactacccggaggcgtggaggcgccagtggggcacacgcctctacatgccatgagcgcagtccgagcaagcagacggcca

SEQ ID NO: 361034 - DNA, 315 bp, Zea mays
cggacggtgggggaggagctgtggaaatgataagaacaattcgaaaccaaggcccccccttttgtagcattatttctcctgtcgctgtatttttatcgaggtcttcatttttctgctgtatctatcatcacggtttctttttttgcatctcttctgagattctgtgtgtgggaattgagtccatgagatctgaccctatatttgtactcttcacatatgtacactactcgtggaaggaaattcagaccaaaaaaaaaaaaaagtaaataaaaaacaaaaaaaaaaaccaaaaaaaaaaaagtaaaagagaagaag

SEQ ID NO: 361035 - DNA, 263 bp, Zea mays
gccgctccgcgtctccagtgggctctgctcctcctcttcaatcccactcccgccccgatggccacctcttccgtgctcccgctccacctcctgtcctgcgcgcgccgggccagcagcgccgcgcgcgcctccgtggccccggcggtggcggcgacgaccgcgcagtccctggaggagtcgttcggacggaagggcctgcggttcgtggccgacccggccggcgggcccctcgccgcggactcagcgtgctgaacggcagctcg

SEQ ID NO: 361036 - DNA, 357 bp, Zea mays
cccacgcgtccgcacctccaaacctcctctctatttccaatttccacgccgccgccaacatgaccacctcaaccgccgcctccgccaccgccgcgttgtccaccccatcctccgtcaatccccatcgatcgtcttctgcgctcaggctcccagcgtccctccgccgataccatcccaacagattcttatcgtcgtcaccctcgcgctctccactcgtgccggtctccgccatggcctctcccgccgccgccggtgagacgtcctccaggaagaaactcatcatattcgatgcggaggacgacctcgcggcgtcactggccaagtacacgtctgagctgtcggcgaagttcgcggccg

SEQ ID NO: 361037 - DNA, 350 bp, Zea mays
gtggtttgcttctttcataccttgatccaacatgatgaattgtccataaaagttgaccctgacttaacatggaagaaaaatacatttatgtattatttaaacaacttttttcatagcacatgtctagtgcagtggtgagaagccttcccattgaggcaaaggtctaggctcgacgcagctctctgaaaaaatagaggggtaaggtttgcctcggttattccttacctagatctcactcatgtgggagccaccaacactcggtctgtcctttttcatggcatagatatgcatatgcctacctaccaaatagtggacttccttttctaattgcctcaatcactgttcttaag

SEQ ID NO: 361038 - DNA, 353 bp, Zea mays
caacaattaaaagagctaaggattctgccaacattcggagatcacagttccatgggaattttgtatgaagatatttcaaagttttataaaatggctcctataacccctgtttggaagagtaatgaagcagcagtgattattcaaagatcccagtgactcactatgatcgatcaaaacacctgctaccacatgattattcaaagttctatctgagctagcttgtgcttcaatttgatctatctgtccgtcctcacggtccacatttgttgcttgcgtcaagactaggccgaggtgatgtcgacgctcatctacagagtgaggaactcgccccccagcaggtaaataatttgtgc

SEQ ID NO: 361039 - DNA, 351 bp, Zea mays
aactgttggtcaacaagcatcatctggtacccaggatacaaagaaaggaccatcgataccatttaatatgttaattccaatcctacaggcacatcttgacagagacaaagatatgcagcttcaaactgtttgggcaaaacttaggcgtaatgaagtcaacaaagatgatttcttaagagttatcaggaatattgttggggatcaaatgctcaagcaggcagctcataaagtttttgtacagatgcaagcacaggcgcaaagaaatagccaggcaaattcaagtcagcagtctttattctctcaactttctgcacagcagatggcttccagtggttcagcacagttacatga

SEQ ID NO: 361040 - DNA, 303 bp, Zea mays
cgaccaacaacgcgggcggcgggtccagcgacaacggtactgacgacgccagacggcaggtcgtcgtccatggcggcggcgaggcggccaagcggaagaaagggggcgccttcttgccccagatcgtgccgtctccggctgacggctgcgaccgctgcgtgcgccggtccaaggccacctactaccaggcctcgtcgctcgccgtcaacgccgggtcgtgcgggtagggctccttggcggcgtgcttcaacggcggcctgctagccgcagccagccgcgaggtgtacaggcgcggcgtcggct

SEQ ID NO: 361041 - DNA, 330 bp, Zea mays
cgcctctgttcaaatttcatggtctagaatatttgacatgttaggttttgaagaagtatcacatttgtgtttttcttcttttaatcagttgaggtactatattaaggctgtaagggtagcctttcttcccgctgttctgccttccaactatctcaaccgtccatccatgcctctgttttcatcgtccatcggatgcaaccctgcagccaccaacgtcggatgacgcccatgccgcaaatgccgcaactccacagccgccggatgacgcccacgccccacgcgagcaccagctatcccgatccatccctcctccccacgcccctctctcac

SEQ ID NO: 361042 - DNA, 320 bp, Zea mays
cggacgcgtgggtcgcgctgcttcaccgcgcgctccgcagcgtgctcgccgtccacgcgcagcgccggccgccggggacgccgctggtgcccactagctatacaggtgaggctcgtcaacaagctgcccgccagtcacgaaccgccacgccattcctcactttcgaaaccaagggcgcccacgcggccgtcgtgcaggatgtgcccatctcgcgtcctctctcacgctccgacgtcgagcggttgcacgcggcccttgacgctgccaaggatctccctaagactctagtccaggttcctgatctgccacaactgcaaagc

SEQ ID NO: 361043 - DNA, 308 bp, Zea mays
cgcactcgcacacagttgcgaccgcattgcatcgtgcgcggctgcagcacgaagacgaagctctggtacatggcgagcagcgcgtaggagcgcttcctgaggcagctgagcgcgagcaacggcggcgacgaaggggtctgcggcggccagcagctgggccacaaggagtactgcgcggagaggaggggctcccggcggtggtccaggaagcgggccgccgccgcgaggggctactgcggcgggtacgacgactacgacgtgaagcagcaggcggaggccgcctctgctgccgcgaggaagcgggtgat

SEQ ID NO: 361044 - DNA, 337 bp, Zea mays
ggtgagctggctgctcgacgcgtcggcgtggcccccgacccccgtccgcacgagaaaacaaatcgcctcttttccaggagccaaaccacactaaccttatatctgtcatactttctcgccccccgtgagccgtgaacacgtctcgcctcgccgccgccgccgccgccgatgggctccggggaggagccgtcgcagatgcggagggcgctggtggactctctcgcgggcgccatctccggcggcatctcccgcaccgtcacctcccccctcgacgtcatcaaaatccgcttccaggttcagttagaacccacaacctcgtggggtattcttcgaaggg

SEQ ID NO: 361045 - DNA, 300 bp, Zea mays
atccggctccatcagatccaacgccaccagctagcagcagcagcagcagcatggccaccaccagcacgcctcgcctcgccaccctcctggtgctcctggcggcggcgtcaccgctgctgagcgcagctcaaaaggacgcccccaaggctcctgctgcggcgaaggctgcgcctgggccggcagcgtcgtcgtcgtccggcgctggcgctgcgtacgcggcccctctcacagacgtgtaccaggcgctcaaggacgatcagttctgcgagttcaatcagctgctgcacgtctcgtcgcggg

SEQ ID NO: 361046 - DNA, 339 bp, Zea mays
gctttttcttcttctccaactcaaagcaagcttgagaaacaagaactggtccggctgctgcttacctgaatctcgcggcactggtccaagaatttctgcagcatgtctcgcctcttcgatctctcttggttcagacaaaattatctcatacaagaggtgatgattgaagactactgaattgcttctgcattctaaaaaggataaggtacccagccttcatcgatttcatgtgcgcaggctgcatccatgtctgcatcagcagactccgtcgcacctgaagattgcctacccagacagctaccagagatattgggagacttagctgacagaactggtgat

SEQ ID NO: 361047 - DNA, 336 bp, Zea mays
cccacgcgtccgataatatatgatatcccccagttgcagtttgttaacaataccatcttgcattcctcaattcttttagatacacaagaccctgaactgaggaaagttgagacttcctttctccttggaccactcttagtctgtgcaagcactttacctaataaaggagctcatgaatatgcacataagttaccgaaggcatatggttgtcttttgattttgcggatgcacaccctgatctgccggtgctgtatctacaaggtggatcaattcttcctgtaggtcttcctattaagcatgttggtgaagcaagtttggaggatgacctgtcactaa

SEQ ID NO: 361048 - DNA, 337 bp, Zea mays
cttcttcgtcaccgagccttctcgtcctcgcggacttgtgacttgtgactccagtcccttccaatcaacaagttgctatagtagtcccttccaaaatccacactggaaccggaacctccatctccaatccaatccaactccagaaccgcctccctgctgcatccccatcccgcacgaacaccaccccttgtactctccgcctctacatctcatcggctggtgcacctactccctcctctgcacggaccctccctcccttctcgtgctacggcagcgtggatgcacgagactacagctgtggcaaagcggagatccggcgggagtgcagcggccggcg

SEQ ID NO: 361049 - DNA, 316 bp, Zea mays
cccacgcgtccgctttccctcgccagccccccgctcctgaagcaatggtactggaccacgccatcacgggctcggcggcccgcaggctgagaaccaaaccctagcgccagtgctgctcatgggcccgccgcctccaccgccgatcccaccgacgacggggatgtacctcccggggcccccaccccccgggacgctcctgccgcacccgatgcacatggcgctcccgcgtgaggtcatcatttacatggacgagtgtcggagccgctccctcctcaagttcatttccgacgcggggattgtggcttcgctagaggac

SEQ ID NO: 361050 - DNA, 305 bp, Zea mays
ggaaataagttgcttcactaacatgtaacatataccctatttttaatatatatatttgcaaccttgccctatgactctgtttgagatttggagctggtgatcatttaatttgttttatctggacaatcatgttttgatttcaatgccgttttcttatttggcatctggtagtcatgttttagcaacttcctaggaaagtatcgtacctcctttactcaatttctagaattcaaaagggaggggtatgtaggttcaattaattctaaggatttatgcctagagtataaagttgtctcagtgttagt

SEQ ID NO: 361051 - DNA, 299 bp, Zea mays
gatctccagatcgaccaagtcatcgagaagagaggtgcatttggtggtcgcccgttttggtaagaagttgaattcgaacctgaacctctgttgccaaagtgccaactttagcctactccaccgatttccagcgcggacatgctcttggcgtatttgctagtatatgctagtatatgagatcgaaggcccgtggttaagctatccgaggatgttcttttattttcaaaaaaaaaagaaaaaaaaaagaagaagaagagaaaaaataaaagaaccataaagagaaagaggaagagtaagaa

SEQ ID NO: 361052 - DNA, 308 bp, Zea mays
cccacgcgtccgatcattagaagggtgatctgtcctggtgtaaggacgtggggaataattggaaggtggctacaatcctcacagcaatgataaaccggatgtctcggcttaccctcaggcataccaacccccaccctacacaattgaccctcagcacatctctcaaaactactactccaccaaagccccagctgctccatacaactaccctaattttcagtcatatccaagttttcaggacagcacgtcaccttctgtcccgactgagccgacgtatcaatcttcattctatcctgcaactgatggtc

SEQ ID NO: 361053 - DNA, 302 bp, Zea mays
cccacgcgtccgcccatggtcacaaattgaaaaactgaagcaagatctgagtcatgagaagaatctaaattcagatcttcgtctgcacattcaaaagatgcaggaatccaactctgagctgcttttggctgtgaaagatcttgatgagtcgttggataaaaaaaacagagagatttccattttgcaagaggatacacaggaggcagaatatgagcatgcgctgtcaaatgtgcacaactccggacagaaattagccttatctgaaacgagttcataccaagagaaggaagatgagcttatgc

SEQ ID NO: 361054 - DNA, 301 bp, Zea mays
ggtggacgattggtgctgcatctaacgaccttcctgtcagttcaacgactgtcacaaccaatgaaataactgctatggtgccacctccatcaacatctgctgcggatcgcctaggatctattttacctgaacttttgaatactggggatgctttggagagataccaacaggttgcccaaaagctggaagccttgattgctaatgatggcaaagatgtggaaattcagtctgttattatggaagttcctgatatcttgcgtaggtgtgttagccgtgatgaggctgcattagcagtagcaca

SEQ ID NO: 361055 - DNA, 268 bp, Zea mays
gaagaatcagtgaggtggcacctgaggttcttgagcatgtacctaagtgtgttgtttccaaaaggctggtaaaagatgctttaacaaatctgaattgggtggctgatataaggggtgcgctttcagttagggcgcttgcacaggttttggatctctgtgacttgctggagggcttagttcttcaacctgggattcctgataagcattcttggaagttcagcgcgtcgagggaatactccccctagtcctgccaacaaggtcctccccc

SEQ ID NO: 361056 - DNA, 292 bp, Zea mays
cggaccgggagcggacactcggccgcatccactctgcgcaacgcgagcacgatcggtgacagcgtgctgctcatagtagccctactcttccactccgtcttcgagggcatcgcatcgggatcgccggtaaggctaagccagatagagatagggatatatggatgcgttgttttgttcccttccaacttgcagatgacgcgtagaaattcctttatgtgcattccgggtctactcttatcagcagatgtcgccatcatgtcacgggctaaactgacgaacttagcttcgtctg

SEQ ID NO: 361057 - DNA, 298 bp, Zea mays
gagctgaagcaagactgcttctcgcagctccacagcgcggccaacaagccatgccccggacaggagccgtcttggatcgtccggccaaccaccgacaacgacgacgacgacaagatgaagaataccttcgtcgcagtcgccggcaaggtgcactacccatcaaaggagtgcgcctctgctttcctcttctaccatttgttcaagaagcacctgttgcacaagaagcccatggtgatcatccctcacatccacaagaagcccatggtgccgatgtaccgccactcgcccgtgccggagt

SEQ ID NO: 361058 - DNA, 283 bp, Zea mays
ggacccgtgcggaaggcgggttcccgagcttcagtgcgccgcggtctccctgtgcttgccagcgctgcttcccttgcctacctactccccgagccagctctcctacgcgcgctgctcctcgctgccccagccgcgtccggccaagcattcctgcgccctgctctagctcttgcgcgcggtgccccagctgctccatccatggcgcgcgacgggactgaccgtgtgcccagctccagtttggttcttccctgggcgcgtcgccctgcttcctctctctccctca

SEQ ID NO: 361059 - DNA, 303 bp, Zea mays
cccacgcgtccggttggctaatcgcgatgtgtggaggagacaaatttctaggatctgagggtaagagaagccaagacctagagcgatgatcactaggtgttcggtgaaaaggatgaactggtgattgtggttggtcttgcgaaatccgagttctattttatattggtgttgtgcggtgtgatctccaattccatgttgctgatgtcttgctccatcatgaccttagggaaggatgttttcctctaaattatcgtaataattatgctgggtttatgtgttgttttagcatacattgtgaaagca

SEQ ID NO: 361060 - DNA, 305 bp, Zea mays
ccacgcgtccgctgaagggcagggaggcagcaggggggtcgtcggagctgatcaacctgaacaaggagacggaggcgtcctgcagcaaccgcagcgaggacagctccgagatcaacctcgacatctcgcgcacgccgccggcgtccgagggccccatggaccatccgccgccgccgccgccgcaccacgccgccggcggcggcttgatccctttctacccttccgtcggcggccgacatagtattgccgccggcgtgggtatggaccaactcctgcacgcctccaccccgaagctggagcaacac

SEQ ID NO: 361061 - DNA, 295 bp, Zea mays
gtcgtcttagctggagcctggtttggttactggggtgtccgtaaacttgtcctggcagaagatggatctgttgatgagggtgtggcttattttgttgagtgggctatcttgattgtttcagctgttatgatcctccagagttctctggactatctctttgcctttgcagctctaatcttctgtgtaatcatcaaagcgattgcaagaattgaaggaaagtcaaaagttttacactatatattcggtaattcatctcgttatggagatttctttgaagactattctagcatgaatg

SEQ ID NO: 361062 - DNA, 297 bp, Zea mays
gtcccttcccaaggttaagtttgagctttcgctgttccggctattcaatcttatggcgattcctgttctgtctatgtttctcacagaacttctgacagaagatttgccacgtctctttgtgcggcccaaaaagattgtccttgattttcaaaaggggagagctatgggacctgtttcaggaagtgttgcaagtgatataattcaaaatgttgcaactgacctgatccaagaggggaataaggactttgttggagagctatcagtgacactagttgatgctagaaagcttagctttgt

SEQ ID NO: 361063 - DNA, 296 bp, Zea mays
atgaattaccatggttcatggttttgttcctggcaagggacatgatgtgcaattcttttgggattatgcactagaagggttaatcactaaattgtgattttagcaaaattattgctacatattttcactttaataggacggcctgtccttgtgggtcatcactatgaaacttagttgtaagggagaacttctgttgctgccagagtttgatgtttttggttttgggattcagaaaataggctgatctatcaatgcggatcatgactatgagactttgtcattgctctctttagatt

SEQ ID NO: 361064 - DNA, 297 bp, Zea mays
cccacgcgtccgcccacgcgtccgccggcgacgggctctgcgccaaggacgaggccgacgtcgccgccgacatcaaggtgctcgtcttcggctccaagcttgtcggcgctgctgggggcgtccccgccgccgccacgttcgccaaggtgcccgcgctgaacgggatcttccgccaggcggtgcgggcgctgcatgtcttagtgcgcatcgagctcaacgcacccgtcaaattggggaagagggatgctggtgaaaccggtgaggggaatgaggaggcactggtggtgctggccacac

SEQ ID NO: 361065 - DNA, 299 bp, Zea mays
agtactgcaagctgagctaaagaaaacaaaagagaggctgcaacagttgaagaactgaaaggacaaactgatcctggaactgtggtagacgctaatattgctgaaaagttagcacaacttaagaatcaaattgcgacacttgaaaaacgtgaagaaagatacaaggcggtgtttgcagagaggatctcggtcttccggaaagcctgctgctcccttttcggttacaagatagtgatgaatgatcagcagcagtcaaatgggattcccgtaacacgctttattctgcagtcagtgtatgc

SEQ ID NO: 361066 - DNA, 294 bp, Zea mays
gattaactatagaagcaacagcttcattcttttgaacttttacaatctcattgtgcatgttagaatttgccagcttcaggtttcattagttttctacatatcttaaatcctatcaagttgttgcgatagatcattctcaatattcatcaaagaagcctttagccgctctatctctaatgtggtagaattcttctacttccatagttccacaatatgactattgggaacactttttgttgactccagttccttttccaaatccttaacattagaatgtgcctcctcttcctctaa

SEQ ID NO: 361067 - DNA, 290 bp, Zea mays
gtgttgtgctggtgtgagatctgggcggggcctctgttatccggtttgaaaccacgttttcgggcttcgaattttacggtcccttatccggatgttttgtttttttcttcccgttatcaggcgaggtcgagcagcagaggacgccggcgacaactagcttgctccccggagcggagggcgaggaggtcgaaaggaggaaggagaccatggagctgttcccgcagagcgtcgggttcagcatcaaggatgctgctgccccccctagggaggagcaaggagataaagagaag

SEQ ID NO: 361068 - DNA, 299 bp, Zea mays
ggaccgtggcaacagcaaaggtaggcgaaccaattgaggaggatgttagatccaatattaaagccaagacaatctagtccagtacgtccttcatttgttcctaagtgtcaacttccagtcaataccaccaagcagtctctggacttggggaaatcagtgccacataatgttcagcgaaggtcggttgatttggtagtcaattcaaattatctgatggaagaaaataggaatccgcctcctccccgtgtgctattgaacactgcaagatacatacagacaggaaatgattcagcaacaac

SEQ ID NO: 361069 - DNA, 297 bp, Zea mays
  unsure (1)..(297): unsure at all n locations
gagagatccggagcagccgcagtcccaccgaccccgccgccggtcgccctccatctcctcgccgctgcctctcgtttctcttttcaataatcaagatgagccgtggtggtagtgccggtggtggtcaaagttctctgggttatctctttggaagcggtgagccccccaaaccagcagtggcaccagctgcaagtgctccacctgttgagaaaccatctgctgcaaagactgatgcgggcaagcaggttgctgctgaggttaccagcaaaaccantaactaccacagggctgatggtc

SEQ ID NO: 361070 - DNA, 202 bp, Zea mays
gggatggggaaatttcttcccccacggggatgtaaacggggaaaatttctcccccgacgggtaaacggggatagggatggggaagcattccccatccccgttccccgcgtggacccgttaaacttacatgtgacgatgttttcatataatagttaatgataaaaaataaataattatcttgccaagagatcactagttgtac

SEQ ID NO: 361071 - DNA, 298 bp, Zea mays
gttctagatcgcgagcggccgcccttttttttttttttttttttttttttttttttttttttttttttttttttttttttttttaggataacagaagaaattatctttgcaaaagtttgacgaagtacaaatgtttcctgatctaccgtctaacacagatcagtgttaccctagagtttgcccttacaaatccaaccagttacagatcgaagtcgcgcaaacactgcagatattactcacgacatcatactaggaatcagagggccagattctaacgacagacgcatggcaacaacgt

SEQ ID NO: 361072 - DNA, 296 bp, Zea mays
aaacgctcccctagtcccctgctcagcttctccagagatcgccaaagaagcagcatcggcagtaagctctgcggcgatggggtacacgtacactccgacatactactcgggcctgcaggacaccatcgcgtcgctctgcaagtccatcctgccctccttccgcgtgggccggcggctcaccgccgaccaggccgccgcgcggcgccacgccgagcagctcaagtggcagcaggagtccttccaccgcatcctccacctcgccgcgctccaccgcgagggcatcgctccggcctccg

SEQ ID NO: 361073 - DNA, 293 bp, Zea mays
ataatgggaccgaagtatgaagagcatgatgtggaggcatatcatgacgctaaatttgtagaagatgaagattgtgcagaaaatcacatcaatcatcattgtgatgatggtgagcaacaccatcaaaacagtcctgttggtgcagccccgacagtgcaacgccatcaaaatagtcctgttggtgcagccccgatagtgcaacgccatcaaaacaatcatgttagggcagccccaacaattcaacgccatcaaaatagtcctattggtgcagtcccaccaaagcagcctcgacg

SEQ ID NO: 361074 - DNA, 291 bp, Zea mays
gcaggcgagcacctcgtgtcatggtcgtgggcgccccgcgtcactgccaggggcagatctccgaagcccgaagcctgaaggtgaagctgttagctgtgaagcagactgcctacaagcaaactagatccaccactggacgaaagaacggagcaaatttcttatcgattatttaagacaagcaagcagacgggcctggcctggcaagcttggagccgatgtcgggcgtgacaagcgtccaggacaccagcgagttaaaaaacggcaaggaggagctaagtgaactcgacgcgc

SEQ ID NO: 361075 - DNA, 288 bp, Zea mays
ggaccgtggagcttatggcggttgaatcccttgtcttcgcccccttcttcgccgcccatggtggcattatcttcaaaagctctctaaagatagcgacaacgttagttagtcgcaagagaaaggccgcagttctgcgctgcgaggggaatagagcagtatgtcagctatacaacatctatggcatgtgctttgctcctccacttgattatagcccccgttgtgtgtttcggtttcaaaaaaaaagaaaaaacagacaaaaaacgcgaaagttctcgttgcgacgagggg

SEQ ID NO: 361076 - DNA, 287 bp, Zea mays
ggaccgtgggcagcagcaatggtggcggaggctcttggtaaggtggcgcgccatgcatggctcatgcacgcgccgttgacagcatgcggagataggggtagagacaaggatcggagttaataagagggtggaggtgattagtgttcacatatggcgtttgatctctctggttgtttgccttctctatttattttcggttcttggtgttcgtgtgtgtcaatcgacttgggggctaacacagcaggatatacagattgttaaggggcggtgaaccggttatttaaaaa

SEQ ID NO: 361077 - DNA, 301 bp, Zea mays
gctccattagattgaggttgttgtcgctctcttcccattgtcctggttcctctttcctttccaccttcaacgatgaaccctaattgtttcttaagatggcggcgatgacaataaggcaaagctagacacgtctatgcctgagtctacccgctccgttagattgagattgttgtcgctctcttcccattgtcctggttcctctttactttccaccttcaacgatgaaccctaattgtttcttaagatggtgacgatgacaataagacaaagctagacgatgttgttagaggagatgtgggca

SEQ ID NO: 361078 - DNA, 297 bp, Zea mays
cccacgcgtccgacgtagcaaccgctccctagaaccaccgctcgccaccctcaccgcgtcgtcgaacgccacgatgcgacaacttctctcctgttgccgcggccacggtcgcatccccaacacccaccaccaccacctcgccctcctctatgccatctccttcccccctcatcctcaacgatgggcatgaactgcagcagccactcctctcttcacgacaagcacaaccggtgactgctctaccctctgtgacgagcgcaccaagatccgacagcagctccttcctccatgcgtggg

SEQ ID NO: 361079 - DNA, 296 bp, Zea mays
cccacgcgtccggctaaggaatgagctacagagtcttaactcccagatttgcttgacatctgatctttagacctcaaatcagaagttgggttatctttgcttgacaacccactacattgatgcaaactttatcttgaaaaagaagactattgcattcaaagttgtaaaatatcaccctctcgcatatagggatggcagttggacccgtgggtatggatacccgcgggtttcgtacccaccggatatggatacgggtacaaaaactcacccgtgggtcctatcgggtcggataccga

SEQ ID NO: 361080 - DNA, 289 bp, Zea mays
ggtggatggcagcgcggccatgggagaacaggctgatggaggagcacaactccagctccccggacttccggtcctccaagaactgcgaggactcctttggtgtgctcggcgacttctctgaaccgaactcagtgaaggtgcgcaagaacaatgtcagcaagcgggtctgcgcaaaacctccagggccaacacacgcccacggacatcatcagcgcctcaaggcccagtcgatctcgtctctgagcactgagctgcacaacgacgagagctccgcgtcctcctcgtcttg

SEQ ID NO: 361081 - DNA, 290 bp, Zea mays
cccacgcgtccggtccacctgtaagcaaaatatgcctagtcattggagcacttgtctcgggatatagtgagacaaagtttggatcatgatattggtctagctattgctcatttctcgagctgtttcattgggaacatttcttggaaagtttggatcatgatattggtccaactattgcttgatgagatagcaaatgtttgagaacagttgcttgacttcttcatgaatgaggtgatagacattggtggattatgcaaggttgaggatgcttcacataactagatctagca

SEQ ID NO: 361082 - DNA, 181 bp, Zea mays
ccctcctctcgcctcccccccggccccgccgaagaggagcagcgcaccgcgatggaccgcgtccagctcgtgctcctcggcctccccatcctcctgttctgctccgacgtcgttaccctcttcgcggctctcccgccgccgggccccgggcccgacaggggcccccacgcttttcagcccg

SEQ ID NO: 361083 - DNA, 319 bp, Zea mays
gaaccagcctctatgcaatattggcaagggagctgtctataaaccttttccaaaccctacctttatgtgaactttcatcagtgggtggtatgcttattcagtgacattctatgctatattcctcgaccacttatgccaattgctgtacagaagtgttactagcctttctattgcttctaactgttttttttttcaaaaacagataaatcttccacacagttttattatgtagcatgctggctcgctgtcacttcattcatttaactttaacttcatgtccttttagaggcccctgaatatttttgcataattagtatat

SEQ ID NO: 361084 - DNA, 311 bp, Zea mays
gaagcagcaacagtggtggtgcctcgggcagctgctactggaggcaacgcagcggcggcaggagctggccaacgattttgtccgccttgtatcctggctgcacgcatgcacggagaccctcctgtgtcaggctgcggatgcggcggcggccaacaaggaaatcagcatcgccaccggcaccgcaggcgccgccgcttcggccgacgtctgccggaagctatccaggtacatgatgtacctggtggctgcaaacccaggaggtgctgcttcctcccttttgcaggaaggcaaccctgaagcggagtttcggc

SEQ ID NO: 361085 - DNA, 309 bp, Zea mays
aagaggacgacgacgatggggacggcatccacgaacacgtcgattgaggttgcttgaggttaaggctcagaaaaggagaatttggggttgaggagggaagaatgaacattggcatgttgtgctggatgctgaactgctcgcccttctatgattctatctcgtagttctcaggatatggcattatgacgacgctcattataaaaagccaggtcagaagctctgcaaaaaggataccaacggatgaaactggtttgagttgtcattattgttgctgttgtttaaacgaactactgatttttttttttatat

SEQ ID NO: 361086 - DNA, 307 bp, Zea mays
  unsure (1)..(307): unsure at all n locations
cggacgcgtggngggtgtgctaggcgtgttgcagatttggccgggaagcgatccttcttcaccgccgcagccgacgatggcaatcccgttacaccctaccaggcacgggtggtagaacttgaaacacccgagacagcagcagcagcagaagcatgagtgtttgaagcatggtttcgatcagacagcttagcttggctccccttcgtcatgagtgtttgaagtgtctgcttacttgagcttgcatctaggtgagaggccttttttgcagtgtgccactacatattctactgctacaatcgtatcatat

SEQ ID NO: 361087 - DNA, 307 bp, Zea mays
agcaccgcagctagtccattgcattgacgcctcgatcagggctagcgacggacgaaagaaagctctgcatgcagcgcctcgccgccgccgtcgtccccagcctggtgccgccgctcgacctgtccatggccgcctccgccgctgccggctgttttccagcagaagcagccggcagtagtagccggacgacgacgtcgacgccgacgccgacgcggcggccattattagcgcaccgccgtggcgggtggtgctactgacgctcctgctgctggcgccgagctgctgccaggcgacgcgaggcatgcag

SEQ ID NO: 361088 - DNA, 288 bp, Zea mays
cgagatccactcggagggccaccgcgaccgctccggtcggttccggcgaggtaccagcctaccgcctccgcaatgctgctccgttccctctctccttgcacccgcttgctggcgtcgatccagcggactgttcccgtccttccccgccgatgagctagcgaacgaggaagcgagcgaggttccgcgccgtcgtaagtcgtaacagcatacacagggcagacaaagctgcgattttcggggggctgttggtcccagcgtggttgttggtggagataaccacgtgaaagc

SEQ ID NO: 361089 - DNA, 263 bp, Zea mays
  unsure (1)..(263): unsure at all n locations
gcagaagacgcgcaagggacgcgggatcggctccggcacagggaagacggcgggacccggccacaaagggccagaagcgcgangcaccgctagtttggccttccaaggtggccagacccgattcggcgccgcttgccccgccgtgattcaagacccctctcattccattccacccgtggactgggaaaatgcaaactcataaagctggaaaatgattccccgaatgataccagagacctaaagaacagtgccatggaacaata

SEQ ID NO: 361090 - DNA, 295 bp, Zea mays
  unsure (1)..(295): unsure at all n locations
cccacgcgtccgtaaaaaagtaggcatccagatcggccaacaaggcaagatgatgatcctctctcgtcactgctttgggcaggaaagcagtgacgagagaggatcatccttcttccttccgagtataaaaaagtaggcatccagatcggccaacaaggcaagaggcgcttcaatacacatggaagatgagcgagtacttctgatacaaagagtgttcggcagttattatcaaaataaataagccgagtaaaactccatatcggantcaacagttaccatttttcattaatcacag

SEQ ID NO: 361091 - DNA, 294 bp, Zea mays
gcaagatgcagtacgagatccaggtccagcagcagcatcagcatgttcagccgccgcagcagcagcagaaccagagcggcggcggagtccggccgaacgcgagcggcacgccgggccggcagcgacaataagtgggtctttcttgaccattgtccatcactagctgcatgcatgcatagatgccaaagcgtacagagcttgctgtacgtacgtgtcctcttgcacaggtaaaaagacaatggacacaccgaacagcatcaaaaccatgcatttttactcttttcgatccatgga

SEQ ID NO: 361092 - DNA, 286 bp, Zea mays
cgactacgccttcctgctcgccgcgccggtcaactacacgtccaagaaccctgaggtacgtactaatacacaagctacctatatatatacgtacggtgcacgaacgagctatccgagttgtgacttgtgatggtggtgtggtggcggcacgcgcgcatgcagaaagagctgatggagctcggcgtccaaggcactctgaacgtgatgaggtcgtgcgtcaagtccggcacggtgaagcgcgtggtcctgacctcgtcgacggccgccgtctccagcaagccgctgg

SEQ ID NO: 361093 - DNA, 313 bp, Zea mays
caatatgatgttgcacaggaaacagagggtacacaaatggattgtgaaggtgaagatgctgaaactgatgtgccatatgattcagtatccagaagtgatcctgctgagtgttgcaaccaaataagtgatgtttctctgagtcctgaaaactacagaacagcagacgatgatgttttggttgaaggctgtagtgtagctgtggaggatccaaactccagtgagcaattagcacatggccatgaatccaacagtgctgccaataatgaaatggatgaatggcagatggatcctacttcaacagaggaatctagtc

SEQ ID NO: 361094 - DNA, 118 bp, Zea mays
acaacttgtatcgtcatacagctctgcagtctagctttagctgcaacatggtggctatacttgatgggcagccaaaattgatgggactgaaagatattcttcaggcatttcttgactt

SEQ ID NO: 361095 - DNA, 293 bp, Zea mays
tgagaaaaacaatgtccacatttcgtataatccttcattgactgtccttactttcgattgttaacatgataagctactactcttcagaatcagagagctgtttagatgactggagttcacatctctgggtgccagacaagctagagatggtagacttgataacatgaagacctgttttttatgctagctgtttacgtgcaatttgttccttccacatcgtgattcgggtcgtggagattttgaagatcttatacattgcgggcgagcgaagtcacgactcaatttaagtcgga

SEQ ID NO: 361096 - DNA, 328 bp, Zea mays
aaagatttgagaggattctatgaactgaagagtgtaattcctgtggatatgtttcctcatactcctcatattgagtgtgtatgcttattggagctgcgttgattttcagttttggtcaggctagtaatcaacctaggaagagatgcaagccttgaaaagttagtgggaagagaagaggaaaaggaagagagcataccagctaagccatctcgtttctcaaccaaatcagtgcagactcggcatcatcatcacatgcactcaagaaaatttgcctgttgtcaaggtccttgaagacattataggctttcgctttttcctcctctgtaac

SEQ ID NO: 361097 - DNA, 141 bp, Zea mays
cccacgcgtccggattatctcaatgatgacactttttaatcggatataccttgtgaaaatcataaaacatcaccaacctatacacacagtagcggcaatgggatgctggcctgctctacaaattgccgctgctgtgtgtgt

SEQ ID NO: 361098 - DNA, 250 bp, Zea mays
tgcttcagtttcttcacatgaggctgcttttgagcaccttatgtgccggaaagttccagaggtagaatatatactcaagggacagcatcaaagaagtcaactgttaagttttctttttgggttgggagaagattcattttgggatgaaaataattccattgcagagtttacatacaatttggactggaaaatttagcagtctaaccagatacatctggatagatactgtaaaagagatacagttggatcc

SEQ ID NO: 361099 - DNA, 104 bp, Zea mays
ggcctacgtccacgacgacatgagcatcgtgcacggcaacctgacggccagcaacgtgctcctggacgagcagcacagccccaggatgtccgacttcgggctgt

SEQ ID NO: 361100 - DNA, 291 bp, Zea mays
  unsure (1)..(291): unsure at all n locations
cggaccgtggcggnacgcgtgggttcggcttgactcagatgcagcccgccgccgttagctccggttgccgcctgctcgcacccggacacttcgtcctcccagtcgccggcgcgcctgacggcggtgctggagcaggtggaccagttgctaagccaggggaacgacatggccgcgctctccctcgtgcgcagtacgcaggggnggtgacggcgggctccgggcctttggcgccgccaggcaggaacctgtgcgaataatgtgatggaatgtaactataagataaatttcttt

SEQ ID NO: 361101 - DNA, 287 bp, Zea mays
gcgcctaggaattacaaaataaatcacttcagtgccaagggtggaacaaaacctaacacgaccataattattacattgcagctagaccaccccggacgcgtgggatcggcatcctcccggctaccccgggccgggaatcgaaaaggctgccgtgttctccacttctccgccttcccctgctctcctggacctccgacgcaccccaaacaccgcagagatgcagaaccctagctgctaccacacctcgacggccgccccgtcgtcggcgccgtccaagggcaagtcgt

SEQ ID NO: 361102 - DNA, 300 bp, Zea mays
gtgccaatgtatcactgtatcaggtcccaattccacttgttataccatcttttttcttcactggggattgtttttgaataatctgctgataataccgctccgttcttttgagcttttataatctgccagaggtaactagttgactataaaatctgggaggatgctaccatgtgaattatgtctttctttttacctagttgggtaaaatgcgctaatggtttgctatgcctaaatatgaattcgagttgactatgttcctcattgcgatgtttgtggcacacaggtatagcacttctaatt

SEQ ID NO: 361103 - DNA, 303 bp, Zea mays
aaattccaaacttcttcagtacaatagcaatcatcttgttaagggggaaccttaaaccagctttcagaaaacttttaaagaccactacctcattctttcctggttttggggtagtttcttctccaccaaaacgaattaattccttcttggcctcgctaaaataacctagcttcaccatcttaggaagatcagcttcagagatggtggaccttccaaagtccagatgactaggtttacttggcatcccgaagctgtactcatcctcggaaccaatttcttcaacagtagcttgtgttgcttcgg

SEQ ID NO: 361104 - DNA, 299 bp, Zea mays
aacttctgtatcagctgtagatgcacaacacttttctaaaggagaagcaaaacttactgatgtttctagtctgccaactagtagcatctccggaacgccagccattggtggtgtgattggtattccaggtcttacacacatacccaatctcgattctgtgaagagagcccaagagcttgctgctaagatgggattccgccaagatccacaatttgctcctgttatcaacttcttccctggtacatccactgaagttactgtgacacaaagacctgcaaaggctcctgttcttcgccttg

SEQ ID NO: 361105 - DNA, 232 bp, Zea mays
gatggagtcaggttttcttatggcacttgattacatgatacaacttgcacagaaggacacagatgatgagcgtaagtctattcttgaggtaattaagcagacagtgctagaccatctgacgaagaaatgtcctccacatgtccaggttgttgggctactttgccagactgaaaagaaagagagcagacatgaattgttgcgccgcgtactgctggtggaggtgtttttaaga

SEQ ID NO: 361106 - DNA, 299 bp, Zea mays
cccacgcgtccggttgcttagaaggaagctgaaagattcagaggaatctactcatgcattccgcaaccaaaattctgtacttcgatctgaaaaaagaactcttatgcgtgaggtggatagcatcaatagtgctctactcagtttggaaacccaatatgcagagttagaagggcgatatttggatcttgagcaagacaaagacaaggccctcaatgaagtgatcaaactacgagacctgttgaggctagaaaaagaaaaacacaaagaagccaccaactcagacatgactaaattcagtg

SEQ ID NO: 361107 - DNA, 295 bp, Zea mays
aatattgtctctggtttgattccttttgcctctatgttagcaatatttaaggataatacagtaacaaagttttattcattgcatgttgcttatttttaatgagactactgcctaacttttgtttcaccatgaagattatcagattctgccctgacaatttttttgaggttgaagcctttgtcttctctgcaatagagttattgtctcagtatctgggtctgatacttcaatgtagggatgggagttctcagaataattcaagtaacactttgatttctgagttgtctattgcaag

SEQ ID NO: 361108 - DNA, 106 bp, Zea mays
atggtatcagcctaggtttaggttttcctctcccacagcatggcagccgccggctgctcccaccctacatccgtcgcctaccatcgtttcccccgggatgctcaac

SEQ ID NO: 361109 - DNA, 304 bp, Zea mays
gcatcggcggcggagagctacgtgtacagctacagccacagcagtggcgtgcgcgagcgacggctctctgcagtcgctgtcggggtacaacagcaacagcaacagcaagcaaacagctgcggatcacttgggtgtcgcagccgcagcggggtacctgcagcaggagcaggacccagcagcagcagcagcagcagccgacgcgctgcactgcggaccctccggtgccccggcggtcgttctcccgtcggtgtccagctccagcacgctgaactcgatggctggcctaagccccgcggccaccacc

SEQ ID NO: 361110 - DNA, 290 bp, Zea mays
gaaaaagaaatagcacgaattcctattgacttgaatgtaaacccgggagcatctattgcgctaccacccgaagtgagcacccaagctaatccatgctttgcagatgtgcttcgaagaaattcagaaattcaagacaactcaaagcatattgagctcaagacagatttagttgaacatatatggcatcgatatggtccaaagtagtatgaatattgtaattttaatttcgtgttacctaaattatatattatttatgtaaatattatgagtcaggcacaatacatctttgc

SEQ ID NO: 361111 - DNA, 304 bp, Zea mays
accaattaaattctcggtatcattgagctacttacccgagccacttaaaaataatatttggtattgaacaaaggatgtctctgtatttgtggaaagcaaatgcgagcgtattgctcatccctcttttgcattagatgcctgtgtggacagtgtggtggactggtggtactgcatcggtagcattctagtttttgcttaattgaatggtagttattttggtttacaaggtatagcttaagaaagtctggttcactatttttcattttggttggtatattcacacatcacactattcagctagtcc

SEQ ID NO: 361112 - DNA, 296 bp, Zea mays
cctactacccgccccgcccttccagttccagaagtttctggaagccaacccaagccatggacgccgccagcatagccgccgccgccgccgccgtggccaccccgccccctggcccggccgtgaccgtgcaggtaccgcgcgggcaggtggatctgattgacttcatcgactggactggcgtcgagtgcctaaaccaggactcctcccacagcatcgtcaacgcgctcaagcagagtttgagggacgacgaggggctgtacctcgccagtgattcggacgagcagctgctgatctac

SEQ ID NO: 361113 - DNA, 240 bp, Zea mays
aagacagttcgagcacaacccctgccaagtgttcgatggaaagtctgaaccaagattcatcgtcgatttgcgattatcaaattgttttggtcgtggtaagccgatgggttatgtaacaccccaggtgttaccatggccatggcacatctatgcactaatgactgtgatcatgtggaagaaacttgagcaggagaacataaaaccttgggaaccatgtattagccaagaatgttaatgacc

SEQ ID NO: 361114 - DNA, 315 bp, Zea mays
gcttgagcaacattgtgttggtgttgcatcgcttgctgcttttctatctgctctgaaaggcaatatggctcggctcccaagtactgctgctaatttccatctcgccatcgtcttgtgcttgctccatcacctcataaacgactacttgttggctgacgctgccattgttgagcacaccttccatgtgggcaacctgagcgtgcacggctggggcagagccaggtgatcaccgcggtgaacgggcagttcccaggccccaagatcgaggcccgcgacggcgacacggtggtggtgcacgtcgtcaacctctccccc

SEQ ID NO: 361115 - DNA, 315 bp, Zea mays
ctccactccattttgtttctctctccctctagatgaagggggactctataccaagctgcttgttgcctacccttccacgcttacgctcctggcattctccggaagcctctaagaccactgcttcggccttcaaagggatggtggtggtggtgacctactcgacgtcacacaacctttctcctcatcggctgacgactgatggcaaccgagatccagtccatagacctagattaatctcccccatcctggttgctcgaccgagttgctcagatccatcgacgaagggagcgactacatcaccgccactgtcactta

SEQ ID NO: 361116 - DNA, 302 bp, Zea mays
cagacgcgttcgactgtgagccacagaaaatgccaaaactcagtaatgagcgcgtatcggctggaggtcctatagagacatgggactagacggatattgtgcgaagtgttccctgcatagaagatggctataatccatggaggctcctttgcttgtctggtcgtgatagctcccacgcaaccagtgagctattgaactgcacgggacttgcagtttctgcgtcaaatataccctcgagaaaatgaaggtagcggtgccgagtaacattagtaagcaacgacagtgagcattatactggaagc

SEQ ID NO: 361117 - DNA, 310 bp, Zea mays
accacgcgtccgcggacgcgtgggcgagcgaggacgtagaggatgacgccgcacgaccagatgtcagccctacgaccaggcgtccgtccaaacgaactgtgagcgtccgtcctggctaccgtccagcgagcggcacaacttttctacgcacaacacattccaagaaccgaaaatggagagtgaaggagctggtgagcactttgtggaacaagctgatggtagtggccatgttgtgtggacttctgcaatgtccgcttacatgctcagtaacctagcaagccttgtggctgaagggatcaggacatcaaca

SEQ ID NO: 361118 - DNA, 214 bp, Zea mays
gagtagcaaccggtcattttaactagtgtagcagcagggtagggtggtagcagcggagatgctttcgcagttgttcggtggcagtagctggctagccatctcaggtcaattgatgctaggtttagctaactgtctgttatcagcggattcttagttctctagagctgatatatgtgtaatggtttaaacaatctaatcagtgactggatccagc

SEQ ID NO: 361119 - DNA, 315 bp, Zea mays
cccacgcgtccggcaccacaccacaagcgcaccgccgtcacctctgcagctctgccccatcgcggccccatcccgccgctcgtcgacgacgccacaccgcccctcggccgcggagaggagagggctgatgtgttcgcggtggagggcatgaagctgcgcagtgcgaacgctaagctagaggagaacaacagggagcttgctgcaggacgcgattgagcaggcctcctcgacactggtgtgccaccggcccggccctgtcccccctcgtcgtcgccagtgcgcggacgccccgccactctccatcgagcggcaagg

SEQ ID NO: 361120 - DNA, 315 bp, Zea mays
ggctcacagagatacctcaaaacccaaccaggccggcgtccaggtgtccacagaaagaggagagcagagagagcgggagatcatggagctctgcgtctctaccaccgcctccgtccgcgccaccgccgcgcccatatccttcgcgccgccccggcgaggcgcgtctgcttccaccgccctcccgctccaccgccgaatcccaactcgaggctggtgttgcgccaggcggccgtgcctgacccggcgccctccgaagagctcgcatccgcctcctacaccgtcgtcgtcgcggacaagcccgattcgcctgccgat

SEQ ID NO: 361121 - DNA, 140 bp, Zea mays
cccacgcgtccggaaagatgattctgcaactgctcctagccagatttcatttggtagctttttaaaaactgacaagttgaatggggatcccagcattgctgaagataagtctttgaatggtactgctaaaccagaacaat

SEQ ID NO: 361122 - DNA, 293 bp, Zea mays
attgaaaacctgtctgcaaataggcagtcaaagttcctggcttttctcagaatttctgaggaggttgttgaagcagaacaagagttaattgagctacaaaagcatgtgtcttcccaaggaattcttgtgcaggatctaatgagtggtgtgtgtcgtgagctcgacatttggcacaaatctagcaaggaagaagatgcaacaaaaaaagactctgaaattgaacttgatgaaattttgtctgatgatacccaggatcccagaactatttttctagataagttagacgttttgct

SEQ ID NO: 361123 - DNA, 290 bp, Zea mays
gtgattttcagcagaaagctcccattacttcctgtttgatatttaaacgtgtcaaatgtcaggtgttttgagaacaagtttctgttcagttatatttctatgatccatatagattctttgcttgtaactactagaatacagtctagatcctttgttctgtcagatgaatactagcgttcactactcaactcaacgcataccctctaatctctgttgattggaggatatttatattaatgtacacctagccatattctggacgatcttctgaaagttggttgtgggtagtt

SEQ ID NO: 361124 - DNA, 285 bp, Zea mays
  unsure (1)..(285): unsure at all n locations
acgccaagacaacagtccgggacgcgtgggcgacgtggnagttgaattcaattatgagttgcagtttgttgatattaaaggaaagatacaggttgaccttttttacttaacaaggtaagagctctaaaattatgttaatgtaacagaagttaattttttgtaaatatcacttgcatatacgccaggtagatgctcactattttgaagagggaaatgtccagctggatactaacattgatcgtaaggactccaccagaatgcagtcacctgacgattgtgcggttt

SEQ ID NO: 361125 - DNA, 294 bp, Zea mays
aacattccttataatttgggtttcatccaattcatctttcacttggatagttcttagggacatactttggtagcttgtatttttactggattgagcaatgggcaagatattctagccttctaggacatgggtaaggttatcatatttggttctgttggttctggtttcctgtttacatattgttctactttcgtatgattaatttttaactctgaacaatcttactttttgaatgtttcttttcatatcttcactagctggcgaaattagcaggcaacaaggttgttgccacat

SEQ ID NO: 361126 - DNA, 303 bp, Zea mays
gtaacaacagcagcccccggggccacagggcgaggcccgcagccatggaccaggaccacaagaggctagcactcccgtcgccggcgccgcagtccccgccggcatccgccgcgtcggcgtcgaccacggcctcgccgtactccgcgctacacccgctcctcttgccctccccgaacccgcaccttttcctcaagtccaagacgctcactctctccctctcgtcctcctccctcacctccatgtcctcctcctcgctgcccgcccccgtcaccgatgtctgggaggtcgtcacccccactgccc

SEQ ID NO: 361127 - DNA, 308 bp, Zea mays
cgacgtgatcatcaagggcaacaccaagacgcaggacgagctcatcgaggcggaggtcgccgagctgctccgcgccgcccccaccgtgcaggacctgctccgcgccgccagtgtcgccactgcgcggctgcacgatctcgacatcttcgacgccgtcaagatcacgctcgacgccgggccgcccgagctgcctggcaccaccaacgtcgtcatcgaggtcgtcgaggtggccaaccccctcactggcaccgccggcgtctattcgaagtccgaagcaagatcttggtcgctggaagggtcacttaagt

SEQ ID NO: 361128 - DNA, 295 bp, Zea mays
agtcaaactaacaaactggtttacatgttttagcttgaaattcacaagccgctcaaggtcatcagccatcgcttccgtaagttcatcgttgttgcgctgctcatcgaccatcgccatggccagccattttgttctgtaagcatggttgacctatgtgataagatgaaagagaaatatttgccacaattcattgttgcgagtgtgttgtctgctttataatgtttatcttttccaataagcatggttaattgacttgtattttcacctaaatatagatgacacggaagaaaaatgt

SEQ ID NO: 361129 - DNA, 295 bp, Zea mays
cggacgcgtggctctctatagtgatatagatagcccagatttgcccagatgaaaacttttggagaaatcttattcttgaaaagttttcatctgggcaaatctgggctctctatagtgatatagataaattccccaattactatgcattcatacagaaagtcgatcttaaaaatggtacagtacaagttagatggctggatgtctatcctcgaggagaagtggagaaaagattgtcccaagaagaacggaccattggcattggaacctttaggcttggctatatcttcgatatgat

SEQ ID NO: 361130 - DNA, 290 bp, Zea mays
attcactgggggacttgattgagtggtgctccgagcggcatcacatgccttccgattgtggcgatcaaacacaacacactggtgtgtttgctgcaatgcaagaatacacctgttccactggtaacaatggtgtgatttatccacaatctgggattagccattcatctggtcaaaatggggcacatggcgcatacttggaacaccaacattttgaaggctgcatgtatatgagcgggaatggacagatgtgcggaccttacctgcctgaacaactgtatgaggggctatct

SEQ ID NO: 361131 - DNA, 288 bp, Zea mays
cgctcgtctacctcctcgccctgcaccgccccgccgggtatggatcggacgaccgcgccgcggtggtcatcagcaccgagctcgccggcctcggggcgcgtggcagccggcatctggagaacgggggcgccatgaagcacaagctgctcaaggatgtttccaaaaaggtgtctggatctgatggggtttccgctgagagatctactagatcgaggtttaggcaggatcatgctgccaaatcaaaagcaaagctcaagggcgctttctctttacttggactgaacaatg

SEQ ID NO: 361132 - DNA, 285 bp, Zea mays
ccagccaatccatcactggaaggagatggcgatctgtactgccggctgccgaggactggacgaccgggtaggaattctgggggatccaatcgttctgccggtataagaagtgcagttaggcgtacagtagtttctccagcgatatccatctgagctcagagacatcacctattaagaaggatggctcggttagcatgactgccaccgaaaggagttcttctgctgtatccacagaagctgaggactcaccgaaatacaccgcacgaactgctgaaacaccctcga

SEQ ID NO: 361133 - DNA, 275 bp, Zea mays
cgtcgctggttcttagtgcatacaagtctttgctagtgccttcgctcagaattccagtgcattatgagaactcgttgcttattcggttcattcacatccatggggaccggaaggaagaagaagggcttgattttcgtgtgatagaacagtcaattcgtgacggggatctaccttatggtggacaaagcttgaagtttgatctgcatacggtcaagtactctgaatgcccaatttgttcattcgcagttgctaggtcgacaaactcgtttacatcg

SEQ ID NO: 361134 - DNA, 277 bp, Zea mays
cacacgcgtccgcacacgcgtccgcacacgcgtccgcttggaggggaaacgtagagttctttcgtggaggaagcgggtgcaactggaggagggtagaggtagctcaatagatctactgctgtcgggggagttaatgcaaagctgagttgctgcacgttggctttcttcagagatggcttcagctggtgtagccccatctgggtacaaaaacagcagcagcactagcattggtgccgagaagttgcaagatcagatgaacgagctaaagattagagat

SEQ ID NO: 361135 - DNA, 277 bp, Zea mays
cccacgcgtccgcccacgcgtccgcacacgcgtccgcgggggcgggtttcgcaacaccatcggcatgaacgtggttctagaggcctgcgtgcgctgcggcgacgtcgaccgcgcgctccggctcttcgaggaaatccgtgggcccagggggtgtggtgtcgacggtgacctacggcatcctgctcaaggtatgcgattgtggtatctgttcatgcacgcaaccttgacacatgcaattgccaaaactcatttggtcaattgtttgttctaactgttt

SEQ ID NO: 361136 - DNA, 132 bp, Zea mays
aacatacacacacgcgtccgcagacgcgtggctacgtggtgaccttaaaccctagcttgcctatcgatggcgccgaagaagcgcaaggccgatcccgccgagtcccgcaccgccgtcgaggacgccaccacc

SEQ ID NO: 361137 - DNA, 157 bp, Zea mays
cggaccgtgggcggacgcgtgggttttgagaatgtgttatcctatcaaaattccatgcttatgtcataacatggattggtacacaatactgatgtgacataagcatggaattttgagaatgtgttatcctatcaaatatcaaacgtcttctgaggtc

SEQ ID NO: 361138 - DNA, 308 bp, Zea mays
atggtaaacacattgatcttattgagaagggtggtctatattcaagattagccaggcgacaaaatgacgatctcaagtagccctggatcacagaatgtggtttagtgcacgccttctttttaaatggaatggcagaagggagagtcgtctgtcattagtgtattctttgcaagaactgacctggacccaggagctcgaatgtggtttagtgcacgccttctttttaaatggaatggcagaagggagagtcgtctgtcattagtgtattctttgcaagaactgacctggacccaggagctcgaataagc

SEQ ID NO: 361139 - DNA, 306 bp, Zea mays
cggacggtgggctcgcttctctcaaaatactagtcatcagcaattgcaagggcatcgtgtctctgccagagggcatacagaagatcaccaggcttgtacgagtatacattgggggagcctgaaacatgctatctgctttgcaacccatttacaggtgctgcagtagcctggaagtgatgacagacatatatggaggctttcttctactggtgtttgcacagccaagtcagcttatgggggtttcttcattggagccacggtttttggtccttcggatctaatctggaaatcgtgggccccaaagaa

SEQ ID NO: 361140 - DNA, 236 bp, Zea mays
gtcgttgtagcggtttagttcagcccctcaaattttccaagctccatccctgtctggtggtgctggttattgtagtctttatgttgaccaatttagtctattcagttcagtttttattgaggatttctcatgtgaagtttttacccagtttccccttagttcctttgatttgaggtggttgatactgagaaactgaaagagctttcagcctgattgtctgcgcttctggcagtgct

SEQ ID NO: 361141 - DNA, 300 bp, Zea mays
gttgagggagcaggcggaggcgggagactttatgctgcaaccgcgaagaaggacaaagaatctgtccagatacttctgaatgcgaaaacagaggagttgtcgaggaagacatcagagtgcgggaggttgcaggagaagagccttgcattagccaaagagcttgcggcgctgaagctgtccgcagacatgaaccttcaggaggaagaaatcatgaagtttgcttcacttggtaaccagggaaacctgcagaatgctgttgatgttttaaagagatcacttgctattcggaacaagagctac

SEQ ID NO: 361142 - DNA, 235 bp, Zea mays
cgttaagctccctggagcctcctagccacgtgcctagccatcaagttcccctgcacgcggacttttccctccctggtcgctcctccactgctcgtgccgctccttttccccgcgcgcgcaacctcccctgctggccgtccctggtgctccctgctcgcgccgtgtccctgtttttctttccctctctgctcatcctccacttagctcatggcgcatgtccctgctcggatctctg

SEQ ID NO: 361143 - DNA, 308 bp, Zea mays
tctcaaatgaccggttgaggtaaaatataggctccaatctccaaactagccgttggaagcaaagcagataatctctaaattgtaggtttcatgaagtttgcgaggtaccatacgagatatgattattcagttatgccagtgccattcaagtttaatgtgatagatgttgggttgcttactgacctatattaatatcactgtttatagcataaagggcgtggctgtaccttactgcctttacctttgttcctgcttgctattgaacagactatattaaagtcttatttttcaggtgcactacactcact

SEQ ID NO: 361144 - DNA, 287 bp, Zea mays
gaaaaatggtaaatatttatgaatattttcacaacatgtttcttcctctaacaaggcaagtgctcagttcttttttttttgcaaaagcactacatccaagcacatactctgttgtgcaattggtttgtgcattcccatttttttattttggatacttgctacatcgctaagtttggacatctttttaactacaatcattttaactatgatcagtgtgttatccaccgccatagcttttcgctcagtgacaacgaggtcgccggcaccggagcgtggagggcctgcat

SEQ ID NO: 361145 - DNA, 284 bp, Zea mays
  unsure (1)..(284): unsure at all n locations
ccataggagaaggggtcctcgccaaggacaacattcgctaaccggaggtctacaagcgaaggggtctacgacccaacgggcgacgacaacttgtcagcaaaacccgaggccttcgccatctcatcgactgaaggaccatccggccgggcgcaaccggagggagcgaaaatgcgaaggctgttggagcggaggctacgtgttgaccccaaacacctctagtgcaccagaagacaccccaagggcccacccgtcagcgtagtngtgagtgtgttgtctggtatacg

SEQ ID NO: 361146 - DNA, 277 bp, Zea mays
ctcaaccaggaaattgttagagccctagcaagagaaggaataccatctgttgggatgtcaccatttgcttgtgggtggtctacccaacaaagaaaacttgcatcagcaaatgcttctcaaataattcagtcactccatgcaggttttgtcccagttttgcatggtgatgcagttcttgatgaattattggactgtaccatattgagtggggatgtcattatacgacatcttgcacagcttctaagtccgaaatatgtagtatttctgatgtccatgg

SEQ ID NO: 361147 - DNA, 266 bp, Zea mays
cgtgaccgtggtcgcgacgcctacgcgccctcccccttcggcatgccccactccaacggcgacctccacgacgaccctttcgccgcacctactgactccaacggtggggcccatccttacgccgcccaccggagattggggcggcccccggcccgcgaaggggcccccattgctgctccgcgagtggtgccgacaacatgccattcacttgaggaagaagaccagcaggagaaggagctgaggagccaaatcatcgttgatgctga

SEQ ID NO: 361148 - DNA, 270 bp, Zea mays
ctcttctccggactctcggggtttcccgacgtccaccacccatcctcgcttctctcgagtcctcaatccatcctccggctgttccctcccagcgacgaaaccctagcccgtcacctcgacgcctagaacagaccccaaagcaccttttgggaggggggccccgtcgctgcaggtttatggagactgtgtgatcggatcagcagtcagctccgtgtgcttgggatcacgcaatctgcatgttcctgttgcgcatcgtaatccgcgacctgg

SEQ ID NO: 361149 - DNA, 260 bp, Zea mays
ccggactcagagagagagagaagggcattcgcccgttcgaattctctcgcctcggcctcctcctcacctgcctgctcggctgctcgccagaccaaccacagccgtcggcgctgcagaccgcggctggggggccaaagggggaaattcccagggtcgtgcgtagctgcccatttcgcgaggaccatataattccaagaccctgatgatggccacaagtgcttatatcgatgattcctgttcggaggttattgatcccccga

SEQ ID NO: 361150 - DNA, 259 bp, Zea mays
cccacgcgtccgctcagccgctcctttctgtggctgtctcgccctgtgggtctgtggtggtggcagggtctgcgaaagggaagatttatatgagaaataggaagaagaaggctgtggatgtagaggtaaaaggtaagggccaaaaggggggccgaaatctgttggtggtgagattgactgggtatctccagagccggagaagtcagtgttgaggccaaattactttaggtacttccgccgtgggcagaatgagaaggca

SEQ ID NO: 361151 - DNA, 257 bp, Zea mays
aatttttcaaggaaaaaaaggtaatatattaattgtgcagcgtgccaatctaatatgagttatattaattgtgcctagaacctgtctagacaatctggagtaatatattaattgtgcagagtctttgggtctcctcaagggagagaagcgggtccatgatacaatctggagtaatatattaattgtgcagcgtgccaatctaatatgagttatgttctttttggtgttcctttcaagggaaacgctcggcggcgaac

SEQ ID NO: 361152 - DNA, 260 bp, Zea mays
cggacggtggacggcacgcgtggggcaggggccaccaccatctcggttcaggcgcgcacatgcctctgcggcaagccaccgatggcaaagacagcggcatcaactggaacggcaacgcgtcactcaacttgttgttgcggctatcgggggaattcgatgtgcatccaagatgagaggatgatgagcagccttgcaatgagtgctcctcctgctgctgctgatgcggaaggcgagcacgaggagcagcagggagacggcgg

SEQ ID NO: 361153 - DNA, 254 bp, Zea mays
aacgatgctggtatgtccatgaaggtggaaagcctggtccagcatggggatgctttgtatggagagaaagaattccgcagggcactgaatgcgtacaagcaagctatgcaatatagtagacaggttcagtttcccgcgttaaaggcgtcgtcaacaagtaacaccagaagttcagtatccgtcacaggccggtcaccttctccaaactcttcaaatctcttatcattcaatgaagatgaggtgaagttcaagat

SEQ ID NO: 361154 - DNA, 283 bp, Zea mays
gccggcgtcagtacccacgcgatccgcggcacggtggtcgcgacgcgtggggccgtctcctcctccgtcccatcactctctgctcgggcactctcacctgcgcgcgccgtcttcgaccgccaccaagatgaccaaggagaggctcattgcagaaaggcaattgggggtccggggggttgttttccgcagaggcggcaagggcaccatgcgcacgaagaagaaggctgtacgcaagacggtcaccacggacgacaagaggctgcagggcactctcaagagagta

SEQ ID NO: 361155 - DNA, 260 bp, Zea mays
cttgaaaatgcattcttcactgatatacaacaaggagcttttggttttgatggcatcatgaatcctcttgatccccttgatgctttcttgaatcaaacagttgttgatcctgatgaacatttcaaattttccaaaacccaaaaagccgaaattctgtagttcagtatgattctgacattccaacagaatttgagaaccattggaatatgaaggttgagcctcaagatgatcaatgctggtgggcaaacataggatttgag

SEQ ID NO: 361156 - DNA, 257 bp, Zea mays
cagacggtggccgagctagcagagggcatgtttgcgttcttctgaatgttgtgcgcgtgtctgtggcagcataagtagagagtatgttgatagtgatgatgacgacgacgatcagttcggccggaggtccggggggcgggaagggggccccaagtggccgggcgccgatttccgtcctggtttgggcgtttggcctatagccgaaccggcaggcgcgttctccagttcttggatcagggggagaactcctgcagggg

SEQ ID NO: 361157 - DNA, 257 bp, Zea mays
atattgtagcatatgtcctttcactgttgatttgttcgcttcacacaaaaaatagtgaacgtcgattccagcccaaactttcgtttggtccacccagtcttgctgtagacactgtagattcaacaacacaattggggcctttgcctggcccaactttattcaggtctcttattcctagacctgcaatctcctttgccatggtcgatttcaataatttaaaacatgttgataatgagtgccatatatattcttagcga

SEQ ID NO: 361158 - DNA, 261 bp, Zea mays
cttcttcagcggcacgtgcgcaacgagagcaacgaatattcaaaccgaaaacaatggagccggtgcggaagagcgtgtgcgtgaccggcgctggcggcttcgtcgcgtcggagctggtaggaaaaagggccttgcccgcgttgcggggggccccgcggggccacatacgcggtccgcggcaccgttcgctaccgtggtgctagcaaggatgcacatctcaaggtcctgggaagagctgaggaaaggttgcagcttgtcaag

SEQ ID NO: 361159 - DNA, 327 bp, Zea mays
ggccgaagtgacacggcgctgccggagaacatgcacaagtggaggatggtcatcgcctacgatggaacaaagttcaaaggttggcagtatcaaccatcaattccaacaatacaatattttctagaggatgcgctgatatgcatcactaagctggatcggaagaaactatgcttagtcggtgcaggcaggactgatacaggtggcacattttactacacccttcagttacagttgcctcagtagtattcattctgcaatgaatggactccttcctcctgagattcgagtcagggaaattagtgcagcacgtcctgaattccatgctcg

SEQ ID NO: 361160 - DNA, 328 bp, Zea mays
acaacttgtaattattcttgatatgtactcacgagttttattgctgctaaaaaggtataatcctatgttttatttcagagcttatcctcaatctactgaacatattctctctggctgctagctgtttcagacgcctataggatacgaaatgcaaaataatagttagccaggtaccgagttattgagcaaccaccgtggaggctgcaagcctttggtaaggaaggaaagttgacttgttggaagcttatgaaaaagtggacgcacagtcacctgcaacttgtgttatctggtattatcgggtgttcccatacttgacctgataaattag

SEQ ID NO: 361161 - DNA, 317 bp, Zea mays
gctgccgcagcggtcgcggagaagagcgttgaggtgaaggatgggcttgcgttgctggtaagagagagccatgggttaaaagaggtaggagttaaggcttaggctaggattgtttgggtaacccacaattgggattgctttggtgaatttggtaaagaagactagttatgagagagattgtttgtaggaatcattacctgttagtgggttggtatccacaaaagacaggaagatctaccattatgttttatttttcaagatacaatagtgcattgctgatatatatacctacaattaacggtccaattgtgcagttg

SEQ ID NO: 361162 - DNA, 319 bp, Zea mays
cacgagtccctcgcccggtgcggcgcgccgcctgctcgacgaaatggggcagtgggacgcgctagtggacgccgcgctcgcgaggctggaggccaggagcctgctacgtgccacgcgccccatcgctctcgcagcgccgaccgcggcgcgaggaccttcgacggcccggggccttgggaccatgccgccgtcgagatccgcctcgaccgcgacaccctgcaccagtggctggccgaagcgtatgaggcgggtggacaggaagaacagctggatggaaacctgatcctcttctcagggaatgactacatgggcctcagct

SEQ ID NO: 361163 - DNA, 315 bp, Zea mays
ggcgcaacccctgcccctatcctcgacggcaaggaaacttcccccgggcataaatctcaccgctcacacgccattagcgtcatacccgctacctcctctagcatgccacacgccgccatccccctagcccatcgtgtgtcacgcgcccggatctcctatttttatgccccacgcaacctaggccatcccaccacggagcaagaaaccctagcgtagcaccaaccactgccgccccacatggcatcccgaccgtggccgcatccatctcggcgtctcggccgccacattgcaccaccgttgccgctcctcctcccc

SEQ ID NO: 361164 - DNA, 323 bp, Zea mays
gccatatccatggtcggtgttcccacactctcatgttctgatttgaagatgctatgtaagttgtcccatttcatatgaccgtgcctatcctgagatgtcgtgtgcttctgttagatccatttgcaaggatgaattaacttccgtctttaggacgatttaatttagctaatgttgtcatttgtctcccagatcagaggttagagtttggccatttttcagcttgccggatgggggcaaagtcatggtggcatgctacaaccatgtgtgtgggtacagacaaattatgtacataatctgaggttatgttgggctaattattagct

SEQ ID NO: 361165 - DNA, 319 bp, Zea mays
gaatactgtaacatgagacaggcaaatgctgtgattcgtgctcttgggaacgagaacatcatccgggagtcatactcgtctagtgttgatgtactgctctcattgcgagatcttcagctaggagctataggagatctgaaagtgattgtcccaggacgaaggaggcaattcattcttggtgaacaggaaacttcgctatattgctacaaggctattttattggatgccaagaagcaaacagaaacctttgtatatcactgtggagtttttattgtccctaaggctcgagctcaggaatggctattttgttcctcagaag

SEQ ID NO: 361166 - DNA, 320 bp, Zea mays
gaccccgcccgggagggctccctgctcggctggaacgaggcgcgccgcaactggcccgtcttctgggactcgctccagggacgctccccacctcgacggggctaagagtttgtctcggaaacttgggctcttgctcttgcattggtgctgctgtgtaaatccacgtcgatcgctcgagttggggttggggacggggctaggagtttgtggatggaatggattcactgcagtgctcattcggttattcaggaaccatctatggttcggcgccggatgaagagggggcgagaaccccggttgtgactgtgtgtaggcaatat

SEQ ID NO: 361167 - DNA, 316 bp, Zea mays
tgaatgctgcttggtcgctactacggaagtccctgcgccagaaaagggcacccaccccagagacatatcttgccaagatctatgctcattcatcaattggccagcttcaaagggcttttggtacattgcatgaatttgaaaatgcctatgggaactccaaggacgttgatttagagctcttctcaccatttacgtccttgcatcctcttgttgttgcttgctgcaaagatggctttagcacattggatttggtgtatgttcagttggagaatctgagtcatgcagatccaccttacaaatctgttgcggctctcaa

SEQ ID NO: 361168 - DNA, 274 bp, Zea mays
cccacgcgtccgccgattcagatctcgcgcacagcacgcgagccgagggggacaaatagtaggatttccagagagacagaaacagacggagacgcagagaaaccctttccacccagattcggtcgggtctgttcggttccgaccacgcgggcgcggtagagagtggggagatgagcgctgctgcggaggacgcggctgcggccgaagggggatcctgatgcgggagcagcggcgctgggtcgtcggaagggggcgcgcggcgccggttcgacga

SEQ ID NO: 361169 - DNA, 338 bp, Zea mays
cgacaacttctgattcgacgcgcttcaacaaactcctagaagcggacgcctcttcagaatactccgacacggcctcatcaatcacagtggccacagcagaaatcgctcgatcagaaagtagcagctcgtggcatatggatagcagacaggaggtggagtttataagagagatactgaacgccagctctcccgcccgccgcatctcctatctggagcggttcggcaacggcaactcttcgggtattttggatccacatctactggaggagttaaatggcggcactaggctgctggccggtgaagagggcaaaggtcacagactgaggcggatgctgctc

SEQ ID NO: 361170 - DNA, 172 bp, Zea mays
cccacgcgtccgcttaacatgctgcttcatcttattggcgatggcggtgagacccttcaggttgctgcgtttcgagccatggttaacattttaacccgtgtgcagcaggagtcatcagatggggctgagagaaatagattccttattaattatgttgattttgcttttgatg

SEQ ID NO: 361171 - DNA, 171 bp, Zea mays
cttcttcttgttcttattacctccgataatattccagtcgggtttcagcttatctccgaaaccattctttgcaaactttggggctatcgtaacttttgcaattcttgggacattcattgcttctgttgtaacaggagttcttgtctatcttggtgggctgacatttctaat

SEQ ID NO: 361172 - DNA, 104 bp, Zea mays
gggctcgtttggcttcgacgcgctcaaggagaccttctccgtgaacatgtcggctgccggcgcgctctcgctccgcatcccgctcgttgctcccttcaccatcg

SEQ ID NO: 361173 - DNA, 311 bp, Zea mays
aatggattcacatatctcatttgattccagtggtgttgttttaacttacaacactgttgaggcagatagtgtccagaagcttgtgtcagatttacgccgactttcaaatgctcgttcttttgctcttggaatgaggagactgattggtgtgaaatttcaagacaagctagatgacaaccagttaaccatggaggtgacatcacaatctgttaataaaggtaacagtgatgctgctgacaagctatctgagcaaatgagaaagacattcaggattgaagctgtcggtctaatgagcttatggtttagctacg

SEQ ID NO: 361174 - DNA, 307 bp, Zea mays
cccacgcgtccggtacgaactatcatagatgagattaaaaacgtcattatagccagtgccacccggaaaagagaacgctcggagagaacaaaagcggatgcttttgatgctgatgaaggagagctactcaaagaagagtatgcacaggaggaggaactatttgatcacgtcagtgagtgcctaaggactttgattaagaccttcaaaggatctttcttgccgttttttgaagagctctctatgtacattacaccaatgttgggaaaagatataacacctggtgagagacggatagctatctgtattt

SEQ ID NO: 361175 - DNA, 306 bp, Zea mays
agcaaacaagccagcgcccgctgcagcaagctcgaagcagcagtcagcgacaccaaattccccgaatctcccctcccaaatgcgagtcctcgactgaggaagcccttcccgacctcttcgtggtccgcgccgcggctatcatgccgccgccgggggtggagacgccggagtggctgcgcaacctgcccgtggcaccggagttccgccccaccgccgccgagttcgcggaccccatcgcctatatactcaagatcgagcctgaggcctcccgctacggcatctgcaagatcgtgcctcccctcgcgc

SEQ ID NO: 361176 - DNA, 307 bp, Zea mays
gaatgaatgaataacagaatagaaacacatcgagccgctgggggttgctattctgttattcattcattcacttaaatcatgcgtttctttcgtcttataatccttaagttgatactgcaatccgcctcatgtgaaattgatgtgtcaatctgacaagcacacttgtattctagatgctattatcaagcaagcgaactgggactgctctaaaatgctagagaaagttcggcgtgatattgaagatcatgcactttcaattcgtgaaagcaagctatccgaaatgacaagacacgctaaggacaaacta

SEQ ID NO: 361177 - DNA, 178 bp, Zea mays
cggacgcgtgggcggacgcgtgggcagcggtgagttgcagtttggagatttagcgattctgaatgtgtagtagaaaaaccacaggggaaacgaaacaacaactgtatagactattcaggatcaggaggtttttttagggcgcgtttggttgcctggttttggcccagcctggcccatg

SEQ ID NO: 361178 - DNA, 315 bp, Zea mays
catgtcaaggtttcagacataagtgaaatggttcttctcaagtatctgtgtctccgaagcacggacataaaatatcttccccggaatatacacaagctcaagtacttggagactatagatataagggagacagaggttcaacggttgcctgcaactgtaggaaagcttcaacgaataaagaacatactcggtggagataaaagagcaaggaaaaccctaaaacttcctagagaattcaagggaacaacgagaaccttacgcatattgtcaggggttgagatcgcggagggatcaacaacagcggcatcagatctt

SEQ ID NO: 361179 - DNA, 202 bp, Zea mays
cggaccgtgggtattatgcacatttcctattgagtaaaatgatttacgcatgtcgtagccacggcatgcacatatttgtttgtcagataggaaacggaaaggacgaaacacatatgtccatgccgtggccacaacacgcataaatcattatgcacatttcctattgagtaaaatacaattccggtcaacaaaaacataaaaa

SEQ ID NO: 361180 - DNA, 311 bp, Zea mays
aaataatttatagaggtcagcacaaccaccagcgcccaccaaaaaggaggtccaaagatggtggtggtcaactaaatgaagcagatgatttccatgagaatgaagacacttctactagatcagaacctggctctcaagatcactctggaaaacatgaggggtcaaatgatggcataccagggccttcagtgtcaagaaggggagaggtatatgagcaattgtcaggctcaagtgatagtgaggaggaacgagatgatgaacaaagggctggcaatggatgtcctggctatacaaatgcaaacagaagacat

SEQ ID NO: 361181 - DNA, 309 bp, Zea mays
gtgaatctgagtctgacgacgaggatagcaatgctaaaacagtaccacctgccaagctgctgctattaaaaagaagggagattctagtgagagctcagaaactgactcacagtcagattcagaagattcagaacctgaaaaacctactgtccctgcgaaaaggcctctagcaacaaataaaaagaatgaacaagtactctcttataaaatcttattttatttacttgtactccccctgccagtttattgaggtgtattttgattttgattgaagtcaattattcacagtcattgccacttcatttagtg

SEQ ID NO: 361182 - DNA, 311 bp, Zea mays
gcggtggctgcttgcctggttaatgatgactgcaatataattttccctggaggtgtgcataggtccgatgaccaaactgatcaggagtttggtggcaattcccttgacgctgatgaggtcgctctcttggtaaatgacatacaagatgacagtgcaaggatggatatggatgtttcagcccatggtgatgtgcatgctcaggatcgggaaagctcacagttggatgtggctacagctctgttaaatgaggtgggaacagagcttgtggaagctggtgaccatgctgtacaggaatgcacaaatatggatat

SEQ ID NO: 361183 - DNA, 229 bp, Zea mays
gaaagaagctacaggccacagctattttcattgtttcaaagcattcggacgcgtgggcaataatgtgtagctgctgtgagctctctagcgctatatgtaatgtagtccgtggagaatgtgttttccctgttacactggatctgattagaatggtagctgaagaagtgatggttgcctgcattagtatggtagctgaccaaggccatgtttgttttcctcccagattaag

SEQ ID NO: 361184 - DNA, 237 bp, Zea mays
atgtggttgaggaattgcagatctcgattgaagatgagcagaagagtatagcagatgagctgagagctattgctggagagcagaagatgagcatggaagaagggagcgtcggtgcttcagattccatggttggtgactgatcgagatacattcacatatgttgcagacctgcttgccaaaatccatcacatggtttttggacaatatggcgatttggtagatgtcttttgcggtgtc

SEQ ID NO: 361185 - DNA, 237 bp, Zea mays
gtcttaccaacttgggcaattaatcgtgattgggttcaaatcaacttggacgattaatcacaattaatcggacgacttgaaaacagattcttgaatacagaggatagtgtcatctacatactgcaagatggccactccataatcaatatattctggcactaaaccttcaaacaacttttcttccgggctaaacacttggaatagcattgtattttttagctgtttttagtgccttat

SEQ ID NO: 361186 - DNA, 233 bp, Zea mays
gacaagcgtcgacaagcgtccgggaccgtggagaaggctgggttggaagtggatgtgcagagttatggtgttctcttgcatgcgctctgcatggaagggaagatgatgcatgactaggaaacagtttcagtcgatggatctaaaaggtgtcaaaccaaacagtgtgttatatgacatgatgatctacggatatggacgggaagggagctcatataaggctttgagattgatca

SEQ ID NO: 361187 - DNA, 224 bp, Zea mays
ccgtcctatcattcacacaaaatttcccacgccggcctcgcggcagaccggcctccgtatcactgcgcaacgatggcttcctcccgggctgcgcacgcggtccgcccctgtcccgccgccagacgcagcagcagctgctgctaccgccgccgccacccccgccccgacgtcggagcaacaccgggttaaggaggaaggaaacgctgccgccgcgactgtaccga

SEQ ID NO: 361188 - DNA, 231 bp, Zea mays
ggaccgtggttcatccggatgcataacacaaagtctgtcgagttgcttcaaaaaaacagacaaccaatgaaagaatgcctggttggcgaaacgacctagattcacacaagaaggttcttcacgcgcggcagtgagacactgcgccggatgtccggcaacggcatattggtcctctcggcgtgcggcggcttgctccagttccggcgttgccttccttcggtcagaggctcc

SEQ ID NO: 361189 - DNA, 175 bp, Zea mays
cggacgcgtggggaaaaaatagactatgataccataactgaaaaacggtgttgagtgtgatcttgcaacatcctgtatgtagccaactgtcactcttacatgaatcttaataaggacatgcctagcgcagtggtaagaagtctttccacagagccaaaggtcctgaatttggcgt

SEQ ID NO: 361190 - DNA, 363 bp, Zea mays
ctcgacctggctgcgtcgtcgcctcctccggcaagggcggcggccgacaaggagaacttcctcctcgccgcggctccgtcgtccccctcggcgagggtggggttcgacaaggagaacctcctcccggccggcgcggacgcccacgacgagcttgtggcgctcaacctcgccgcgattgccaggacagcgggcacgccgtctggtggcccgctcttcgtgcggggcagactctacgacctctactcggcgcgccgcaacgagcggctcaagcgcaagctggacttccccttctattccgaggagttcgcgtccgcggcagtggaccccgagacgatggccgagaacccctgtgtcgccgtcgag

SEQ ID NO: 361191 - DNA, 134 bp, Zea mays
cccacgcgtccgtccgacaccgcgcgccgcgtaccagcagccatgtcgtgattccacctctccaccgcctggtcctcctcggcgctcgcagcagcgctccaacaaccgtcggcgctcccccccggggtcgggtc

SEQ ID NO: 361192 - DNA, 291 bp, Zea mays
gcgagcggccactcccgatgatgaagcagaggagacccctacaccgtcgcgtcgccggcgccgtcggaagtcgaggcagcgtggtgactctccgccgccacttccggaccacctccgctgccgtcgtagcgacgggaagaagtggcgctgctcgggccgtgcactcccaactgttagcttctgcgagtaccactacgcgaagggcaacaaaggcaagaagctaccagcggatggagagctccttgctgtcgctcttcagaggccagagaaccagaagaagggcaggaagag

SEQ ID NO: 361193 - DNA, 337 bp, Zea mays
attttagtgcagcaacggagcctatgaagaagccctattttctgctgctgtttgccaactctaagcagatcgctcgctgaagaagcccgccctcctcgctatagaaggtatgtgtttaacagatatgaaatgttgttctgaaagagcatggaacaacaaagagaaataaaaataaaaaaagatagcacaaagtctgaacttatgaacttctgaaacctacagattattctaaaatttctattaagtctaaaattgtgaaattgtgaaattcgtgtttagtctgaacttctataattctgaaagtctacagtcacctgaacattggctgaaagtctgc

SEQ ID NO: 361194 - DNA, 341 bp, Zea mays
cactgctcaacccaagccgaggtcgtgcacgaagcagcaagcctcagattcttccgcgccgcgtgcgtcgactcgatttgcaaccctgtgtcatcgatctgtgcagccccgacgtcagccccaacatcgatctgcgcgcgtggatccgacgtcgcgtctcgctctctggtggtcgagctcacccagctcgcctcctgtcttcaactatggatggcagccaccttggattgttcataaactccgccgctcagtgccgcgtctccagcaccagcgtccctgctccttgttcctccatggctgcgtcgcgcgcgttccgttgttcctacgcgtgctgccgcaaa

SEQ ID NO: 361195 - DNA, 335 bp, Zea mays
cttttacccaatacacatcagcaaactattggggagactttcaacagatctaatatttttctctctcttgtatacaggtatttgctttttgtgcacctatcactatcaggatcaccatcacttttgaaccatgaatgcttccctttaaatatgaactagctgttagcctatttgtggatctatacatatagacttaacacctgcaagcacactgttgctaggtcttgatgtacggtggttgaatgctacttactatatttttttaatatagtctaaattaactctacaactgatatccactattagagaaaaaccatgttatatgcttatatttg

SEQ ID NO: 361196 - DNA, 128 bp, Zea mays
atttaccagaacacccaaggaactgattctgatagcgatccgaacaatactactgtaattgctggcggcttgaccgagtgtgatgacgacttctgaagcaactttcagccatatggagagttctctat

SEQ ID NO: 361197 - DNA, 332 bp, Zea mays
  unsure (1)..(332): unsure at all n locations
gtcacgcgtccgcggaccgtggnggtgcttgttcttgtgtggtttattagtttatttgtatggttatggttgattgatatgatattttagctggctgaattaggagtctgccgtgcagcagtattcttgccgccttggcgatactggtatcaacaacgaaagaagagtagttttacctcaaacagaatttctacaagggagtatctttgagatttttagcactgtagtttatgattttagtagattctggatactgcaaagcttcagatcagcaatgaagatattccttagcaagagttcaaatatgaagttgaatgtctcactgtggtcta

SEQ ID NO: 361198 - DNA, 165 bp, Zea mays
cagctcgccgcccttctttgtctactccaaggcgacgagctcgggggaggccaacggcggctatggcggcgctgatgatgcccagatgacagagatgggcaatgccgccgacttctcgtacgccttctccaccacgacgggattcaagtctcccctaaacggggg

SEQ ID NO: 361199 - DNA, 330 bp, Zea mays
cccacgcgtccgctacagctttgattacagaaattggtgatggtcgtaacaccttattttggagggacagatggttgatggggttgaggattgaggatctaactcctcatatttttgccatcgtcccgaccaggattaccaataggagaacggtggctgaaggtatcgtggagatggcttggattcgggacctgagaggcaccatcacttgggatgtcctctctgattttttaactcttagtgaagtcattgcagattactccattaatgttggagtgccagacaagcatatctggaaattctccccgacaggccaatactcttcaaagt

SEQ ID NO: 361200 - DNA, 127 bp, Zea mays
cgcagacctgtttgtccgccgccggcgcggctaccactagccagcaagccatctcctagagctggagggggtctgcttcctccttgactgcccatcgacgtctccgccctcgtaggattcgcgccgg

SEQ ID NO: 361201 - DNA, 349 bp, Zea mays
gttctagatcgcgagctgccgcccttattttttttttttttttgataataaaacatccaaacacacatttgatatttcgagagctccattgtactagtacaactatgccccaagttctcatgtaattaaacatagtatagttaagtaacctgacacgtatcacatccgtgagttaacacatgcacctcccactacatgcaaaaactaccaactacacgacattaacctgcagcttaaaactcgtaaggaaaaaaacatgcagcgacccaaaacaagatcgatcaccagccctaattgaagaagacgactccaattaagttccagaccacatagactaactgaggagagt

SEQ ID NO: 361202 - DNA, 344 bp, Zea mays
atttctttgttccatatcaacagacactccgtatcggagattcttatttcttatttttttgcagtaatatgaggtttgacatgacctctttccttgcatattgcacatagaacctacttatgttgcaacctgaaatgcttgctagtcttattaattcatcaaattcgtgtgtgatgcaaatgcactgagctgtaatgttgtatatatctgagtggaagttgagcgtgcgcactgcttatgtgaataacttatgacttgcctagattgatttctgtagaaatgttctataccttatgccatgcaatgcctgcactgcgtcgcgctacacaatgcattgtgcagta

SEQ ID NO: 361203 - DNA, 340 bp, Zea mays
ctctccgctccgacgcgcccgacccaccaccacatccctcatggctgccctcgccgacatcgactcctcggcacttccgacgtccgagtcatccaaaggcaagggcaagatggacgaggaggaggaggacgaggcggagggcgcggagaagatgtgcggcatctgctatctcgacggccggcgggccatccgcggcgagctcgactgctgcgcccatttcttttgctttgtctgcatcatggcttggggccgcgtcgagtcccgctgtcccttctgcagggcccgcttccacaccatccgcacgccgcacgtcgccggccggttccccgacgagcgaatc

SEQ ID NO: 361204 - DNA, 313 bp, Zea mays
cccggcggctgtagctgctgttggaaaacctaaacctaagctgatcccatgttggaatgcgaacacatgaccctaaacagggttgggagtggtattaatagacttagtaaatgggtcaggcccattacagtgagggtgagacggtaattacaaggggaacaccccaaaccctagacgggtagtctaacactcctaaaacttaatcgacatggttctggtcaatattttatttcttctttgatctgagcattttttttgcaggcttttcctgctggttctggtcccaatgaccgtactacatacatgttcactt

SEQ ID NO: 361205 - DNA, 277 bp, Zea mays
gcccccctcccgtccctctctctctctctccacgcaccatggcgatctccgagctcgggtgagctgacaagaatgcggccgatttgagcgatgacgggagggcgcgacgatggatgcgggttcgggcggattcgcgaggaggctctagagtctagaggaggttaggtttcggtcccggcccgtatgttggagatgagctcctcgtccgcgggcagcatcgggcagcagccgccggaggaagagaagaagtgcctcaactcggagctgtggcacgcgt

SEQ ID NO: 361206 - DNA, 336 bp, Zea mays
cccacgcgtccgggaagtttatttttctgttttctcatagtttgggaagaaagagatgcctgcttgtcaatggtagtgaatcatgcccgatttaggtcaatttatggttggatttatctcacctacaaatatgctttctatccttacactattagttagctttgttactcttgtggcccgaacctgtcagtttaagtatttcaatatttttgcctaagcctatagtgtgatgatgagaagtactacaacaataagctggagcttgaatggtccagtgtgaaagtaagttttcaactgaaatccttgaaatacattagacttgtgatctttttacaa

SEQ ID NO: 361207 - DNA, 143 bp, Zea mays
gactccagctccggcggaaggatcgtgtcaaggaccaagttcctgtacggcaaggccagcgccgacctcaagctcgtgccggaggactccgccggcgtcgtcacgggtttctatctgtcgtcggccggggacaagcacaacgg

SEQ ID NO: 361208 - DNA, 130 bp, Zea mays
gggcgggtcttggctactaccgtaggctcgatttctgctggagggagcaaatcagatcatcgaaaaggggttgtttccttgcacggcgttagcccttcgtgaggttcgtggcattggggattacacagct

SEQ ID NO: 361209 - DNA, 329 bp, Zea mays
ctgctcatctcctccatagccatagcttttagactaggttttagattctggaagaagaacctatacacgagacagaagctagctagctagcttatttctgtttcttcagtaacctctcggtctagcaaccagcaagcttcccattgccctcgatcgatccgccccaaacatccatccatccatccacccttcttcattcctggctgtaagaagagatggtctcatggccgtgagctcacctcgccgagcgctcatcgcggccgtgtccctctgcttccttctcggcgctgcgagcagcgtccgcaccgcgacgttttccccttctcagg

SEQ ID NO: 361210 - DNA, 131 bp, Zea mays
ctgcaacgcaaagcagcttcctttcgcctgctgacaaggactagtcgagcggcgagctaggaggctgaggatggtccgcggccggtgcgtgaggtacgggtgcgtgcagagctcgctgagctacctcttcg

SEQ ID NO: 361211 - DNA, 328 bp, Zea mays
caaagtttcttaatgattgataatgcaattactcttggtcttttatttggcttcattattcctgcttatgcaatctttgtgtagccaaatgaacatttacatgtaaataaccattttttgttttctatatatataagtttcaacttccattgtattatctatcaatgatcatgttgagttcttctgtgatgttacaatccttgtcttgttattaaatttaaacttctattgtacctcagtgcctggagggaagtaggcctatctttcatataattgaaaattgatttttttttctgaggcactaggtattagccaactctcacctctt

SEQ ID NO: 361212 - DNA, 336 bp, Zea mays
  unsure (1)..(336): unsure at all n locations
attgaatagtagggttcttactggtggaacgacgaccgtagagtctgtccacgacacgagcagctgagcggcgggagggatgtcgacggtgtgaaattctggccgccccgatggtcgttacttccttctccggccacgagcgccctccaagcaacatagtgaagccccccagactctccnctcccccgtggaactccgaacactagctgaggccgagggcggcgttggtggtactctcagctgccgttctcccctcggtctggtgttggcactcggttccagctcagatgtgacggaacggggaggcaggaggatcatggctggtggctttgtact

SEQ ID NO: 361213 - DNA, 272 bp, Zea mays
cgcgacggccgccctttttttttttttttagtacaaagcaaggcaatggaatgccaccagccaatcgttgattcaatcaacatctttcagagcccattcttacatggctacatctacaattccaggttggtttgttggctctattcttctaactgcgtattatatgttctctcctccagatggtggtggtggtagctcggcgacctttgggggagcacccagcactcgctccatgtccaaccgcacctcaatgttgcgcatgctgtacccaa

SEQ ID NO: 361214 - DNA, 251 bp, Zea mays
cagcagcagcacatcaatttagctagttccaggaacacgcgaggaaacgcagcatggccaacaaccgcatcttcgacgagtacaaccccgccgtcgaatggagccgctccgacgaggcggacgcgtccggatctcgctcccagggttcaagagggaggacatacgcgtgctggtggacagccacggccacctgcggacgcgcggcgagcggcacatcgccggcaacaggtggagccgcttccatacggacg

SEQ ID NO: 361215 - DNA, 321 bp, Zea mays
catctccgctacccccagccaagtcgctcccggtggctccgttctccgcgccttcgttccccctcggttttcctgctgtttcgcctcggtcctgcttgctggtgctgcagatctgcgttcgccggccccttctccctgctatcgcatgccagccaggcgcccacgggcacggccagcccccaccccacaggcgtggcactgcccctgtccggctgttccttgcttttgcttgcctgtgcctgctcctgttgggcttcggcacctgcacagaggagacagaggtatacagagccacgcagccaaggatttcgaattcgtgac

SEQ ID NO: 361216 - DNA, 328 bp, Zea mays
  unsure (1)..(328): unsure at all n locations
ggaggaggttcacgccgagcggcgcgcttagcttgaggggttgcttgggttggcgggatggtggcggcgacggcgagttcaggaggtgggtggacggagaggcggcggggatgaaggcgcaggtgctcacctacgcagcggcagctgagtgcgcgatccggnagtgctgccgctcgaggaggccgccacaggcaagagcatgaacgtgaatggtgcctgtcggcgagggaagcggctagggtttccggagcaggcagcggctaagatggtggttgctgttgatgtagatgaagttcttggtagcttccttgcggctctgaacaaattt

SEQ ID NO: 361217 - DNA, 301 bp, Zea mays
gcttcagataccgttgctgattgaatggaagtggagtgacgagtcggcagtttaatggtaattcttgacaagtttggtctgttgggttgctactgttcaacgggtgtgccttcatgagttgcaatggtggcacggcttctcttcggacgagctagtcaactttggtctttggtgcccacacaccatgtacagttataataactaatcaaaggagcacggtgattttttttggcgaacttgtggagaaaataatgtacaatgatcgtctggaatttactaaccaagatgtttttttagtgct

SEQ ID NO: 361218 - DNA, 214 bp, Zea mays
ggcagaagtaaagacgatagtacccgatgacgtcctgggcaaggccgaggcaaggtgttccattactccgccatgttttatttcatttgtactactgtcgtctcctatggtttaatttcagcagtacaaacggagctcatcctatctctttggttgaagctttcccaaatatgagatttttaaaggtcgttatgatatcaaattattaataatg

SEQ ID NO: 361219 - DNA, 169 bp, Zea mays
cccacgcgtccgcccacgcgtccgggagcagccaaagaaataatcctgggagaccccaaggagaccagatgagaggggtccacctccaccaagacaacggttcgaactaacagttgcggagaagaacattcttctagaagttggacccattaaattacgtgtgaggagc

SEQ ID NO: 361220 - DNA, 189 bp, Zea mays
tacggccggaattccgggcgaacacgcgtcgccacgcgccgggaccgggctcatcttttctcgtttagaacctctaaaatttcccccactcgacagtcgcagcatcagctgtagcagccatggacgccagcggaccggtagcaaagggaagaaaggggcggccgggcgcaatgcaggcggccccaggaa

SEQ ID NO: 361221 - DNA, 334 bp, Zea mays
ggaaggaccgtacccgccgccgggctacccgcccgcgggtatatcctccgccgtcgcagggctacccaccgcatgctacccgccgcaggctaccctccgcagcaggggtatccgcagcagggatacccgccgcagtactcgcagccgacgccgccgccccgccagcagcagagcagcgggccctctttcatggagggatggtacgttctctcctctgtccgccccctcacctccgattccatgcggttgcagatattggagccgtcgattcgttttcagttttgccggagacgacgccctgggcggtggcgctagtggccgcctagtgggcgtg

SEQ ID NO: 361222 - DNA, 281 bp, Zea mays
atagcctacaacgggtttatgatgtaccatgccatatatagccaatttaaagtctagtcatataataactctcccatgatagaagttgtgcgtttaatgcttggctcactcttcctctcacaaactgtcatgaagtacgtaagcagtccgctgccccgctttcaactggctacagtgagcagcccgtttgcataaatcttattattttgcagcccgtttatatcaccttattatatttgcttttactttttacagctatagaaatattggtaatagaggtg

SEQ ID NO: 361223 - DNA, 301 bp, Zea mays
tcagtacggtcggatccgggcgaccacgcgccgcggacgtgcgagacgcgatgggccagagtgccagccagcatggtctaacaagaacgtcggtccggtcgtgtcgggatgggttgcaggctgtgggcgcgtgctggtacctgctcggcgtccagcgggccagcaagtgcctggaagagcagtgcctccaggcggccgggtgcactcacagcagcggatggcctgctcggcgccgctgtactacggcggctccccgtctcgcggagtcggcagcggcgacaggctcgcctgggccgcgaac

SEQ ID NO: 361224 - DNA, 277 bp, Zea mays
ataacgccctcactagcgctcattcatgtttactcgaccttgtccttttcccttccgccttctgtgtgctggtatcaatttgttgtaatttggggagaccaggagttttctcttcttgcccttgttctgcccgtagtaagtgcttgccgtttggttgattggaactcccaagtgttcgtcggtcacatttatatagctttacctcactaggataatcataagcaacgtttccccaaaattcttagaccagttgggatcaggacccgaatgtagattg

SEQ ID NO: 361225 - DNA, 177 bp, Zea mays
tgcagtacggtccgattccgggcgaacacggccgggagtgcggaccgtggcgcgaggagcccaaacacagcttcctccttaagctgtagtcggtctcctcgctccctcctcaaacgtcgtcgtgctgccgacattgtctgtcacggctccaaccggagcaccatcccacctcccccg

SEQ ID NO: 361226 - DNA, 270 bp, Zea mays
ggacgagggaccaggtggaaaggcggagagcagaatcagtaacgattaccaccgacgggaagcagcagcagcagctacggcaccgtggacgtggtcaaggaccggcccgtgaggttcagctcgtcgcagctgagcgagttcaccgccaactacagcgagaagctcggcgccggtggcttcggcgtggtgtaccgaggccaggtgcagctcccggccggcggtcacgggagcagcatcagcagcagcctggcggtggccgtgaaggtgctc

SEQ ID NO: 361227 - DNA, 296 bp, Zea mays
gcacgtgtgaaccggagaggtgaggaaaagaggaaaagggagacataaattggaggccattatcaagaaaccatgagttctaggttcgcaatccctaatcctgatctcacttaagcgctcgtgagctctctccagtggctaaagattgcagatttgagttatagtccaagaaacgggtggtggtccgccatggaggtgaggtccgagcaagggctgatcgcggggagggatctattcggtatgccaaagagcccgccggcgccggtttccgggccgccggcgtccgccgccatgca

SEQ ID NO: 361228 - DNA, 291 bp, Zea mays
agaggtggaaaaatattttttttgtcaacctaaaagtatgcttcttattaccaactaggactacatcccagttaggttcagactctgtaaacaaaggccaataccctgtcagcacagctcacactgttccaggtatatgcacaatgttaccagtgaagtataatttcagacaggtatatgcacaatgtggcacctgatagttcaaagaccatcatggaaaaaatcagtgagtatgacgagaccctgtttttcttttacgaaacaataggttctgatgcatgtgtgatattg

SEQ ID NO: 361229 - DNA, 288 bp, Zea mays
gtcgcttgcacttatactttgcttgcctcatgttattgaggcaataattctgttgcaacttgcaagtggcactttcttttgattctcactccaccaggcaccagccaagaggttctgctgggaattatttggcatctcctactcagcacagagtgtgcagataagcctagcctttagagaggatttcagatggaaatgttatcctgcaaactaaaattaactggtaaaatgacagaataaaacaaaggaagtcaattcataagtgccggatgcataggatgcctacca

SEQ ID NO: 361230 - DNA, 288 bp, Zea mays
ctttgccctcagattggtgctgtaggtgattcctgtttcccaattgacactttagaaagcagcacttcaagaacattgatctcttctgaagaaaatgatgctttttgtaaggatgctttgccaagtgatatggaatgtttgtctccacaggttattgctgatgatgacagtcatgttgacttgaaaattcagagctatttaagtgaggtaggagatacaacagttgagaatcatagtgctggcagaatgcctgacatggatcataccagtacaaatatgtattcttta

SEQ ID NO: 361231 - DNA, 304 bp, Zea mays
ggaagaacaagaaatcagcaatggcgagcaaagaaatacctgaacaaggtggtccgaatgttgaagatgtggttgttgctgtcagtatcagtgctgagcttcgaaatgaaggtcaaccaacaacaacaagggagatggacaatcctaaacaaggtggtctgaatgttgaagatgtggttgctgctgttagtgtcagtgatgaaccaacaagggagatatttaactaatcaaacttacaagacctaatgtagcagatcctcatcctaaatatttgtatttgttggtcagcatttctgcagatttg

SEQ ID NO: 361232 - DNA, 189 bp, Zea mays
cggagttgttgtttatcagaattaacctccggcattcaacgtccagtaccacataactaaagatagccacatgcagcatcattagttatgtggtacttgacgttgaataccggagttgttgtttatcagaattaacctccaatttttgtaggccagcctttaaagagcttggcgtaatcagggcggccg

SEQ ID NO: 361233 - DNA, 304 bp, Zea mays
cacatcgctctccttgccggcttgcactcgcccttagctcccgggcatggagctcgcccaagctccacctcccaagcgctctccctcacagccgcgctctcctccacctgcagctcgcccccatctcctcctctccccatggtggctccccctggatccctccctgcgcgggctccctgctccccatggttgtcggcttcccctacgagcagctcctccagggagcacggccttcctcctctcatgcgctctggagccgagctcctccttcaacaccggccgcggtgcttgccatgcaccaact

SEQ ID NO: 361234 - DNA, 185 bp, Zea mays
cctctctctctctctctcccgcggtctcggctcgtcttcctcctcctcttttattggccgcatctttttctccggttgttgaacgcggcggttcttgctccaaatccaggcggcggggagggggtgaggcggcgccctgagccgtaaaggagccggctttcgtagctcttcctgggagtgacctt

SEQ ID NO: 361235 - DNA, 294 bp, Zea mays
tgctctgcaggccgcacacgctaatcgccgcgcgctgagatcccggcgtcccgcgccgcgtccaccgtgctgggaacccgcctgcccctccacgtgcggtcttgccggtcgtctctatattcgctgcttcctccgcgaccatgctccactcctccactccgtccggccgtccccaagccaaaggcaccggcgtccctcggctcctgcctccggcctgtctaccgccacctgtcgcccgcggagataccccaggtccgtatcatcgccgcgtaagatgcacaattgcacacgatg

SEQ ID NO: 361236 - DNA, 307 bp, Zea mays
ctgccatccgcccgccaggagttcagtcaatctcctgtctcctgagagccgccgcccgccgagtcccgctcgccgctcggtcgctcccgtgaggcgctcgatctcctcagcgccgcgcccacccagccacggtggagccacccttcgtcccgtcgtccggcggccggccctcaatccctcacgccctagcttctctgccatttccggtcagcccctcacgccctagctttcctatcaggcgctcggtcgctccctttgccacgcgctcctagcttctctggtcggctcttcctccgccatttccggt

SEQ ID NO: 361237 - DNA, 307 bp, Zea mays
  unsure (1)..(307): unsure at all n locations
cgaaggtagggtagataccatgagaaaggaggctttcttgaacagagaaagggttgtctcacgtgacaatgaaaggatgcatgaaagggttgtttcacgtggcaatgagaggatgcatggtagtgcaataaatgggtccaaccaggcaagtactagcaaaaccacaatccaaaagcttacaagcagaggttccattgctaataagcaagcttccacggatctgaatgatgctgctctgaggaagagcagtgtagccccaaagcaccatttctcagaggttgacagatcaaaatccttgcanagccag

SEQ ID NO: 361238 - DNA, 298 bp, Zea mays
attctagatcgcgagcagccgccctttttttttttttttttttttttttacaaccatataatatcatccgattgcacgtagctgaatccccaagacactagcagacaagttgcaaaccaatatccatccaccaacgcagcaccaaagtgctccagacaacaccctcaccgcctactaataaaaaccacacttgagatatcaacaccaacatctggcctgcgcacacataacctctaggcagctcaatggaaaatactgcatcaaccaacatcaacaggccattctactgctgcttgca

SEQ ID NO: 361239 - DNA, 324 bp, Zea mays
cttccatacgcaatatggcacttctaagattcaccaattaacagtgactgaaggatgtgaaattaagaattctatagattattctattttttccttagatattctaacagatgacactctcctaaacacacaacataaatttgctctctgcatgtgaagactaagctcggtatgtgttgtatagtttcctgtcatgcagatcttgcaatgctgaatgtgacctgtactaatgctgtatagattttgggcataatagggtcagaagctagctgatttaagctagctctgatgaatctgaagcgccacctgggtatgttaagcaac

SEQ ID NO: 361240 - DNA, 297 bp, Zea mays
gaaacattggcagatcgtttatccatagaccaactactgcaggctgaggcctcacttgcaagtgttttggagtccctggtgtttgggtctattagttgtggtgatggcatgtgctttacttgaagattctagttagaaaacttgttgagaagatatgctcaaaacttcgatataaaaatattttagtgtcaaaatttgaataaatgtgtttagattgtcttaaatactgaatattgtcaaacacatttttatacctttctgacgcatgcctttgtcttcagtataaactggatcatc

SEQ ID NO: 361241 - DNA, 298 bp, Zea mays
atgcgcggtgtcgaagtgtcgtttccttcggttcacgcgcttcaaggaacccgatcctttgctgacgatcgctcacactatgatctgcttggtaaaagaaggcctggggatgaagagttcagaaaagcctggcaggaggacgtagatgaagaggactgtctgtggacaagtagtgaagatgatgacgacgacgaagagagcgatacaaaactggagagggacattaagacagtgaagaggctagcgaacgtagattcaaaccttattgatgctgatgacagtgacgagttaagaagta

SEQ ID NO: 361242 - DNA, 104 bp, Zea mays
gcaaacgactggctcacaggtcacctcgtccgccgcatcaagaacttgcgcagttaacgtcacagccgctcaattttacagcgcagagcaggaagcatcagctg

SEQ ID NO: 361243 - DNA, 304 bp, Zea mays
atcgttcactacttacagtgccacttcaaatggtgtttcgtatgcaggcaccagagctaatggtgccattgatgccacccctatctctgcatacaacacaaggtcgaacatatcacttgatggtgatgatgatccttactcgggtacccaaactgcacggaagcctaggagaggccgacctcccggatctggtcgtgatggctcatatggtaagttagagcgccctaagcccacttacaagaattctgttgctggcagagagcttgcctctctggcagcttcatccgatcacagggatatcgtg

SEQ ID NO: 361244 - DNA, 294 bp, Zea mays
ccagctccttcaagcagctgacatctagattcttttcctcactcggccatggtgtccaattcctcaccgtgtgtttcctcccgaccacgcacttccggcaagctgctagagccatctccccttcgagctcctctttcatggtgtcgagccctcttcactcgctatctctgctcagagtgtcgcagtccttggttgggctccaccctcgctggagcccggcggtcgtcgaggtctcggatgctgtctttatcttccatggtgtttgtcgtgagctccacgtacggctccggccat

SEQ ID NO: 361245 - DNA, 292 bp, Zea mays
gtgtttcggatgaagatgcaggagtcgatatttcagacaatcatggtacaaatcctggcatccagattgaagcagtggaagagataactgatgttgttaacgaactaaaacttcccgaagataaaactactgaacaagcacctgttgaaatggaacatcataatttgagaactgaggaaattgattctctcttggacaaatgccttctgcgagcgctatacacaagcatagaagaaaaagatcttccaatgccaggaagtacactatgggcaaatcacatactaccgaacag

SEQ ID NO: 361246 - DNA, 292 bp, Zea mays
gtaactgggcagttccatgcattaagcagtcaaggtttaaagcagcagcgcactcggttatcgatctcgtctccattttctgaagcatgtttttctaggcctgcacaaagttttataaatgctgcaaagcaatgttcagtggacaatctgtgtggaagtctcgatgcagttgcttggggcaaagagcctttcaatgggacgtcagggccttttgaaattatgcactcgggaaagccacatgaaccagaacaaaatgagagcatctatgatttcctatgcagctctaaagttc

SEQ ID NO: 361247 - DNA, 288 bp, Zea mays
cagaaagaaaggtggcatcagcaactacaagaagcttcgaactgcagaactgtaatacccctcttgcttgagttggaaagcaatatccgtggagtagcattttctgcaagttggttgaagccaatagacgattggcctttggaatctcctggtccatcaacgggcgcatctcgtcctgcacaataccaaaaacgtggggttggtggaaggcgtggcagaagacgttcggttgcatctgaatctggtactgctactgctactgatgaggacaacagctggacttggtgg

SEQ ID NO: 361248 - DNA, 287 bp, Zea mays
catatgccttatccctgtgcacaattgttgacaacgcctcaacaggatccccgttgatttgtatatccagctttactagtcggaagggcacttactcaaaagctcaaggaacttatacctcggcaaatgtttagagttcctattcaagcatgtattggcacaaaggtgattgcaagcgaaccctgtctgccatcaggaaggatgtcttatcaaaatgctatgggggtgatatatcaaggaaaaagaagttgctgaagaagcaggctgaaggaaagaaaaggatgaag

SEQ ID NO: 361249 - DNA, 297 bp, Zea mays
gtctagctctaagtgagaaatggtcctcattttgatgctcgatgtgggtggataaatcctctggtggaaacagctcacaacatacaagttgaaaccgtgatggatgaatctatatagaagatggttgacgatctagacatagaaaaaggtccctcatcatcgtcttgagttattgtgatggtataatgttaaacgtctttgttgatagttttgcaattttggctttattatttactggtgtttctgcagaattgttccttttctagatgtgctcatttgactctggtcaatagaaaa

SEQ ID NO: 361250 - DNA, 274 bp, Zea mays
gtccaccgaattccgggcgatgcctctcccctcgcctcgtcgtctccccctaggggatcgtcggagcggaatcgcaaagagggccgtctacatccgagttaaggccgccatggaggcacaggaagctgggtggcaggcccccgagggccccatcgtctgcatcaataactgtgacttcttcggccgtgcggcgaccatgaacatgtgctccaagtgccagaaggagatgttcacgaagcaggctcaggccaagctggctacctcctctatcgac

SEQ ID NO: 361251 - DNA, 153 bp, Zea mays
tccggagcagccgcagtcccaccgaccccgccgccggtcgccctccatctactcgccgctgcatctcgtatctcttttcaataatcaagctaaaccgtagtggtagtgccggtaatggtcaaagttctctgggttatctctttggaagcggtg

SEQ ID NO: 361252 - DNA, 142 bp, Zea mays
ccctcgagccgcatcggctcgagagcgcggtccggtgcctgtggcacataggatcttcttccacctgtatgacactctcttggaagcgcacctctgcaggctgattaagccctactcaagggtggagattgctcacatagca

SEQ ID NO: 361253 - DNA, 249 bp, Zea mays
ggacttctccctcttcctcaagctacgctatgaggaactcgtgtctagtggccaaatggttctaacatttattggaagaaagcatgaggatgtgttcactggagagtccagccatctttacggattgcttacgcagtcactgaaatccctagttgatgaggatcttgtagagaaagaaaaacttgagtacatctatcttccgatctaactcaccgtcggttggtgaagtggaggcgatagtgaaacaag

SEQ ID NO: 361254 - DNA, 280 bp, Zea mays
ctcctccctccactactgccacaccgttccgagttcccgacgacgagcgagtatgagatgaggtgacgagaggtcgagatatatgtgtatatatatgagtgagaaggaccacgctggagaagcagggcacgtgcatgcacatacgccattctcgatctctcctctccaccactactgcatctagctatctccatggatggatgtacgtagctcggactggatcgatcggagaagcaataagctagcgagctcatgcatgctggctgtgcacgcacgtggt

SEQ ID NO: 361255 - DNA, 284 bp, Zea mays
ggcgcccgctcctgcgaggccgaggccgaggccgaggcggctgcgttcgaccacgacatttggagcatttggtgaaccgagccggtggtggtgcttttctgttgcgctggtcttgctctctgccgacggtagtgtcttggtacaagagccggaggatgtgtagtagccgaggtagctagtgtgtgatgcgatggtgtgtgcatgtcggcgttggtccaactccattgatcgcgcacactgtctctgtctcccgggccggccagacgtctttggttctatgcctg

SEQ ID NO: 361256 - DNA, 270 bp, Zea mays
ctcgagccggaactagatcgcgagcagccgctcggatctagaaataggtttcctaccttactctcgtcccagcagccgcaagccaaaaccctagcaagcaaaccaccggaactgcggcgctcgcgcgggcggagcaatggcggacgacgattacaacgaaatcgacatgggctatgaggatgagcctacagaacctgagattgaggaaggggccgaagaagagcttgagaacaacgaagatgcccctgatgatgtcataggtggagaggg

SEQ ID NO: 361257 - DNA, 173 bp, Zea mays
attgaatttgagaaatcggatgagaagtaattatgcttagggacacggaaaaaaatgttgagctgggggatgaagtgatggatacaaatgcaagctgcgccactaattcacataggctgatgagtgccaacttgtgttaaacagtaaaacagatgtagttagttatccataca

SEQ ID NO: 361258 - DNA, 99 bp, Zea mays
gatggcatcaataacatttaaatgattttgaagaagtattattttactaccctataaactgaatcgaagatactaaagttcttaacataatttactctt

SEQ ID NO: 361259 - DNA, 245 bp, Zea mays
gttgataaggaaaccaagcgagttgccgatccagacatccatgatgagttacctcatgttaatagcactcagtttgctttagagcttcacgtgaatgctgcttctatggtgcctcttgaaaatgagatggtagagaacaaagatgcgcagaaatttcgtgagacaatgcctttcgataacatcgtatgggatgaggaactagcatcagatggcaacacacatgatggcttattgcagcagctagc

SEQ ID NO: 361260 - DNA, 265 bp, Zea mays
cttctgcgtctgttgacaattgtggaagttggcttctttcttacttccggacaatagatagtccaaagccattaaataatgcagattcattggaggaacctctagtaagtgattcgcagaggactgacaatataacttcagttgaagagaacacaccattgcatagtgataacacaataggtaaagcagaacaatcaaacaaaccatcaccaactggatcccaaaccacagctgcaacgtatgacgtccaggagtccttcagtca

SEQ ID NO: 361261 - DNA, 283 bp, Zea mays
cgacactgggaggggagcgttttgcgtcccctttctcctcaccctctccgtcgtcgtctacgcttccatctcagcgtcgtctctgccaccctcaccctttgcctccctcccggcgtcgcgtttgccgccctccccctctgcctctacgctgtctccgtcgcccggccagtcccgccgctctcatctcgacagtcctccgctcgtctgacgtaccaatcgatgaagttgttggagaggcagtccaagaagtccccggagaagttgcgactgtcacagcccatgc

SEQ ID NO: 361262 - DNA, 124 bp, Zea mays
cgccattaaaccccactcgcgagcgcggcggtcggcggcgagtcctcacccatccgagcaagccgaggaggatgcgagcgctcgatagtctcaggaggatgcatgggtaccctagggcgcgcga

SEQ ID NO: 361263 - DNA, 135 bp, Zea mays
cgccaccaggtgcagagtctttcgtcatctcttctccggcgaagaacccccagtcgaccaccagatcacttgttaaactttgttgagtggtgatggcggtttctttcgcaaacctcagctccgaggcagggctta

SEQ ID NO: 361264 - DNA, 176 bp, Zea mays
gcgcgccattatagcacacggggcacggcacgccttcggcctccgcggccgactctgcctacggcgctggaggccgaggtgcgggagtactacgacgacgcggcgccaaagcgccacaccaagccctcccgcagcgagcactccgccgtgtacgtcgatgcgctcgtcccggacgt

SEQ ID NO: 361265 - DNA, 280 bp, Zea mays
gcaacctagtcgaggaggagcaatacctgacacttgttcgtaagtcaccgtatcatcatggtgacagagcaaccgtgcttctaaactggaaattacttgctgtggagttcttacctgaagaggatgcagtttttgttcttctcctatgcatggtgattgcacggaccatgacagagatcaggagagaagatgtggctgggcttttagtgcggcggaggataagtgaagcaagggccgggcagagagactggggttcggtgatgcttcctggctcgctttc

SEQ ID NO: 361266 - DNA, 260 bp, Zea mays
tgagaatacaatacaacagatgccatgcgagcagaatggcatgctgcggtgcgtaagcttgattgtacgtgcaggttgcgttttgggctgcttaagtagttggagacaaagtcatactatcaggttgttttgtttccagcagatatatgcttgtaaaacacgtattgtgccatagactgcatgattcttagcagagtttgaaatagaaaataatatatctctactactagaaagcaaaaagtgtgaagaatagaagagat

SEQ ID NO: 361267 - DNA, 115 bp, Zea mays
tagctcgatcgctcatcaatcgacagatgaattattgatctaactaagtgaagttgaaaagcacatcatcatcatgtacggcggatactacggttatcgcgatcaacgctacatc

SEQ ID NO: 361268 - DNA, 110 bp, Zea mays
ggaccagctgatgatgggcatcttcggcatgtgattgacacaatgggtctgcacgtacataatggtgggtatgtgtctgaacaagctgtaatggatagagggcgaggaaa

SEQ ID NO: 361269 - DNA, 142 bp, Zea mays
gatttccaccattatattagaaaaataaagttttcttctaatgtgcatgcaaatgttgtaactattatcatggcttcaggaattgctggcctcggccttagtacatcctatgctactgctagaaatgaggaaaaagtggctg

SEQ ID NO: 361270 - DNA, 163 bp, Zea mays
gcaattctcaaggggatttcgaatggactctcgtatgggcaggggctaaaggagatggacaaactgcttgttgacaatatttttcagtgatgtggcagaaacatgctaggcctgctccacaggctcctctcggtgtctagtccacctcatcggcccatggtgc

SEQ ID NO: 361271 - DNA, 257 bp, Zea mays
gcaaagaggactttgttaatgaggtgaaggctgatcatacaaaagaactcgaatattctagagcagaaaaatataataacgatgacaaatacagcatgtatggaaatattgacaaaagggatagctgcaaggagggaaaaggttctggtagggctgcaaagcatgaatccgatacaagggagctacattccagaggtaactctaagcttgatggtgcacagggagattggaaggatttttcgaaggatagagagaga

SEQ ID NO: 361272 - DNA, 170 bp, Zea mays
gttgggttgaactgaggtcaacaggtcatcgtatttgatctcgaaggtctgtgagtgatcagtgatcaggcttcactgtgctagttcttgttgtgtcgtgcataagaacatggcctctagtatttgtctgattcctaccaaatcacaaaacgctctacacatcatgcatt

SEQ ID NO: 361273 - DNA, 156 bp, Zea mays
  unsure (1)..(156): unsure at all n locations
ctcgactcctgtgaggtatggtgctgggtgcagatgcagtgtgtttgcgctccagnaccttatggacagttgtgtccccaaggaaggatgagaatagctactgaagtcctaaagagcaaacctaaatcaagccattggcacacaggcatagacaga

SEQ ID NO: 361274 - DNA, 281 bp, Zea mays
cacaacacaactcgtaggcagcgagcgtctctcctcttcctctcccacgcaccgcgccaaggaaggcagagagagatcgccgctcctcttctctccgtcggtggtgcggttgaccgacctcctcgagcgagatctcgctgcatccctcgagatctggtgaggctcgctccctgatcccacgcggttacttcgacttatcctttcctgattccgcgcctgatcatgctagttacttgaggatcgtgatttcattccgtggctagttatgtttacccccgcga

SEQ ID NO: 361275 - DNA, 198 bp, Zea mays
ggcgatgtcgcgcttcgggcgctccgggcagccggagataccgcgaatgctttgctccctgcctgcgtccttcagacgtctcctatccgcactaccggctgatcgacctctatcccgctgcttcgattcgctagcggcataggtcttagacatcctacgatcccgctgcgaccacaggacctgggtgatccgcgaggg

SEQ ID NO: 361276 - DNA, 175 bp, Zea mays
gaaagagagatctccacaagccatgacgcgcacacacatcacatgcatcagcaccggagtttcagattcatatacatgctaaacttgaagtttttgggttatacatatattgtccatttcttcatggagctttctggttgctgtggtgtgtggaatgttgcgaaaaaaaaaacga

SEQ ID NO: 361277 - DNA, 107 bp, Zea mays
gtggagacgctgcctcacccaaagacttttcccttccagactttgagtgtcttcccttctagactttcccatctcctggtgagatgtttcccacttatgccgtggtc

SEQ ID NO: 361278 - DNA, 102 bp, Zea mays
ctgcattttatccttcctggtgctctgtccacctctctcgctctgggccgccgcgacgccctaagccacgtgctgaggctttcgttggtctcttcgccggcg

SEQ ID NO: 361279 - DNA, 171 bp, Zea mays
gcctctgtttccaattcctcatggcgcacggccaggtttctctgcgcgccgtgctctctgtcgcgctgctatggtgcccaagtcctggcgcgctcgtcgtcggctcggcatctcctcgagctcgcccctgccttcctgctcggtttctagtgctcgcgtcgacctcaatca

SEQ ID NO: 361280 - DNA, 286 bp, Zea mays
agaatttagacttttgttgctatataatttccatggtttcttcctctatgaatacgggagaaaattcggtcctagactagattggagtctactaagatgcatgagatgtgttatctccttatacagttactgctacaagttcttctccatccagatcagtattgggtggctacacatgatgtgactatatgttgcaagaaattctttcttgtcattgctcaaggtggtagctccagtgactatattgtcgaccttcgcatctcgctacaacaaggatccgatccat

SEQ ID NO: 361281 - DNA, 272 bp, Zea mays
cgcatgttgagatgagtggtttcaggcatccattgaagttacatttttgtgtgtgctacagacgtcacagagcaatctcttagcttccgttatttaacagtcaggaacttcagctgttttattaaagactggatgtgaacgctgcggtgctttgccaacaaagacatcatagggacacaagtgcacttttcccatatgttttagttagttgttccctgcatgtctgatatcagtcagagctatgctagaatctaatactcacaccttgaaga

SEQ ID NO: 361282 - DNA, 159 bp, Zea mays
cgctgctctccgatggggtggcgtcactgccgcgtccgtccccacgccgccgttgccgtaccccggggaggtcgctgccgccgcggccgaatcatttccacccgtcgcggcgctgcagcacctgctggacgccgttcaatccttcaccggcctcaactg

SEQ ID NO: 361283 - DNA, 258 bp, Zea mays
ctttgagttaacttcatagcgtagggaagcagcactgtgcaggtttcagcatttcagataagggcataattaattgtgtaacttaatgccctgttattcattgctgaggttcatataaagactagaaaaattgaaagatgggtttgggcgacattttcttcccaaaagatcaagtaaggcgtaagaacaagtatgggaggacagctagggaacatacttgccatgtcatagattggggaacattttggtccccggttt

SEQ ID NO: 361284 - DNA, 269 bp, Zea mays
caactttttccacccgccggaacactggtaaccctcacgccggcgcaggcaagccgaggcgccatgaggggcctccggaatcgcatgatctcccttctcctccgggcacctggatcaccatacgtcccctgcccggcattcttcgcgctcttctatccccagcgcctctgctccggcatcgaatgcgtcgttacaaaaccattcgccgtcgaagactacctcgtcgccacatggggtctcactcaagcacaggcctcaaggggtcgaag

SEQ ID NO: 361285 - DNA, 171 bp, Zea mays
ctttttccttatctgaggctacctggggattataggcagcaagacccttgactcccagaaatgctgagggtccctcttccaggggagttccctggggagcaagagtagaagggttattcccaagggtcctgtggtcagggtccttctttgtccctggcatgctgtcagtcc

SEQ ID NO: 361286 - DNA, 284 bp, Zea mays
gccccgagccctgggacctcgtcgtcttcgccgagacgcacctcgccgccgcgccccgccacgcacccgtggctgacctacgatagctcgccgcagctctcgttcaaacagatttacggcctccgagcgctggtcccgggtactctcatcgtggatggtggatctggttattgcaagtatggctggcgcaagtatgctgctccttccgggcgttgtgctacattcttggaattcggtaacattgaagcacctatgtatgccaggcttcgtcacttcttctctac

SEQ ID NO: 361287 - DNA, 267 bp, Zea mays
gcgggagacggcccctcgcgtgtgtttcaggcaggaggccgatttggtgcagatttggctggcggacgggcgaccagcttggcttccggacgcgtgacggcgtgagcgcttcttgttttctttcttcgactgcataacagtagtgccatgtgtcgttaggattggattgaactgtgtatatgtgagtacactctatatggttcatatgtagacatgacattgagaccagtttcaatctagaaatcagtataattactccaactgtga

SEQ ID NO: 361288 - DNA, 159 bp, Zea mays
cagtcacgcatcagttcatcacagcataaattacagcggaaaatgggtgcgggcgcaggtgttcgttgtttgcaaagtagatgaagaaaatgtaaccgtcattcggtagaatgctctagcagccaagcccaacaggtgaacctgtgtgttaacagcaaa

SEQ ID NO: 361289 - DNA, 232 bp, Zea mays
gtgtgggtgtgggtgtgcctccgacggcgtctcggtgccagtgtcgaggttctttctgcttagctacccggagcctactacggaggaggacacctgagtttacgtctcttccatctgctgctcacctcagctgcctgggtccccgacgagagccaggtgacacttaactccgccatctgcgttttgagcactgttctcataatgaagttccggattgggggaagcatttgtt

SEQ ID NO: 361290 - DNA, 261 bp, Zea mays
cagaaccacatgatgtgggccggtacacccaagctgaagtcaaatctggtggccaaacatcaatcacaaaaattgctggttcagtagatcctggtatggtttcctgatgtatggattgtccaacacatacagctgttgtttaattgttttcgatttgtgacatggctgacagttcttcagtttcgtagctgcaggattggttcattatgtagaggctcttgtaaggcgaagagaaactggttataatgtatgatcacgtgg

SEQ ID NO: 361291 - DNA, 266 bp, Zea mays
gtgctcgcccttgcacttccctggccggtgccctctatggtcgagctcacccctgcagggagcccctcccatggcgcctagtcctcttcccatgtcgagctcgcccaaccaatcgtctccatcgcagctcgccctcaagcctagggtctcgctgttttcctttgccccacgcggatgctgtagccgggctatgtctctccctgtcatagcaccccgcaaatgttttgttcatcaccggtttgtcgtggaagaggaaagtccatttg

SEQ ID NO: 361292 - DNA, 262 bp, Zea mays
cggtgtgccccatgtcggaaatggctgagttgtccgagctcgccaccgacgagcagtgacctgcagatggatgtgatgcctggcgagggtgcccttccgcagatggaggtaggcagcgggagccgggagctatccctgcggccctcccgcagcggggcccaacagctcgaggaggaaggcccgatggaggaggaggacgcccagccaatggcggcgccagaggggaaacggcgccttgctaacgggcccaacgctggggagg

SEQ ID NO: 361293 - DNA, 276 bp, Zea mays
attctagatcggcggcggcgaattcccttactacccggtggacgacgggctggagttcgagatgcgtgggtaccctgacatggcgcaagggatgctcatcgacccggcgcaaccggccgcttggcaatcggcgttgattcaagaacgatacatatgcgggtcactttggagctactgatcgaacgcgtctggtaccaacaaggaccctgtgtacatacagcttatggtgtgctgaatgaagtcctgtactgtttccctgctcttctgacgaatcgc

SEQ ID NO: 361294 - DNA, 161 bp, Zea mays
ataaactctcagttattttgaaatggcaaatttctcatgatataagtctggatctggaaaggacatgacttctgaaatagccgctgctgggttttaaaagctgaggtctctcaaagtgtggaggagacgttgccgtcagggggtgctagtgccgggaagat

SEQ ID NO: 361295 - DNA, 269 bp, Zea mays
catctctgcgagcaagttctgtcttcgtccatccatccgtccccgtctcactgcctgtggcccgtgggtggcggttgtcgatcagcttacccacgccggcgtgttctccctgacatggtcggccggatggagcggcagacgcgtcgtcgtcagcgtcatgctcccccgctgccgccgccacctcctgctcctcctcgtcctgcggcggcaacaagcggcttgatatcctcaacatgatccggaatgcatcctgtcttaattcgtcgtct

SEQ ID NO: 361296 - DNA, 268 bp, Zea mays
attcgaccctcttttagtggaagaggctctggacatgctccagtattcagaagaaaagatgatggagtttcttcagttaatgagcaaatttaaggagatgggctttgagctgaaagacattaaggaagttttgctatacacaacaatgaccaggacaatgctttggaagacctcatggctcggacaggagccagctgagaccaggccctgctaggcctgccgcaggaccacaatcccgggacgccctgcagagcccacctgtggggaa

SEQ ID NO: 361297 - DNA, 278 bp, Zea mays
caattccagacagttttcttcaaaatgcgccctgctattattcttaatggattctcatcacatcaattgaacttaattcaacaggttttgagaaaaaactttagggatcttatttttgtctgtacatttggtgaggatgacacatctgaaaagaaagtagtttattcagacactgatgaggacagaatattattaatgacagatgtgcaggaagatctactaaaaaacagggaagacagaatcaaatcagcaataggaatccgccatgtcatcgacct

SEQ ID NO: 361298 - DNA, 179 bp, Zea mays
agccgccacctcatgaactcatcctgcagcatcctcaggcctcaccgcctcagctgccagcctcaccctgcatccgagagagagagaggagagttgccgccggagggaggaggtcgccgcggaggggaggggctcgacggtaggggacatcgccggcgcctagagagctcgtggagggg

SEQ ID NO: 361299 - DNA, 280 bp, Zea mays
ccgagagcgtcgctgcctgctgctcgcgcggctacacgcaagtcataaacatcatatggcgctagtacagttcaacggtgccttggttcctcaactcggtgaaaagcctcggctgctatcctcatcacctgcaatcgcaaaggctacctattctgatgcaagattcctgacaccaaaaactggacctcttctgaacaactaaaccatgtaccatcgtcaagatttcgccagacaaggggttcacgttttatcgtcagagctgaagctgatttctatagtg

SEQ ID NO: 361300 - DNA, 224 bp, Zea mays
aggatacgtgcaaacctgcagaaggctttgcatctcgtgtagaagatcatgctggcttcaattcagatcctccagggccaaagttaaaagggcaattattggataccatgtcatgttcttgcagcaaggatgacaacaactcagcagattgtctaatagatgagcagcacacaagccactattttgcaaactcaaagcatgaactaccctctgtatctaacaaa

SEQ ID NO: 361301 - DNA, 298 bp, Zea mays
gttcgactgggagttgccggcagggcagacgccggacaagctgaacatggaggaggccttcaccctcctgctgcagcgggctgttccgttagtggctcgtccagtacccaggctgctgccgtcggcgtatgagatcgcataggaaggctcgctcaagggcctcagcttggctgtatcaagcacgtacaatggcgtgaaagacgacgtgtgtatgtattgttgttcactttgttgacttttgtaaacactagtaaatgttcttgctatggctaatatctgtaacgaatttttatatttt

SEQ ID NO: 361302 - DNA, 227 bp, Zea mays
gtctgacagataacgtatcttctagcttcagaccgatattgtcaccgagattgggacaggcattttacactaatcctccataccatgggcctggtacattcggacttgacagctccattgaccatgcccgtaaccgcagagttgacagcagtgtgttgcaagctgatagcaagaggcagtatctgcttgacttggagaagattcgcagaggtgatgatactcggaca

SEQ ID NO: 361303 - DNA, 292 bp, Zea mays
gaaaacgagacgcttccgtttgacggggatgtggttaacagacagatgctggaacttaaaagtacaaggttggagccgattgtggctgcggcagagactgaagccgcccaagaacaacaggttgatgagagtcctccagttcctgcgatgctggatgatgaggcggacttcattgaagcgtcacatgtccaaccttctgttaatgattctgacattggtgcaaagaagcagctgataattgtgacaacaacttctgttcgaccacatcaggcttattacttgaaccgcctgg

SEQ ID NO: 361304 - DNA, 271 bp, Zea mays
gccgaagcccactctatccaacccaattgctgaagccaaagaccacgaggacaaagacggagctgaggcatcgatgcagaggacaggaaattattcagaaagaagaaagaccgaggaacacaggaagctcgtcttcctcctctggctgtgagatcctatccccctctcgatttcccctgcaattactcacgctccggattgatctcgcggtatggtagccacgggtattacaaggcggcggcggtgtcagagctgtgcgccttcacccagg

SEQ ID NO: 361305 - DNA, 161 bp, Zea mays
cggcggcacagacaggaggggcagactctgttgtatggttttcgcttagatttttttggtagcagttgtatgttctatatacaaactaccccttcttcttgagaggagagagtgcacaccccttcatcaaattgaatagcacgtatgtgtaccgctaaaaa

SEQ ID NO: 361306 - DNA, 146 bp, Zea mays
  unsure (1)..(146): unsure at all n locations
cattcctatcctgtcttaatttcagttatcccagacaatttaatcatttgatgctatcagaaagcacattggggcaggatattcctgaatcagtaggtggcagnaacgcaattagtgcttnaaaattatggccaatatagtagtag

SEQ ID NO: 361307 - DNA, 255 bp, Zea mays
tagaggaagcttgggcagtaagtggcgacttgcagcagagtggacgaacttatcaccaaggcaaagattgtacatttcacttctctatgatcattcttttttcgatgctactgttgggtttcacgtttatactatcagtatgtactcagcttgaggagcaaacatgtactttattcaataaaatggttgttatttgcaataaaaaaaaaaaaaaaaaaaaaaaaaagagaaaaaaaaaaaaaaaaaaaaaaagaa

SEQ ID NO: 361308 - DNA, 267 bp, Zea mays
gccaaaccatgttcatatgcaatcaggcagtggttcatcaggaactacgaatgagattggaagtaaccaattgatctccgtaagtgcttttaaggtagccatgcagctaaaccctcaacatcttggggagaactggccagtccttctggagaagatatgtctatgttcttcagaggaaaatgactgacagatggcgcctttttacttcacattgaagttctgtaccaatgtgcttcttggtgcccatccgatgtacatttgagctgg

SEQ ID NO: 361309 - DNA, 233 bp, Zea mays
ctcgagccgatttgacgagtgggcgcccgctgtcggctttgtgccttgaagcctccgatgcacgagaaaacaaggtgagttggaacccgagacatgtctgaccagcatggcccgtagaaaagtttgccccggccggctaaaatttcccgtgctcgtactttagccgtgcacttgtgcgtccatgaccgtaggtaccgttacgtgaacccgttgccttctctatatttcttgtc

SEQ ID NO: 361310 - DNA, 151 bp, Zea mays
ctacgctcctgtcggcgcgtcctccggatcccggtgaccggtgtgttctccgatttgaagggcgtcccacggacgctccggtctgctgctcctccggcctccggagtccattccagcggacgcgctacggcacagatccgccgccgtccat

SEQ ID NO: 361311 - DNA, 267 bp, Zea mays
gatggcacctatggtgacgatgaatcatctacgcatacgcatgtgccgcaggtcgccgccgccggcacggagacggtgaaagtgatcaccaccccagtcttcccccacatccctcgacttcaggcaagcaaggatttccaggtgctcgtgcgcgtcgaggcgccaccggcgctgcagcagcatagacgcgtccccgtcgacctcgccgtggtgctcgacgtgggtgccagcaccggcaccggcaccggcgtgccgaggctggatgcg

SEQ ID NO: 361312 - DNA, 263 bp, Zea mays
cggcgacgtcttcgcccccgccgcctcccacgggttcgccgcgtcggcggaggagaggatgttcctgcagagcatccaggcggcccagatgccgcacatgcccgccgctaacactagcactaatggcttctttgcttgaccaaggctcgacgggcatccacgccacgtgcatggaatggaagcttgggaaggggaagcgaagattagcagcagccaaaaaaaaaagggtaatcagagtcagttaagtttctcctggttgtgtg

SEQ ID NO: 361313 - DNA, 291 bp, Zea mays
  unsure (1)..(291): unsure at all n locations
gaaattgtcacaagcaatcaacctctggtttgatcacctgccccgaaagtacaatctcttagcccaagatgaagtaatttctagtgcccgaaaaaagtttgaagagggttgcctgcatgaagcagttagggagctaatcaagattgatcaagaatatggttcagtaaattcatgtccttacaccatttggctcataggcctaattcaagcagggagaatagagtgccctcaatttttcatatacttgagggatcaggngcattgatatcacaccagcttgctgtgttcatc

SEQ ID NO: 361314 - DNA, 154 bp, Zea mays
aagcgagtaaaggccttgggttcgacgcagcttttctgcaaaaatgtagggatatggcgtgcctcggttattacttcatcggactccactcaagtgttcataagcaaggtagtgccctcggaaggtcgattgatctaacaaagttcgcttgcta

SEQ ID NO: 361315 - DNA, 152 bp, Zea mays
cttgacacgagcagcagccaaggacgtgatgtgctgaagttcaggcgactaggtcggctggagaagtcaacggggcggttataacactagcccgattcaattaatatatcactttcattgctttacattatagctgttacatagacttctcc

SEQ ID NO: 361316 - DNA, 145 bp, Zea mays
tggaccgctcctccgtcttctcgcgtgagacgtgccgccggcgtgtcgctgtcagctccctgccattatcgacatgtgtcgcagccggacgaggtccgcccgctatcctcgacgcgggcatggagttcggcttcttcctggtggt

SEQ ID NO: 361317 - DNA, 158 bp, Zea mays
gcctgttgtatcgattgagcgagcagttttctaccgtgagaaggcagcgggatgtactctccgttatccggtgcatttgctcagacatgtgtggaggtcatctacaccatcttacaggggatactgtacacagtcatcatatatgcgatgatcggata

SEQ ID NO: 361318 - DNA, 189 bp, Zea mays
cggctcgagtgggcaccaaatttccggcggcgatggcggcggctgtggcgaggtcagggttacggcgcatgttctccgtctctgccttcgcgccgccgaaggcgccagccgcgcgccccaatgccgactcatgccccaacctcttcgtctccggcttaagcaagcataccacaagtaaatgacgtagag

SEQ ID NO: 361319 - DNA, 239 bp, Zea mays
cagaaacttgaataaacagacaggataggtgcagtttctgatcatgagacgtttcagttcttctgtgtcctgcagcctgtggatataatctgtgcagactgaaatgatttgatgaaaccattgttgaaccgcccaatcgcttcaaagttttgccgttcagagtgagcttgtttgggcttgtcaaggagaagaatattctctccctttcttgttttttctaagttaacttctctatatct

SEQ ID NO: 361320 - DNA, 250 bp, Zea mays
accaccagcagattcaaatgaaagacgtcatgctattgcactttgccgaggccaagagatcgctgatacaatccagtgctatcaatctctaatcgtgtatctttcttccatatcacatctcaagatcctgacagagaatgatgagactccacccgattgtgccactgctgttgtcaacagagacttgtctgtgtaccttcagctccaaggaactttaaatgcagacgctgaacgtgataagctaaagaag

SEQ ID NO: 361321 - DNA, 137 bp, Zea mays
tgcagggaaagcaagaaggctggagggatccagcgtatcttgccagtcaccagtgaggtctatcagtaaggtgggattatgggggtacatactaaaggagttgaatcatcagagtaaactgccagttgcaaatttga

SEQ ID NO: 361322 - DNA, 114 bp, Zea mays
ctcgagccgctcgactgcttcctcgtcccccatggcgacggcgctcaaatcgttcctgaaacgcttcgtcggcacctagaccagccacttctggggtcctgtcgcgaactgggg

SEQ ID NO: 361323 - DNA, 262 bp, Zea mays
gtggtggggtcctgcttgtgtgctctgcgttcctctgtggcgtggccaggccggggctggctcttacccggggagtggtgtgcatctcgatgcttctttgccttaatgattggccacatctgggctgctctgcacccacgggataggctggcccactgcagactgcttagggacttctgtgtccatcctggggggtaagcccacgtgacccacattcttggcactatgaacagagaacatttgcctgttggcttctgaagtg

SEQ ID NO: 361324 - DNA, 144 bp, Zea mays
gtaaagcggcaaaaggggattattcagagtaccgaaaaccttctcccgggatcatgcacggcggcacccccaggccaggggcacctctggtggggcagaaggtgattgaattactcagatatgaagatcatcatctaggttttg

SEQ ID NO: 361325 - DNA, 105 bp, Zea mays
cttggatgtgctgctggatctgatcttcataagtaggctgccgccgtgagattccagccatcttcagagtcaagtggtgatctagatggtactggccagagggtg

SEQ ID NO: 361326 - DNA, 195 bp, Zea mays
cttattttccatctcttttatttcactatctaaaaaatatgactgcttagtgttgatggtactttttgctcaataaacttagtttttattaaagaaacactcaattttaggtaagaaagcaaaatttgaagtaaagaaattcctttgcttgggaatttctatattaatgctagtgagaaatatattaactattat

SEQ ID NO: 361327 - DNA, 114 bp, Zea mays
cttttccccactcccgggtctccagcattcctatcctctccccgcacgaacgtaccgccgccggtataccattcatctcacgaagccaagatgaatgttgaaaagttcaagaag

SEQ ID NO: 361328 - DNA, 190 bp, Zea mays
cggtaactccaaatacatgcatgaaggctgttattcataactggctcaaagatcatgagcttgaatctactgatttgcctaagcaatttcagaattattattctgtatcaagtttgcacaatatctctgcacctctaattatagaaaagaatagagactacacagttgattatagcagctcatcttttgg

SEQ ID NO: 361329 - DNA, 188 bp, Zea mays
  unsure (1)..(188): unsure at all n locations
ggcgactcggctcctccctccacgcctctcctcgtcgacgagcggacccggtccaaacaaccccanaccccncacccccgtaccccgaacccctacccgctcccgctaccctaccacgattcccagcatacccgacacctccgataccggaccgcgtaccgctggtaggagttccggtcttcccctcc

SEQ ID NO: 361330 - DNA, 185 bp, Zea mays
cggggatggatgcggcgacggcgacggcgatgcgctccagcggaggcgatctactagccggctagcacgtacgttgcgtgtgtatgccagctgccagcagccagtgtacagaaataaagcggaagaggaggttctcttcaggtttcagctgctgcaaccaaggatcctgctagtggtagtagaga

SEQ ID NO: 361331 - DNA, 269 bp, Zea mays
cgcagatcccgaagcagcgctgggagcgtaagtgcgggcagagcactgcgccgtttgggaacgcacactttggaggagacagtgcggtggttctggaggctgggaagtccaagaccagttggctcgcatctgacttcagtgaagttccttatgacttcccctgacattgcgtccttatcatgggggcacatgaaagtaaaaggctctaatataacctataaggactgcacagtatagccaaggggtagtcggacttgggattggagaga

SEQ ID NO: 361332 - DNA, 267 bp, Zea mays
ctcctccgctccctcccttactcgcgctcggcacgcaggccacgccggcggtggtcaggctcgggctccgcgcgacggcgtcagtgtcgtcccctcccacctctcggcagtcgcctcgcgccctcgcctccggtcctccatgcaccagccggctactctgcgctgagctgattctcccattcaatagagacagcgacgggcatagctaccatacgcaacactgagcccatcttgcttggcattctctctgctgttggaacaattaca

SEQ ID NO: 361333 - DNA, 273 bp, Zea mays
gccgcagcatcaggtccgtctccaactcgccagtactccgccgctgcaatcagggacagggagctcgagcgcgcgccccacctgcgccgacgcgatgcgggccaaggtatagggacattctgttggctgtcatcgtttcatgctacttcaagttgtttcttttcacaatgatggtttgggagtttccatcatctgttatattcatcgttgaaatgtttgttttctagtcagtgggatgcatatataacattagtaacagtcttgttgttccgc

SEQ ID NO: 361334 - DNA, 269 bp, Zea mays
gccccgtccagttctctcttctctttctttcttccccttcctacaccgccgcaccccactcccagatcacactgctccccagatccgcgcccgagccctagtcccccagatccgccgcggcgccggagatctactcctcgtcttggcgtccgcggcgccatggcgtgcctcgcgatctctctgcaccctgtgaacggcccggacatcctactgcaaacgcggtcctggttccccgtctctcgcgccctcgccgccgtctccgactttcg

SEQ ID NO: 361335 - DNA, 264 bp, Zea mays
ctcgccactggtttggcttatacttgccttcagactgtgttgctggtagagagtgtaagttcaatgataaagcacgacagacagttaaggctacttgttacaagctaatttggtactcataatcagaagctcacgtggtggacagctccgatgcttgccattccctacatggtgctcttgattcctgaacacaaacagctcctcatcttggagttcgtagatgtaggtcatattcgatgtagcatgttgtactgtagaccccac

SEQ ID NO: 361336 - DNA, 279 bp, Zea mays
gaaaaaaggtgcccacgaaatgctgatcacgggggacgctgcagttggaatgggcatgtgggacttttgcacgagattctggggtgcgctctaaaccaccaaggtatgtcagacctgtactaacagaaatagaaatgcggggggttttggacattttgtagctatatatatatatgtgtgtgttttgttttatgtcttagagagaagggaaagagttgggctggcctcgtttacaggtgagaaaaatggagcaggagcagcatgcagatgcccttgtac

SEQ ID NO: 361337 - DNA, 282 bp, Zea mays
ctcggcctccagtccagctccaccgctttcacccgctccgctccgtttccgtcgctcccgtcccaaggagccgcgccacgcgagagggggccacggacggtggcagttttctgtttcggtgggcggggacgtcgtcgaccgaccgaccggagcggaaggccggagatgatggaggagggggcgctagatctgcgagagctcgtgcgcctgccggatgttctcgtggtatgctcatctactggatggacagatgaaaagcacatgctttatcttcgattattg

SEQ ID NO: 361338 - DNA, 267 bp, Zea mays
  unsure (1)..(267): unsure at all n locations
ggagaatgggctcatgtgcagctgccctgccggcttctatggccgacgctgtgaggtgcggacatccatcgatgcctgtgcctcgagtccctgcttcaacagggccacctgctacaccgtcctctccacagacgcctctgtgtgcaactggccttatggctttgttggcagacgctgaacgntcctcgtgggcttgncgcccagcttcccctgggtggccgtctcgctgggtgtggggctggcagtgctgctggtactgctgggcat

SEQ ID NO: 361339 - DNA, 114 bp, Zea mays
cgctcgtccactcgtccagggatttcgacgagcgacttcgggtccacatccaagcggcatcgcgccagctcctccacaccgtcgaacatagatccagagcacactagtcatctc

SEQ ID NO: 361340 - DNA, 219 bp, Zea mays
gccgccgccgccaccaccgcctcacccaagctttcatttgtcatgctggttgcccccgccttatcgtgactggcaattttgctttgagtctttatagtaatcactggaattatttcctaggttggcctgactactgttaccttttgtagaatttataaggcggtatcataaactgattttttgtggttcagttagacgagagcgatgaagagcaatttt

SEQ ID NO: 361341 - DNA, 158 bp, Zea mays
cttttggctccgcagctaacgagctgcagccaaccatctaccagcgactcatcgatcgagcgcatcacacactgcacgcagctagctaggcgcagcatcagcggcggcgatggcggcctccatgatctcctcgtcagctctggcggtggcgcctcagg

SEQ ID NO: 361342 - DNA, 225 bp, Zea mays
ttcctgttgatgttcaaatggtccatgctcctactacttccactgaaataagctttcagtttgatcaaaggcttaatgctgagtcccaaattttcttagcgcctttttcaaagaggaggaggttggtttcatccaagactgaaagaactggtcgcaagaataccaccaccattgaaaaccatgactggaagcaagttgacgagccagtgcatcatgatgcatctg

SEQ ID NO: 361343 - DNA, 182 bp, Zea mays
ggggaagagcgcgtcggtgcagcgagggcacgtcccggtgctcgtcggcgaggcagggaaggaggaggaggagctgaggagggttctagttcacaggaaggttcttcagcacccctacttcgctgggctgctggagctcgcggcggcggagttcgggcatgaccacaagggcgtgctccgga

SEQ ID NO: 361344 - DNA, 151 bp, Zea mays
gataaatgtaaaagtgtttcttgtaaactaacaaaaagaaagagggtgcagagctacacttgcgatatgttacgtgcatttgatgctgaacatagttccagaattaattttcagagaatttgtagtataaaaaaaaaaaaaaaaagggcgg

SEQ ID NO: 361345 - DNA, 158 bp, Zea mays
gcagaccgcgccgcagggcagatcgcgccggcggcctccctccacctcggcccgggggagatcgccgagctcgcgcgcaacaaggttttgaatacggcgacagtggcgagcgcgatcgggcagctgtccatccccttcacctcggtcaagaatggggg

SEQ ID NO: 361346 - DNA, 132 bp, Zea mays
gtcaactatatttacctatgttcggagattgtatggtaaattaaattgacatgctttagcgtaggtctccaccgatccagtgttgtgctagatgtgagttgctagattttgtttatagatgagtatatgctt

SEQ ID NO: 361347 - DNA, 274 bp, Zea mays
aaagcttgctacttgttttgaagtggcatctccagaatatcagaaactgcaggattccagttcttgttatgagtgtcttgctctccatctcggcatgaaaaggtaggaagcagaatacacactgggcttctggaagaccttccccggaaaaatgacggattccttgaggaagccagagttttgactgctgtgcgagagtaataaccgaggcctgtctctgcagcatgactgggagttttccgtgaatgggttcatctctttaatgatgccctgg

SEQ ID NO: 361348 - DNA, 273 bp, Zea mays
gtctcaccggacattgttctgtacactataatgatccgtgggtgtgcggaggctggaagaaccaatgatgcatttgcgttctttgacgagatgaaagagaaaggttttactcctgataccttctgctacaacacgctgctgaagccctctgtgatgctggtgatctggatggagctcgctcgtagatgtcagagatggtgcggaataatgtagtcctagacatccatacatatactaccatgataattgggttgtgcaaagaacagcttgtag

SEQ ID NO: 361349 - DNA, 274 bp, Zea mays
gcgcgccttttgcttcctcaacccctcatcatggacatggaggaggatccagcaggcggcgaagacctctcttccacggccgccagcggccactcctgctccggtgacgacggcgaggagagtggctggacgtcctacatcgctacttcatggagacgcagcagcgacgacgacgcaagcagggggacgtgagccgtgctgctgctggtgatggtccatccaccgacgacgatgctgggcgccgccgcagctctacggcggagtgcagtagtgg

SEQ ID NO: 361350 - DNA, 271 bp, Zea mays
caaaaacaggcaaatgtaaatttggtgccgtttgcaagttcaatcacccaaagctagaagatattaagacatcatctttgattgcaaaggaaaccatatatagagcaacaactgatgcagcagcgcacattggtgggacaatgattctgttcccgcaaagacacatgcaccaattgccccagccgaggcacataatgcaaaggggcttccaataagaccaggtgaagtggattgctcgttttatatgaagacaggcagctgcaaatatggt

SEQ ID NO: 361351 - DNA, 248 bp, Zea mays
acaccgcaggcagtgagccagccactgagccacaaagcgatctatctctgagcgacgtcaagcaccaccgaacgattaccaccaccacctcgagctacaagctatggcgaacgtctcctccgctcgtcgtctcttcctctggccctagtgccgccgctgctgatgcttctcctggtagcgggatcgctcgcaggggcaacagcgcttggcagcttccctagggaatgtactggtcgaactctgcagca

SEQ ID NO: 361352 - DNA, 279 bp, Zea mays
  unsure (1)..(279): unsure at all n locations
ggcgcgacaagtcgaggtcggcggatgccaaggaggagacgtggatgctcgtcctcggaggcgacgctgtcggcaaggagagggttgcgagggaactcgccaggtccgtgttagggtcacgcagcagcgttttgtccagcaggcctggcggtgtcgtctccgcctcgtcgccgccgccggcctcgtcaggctcctccgtggtgcacaggagtaggaagcgcccacggatgccggatgttgtgccggctgnctacctagagcggttgcacgaggctgtct

SEQ ID NO: 361353 - DNA, 274 bp, Zea mays
gttccctctcgtcttccccagttcccctacgccggtaatcccacgtcctatcagccgccgatccagccttgcttccatccatccatccatccatccatccatctcgtcgcttctctctgttccgcgtgcgatcgagtagatcaaaaggaggaggaggatggcgaggagttcgttcaagttggagcaccccttcgcgcagaaaagtgcaggagccaggctatagcggacgcccgtacaacctctaagtttagagtgtccagcgacatacgctatt

SEQ ID NO: 361354 - DNA, 300 bp, Zea mays
tagataagccacgtgcccatctgcctgtttgtgctggagtcgagctgttgatagatagaaaagtcccaacaaacgttaagaaagaagctccaaaaccacgtcaatataaaccagggcatgcaggagatgatttcttaacgaaatttcagaggaatgcaggtcttgtggccagtggtgtagctaagaacctgaatagagttgggacctacatcaaagacactgtcagtgatatgatgcagcctcaccgcaagcgtcccaaataacacataggcctgtctctcctaaatcctgtagtgaagt

SEQ ID NO: 361355 - DNA, 235 bp, Zea mays
attacatcgtctaccaagtgaacacaaggcgcacgacctggctgagaaaaatgagctggacggagatctgttcggggctgatctgcaggacgaagaaagagcaagacaggaacgccaagacacggaaccttctcgtgtgcaatcaaggcctccaggttcctaagcctccggggctccaatccctttcctaacggtacccatatacgagtcatgaaaagttgaaaacctcctctgg

SEQ ID NO: 361356 - DNA, 297 bp, Zea mays
  unsure (1)..(297): unsure at all n locations
gtcggatatnaaataaagccctctctgcatccattccactctccactcttgctcattctctcctgccctctaaaaggtgatctgtctttggcagattcaatcacttgcctttctcattctctcctgagcccactattccactctggtccccagcggttcgcccagaacttcgntgaaccatcgcactgcaacctgttgcttagcccctccatctagtctcaatcgttaggactgactgcccagcagaggctggtgcaacaatcagtcctgtagtaagttctcctgggttcactcttc

SEQ ID NO: 361357 - DNA, 187 bp, Zea mays
atcttgcacattgaccacgctaggtgaagatgaaattttggagttcaactgacagatacaaacgcgagattaacatgtatttttcttctgttgaagatgaatgtatttttgtggttgcgtacccaaaaaaaataaaaaaaaaaaaaaaaaaaaaaaaaaaaaaaaaaaaaaaagaaaaagggggggg

SEQ ID NO: 361358 - DNA, 284 bp, Zea mays
ataagacatactctattggacgatttgtcactggtttacctcctttctcgaaaaagaagaatgccgagaacaagtggtctctccataaggagggtctgcaaggccgtcagatagccgagaatatgcgggtaataggtgtgggtgttcttggttttggccttaaggatccgggatcgaggaggagccgtgacgacggcgaggaaaaatacaacaagaaaccatggattttggaagacgagacaggccaatatcagtatcaaggtcaaatggaaggatcacagtca

SEQ ID NO: 361359 - DNA, 283 bp, Zea mays
actgtaaattggaattttaaaaagtttctatagtcagcacaacttgaactatattatagtggtaagcaatcattacattttgccacaggatagcttatcaatatgatgagtgtataaaggactcagtggtcaaaaggaaggctagagtttagaggaacatgagaaagaatgaagcatttctcatagaatggaatgaacaacataaccaatcattgactgtcactatgtttattcttcccgaccatgtcaaataaacttgctttactcccttgtgcctttacta

SEQ ID NO: 361360 - DNA, 116 bp, Zea mays
gtctcctcctccgtcccatcactctctgctcgcgcactctcatctgtccgcgccgtcttcgagcgccatcaagatgaacaaggagatgctcatgatgagaggctgcgccgtccgta

SEQ ID NO: 361361 - DNA, 292 bp, Zea mays
gtttatgcataacgtctttagcatcaaatgttgaaaatttgctttgattagagtgtgagatttgctgggtgcagcatgcaggtgtatccgtatccggattttatttccctctttactctcatatatctaaacaatttgcatgtgataggatgaaagatgggcacttggccctgtcatgatcttgtatttccttttgtattagctagttagctgagcacagcactaaacaatgctaaaaaccattttagtacagtggcaggtgcgtttttttggaggcctgtagtttctcttc

SEQ ID NO: 361362 - DNA, 291 bp, Zea mays
gcagagatggcggagaaggtaccaaaagctgttctctggtacaataagttccttggcttccgggtgatcggaggagaaagaggtgtgaagttcgtgttcgacaagattgacccacagcgtccggagaaggagtactcgattcgcgtaagtccgagacacaattcatcgatcgtgattctcatgtccaggacattgatgaattggcgaaagatttggatttgaacgatcatctattcgagtttgtaagaatggccagagagaaattccagtctcccttcatgaacgagacac

SEQ ID NO: 361363 - DNA, 157 bp, Zea mays
gcgatgcttgccagcaagcacggcagctgtggagagagtgtcctcgctgatcacagtgtttcaggaccaggagcagcagcaggcggcacgacactggccatggtgataaagcgacccgagggatagaagaagtcgatgggggtgatacgccggtcgt

SEQ ID NO: 361364 - DNA, 150 bp, Zea mays
atactgcaggtgcagctgatgcattgctggtctctcatctgaagcttccacagagtgccaatcccctcactcagcccatccctaggctctactccggggccccaagacacaggaggaggagcgttctgcctgctccctcccacctcccct

SEQ ID NO: 361365 - DNA, 239 bp, Zea mays
atttgtttatgtgttttggtaatcttctccagttcctttttagtttcggaagctgccaatgagatttgtgattaatagatttcttgtgttacaaaagcaagggggaattcaataccattatgaatagatgattttattggtgtaggaactggggatgtcattgataagcattgcgttgccatgtcttgtgaagccttgtcattgctggaagcaggttctgaatttcaatggttgttgac

SEQ ID NO: 361366 - DNA, 118 bp, Zea mays
agtgggagagttgaccgtgtcaccccctgcattgtgctgccatttggctagtctgtccaagggcatgacaccaagttgacactaccgagctagaaccacgacaggagcccagggtggt

SEQ ID NO: 361367 - DNA, 121 bp, Zea mays
  unsure (1)..(121): unsure at all n locations
ttccgccacacacccatatgccaaattgcattgacagagaacgagagcgnaaaaaaaaagatcctaatccaccctcgccgcgagatcgccggtcgctcccatgtcgactccagccgccgct

SEQ ID NO: 361368 - DNA, 168 bp, Zea mays
agcgccgcgccgcgcaggcagccatccttgttctgtcccgggtacgccgccacacacatcgcttcaagcgcctccctccgtccttcctctttgtggattggaatcgacgcctgaaagtggatgacgatggcgggttcttgcgccgcgccgcccgttgcctgtcttccc

SEQ ID NO: 361369 - DNA, 235 bp, Zea mays
aaagagttggaatgattatatggcatgatcggcagatgtgactgcctacccatttgccctgtgaatctggtggagtttgttttctgtttttttggggggtattcattttaggagatagttaacataatggcgagataatctaccttgttaagatatcaaagagcagcccagcacagattttgacataaaaacaacaaagtgtgcgaagtgggtaaatagaaagtacagtactggg

SEQ ID NO: 361370 - DNA, 140 bp, Zea mays
  unsure (1)..(140): unsure at all n locations
aagcagactcagatagaacccacactantaatatctcctaccgacaagaccaacatcaaagccacatgaagtaatatcagcgcgcacactagcgagtataatacggaaaccctgaagaggatattcctatccttccccac

SEQ ID NO: 361371 - DNA, 178 bp, Zea mays
caagtagcacgcattatatacacagtacatcgcaggcccaagctatactactaagcatcaaggagactggtttgatctggcgcgtttgctgctcttgttgtaccactatggatgtttgtagcaaagtgacatacgacggtgttgtaatggactgaagatgaatagatgatgttccagt

SEQ ID NO: 361372 - DNA, 281 bp, Zea mays
gtacaccggacccggagcagctcgccgccgaacccagcgctgaaccgacggggagaggcgaggcccgctttaccccgggaactacgaagcaacgacggcgggactgagcaggcggggatatgactgtgatcaaggcagctggagcggagccgtgcggagacggcggcgcgtacggcgcgaggcggcggcagtcgctgcgggcgcggtacgcgtacgggttcgtcttcttcgccaccaacctgctggcctggttcgtcagggactacggggcaagggcgctc

SEQ ID NO: 361373 - DNA, 106 bp, Zea mays
ggactatattgatcacatgtacctcgtcgtcgcagcagcactgacgtccgcgacgccacgtacaggcgtcgtgctcccacggagcagtcgccgacactgcacacgc

SEQ ID NO: 361374 - DNA, 278 bp, Zea mays
cgacgacaatagcaataacaagagcctagtgcctgtacatatgttctgcttctaacagttggaggagagagagtcagttagctagctctttcagaagaatcaatggtgacaggggggaaacttgtcatgtcgatggagaaagggggagggttcctcatcaaatactctagttttgtagttttggtttctcttttgtgttcgtcctgtgctagggcccatcttgtggttgcagtgtgacattgagccgcagttgtatgtctggtaatggtgttagggga

SEQ ID NO: 361375 - DNA, 110 bp, Zea mays
ttcacgagcaccatccatcgccatggctggccccaccaccacgctcctcgtcctgctgctgtgctccgctgggctcgcgtctggcgccacggcggctgacgatagcgggt

SEQ ID NO: 361376 - DNA, 128 bp, Zea mays
gtaacgcgaataccacccccgtgacttcccgatctccggcgatggtcgcgcggtgcctcggatcccccgtatctaggtggttgcgcccgtctgcgctgatcctcctggtcgcctctgatctcctctcg

SEQ ID NO: 361377 - DNA, 155 bp, Zea mays
cggactacccgagtggcagcgagtcgaccgcatcttcactcgggattcatcaaagctacatgtatgtcaaccggatgcactgccacgatgacggcgctgtccgtgcttatgtggtgttcactaaccagacagagttatcgaggtactacttcatg

SEQ ID NO: 361378 - DNA, 102 bp, Zea mays
cagggcatgctctgggccagcaccacgttgacgacgcggttcgccggaggaccagccggaaaacaccaggtaacatcaaacacacccgttcccttccacaca

SEQ ID NO: 361379 - DNA, 181 bp, Zea mays
cagggtacgacgacccacccggtgagtttgacccctcgtcagttcgtcagtggccaaccgagcagccgagcagaaacagcatgcggcgccgtatataaaccagagcgcacgagtagaggaggaaaagcagtatgagccgaggaaagacgggtccgggaaagtcgcggaaggagcaatggca

SEQ ID NO: 361380 - DNA, 208 bp, Zea mays
aggctgctgctcgcatttcttctgtagctagcaatagcaatctacacttgctccctgcaagataaagaaaggcgagagagctagagagggagacagatcaataatcgtcaagacaatcttgacttctgagctagcttccgatcgatcacactgctgtgcacagctgacaagtgcccatggcgacgacaaggaagcatgtgtccgaccc

SEQ ID NO: 361381 - DNA, 259 bp, Zea mays
ctaggaggttaccctttgtctttctgttcattatttccatgttcgcagtgtcaaattgtcttatggttgtagtttttttgttcaactttcagatgtctaaaatcaatatgctaaggtcatgcaaaggaagtgtttactggatggcacctgaggtaaaagttacagtttaacttctgagtgacattcttgcaaaagatcagaaaccaatggaaaatccgcaatagccccttaacattcttattacttttgtgtgactact

SEQ ID NO: 361382 - DNA, 255 bp, Zea mays
ataggacactttggatatgaagaagagattgatcagctggaagagggataaacaagctcttgatggctgaggtagtgaaactgaggcaggagcaccaaaatactagatcagatctacaggccatggaagagaaattacgagacaccgaagcagaagcagcagcagatgatggcattcatggcacgagtcatgcagaaccctgatttcatgcgtcactagatctcccagcgggagatgaggaaggactcgaggatc

SEQ ID NO: 361383 - DNA, 118 bp, Zea mays
aaagtcatataaactgatgaaataaagagcagacttagtgtcggagactccgagttggaatcacatctacagttctgcaaaattttcatcaagggatatggagctataatctaatttt

SEQ ID NO: 361384 - DNA, 194 bp, Zea mays
gcttctctccaagtgaggacacccaagccctcgccatggcgtcgcagatctggcccgatccaaggcccttcccctcgtcgacgcactcacccctgctgctgccaaagcagcaacgcctatcgccggagcccaggagctctcgtccctgccgcgataaagcgagtgcttcgagatgccccgatcagctcgggaaa

SEQ ID NO: 361385 - DNA, 265 bp, Zea mays
atcccacctctgggtgtgggactttggggcagccgtgtgtgcaggtgtcggcacaggctagctcctcctggtttggtgtgatgtttgccattgcagagtaagttgccacgaagacccctgggcatgattttgcttgtatttccggaagtggggttgctgggtcatagggcaggggtaattttttttgcttgaaatgtccacttcttgttctgggaggtggttccaagggtgtctgcttttggccaggcgcagtggctcacgcttg

SEQ ID NO: 361386 - DNA, 101 bp, Zea mays
ggctcgagatgtacctcggatgtgctctcactggctttgtaatttcactcggaggaagtaataatacgctaaatggatggcgtaacaagatactttgcttt

SEQ ID NO: 361387 - DNA, 249 bp, Zea mays
gaagacccatgaagctattctgaacgttttagatcttcagtagtacgtacttttgcatgatcacatcaattgttcatgttgtagtttgatcattcaaggagcactgctcatgagttcacttttattactgctacgtatgcagtgatggaaaagtacctcgggaacctttagggatgtggactaaaagagccaccaagttggacaaattgaagacttcggtcaagattgccatggttggtaaaacactgg

SEQ ID NO: 361388 - DNA, 271 bp, Zea mays
ggccaggctcgacggcgccgggtaccacgccatggagctgttcaagcccaactgcgccgcggagttcaccgcgcaggtggccgacttcgttcgccgccactcctctaccgtcaccgccgtcgccggctccggcgacgtggttggtatgagcaagctgtgacacatggtcaaacaaacccatcggcccgcagtggaggttgctgtactttggtgcaagctgcaccgggccacttctcaatcatatgtcatatcatcatcatcatgctacaat

SEQ ID NO: 361389 - DNA, 283 bp, Zea mays
ccatgtgcgagtggccgcaccggtgtccccagcagtgcgactgctgcttcccgccgcacagcctcatcccctggccgaacgagcaccacatggccaccgccgccgccgccgatgcctccggctccgcccaacaccagtagcgaaactgcacttgtgctgctacgcaatgtaagccgtcgtagctagactactagaactagcgtgttgtttggttgggtacgtagctgcaaccgcgcgcgtgcagtagtgtggcgccaacaccacaacacctgcatctgcatgc

SEQ ID NO: 361390 - DNA, 295 bp, Zea mays
ctcgggcttcagctcgagcgcggccttcccggccggatccacgttgctgcggtcttctcggctagatccgccaaccctttggccggatcgccgacttcatggctggattcgtcgctgccgtggccttcccggccggatccggctattccccgtcttttctgccacgggcgcggacaccatgaccggcgcacacgcgtgcgctgtcgtcggcctccctggcggggctcgttgaggcccggatgatcgaagacgcaggaaggtcggcctgccggtgcccttttgctgtgtcgccctg

SEQ ID NO: 361391 - DNA, 266 bp, Zea mays
  unsure (1)..(266): unsure at all n locations
tagagttttctcctcttgccaatcatcatacagctatccttatgttcctgagagatacacatcctttcacatataaagtgtagtttaccatagcatacaagcacactgggaattttgcattacagattacgtactttctgaagtatcaaacacatcatttctacaaagtgaagtggtgatacgtttaataaggttggagtaattttttaaaacagcccccataacatattttctcncgtttactagaaaaatggcctactcaaaat

SEQ ID NO: 361392 - DNA, 269 bp, Zea mays
gtgagaccgtcagaataatggaatgcttcctgctcatcggctcccctcaagatcacctacatccctgaggggagccacttcgtgcaggagcagctcccagagctggtcaacgacctgctcctcggcttcctcagggaccatccctccgccgcataagcagtgggtgagaccgtcagattaccgcaatgcttcctgagcaacggtttctctactctattgccgttgcctggatccatgaccgtgttaattaattaattagtgcatatact

SEQ ID NO: 361393 - DNA, 107 bp, Zea mays
ttccacaccggatgtttatcacaaggttgttcctcagatccctgtgaagagtggtggtccccatggagcaggcgtcctcgggctgcacctggagggccccttcatca

SEQ ID NO: 361394 - DNA, 228 bp, Zea mays
ccggccttcagacgccgttccctgcagcttgctacagtaaaatgaagccccaggtttctgacgatggtgtacggaaagctcccatagtggaattgcgtaccgcgcgtgtcaaaatattgttccaatatagctaatatgggacaggacattcatcgtttttttttcttctcatcaatatattgttccactataggcatgcctggctctcactaggtcaacaggctacac

SEQ ID NO: 361395 - DNA, 113 bp, Zea mays
gcgtctgtgagtgtttgatcaaatcgaaggtggtgtttgtttgctgaataataggcaccttccatgaccatatcattcagcaaacaaacaccaccttcgatttgatcaaacac

SEQ ID NO: 361396 - DNA, 278 bp, Zea mays
cacagctctgaatgtcgacaagtcaagcactgctcccaacgagaacgcaccatcgatgccaccggcaatacctacctccgctgcatccagagcacttggcacaaatttgcaggatcagagccctactgtatctgatcctactgtaggagcggcggcggcggcggcggcacgaaggaaggatggcccaatgccttcccaagtacctgttgataggaaaaagatggatgcacggaagaagagcttgaagagatttataggcggaacttcctgggaagaag

SEQ ID NO: 361397 - DNA, 194 bp, Zea mays
gtccactcatcatcgccatctcttctcttgttttgctcgctctatacataccagagaggtaggtagctagctagctagtggtgaacgtacaataatacaatcagcacagcaagacagtaatggcgcacggcagggaagaggcagtggtgctgtggcccttgcggcggcggccgcggtgctcctctgcgtgctcc

SEQ ID NO: 361398 - DNA, 181 bp, Zea mays
ggggggttacagcgccggcgggttgcaggagagcgcggtgggcaggatgctcgccgagtacgcagcacccgcgggattcacgcttggcgagttccgcattcccccgccgccgcagtctcagagtgtgctcgggttctcgctggacacgcacggaacggggggttacagcgccggcgggttg

SEQ ID NO: 361399 - DNA, 263 bp, Zea mays
cttcctccgacaattcgtcacgcccatgccgccctcccctccgaccacctaacttcgctccgcccatggccgtcgtcgcccatgccggcctcccacggcctcgcctctttctccctttctccttccacggaagccccatctattcatcatgcctgtcattggctctgccttcggttgctgtagattatgaccatgggaacccatggtgtcgccctgacactcctcacaacggtgcttctcgagagcacatccagtgtcacagt

SEQ ID NO: 361400 - DNA, 264 bp, Zea mays
ctttcccgaaaatgcaatgagaatccccaggaagcagggacaatggaaggcgggctggtctgcaaggccgacatgggtgccccagcctgctgctccgggaaagacgtttacctgctgcccagagctgggactgcagaccctgattggcgagggcttggagagtagctgagaaccttcccttcagctactgaagaccagacagggctttctgtatcacgctgcctgacgatgatgatggtgcagtgactaagagtgcagatgaaa

SEQ ID NO: 361401 - DNA, 260 bp, Zea mays
cagaaacgagagggccggagcagcccagtcccggcgatcccgccgccggtcgctctcatacttcctcgtcactgccttcgtttctctttccaacaatcaagatgagccgtggcggtagcgcgggtggtggtcaaagttctctgggttacctctttggaagcggtgagccccccaaaccagcagtggcaccagctgtaagtgctccacctgctgctgcaggtgctccacctgctgagaaaccacctgctgcaaacctgatg

SEQ ID NO: 361402 - DNA, 130 bp, Zea mays
atcggctctggtgcatgctcggccaccacgatgtcccagcgccgatgaaggtccgtcttgcagcagcaccgtggtggacttcgacttggagcactgcgatgactccatgccgtgcccctctggttcctcc

SEQ ID NO: 361403 - DNA, 179 bp, Zea mays
gcgaatctcggctcgagacttttttgaaaaacttgagaagttacaacaaaaacaaaggatacgaatcaaacaaaagaatcttgcaactggtcgaccgcttgtcgctgcccgcacgacgctcggcgcgtccggcgaatgcacggaagggccgctcaagtttcacctacccttaaaccctg

SEQ ID NO: 361404 - DNA, 284 bp, Zea mays
cgtcgaagctcgttgagcgtgtccactctacatgtcctcctgccgtctcagcctcttgtgttttacaccctacaactcctagtaccgccgaataagatttgctatctgcaatgtgctcatgccaccgctgtgtgtgccagttaacagtttgcacgaaaccctagatattttgttatacgaatgaatgacatgtggtgtttgataaatgatgaaacgatgatggttcaaatcaacccacctgtctttcacaagttcgatgaaacgttgcgcgcaatggttgttta

SEQ ID NO: 361405 - DNA, 284 bp, Zea mays
gactccgtgctgacgtcgccgcggacgttgaggcaggggcagaagtgggaggtggagtatgcgcgctacttcggtacgccgcggcgggaccccaccgcggctccaccatcagggctccgctacatcatgcggggcgtccaccgccaccagggaacctggatccccgcctcatgccccgcttctctctgcgtctgccaccctagcctcccctccgcggtccacgtcctcaccatctccatcggcgacgtcgtcttcgaggagcacattgtgtcgattctcaactt

SEQ ID NO: 361406 - DNA, 277 bp, Zea mays
gtttgttcactgtttcaacttcatttctgaattttgtattttgtttgtgtctagacaaacaaattatttttaaaatgaaagctcaattgtctatcgttttgtttgccttcttggctgtttcaatggtgtctgccgacactttgaccgaaaaattgcgtgctttgtaccaagaaaacgctgaatcagttggaaaattggcagaacaaattgaaactttgcgcaaagatgcttccttaagtttgtcagacaaacaaaatcaaattgaacaatcagtcaa

SEQ ID NO: 361407 - DNA, 275 bp, Zea mays
cgcagatcgaccatgatgaccgggagaacctgtcgttgctgaggtttgaggcgctgtgggaggcggagttcgcccaggactctctgctggtcttctccacggggaggacgccggtgagctacaagggcttgcggagggacaagcctctggtgacgccggacgtcaccatcatgtccgtggggaccgtgatagcgtacggcgaggagatggtccgtgacgtcggctgggaggagcggctggacagcgactgggacagggccatcgtcgtggaggag

SEQ ID NO: 361408 - DNA, 281 bp, Zea mays
cggctcgagcgttcatcctggtggttttgtgacgtcgaaagcggcgagcgaattagaacatgctggacaagctgttggacgacgtggtgcccgggcctcgcccggagacgggcctcgagaagctccgcaaggccagcaccgcccgcccgctcgtcatcgacaaagacgcggacggcggcagctacaagcgggcgcagtcgatgccgtcgaccccgacgacgccggtgacgccgtcgtcgtcgtcgtcgtcgacgacgccgcgcggcgtctgcaacgtgtgg

SEQ ID NO: 361409 - DNA, 269 bp, Zea mays
cccccccccttttttttttttttttttttttttctttttttttgacaagaatcaaataaatcatctcattgataaccagaaaacgcagcagggtagtacatgatcgccgcgacaaacagtggcgcgtcgaagcacgtaccaccaccaccactcgcacacctccgccgccgccgcggccgactgtccatacatacacacgcccaacgacacctcacacagagacacgcacgacacacgagctggactcacgcacgccagaccagacgaat

SEQ ID NO: 361410 - DNA, 271 bp, Zea mays
ggaacatcaggcctcctgctttgtgccaagacaaaagttgccaaagttcgacttgcatcttattttgctgaaggtgctataaatgctgcaaagaaaagggataaatcagagttcagtgaagagcgaaaaatttcaaaattttatcgagccttagtgactggcatacttgatgatgatgaggttgttgttacacaacctatagggttagttcattatcctggagttgcagagggactttatgcagcatgttcctcaggaaagccagcaatga

SEQ ID NO: 361411 - DNA, 276 bp, Zea mays
accgactgaccagctggcatcgctcgttgccggagtgtatcaaagacgggcaaagctggaccccggccgtggtcgggatgcacatgttctaccacgtctacatcatcacaatctccagctatctcaaagtccacccttctgcgcccgcaagcacggtatcatctgcacaacagctgtgcatatcgtccgcaatagccgtgcgcgatctcatgaatacctaccgctccaattggcgacgcattgaatatcagccggtggaatacatgcaaatcaccg

SEQ ID NO: 361412 - DNA, 274 bp, Zea mays
tgaagaagttacttttggatggcctaggcaaaaggcagacctcctattaaaagaacagctcgctttaaatcttcaaaatgcttttaactcggttcaaactcctgatctgttgctgcttgatgagccacttgctggtctagattggaaggctcgagctgatgttgtgaatctcctaaaggacctgaagaaacatcatactatactggttgtaagtcacgatctaagggaactatatccactagtggatcgctcatggcgaatggaaatgggggga

SEQ ID NO: 361413 - DNA, 144 bp, Zea mays
ggaagagctgagccggaccaagtctcctcgtctgtcgtctccacctcgtcgctcacctctgatcccaagcgacccaagctagggttccaccccagccctgaggtcgcccctatccaatccgatggagggcggcgactcgtccgg

SEQ ID NO: 361414 - DNA, 214 bp, Zea mays
tcgagcggtcactattcactaactcggtgatttttcatactagaaaacgtttacagatgtgatttcactttagtatgtggaataatattcgtagtagtattttaggtgtaaacgtattgacatgaagaaattgaaataggcactaagtcacgtattttctagtcgaatgagaatatagattttactattcataataaatgtattcataagtgtg

SEQ ID NO: 361415 - DNA, 280 bp, Zea mays
tgagagagagggagccaagggaagctctcttctttcttcctcctcctcgtcctctcgaattccgtctcttgtctctgtcctcctcgctcggcttccccggttcttgagaggggaaagcggaggagagggatggggagggacgagaggttcccagtgtgggaggccgcgctcggcgctggggtcgccgccgccttcgccgctgggctcgtcggggtttacctttccatgccggactccgactacagcttcctcaagctgccacgtaatctccaggaactcc

SEQ ID NO: 361416 - DNA, 269 bp, Zea mays
aattaaacacccaatatgtaaaagaacaaaaggccactaagaactcccttgggagttcggctgcgaactgttctgaatcttcttccctttcttcttctttatccttttcttcttccgtagaagatagaaaagacgactcttcttcccacgtcgctgctgataacggtagtgacaaaataggaagagttgctgatcctcaccgccgcgatccgcatggatctcctgatggtagtgactcggatcagcctcgcaagagtggttctcatgac

SEQ ID NO: 361417 - DNA, 265 bp, Zea mays
cttgtcttgattatattgaatattttacagttttttaaacgttcacttgaaatttacatcgcactacaattgctggcgatttgtttgaacgattaaattaaagtagagtaaatcaaaatgtctgatcatccagtttacacttggggtgaatttcatatggattttattaatcgagaacggaaaaagccattacgtccacgtaattacactccgaccaatcatcctttgtactattcccgaatttatgatgattttcgatggggcc

SEQ ID NO: 361418 - DNA, 264 bp, Zea mays
tcggcctcgccgccgccgccgcctccgcggccgacgcgcccttcgtcgtcgcgcacaagaagatttcgctctcccgccccaagccgggcgtcgagcgcgtcgccgtctccgtcgacctctacaaccagggatccgcgtgagtaccgctgctccccccacagcacccccaccgccgatccggtttgtcgcttgtagtagtctgccgatctggcttgttgcttgtcgtagtttcgtttgctcctgggatctgatctgactcgtatg

SEQ ID NO: 361419 - DNA, 260 bp, Zea mays
gttctagctcttattgtccacctgatgataataaaggccttctgatcttctttctaggaagccaatgaacttattctacattaaattctcctgagccctaccgtataaataaaccagatgcgttttgctgattgtattagtattagaatgctttgtacgtggcaagaatgagaattacaaatggtcaaaaaaaaaaaaaaaaaaaaaaaaaaaaaaaaaaaaaaaaaaaaaaattaagaaaaatgcaaagagtgattcga

SEQ ID NO: 361420 - DNA, 251 bp, Zea mays
ggccaagcaacagccacgggggcgggggcgacgaggagcggctgcccctccgcagactgctggagacgtccccgtcccatcacgccgcggtgcagcccaaggacaaggaggcgaggcgcgggggcagcaggctctggcgcgcgtccgtgcgcgcggggctgctgctctgcctgctgaccgtcccggccgtcctgctgctgctgtggtggcaggccgactcctcgccgcagtgggtcttcgacttcgagcca

SEQ ID NO: 361421 - DNA, 284 bp, Zea mays
tctagttctagatcgcgagctgccgcccttttttttttttttttttttttttttttttttttttttttttatctttttttttttttagctttgatcagcttattttatcattggccgctgcgaacgtgacgtacaggacaggttggttgacaagggtgaacacacagcggacacaaattgctccataggttacaaaagtgtagcggcagccggcaggtatcctgatccatcgccatctgcttacacacagacaaaacagatagtaacgacactaggcatgaagt

SEQ ID NO: 361422 - DNA, 285 bp, Zea mays
ctacctcggcatggggctgctcgtggtgtccgccggcggcacgagcccgactggcctgcccttcggcgcggaccagttcgacgagaggaaagagcagcacagtaagcagggaggcctcgcgcgcttctactgcgcgcagggcatcagcagctaccttgccacactcgtggtcaacatcgtcaacgccaggacgaggcgacacggtgggtctgcgggctgggtcaccgacgacatcaacgccgggaggatcgactacttctactatgccatggcggtgctctctgg

SEQ ID NO: 361423 - DNA, 284 bp, Zea mays
ggcgaaggccgcggccgagcgcgacgccgcggcgcgcgcgcgtggcggcgctcctgagccgcgtcgggcgggtgccggatggcgttccggaaggacgagcgcggcgtggtgaacgcggtgcagctgctggacccgagcgcgcgcgccgtgtgacagacggttccccgtgtcggtgctgctggccgtggcgccgtcccggcggtgccgcaagcagatggtggccgccggcgcgtgcgggttcctgcagggcctggtcgccgcacgagtggaaggagctaagcggg

SEQ ID NO: 361424 - DNA, 277 bp, Zea mays
agagtggtaggagttctcttgttgtgacaataggtccatctgctaggcattagtcagaaacttcaagcacaatcatgtttgggcagagggcaatgaaagtagtgaacacaataaagctgaaggaagaggttgattatgaaattctttacaagaagatggagcgtgaggttgaccaactcacatccgagatggagagacaacagaaggttataagaagtgagaaaatgcagatggataagaggttgagagaatctgagaggtccttccatgatttaag

SEQ ID NO: 361425 - DNA, 278 bp, Zea mays
gttctagatcgcgacgttcgccctttttttttttttttttttatggctagttttttgtattacctgaacacgttattagtttattttctcaaaactagccgaacaaatagcctggttatttctgtcgctgtaagaagctagcaaaaatctaaaacaaacaagtaaaacaggttacaaatttgcaattcgcaagaacaggaactgacgtcggcaccagacagttgctcattgtgctcctcttgatgatcatatacccagaatgatcggacagtaattca

SEQ ID NO: 361426 - DNA, 278 bp, Zea mays
gtgacgtacggcctgctgaggcagtacatgaaggagcagggcggcagcagcgccaccaggtgcctcgcgccggccgtgggcgtgggcctcatgccggaagccgacgctgctgctgcggcggcggaggcgacggacgacaggaccaccgtgctggagctcttcccgcagcaggctggcacgctcaaacacgagcagcaaaggtgtgttaactcgccgttgccttcagtcagtgcctcaccgtgcgcgtgtgaacttctgatcggatctctccgtcgtcc

SEQ ID NO: 361427 - DNA, 269 bp, Zea mays
cacccttcgagctaaaacccgtgccagcggtggccaacaagtggccgcgaccgcgaaacaaggtcgccaggactccgacagttattcggtcgctaccgccgtgagcagtggggtgcctcgtcagaacagagaccagggctccattggtgccgtcacggagagttccttcgacgctgatgtcgcgagcgccgagcatggcagcaacggagcaaggagcggtgaaaatggtggtggtatgctggctggccagaatgtccatttcgaaggcc

SEQ ID NO: 361428 - DNA, 266 bp, Zea mays
ctatactccgttgtattgtattctttgtacttcacattcactacatgtctacatgcagtagcactagtagccgagtacaggagagagtgtatgaagacgcgtgcgacggtgcgagacagatgggcaccggccgcgcgcgtgctagaaaaaaaaccctccaacgaatcaagaaatttgcattcctagctaagctagaaaaacacctaggatccagtgtatacagcgtgtgtcgtgtgtgtgtgtgtgtgtgtgtgactgtgtgttat

SEQ ID NO: 361429 - DNA, 269 bp, Zea mays
ggcacctgatcccgtcgcttcttatcgctgtacaggtggccagctactgccgggagatcgtccaggtgctcctgaggcaggaactgaggctgctcagcaaggatttgggggagacaagcgaggccgacatgaaggagcactgggacgagctgttcaccaggtgtttccagaggctggatgacgaagtgtcggggcaggcgagcaggctcgtcggtggcgtccaggagacacggccggtggccgccgagaacgtcggctccactgcggtt

SEQ ID NO: 361430 - DNA, 159 bp, Zea mays
ctcgagccgatttcggcaaccccgcacgaaaaaaaaaagggcgaaacgaggccaccagctcaccgccgagcggaagcggcgccgagcaaccaacccctctcctcgtccgccgccgactccccggaccatgtccatggccgcatcctcccggctgctctg

SEQ ID NO: 361431 - DNA, 282 bp, Zea mays
ggagtttcttccgctgttctctctcgcgcaaatttttatgctgggcaaagacggtgttcttcagcttcgacccccaaaaagggcgaagctttcgcgtccttccccacacacacaaattacctgggagccgtagcttctgtttggtgcggccacggggtggaagaaatgggaagggaagggaagtgatgggggagtgcgaggacggcaaggagtacaggtgctgggaggagctgctgccggacgcgctggggctcatcttccgcaacctgccgctccaggagg

SEQ ID NO: 361432 - DNA, 277 bp, Zea mays
aggagtcgtggaccatcgacgacgtggcgttcaacgtgccggggctcggcccggacgccttcataccgccggaggaggtcaggaggagccggtcctacggcgccgccatcgcaggcggcaagtgagctctctctccgccgtgtcagtcagggctcaagcgtctgtgtaacatagtctgcaactgcatagagagagctatgctgtttggtagcttcgtcgtctttgtctgtcttccctttattttgtaacctgtgagtgagtgagtgagtgagtgaga

SEQ ID NO: 361433 - DNA, 159 bp, Zea mays
tcaattttgcattatttctccccccattgccaaattgccattgatttggtggtccgaacaggtaaaatttgatttttgactaggggcaagactgtgaggaactgaatgggtgtaaataatttgttatatacaaaaatcaatggaatataatcattatag

SEQ ID NO: 361434 - DNA, 269 bp, Zea mays
cggctcgaggcacccgttgcctccaaagtcatttcacccgaccgccgccgcgagcctccgttccagcttcgtccatggcttccctcaccggatccgctctctcctttgcgaggcccgtcaaggtatatcgccggatcacctctcgagttgcctgatctgtgagataatccgattacgggtagggttttagctctagcggcgcagggtttcggttgttgcgatttctcttctctggtttatgtctgcgtgcttatcggttcgtctactgg

SEQ ID NO: 361435 - DNA, 250 bp, Zea mays
ctcccccttttttttttttttttttttttttttttttttctagcgattccacggggaagttcttatatataaaaaaaatccaagacagctaaatagcacgagggatgcttaattcatcgcacaacaaatacagaggcactggcgagagagatattctacctatacttcctaagttctagtctcctttcggattgatttccctgcgtcatgtccagtttacttggcgctacaaacaaagggcggccgccga

SEQ ID NO: 361436 - DNA, 259 bp, Zea mays
tggacgagacgggagacgaggaggggcacaccacgcaggagaccggaggagagcgcgcgcgcggatccacctcgatgttggcaagaccatcagcaccgcctttggtgactgctcaaactcctgaagtcggcatcttcattacagctcgcaacgtctcgggtgcactggtcgccaagcttcctggtaacaaaaacaagtgtggaggaagatcgaatgtccggcagcggaacatccaacctgggaaaaggggctgtcgtcg

SEQ ID NO: 361437 - DNA, 289 bp, Zea mays
  unsure (1)..(289): unsure at all n locations
cacaaactataccagaagatacaagtgcgttggcgcctatcacgtcagcccaagctaggcaacaggtactgtctattggtacttcacctgtgttagacggaacaccacaattgcaacctggaaaggagaatgacgaatgtttgaacaacagtggccagataggcgtagagacacagaacacaatattgttctctctacttgagatggaagaattacaagacaaggaattggaggatgctcaggagcatagancaaaatgtgaatctgaagcttatcgcanagcacaaag

SEQ ID NO: 361438 - DNA, 280 bp, Zea mays
cttggtcgagtagttccctctcctctctctgattcttctgcttctcggtctagctagctagctcggtgcctcggccaaccgggcgtcgcgcgctggccggcctgccaggcaagcaacaatggcagattcaggggaggggcgtcgggtgtgcggcatgccggagaaggcgcactgcacgtggcgatgctgctgctgcagttcggctacgcgggcttccacgtggtgtcgcggctggcgctcaacatgggcatcagcaagctcgtcttccccgtctaccgca

SEQ ID NO: 361439 - DNA, 274 bp, Zea mays
ccagcagtacaagctgcagctcaactggatgtcgctcaaggacgccgtcaaagagaagctcacggtgctcgagaacgtccagtggttcgagctcctcgaggggaaggacggcagcaggtcgggcccagccatcgagctcatgggcctcggcaggctcatgaacgagaaggccaggatgctctccatggggcagaggaagcgtctgcagctcgccaggctgctcgctatcgaccgacccatctggctgctggacgagccctcagtcgcgctggac

SEQ ID NO: 361440 - DNA, 272 bp, Zea mays
ctcacacacacatggcgctgatgagccttggcgccgccgggtacaccacggccaccgcgccgcctcgtccccgaagatgtaccctgccgtttcgcgccgccgcctcccctgcggcactggaccgccggcgacggccgcataatgtggctggcgacttcttcgtcgaccaccgctgcatcgactgccagacctgccgatggatggcgccggtacgcaggcagctttctcccatcctccaccttcaatcgctcgcttggctaaccatcattcat

SEQ ID NO: 361441 - DNA, 195 bp, Zea mays
cgcagaagccaaaatccggccgcccgctcactccaatccacgttcttcattcctctccctccatagggttttgtgaactctcctgtttgggcaccaccgtcggcccatggcgaccacgaccttccccacctcgaccccattctttgcggcccatcacggcccccgccggagccgaccctccatctccgccgcggt

SEQ ID NO: 361442 - DNA, 198 bp, Zea mays
gcatgttagctgaataacagcacggtaaaacatgccaaaaatgaccctcttcgaggttttacctgtacaagaggagtgcctaaatgcaatgcttaattagaaatacgtgagatcgtgcggctggtcccgaggtgagacatacattttgctaatcgcaacaactatggattacctgcaaaagaaatatatatagggcat

SEQ ID NO: 361443 - DNA, 196 bp, Zea mays
tccggatcatacagattcaataaggactagacgaccttttactctacgtgccagggagaggatgatgccaggtgacagggaggacagtgtatttgctctgcatgagactgttgcaagcattcatccagaatgcggacattttcacatggatggtactcccccagagagattaggaagacccttttatgcagaacta

SEQ ID NO: 361444 - DNA, 182 bp, Zea mays
ccaggcgcatatatacatagtcgtcgattgtctgcactacctagctacctggcaacataaacacgcacgtgtgtacagtgtgtgtgctagtgctagctaggctcctgctagcagtgtcgtcagagtgcagctagcgcagagagagacgggtacgtagcgtaggttcctcgacgacgactggt

SEQ ID NO: 361445 - DNA, 186 bp, Zea mays
gcatagtcgatcatgaagggtggcgagaaggaagtggccggtgcggtggtggccatactgctggttctgcagctcatggcagctccaccgacggccatggccgcccgctcgccgcgcggaccgtgccggatggctccctcgccacgacgcccaaggtgacgatgctgtcggccacgctgtgctaca

SEQ ID NO: 361446 - DNA, 183 bp, Zea mays
caaaccaagttctccgaggtcttgagagctttaggacaagggcgaagtaatttgggcaacttagctggcttgggtaatcttggtggtggacaaggtcttggtggtttaggacaaggtcttggcggcctcggaaatttggctggcttaggcggtgcaaatcaaggcttaggtgctggtcaaggt

SEQ ID NO: 361447 - DNA, 284 bp, Zea mays
taaaaagatgtgcggctgcatcacgcatttctaacccacccacccagggagtaaccgtagtagtacaacatgtagtgcaaacgtctgcaccagccccagtttttttttcttttcctttcctttctactactaataaaatataataatgttgtcaccaaccaatccggctctgcgcctaactaatccttccccttcccaggcactctcaccgtcccttcgccttattcattggccagggccagtctctctcacccacttacaggagggccctaatcgcggaatcg

SEQ ID NO: 361448 - DNA, 122 bp, Zea mays
ccagtattgtgcgagatgaaggtactcagaaccacccaacacgtagtagtccccaagggggtcactgttaccgccaactccagaactgtcactgttaccggcaaacgcggtaacctgacacg

SEQ ID NO: 361449 - DNA, 256 bp, Zea mays
aacaaagtccattgttagtcacttgcacacaaaatatatagttgatttacagacaatggagtcaacaattgcagaaattgatcgtctaagagatcaacagctttacccaaaactccttgaactggtgaagggattcgcacacatgtgggatgtcatgtacgctcgtcacaaagcgcactcaagatcattacagagcttaaagcgtccgatatctcggttgctacacgggaaacaagtgagcaacaccatgagcgaa

SEQ ID NO: 361450 - DNA, 250 bp, Zea mays
ctgatttatcatctccagtgtcatcaatctcattagccatacctgcccagtctcaacacgaggtcagtttggcaattggaagagtatctgggtcactagaaatatggatatggaatgcatctagcaacaaaattgagattttcagtgcatggcatgcacatgatcaagtggtaacaggtttacaatgggctatggatggctattgtttattcagctgcagtcaggacaattctgcacgttgtgggatctc

SEQ ID NO: 361451 - DNA, 302 bp, Zea mays
cgaaaaaaaagctatgagcggcaagggtcccatttctcaattcatcctccaccattatcgccactttaacgctgccgctctagtggatgctgccaaggggtatgaagcacacctcgcaggtggaggtaaaatgttggttgctttggctggcgctatgagcacagccgaacttggaatctcgctggctgaaatgattcgtcaagataaagttcacctcatttcttgcaccggagccaatctcgaggaggatgttatgaacctcgttgcccactcgcattacaagagagtcaccaactatcgcg

SEQ ID NO: 361452 - DNA, 166 bp, Zea mays
ctcctcgacatgcacacaaacacgccatcacgattcccattctctgcactgcaattcctcacagactgaccgaatcctaaccgtggctatgacgacgaatcaactgatgcgggtgcgcacgctgggctgcggcgcatcgggcgtcgtatgtagtggctggccttcg

SEQ ID NO: 361453 - DNA, 296 bp, Zea mays
cagtattaatgtgtaatcatgcttgacttatcacttatcaggattcactatcacattttttttcttgcaaaattatttgcttgattaaggtacaaattggcttttgtttgtttctttaaaaattccctttttgtgagccatatagagcaaatgcaaggtacaattcggctctttccattgatgattagttcttatcagctagatattgttttttaactaatggaggttatagagttttttttgtctttcctatgataatgaagtgctatacaatgactcactgtggcaggtatcat

SEQ ID NO: 361454 - DNA, 235 bp, Zea mays
gacagagaagcaggtgggaagtcgacgcagttgtttgttgtggatgagttgcgtgtgttgctgctgccgcgcgtgcgtgtcccccgacggccccggaccacgactccctcctcgcgccgccgccttctccttcgtcggggaccgaatgcagcgggtcgtcgtcatgcgccacggcgatcgcctcgaccattccgagcccatgtggcccgccaacaagccgcgcccctgggatccg

SEQ ID NO: 361455 - DNA, 141 bp, Zea mays
gcagccaattcgctcgagttcagatcgagcgcgcgccaagcaagtcttccggacggccgcgaagagagcaatcaagcaagacaagatggtgaagctcgccttcggaagcgtcggcgactccttcagcgtcacctccatcaa

SEQ ID NO: 361456 - DNA, 324 bp, Zea mays
ctccccccctttttttttttttttttttttttttttttttacagtgaaatgaacgtttacttggaactgctagaaatcaactgatctatccgatcgatcgactgagatggaaactgagcgcgagtgggcactcgcgagagagtacaaacatgaacgaacgagcacggacaagctccgccaacaatcgcggaggacacctcatcgctgatgcgtttggcccgcatcaaccgcgagctgtcgagtaaatatgacttgaccaagtgcaaatcacagctcggaccgcaccaagaaccagataccgtctagcgcgtaccacgagggcgg

SEQ ID NO: 361457 - DNA, 270 bp, Zea mays
gaacaataagcattgcgggtgagggagatccgccgtcggcacctagagccgtggatgccgccagagctttaggaaggggtccaagggtatcgttagacgttgtagaagcttgactgtgaccgaacaaagcattgaatcgactgagccatcggcaattgctcatcggtggtggaggaccaccgcggggaacgtgcgacatggtgggcaacatcacctccgccgctaccgttggtagaagttgctgagcaggagctcattgaaggaagttat

SEQ ID NO: 361458 - DNA, 284 bp, Zea mays
cttgaagatgaggattcccaaacatatgaaagcgcgagtgccttgtccttggctacatttgcatcactcctgattgagtttgttgccagactacagaatgttgttaacgcatttgaagagttgagtgagaaggctaactttaaggatcctgtggtggagcctactgcagttagcacaagtaatgttaggtttctcgataaactgtgcaaatttgtaggtttctagagttgacacggatcctgtgaaggctaactctaaggatcctgttttggcatccagtttcc

SEQ ID NO: 361459 - DNA, 133 bp, Zea mays
gaggaagtagccggagagatggacgcgaaattccagcaccattgtaagagatggctgagctgagctgaactgaatctgcgacggcgcctctgcactttcatctgattccggcgaattaggagacagacacaga

SEQ ID NO: 361460 - DNA, 291 bp, Zea mays
tgaacccatcgttctgcccaatgtatccatgccaactcaagaccatcttcgccgtgacataaagttcttgcatgatgctctcctccacccacatacaatgcatccatacaaaccggaaaactgttatgagcatggcaagaggtctgccatggtccttttggactgcaagcaattcacaaagcactatgacctggaacaggagttcttgcctcaaaacccatccatgttgcacctgtggtgtcaagtagaggtgttagaccaggttggcgatccaccttgcataccaccaga

SEQ ID NO: 361461 - DNA, 297 bp, Zea mays
accttcacgtaggtagaccctcgtatatatatatcatcctcaagtcagaaaaaatgacctccaaagcaatcgtcctcatcactggcgccaatcgaggcatcggctacggcgtcgctcgcagactaattcgcgagcaccccgattaccacgttatcatcggcagccgtgatgccactcaaggccgcgaggcagcttcaaccctccgcgcggaagaagccgcgtcctcaccatcgatatccagcgtcgaactagacgttacctccgacacatccatcacagctgccaaggagaccatcg

SEQ ID NO: 361462 - DNA, 307 bp, Zea mays
tgtttccgtatgtgggatatatgagggaggaatccagcggtggaacgagcaggcctcaaccaatacttgatccacaactaatgattatccgcatgtttggttcactgctgagatggtgcagctgcatccgcggaactttaaagcacattttgtttggttgttggataagccaatacaagcgtccggcatgcagaaaggacagacgagtcaggctccgcagagacgctcgttgactgcgtacccgcgcgtgcaagcacgcctcatacagcctcatgttcatgcacgcaaaaccaaaaacatttttggt

SEQ ID NO: 361463 - DNA, 292 bp, Zea mays
aaattctggaatcgtatgactcaacataacaaggaatatgaagaaggaaaacatagttatactcttggaatcaatcaattcgctgatcgtaccgaagaagagatcaagcgtggtcgcattgttaaagattttagcaatagagccacaactgacaaaactgcttaaattggttcaaactcaattagcttaagttcaatttgtgagtttaattgttaattttctaattcaattgtaaactgcacttttttgtgcaattaaaacgtttaaatgttaataaaaattcattagaatt

SEQ ID NO: 361464 - DNA, 281 bp, Zea mays
tgcagatgggcatgccagtgactgccctgagggagaagacaggggcgccgtcctgcgggtcgtcccctgcgagttcctcggcagcggccgtgagctcgacgccatggaggtagaagatgcggcggcagacacggttgtggccgcggttgtacggctcattgcagttgaagcagaggccgaggcggcgccgttccgcctgttcctccggtgacagccgcttcaagggcggaccctctggtcgcggctggggcgcgcccacgggtggtgcagggagggcgagc

SEQ ID NO: 361465 - DNA, 272 bp, Zea mays
ggtgaacctgtgctggaggatctggcacgtcgcgaggaagaagaagcaggtgcaacgggagtacgcgcggcagtaggcgcacggcgcctggagcaggagctgggcagccgggaggccgccgaggagctctccgatggcgagaaggacggcgcccccgacgccgcccagcagcctgtgtcggtggcggcgcccgacggccggatcgccaggatcgggtccgaggcccggatcgtgtcggacgacgagggcggggacggcagctacgtcgacac

SEQ ID NO: 361466 - DNA, 180 bp, Zea mays
  unsure (1)..(180): unsure at all n locations
cgcgctcttccnnncacacncgcgaatcacgcccgcacgcgtcgcgccgccgngatgcccgccgcccgcgcaatccacagccgcctccgcatccgccgcgagttccccctgcgctcgcttgcccccgctcgcctgtgcctcccacgcccacacacccagccaccgccggccacgcgcgcg

SEQ ID NO: 361467 - DNA, 252 bp, Zea mays
ttctgccccaagccgcgacgccccacgacgccgctgcggtgccaccagagcggtggcttctgcgacgctgagcgcgcgttccagggcgacgagagcggcctgtcgtcggcgtccccgcagccgccgctgttctgcggctcaccgccacggcgagcgtcaaacccggtggtccacgacagtaggttcggcgcggactgcccgcccgtgcccgtacaggggctgtccgtgcaccggcccagcccgcggtcgtcg

SEQ ID NO: 361468 - DNA, 261 bp, Zea mays
atcgagtgtgtgcggcggcggcggcgggaggagacgaaagagcacgatgcaggcggtggcacgggcgcgtgggcttgcggctgcggctgtggctgcgcggccgtcggcgatggaggcagggcaccgcgggcaggtgcagcaagcccggggcattgtggtgcaagtgagggacgggaacctggagcgggcgctggcggtcatggagcgcaagatgaggtccagcggcatggagcgccttatccgagcgcgcacccactacca

SEQ ID NO: 361469 - DNA, 311 bp, Zea mays
  unsure (1)..(311): unsure at all n locations
ccganggagcggaggaagatctcgggctctcagagctgcatcctgaacccatcgcgtaggaaggggcaaaggagtcggagctgatccggcagtcgctctctctcgttggcgctgtgtagacttgcgattcgcgattcttctctgagtaattgggctgccacctgcgcttggtcccaattcacagtaaaatctacgcattgcgtggccacgttggctaggaatttggaagcaagtactctccgctttcagtaatcccaacggattgagtacgatttgacgcatttgcggccgagctttcttgcacccaagat

SEQ ID NO: 361470 - DNA, 104 bp, Zea mays
aaactcatttcccgtctccacttgttcctcctctgtgctctcgcctttccattcctccaccggcctcatcccccaactccgtcgagcattaccgtcagagggcg

SEQ ID NO: 361471 - DNA, 264 bp, Zea mays
gacccagaggtggttacgccttatatactgggacggagggagtacttgttaaattttaacaaatgtccagagacttcagcaaagcaataacatttgtacttacctgtatatcatatatacatgtggcctatgaatacttttttcagctttgcttactccgttttaattggcaggggttatttggctcctgagtatgctattcgaggacaggtgacacgcaaatcagatgcgtacagctttggcgtgctgctcctggaaattgtt

SEQ ID NO: 361472 - DNA, 276 bp, Zea mays
tcgaattcaagtacagacggttcacgaggacaccatgtctgggaaggacctctgccggggtcacggcgaccaacccgggtttttcctggagaagacgatatagagatgaaatcgacattgtatttggctccgaacgaatcgaatggtttcgggtttcgtacgtcactcgacgcagcactttcgccccagttttttgaccgaacgggtcaaattagtatgccagtccctattgagaaggttgacagcgaactcgatggtattaccttgaaatccaca

SEQ ID NO: 361473 - DNA, 269 bp, Zea mays
gattttggttgggcatgtagtaagtagcatccaagaaatatggtttagttggaatatcttaatgcctcatgattagctctaaacctgccacaaattacttgacattcttctctacaggctttaccgaagggagctactgctatagttccacttgttatatttgatgatgcaattggtgatcatttatctactcttgatcagttttgataattcgtttttggatctggaacgaactagaggtatgcctgaaatgcattagcttgtagtca

SEQ ID NO: 361474 - DNA, 273 bp, Zea mays
cgcaacaaaggattgaagaactccaagtaattgaaaggacacaccatgaatttctcagcatgaaaactaggatggtagctagcattggggagttattgtcaaaaatggaggcactgaaacaaaaccgaagcacatgaactgaggttactattgcagaaatcgaagttgctcaacttgtttaaggaagcctgcacatattgttcttacaggaatgcgcaaagcatcgacatgtgaggggtaaccgaatgtctcactggggatgagccaccccag

SEQ ID NO: 361475 - DNA, 258 bp, Zea mays
tggcaaaccgccggcgccctagctagccaggtctttgtcccttcgccaggccttcatcggggactagcacactgcacacgcacccactagatgtctgcgccgaacggtccagcggcttgtccgatggtgtaccctgtctaccttaccggggcattcccccagcaagcaggggatgaccaggctcaaggtccggggatatatgccatacaacagaaccagttagcggctgcgatgggaatggggtgctatgctccaacc

SEQ ID NO: 361476 - DNA, 248 bp, Zea mays
gcaacacacatgttcaagatccggcgaatcttatcaagtggttaccagcagatgtattttgatggtcgagatcctgtgccttacgtgctagctcgaacgtggagactttgcgcggacgcgcgagaatggtacgccaatgcaccggcaacaacgtcaaattcgtttggtctcttgtaccgacttgagctattgtattgtacaattgtatttttgtcgccctcaatcggcgatcccgagatctgtgactt

SEQ ID NO: 361477 - DNA, 303 bp, Zea mays
  unsure (1)..(303): unsure at all n locations
gcagcatggccggcatcgcgtcccgccacgtcatcctcgtggagcacctggcggcgacatcgcagctgggcgcgacgcagaaggccgcgccatggtaggtgtcgtctncgtgctctgtcgcgtgtgctgctgacgctgcgtcgtcgacggacgtgtacaatgcgcataaggactatcattgcagcgtgtcccgtcatcggcttcactacacgctctaggacactcagaccaactctcagctgaaggacagcgacaacgggctgaccagcatggcgcccaccaacgccgccttcgacaagatga

SEQ ID NO: 361478 - DNA, 294 bp, Zea mays
  unsure (1)..(294): unsure at all n locations
cggctcgagcagaaactagaagttagtcacagcatggcattaaattgtcatagtaaacaacagcacagtgagcaactatgcaatttaatgccatgctgtgactaacttctagtttctggcattaaattactgtttggctactaggaagaccgaggtagagaagcaaatataagaataccctccaatgcacacacaaatgacagagtaaatgaaggtagggttcaccttcttgaacatgaccgtatactggttgttaacacaagttccttctggganaatcaagagagggttttt

SEQ ID NO: 361479 - DNA, 291 bp, Zea mays
tgtctcccggtgcggtacatcagaaaccgataatgcagttatagcctgcacaccaggtggatttggagaaccttcggtccgttcttatgttaacggctgatctcgcttctggtcttttggttgtttgtcctccttaaacttcagatgcatgaagggtccttgctggttatggagagatcatttgaagggtggaggtttgctattatggttcattcgccgtttctcattcctattcatcatattgtcggaagattagcaccgaacttactctaagcttcgttggaaatgctg

SEQ ID NO: 361480 - DNA, 302 bp, Zea mays
acggagagatggagcggctgatgcgtgacaagagcatcctgctggcggaggtggtgaagctgcggcaggagcagcagagcacgcgggcgggcatgcgggccatggaggagcggctgcggcaccggagcacaagcaggtgcagatgatggggttcctggcgcgggcggtgcagagcccagacttgttccagctgctggcacagcagcaagcccggctgatggagctggagggcgcggcgctgctctccgccgcctcccggaagcggaggcggcccatcggcgccgcgccggccaacggcggct

SEQ ID NO: 361481 - DNA, 292 bp, Zea mays
cggctcgaggcgacgtgcctctagcttgttccgtcgtcgtcgtcgaagaagagcgctctccccctctgcctcgacgaccaccagctcccttccggccgccgctgtcgatcggcaggtggtggacgacgatcgagaggatgagaggagataggagtaaggccacacggccgctggcgccgccaccaccggcgatcggcgagagggacatggtggaggaccctagactgctgaagcaggtgagggagcttcggaggctggtgccagcgtgccgtgagccatgcgggctcggcga

SEQ ID NO: 361482 - DNA, 298 bp, Zea mays
aggcaccaaagctcttgcatcatctgcacacacatttaccgagagtgagtcagtcaagcgagcgcgtgctgcttacgaggctgcttcgagtacggcaacgtctactacatcaacagcgttgaaatccaccggaagagttatcggacaaggagcagcttggacgtgggaaactccggtagtcaagggactgcgtaaaggtgtttctgcaactggaaagggcattgaaaaagtcacacgaccagtcagggagactgaagcttataagagtgttaaggaagctatcgatgatggcagtagc

SEQ ID NO: 361483 - DNA, 237 bp, Zea mays
cggctcgagcaccgagtcgctcaaacactacgttccctttaagaccaagtcgtgatgactgactgagcttcaattctccggtccctgtacaatgcaatggcctaccaccttgcagtggtcgctaagggctatatagtccacatgagaaactgatgtacatagacaatcctgaccttcaaaaacagatttggtgtgtgattgtttagcaccgttatatctgactatgaagactaggat

SEQ ID NO: 361484 - DNA, 268 bp, Zea mays
gttaatttccatgaagaaatgtatgttcatgtgtacctctgtaatctagaaatgtttatgtgtatctctgcaatttcgttggggtcggtcgtctcatcagtgcctgtatgtgtgtgtgtcaacaacttaacacatgttctcaacttctgatgaacaacatgcaggacaaagtcagttgatgacacacacacatacaggcactgatgagacgaccgactttgtcctgcatgttgttcatcagaagttgagaacatgtgttaagttgttc

SEQ ID NO: 361485 - DNA, 248 bp, Zea mays
aaaaagatctcattgtggcataagaagggtcaaaatgtaggacaactaccaacatcaactgtcgaccgtggtgatgacatagaggagtgcatttattctatcagctttagcaacaaaggttctcgatatctctgttcctgtggaagtggccatattgttaggatatgggatttgcagcgtaagagatgtatcaaatggctaagcggtcacactgacacaattactggcgtaatgtataactgcaaaga

SEQ ID NO: 361486 - DNA, 183 bp, Zea mays
  unsure (1)..(183): unsure at all n locations
cagagggccgtcgtcggaggtcgcgaccaagcacctcgcggagaccatggccgtcacgtccacgcgggatcccgggctcaagcgcggcgtactcacngcgctctcccggagcatccctgaccagggactacagctaacaacacacgaacacgacgactaatcgatacagacattttcacttca

SEQ ID NO: 361487 - DNA, 288 bp, Zea mays
tctcgagcggctcgagttttggggctttacctcagtactggaggatgtggaacatggtaatctttttgttacttctatattcagattctatacccttttatttagttgagactttgttacttaactaaggacagttgtgatggtagtggtactcttctatttagttaagacttccttaacttctgtcactgagcttgagatatttgtctaataatatctttcaaataactgacaattagtctattttttgtcagcctgttcataagtggatcatcagacacatatatt

SEQ ID NO: 361488 - DNA, 290 bp, Zea mays
ggcgaactggaggcagcaagagattcagagaagaagatgctgctgtcattgcaggctcaaacaaagcagcttgagcagaccaaagtatccctggaagaggccaagattgagatagcttcgctacgagacagtaggcagccgttcaagaatttcaggagaaggggtttgatgtcattctcctttgacgaccctggcgaagcggagacatggtcgctacagcgtgagctcaggttagctgtggaatccgaggagaagtgcaacaaggccatggatgacttggccattgcctt

SEQ ID NO: 361489 - DNA, 119 bp, Zea mays
tgttgacgcgttcattttagatttttatgaggcttgagcttgcgctgacatttttacgatgctcttggttttccttcgctgtgctcatcgcatagcaagtgatgatgtttgagattgtt

SEQ ID NO: 361490 - DNA, 283 bp, Zea mays
cagatccttgcatcgagtttgctttcaagacccttacaggcgacattcctgttctcgacgacacaacggctgtcacagactacttcccagagcaacaagacttgaataaagacccagcgccaaactgtgcaggctctgtgtttgacagttcaagaaaccacacacaagtcgacgtcaaccttccaccgcctgctccggatggtttctacgatggcagctggttccctccccaatgaatttgagtgcagggaggggaaaaatgcaataacattttgtacctgtg

SEQ ID NO: 361491 - DNA, 286 bp, Zea mays
agaaaccacagaagattatggaggggaattctttacaccaaccggagattgaatcgatgcaactagagcaaaatgatgagacgactgaagaagagaggaaacatttcaaccaagagagaaaaattatcactttgccaaccagtgaacaaacaacaattgcagaacccgcttctactgcgcgatatgatgcgtatgctgaaatatgtgagctgaaaaagaaggtcgtgtcattagaggaacataacaaagaacaagcggcagaaatagctactcttcgtcaagatgt

SEQ ID NO: 361492 - DNA, 327 bp, Zea mays
ataaatctggtctatataatatgcgtcgtcacttccattggaaggatgcgaatggcaaaatgctaaaaggaggcgactatttcacctattcatttgaaaatggcgtgcatctgcttgaatcaggacaaagtctactgtccgtttatgcttggtcattaggagtacgtgaagtgattgcaaatcaattgcgcaatccaaaactatggttttcactgaagaacgcatatgacgccactcgtcgattggagtacagtcgagatggaccatgtgccgaaattttgtttgttcctacagaaagaggtgctttcgatcgatatacagcgtgca

SEQ ID NO: 361493 - DNA, 294 bp, Zea mays
  unsure (1)..(294): unsure at all n locations
cacagcacaacagcaatccaatccaatctcacttacaatcttctgctttttacgcaaaagcagaatcagctatcaaatcagatcttctcgatcaaccacataacaacaactcaacatgacagaacctctttccaaggtcgattcagccgtccagggcctctcaagctcacctcccgccaaggatgacaagaagacgcggcgacaaagctcagcagcagcacctggcgtttacaacatcaatgaccttgaagccgaaggcactgaactcgagctcngcaccgagactcagaagac

SEQ ID NO: 361494 - DNA, 210 bp, Zea mays
  unsure (1)..(210): unsure at all n locations
cactactccacactcgagatccatctcgcagcacacgagcgggatggcttctaccagcaccaccttcctcgccgtcttgctggtactggccgcgntcgggcgctcgtgacgtccggctcactgcgctacatccacgctctgctgagcgtgaagcaggcgctggttaacgcggcgtcgctgtctacgttgactccggcttcgcccaactgc

SEQ ID NO: 361495 - DNA, 289 bp, Zea mays
tgcccgttttgacgaattagctctttagtgtctctgtattgaccttgtgaccttgtgtgtttgggtgcccttctctttgtctgtaaatcaacagttaactacttcaaaatgaccaaaagggttgaactttctttagaagccactttgaaaggccataccggatgggtaactcaagttgccggtttccaagataaaattatttcttcatcacgtgataattccattattatttgggatttgaaaaataaagacaatatttatcctcttcgtcgtttgaccggccactcac

SEQ ID NO: 361496 - DNA, 100 bp, Zea mays
tcagatgcagcggtacaagcactaccacgaccggttcaagatccacggcgactcgtcgtacggcgtggagaagcagaagcttggtgcggccatcgaggag

SEQ ID NO: 361497 - DNA, 114 bp, Zea mays
tgtcggcgcacacgcggcgctcaacttcgggcagtacccgctgggcgggtacgtcacgaaccgcccgccgctgatgcgccggctgctaccggacccggagcgcgacgccgccga

SEQ ID NO: 361498 - DNA, 344 bp, Zea mays
ccatccgccgcgcccttccccgccgctgatccggtgggcccgggcccaggccccggccgtgatctgcccaccgccccgtccgtctacacggcgggcggggactggggcgccctgtcgtggatggagcctcccgcgagctacatggcccccgccgccacgccgccgggttataaaggcgaggccactccctatgacatatactcaaggaaccacttcagtaacttatttggtctacattctctgagatcagagagctcgaatttgacaagtgagaagcatccaggaaactggcaagacagttcagagaccctcactaaagattttggaccatcagtgtttcatca

SEQ ID NO: 361499 - DNA, 340 bp, Zea mays
cggagcttggcgttccgctgttcgcagccgcgaaggagagcttgaagacaccgccgcacccgtatttggtctgtggtgccgttcggctcccctgctatgggcagagcgcatcatttgcgagtgaggaacctggacagggcgactccgggggcggtgaaccggtgagtctcagtgaattgctcgccggcgacacatcgccaccgcgggtatgcgctacaaagtggatagggcctcgcaccgcgtgattcacggtaaggactccttcccccgactcgcgttcatctctatttcgtgtagcctcgtccgaatctgggttttggggcacagtgccattggcggc

SEQ ID NO: 361500 - DNA, 334 bp, Zea mays
cgggtggctaaggattggaaggagatgattgacagtccagagagttgctatgttcttggcagcctagcctcgtggggcctcctttactttcttatctcctataacattgtaactgagtttgacatgaaggagatcttccgtctctttggtaacatccctttcaaacagaagaagaaatctgccatgctcttaaaaggtcttgggctcagcaatagaatcccagagttaatggactatttgatcggaaacggacaacaaatggatgttttatgtttggcacgtgttcttaacatggtggacaagtatcctccactttctcttctgaagggatatg

SEQ ID NO: 361501 - DNA, 268 bp, Zea mays
ccggagcagccgcagtcccaccgaccccgccgccggtcgccctccatctcctcgccgctgcctctcgtttctcttgtcaataatcaagatgagccgtggtagtagtgccggtggtagatcaagttctctgggtaatctctttggaagcggtgagccccccacagcagcagtggcaccagctgcaagtgctcgactgtgttgagcaaccatctgctgtggagactgataggacaacaaagttcatcgagagggtaccagccgtaccaat

SEQ ID NO: 361502 - DNA, 328 bp, Zea mays
  unsure (1)..(328): unsure at all n locations
tttactttctcttcagagaaaaataattctgtctcatcccttttgcataaggatttttagaaaattatatttatttaatttttctaatctttgagatctagtatttttataaaatagttgaatttaataatactaaagttagaagcttaggatcaaagcaatatatagatctaaatatttcttttcttaaggaaaataagtttttgaattattaatttaataatatttttagaagtgatttttaagtttaattactttaaataaaatataaaaagctttttaaatgatcttatttataaataattataattanagaattagtagatat

SEQ ID NO: 361503 - DNA, 326 bp, Zea mays
  unsure (1)..(326): unsure at all n locations
atcgcctcctatccttcgcccgccaacctcggcgggtcatggcgtgtttcgcgcggtggctgtggcaggaggaggagcagcagcagcgcgccatggacccgtgcccgttcgtgcgggtgctggtgggcaacctcgcgctcagaatgccggtggcgccgcccgcctccggggccggcgcgggcgtccacccgtccacgtcggcgtgctactgcacgattcggctcgggaagatgccggttcagagcgtcncggcgccgctcgtggtcactgacggcggcgagcagacgccggcgtccggggcactcgccgccgcgttccacctgtcg

SEQ ID NO: 361504 - DNA, 321 bp, Zea mays
gcgctgcattctctccctccccacttctctctcgtggcgacagcgacgagccgacgactgtgcggccgtcgctgccactctactcgccagttgcccgggtcttcttcgtccccttggaaatcgacggccacaaccagggcaaacaggaagtttcgcaaggatgccctggtgcacgattgatgagtctgaccctggtgttttcaccgagctgattcagcaaatgcaagtggaaggtgtacagaccagtatatgggctaatttttctctccaagtggatatctggggagaaggatgaacggcatgttgtcagagatcctaatc

SEQ ID NO: 361505 - DNA, 315 bp, Zea mays
cggagttcaagacggacgaggagttccagcgccacctgaaccggtccagggccacgggcgctctggtggtggtggacttctaccggccctcctgcggcagctgcaagtacatcgagaaggccttcacgcgcctctgcaaggggtccggcgacgacggcgctcccgtcgtattcctcaagcacaacgtgatcgacgagtacgacgagcagtcggaggtggcggaccggctgcgcatcaagatcgtgccgctcttccatttctacgtggacggggtgctggtggagtcgttcccaacgagggacaaggagaggatca

SEQ ID NO: 361506 - DNA, 287 bp, Zea mays
  unsure (1)..(287): unsure at all n locations
ccacccnccgnccacccagccgcactcactcacgagaccgtccaccgccacgcgctctcttgcccgtccccccgtcctccccttccccctccacctccgccgcgcccgcggtaacctcgccacgccacctcgcgtgcgagcaacaaccgtcgccggcactctacttcagctgctcgcgcggcgcgatccggcgtccaccgctgccctgacggacgacgcggaggaaggggcgcggcgggtggagcaccggggatgctagaggcgaacgnccgtcgncgggctcctcg

SEQ ID NO: 361507 - DNA, 314 bp, Zea mays
gaagaatgcgacacgcgcacacggggcgagcagcaggcgccgagctgcgcgacaaggcgaaatccgggctggagctcgcgacaacagcgagctggggcgagcagaagtccgggcgccatgggacgaagaaaaagcagccgggcacactacagcttggaatcgatcctagaaacggcgactggcacggatgggtggagttcgcggacaaggacgttgcagcaggcagagaggcaccgcggccaccatggggaacgagccggagctgcacgcgcacgcgaaaatcgctcggcagagaggacggacagggagctgtg

SEQ ID NO: 361508 - DNA, 204 bp, Zea mays
tgtgggccgtgcccacgaccgcgcgaccgccgccgccctacgccaggtgccctggtcggtcccttcgagccaggtcgtcgtcgtcccttcgcagccgacgagcgcccgtcagcctggaggaccactcgatgtaatcgaagacaccgggggttcacagctgtttttttttgtgtgaatttacgttcctgaaaggttcgctttcgt

SEQ ID NO: 361509 - DNA, 321 bp, Zea mays
aagctataaagatgcatcgtaaactaacagtttctcaatatggacttctggcttctgtattcctgtgggctggtgcactgcggaaggcaccgccgctcaggccttgtttctagtctggttatccactcaggccttctattctgacttgtactttgaaagttgaatagagttacctgtgttgtagcatggagatggtatgtgaaagatttgcgatttttgatatccacgtaccaaatagatttatgacacagactgttagtactgtctaactacaccttggaacgaggggcatattcaggccctgtttgggaacatagtttt

SEQ ID NO: 361510 - DNA, 320 bp, Zea mays
cggctcgagggcggagttttgggttgagagcggcagaatagataatcggacttccggctggataagtgatccttttttttgaatcgccagacgcggagagcaggagggattatagctagcaacaggtgaaatggcaattggacagggcgacgagaagaagggctcccttgccaggagcttgagctgctcaaactgcgggaacggcgcaataatttttgggcggaagagagtcgccgtctcgccgactccgggctcccggagcccgcactcgccgacgcgcaccctgcgcaacagcgcacggctcggttccacatggagga

SEQ ID NO: 361511 - DNA, 298 bp, Zea mays
attctttttcgatggtttgctgggaacgtgtaatcatcatgacagttttctgtctagatgcgcttttcagatttagaaaggggcatatgcttgaaggtgaacaggtgtattgaattatccatccagttgctgtccaatattagctcctgagaattgaattgctaattttgtctgacccattgttggtccaatatggggacctagtttcatatgagttaaattgtggctgaagaacttgttgtaaccacattatagtttactttccattccttttgactacttgctacaattcaagaga

SEQ ID NO: 361512 - DNA, 296 bp, Zea mays
  unsure (1)..(296): unsure at all n locations
cctaagagaaatttcgcttgtaattcaaaatccggtcaatcatggaacaggagaaaagaagacaaaaagagaaagaagaagaaaaaaaaaaaacttttattagtttttaaataacctaaaagaggaagaaagatatattccagaaacatatttttttaatttcaaagagaatggtatttcacgaagaacaacatatcgtttcatcttcttctgatgaggaaggtttacactctttcncccgttggttatcttccaacagtgcccaagaagactttttggcaaaaatctattgcaat

SEQ ID NO: 361513 - DNA, 210 bp, Zea mays
acggaacaactgactagaactagtacgtagaaatccaacactcgggacgaaattaaaagagacgagacgacgcatcatccggcatggcggcgcaggagggcggcatgaggctggtgtcgcacccgatcgcggcgcacgacgggcggctgccgcggcagtacacggcggaggggcagggcgccaagaaggacatgtcgccgccgctggaat

SEQ ID NO: 361514 - DNA, 280 bp, Zea mays
tagataacgaacagagagtagaatcaactaaagaagatggcaagatgagagcagagacccctcagaaagacgacgatctgctaagggtccaattaaccacggaccatttgaatggacaccatgaacagatgcaagaacataaaactggattgataagcacaatggcacccagtccaagtaccttcggcaacacttattagtgtatttgtgacctgatcacggtgccagttggtgcagcattgaggctggcctaaagttttgagatatcccccccttccct

SEQ ID NO: 361515 - DNA, 305 bp, Zea mays
  unsure (1)..(305): unsure at all n locations
atctgcaacaatttcacaagacnttaccaacaaattctcttgtaaagatttcatagcctgttgcgcctcaggtgagaagtacgtgtgcagtacagtctcaaaatactcaagagaatttgttggaaaaggcctgtgaaagtgttgcagaagccatggaaaatcctggacaccaacgtcgaccaacccgtggcagtgaagatacagcatcggatgacagacagccatcagtatcacctgatgatttgcttgtgattgctcagcagtgcagtagtgatcttctgcaaggggagttggagaggactcga

SEQ ID NO: 361516 - DNA, 304 bp, Zea mays
cggctcgaggaaaaagacagaatcgagacccgtggtttgtcaaagcatgcaaagacttacaaggaggacgatgataagatgcgaactacagctgcaaatgttgctgcacgagttgcagcggggggagatgacatgctgtcaaagtggcaattactagctgaacggaataagcagagaagtgagggaggtgatggttcttctggctctgtaccaggtaacatgttgcaacacaggccatcactgaaatctgggaaagacttaagggaagaacatgaagttgaaaagagaggatactccacaatgc

SEQ ID NO: 361517 - DNA, 205 bp, Zea mays
gtacccaattaagtacatacacttacacacacacacttgcacacacctgcactgctccatcattttgcacccgctaatcaaaaatacgtttttgtattgtgtagtttgttttaattagttcaattcaaatgattgtaacaaagcgattgttttggtcatttgcttaattgagcttttgtttattttgcaaataaaatgcgtcttt

SEQ ID NO: 361518 - DNA, 298 bp, Zea mays
cagcaatcagaaacgctgaaaaacggtactcttgctgtcctgcaccagtgctgtccacagatgggtgtcgataccgtgtaccaattttcctcggatgcctcggatgaagtgagagccagtagatatgaaatccgtgtctacgcatgacatcttgacacataaaaatgctccttccagtcaaccggcatacgttatacgagtttcagtgtcgtgtgtaaataagagaaagaaaaggcattttaaaaacaaaagccatagcaaaagcaaaaaaaggaggagaagaagaaaatactcgatg

SEQ ID NO: 361519 - DNA, 279 bp, Zea mays
cttcgtgatgtgcgtttggagccatcaaaagaaaacattgatgtgctcaaggaactcgcaagcaatttagaaaaaatgggacgatatgagtatgcagtaaagttttacctgctaattgaaaatgttgctactcaaaatgatggtggtttatgctttgatcacaaagaaatgggtagttggtatgtcaaagctgctcagtgctacatgatcttaggggacaaaaaaaatgctattccttatttttataaagcgttacaaagcatgaaggacaatattggt

SEQ ID NO: 361520 - DNA, 281 bp, Zea mays
ctcaagcgtgtttagttgacttgtagacagtacaccgttcatgccatttttcctgttacaattcctggcgatggttcagctgagcctggtcgagctgtgcagttagccggtcggttagggtgtttatgcagaacacttaatactacttgaatagcaagcaaccggggacctgtttattccttcgtctgttacattgaaagtctggtccctggtgaggcggttcgaccagccacagctcttcaagcccttcgtgagccggtgtgagatgaaggggaacatcg

SEQ ID NO: 361521 - DNA, 282 bp, Zea mays
ctgtttcccaattgccgttcctgcgtcggcttgtgtcgcttcggcggctgccactgttcgccttccctatcttttcgctctctggttcggtttttttttcccggaaatttgtgaatctagttttttttttttggttttcaggaagtggattactatctccaatcccatgcagataggcttcattgcaagatctccgattagttaagggcaacgcgaagaagggggtctcttgccagttgccaccagcttgagcttctcaaactgcaggagcagcacaaggat

SEQ ID NO: 361522 - DNA, 279 bp, Zea mays
catctccgacgagctgtacgaggcggcgaacatgggctgcggcggcgacttctacgtggcgccggaccccaccaacgcgcggtgcgccagcgcgatgatggccatcaacatggtgaccttcgccgtgaaccccgtgcacatcctggagcccttctgcggcgcggccgtgcgggccggcggcggcagcatcttccagggctacggcggcggcgcgaggcggtcgatgctggtgcgtgacgacgtccgccacccgggcttcttcgccaagcagcggctggg

SEQ ID NO: 361523 - DNA, 273 bp, Zea mays
gcaggggcaggggcaggggcggcgcagaaagagagccacacaccccacacctatacgctacgcgcgtgctgggcgagtgatggacctcgccctcctggagaaggccctgctggggctgttcgctgcggcggtgctggccatcgccgtggcgaagctgacgggcaggcggtaccgcctgccaccgggcccccgtggcgcccccgtggtggggaactggctgcaggtgggggacgacctgaaccaccgcaacctgatggcgctggcgaggcggtt

SEQ ID NO: 361524 - DNA, 273 bp, Zea mays
ttctagatcgcgagcggccgccctttttttttttttttatctccaggagcttacccatcctcatacatattcaaactccactctaatgcagaacagtgtttttggataatctatacgtagacacagatggcctaacacaggcaggacagattttcatcacatgcggagtacagaaaacaataggacatctttggggttcgatacccacatacgaaaacaacaggacatcaattatcttgggtgcataccttggtttctcatcataattcaaaa

SEQ ID NO: 361525 - DNA, 278 bp, Zea mays
gcagctactactccctcatgctgctcctgctgctggcggccacggccgtagcagaagaagcagccgccgaggcgtccggaggcggcggcaacgcgaccgagacgtcgccgacggcgtacgagatgctggagcggtacggctatcccgcggggcatcctgccggcgggcgtgacagggtacgagctcggcgcggacggcgccttcgaggtgtacttcccgcgggcctgcgagttcctgctggcgaggacgtggctggtccgctacgaggcgcgcgtgtc

SEQ ID NO: 361526 - DNA, 276 bp, Zea mays
gaacaacataaactatgtgtggcctaaaaagtgaggtactgtagggctacagtggtctagtcggagtagagcgcgggagtaggttgcgacgtaggctgatacgctacgcatgtaggagtgctcaggcggcgttgtccagtattctctacctgtcacccttcgcctcggtaccgcgcgagctacggtgggagtcatgatgacagtagcccacacgtagcagagagtcaatggtcctgcctcggtaacgcgcaagttactgtgcggcctgcatactgc

SEQ ID NO: 361527 - DNA, 270 bp, Zea mays
gacagtgtttaaaaaaatcctctcgtctatctcacactaaaatacatatctaaggtccagctcgagctatggtcattgtcacatggactacaatgctgctttgtattggtgggatagaggttcagttgttttgtcggccttcgtgagaaggtcgttttcttcttagatgcctgagagctgtcttacttctcgtaggtcgagttttttttaactagtgtgatttgtgccataccttaacatggacctagatgtgcatgttaggaatttagg

SEQ ID NO: 361528 - DNA, 276 bp, Zea mays
tgctatttcccaggccgccattcccactagggttttcggattattaggtttctagaacctttcttcgccgcctccccagaccccatgcacgcgccgccgctggtcgcgttcgcagggggcgcctgccccgctaccgctgcctcctcgctgtcgccctggttggcctcgctgcggcccgccatccttgctgcgccggcgaggttcctatggttccgccgcggggcactccggctggaagctaaggccacgtggacggctaccggacggggacggggc

SEQ ID NO: 361529 - DNA, 283 bp, Zea mays
tagcgatcctcctcgctctccttccccttcctctccactcctccagtgctgagccgtgctgccgcggccccggcacgccatggcatccacggcgtactcgcggtcgtcgtccaacaagctgccgggcggcgagcggcggctgcccccgcgcctcatgcggggcctcacgtccaaattcgaacccaagaagctgggcgtcggcctcgtcgccggctgctgcctcgcgctcctcacctacgtctccctcgccaagctcttcgcggtctactccactgtattcgcc

SEQ ID NO: 361530 - DNA, 284 bp, Zea mays
tggtggttaatgatggagatagtatttcttacaaaagttctagccaaggtagtggtgctaatcctgtatatgatgttctcactaagttgctagacaaggcaagaccagggcataagtcaaagaaaacaagaataagtttagtttcacgagatgttggcctaaagatgttgtcagatcattctgaaatcaaagtggttaagtctctatcagttgaagagagtgaatacaaaagaactgatgatgcatctgccactacagctaattccaatgatgatattactgaa

SEQ ID NO: 361531 - DNA, 286 bp, Zea mays
cgcgagttgaagaatctgaccggcttccgatatcctaagcctttcgccgatgctaagtcgtccgctatctcgacgcaatctcaggttgcttattttggaacaaatttgagtccggttcaaatatggaagctttccgttcaaggaaaattttatattcccaattttattcgcgctaccacgagcacgaatgatctgtggaagatccctggtaacgtactcgtcgagattcacggttggaacaactttgctaccctgttgtcttccgagctgtgcctcttttcctgct

SEQ ID NO: 361532 - DNA, 222 bp, Zea mays
tcgccgccgcgtcacgaggatggctgctcctaccgatgaggctgccggctcagggacgccgggatctaccgattcgttcctcgccgactggagggaacggatcattctgccggccgtcgcggctggtgtgcttggagccgcgttcgggctgctgtcgcggcaccgggcgcgccttggcgccgcccgcgccgctgtcacctacgccgcgaacctcgtcatcgt

SEQ ID NO: 361533 - DNA, 293 bp, Zea mays
  unsure (1)..(293): unsure at all n locations
ctctcgaaggccttggcacctcgtaacagggagttatacttggacttgaagaataatggctggtaataatggtgggaatatccccaaatttggtgagtggaagaccactgacggaggctccccttataccatgtacttcgacaatgccaggaaacgaaggaacaacagtggcataacagttgcccctgaggcatctccagttcgcacgaacactgtcccaggtggcaaggacggtgtcaagccactgaaccaacaggacggtgccaaccgctcacgaaaccaagccanagctg

SEQ ID NO: 361534 - DNA, 280 bp, Zea mays
gattggtggcatgggcggtctgcagtctctgatgaaacagatgggatcgaaggagatgagcggaatgtttggaggcatgggtggcgagcggtaattttacgtcctgtttttggtggatcgtcgctgtgaacttgtgatgctaaattgagagggtttagtgctgcggtctgatcatcgtcagaggtttccatgaagatcagcctgcgccatgttatggaacaggcttagggggtgtttgtttgggattataatccacctagattatataatccaacaattt

SEQ ID NO: 361535 - DNA, 276 bp, Zea mays
gctttggctcaagtctacgacatcttaaaccattttgtttgcagtcatgcacggagaagtacagaggaattgcacccaacaagcccttgatatccaaggaccacgagcgtgcctactatgattctacagactgggtcgatctctctatgattaacaaacacaataaaaaaactatatgtactaatcgatttataatgcttgtatatactaatcgattttataatgtagctgctaggaaaaattcaagactgaaagacaggacacaacaatttttgc

SEQ ID NO: 361536 - DNA, 257 bp, Zea mays
tgcacccacacccacacccactccctccgttcctcctccatcctcctgcccccaagtacggccgctgccgccgctcaccggatccaagaagaacagccgaggggttcggtctccctccctcgtggtgcaggttcagctcatctttgaacactgtagccattattccagctagctcgcgatgtttctgctcttgcttgctcgggggatctcttctcgctctctcgagttcttgctcggttcctcctgcggccatggcg

SEQ ID NO: 361537 - DNA, 275 bp, Zea mays
tcgagctgcgactagggccgggccttgggcctgtttgtcatgggagtatgggacaaagtaggggatatttttaaccttagcctgaaatttactcccgtgaggagtcaaacacaggacctgtgtagtgctactcagaccccctatccattcgcctggtttgagcttatgctgtacgatttctgaacttgaaaatatgtatttgagatgaatatcccttgcggtaaaaactaggacaattatgcttgtaactttatttctgtaaatttgctttaagt

SEQ ID NO: 361538 - DNA, 137 bp, Zea mays
gactccagcataggacaacttgaacttttcaacagtgtagtatgggtgtacaaaatcagcaattttgttgtttggaagtgaagtgatgaaagcaatagcatgaaaacaaggcaatccagttacttgccatcttctac

SEQ ID NO: 361539 - DNA, 271 bp, Zea mays
cggctcgaggagaggtgcagcacccagtgcaccatatggttattcacggccagaggagtaccgtgcagagagcagcactgctgcagcagcagcaactggttctaggaattcaggcatggatgaacagatcgcctcggacttcgagtacgccaagcagctgcagcaggagatggaggacctcagcgtcaaagacgaagacgacaacgatatcagctgcgtgccgtctccatctgactctgacgatgagcacgagcatcatgacgaagaggaa

SEQ ID NO: 361540 - DNA, 267 bp, Zea mays
gtcctccccttggcttcttcatttcaagcttgttgagcacatggccagatgtggcttgcagatcaacgcgcccgcctccgccatcaacgctctctctaccctctctctaccagtggagcagatggcgcgctggtcaaccgccgcggcttgcgccacggggggcgctgctatcaccagcgtcggggctggcgagggagctggagcgggcggttcctcgccacgcttcaagatccagacctcctccatgacaagcagccccaccctcct

SEQ ID NO: 361541 - DNA, 278 bp, Zea mays
acgaggcgacgaggatatgaaacgcacaatagccaaagcttggtctgatgccaggtctgggaagacgaccgattcgttgagcggattacgctgagctggcatatcggcctacggacttatgttactgatggttcaaacggtctttacagtgtcttgttggtgttagactgttaatgcttgtttatcttacatttgtagtgaagctggacgtgcgaggactattgaattctcttcttgaaaccaaagaaataaaaaccataagtctaagacgttttatg

SEQ ID NO: 361542 - DNA, 231 bp, Zea mays
tagatcgcgagcggtcgcccttttttttttttttttttgtcatcatcttgcccttcggcattttatttggtaagaaacgagatggattcttcgtttttttctgcagctacacacgatgttaagatgactggtgttgatatatgacactccgtacattaagaaaatctccacaaaacatctgatcaagctaccagtgggagtcagcaatatacaaactcgatcgtctcagcc

SEQ ID NO: 361543 - DNA, 273 bp, Zea mays
cggctcgagctaaacacgccggcacccttccttgctccctccccacgcagatgctgcagcactaaactgcctcctctgttagccacgctcggctcctgggcatcagcccccacgccagaagctagggcaccaccctcttgatgtttcccatggccgcctccagctgctcctatggcgagctcgccctccctctgtgccctgccctctcacgacgtgcctgcgcagcccggcagcgacgtcgtccatcccattcggcgtgctctaggtgttcga

SEQ ID NO: 361544 - DNA, 205 bp, Zea mays
gattaatgcctaaagtaagcatgcgtagagaattgagatgtctcgtgcacggtggcagtttatgcctactgaaaacacgtgtagcgtgaagtatgtgcgtgtttccatttctcaatggaagcgctgcctactaatgtatgttggtcatccctgagaaagaagctgctctctttcactttcctgaatatacgatataccccagttc

SEQ ID NO: 361545 - DNA, 270 bp, Zea mays
tccaagaccacatcggtttatcgacgtgagctcttgcgtgagtgctctggtcgactaccgcccgctcgccatggactcaacgacgacgacggcgccgctgctgctgccgtccgccgcctcgtgcaaggtggggccggctctggcgccgctccgcactgtgagggcagccgggtgctggaggcgatcctggccgtcgcgtccaagccgtgggctaggcgggccttggatggctctcgcctggagctgccgctgctgctgcgggtggcgctg

SEQ ID NO: 361546 - DNA, 268 bp, Zea mays
agcctttgcagtccatccatttgtctttacgacaaacagtcactctttaacccaattttgctgtttcttttcttcattcttttcttttccaaccaagtaaacaaaaaaacccttcatttcaaccgtcaagatgcgattcactctgtctgttcccgctttcctggctctggctgccaccgcctttgcccagactcccgactttgaccccgtcaacagccccagctccaaccaggtcatcaccgccggccagcccttcaccatccagtgg

SEQ ID NO: 361547 - DNA, 108 bp, Zea mays
cgtcggcgtcgtcagggcggtgttcgagcggttcacggagcgggccgtcaaggcggtcgtgctgtcgcagctggatgcccggtggctcggggagcccgccgtggcgcc

SEQ ID NO: 361548 - DNA, 246 bp, Zea mays
cggctcgagcagagaatgaggcaccttgggatatacgagagttgcatgatatatcacagatggacgctagagttactactagttaagcttggcctaattaattggtgctcgtcagaccgaactaatgaactcaagcacaatcactgtgttgtgttgtgcaggtaaaccggcagtcctcgtccatgatgacttgagtccggttcaagacaccagcaccatcgcaacagtccactcgacgaacgcgtc

SEQ ID NO: 361549 - DNA, 286 bp, Zea mays
taagattctttttatgtacctcacttcggcaccaccgtgaaaccatagtgtccccatccatgttgtccggagtcgaataattgtatgcattttttaatcgaggacacaattcaataatcttggatgcagaggatgaactaacagaggacaaagctcacacaaccatggatacagacgtcaatccaaattctgcttcaatttgtaaaggctcttcaaattctacttcgttttgtgaaggtggcagtcgtgaaggtggccatgaacaaaaaaatccaaacacttttgt

SEQ ID NO: 361550 - DNA, 181 bp, Zea mays
ctccttcctccgtcccctcttccctgctctgctccatcagggcaggggcttgcatcagagaaggtagtagagaggatcaggtgcgcgagacagacgctgcaatgatggagtccaaggcagcaattactcttgccgcggctgtactggccgtcctcttcgccccggcattgggtcagaagag

SEQ ID NO: 361551 - DNA, 275 bp, Zea mays
ctctgctgctttgcgtctccgtactcttgcagatcccttgtggccgcgttgcctctgcgctcggcgcccggatttccctccaatcctccctgcgtcgcgcgctcctgcgcactccctggtcgccgcgcagtcgagctccctcgagctctcctgttggccgcgtgcccagccaagctgtcccagatttcgcgcgcccctggttcgcccctgcttgaactacgttagccccagctgcgcgtgtcgagcccctctgaagctcctctgttgtgagcgcg

SEQ ID NO: 361552 - DNA, 269 bp, Zea mays
  unsure (1)..(269): unsure at all n locations
cgacgccggcatcgcgcgctcgtccgacttccctgacgtcaagcgcgtcgacgacaagttgctcgagacgatggagcagttcctgagggagcgcggcaaggcggggcgcgcgtgggcatcaccgccggcgccatcacgactggcacaccagcctgatgcgaacgcgcaaggcgccgacggccatgtcgacggcatgaacagcatcaagatgctcccggcgncgtcaacgcgctccatcggcgctgagcctgccatacgcagaccggcgg

SEQ ID NO: 361553 - DNA, 260 bp, Zea mays
gattcagctcttgggtggtgtagtgcaaatatgatagtttggttctgtaaatagacagtcggtacatgtcaaagcctcaatgtgtagtggggatttctaaaagcaatttgtgggtacctgcttgtcaagcagctggactgcactctggagtaaatgtatgatactgtacagtaactgaattttcatgtctgtaaacatgggcttaaacatgtgtaatatgatacttaaacatttgcttgggaggatgagggttaacactt

SEQ ID NO: 361554 - DNA, 223 bp, Zea mays
tgtccaggtcaggacttatctcccctgcatctctctctctctctctttcctcttcaatcatcttccgcaacccaccaaccgtggttgattcaacgctccaatccgctccgctcctagtattcgcagccgtctcacggtgacctgttcgtggaaattccttcatttatacgtagagatatgttcagatgacacgagcaattatttttcgctaagacgtcgagat

SEQ ID NO: 361555 - DNA, 200 bp, Zea mays
atttggttaaatactaccacgaggctcagcgtgggggtacacatggcaagcatggacgaggaaacagtatgcaaaaatcggattttccgaccacagacctccccgccctgcgcgcccgcgaatggatctcgcccgacgccctcgccacgcacgtcgtgacctccgccgcgccctgacctcttgcgcaaccctgctccgag

SEQ ID NO: 361556 - DNA, 214 bp, Zea mays
ggggttcagttcagatcagtgttggccacccgaattgggtggcttccactccatcccagtgagcaatcaagcaaggaggagctgcatcagctctccctcccgtcctatctatctatatgattttttcctcttccttttgagcattggattagtgctctcaactacccacaagtgtttattagtcagccagctccttcagtgctactagcagctc

SEQ ID NO: 361557 - DNA, 196 bp, Zea mays
agttggagtccgaggtgtgctgtgcatcctccgtatgcaggtaatctgtacgtcaagaaggtttctgagcggaaaggaataggaaagtaccgacgagaagtgcactctatctttttatatagggactagggagatatgctggctcggtagctcagagacatcctccagctgattttctcgccgcgccgtgttcaat

SEQ ID NO: 361558 - DNA, 280 bp, Zea mays
tctcctcctaggaagatgccgctgcgcaaccccctcctcccactattcctcctgcccatctcggcgctcgttctggcgttgccggcatcgtgcaccgccgaccccgtccccgtgctcttcccggttgccaatgtcccagccacctccctctacaccatccccgtccggtatcgcgccagcacgtgatcgacctcgccggcccgctcctctggtccacgtgcgacgacgaccacctgctggccaacatctcctgctgctacctgctctgctagctcgccaa

SEQ ID NO: 361559 - DNA, 286 bp, Zea mays
tatcgcggccgaggtcgctcccccgcccgccgcctcttgcccgcggccgatctcttccctccgctcgcagcgtcgcagcccgtaacgagaccgcgctcggttgagcaccacctggggcccagcgccccagcgtcctcgtgaccacctcggcgcggcatccgccctctgcagccccggtgtctccgcgaccggctccggtgcgtccggaacgcagctccacaggagcatcattatttatagaatacgatctactttatagctgatgacaatgtctgcttctactgct

SEQ ID NO: 361560 - DNA, 271 bp, Zea mays
tgaagcgctccactccagttatgttggcatacgatgccgagaatgcgccgaaggatgctactcctttcatgttggcatatgacaacgcggcgaagaagcgctccactccagttatgttggcatacgatgccgagaatgcgccgaaggatgctactcctgtcatgttggcatatgacgcttaacggactgataccgcatctggaaaatctgaaaagacggacaagcaaaacacaacacagatttttcaggctcgtgtacttcttttatctgt

SEQ ID NO: 361561 - DNA, 262 bp, Zea mays
  unsure (1)..(262): unsure at all n locations
atcacttgtaaaggtgttgcactcagacccaacactgtcatgataggtggatggattgtgttccgaggaaaaccaccaaaacctcatttggacaattatggaactccgcgcacctgngggttaagtaacagccccgaggctagaccaatcactcccgatacgataacttcagttanaacacccacgaaaacgttgtatgctacaacagcgaccttagtaaccaaggtcaccctttgtgcgcagagccttggcttagcgcttt

SEQ ID NO: 361562 - DNA, 284 bp, Zea mays
aaaggtctaccggaactgggagattctgctgtgactcaaaactccagctccagctccagcttacttactgacatcaggctgcacgccattccttcaggcagtcctgcaactcctgcagccaagcagttttcctgcccttcttgttgctggtattcggttgtcatcatcgcgtatcctgcgggcagatgctaggcttcctgttgtaccaccacctcgaccaacccgccttcaacaactgcctctgactcctagttcaccagcagcaccaccacaagaggcgcacg

SEQ ID NO: 361563 - DNA, 276 bp, Zea mays
  unsure (1)..(276): unsure at all n locations
cggctcgaggcagcctacagctctgccatccctctccgcgcggccggtccctcggctctcgctatggccacggcgcacggcggcaggctcttcctcttcgaggccatgctcttctcggcgctgctgctgctgctcctactcctccaggcacacactgcttccgccgcagacggcagcacgtacccagccgactgcccttacccgtgcctgcctccgctcgcggcgcccgccgtcgtcaccgcaaactgcccgccgccgncgccatcgtcctcctac

SEQ ID NO: 361564 - DNA, 279 bp, Zea mays
atcttctgcaaagcaaaacaccgcaaccattcagttctctcagcttctcagctcatttctctttgtgtccaacctcacaaccttcaactcttccctcacccaaaacaacaccaccacaacaaacgtcacaatggccgccaagctctccgccgatctcctcttccagatggccaaggtccgccgctccatctacaccctcaacaaggacctccccatctcgaccacccgcatccacgagatcgtcaaggacgccacactgcacactccctcgtccttcaa

SEQ ID NO: 361565 - DNA, 219 bp, Zea mays
cgaaaatttgccgtctcctcgtctcgctcctctccctgcgcagccccagatccggcaccgcccgctcctcgatccccgcaccccacgcccgcatgccgggaccggcggggtcgcgcgccgggtaggaggaggagaagaggaagggcggtatggcggcgccgccggcgagggcccgggccgactacgactaccttatcaagctgctcctcattggagaca

SEQ ID NO: 361566 - DNA, 229 bp, Zea mays
cggctcgaggcaaatacaaaagattatttggctgctatgttgctcgtgaggctgtgatcgatgaggaatactggatcgctgcatggttgagagcagaagatcagtatgaaaatgagtcaggcaatcgctatgttgaaagctttaaaagaaagtttgcatcaaaggaattccatgcattaaagaagagatgcaacacacaacatagagagaagtatatctgtcttgtcgc

SEQ ID NO: 361567 - DNA, 275 bp, Zea mays
gccagaaacagagattttggcgccacctgagagagcaacgagagatcgaggaaatcctccaccggcgttgtcgggtcatcggtgaccattccgggcgcttcttcgtatccccaggaattctctcgtggccccggtgctctgtgaagatcagtgggtgcccttcgatttctcaccgtcgtgggaaatcatcgtcgtgctgcacttcttcaacgctggcccctgctctgtccgaaatcccgctcgaggttacgagtcatctgaagatcatcctggta

SEQ ID NO: 361568 - DNA, 262 bp, Zea mays
accccccccttttttttttttttttttttttttttttttttttttgatacaagtgtgtatattattcatatatagaaacatttctcaaaagttatttcaatattgacatagtccattgaaacatatcctcaagcaacaaacactgatacaatatagctgtaacatacatgggaagaaaaacatcaacctctggtgcaccgatcaacacaaaaggatggaggaaagccatcgctgtaacaatccaagttttagcatatgaaag

SEQ ID NO: 361569 - DNA, 270 bp, Zea mays
cctgttggccgacgccagccccttccccagccgctcccttctctctccccctcagctcgcctcccctctgctcgctcgcgcatagctcggagcttcctcgatgcgctcctctgtcgcgcccgctgcttgctcctctgctgcgctcccatctcccatggccactgcgccctggctcctgctcggccggagctctctggctcgccgcggtgtccgtctccctacgcgcgcgaccgggttcctgctccctgttcccctcgcgtccccctggtg

SEQ ID NO: 361570 - DNA, 293 bp, Zea mays
tgtctttgtccacacatactgtttctgagaactgtttcacttattttaatctatcttgctatttgacaggatgattataactattttactgtggccagaatgccagatcgattctacatgttcctgcttggcacttataaacttgctgttttaagctgtttctggctactcaattatggctgtggtcaaagttttcataggaactttggttccctccacctatcatttcaaaacgaaattaccgtttagattttcaaaagggcatcttatggctgcaagactattgtagaaga

SEQ ID NO: 361571 - DNA, 280 bp, Zea mays
caacatctatcaatgattattcgacaaatactctggactcaagagattcagttaaggaagatgaagatagtgctgaagttgtgaatctgtgctctcctgacagctgtatgaatcaatcttcatgtacaaaaattaatggagaaaacagtgtccacttcaatgcagtaacagaattttctccaatggacagtagtgacctttgtacatcagatcaatccaagtcttcgagacggggtccaaggtcaagggaggattttcctcaagatcagtcctgttggta

SEQ ID NO: 361572 - DNA, 280 bp, Zea mays
gctcattgttggtttgctgaagtgaagttatctttccaggttgggaacgacgaattcttcgagtgctgaactgactcgcaaagtctgggaggcggtccgatccagggagcgagccttttggcccattacaacaaactcgtgcccagcagcccagatggcataactggggcacagcacagctgacgaagatgttgctgctggctgctgctatccctgcctctgacacgtccacgctttccctccgtgatttgctctctcgactcggtcagtgttgtttgat

SEQ ID NO: 361573 - DNA, 257 bp, Zea mays
atccatcgcgctgcgcatttgcaactcccagtcccacctccggcgcggctgccagccagtagtcagtaggcttgatcatgtcgtcgcggaagcatcacgagctgccggagggaggagcaggaggcagcggcgccggccgcacggcggtgtgggacaccgggagctccctgtacgactcgtacgagctggccgccgtgcgccggctcctcgacaagcgcctcctcgccctccgcgacgacgctgaagagacgaggggc

SEQ ID NO: 361574 - DNA, 191 bp, Zea mays
ggtaaccttcgatacaaatctaattctgcggccacttcactcactgtggtgtaacctcaatctttctgttcctggatacaagatagctttattatacgatacatcacctcctgccatgccaactgatttgcacagccgatggtgtacgtcgccgagagtgccatcagctccggcacggcgggtacgtcggc

SEQ ID NO: 361575 - DNA, 239 bp, Zea mays
acatcatctacatttataaacaaacattcttcacctctgctcactatcatcactactctaaaccatccaatacttgataagtctccattacgcaaaatgagtcgacaatcaaacccgttcaacaatgcaaacttctgggattttgttcagcactttgaccccaaccaagcaactggccgcggagtagatcatcagactgagactccatttccctctttcatggccggtttcccctttgg

SEQ ID NO: 361576 - DNA, 293 bp, Zea mays
ctgtcgccacccgtcgccgcccctgcagtttccacgcagcagcggcaggaaaagacgagacgaagcagcgacgacaacggcggaggcggaggcgttcttgggcagagtactttggatctgaccatgtcgatcagggcattggagtgagatctttcaagtactttggcccaccaaggccttccaaaacttgcacactgcgccatgcaataagaatcgttaatttaacccccctctccttgtcacggtacatactagatatatcatatgtggatgtcgtgcttggttattgtgtc

SEQ ID NO: 361577 - DNA, 231 bp, Zea mays
tgcgaccgtgcgagtgcccagagactgcgagagttaaagatgggcgatagaaatggggagtgtaaaagattgcaatgcacacagcaaacacctatgccctgcaacaacaatagcatgtgagcacgcagaaggcgatggtcccgtccactgtacagagtgatgtctgcggtcacgcagcggcccgtacacccatgagcagctcacttgatgcaaaaccagtggtgcgcactt

SEQ ID NO: 361578 - DNA, 285 bp, Zea mays
ctgctctctcatcagctcaacgatttaggcatttagcactgcgggcagcagttgcgagcaaaggccaaagaacacggagaggctaaggctatccacacccacacaggttagctttacttcttccgctagctgatttcctctgcgtttgaagctcttgttgctgttgccggtcagggtattcgggctactcgccttgttaattcagtcaggagatagatagtaacctcatgcagtcatgctcgtgcgcgtttcttctgtagatcgatggaatgatcagtaactttt

SEQ ID NO: 361579 - DNA, 115 bp, Zea mays
tgttccatgtgccaggcttcgcgagggagcagtggggcatcagcacggaggcgatccggagcgcgttcggcgggtccatgaggagtttcacaggcaggtgaggcaggagtgggcg

SEQ ID NO: 361580 - DNA, 287 bp, Zea mays
cggctcgagcaccgttccctgcacgccaaccaggacgtacacgccggacacacgtcacagccttcaaccctccctcccatacaaccccaagccccaacacaaacacacacacacgatcggtctcgtcgcagcgcacgctcgcgccgcgggtttgatcgtcacgagtggcgacttccttcccctccctctttcgccgatgaccacctcgtcctccgggagcatcgaagcatcggcgaactccagacccggctcgttctcgttcgcgagcacgatcacgagcttcacga

SEQ ID NO: 361581 - DNA, 287 bp, Zea mays
gcagaatgatgaaacaaggtgcggaagtaacaatctttgggccttccggtttggttcctgagaacatagatgggatcgtggacctatcttgctttcgattcgaagctataagcgtggagaggggatttagctatttcttctctttatatagagcatgaaaggagtcaatgttaaggcatgatgaaaacgaaatattgctgcagccacagttagttgcaaaggaatttagttgtaataggcaatctattttggttgtcctctgttgcagcaaaggggccgtggtgcct

SEQ ID NO: 361582 - DNA, 279 bp, Zea mays
attcctgttgttgaaggaaggcctgttagaatccgtcctcttccatgttgtggccttggcatggggtggtttctgtatgtttgtttttcctaaatatcaatcatctcacaattcatatatgaacctgtattggtctctgaggaactgatatttccactgtttgctacaggtttataattgggttcttctttgctgccattccatggtatcttggagcttttgtgctgatttgtgtccgagtacgtgattacagggagaaaccaggatatgttgcttgca

SEQ ID NO: 361583 - DNA, 277 bp, Zea mays
gcgagccgcggagatccggggttctgacctcgagtccttctgctggattgttgacttagtggttgtataatggcaaagcttggtagtcatatatcactcattatctgctggttttcagagttgatgctaaacatgcttattctagctagactagacatttgttaccgagacttgtgaacgaggcagcatcatagttcagattggaaacatgtcatcgaagacgatagagttggatcacaaggacatggtccatgattctgccatcgactactatggc

SEQ ID NO: 361584 - DNA, 302 bp, Zea mays
tgcttcttcgtggacgccggggcctacggggtcgtgccaagcttctagaaagttcgtgccttgaaaatgaatggcatcacagcagcgcttctgggcttctgacggtggcgttcgcccagcttgaagcaagttaagcaaccgcccttctcgtttgtgtcgtgtcgtcattcatgtgagcagcattcgtggtgaaattccgccatcgctatttttaaatgatggcgcggaatttcgatgggtcatcaccagttggtgaacgaactagggaatttattgtgtcttgtaagatacaactttactgg

SEQ ID NO: 361585 - DNA, 188 bp, Zea mays
gaggttttcttcaggacttgactggacgagagactgatgctgataatccttgtaatgatgacgccaaagacgaagaggagttttatgctaaatcaccacctcgaaatgacaaaactaatgagttgaaggatcaacctttagctgacatatattggcctgattcactcggaccactggacttggacata

SEQ ID NO: 361586 - DNA, 268 bp, Zea mays
gaacagtccgtctggatctgggcgtacggtgattaccaagagttttgtgagaagacggtagggtccctgacgcgattctgcacgagtggtgggaaaacttgatgctgcggctgtgcgttaggttcaggtgcctgtggtatgtgtgatcctgtgcttgaaatgtaggggtttagtcactttagtggatagaattgtggattgttgagtatgttggtgccacttgtgttttagtgtttacctaagcttgaaattgtcattcgatgggtac

SEQ ID NO: 361587 - DNA, 275 bp, Zea mays
cctgcgtgcgccggctctagctcggtcgctcctactgctctgtgcgtgcacgcccatctccttagcccctgttcggatttcacctggccgctgcgcactccttctgccatggtcggttgctgctccctgcgctggatctcctcccctgcgcgtctctgatctctggcgcccagcctgcttgttctatggtcttcactgttaatgttttggagtctgccgtgatgccgtaccggcgttctgtgtgcagcgggaaagctttgcgagttagcgttgtc

SEQ ID NO: 361588 - DNA, 99 bp, Zea mays
cgcacacggcacagacccgtttcgcctcttcgaccgcgactccctccgaccgagctgcagtgcgcgtgctgcctgccttccactgttcctgcttccaga

SEQ ID NO: 361589 - DNA, 286 bp, Zea mays
agcttggaacaggttctatcttgcttccaaacggagcttttgtagcgggagtaaaatcgtactcacaagcagttcagacagagctgtaaagtttggaacatcacaggctctaactctgaatcatctgtctcatgaagcatactggtatttcttcaagacacttgcatttggaagcattgatcctgaggcacacccagggcttgcacaagtagccatggagattgctaggacgcagaatcgttcaatccctggcgcatgcatcatctgttatttgctgaggaacaat

SEQ ID NO: 361590 - DNA, 285 bp, Zea mays
tattccttcatctccaccatcattgagttatcagcctccagctcctgagtactttgtgacggccaatggtgatcaattaacccagatgacaggaaatatattgattcaagctattggaaatgcaacaaccttcattcctagtggaccagttaatggacaagctgcggttaattttgttacttcgatgcaggcagaatatggaaacaataacatatttatggcaccacaagcttctaatggtaattaccagtttcggcccactggtgtaccttttcagcaagggaa

SEQ ID NO: 361591 - DNA, 283 bp, Zea mays
atagggtattgatgatgttgattatgcacaccaagtttagaactatagacaaaacactagtacctccatccacaacacaagtataatggattctagtggacaaaggtagtacttatctattatttcgaatagaattttcgaagtccaatgtttctgtttattttttcattgcaactgtggtgctaggtgtcacgtgatatctgaatttggtcgtctctagcagtttggtttaaatatgttagttatttttaatactttttatttctgtatgtaaggtttgttt

SEQ ID NO: 361592 - DNA, 276 bp, Zea mays
gcggaggagtgccatagaagagctaatccgtgttgttcgaagaggtggtctggtgcttataacagtctgggctagggagcaggaagacaagtctttgctcaacaagtggactcccctctgcgagaaatatactgaagagtgggttgaacagagcagtcctccagtacgcagtaaatctggaactcttctggaaagcattgcagaaactgatgaagatgctggtttcacgaagcaaacagatgaccgattgaaaagctgtcatggtgaagtggagga

SEQ ID NO: 361593 - DNA, 272 bp, Zea mays
gcccgggccagcgcgggcagcagcagcctgcagccatgagcgcgaggtgtagcgagcgcgcgtcctagagtgggtcggagtctgagccgccccccgagttgccagcagcagccgcagagcggatccagatcgcccggagccccgcgtgcgtactctgctcgcttccaagagaagacgctaccccaatcccagtgggcgcccgcgaaccaggaccggcagatctaggcgtcatcgaatcggccggccgatctggtctcccccctcctccccgg

SEQ ID NO: 361594 - DNA, 275 bp, Zea mays
agaaagaaaaaacggaaacgtaacgaagacaccaagagctcgacgcctgctgacacaccggcagaagccacatacaacatgctgaaacggaagggacttggttccaagatcaatgagggagctgttggcgaattatacaagactaaagatgaagttgagagcgcgagtaggaaagaagagatggagttcgacgcactgtttgggccggacaacgctgatggcgagacggtcgatgatggtggttacggctatgggggctgcggcgatggtggcgc

SEQ ID NO: 361595 - DNA, 126 bp, Zea mays
ccaggaactccactattcccatctctagaagttgagtcgaaaaggtccccggtgagccaagctggaacaccaaagactcgtccaactgccttaaaatcaaggttgtccaaccatccagatcctcca

SEQ ID NO: 361596 - DNA, 248 bp, Zea mays
ttttgaagttgcaaaaattagaccagagtatcagctttgggttctcaatgattgtgtctggacagatcctagcttaacagtttttaaggcacttgaacttagcaaacaaatcaaatcagatacaaaaaaatcagatgtatcacaattaccaacattagttttacatttaatccaaccagtggcaagtaaaaatgcggaatttaatgttttgttgaagcttgatgacctgcgaattgtggtcaatctca

SEQ ID NO: 361597 - DNA, 244 bp, Zea mays
gcgggccttgattggattcctcgtacctgtggcttgcggtattccactattgtctctctcgaaatcggccgtctctctcccgtccggcacttcctccgatcgactagcctgctgcggcgccggcgccggcgaccagcggccatgcgggtggcacccagggtgctcttcctcgtccgcgacgccgcgggctacggcgctgccctcgccgacgcgctccgctcgccgcccgggctaacgagggagt

SEQ ID NO: 361598 - DNA, 246 bp, Zea mays
acctccccttttttttttattttttatttttttttttttacagagcagaacttcctccctcgctcaaacgaaaaacattaattaatctacagccaaacacaaatatacaaaaaaaagaaaaaatactaaaattctaatattaacaaaatcctccgtctgcgaaaggatgaacctcccgaagtcaaccgcccggctaccgaacgctaacgcctaacggcgaacgaaacaaagagaatcaaccgatcg

SEQ ID NO: 361599 - DNA, 248 bp, Zea mays
gtccgagcaggcacaacaggagcatagccccatggcgcccaggtgttctagatgctctgctttggcctcgcgagctcgctgcgggacgccctagccgctgctcgccccgaccacatctccctggccgagcgctcccctgttgaagccccttgccgatgccttgccctcctccctccccacggtcttcttccccatggcgtcgggatccctccttccgacggctgtgctcctcaagcgtgctctactcg

SEQ ID NO: 361600 - DNA, 211 bp, Zea mays
gtctccgtgtccgtctgtcattagcatatccttcagagacacccgcagcaaagcaaagcacagaaaagcagcggcattcgcagctgcagcgccatcccttgccttctccacaagcatcaccggacaccggccagccaagccttcccctttgatctccacgcgcggccttcgtccatcctctccgccggtcgaggtcggggcgcgatgggcg

SEQ ID NO: 361601 - DNA, 276 bp, Zea mays
gtgtgggctagtagtaggtagctgtattagaagtttagaaccagtgacccaccgtggtggtggtggtgggctacagccactcagccatgttgttgctgccgtgcctgctcgtgctatcgtccctgcaagcgccggccatcgtcgctgcttctgcagctgcaggtggccgaccgccggcgatgtttgtgttcggggactccacgctggatgtgggcaacaacaactacttggcggggccgggcgtgccccaggccaacaagccctactacggtatcg

SEQ ID NO: 361602 - DNA, 282 bp, Zea mays
cgccgtcccggttgccagcagataagccattcgtgcatgtgccaccgtgtttcaccgccgtcgtgagtgagggtgtgagcgtcgtctctgtcgtgcggtgggagccgggttctccaacgacttgcgggcgttgtcaagctgcgatatcaccccgtaccgcgcgaagactcattcacgtattcgccaagtcagaaatcgggagcttcgcgggcggtgttgaggaatcgccatcacgccgcaagcctccgtgggcaactgtacttgtgcttcgaacttgcggtg

SEQ ID NO: 361603 - DNA, 278 bp, Zea mays
tcagaacatcagtgtttgaattgcctagatcattatgtgctctttggcacttacaactacttcagctaaacggcatggtggagaggttgcctaacaaagtttgcaatttaagtaagttacggtatctgcgagggtataaggaccaaattcccaacattggcaagcttacttctttacaacagatatatgacttttctgtgcaaaagaagcaaggatatgagttgcgacactaaaggacttgaatgagcttggcggcagtttacatgtacaaaatcttg

SEQ ID NO: 361604 - DNA, 275 bp, Zea mays
atcaagaattcactaggccataccagagcaagaacatggatataaaagtgggtggctatgctaattatctagaagagtcgacattatattatctggatccccaaggaggtgtgtcagggctagtctgagtgctgacataatctcttggtatgaagatggatacttcggtttggacttaccagtacgactgtctcagtctccagatgatgttcctttccgtccacttgtctaagtcatgccccaccttgcgcaatagacgcgatcgcgtatacctc

SEQ ID NO: 361605 - DNA, 253 bp, Zea mays
cctcaatgaaaaactgtactgcatatttgagatacgaactaacagcactgcagtactttgaacgctaacatgccacggaacttatatgctagcgaattcctgaagtttgaacttgaaattcagtcgtccgtacaatggattcggtgaagaaatgcaatgcaagaattcaaaaaaaaaaaagaatcagaaataatgaaagaacaaatctttgggaactttttcagtcaagatgtgagagtatcatgaagactct

SEQ ID NO: 361606 - DNA, 271 bp, Zea mays
agaaagcttatttttgtttgtttccacacataatttagtaaacataaaaatgaataaatccattttcttatttgccatctttggcttattaatcgttttggcatctgctgctggtcgtcgtggttacggtggtcgaggtggctatggcggtggtagtctaggaggcggctatggcggcggtcaccgaggtggattcggtggtggctatggaggtggtcatcgtggaggttatggaggtggacgaggcggctatggtggaggccatggtggc

SEQ ID NO: 361607 - DNA, 265 bp, Zea mays
gcatcctctcttcctctcctctccaatctccattgcagcagcactgcagcagcgggtgcgggtggcatggctatggcgtccgcactgccgctcctcctcgcgccgcgcgccgtctttgcgtccgcggggccgtcttcgcctcatctccgctcccgcgcctcgccagctactacacgaatgtccgacacgccgccctctccgcgccaccagccgccccgcgccgcctcctgctgccaagatcccgctccggccgcgggaggaggcg

SEQ ID NO: 361608 - DNA, 275 bp, Zea mays
tttacaactacagtcaaacgatctaatcctcctactaaatcaataccatcaaaatgtcttggcgtgacgacgaccacaaccagcagcagcagttcggttcttgcggtaacactgatcactttagctccactggagatcaatttgggtctagaccatatacctacggcaccggcaatcgccgcaacgattagacctcactcggatccagcggccaggagtcctatggccaaggcaacacattcggctcacggaacgacgacctcagatccagcggt

SEQ ID NO: 361609 - DNA, 252 bp, Zea mays
  unsure (1)..(252): unsure at all n locations
ctatgaatccctggtangattatgtgatgccgagtcagtgaggacaagagtacttcaaagaagaactcgtgactcctgatttccgcgatttggtgnactgataatttaatcagatcttgccagtggtctcggaaacatggcctttgntttattgagactcgattggcacccagagggnctggcgccttcccatacctttggctatacctctcaaaagttgatcagacggctgcgaatgattggcgagtccag

SEQ ID NO: 361610 - DNA, 284 bp, Zea mays
atctggctatcggaagcgatggagcgaagggccacactgtttgagggggctcgctgcggcgtcgcgaaggcgctcccggcaactcggactctcccactcagcaagatatagtcccgatgaggttgaaagctcgactttgtagcgaaggcgctcccgacgactcggactctcccactcagcaagatagtctcgatgaggttgaaagctcgactttgtagagtgaaaggctacgccctgtcagcgttcgggcccatttctaagcccctatttggggtaagtttaaa

SEQ ID NO: 361611 - DNA, 281 bp, Zea mays
tatcactacttacctaaactattacacacaaaatcacacaacaacctacctatgccatacattctacctgaaaaccacacctacctcacatccccatacaaactgcggaaccaacccatcatggctccctcagtctacatcctgctccagcgcgacacagagtccaacaccacagtcacctctgtattcctcgatcttcaagacgccaacgctgctctactccacacagcacaagaagctggcgttgaccctgcgagcgccaagcccgcagacggagacgt

SEQ ID NO: 361612 - DNA, 239 bp, Zea mays
agaagacgaggttaaggggagatgagcgagctggtgcgggcggcggctccggcagctgctgaggaggagaagaaggccgtcgcggctgtgactgtggtggcgaaaggaaaagagaaggcggaggtgacgccgaccgtggaggcctcatcggtcggcgacatcgggaggttcgtggcctacccgtcaagggtggcggagcacacggacgtggtggcggacgcccgcgcttcagggcggcg

SEQ ID NO: 361613 - DNA, 288 bp, Zea mays
gcgtgccatcaccatacactaggctttaaggatgccccgccttcctaactaagtgcattagcgtacgacggatggggaagcagggtagcatgagccgagcagcaggagtggctagcagcatgtggagcctcagctcgctcatgcaatggcagccagtcgcggttgcggtctgtctggacttgcggcagggcagggcagggcttgtgcgcgcggcggtggtggtagttgtagaatattcggtctaggcttcctcgcacctagctacggtcgagactccgcctgacgcta

SEQ ID NO: 361614 - DNA, 259 bp, Zea mays
gagaaccggaagacgaagccgggtaacccccaacacataaaatgctgaagctggcgccatgaccacgacctcgaccacgaatggcgccccctccccttctttcataaatttctgacttcatttggttgtgatgatgagagcttaaaaacctgatggatgcgaaatcaattcatagcagcagattaatctatctatctatctatggccgagttccatgacataattatgatgatgcccggcttgtcttcagccgcagcca

SEQ ID NO: 361615 - DNA, 273 bp, Zea mays
gtgctcactgcttataagtgatggttttcttcatacacacaatattatggcatcaactctcaattactccacccagttgcattttatgttgtcgacctttttcacctgtttgctgcttagtttacctaggcgtgttgcttaatgacataacgcatggtttgtggccttacatttctgttatccatttgtcagtcagcattttaactgatgcaatcatatactgcaggttgattatgcttgcaccccagaagaagtgcagcagcatttcgaagc

SEQ ID NO: 361616 - DNA, 153 bp, Zea mays
tgacgagatggccgccatcccggacgcggaggatgccccggactcggtctgcgccatctgctgcctcaggaacgggatggagttcgagccggtggggattatgcccggcggcgagatgcggatcgtgcgggagagccccacctcggcgtacgt

SEQ ID NO: 361617 - DNA, 239 bp, Zea mays
gccgagggtccgggagctgcgggcggcatggggagggacgagatgctacggcgtagctcgtggcgctggcggcggccgtggcgctcacggggctggccacggcgtcgctgcgcaaggcggcggtcacgtacggcttcggcatcctcgccatcgccggcgtcctgctcccggactgggagttcttcgaccgcgactactcccagtggctaacccccatgctcgcctcccgccgcacggcc

SEQ ID NO: 361618 - DNA, 180 bp, Zea mays
gaaaggaatccctcctacgcggaacgaagagattcgtcgcctcagccgcctctctgctcagatctgcggcggagctcgccggcggcctgcgccccgcggcgccgccgatccaagatgccttcgtgcgtgcagggatgctgctgctgctcgtccctgcgccttctttcccgcgacgacgcg

SEQ ID NO: 361619 - DNA, 285 bp, Zea mays
  unsure (1)..(285): unsure at all n locations
cggctcgagcattaagaaccgtcttttgtttgctgtagctcgtcaatatggtcaacgtgtaaagcatgcacgtgaattaggacaaagtttgcttaggaaacgtactgcagctcgtccatatgcaaagcaacttgtgcgtcaacttgctggagaacatgttcgtgcttatttgaccagacgcctggttacaaagccaaaattggctcaacaggctgctcgtcgtgctagtcaaaaggctaagaaataaatttgataaaaatacataaatcacctanaagcactatc

SEQ ID NO: 361620 - DNA, 269 bp, Zea mays
gaaaaaaaactgggccggacacatcattagcattattattagaagatatatatagttcctctataaataaattataaccaataaaaaacacctcagtctgaacctcctaatgacgtagtcctagtcctatgtagaatcaaagcgtagaggagctcgttccacgcgtccggcacgcctggcaggcaccagtggctgcagtcggccgccctcgtcgtcacctgctcctgcgcggccgccggcgacgggaggcggacgttgtacaccgacgg

SEQ ID NO: 361621 - DNA, 268 bp, Zea mays
atcacaaattcacaagtatatagctcacaagagtcacggaatgtacatacgcttgtgcatactgctacgcatgacgtttacgtacacccagacccagctacgcatcgacccctctccgcgtacacgtctgagcaaacaaacgctcagcggtcgcaacaattcctctatatattgtacattgaatgctgtgtacacgcaaataaaacacacacaccatgaccccagtacgtattcatttcttggatcggtcgagtgcaaattcgatcat

SEQ ID NO: 361622 - DNA, 271 bp, Zea mays
cgcacgcaacgcgctcgccggctcaacacgctctcaccacgccaagagcggcaagaacagctcctcgcacagtctgcagaagccgaaccttaaagcggaaccggagcatcaccaagcctcggaggcggtccccagctacgccaccaccgcgaccgcagccacaaccacaagcaccaccaccacagcgaccacaagcaccaccagcaacagtactcctccggagacggtggctgcagtgaaagaggaggcgatggttgggtcggaagtggag

SEQ ID NO: 361623 - DNA, 283 bp, Zea mays
aggcggagaggttcagggcgttcggggtggggttcgggagatgcctcccgtgaagaagtccaagaaggggaagcggaaatccaaggatggcaagctcaagattgtcagggcgcggagcgcgccgccggcgctgccgccggagctccgcgccctcgacaccgagtggtggtacgctttcctgaacaagcaagtcgagctagagcatgctgtgcctccagatgagggggaagcattcaggcacttcttcaggacttcaaggaagacttttgactacatctgctcc

SEQ ID NO: 361624 - DNA, 273 bp, Zea mays
tcttgacttggtgtgctttcccgagtcttcagtcatctcctgcctgaagcaaactggcttctaaaaataaattgtcttgtctgaagataatacaacacagcgatgcaccaagacagtttcaggtcggtggtctgcagatccctctcgaagagcctgcccccaaggagcaaagatggcagctgttccgaaacagtccagtgcactgtcccctgtatcgtcacgctgcagccttcggtctgtcggagctgccaaggtcgggatgtacagagcgcg

SEQ ID NO: 361625 - DNA, 269 bp, Zea mays
  unsure (1)..(269): unsure at all n locations
cctccctttacccttccttctctcccatgcaagcaaggaatcgagggagngagggaggaagcaaaaggggaaaagctcgtgcaagacaagccgccctgccctgggaccattcccacccacatcgatcgtcagccagagagaggttcgttagttccagaaggacactggacagttggagacagcgagcgagcgagcgagcgagcgggaggtgaggaagaagagctagggggcgatgggcgtcgagatgaagcccgtgaggggcctcagga

SEQ ID NO: 361626 - DNA, 269 bp, Zea mays
gtgaatgatcaagcagttcaaatatatgaggatgcggtaacatttcatatcaggtcccatcaaagactttccacgtcttgccaggattcagctgcatcttccctttgttacctaaacatggagcagctaacaaaatgcctgctttctctgtatgatatgtatcatgtacttcataagtgtgattcacacagcaaaaaggaggctgagtattattccttctatgtgcttctacatttgggatgcaagatacacaaaatgatagattcact

SEQ ID NO: 361627 - DNA, 267 bp, Zea mays
cggctcgagcggctcgaggaaaaattcatgtcactctcatctttagcccgtgtaagaggtcaactccggtacttaaaggtgtgtgataacttcaagtaaacttcttccataaaacttcacattttagtgtacaatttacataatttatttatttttgtttctgaagattgcactatgatactatcaccatatggttcactcatcatttgtttgggttaatatcatcttaatataatacctcagctacaaagttctgttcttgcatgg

SEQ ID NO: 361628 - DNA, 269 bp, Zea mays
gttttgcatggggtgttatatggggattcatctcgtttatcttcctctgcgcttcaatataccttggactggtcatattgtcttgagggttccaacctcgcgcacgccgttttgatctgacaaccaactctggttggctttttccagagttctccttgctctagattttgggttcaaacttacattgttctggcggctgtacagtatacatgtagggtaaacatgtacatccatcgtggagttaattcggcggggattgttcatgtgat

SEQ ID NO: 361629 - DNA, 143 bp, Zea mays
tcctgcgctccagctcccctccatcctcggccaaaaattctgcggcgagctccgatccggtgcgactactaacccacgccgcagaagccgcgcgtcctgatcgcgcgggggtcgaggagaggggaagcgcggcgccgcggttg

SEQ ID NO: 361630 - DNA, 144 bp, Zea mays
aaatttgcagttcctggtaaggtatagcatggcttgctatcgcatgcaggagtttgacagaaggtaccaggaggcacaggacgaaatggaagataataagtctagagaaccagatactccagcagagcccggacctgctgagaa

SEQ ID NO: 361631 - DNA, 258 bp, Zea mays
atcacttgcagtggtacctgtttcagtgtcagtaaaaaacaagttgtcgccataaaaaaccaatccagtgtcagtaaaactttctccttggtctgtgattgaatcatcaatgccggcagctttagaaaattcagaattatggcaaaacatctcttcaagcttgaagtgcttcacaaatgaccattggcttgccaaattcgtatatgaaaacattggcaatcaggaaaggtcatgcatctattcagcaagataggtgta

SEQ ID NO: 361632 - DNA, 264 bp, Zea mays
ggagaggagttgaaaggggattcaatctctgctgcgggcgaggaggagacggactggaataaggaaaccgaagaaggcttcgtgataatgtcttttctgtcaccaaagccagcgcccaaggctctcttctacggcaacctttacaagcgtggaaagtacaacaaagattggaaagaacgatggttcatgctcatggacaacaagctcttgtattacttcaagaacaaacaacagaagcaacctatcaacgacgggattcctttg

SEQ ID NO: 361633 - DNA, 168 bp, Zea mays
tgaccgaatataaccttttcctcaataagttgtacgcggaccacaagtagtatataaaatcagaatatttcactcatgagagtgtgttctggttttacgcgagctgcttatgttattgctagctaacgtttattacctgtgctttttactttctatttctaatacaac

SEQ ID NO: 361634 - DNA, 284 bp, Zea mays
tggagggtttatgacgagtagcctagttggtctggtcagtaacgactagttaatatcctttggacaaggtcaagaatagctctccatggatagaaaagtccatctgatgatgctgcacagtactttgttagctacgagtcagatgatgggtatccatgcttagataagccaagatactccacgtaatagaaaactgaaacccggagtgcattttagtcatgtgaatgatcatgcggcccactcttttcttaccctgtacgttctaatttataattcgcttgatt

SEQ ID NO: 361635 - DNA, 285 bp, Zea mays
ctactgtgtgtttcgtctgacattcgtttctaaagggcttgatttcttgagccggccaggccggcgacctctttctcatccgtgtgtgagtccacaaccacaaaccttttacgatgccggcaccctttcaacttcgtcccagcgtcgagcgggacgacgccgacgtgacccatctcgacatcacccagatggacgatgaccccatcacctacttcctcacccctgcacagccgtcgtacggctacgccgacgacggcatggactttgagatggactttgatgccg

SEQ ID NO: 361636 - DNA, 278 bp, Zea mays
ctcgcgtcgctccggatcccggagccggagctggccggcgtcgtggccaggcacagcaacctgagggatgcactcactgccgtcctacgctcgtcgaatctgaagtcgcgcgcgaacgccgctctgctcgttaggtccctctcggaagcggcgtggccggcctgggtcatcgggctgagccaggagcttctagcggaggttgtccgcgtggtccgcgaccgtgtctccacgcaggcgaccaaggcagcactgcacgccctcgcggcgctctgctccta

SEQ ID NO: 361637 - DNA, 283 bp, Zea mays
tagcgcaggcaggcgaggatcagaccggccggagcttgccttctccgttggggttcctgcttgccgcggcgcgagaacagatatattggatcggatttgtgccgggttcttggagcagtaggcaccaaactggtccaggttgggcaaaaatgcagtttaaccagtagctaacggagctctctcatcttgtactgtggcatttcttaagttgtctggaagctgaatctccaaggctggaagatccaacatctgttcttgaaaatttactgtacctgcaaatggc

SEQ ID NO: 361638 - DNA, 275 bp, Zea mays
gttgctggctactactacgactacaacccagcaaggagagacgacgacgagccgaattcaccagcatggggggccagcagcctcgccggtgttcttcgtgagctcgtccacttgcaggcgtccgggaatgctgctgtcgccgaatgatctcgtggagcttggatggaatggctcatggcatggactgaaaaggagacggaagaagcgtcacacgcaggagatacagcgctgctgctagctcgcacagtcgagatatgctcaggaaggctccgtgg

SEQ ID NO: 361639 - DNA, 291 bp, Zea mays
  unsure (1)..(291): unsure at all n locations
attgaaattttacttaataatgttgtttttaatttaccatggaatgctacccgaattggcatggagttcactgtcattaattattcaccagatctaaaagatgaaggttttgattcaattgatgatgaatattcaccaggaattttcagacaagaagcgtacatgtttgaaaataagcaaaaatcccgttcatttatctcttacaaaccaaatgcttataatgccaataatcgtcatattgcagcaactgtagaaatcanacaatctggttttanattatctacagacact

SEQ ID NO: 361640 - DNA, 252 bp, Zea mays
tgctattcaagagtggattcgggaaatagctccagcaattagatacgttccagtccttctgagactagtaatcatgctttatctgctgactttaactcttcagttgggggactgctatgaggtcacagattttcttgctaagcacagaatttttgaggatttacctcctgatttctccaagaagattgtacctactctgatatttagcaatggtaccagtagcacacttcacaagagtatttggtgatgcac

SEQ ID NO: 361641 - DNA, 281 bp, Zea mays
tgcaattatggagctggcaactctggggatggaaaaggaagggatcaagaagaagggcagcaaggtgacgcccctcaaggctcctattatcgaggcttctgagatgctataagttgtaatttgagttgtgggggtagttctagtgcatcatgttgtgtcgctggtgtacttgcctgtgggtcgcccaggttcttttgctggctgtttcgtgtgccaggttgttgcctgggcagcggtgtttgtttctttggttggtattttcggtgtctctatctgtctta

SEQ ID NO: 361642 - DNA, 273 bp, Zea mays
gcagcgtgaaggcatcaacataaagtcctatctacacctacatctacctagtgccggttctgcctgcctacaagtcctatttaatacccctgcatatcccacctcttttcaaaaactctgccttttccccaggcaaagtggtttttattccagcaatgcccatggaatccgtcttctcctctcgccgagaatcctggccaccaacccagatccgcttgactcccacaaacatgtccatcaagaagcgatccagcattgagcctcgaccgctgc

SEQ ID NO: 361643 - DNA, 274 bp, Zea mays
gattagtgccgctatatgcataacttcagtttgtttccaaattcactttctaatgttcaccaattttcttcatgtgaaccttttgcagactagatcatgctcacttcaaggttcagtgaagttgaggaacctatttgctgatcagccacacagaaaatttggtgacttcattaaaggagtatttgctctcttccacagatttgggaaatgtttatttgcctgctgtagtgaattaagaaattttcatgtccctatattttcttatttgccatgt

SEQ ID NO: 361644 - DNA, 322 bp, Zea mays
  unsure (1)..(322): unsure at all n locations
aggagaagttgttgcccttgatagatctcacaataaggtgatggatattctgaagttggcttctgagatggacttgagttgtattaaagcttataaacttgatgctctcaaatctgtacggaaaactgatgaagcaagaagccttggcatggctgataatcacagtgaagcaattgaaacaccaacagaggacccttgccatgcgacactaggtgggaaatctaccagtgtagacgaagacagctcaacaacaacagtggtgttttctgataacaaaaacctaaattccanaagatacattagcaaggcagaactcaggaag

SEQ ID NO: 361645 - DNA, 344 bp, Zea mays
tgccggtcccgaataaagagcagcagcgcaaggtcagccatcttgcccgcaccctgcttctctctcgttggttcgttcgtccgtgcgtggttttgcgcgtatgcttgtggagatatatgctgcaaacccttgggtcttcttcctccgtggagggggtaactggtgctcatttcttggcgcggttggatctgatggtcgccacgggatggcagatccgggtgtggggtttggcgatttatccttgttgcagtttctgtatggattggatgtcgtttaaatttgagggaaatggttttagatttatcatttctaatacagcagtggagaaaatttggcttttttat

SEQ ID NO: 361646 - DNA, 190 bp, Zea mays
gcggggtcgacgtcgccgacgtcgcggacgcgatgcgggaggcgatcttccacatcgccgcgctgcagccggtggagatcgacccggaggcggtgcgtcccccgaagcggcgcaacgtgcgcatctccaaggacccgacgcgctcggcgccgccgcctacccggccttccacgcgccgtggcagtacgcg

SEQ ID NO: 361647 - DNA, 301 bp, Zea mays
gccgccttaaacgacgacgaggacccctccgccctcggcgcgacgggggacggggcaaccgacaacgacgcggacgccgcggcgtccgaggaccccgcggtcgagctccgcgaggcggaggttctgccctcggccgatgccatctctagcttccctgccgccaagcgccgcgtggtcaaccggccgcatgcgtccatcctcgcgatgctcgaggccgaacgatctgcttgttccggcgatgtccctaccgtggcactgccggcgctagagaacatctcgcacgggcagctgcaggtgctgt

SEQ ID NO: 361648 - DNA, 299 bp, Zea mays
aatatttatatcttccttcatgttacttgtttctaattcgttcaggcaatagtcctctgtctttttaaattttttggctcgaaattcattggtccaattttgacctcggaaaggtttgaacccgtcagggactaaagatgccaaaggtatattgttttccttctcattctactatgctataactatttctcctctactgttttttaccctacgaactgtgttgctaattttaatctacactacatctacttaaactcaattgttcagtgtcatagctttgctggaagccacatggcata

SEQ ID NO: 361649 - DNA, 250 bp, Zea mays
tcttcccgggcacggagcgcctggtgagctgtgagctggtgaaggccggcttcgcggacatcgtggacaaccagtgcgccccgctgcggcgcggcgcgcgcggggcgtgggccgcgctcgccgcgctgtccgcctccatggtgctgctgatcctgctcgtgctcgtggcgaccaacgcgcgccaccccggcgacgaccgcctgtccgtgcgccacctgacgtcgtcgaccaactcggagatctcggaggc

SEQ ID NO: 361650 - DNA, 277 bp, Zea mays
ctcctctcgtacaccacgtccctctctgggctgtggtggctcccaagcacacggcccgcacgagcagttggaacagattcctcgaccgcgtcgccccggaacccagttcttggcatccggtgcctagcttcgtcgcccctccggcaaggaccacctccagccctccacctcgcgaggttgcacttgctgctagtgagctagtatatttctgataccggaaacccgcgacacgggaccgagttcttgggagcggattcggctcgctgcagcaggctga

SEQ ID NO: 361651 - DNA, 264 bp, Zea mays
attgatgtcatggatcatcttttctcatgcaacatggcacaaggggcacactctagctcagactgtatttacatgtatctaccttatgagaatggaaagaacttcatcgcatgctatactaaatagcttttgcaggattttgcgtgctacttgtaatgctgtcatttctgctgtttctactgcccgaactcatgaggaagaggatctctttactatgtcctttggtctgcctttgagagatgaaggtgatcataagtgcctgtc

SEQ ID NO: 361652 - DNA, 275 bp, Zea mays
cggctcgagttttttggttcgggtgaaaaaacattttgctgctctcagcttttcaccccttgtttccacatgctttaggtcggactcgctacatgaaattcctagcctagttactagtggctcgcaactcgcaaatcatgcgccatccattgcagcattgcgctgcgtggtagcagctcgaccagcaactccagtcggccagtcttacttgcactggcagtgggccacacgttcctaatccccttcccagcgccgcaaaaaatatctcgtttctg

SEQ ID NO: 361653 - DNA, 271 bp, Zea mays
cttccttgtccgtctccactaccgaccaacggctgcctgctcacacttcgccactactgctgctgcgcgttggcgagcgcgcgtggttcacgagcgagctccaccacaagcccagtcgcgcacggcagccgttttgcttgttttgtttgcttaccgcctcttccgtccttcctcttttgggcggcctggctgggctagctagctagctgttctgttcattccgagtatccggcatagcacacgaggttggagttggaggcgtaccgaggga

SEQ ID NO: 361654 - DNA, 265 bp, Zea mays
cctttttctccccgtgccgctgcagctgttgcatgcctgcgggcggtcgctgctgctgctgctgtgcacctagagatttgctgctggcgctgtttggccgcgtccagcattcaagaagcacgcctgcacgcgtgtgggagaggagggagtggatgtctcattcttaaccaaaaaaatctgaagcggagatttggtaatggttgaaacggagttgagctcgtttggcttgtaggcatacttttgctggaatttgggtttttcgacg

SEQ ID NO: 361655 - DNA, 268 bp, Zea mays
cgcggttccggaacatcatgcgcgaggcgctgcggcgggagcgcctcagccagggattcgccgacctccacgctcttctgccccacggcgcgtcgtcaaaaggtggcaagaacgacatcgtcggcgcggcggccggctacgtcagggagctggtggccaggaaggagcagctcagcgccaggaaccaggagctcctagagaaggccgcgagccgctggaagcagcagggaggcacgaggagtggtgtcgggcggagcatggtggtgaa

SEQ ID NO: 361656 - DNA, 270 bp, Zea mays
agcacacccggttagcgtccactaatccgcgaaagcatgactgctccaccacgggtcaccggacatccggcttcctcgccccgtcccccgcacgcaggccgccccttaggctcctttgtcattcgaccttcctcttaagcacagcacaagcagctacaaggttctgacctacaagttccaatgacaatctgcagtagtgaagaaatcattgatgagtttgagttgctaacgcgtgatgctaggcgcgtgcagcaggatacactgagaaag

SEQ ID NO: 361657 - DNA, 290 bp, Zea mays
ccacaccagcaatcccctcccttctaccccgggccgggcttgtcttcttcctcccgattcgttttcttttttcctttcttccgctgctgcaaaatctcgtgctggcgcggcccgaggccagaggagagaggactcctcggatccttatccctcacgcatctcccgcttcgcctccgccacacgttccgcgcctccacagctctcgacctcgtctggaatttttttccccgacccgattttcgcatcagctccatctgcccaccgggctcgtctcctcccctggtttcttt

SEQ ID NO: 361658 - DNA, 238 bp, Zea mays
ttggtttctcgcatacaagaagaaatcgaagtagtgagaactcatgggcatttgcttgttcttgttctacgtgaaattggaaagaccttgcttcttttagcacagagagcagaatatcagatctctactggccccgaagctcgacaagttaccggcacagcgactgcagcccaactaaaaaattttgctctgtgtcttcaccttcaggaggttcacatgcgcatttctagcgtcttgt

SEQ ID NO: 361659 - DNA, 222 bp, Zea mays
tggtaagctgtggttgctgtgattaataatttcagtatggcgatttcctttcttttccagtggtgtatttggaactaatttgtgcacttctggtcttcttcagcctcaatgcaaagacaccatatcaaactggctcttcagatgcggcacagtcaagatgagctgagagcagcatgctcggattagacgatgcgtggatcagctgagctcagtagtacacac

SEQ ID NO: 361660 - DNA, 231 bp, Zea mays
  unsure (1)..(231): unsure at all n locations
cggctcgagcgcangtcatgaagatgcagagggagcacctcggcgcgttcgagtgatgcgtcgtgcttccttctctctgcatgcatgcgcgcgtcgcggcgtgttcctcgtcgtcggccgcttcgtggtcgtcaggcgtcacaccgtggtgtgtggttgtcgattcgtcgtattcgtatncgtatcgatcgtatcgtacgtacgtcctgtggctagaataacgtgagctgc

SEQ ID NO: 361661 - DNA, 152 bp, Zea mays
  unsure (1)..(152): unsure at all n locations
atctcctcacctatcatcgccgctgcgccgtctcctccgctcacgtcgtccgaatagatggcgtcccacattgtttggatacgctcgcantgggccccagagggagctcaagtatgcacttgagtctttctggggatggaagagcaccgctg

SEQ ID NO: 361662 - DNA, 201 bp, Zea mays
  unsure (1)..(201): unsure at all n locations
tctcaatcgagcagcgcacagccagataatctctcgctagagngccggccgtgtggctagctaaccacgagaagaagatagataatatcgctattgctttcgcgctcgcgctgcgagagncgtccccgccatgtcttcctcgccagcagacctctcctgcgtcctcacccgcggtctcatcgtctcgctgcgcactgtccg

SEQ ID NO: 361663 - DNA, 290 bp, Zea mays
  unsure (1)..(290): unsure at all n locations
ctctactaccacatggacctgctcaccaagcacggccacttcaaatgcacaggtaactcagctanactgacgggatgatgctagctgctgtcacctcgtccatctcgatctcttatcgcatatgcatgtcgtctanatttanagccctgtttaatttggtgccacttttcactagctagtanattgngggtttttcccgttagctccacgagcagcgtcgttaatcacaaagctanaacctgtttgatanagaaaacgttggatagctttttttatntcatgaatggcta

SEQ ID NO: 361664 - DNA, 213 bp, Zea mays
  unsure (1)..(213): unsure at all n locations
ctcgtcggccatggctcgtgcaccgtctgcaggctacgcgtgtanaagatatataggcgaactgcgtacgtacgtagtacgagaaatagctgggtggagtgaagagaaatgtctgctcgggcacttcgtattagaggtacatacngatctgcctgttntcactaccggcgagaacggccgtgcgcatctaggcatctcacttcgtttcttgca

SEQ ID NO: 361665 - DNA, 324 bp, Zea mays
  unsure (1)..(324): unsure at all n locations
tacaacatatattagctagcacgtactcctgcggtggatcacacgagcgcaccttctttcttgtgttctgatttgtctcttcttctttttgtctgaagacctcgaccgaattcctgtgcgacgaccatggtttattagctagcgaggacttgtatggtangcattagttttccctttcangactcgatcgtaagctgtgtttgtgagttaactgaagtgatggtagctagtacattaatatactatacgacaaatgtaatgtaatatattaacagtacatggtgatngtaattccatgaaangaagagaggtagatggttcgtg

SEQ ID NO: 361666 - DNA, 274 bp, Zea mays
  unsure (1)..(274): unsure at all n locations
actggagatatcgatgtgctagcactcctggactcaggaagttctcatacatttctcaacacaatggtagcagaccagttgacaggagtgtcaaccatgaagacgcctgtgaatgtttatgtggccaatgggtcacaaattacttgctgctcggaattggtggatgcttcatggtctattgngggagtgtcttttcgtcacacttcatgtgctgccctgtctacatatgatctcatagtanggatggattggctcgaagctcacagcactatgc

SEQ ID NO: 361667 - DNA, 222 bp, Zea mays
  unsure (1)..(222): unsure at all n locations
tgctaattacanaaacgcagctcaccacgcgcacggatcctctctcacctgcagtcgcgctgcccaacccgccaacaccgacgctgggatgaangccgtgccagccgacagcgccgcgcacccggtgccgatgccgatgccgatgccggcgtacaagatcagcattcacgtttccgcggtgggcggcacggaggcggcgctcctcgggaaggggcggtacaa

SEQ ID NO: 361668 - DNA, 286 bp, Zea mays
gcaaccctccagcaaccctcaggtgttcttggaccttcacatcaaatcatcaacatggccaaccccagagtcgaagagctccccgacgaggagatccccaaggccggtgtcgaggatgctggcagcgactctgagtctgaggcaggcgaggagcccaccattcctggtggcgctgccgttaccattcactcgcgcaacgaaaagaaagctcgtaaggctattggaaagctcggattgaagcacgttcctggtattactcgtgtcactctccgccgacctaagaaca

SEQ ID NO: 361669 - DNA, 283 bp, Zea mays
cgatgagctaaccacaagtccacaaccctagtcgaagtcagccgcccgccgcccccaagccgcagcccgccgccccaagccgcaggaacgccaccacccaccgccgactgcagcttccggctccggcgtgcgctcagctcaactgctccaagcctccagctctcgcttgccgcccagctaccacccgtcaggccccatcccctcaactgctccaagcctccagcttcctggtgttgtgctacaaggtgatgtcgatggatggtgcagtttgcttgctgtgtgc

SEQ ID NO: 361670 - DNA, 270 bp, Zea mays
gtttgagatggtaagcatacctgcttggttcaccatggatgctcgattaggatgcttgtctgtccacctggatactccacaatgcttttctgcagaaatatatgcagttgatctaaatgtttctggagcacaagaagatctcaaggtgtggcttttatttacatcctgctgaaggttcgcctgcgccaaacataactcaagggaagcttagtgctccacggatattacgaattcacaaggttgctaactatgtggttgagaaactcgttc

SEQ ID NO: 361671 - DNA, 276 bp, Zea mays
accagcatgcctaccaccgccactcagctgaccatgaccacagcaacaacatgcaacatgcaggagaatctcagtccgacagagacaacaggagctgcagtgcagcttcggcaccgccgccgccgccgtcgcggcggctccggctgttcggcgtcaacctcgactgcgggccggggccggagccggagacaccaacggcgatgtacggctacatgcaccaaagcccctacgcttacaacaactggggcagtccagcataccagcatgacgaggaga

SEQ ID NO: 361672 - DNA, 284 bp, Zea mays
tgtcatgttatcagttatgttatgtggatcctggaattgctagttcagaagagatggagcaactgaagactattgatagtatgcttgtcaggttttaggttcctggtaagtgtgaaaacttatcctgtctttcttcgtttacatgtcaactatgagaaattgtggctaactaattattggttttcataccaccttttatgaacgccttcatcagttactttgatctaactcaatgctgtatttgttctgtattaccttgcatgtttctccgaatttcttggttg

SEQ ID NO: 361673 - DNA, 287 bp, Zea mays
tattgaccatttcccaaagaaacaaatgaatttgagtacaagaccaattacttttgtcatagctgtatacatcagtttttgtcataggtgctgtcgagtttttgttttcattgctttatccagaagtttctaatggatacaaagtggttatgcttaataagcgaaatggttcatagttacactctagagtagcacctccagtgcctagttgactccctgtgggagtgagtttcagggatggttaagaaaactccctcgctagcaacccataaaatagtggcagggcg

SEQ ID NO: 361674 - DNA, 187 bp, Zea mays
catgcgtccaccgacgacgaagaggaggaagacgacgacgacgaagacgcgtacgaggtggagcgggagctgcgcttcggccagttcagctttgccggcggcgcctactcgcatgagcacccgctgttcctggccaggggccgcggcatcgaccgcactcgctcgggcctcctcagcaccgacggcg

SEQ ID NO: 361675 - DNA, 273 bp, Zea mays
ctggagagcaagaggctgaccgtcgtcggagagttagccccacggacgtcctggagtgcgtgtgtaaggtgacgaagcatgcggagatcttgcaggctccctagccatgcatcggctttccagtccagtccagttatgatgatgatgatgatgcagctgtggtggatcagtggatgtgtgcagtacatattgatgtggaggttaatttggttgcacaaaaaatatttattgtatgtgattctccttgcaagatcaggaataaatcctagatct

SEQ ID NO: 361676 - DNA, 268 bp, Zea mays
atagagtttcatcgcctcgctcgcgtcgccaactacatccgctcgaaccgcgtccttacatgccatgcccaccatcctcgctcgctccaaccatgtatctacatgtcgcctccgacatccacgcccatgcttcgtgtagtgcttgacgcgcccgctccaaccgcgtctatgcatgccgtgactgccatcctcgccacccgcatgcctcatctgcatcctccgtttatcgtacttatccgcgatgatatgctagagcgtcacaaggcgg

SEQ ID NO: 361677 - DNA, 269 bp, Zea mays
ccatctcggtcgctgctgttgctgaggtcggcggcgcagatcgtcgcaacatgagcatggaggggctcatcccgttcgtttgcggcgcgatcagcaagcggagggcggcgaaaagggctgtggactacgagcgcctctcctccgccggcgctccgccaacgcggggatggggacacgagcgcctccccggcggcgcctacgaccatcctcggagccagagctgccggttcgccgcgcgctcgtcgcccgacgagcgcggtttctcccgt

SEQ ID NO: 361678 - DNA, 268 bp, Zea mays
tgacctcaccctctgtgtgttggcgtgtttggcgcactaccccgcccaaggcggacgtctggaggaggttccgccggaaaaccaaggtctccgacgggccggagccggccgtcgggcccaggagccccaccgtctacgactggttcgttctcgcctcaaagcttctcttcttgtactctcgtgccacgccacctcgaatcctcgatgcacaccatgtccatagctaagctagcaggtcacgatttatgttcctgatacagcttctgtc

SEQ ID NO: 361679 - DNA, 268 bp, Zea mays
  unsure (1)..(268): unsure at all n locations
gttggggtcacaggagcaatcgtttgcagattggtggtgaaaggcttgcaaatatctcccaaaagaaagaaaaaaggaagggcatggattcaatgattatgttgcgaatatgtggagtgttctgcatgctctcgaagatgaacaacatctctggtgtcttgctgtaagagttttgttcttgtccggagtgcaagcacagcccctcacggctctgtccggagcgagggtanagtttgtacgggaggccacttttccggtgcttagtatc

SEQ ID NO: 361680 - DNA, 263 bp, Zea mays
tggtaaagcacggggattagtgaaggactcgattgaagccgccgggtataaaagccgcgaggctagcaaaggcgacctcgcgaggtcaaactacctgggccgccaccgccacagccccgccccgcgcccgcctcccgagctgagcgagcgactcagcgagcgcgcaacagaaccagccgccgcggcgcgccatggcgccgttccagatgcgcttcgggctgcagatctctcccgcgcgctccgacgacgacgaggacgacgac

SEQ ID NO: 361681 - DNA, 261 bp, Zea mays
cctaataagaggcgccatggatctccaggagtcccttgcgatgcttgagaggttccaagctgcgtcactgagcatgagactactgtccagcaagaagataagaccggaaactggtgaacagtctcctgcgatagacaccatagtccgtgaagttctcctgatgccatcgaacgccaagcaagtgcaggtcaatggattaaaaccacagctaagcgattctaccagtgagttggaaaatattgtcaaggatagtttttacaa

SEQ ID NO: 361682 - DNA, 227 bp, Zea mays
cagaaatgggaggctccgacgaccacgcccgcagatagccgaccctgccatggacggtgcgcgtccagcaggctgtgctcgatctggcgcactgccgggacttgagcgtccggcgcctccacatctcctgcggcgatcacaagttaggcactacgttccttccgattgcttcgtgggcatgccctgtggaattcaccatcgacgtcgcccgcggcatgagggcgtgc

SEQ ID NO: 361683 - DNA, 264 bp, Zea mays
tcgccgttgcttcctagctgtacctccgtccggtcggtcgaagaagacgccgacgatgaaggtgtcggtgctggcgctgtggtcggcggctgcggcgctgttgctggtggcgcaggcgccgtcggtcgctgaggcctccctccacggtggcgcgggcctcaagctggggtactacaagaagacctgctcgggcgtcgagaacgtggtcaagtaccacgtcgtcaaggccatcaaggcctaccgcggcgccggcgccgcgctcgt

SEQ ID NO: 361684 - DNA, 280 bp, Zea mays
tcggctcgagcgatcggccgcactgaaatgatcagagtgattctcctcctcctcgtccgcgcgctccgtgttcattgctccagtctctcacgcctctcgcgccagcagctccaccaccaccaacgctaacgacgctcagggaaagggtgtctaggttgcgtacaggcgaaaggcacgcgccgccgctgccgcgcgatcctcttcgtcgccatcgtcgctcagatggatccgtcgtcggagccgctgtacgcgcaggtcgagccgtacgacttcgggttcc

SEQ ID NO: 361685 - DNA, 177 bp, Zea mays
taacagctttgcctagcttactccttaccgactaacaaaactgatcatggatccgcacaggccatagctagcttaactaactcgtccagtccggctgctgctgcactacggactcgttctcacgggcccgtcggctcgcagccatgcagacgcatcccgcctggtcatgagtggcgg

SEQ ID NO: 361686 - DNA, 276 bp, Zea mays
aaagttgtgagcggaaccaaccttaaatcgataaatccacttcaaaagccgaccctgaactttcggatccagactggagtcgtctacttggcatacaaaatggccgaatcgacgccgttgctgggcaagagcagcaacactgcattgtgcgccttcgcattcgcaaaggacacgcccaatggcaagcggccccaagccatcgcccaccgcggctacaaagcaaagtatccggaaaacaccatgagtgcattcagagccgctgtggaagtaggtgcc

SEQ ID NO: 361687 - DNA, 280 bp, Zea mays
cagcgacaggcacaggcagcaaggctggtttccttcctcgtcgaacgtctgccgctgctcgcgatggccggacgcggaggaggtagcaagagtagcctgtacgcggcgctgggcgtggccagcgactgctccgacgccgagctgcgcacgcctaccgcaagctcgccatggtcggtgacggtgacctcgccacccctgattctgttactgactgcttcccctgtccgccggttgctctgtttcggtcgtaaacccgacgacccggctgctctgctgagtg

SEQ ID NO: 361688 - DNA, 269 bp, Zea mays
tggagtcggagcgagcgaggatgggcggcggcaacggtgaaaccacccagctgggggagccactgctggcgaagaaggcgaaggcgtaccgccctaggtgccccggctgccgggtggaccgcctcaacgcggagcaggagggggtcttccctctcaaggacctcttcctcatctggctcgtcaccatcacctgcagtaagctaccgcccgccactgctagttccagtacccaaacccaacccgtagctcccctcccccccttcgtacta

SEQ ID NO: 361689 - DNA, 265 bp, Zea mays
tcataaacaagtttattatgtgtttttttaaaccaacaaaatgaaatctttgtcttttattttactgtctttacttttaatagcaccaatttggagtcagcgatctttaccttcaaaatgtaaatgtgtacctttggccgtttgctcccgatcgccgaattttcagccacgctctacattcaataaaaatcaatgtccacgccatcaagtttgctgtcctttcccgcaaatagttgattcagttgaggaagatgagtctgaagtt

SEQ ID NO: 361690 - DNA, 235 bp, Zea mays
cggctccgcaacaccaccagcaccacagcgatcgccgcagccacgacgagcacgaccgcagaggcaccgctcaaccgggctagggaagctacggccagcgagcgccacgcgacaactacgcccgcgagcccatcgaggccgatgcgtagcgtggacgtccgccccagtcgacgtaccgtgccgacgagcacgcctaagcccacagcggccaaggctacgcgcacccggacgcata

SEQ ID NO: 361691 - DNA, 146 bp, Zea mays
agtaccaggagcgtcgcctcactctcctcgtcgcatctccgctcctcatcgtcgcagcgcgggcagcggcaatggcgatggcctccacctatgcgccgtgtcgaggcgcgcgggcgcttcgcctatgtagatgcagggtccgcggt

SEQ ID NO: 361692 - DNA, 262 bp, Zea mays
agaggatcagccgcaagcatctgagcctccacgcctctactgatggctccattgaagtagtagtggaaggtccaaaccctataattgtgcgatcgaacggacagacgaggaaggtttgtgctaaagagacagccaagattgctcatggtgatgtcctagaactgattcctggtgattatttcgtgaagtacgtggacatgggtgatgaacatgtaccaatgcatttgagcgacttaatgaagggtaagaggtatagtgagga

SEQ ID NO: 361693 - DNA, 165 bp, Zea mays
ctgctacaagccgtgagcgatgggaacactttccctttccctccatgtatcaacaggttcacgcccaaccctagattgggatgctggccttcttagttctccataatattatttcatttgtacttcctgtatattgtaaaccttgagatggctgtgttcaaatag

SEQ ID NO: 361694 - DNA, 256 bp, Zea mays
cactattctctcgaatctcgttttcactgagttacaacacgttatcagcactgctcgcgagaaagcgagaacagagagaagttgttgttgtagaaagaagaagaactatcgtagacgtcggcggacggacggagattcttccatgcggaacactggcatgcactggacttcatgcgtctgtcctggcagtgcttgtgcgccgcccctgcgtgcccaccgtgctcggacgccttgtcgtgctcgtgccctggctggc

SEQ ID NO: 361695 - DNA, 290 bp, Zea mays
atggacggcttttcagggacattctgtgccgaggccagcgcgcacgagattggccgcctcgtacgtcaacttctacatcgccaatggtgggatcatagcgccttccttcggcgacaggtgggacgaggaggcgtatgcggttctccagaaggcattccccgatcacgaggttgtatatctttgttttttgttccacctccgaactttaaggctgctcacaatcgcattgtgtgcggttgaacacttgttagaggttagaagatggtgtgatgaatgctgtggttggcacg

SEQ ID NO: 361696 - DNA, 293 bp, Zea mays
  unsure (1)..(293): unsure at all n locations
cgtacgcgccccctgccaccgcatacccgccggcagccatcgccgacgcgtacccacctccatacggcgcctacccgcccgccggcgcaaggccgacgctgcttacccgccctcatccggctacccacccgcggcaggcaagccagccaaggggggcgaaccggtgacggcctacccttcggccggtcccagcacggcggcgccctacgctgctcctccgccgcagtacggcggctacgggtacccgccgcagcaggccgccgngtagcgctacccgcccccgcagcaggccg

SEQ ID NO: 361697 - DNA, 258 bp, Zea mays
tgtttgaggagtcctgatccggactagctaagggctcctgctgtgcacgacctgatactacggattttgcgccttctagaggcatgattcctaaatcggagtcttactgtttaaaccagagtttgctttcgttttgaactgtgggtgaatttccattcccgcagaacgtgaagtcggtttaggccaggcctgtttgatccgtgttcatatatgtatatatgttatatgtatggaggatacagaacgctgttgcttgcg

SEQ ID NO: 361698 - DNA, 294 bp, Zea mays
cggctcgaggcgacgcgtacgtgtccgccatgctgcggctggcctcctcacccgccgtcgggtaaggcgccggcgcgcacgtctgcgccacggcgacgcacggcgcggcggcggcggcggccttcgcgcggccggcgcagctcaaggagtacgacgagaaggtgctggtggagatctacaggtccatactcgcgcgcgtgcggcctctcgccggcgcgcctgccgccgccacgctgcggctaccgacggctgtttgagcttgagcggcaggagagacgtgtgttcttcttgctt

SEQ ID NO: 361699 - DNA, 284 bp, Zea mays
gcaccctccccgcagcagagacagtggacgtctccaccagaccactcgttgtcgttgaagcggtcgctccgcaccctccgcgaccccaccatgcccggctccggctccccctttctccggcaccgccaaccgcgtataaatatctgccgagaacgcgccatggcctcaacctccgctccgccgcccctcttcattttttactggtaccaccgccgccggccccggtctctccagtctccacacacgtatccgcagaagcggaggagctgcactgccgctcagag

SEQ ID NO: 361700 - DNA, 289 bp, Zea mays
ccttcgtggggtgcaagcgcaaccgggaagcgggagcaccgcagcttccagccgctcaagacggccgtgtgcgtcaagaaccactaccggcgcagcactgcgacaagagctacacctgccgccgctgcaacgtcaagcgcttctccgtgctcgccgacctgcgcacgcacgagaagcactgcggacgcgaccgctgggtctgctcctgcggcacctccttctcgcggaaggacaagctcttcgcccacgtcgccgccttcgacggccacgcgcccgcgctgccgcccga

SEQ ID NO: 361701 - DNA, 278 bp, Zea mays
ggataaggctctcgtgccgtgtttagcaacgagaatacaagagcgagattcctgccctcgatcgccgatgggtggttggtctccagtggatttagcagcgcgtttcgtcttgggccctgggtggtccggctgccgacctggtccgggcacttgtgtgctctggaactggaaggcgaatagatagataaggctggagtagggtgtaactgtaagtcacctcgtagctgaatatggttctcagttgtaacatgtatctaccggttcgttttggtcgactc

SEQ ID NO: 361702 - DNA, 280 bp, Zea mays
ctccatcgcagtccccattactgcactgcgctctgtcgcctcctcgctgctccgatccagcaagagcaggaagtacagctccatccgcgcgcaggtactggtccgatccctcgactctctgcccctctcgcccgccgattactttccagtccgttcgcgggttctgcggggtgcccctcagcagtctcagggtctccgcgctcgatccggtagggatcaggtatcagggtcgtcgtcgttcatgatctggtgcgcccccacgcatggaatctggggtttg

SEQ ID NO: 361703 - DNA, 280 bp, Zea mays
tgggcattggcgccgtgagaacatgtgtgattttgtcaatgcgtttgactttggcaaccctgattacagcattccacaggttcctactgctgagacacctcacactgactccaacggcaactttgatggtaccagtctctgcgaatcaacctactcctcaaccagaccgccagtgccatacggcaagcagagccttgaggatgccttgtactttgaagatggctacaagcaagtgatcggttacttaaccgagggtcgttatctcacgtttgaatacaac

SEQ ID NO: 361704 - DNA, 283 bp, Zea mays
gtgcgatgttccacgccacgctgcgccctgctcgcccgcctagcgctatatagcccgtgcccgtgtccgtgtccgtgtcgtgcagcggattgcggagtggcattgggttggcagcacgcccctgcacacggtgacacgggccacggcgctgcgcggcgcggcacggggagcgagcgccgagcgagagcaagcaaccgctgtccgccgggccggccactgcgctgccccctgcttcgcgccttcgccggtgcgctcacgcctcacgcaggtgcatgcatcgacc

SEQ ID NO: 361705 - DNA, 278 bp, Zea mays
cttatccaacatccatgctccccacatgcccaacttcatcatcacttattatcatggtccgacttcccaatatgttctttatccgtaccttgatctatgcgacttcatcgattggtcttctgtccgagccccgtctagcgtccgtccaacacatcacccgaccctgattcgaacttcgtccccaaaatgagtcaaattctctgagtcgatgtgcaagtttttatccgttcaatgcttttaagatcggtcgaatggcttagaatgtgttcttcaaaatt

SEQ ID NO: 361706 - DNA, 258 bp, Zea mays
aacgcgcacaccccacttggcgctccacctcttcgctctccgacgacagccagcgagcgtgcgacgggcgatcgatcggggcaggcattcgaattccgacgacggccatggagcataggagcctgctggtgtcggccctgggcgtcggcgtcggcgttgggctggggctcgcgtcggccaagtgggcagtacagccggcgccgaacggtggcgacggtctcggagccggcgccgcggagtttgaggccgagctgcggt

SEQ ID NO: 361707 - DNA, 274 bp, Zea mays
accagatctccaccacctcaccaggctgcagtcgagtctatcgccgcacgcgcacgggcttcgccaccagctcgaccacggcgcgcggccgaggatcgccggcggcctcatcgtcggccacccggcagctcgggacgacatctcgtgcttgctcaccattggcaccgccccgcacaagaaaccatcagacgtcaagtcggccgcggcggcgccggcgccgcagctgatgctgtttgggaaaccgattctcaccgagcagcagatatctctaggc

SEQ ID NO: 361708 - DNA, 274 bp, Zea mays
tcggactactgcaagctaggcctacagcaatggcggcctcttcgtcgatccaacgatgcgagatacgaggaatgttggggagccccgagcgcaccgtggtgtggactgaacccaaggcccaagccggcgaggaatgtcgccgtggtttactacctgctgccaccgcggcggccacctcgaccacccgcacttcctagagctccttcgacctgggggactgcgatagtaagctgatcgtcgtggcccaacaccaacagtctgcagccacgcgggt

SEQ ID NO: 361709 - DNA, 264 bp, Zea mays
attcaactcctttcaatcgatttcattctcttctcaaatccatctcaacttttgatcgaggtcataattcagaattcctcaatgttaaaactatcgcttcaaaatatttaccaatattttttagtatgtttcacgcagaagtatcaacaccccgcacgaaccatatcttttgctcgtcaagcgtcttttcatccaaccctcaaaatcttctcccttcttcagatcctatttttgtccccttagaagagttaatcgactacactt

SEQ ID NO: 361710 - DNA, 263 bp, Zea mays
cgcggcattctgggagtccgagagcgacagcagcaggagcgacgaccaccgccaccaccacgacgtcgacgtcgacgcggtgtcggcacagagcaccgccgacaggatcggcgcgttggcctgccctgcttcggcgctgccggactggtgggactccgacgagggctggatcgacgtgctctccgcactagccgaagcatcgtccgacgcgacggtggacgagggcccttgcgtcggcgacggcggtgccggaacagaggaag

SEQ ID NO: 361711 - DNA, 262 bp, Zea mays
cgacagacaaccgcctgagcacgccccgccgacctcgtcgcgcgacgcacgctctgcgtctccaggtgcacccgtacaccttcaggaacgagaaccagtacctgcacttcgacttccggcaggacccctacgccgagtacgcgtactggctcgacgaggtcgccgtcgacgggctgttcaccgatttcactggtagtctgcacaagtaccaggagtggactaggccgtaccggaaggagcaggagaagacgagcccggaggc

SEQ ID NO: 361712 - DNA, 298 bp, Zea mays
tgagaaaaaaagttgtatttttgaggttaagtatatgtatgtgggagaaataagaaggggattttagcctcattttcccctagggcgcgtggtccccactcagcgctgtcatcgtccccatgcttgctcgctcgctgcacaagacggaccagtgactggacgacctccgacatgggcggcctgaattctggctcaggttgcgcaaccggaaaccgaccaatctgcaacaccgcacaaaatggctggagatgggaacagcaactaaacccgacaacagcttacctggacgcagagagtg

SEQ ID NO: 361713 - DNA, 295 bp, Zea mays
gtacgtattgcacgctcgctcgcgcgtacgtgtacgtacgtacgtacgtgcgcgaataagctagctagccctaggatcggaaacatatgtatgcatatccattgcatggccggatgtacatcaggagctgctgctggtgtatgtccgccgccgccgtccaaactccaaagtgagctgagatcgatcgatcgagctcgctcgctccaggtgtgcagtacgtacgtacgtaagcgcctgtgtatgtgtaagcagacagcgtggtagtagctctagctagtagaacatacttacacac

SEQ ID NO: 361714 - DNA, 278 bp, Zea mays
cttccatcttctagccgccgccgccgccgccgctgcccaaaaccctacctaccctcttcttccccctcactctcctttcatctccattctaatggcggcccaacccgtccggcgaactgctagtgcttgtatctactatcttcatcaggtacttcgccatcctactgaagtattccccgccgccgctgccatggccaccctcaaccctttcgaactcctcggcgccgacgacaacgacgacccgacgcagctgattgcggcggcggcggctgctgctc

SEQ ID NO: 361715 - DNA, 283 bp, Zea mays
aagaaggaggagaagaagcccgaccccgtcgccgaagctgcggcggcgtactacaaccagtactactaccactacccaccgccggccgccgtcgtttacgacccctacccacggccgggcaacacctgctccataatgtagactcagcctgtggacatattatggagcaggtgttgcccggccgccgtcgtttacgacccctacccacggccgggcaacacctgctccataatgtagactcagcctgtggacatatgcaagttaagttttgtgtgtagcggtg

SEQ ID NO: 361716 - DNA, 286 bp, Zea mays
agcagagatgatgttaaggaacgattggatgattgcaggaagctgcaaacagaagaggtagctacaggtttgtgcatgccttctgaaggagtgattcaagaaatctgcattccattgacaaacatatatgaaatatttggggactttgaggctattacctgtgaaaaaataggaacatctgtgctgaggtttgtaagtcttcattctatactttgctattaacgcaataggaggttgaaacagaaattgatttagtagttcggatacagacatgcagttcagtgag

SEQ ID NO: 361717 - DNA, 212 bp, Zea mays
gccatctacagcaaggtccgtaatcttttcgacgatgctattgacgcctttggcaaattgagctccaccgttgcacgtgtctggggtaatatcctcgatggtgttgttgtttggggacttaccaagctcatgggcgaatctttcaaacttcacgcccaggccttggttggctacgaagattctttgcaggttgccaaagaccagccattgca

SEQ ID NO: 361718 - DNA, 221 bp, Zea mays
tccctcgcgcaccaaaaaataaaccagaacgacgcctccgcttcgtctcctccctcgatcgctccccatcgccgccgcttctctcgccaccagcccaccacactattaattctgcccctccctccgcgtcctcttccacgtcgacgactcgcatcccacgtggcagagccggtcctgtctgcgcctgctcccgagacacgcggcgtcgagcatatagatag

SEQ ID NO: 361719 - DNA, 270 bp, Zea mays
agagacggagaaagcttatcaggagattgataacttgaaaaagaactacgaccaggaaatcctcgctctaaagcagcgtctcgagagccctctccgtgcaaggacgatatggtacagccacaagaaccgaacaatcttgagcctcctatgtatgacacagctggtagccacagtaggcagaattggaaggagttcagtaccttgcaacaaggaggatcatttgaggtctccaagagcacagacctcaactcgtggttttacggatacgac

SEQ ID NO: 361720 - DNA, 241 bp, Zea mays
agtctcgctgtccggtggccgccgcctcgccgccgccctgtgcaccccacgcaaaccgccccaacgtgtcgtggtggtgcgacccgcaagccggtgctgagcccacctcggcgtgcgccgccgttgagggcgccggtggtgcgcacgtgcgtcccaggtgcaagcgccgcaaggtcgccgtcgttgtcgggtgctgcggcgcggggtgtcagggcatgcacaacagtccgggcgcgcgcac

SEQ ID NO: 361721 - DNA, 274 bp, Zea mays
  unsure (1)..(274): unsure at all n locations
aatcccgcgcctacgactacgcagctcgcaggttcaatggcgccaacgccaagctcgactttccgacgactactgctactgctacgacgacgacgacgtcgctgtcgtcgccccaccagctgctgcggtcatccgcggagtcggagacgncgtgggaggagttccccgatctcgggcagtacatgcacatactccagagcagcagctacgccgacgttcgggccgtcgcggcagggttgccgctgatgaaccgcctgccgccagttgacggtcg

SEQ ID NO: 361722 - DNA, 115 bp, Zea mays
tggcgtacacgcagatgaacaccaccttcatccagcaacgcagcgccatgaacgtgtccgtcgtgtcggtgcaggtgccaccggcgtcgatgggctcgttcgaggtggtctgcgt

SEQ ID NO: 361723 - DNA, 263 bp, Zea mays
cttgagaacaaccttctcaacggaagcatacgtgcagagatcgtatcgctcggtagcatgcagcatctggtgctcggtggaaacaagctcagcggggagatcccagacgcgcttcacctcaatgcagggcctcctagagctgcagctcggcggcaactccctggacggagccgtgccatggagcctaggcaagctccagttcatctcccaggtcatgaacatgagcagcaacatgctgagcggcacgatcccaagcagcctcg

SEQ ID NO: 361724 - DNA, 266 bp, Zea mays
aaacccaccggtgcttgtctattctacctttcgcgtgctccgccgtcacgactcagattattgataccccacgaagtgagacatgaccgtgcagattccggcgacatcacgcgcactgagcgtccttctccttctacgtggtgccgagggtctactgcgcacctactccaccggcgaccggcgccggcgggtgatccgcgacgcaaggcaacaggaccacgaccaagcgttcctccgcaccctcaacttcggcgctgactccgaga

SEQ ID NO: 361725 - DNA, 258 bp, Zea mays
aacgcaccccaccaactcatacccataccagaggctctgtgatattacttctccgcggtacatcggcagatcgagcgaacgaggcacacggagctagctatacacgagcacacgggtatacaagcaagatgtcggacggcacggacacctgcatcgacatcatcctcgccatcatcctgcagccgctcggggtcttgttcaagttcggcagccgggttgagatctggatgtgccttatcctcgcgttcgtcggctacc

SEQ ID NO: 361726 - DNA, 185 bp, Zea mays
gtcacgcacgcacatgcatagcgtagtagcaagctcggtcggtcttcgtagcttctgctgtctctctctcttcctgtctccggtcccatccacagcaggggtgagctgtgaagaccgagctccagcttctcccagcgtgtgtgtgaggtgagctgttgcttgcagcgaggtgcaccgtggccatg

SEQ ID NO: 361727 - DNA, 128 bp, Zea mays
aaaaaggctaatctaaatggagccgaagaactcccggttagacagcgcggtcaccagcccgtacgccactgcgccgtccagcccgcgcggctggcgccttgtagactccgagggatcggcgggtagtc

SEQ ID NO: 361728 - DNA, 163 bp, Zea mays
gcacgcgagcgtacgtacgctcttcattccgctcgtgacacaagctaacgaatgcagaggatggttcagataaacgaaggagagatgccttactgaggaggttatcggcgccaaggaccccactgaatgatgcacaaaaacgtgcacagatcctgcgtgcata

SEQ ID NO: 361729 - DNA, 144 bp, Zea mays
tacgctattaatttcgatcgagatgatttccactattcagctgaagatctccgggttatacatcgtggtcatcagctcgtacgcgactgcggcttctagcgcgcgcaggatgttgcttgtcaactcatagggatcggagggcag

SEQ ID NO: 361730 - DNA, 278 bp, Zea mays
cctagctgcgtgctgctctggcatcggtcggtggataagcgcagcaggcaagcaggcaggagactaggagagctcagcactgcacgcacgctcccctccccttactggccaaatcgatcgtccccttcaggttccaggctccggagcttgctttacttcagggacaacaatgacctcagggacaacaatgacctccaagacgagcggcagcataaccaccaacctgagcaccacggggaagctctcctccgtgggcagcagcttcatggcgtctgccg

SEQ ID NO: 361731 - DNA, 278 bp, Zea mays
tgcagaaggcaacacactagcttgataggaaagttggttggcaagcataggtagtgtaatcacttcaccaatgatatcagtactcttcttgcctttaactcgtgcatctttaaatttagcctcttcaagtctggttctcatggcaggtggactctggtgccttcatatatctatatatatattttaagttgacgatcttcgtgatgctgaaactgatgaagacctccgatgaaaaaagagacatgctgcacatgcacgagggtacttgcagatcgatg

SEQ ID NO: 361732 - DNA, 274 bp, Zea mays
ctcggaatatttgacttgtcaaagttatcagagcatttatagttctaaaatatctccccaaccaggactcaacagcagcacttctggggaagatgtaactctgtatgcttctgctcaaagtcaaagcctgcatacggaaagcggtcgagattcgtccactagcatttgtggatctgtggcttcagacactttggtggaagattacgtttcatctgaactggaaacaactaataattttgatggatcaattaaagattcacaaagatctagtgac

SEQ ID NO: 361733 - DNA, 270 bp, Zea mays
agctcctcaacctcgtcgtcatggcggttgggctggccatggtgggctacggcgccttcctgctcgtgacctggcttcaggtcgcgccactcccgccgccttcgtcgtcgccggacgccgtgccacccagcggggagctcgtgcagctcgggaggccgctgctgctttttgttgatgcatccctgtcggatgggaccgcggagaggctctccagtgcctggtttatttttgcgtttattggtgtcggtgctatactctttgtcacatcga

SEQ ID NO: 361734 - DNA, 267 bp, Zea mays
gcagagagccttgttttgtgttggttcagtgtgctgctggtgccaagattttggtcagcagaaatatctagaagttggcgacacagatgagcagaatgattatcttctcacacgagagggccgtgcacgcctcggcgtacgacaagaacctggaggaccaggtgcgcccggcgttcgtgccggacgatgtgatcggcagcgccgggagcccggacaagtactggagcccccaccccaagaccggcgtgttcggcccggcggcggtgg

SEQ ID NO: 361735 - DNA, 290 bp, Zea mays
cccgctcgagcttccatcgagccttacgagtggagaagaacacaaaccaatcccagtggccacacgagatagtgcacacacgcgacacgcgccctatcgttgatagccgacacgccggcgccgtgggactcgctagcgcgccgttggcatcccgctggcctgcctcagcgctccggtgcagtgttctgcccctggctcaaccgacgctttctcttggctgctcaatctcgcgaactcgttcagtttcctctcgtagtattccgttcagtttctaggatgtgagagcagct

SEQ ID NO: 361736 - DNA, 220 bp, Zea mays
tggaggccgatgcactgactctgaagctgaacgaggccattcctgaagagttcaagagcctcattgaggtactcaacaggaatgaagactatggtcgcgtattggtagccaagagggacatccaaccaggcgaagtcgttctaattgagaagcctctcctccacatcaccacagacctggaacaacccaaccttgtacctgttgttattgcctttcagaa

SEQ ID NO: 361737 - DNA, 286 bp, Zea mays
ggaaacatggcaggaacaccgtgcaaaaagatgaaaagatggccgaagtgctctatgcgagtgcccacctgattcgatggccctattcaacggcgccctgtcagcaagccgctgcccatcaacgtcaagtaaagaacgccaaggagaagaggagggaggggaggaaatacgtggaaaaaaaaataaaacctgtacacgtgtatgtccagatcgcgtgccgtcgatcgttcttcgttgttgatttttggttgtattgatcgatccgtatgtgtgcgtgcgtgtgtgg

SEQ ID NO: 361738 - DNA, 279 bp, Zea mays
tgccacgggggcgtccgccacctgcttgccgtgcagctggaacagacgctgcagcgtgcaccggccctctcggtctccggaggacggcgcctgcaggctgctgctggcgtggcggcgaacgcgtccacggagtcgatggcgaactcgacgtcatcgacgtgcggggtcaggtgaaggcccgcgtccccgagcagggcgcggactggtcgacggtgccatggtggaggacggatccggcggctagcaggaggacggagtcgaacatcttgacgatgcgcg

SEQ ID NO: 361739 - DNA, 157 bp, Zea mays
tctagctaccattcacaacacaagtaatatgtaccaccatcatttccatggcgaggtggacatcctccgcttcctgtcccctccgacgaccgcttccttcgctgccgcgcaccaccagcacatgaacatgcccttgcagcctccggcatactactta

SEQ ID NO: 361740 - DNA, 246 bp, Zea mays
aacggttggctaaaatagcggacggtactcgtggaccctattgcccacggccaccagaccaccacgacgctctcagcttcaccttctcttcagtcttgtctgctagactgtcgacagattccgctccaacgcgcacctgcagtcccgcacgccctcgcccaccgtcgcctttcaaaaagctggaggattctcgagagggagaagcgcgcctggcagctccgttccatccgcccccacgaatgtccg

SEQ ID NO: 361741 - DNA, 270 bp, Zea mays
gaatgggagaattgtcagcacaaggaatagctgcagaattgatgtttgcgcaccaccggcagcgtctttaaaatgccaccgtgcaagttgttcttggctctcacaagagcctttcgctgcatcaacacctgccgactgctgcaggcaagtaaaggtggatttgatggaacagcttgcaaggcatttcataaggccccttactaaggatcaaatggaggcaattatggagttggcaattcagggaaaggagaaggaagggaccaagaagaa

SEQ ID NO: 361742 - DNA, 255 bp, Zea mays
ggacggcacctacctcccccacttcgccgccgggggtggagtcgggccggagcagccgctagctcgcctctgttaccccaaaaaagacaaaaaaaaataaagagagagtaccaagcaagccgccggcagctcgggcagccatggggcacggcgtcagctgcgctcgcacgggcgacgagcacaactacttccgcgcggcgcaggtcggggacctcgacgccctggacgcgctcctcgccgccgacccctccctcg

SEQ ID NO: 361743 - DNA, 283 bp, Zea mays
tgtgaaaacatggtcagaacccattcagagtcctcggaggactttgagttcatcgagactcctcctgcgcccgcatctcccgcgcctgaggactgtggagtgaggacaacatcgtatcctgcgcatcaagaatgctccccttccagcagactctgctggtagtgacagcttctccaatgtcctcttgatcatcctcctgatcggtgttcccttctacattgctcgccaattccacggcggcttctacaccactattttctttgccatcttcacaacgatccct

SEQ ID NO: 361744 - DNA, 269 bp, Zea mays
tgtcgccgccgcgttccgcccgcccagcgacaccatcctcatcgacgaggcggacgggcccacggggagcgccaacgacctctacgagtcggcgcactctacctcagcgcgcgctgcctcgccatcgcgcccgccgtgcgcctgcacaagccgcgccagtcgccgcgccccgtggcgtcgctcccggactcgcacaccaccgacgacaccttccgcggggtccgcgtcaagtggacctccaccacgcgcaccgtcgatcgcagcggcag

SEQ ID NO: 361745 - DNA, 276 bp, Zea mays
cgtgtataaagttctagggctcgtgttcttacaacacacacacacacaaaaaaaaagagacgtgcggacagtgaggactgaggacatgtgggcagggatcaagtgggccggaggaagcgggcgagaaatggggtcgagggacaggcacgttccggtcgtgccgtgtggagattcctagccgcggcggcaaccggtcaccagtgtgctctcgttgtccttggtctctactactcctgctacaaatggtgacgcctttattttatcgtgtggagtgga

SEQ ID NO: 361746 - DNA, 295 bp, Zea mays
ttgattctgtctgaggaaacagaaagggctggtctcttgtgcacctcagcatctcaggatttgcaactgtcaatgataacacaggaggatgttccacttgaaagaactgatctgtcgggcatgcctgtgacacaaagtacaactgttctgcagagtgtggaaccttcatgtgatccacatgcagaagaggcaggtacttggggtatgttgtcagctccagatttgcagtccagaatgcagtcatcatctcaattgcaggatcaaattgcggaagcagaaggagcaggcatttttg

SEQ ID NO: 361747 - DNA, 224 bp, Zea mays
tgaggaggccatggagctgccgccggggttccgcttccaccccacagacgaggagctcatcacgcactacctcgcctccagcagtagcagcctcgtcgcgtcgtcggtcagagctggcgcgtcgtcaaagcaggacgagtgggtgctgtgcaggggtgtcaagaagagcatcgagccgccatccgtgctcggcagcaagagggtctcgtcggttgcgtgcatgg

SEQ ID NO: 361748 - DNA, 269 bp, Zea mays
ctggtttcgacttgacgccccatctcgcatctcttgatgcgaggagccaccgtaccggatcggtggccctcgcttcgatttccatttcccaggcgcgcgcgatcagcacacggtccgcccgaagcaaatcgaagcgatgtagaggttcttggcccatttctcctcaggcatttttgcaaggtcagcttggaacggtgacagaagatgcaaatggcagcgagatctgaagcattggcaaggtagatgtttcatatgacacatggtttgca

SEQ ID NO: 361749 - DNA, 279 bp, Zea mays
tactcgaaccatcgaatacctacaaattttctttctaatctgtccaatcagccatcaatctagtttattactgtggaagatgttagttacctaagttgtgaatttgcttcatgacatcttagtatctgatttgaaaatcctccgtagcttctgccatgtcattgctagttatatgttcaaactcaatagccaacaacagaagtgcataaccttatgtatcgtgcattgatggattgtacaagtgatgtgtatggatcatggatgtaagaatctgatacc

SEQ ID NO: 361750 - DNA, 279 bp, Zea mays
  unsure (1)..(279): unsure at all n locations
aactaaacaacagtgacctccatccaaaccttcaaacgaacatcctatttaccatgttcgatcatcgatccaagcaagctctctcatccagctaactaatggaagtagctagcaaacgtacgtattcttcttcaccatctgtttcttggggaaattanaccccagtacgcgtacgtcacaatcgcgcgcaatggagaaggagaaggagaagtccagggccaggccgtcgaggggccactggcggcccggcgaggacgacaagctgcggcaactcgtcga

SEQ ID NO: 361751 - DNA, 269 bp, Zea mays
caatgatgcctcgaaatgaagctggttaatgattttgtctgtccttctggagcttcaccgaagcattgcagtgcattccacacaaatgcagtgttccactggacaaccatgacataaccaaaaatcaaacaagcgattgcaagcatatagccatacaggtacagcctgctgttgcgagtccagtcgggcctggaaccctggactgaattggtcagccagcctgtagatagatagatattcgtatggctgttcgcgtcggctctgttgtt

SEQ ID NO: 361752 - DNA, 218 bp, Zea mays
gaaggcggcttgccctgcccgtcgccttggtgccgcgctcgccatggccaagagcaagtcgtccgccaatgccgtcgccccgctcctcggcaagtacgatctcggccacctcctcgtccggggctacttcttctaggtataccacgcgcgctgtctcggcggaggcgaccccgttgccgtgaaggtgctggacaatgtcgggttttccgccacggtca

SEQ ID NO: 361753 - DNA, 275 bp, Zea mays
ccgccctcctctctctctctatccccccctccccggaggccggagcgctcgtgcggaccacgaggtggaggagagagagaggcagggagccctagccctgccctgcgcgccggcgtcgccagggttagggtctccccggggccatacccttccttgccaatccctccgccgtcttctcgctctggccgatccccccgcccgacgcgcggggggcgcctagcggcgtgtctgcgttcggcctcgacggcgcggcgcgagccaatgctgtgtgcctg

SEQ ID NO: 361754 - DNA, 266 bp, Zea mays
cggctcgagacgacgacgagctgctggtggaggacatggagatggtcggcgaggacgagctcttgttcctcaacatcgacgccgacgccgaagctgacgccggggcaccactggagcccatgccctcgctcttcgacgtcgtcgacgagcccttcctaaactccccttggctgacggccaccagcagcgccggcgagccagccacaggggcagccggcgccaggagctgacttctccaacagatagagacaatgatgtgccgtccg

SEQ ID NO: 361755 - DNA, 269 bp, Zea mays
cggctcgagcagaatcctgaagcgactattgtccctttcaattcccctcccctacctgaggccctgaagcctgggtagccgatccatccgaaattccgaaacccctgcggcatgggaatggaaatcgagaggccgccgcagccaccgcctgtcgctgctgccatggctgcggcggcacccatttccacggtgctcggcgacgacgaccttctgcgcgagatcctcgtacgcctcggcctccccaccagtctcctccgtgccgctctcgt

SEQ ID NO: 361756 - DNA, 291 bp, Zea mays
tgatctatctaacaagcttcacgaccagtacaacacttatcttgcgccgacccaaagtcctgaagcctttttcacgacatctccgaaatcgctcataccgcgcattctgccgccgagtttcatcatctagcccatggtcgaagacaacagcgactcaacgaattgaacgaggccatcgagtctgcaagtttcgagatcattggcaatccgagcctcatcgatacacctcagtgggagcatggcatccagctctttcggaccaactcctcgactccttgttcaatactttgc

SEQ ID NO: 361757 - DNA, 274 bp, Zea mays
  unsure (1)..(274): unsure at all n locations
taaagatgtcgtacaatcatgttctctttattttaatttctggaatgcaaattgtatgcttgaaatttaatctttatgtttatttatgtgcaacaggtgtgatgaacagcttattttcagtttacggtaaagaaacaaaaaaaacttttccttattattccatgctagaataatccatgtgttactctcaatgaaatattctcaaattatatagatatttatgatgacttgatatcccgaagagttaacacnagtgatgctgaaaagtttgctg

SEQ ID NO: 361758 - DNA, 235 bp, Zea mays
aataaatccatcataagagaaaaatagagaccacatatttgtcatcgttcaggtagaagaatgagaagcaccatgttgaagaggaagaatttgaagttgagttggactatcttcattgtattatttggactaataattgttattctgttactcaaagctcgagccgcacaggccagaatcctgaaggaggacggcaggtgccagtcctcctgatgtagttggcttctccgatgtc

SEQ ID NO: 361759 - DNA, 281 bp, Zea mays
atttccacgactgaattgcatgtataatggcatcacgtactggttttaccaatcataggaagcatgaagtattaggataattgtatagacacttaacacttgtactgttctttgtacttcccctgtacatggctctctctctatatatctaacccacacatgcagcctttctgctaggcccgcgacacgcgtgacgcctctttcgcatgactcgcgcgccatactccattccaccctcctctgtgtgatcccctcatgtcctcttccaccacgtgcgttca

SEQ ID NO: 361760 - DNA, 216 bp, Zea mays
cccaattccacctccttcgcatagatcagaatcagatgcgcctcccctccacttcgcatggattgcttgcgggctcttcgcttgcccttccccaacttttcagcttcattcactagctgacatccacacaatccgtgctttgccttttccgctcccccccggatcaatcccaatctcgtttccttcttcctgataaaacagcaacacctttccgca

SEQ ID NO: 361761 - DNA, 238 bp, Zea mays
cattaatcacccactctactactcgaagttactaccagcagcttgcttcaacagtagaagagagcgagccgaggatggcgtcaccggggcactcgtcggtgggcctgcgccacctggtgactgcagtcggtgtgtcgatggtgctagcgacctgacgcacgacaactgcgcgaataacaagaaggtgacggtgcagaacctgtgcagccacgacgagacgctgacgctggagccgctg

SEQ ID NO: 361762 - DNA, 268 bp, Zea mays
cactagcgctctccacgagcatgaacaatcatctgctctgctagacggaccaaaccaaaccctcctttttcgtcactagctaattaaagggaagcgagatcgacctcaccgtccgtcttcaactccatcgtcggcgtcgcgcgctcggagtgaatggttgctcgggagaggagactatatatggagatgacctaaagcttggaggttgctgagggcgccatggacgacgacgaccacgacgcgtgggtgcacgactcctccgtcgatc

SEQ ID NO: 361763 - DNA, 271 bp, Zea mays
tctgctcgagcagaaggtcgccgctgtccccacgtcgtcgcggccatcaaaaccgcctacgtcctcgggtgcgagctgcgcatcctgagcgatgccaacgccttcttcgtcgacaccatcctcgctcaccacggcctcgccgactacttctccggcaccgacactaacccggcccacgtcgacgccgccggctgcctcaggatccgcccctaccacgagttcggcgccgccgcccacggccacggatgcgtcctcccgacctgcccgctca

SEQ ID NO: 361764 - DNA, 217 bp, Zea mays
ggacggactagtcgcccgcgcgcaaggtgctcgacggattgctgctacaccgggcaggcatggcggcgggccggggcgactgggaggacatggtgcgccggatgttcccgccggggaccaccatcccggagccgctgcccgacatggactactccttcgcgctgacgtacaacgggccggacgtgtcgtacgagctcccgcggatccagcccgtctg

SEQ ID NO: 361765 - DNA, 225 bp, Zea mays
cggatttggctcggaaggccggaacgttttgttcagtctatgatggctacctctgaacgaatggaaaaaagaaaaaaagaaacatcgtggtgtctgtgccatctgatggagacacaaacgccgaccatcactccacacgtaaaacaaggtttctgtgagagttgacagaaggacggaaacttttttttctctgatggagttttagatgttaatcgccagtcttat

SEQ ID NO: 361766 - DNA, 217 bp, Zea mays
cggctcgaggccactgctgcaccgctgcctacgcacgcgacgccttgaccggttccagctccgtacatggacgcgcccacggcgtcgtcgccgtcctcgtccttcaccgacacgagcgtcgtggtcctctccgtctccatcgtcggcatcctcgccaactcgctcctgctcctggcatactacctcgtcgtcacccgcgtgggcctcctcttcttct

SEQ ID NO: 361767 - DNA, 270 bp, Zea mays
tggatggcttcatgggatgaagaacgatggctagaagaatacagcagggtgcactagctgcctgatgaccatagccatggacattgccttctctagaactttaatttttactatgttgattataattttccacaggatgaccgaagtactcagtaagcagaggagcgcacaagcacttgaaaagggcagagcgtgctcgaattatatttaacaaaattccaggcttggtagaacagttaatggtcaagacacaattctgggaacaggaga

SEQ ID NO: 361768 - DNA, 266 bp, Zea mays
caagagatctcatccaaggtttacggcaatgaaccatttctaaagcacaaagacgtgatgtctttatcaattcatcaggagagcaaatggcgtcaacaggtaaatgacttctctcatcttctataagtataatgttgaacattgcaggtgttgaagccaatcccacctgtaggatatcatgtccagcagcagtgattccatgagtgactgcattctgtaatttgtgtgcataatttcgtgaatcatgtccaatatcgtggctgaga

SEQ ID NO: 361769 - DNA, 269 bp, Zea mays
gatggctggctggcctccgccgccgccggcgtgctcctcctcctccgccaccgaccgcacaccgcgctccgcttccatgccttcgccatccgccgcctccttccctcccgctctcctccccctctcgtcttctctgccgccgcagcccacgtcgcggcggcctcccgccttcggggccctgccctctccatccttgcctctgcctcccgccactgctcaccggcccagatcttcaatgccctcgctgccacctaccgctgctttgcctc

SEQ ID NO: 361770 - DNA, 320 bp, Zea mays
ctcgccgctagctttccctttccccccgctgctcctcccctccgtcctcctcctcaccctccccgcgcgccgccgtctcggcaggcagccaagcaagcaacagctgcacaaccacccagcaccgccgccactcctctctcctcgagccgctatgaatcagctgttaattcattaccttcagctgtcaaggaagtcttgcttcgaattctacgtctaagaattggtactcgatatgatattgatatccattgtgttaaaagccttgatgagcttcctgagtcatctgctcttgctgtccttaatcagtttttgatatcagg

SEQ ID NO: 361771 - DNA, 313 bp, Zea mays
cgccggcctcgacaactccccggattgtcatagtcgaggcggttctagtcgctgatggtggccatggcgaggaaggacgaggaagaggggcccgcggaccgcgtgccgcacctgccgtggatgcggtaccccgtcgatatcgacaccttctccggccgccccgtcacacagctaccccgcctcgacccgaggtgcactcctcatgctccaacgttgccctcgtgatcgcttcaactggcgactaactagttttagttgctgctcagaatcaactatcgcctttttttattttgctgttcgtaagcggatgaag

SEQ ID NO: 361772 - DNA, 307 bp, Zea mays
cccaaatctacagtctgtaccttagttttagctctggtaagtctattgttgtgtggactattggaattttcggtaaaagtctggcatctgtgtttagattcagaacttaaaaactctgtagaaagaatgcgagatattatccatttctctcaaatttgtgtttatccaaatattaatcatttttatccacggacctttgtaggcattgagcctatcagcgatcatgaaacacgagaaattcttgataccatggtttcttgtttttatcaaattcttggtttttgtcttacatatcctcctatgtatg

SEQ ID NO: 361773 - DNA, 300 bp, Zea mays
ctccaccacgtcactctcgccgtccgaccgggcagctgcagccgctccagacctctccgcgtcctccgacaccgacagtgcctcgtctggtagcaactccggcgccggggatcccccgcgccgtggcatcagcgtgccggcgagattctggcaggaaaccaacagccgcctgcgccgacttccagagcctggactgccgctaccgtcgtctggccggaggtcgttttcagacagcccaatgtcacccagactgccaggtcggtccccgtctccatgccgtggaagccggggcgctccgag

SEQ ID NO: 361774 - DNA, 277 bp, Zea mays
gcaagttatacctgaaacttctgcttcatatgttcacccatcataaagatgccaacaaaagttcaggttagcagcgaaaggaatgtgaagatcatatcaggtcgagatgggcaaaagaagggaaattcacagcatgaccaaattgtacgcgtgccaaaggacatggtcacaccagtcaatggaaatgtagatggaaaatttgaagataaagttagagttgtgaagaatgataagttccgaagacaacgagagtcttggggtggggacaggctgcatg

SEQ ID NO: 361775 - DNA, 267 bp, Zea mays
ctaggccccctcaccgtccaccggcgactgggccggccgtcgctgccgccctgcctctcaaccgtcgcgggcgacgagcaccactaggtatgccctccccttggtctccctttcctgctgtgcggagccgtgcgcggtgcgcccaaaccttaacgtgatccgtagggacgccctctccttagtcttcccttacctgatgtgcgaaaccgtgcgcccaaaccctaacatactatctgtattcggatctgaaggtgtttttgagtctgt

SEQ ID NO: 361776 - DNA, 285 bp, Zea mays
gaaacacgccaacactacggcgcggtggtgaattgttcaatcctttcagcgacttattatttgtttgtgtaatcaattcgaagcggatctataccattcatttgtatcttcattcccacagcccataggataccccagtttttttttttttctttttgtgaagagcactctgcctcatcatcacatataaacgctcgaactctctcctagtcgccggctgcccgtatcctaccaattggttcgcgaaacactcatcactagtaccatggaaacaacactccccat

SEQ ID NO: 361777 - DNA, 247 bp, Zea mays
cggctcgaggtttctggctttctgcgtgcaatttgcatttgtttcaggtaatcaggcatgcaccacatggattcccaagtgaaactgcttttgcttttagttgtatgctttgcaatgaaattattggtaatggacatgagtgcaacatttgtgattataagtttcgaagatctcactgagtagcaggaccaaagagacctgttctttcaataatacgtagaataattctgtaataataatttaagtt

SEQ ID NO: 361778 - DNA, 147 bp, Zea mays
tgtagatataggtactccatcttttgatctgagtcaggtctatagtgttgtttcactctttaggaattaatagtttaacaacgaaacagctcacaaggagatgcaagatgtcaatcgccatgaaataaattattttacagaatacta

SEQ ID NO: 361779 - DNA, 279 bp, Zea mays
aaaagattcgccagagattaatggctctaaagcatgaatttattgaaccatccataggtgaaagtacaggaatcacgcacaggtctggtcttggagctgccaaagctaagctaagtagatggcttcaagaccttcagagacttcgtcaagctagaaaagaaggtgctgccagtattggattgattgtcagtgacatagcgaagtatttagaagggaaggatcttgagctgcatgcatcaagacaagttggtttgcttgactttattgcgtctgcattac

SEQ ID NO: 361780 - DNA, 276 bp, Zea mays
tagaaatcaatgcgtgtttcctgcacgcgcccccgcagatgaagcactatgtattttctgcacgcgcccccgcagatgaagcactatgtattttctcttttttttgtgtgttgtgttttttttactaagaggagatgtatttcttgttcgtaaaatgcacttagtcaaatggatcgagattatgttgatcattaaacaccaaaatcacttagtcaaacgggtcgggatccattttcctcacaatgtcaacctttgactgatgacaatataatcaaa

SEQ ID NO: 361781 - DNA, 277 bp, Zea mays
catacatctatccatcggtttctcagctgctgctgcatacgcacctcggccgccgccatcgtcgtcgcctagctagctctgctcctgggtcgtgcgcctccatcgccgtacgttcgatcgagcacagcacggccggccggtgggcgcacgcgcacgcgttagcttatactacgttaaacgtacgagactgcaggagctagcgagcaacggcgtgccgatcgatcgatcgacagagcggggcagatcgatgagctgcaacggctgccgcgtcctgcgc

SEQ ID NO: 361782 - DNA, 272 bp, Zea mays
cgacgacggcgtcggccgcgtcaacttcggcgacgccggcagccgcggccaggccgagacgccgttcaccgtctacagcttgaagtacgtcacgccgccctctgtgccacgttccatcgcgcggttcttgtcgcttgcttgcttgctacaacccaccgtcgacggcgacgagcgactgatccccctgccgtgcgtttgtgcttgtgcagcccgacgtacaacgttagcttcacgtccatcggcgtcggcagcgagtcggtggcagcggagtt

SEQ ID NO: 361783 - DNA, 181 bp, Zea mays
ccgcagtacgcctgtctgtcatcactcatatcataagaagatgatcacatctcgcacacaagcatatgcatatcactcattccagagaatgagatgacaagacgttgttgcaccacttttattccgcagttgatgctggctcaggtattctttcaacggtccggtctctttgtttgcatgc

SEQ ID NO: 361784 - DNA, 173 bp, Zea mays
cgatgaagctgacattgatccactggtttatacaaatataacgaaatagaccaaaacacctacaaccccagtgggtaaacatggtgacgttggcaagaacatgccgaccaacacaaacgtcactcctcaagcaacaccacatacggaatcttgctcgccgatatttgatgcga

SEQ ID NO: 361785 - DNA, 123 bp, Zea mays
cggctcgagtgcatcgtcagtggcaagaaggctctcgaggcctccggtatcgcccacggctccaagcccatggacaagattgacaagacccgggccggtgtgcttgtgggcactggtatcggt

SEQ ID NO: 361786 - DNA, 159 bp, Zea mays
gagccgcgtgggattccggggccaggcatggttccatgtcaatttctgggctcgcccccgcagcagcagcagcagcaataacaagacaatcaagcgcttctttgctgaggtgcactacaagccaaccccgatcagcagcccctcatcgtcttcgtcatc

SEQ ID NO: 361787 - DNA, 289 bp, Zea mays
cggctcgaggttgtgttcaacgtgggcattgccacccccgatttctctgcagggacaggaggaggaggaggtgccgtccgcgagccgcacgggccggatcagccgccgcaggggtcgccttacagctacaggttgccgtcgcagatgaccccgcctcaggccgccgcggtgttctacagtccccagtacggcgggtgagtgctcctgtcgcatatacgtttcagccgttcatcctcaaaatctccggagccaggccgtagaaatacgtactgcagatctctctgtacgg

SEQ ID NO: 361788 - DNA, 276 bp, Zea mays
gggcaacaccgagacgggggaatttttctttagccaaatcaaatcaaggtgtgggtgggtgcagtgcagaagtagagtggaggagatgggagacgaaagcaacgagcgggaggcgacgcggcgcctccagcggtgctcgtcacagctgcgcatgcgctccagcacggcatggcgggcgcacgccgggatggtggtcgtccagctcgccttcagcggctacaacgtcctcaccaagtccgtcctgagcgcgggcatgaaccaggtggtcttctgcgt

SEQ ID NO: 361789 - DNA, 269 bp, Zea mays
cgctcctgcagccttccggaagggcttcgaggccgaggcgggcacgggatgtgggggcggcactactggggcggcggccggcgcccaagctgggccccggagggaacggagccggcaccggcggcgtggtggtgatgttcgcgtggctgtccagccaggagcggcacgtgcgggcgtacgtggagctgtacgcggcgcacgggtgggcgtgcctcgtctgccactccgacttcctcaccctgtttttccctgagaaggctgccatgctc

SEQ ID NO: 361790 - DNA, 230 bp, Zea mays
actgcacttgaggaagaagtatttcaggcacctgatatcctgggtccttctgcattagaagaaatcgacactctgtctgaaagcaaaaacaaaggatcagacaaagcagaaacgagaggagacaagaaacggaaatcttctgagaagccatctgagaaaaaggaagctaacaaacctccagacagttggtttgatctcaaagttaacacacatgtctacataactgggtt

SEQ ID NO: 361791 - DNA, 264 bp, Zea mays
tgcgttctggaacaagcctccggaggccgtgttccggcgaggcctgacggcgagcagagacaagagcctggagctccagtggccgccggcgccgctgccggccgcgagctactacctggcgctctacttccaggacaaccgggggccgagcgcgctcagctggagggtgttcgacgtcgcggtcaacggccagcccttcttcgccggcctcaacgtctccacggcggggtgcatggtgtacggcgtcgactggccgctatccgg

SEQ ID NO: 361792 - DNA, 292 bp, Zea mays
ccactgttgacgtgacgatttacgacttgatcgcacgagaatcactaccgatactatcgcaggaataatttatcaaaaattagacttttggctctttttgaaagcccgacttgcgatcgttcgtgcgacggctcgacatcgataaaaccccccaccttattctacagaaacccgaccgaaccctctgaaacctcaacaacaccgttaagatggctcaaaatcaacattgccgtttttacgaggagaagtacccggagatcgacagcttcgtcatggtcaatgtcaagcagat

SEQ ID NO: 361793 - DNA, 110 bp, Zea mays
aggcttcatttctacctacgtgaccccaagcgccgagcccgctgatcaatccatttcccatgaccccatcccgagaccagggccaggcacgcaccaggagagacccacgg

SEQ ID NO: 361794 - DNA, 274 bp, Zea mays
aaacatgagtgcaacatttgttgacgttactggcgaatctgagcagtttgctgacttgttcagctatctcgctaccttgaagccagaactcaaggccgatgcagacgaaaaaaatattgagaaagccgtagaacaaaataaacaaagcgagttgttgaagaaattattatctagccaacaattggttttggaacaaggagcagaaaaagatgtcgaaggattttttggattacaaaccactttaatcttgaagcatggagcctctaacacaaaa

SEQ ID NO: 361795 - DNA, 280 bp, Zea mays
acacgccgccggtcgctgtctactagtactagctcgcctccagctagatcatccctcgcccagccacacgccacaccgtacattcattcgcgcacatctggagatcgaccctatccgcgttgcaatttgcatgggcagcagctccgacgagtgctcgccggcgagggagatgtgcatggaggttggcggcggccgggggaggcgcggcggcgggggcagtaggtccgcggcggacggcggcaggaccgccaagcagaagcagccgcagcgtggactgggc

SEQ ID NO: 361796 - DNA, 263 bp, Zea mays
tatattatcagaatggcagatgcggcgacagaacatcacaggcgcagacaccgctctcccacaagtaactttcaaaaagcgctcctcaaaagccaaatccaactttcgcaaacgagcagccacaccacctgcagccgcagcttcagattcggattcggatttcgtctcctcagacgacggcgaaggccgaagaattaaacgccgccgcaaagatgcagttgttacagcctcgttcgcagcgaataaggtaccccataagctag

SEQ ID NO: 361797 - DNA, 289 bp, Zea mays
tatttactcagaatatcaacgtatcatggctcgacctctggaaggaaagttcggtatcgtgaccggaggatcgcggggtattggcgaacgatagcccggaatctagcaagcaaagggtgctcgctcctcttgaactacacatccgaatcgtcacgaaccagaaccgaagagctagcatcgtctttcacagagtctttcggcattcaatgtaccacggtccgcgccgaccttaacgaccctcaggcagccagcgatgtaattatagacgcctccaagaagcactttggcg

SEQ ID NO: 361798 - DNA, 286 bp, Zea mays
cagcagcgccgccggtgccggaggtgaaagaggaaggacgccagccccacggagctggcctccggggacgacatgaccatggtggccacggaagtggtgcgcctcaagcaagagcagcgcgccatcgacgaccgcgtcgcctccatgtggcgccgcgtgcaggagacggagcgcaggcccaagcagatgctcgcgttcctcctcaaggtcgtcggcgaccgcgacaggctgcaccgcctcgtcggcgacgcccccgtgccagataacgggttcgcctccggcggtg

SEQ ID NO: 361799 - DNA, 282 bp, Zea mays
ccatttttctcctcctctcgtttttgcgtttaggcccctggggaagcagggattctggcgacggtccctccccccggctctcccgcctcgcggctccgatcgaggccgcagcgtcagtgcagttgcattaatgggaaaccaatgccaaaatggaacctacgggtacgggagcaattacaacagctacaaccactttcagaaggagcctctggcttctaggcactgtgatggggacgatactgagggttgctacacagggccatctagaccgagcatagcaga

SEQ ID NO: 361800 - DNA, 277 bp, Zea mays
aaatacacggtcctctatgcgtcccaaccgtctggtttgctggagagcccttccggcctgccgctgggtagtcttcttctccgcgagatgcctacccagcggcaggcatctcgcggagaagaagactaacggcacgaaagctgtccagggcgaaaaatgcgatggcgagtgcctcgtcaagtcgagtctcctcgaaggaactttcgttgggatagtgcttctcatcatcctgacatcaggactcatgtgcatgatgggcatcgatactccctcgagg

SEQ ID NO: 361801 - DNA, 241 bp, Zea mays
gaccaatgtcatcagcacctatgcaaccacagcaacaagctgcgtatgctgggggccatttgctcaccatgggtgctcctatgcaacccctgacctatacatatcaaccaacatcgatccctcctgtagtgcaaccctggagtacaggcccaggacagagtgtaactcatgtgcctcctctagtgcagtctgggcacagcaggtgtcagctcaaacgactttgcctctgtcaacttgtctg

SEQ ID NO: 361802 - DNA, 273 bp, Zea mays
gcagagggagaaacgtattaatagtacagctctagccgcagcccgaagtgctcaaagggagaatgctgcaattaagaaggcaatagaatctatagggtgcacaattaaattttcgacaagcgaaaacgaggacagaactgaagtgctgtcatgttcattaggaagaggcacagatggtagagctcagcaagatgaaaacggtgacttctctgtagcaattgaggacagcctggtctcggatgcaccggcggaccatttttgcgaatcactctg

SEQ ID NO: 361803 - DNA, 273 bp, Zea mays
gctggatgctgcaagaacaggtgggcatagaaggggccgaggaactgcttgaagatcctaccaaaggagtcgatgaggtatgtttgccagttacaaattctgctcctggagccatgtttctgtcatgacagggctcacagatcctttttgctaccaaaaggttcaggaagagctcaagaagaactcatcggacatctccggggtcccacattttgtggtatgaggatttattgatgatgatatttatcgtcttttatccgtcccacttttaag

SEQ ID NO: 361804 - DNA, 225 bp, Zea mays
agacgccaaaggaggaagagacggcaaaggaggcggaccgacagccggagccggcggcggctgaagaggtgaaggaggaagcggcaggcccgctgccgagacagaagcagaaccggcagccgctgagcccgatgctgctgctgccgaggagcccgcggcggctgagccggccgctgatgagcccgataagaccgagccggccgctgatgctgaggtggccgataa

SEQ ID NO: 361805 - DNA, 143 bp, Zea mays
taggggattcagcagtttggagtgctcttttctagcgcataccttctttgcccgtaaatatgtagcatacttgctaagctctcgcggcggacacctgcataggcaactcaagtaaacttgacaaaaaccaaagatcgtggagt

SEQ ID NO: 361806 - DNA, 273 bp, Zea mays
cgatcacgctttgtaatgctggttcactgcttttgcgtctgcagattggcgcagaggtccatgggacgatcgatggagctttcgattccgggtacctcatgacggccgtcgtgaatgggcagctcttcagaggcgttctgtttgctccgggacctggggttacggctccgagaccgacggtgcaccatcagatcctgacgagctcggccatgcctccccagcagcggccactgctcgcgcacgccatccctgtccacgcccggccggtgccgc

SEQ ID NO: 361807 - DNA, 298 bp, Zea mays
tggtgtccgtgaactctccttttttcggttcaccagaccatgatcctgatagcaaaccagttccccttttattcgatccatttataaggagccgctcctggtcctgagctagtgtgtgggtgtgcccacggcatggcgttcttcagcagcggatcccgggtgctggtcgaaatcctgacgaggatgcagagcgctgaaagaccaatgcctgtcgaccacaccttcttcgagtcgggatccattcgctaccatgtggaggcttcagcgtcggatcccgagaacgtgttcctatcgatat

SEQ ID NO: 361808 - DNA, 288 bp, Zea mays
ctccagtcgttgcgtcggacgccgttgagcgttggtggcactgtgccagcagcagcgcgccgcgggtggcaaggcaaagggggcgacgaagaggaaagcgaagaaaacgtcatggggcttggccttggcgtgcgggcggcgccttcacgtacgcggcgcacgcgctggccgtcgcggcggcggccatggtgttggtctgggcaatctacttccgcggtgggctcgcaatcgaggccaccaacaagaacctcatcttcaacgttcaccctgttcttatgcatatcggat

SEQ ID NO: 361809 - DNA, 293 bp, Zea mays
acgccgagcagcccgacgcgcgatcccgccgaccccggcgtctccgccctcgccgcgggggcgtcccggagctcgctggcgcgcacggggagctgcttcgccgcgctcgtcgaatgagaaggggaaacgatgacggactgacggaaggggaaaagatcagggtagtctctctctctctctattttgccttcaatgtgtaatgtatttctgctcgtttctatctatggaggattgcgtaggtattactactagaggtgccaataaacatccgtgtaaatatatagaggaggggg

SEQ ID NO: 361810 - DNA, 226 bp, Zea mays
cggacaaccgacaacatcgctcgccggcgacgacgcggcgcgcggcggcgatggatgggggacacacgacgaggcagccgatgtctccagagatctcggcgtcgactgtgctaccgcagcagcggcagatgcagcctcaccaccacccggcgcggccggcaatcgccgatctcttcaccctatacctcggcatgaactcgaagcagcgagcggaagacccattgag

SEQ ID NO: 361811 - DNA, 276 bp, Zea mays
gccacggttctcgcctcctcgcattctaaacatcgccatgattcggtggttctgaatgcatctcctgtaaccaccgggcccggagcttctctcaagcccgcgtcgccgtcgagggctgttaacctggcaacactctcaccaaccaacaaacaaacgcgcggggtcgctgtaatggccgccgccgccgccgctgtgaatgggagcctagaccgcctagacgtgcatgagaggaaggcgcagaagagctactgggaggagcactctggggagctcaac

SEQ ID NO: 361812 - DNA, 271 bp, Zea mays
  unsure (1)..(271): unsure at all n locations
caagaaaggagaaccaattctccctcgagaaaaaagtcccgtcgttttcctcacagttccttcgctctccggcctccgcttccactcccgctcgccccgccgtcgcgatgcacaagacggctcaggcctggttcaccggcgggaccgccgcctcctccggcgccgctgccgagtcgcagccgtccctgctcgctgactggaactcgtacngcgcaacccgctccgacgcctcctcctcctccccgctccccttcgacatcgaagccgccgt

SEQ ID NO: 361813 - DNA, 274 bp, Zea mays
cgtcgacctcaccaccaacggcgacgaccacgactgcgaagcacacggtaacggcttctcctttaacgggaatgtattgggggcgaacgtggcggccgtcaccgggacggacggcggcggcggcggcgtaggcgcgctgctgtccgggatgcggctcacgaccaggagcatgctgccactgtggagtaaagcgagcctgcggcactagtgggctctgtgtgtcgccggaggacatcgccgcttttctagacaacggctacgggcgcaaggctgc

SEQ ID NO: 361814 - DNA, 266 bp, Zea mays
caatctttttctttttttattaatatttattataaactgatttggtttcatataaaaattagttttgattattttttaaacttgtgtcacagctgataaaagtttgcattcagaaactaaattaaaatgagtgatcattctgacaaaaatgtgtatcaaactccgctttcattgcgatatgctagcaaagaaatgggatacaacttttcggaccgcaaaaagttcactacatggcgtcttttgtgggttaatttagctgctgctca

SEQ ID NO: 361815 - DNA, 252 bp, Zea mays
tggcgaccagcttcgccgtcgcgtgcagcctcctcagccgcttcgtccgacagaacggcgccgcgcccgcccagctaggcctcgggatcaaaggtgagcagcggaatcaggcggcggcgccggccaggcctgcactgttgtctgttgagatcgggatcctctgggtgcggaagggtgggggtcggtcagtttcaattcctgtgggggacgtgttcgtcctggccgagacgagcagcaaaggacgccggcgac

SEQ ID NO: 361816 - DNA, 150 bp, Zea mays
cgccgtctctcgccgccccggcaccaacccctctcgggctaggcgagtggaccggccgcccagcgtcgtcgccggctagatattcccaccgctgctcgcaatggctgccccgcacgacgaggccgcagcgtgggctgaggaggcgacgcg

SEQ ID NO: 361817 - DNA, 282 bp, Zea mays
cgctgctgctcgccccctcataacatatataaccggagctagaagcttattactgtactcggattagcatttgagcttaagactcgattcgtgaggagtaagctagcaagaagctccaatagtcgatcgaacgaacacggaacacatggccaacttggctgctcagatcaaggacaagttcctcggcctcgtcgaccgtgtcaccgacgccgccgccggctttggccgcgctgccggaggcaaggacgacgtacaggaccccacgactactaagctgcacct

SEQ ID NO: 361818 - DNA, 276 bp, Zea mays
tctcaacaatgcctcactacgtaggcgtcttgaagcggtttatatttcgccattttcaatattcgatatatgatttgcgtcgattcagcatgtatcatatttgggatacttttgtcttctatcggggcgtttggtttgcgaattgaagcgaggcgtatcacggcgtttacgcatctacatttattgcatcacatagcaacactttcgatttaatcgaaaaatcattgcctaaaagattcccccccaggtttcaaaaaacaagcctggtttcatgga

SEQ ID NO: 361819 - DNA, 278 bp, Zea mays
cggacagcatgcgggaggctctggacgtggaggacaaggagaaggcggcggctgctgcggcggccaaggagaaggcggccgtccccaagaacggcaacggcctacgtcatacccgaggagccgccggccgtggtcgagctcgtcggctggtacatctacggcttctgctcctacttcatcacccacctgctgctgccggtcctcttcccggccatcatcacgcaggtcgccttccccaactccgacttcacgcccgaccccaagtacaccctcaaggg

SEQ ID NO: 361820 - DNA, 205 bp, Zea mays
  unsure (1)..(205): unsure at all n locations
gtttcctcagtggactagtgtgaagctgtgcttagcgtagtnaacgggaggaaggacaaggcaaggcaactgatggcggcgggcggcggaggcggctcgccggcgccgttcgtgtggaagacgtacacgatggtggaggaccccgggacggcaggggtgatcggctggggcagcggcaacaacagcttcgtcgtcgccgacccct

SEQ ID NO: 361821 - DNA, 273 bp, Zea mays
cttaatttctctcttcttttaatcttttctttcttctaatctcatatcatcattcacttttttttcatctactcttttaaataagttcattatttcatttaaaatggccgctgttgttcatccaaataacactttcgaacctaacgatgaagaccgtaaattatttgttggtggtttgagctggaacactaccgaagatgatctatttcaatatttcaatcaatttggatctattgctaatgttaacattaaatataacccagagggtaaatc

SEQ ID NO: 361822 - DNA, 292 bp, Zea mays
ctctcagcaatgctccaggaggtaattagaaggcccttgctttgcctgagaaaggaattgtataatcggatggaatggcgtatcatcataatttgcctggtttgctgcccaacaatatttatggagatgagatcactattacacttctggcttctagcaacgggtttgggttctgtgctagaacttaacaatgcattggtatcatcagcattagacattcttctcaagcctatgtcatggggaatatccatagaattagggcagagatttcccttttctcatgcttacttcc

SEQ ID NO: 361823 - DNA, 253 bp, Zea mays
gtcgcatggaaagagttttgcaggtctaggctccttattgatgaatattggttggaaaaagggaaggactggaaatggatgctcaaatgcaacgcaattgttttccccgaaggatgtaccaataaaagcggacctggaacattcgaagagaagaatggaccatacttcggcgattggaaagagaacaaacaagatggttggggaaagaagatcttcgccgataagagtgtttatatgggtcattggaaagtta

SEQ ID NO: 361824 - DNA, 219 bp, Zea mays
  unsure (1)..(219): unsure at all n locations
tcagaaaggcagaagcggcagaagctcaagcacaggacaaagaaggatcctgctgatgcaacgtcacatggagtcaatactgaaccattgcagatggatgggaaccttgattttctcaatagtanaactgtgcgacccaggggtancccagtcactanaattgcaggcgcagagcttgatgacgaggatactggggctgcaattcagtttatagaattc

SEQ ID NO: 361825 - DNA, 200 bp, Zea mays
cgcttccttgctgagctcccagtctcctgaacgacatcttatatcaagtcctaagggcagcagtcatcatcgaactgccagctcaagcagttcattcagtagctcaacagaacttgaacattcaataagtgaagattgtatgctggaaaagaactcaggaagtggttatttcgagcattctgcaagagttgcacagcatc

SEQ ID NO: 361826 - DNA, 288 bp, Zea mays
catgattagtcttgaatctcacttgtaggacatgtattcactgagaagttgatcagttgatgtgtattattgttctgaattatttgcattacgatcgaactataggattagatattcattgtccacgcgcaatacgaattattggaagtacacacacaagtactggcaccggcacgcgcacatgcatacagtgatcaggcggtcacaattacacaccggcttgatcctgcttcctcttttgctgaaaactggctagcgcacgagctctccggaccttggagatcccca

SEQ ID NO: 361827 - DNA, 204 bp, Zea mays
cgtaaaggagtgcttgctctctgcgatggtgtccttgtagcatcatggactacagaatctgattcctcctccaccaccaccacgacgacgacctattttatactggtcttcagctcattagtctaggtttgtttcgttatctttttgcatggagagaccgatgattgaggtatgtatttctgtaagataaattcatatcttgct

SEQ ID NO: 361828 - DNA, 217 bp, Zea mays
ctccaacgccaggcttgatgcgagcgccaacaagggacgaaatgctgattcgtgcgcatatcaactcgtcaactgcatctttacatgtgcgtcgcacattagatcaattcttctatccgaacattgacacggagactcgcgacagtgaccaggttgtttacagatatcagacgcgctggactgaacacaaggccaaagatcccaaaatcttcatggt

SEQ ID NO: 361829 - DNA, 264 bp, Zea mays
gaggcagtaacatgcaaaagggatgctatgtacaagttgatgatggagaagctccaacattttttctccaatgttgaggtgattgcttttgatactgcatcaaactttctacataaaaggactgaccttctggatgcatctgtttcagatgctgaactattctatggggacagcgacgctgcactaccttgcaatatggctgcagatgaaaaagatgattcttcttcgaattcccaagaatcttcagataaagaggatcccttg

SEQ ID NO: 361830 - DNA, 230 bp, Zea mays
ggaggagatgtactcggaggagatgaaggaccccaaggagggcgcctgcagtaacgcgaacagcagcgtgaacactggcgccggctacgcctccgaggagctagggcagccgctggggcacgggggcgcctgtggtggcgtggacgagcagaagccgacgcgggcgcagctggtccacgacgccgggtcgctagcatcagccgtcagcatcggcagcagcagggaccagc

SEQ ID NO: 361831 - DNA, 281 bp, Zea mays
gttggccagacgcgttcctccggcgttgtgtcgatggcaccgtcggcgacgtgctggtgcggccactgcggcgctgtccgccgcctccgggcggagggcgagttcgcgtcctgcgcggtgtgcggcagggtgctcctggacctgcaggacgacgcggtggcggctccaccaccacggcagctgcggcgacgtcagaggagggctcgtgacggcgcggcggctcgtgacatcggcgcgaggcccgaacgcggagatatatcggacgctgaatccaccgtcac

SEQ ID NO: 361832 - DNA, 231 bp, Zea mays
tctgtagccccgggtacgctggagccggtgatggatggtcggctgcttccagtgcgggccaaggtgcttcgagcctagctgcgacgtgacacatggcaggtgctcatccactggcgcgaccttgctgaagacgacgcaacaggtgaggaccttgacgaattccgcaccacctaccccgacctacagctcgaggacgagctgtttgcgaaggcggggagagatgttatgtac

SEQ ID NO: 361833 - DNA, 252 bp, Zea mays
ccgccccgctcccgcacgccaccgatccccaccgccgaacaaccgactgatgctggtgctcctgctcctgccgccacctgctacgtagcatacgcggacgtaccaccaaacctcgaccggccggtccatcgcgctacgacgctacctacgacgacacgctccgacgagatcgggcaagcgaacgcgcgatgtcgacgtggtcgtcctcttgcatcatctctatccgccgtccatccgtacaagccgctggag

SEQ ID NO: 361834 - DNA, 184 bp, Zea mays
cgcgccggcgcgctgcagttcctggagcgcgtccgcgacgcgttccggagcaccgcaggcgctcggcgggcgccagtccatcgagtcgctggtgccggccgtgcagcggtgcctggtgtcgctgcagaacatgcgctacgccgcgctggtgctcgatggcgccggcgcgggcgccggcgacggc

SEQ ID NO: 361835 - DNA, 295 bp, Zea mays
ccggaaaagaaagggaaagagtttgcgttcgtttgtctttctttcttctctttggaagttggaattgaaactgcactgatgtttgcgtttcaggaactgcattgacgtggatcctgctcagttctcttagcatttacttatgggccaagtttgtagaagtttagtgggctgtagacccattggctgtcatgttgggcctgcttcctgggccgcgacgagtaaagaagaggtatgggatcgccctggccgggtggttggctcttgcgggagggatgagatgggaatgggatggcga

SEQ ID NO: 361836 - DNA, 282 bp, Zea mays
ttttgactttgagtaaatccaaaagctcctattgaaccttaggtggagcagaggtgaaagtaacattatttgcatttttttcaaggggatatccatttgatgatgatttactgctttgcttcaatttaatcgttggatggtttgacactttgacctgcatgaatcttgtcatattctacaagcgctaacatagcgccatcctaatccatgtgcaacatgaaatatttgtttatgctgcatttggactatcatgcgttgcaagattcataaatcataatgcca

SEQ ID NO: 361837 - DNA, 277 bp, Zea mays
cacacagtagattttgattttctgcccacttcaaactgtcaaatctgcaagactcgcatggtagccgcggagagagagagaggaagtgcacatcctcaaactggaggcacgcaggacgtgcacgtcctcaaagccaagccacgccggggcctgatgggtctggtactctggtgcgcggcagttgtcgtccatccaccctctgctctgccaactgccatggctcgatgacggtggggtcgggaccaggcgtggtacggtaagctatggagtgcgacgg

SEQ ID NO: 361838 - DNA, 281 bp, Zea mays
tccttattgagatcacgggaacttcggtgagccttttggagtgctatagtgatcctaagctacaaaagagagccgcgcaggagcatgcggcagagggagctctgtggtacctcaagcaccttggatacctaccaagagatgaaaatcgtttctagcgacattttaggtattatagccttcagtcacataaataaacctcggatgggaagagttctgttattgtaagcatgcagtctattcagaggtatatagcatcctggaatctcaatccaacagtcaac

SEQ ID NO: 361839 - DNA, 263 bp, Zea mays
aacgcataaagagaagagatgctggagccagttcagatacctcactctcgacagtagagaaattggttgatgcgccgaagtctctggcatcaagggtatttcgacttccagttcggtcggcgactttgccagttcgcaagacaattgtcgttgtcacgtacacggcgttcgtggcgggtcttgtaacatacaagtccatacaccacgatgccaatttccacgagcgcattgcgtttcgcgcagcttggatagcagcgacacag

SEQ ID NO: 361840 - DNA, 272 bp, Zea mays
tcgcggttggactgggagctcttctagagggctcctgcgccacagcctgcctgcctgcctctcctcccgccacaggtgtgcttgtccatcggctcggctcggctcggccggtaccttgggcggccatggtgtgcatgtttgtcaatcgccattctttgctttgctttgctttcccgtcccttttgttctttcgttcgttctttctttttttttccctcatgtcctttattaagtatattgtgcatgatctccatgcatccaccaaaaagggg

SEQ ID NO: 361841 - DNA, 278 bp, Zea mays
tgaaataatgctaaggttggctttggagaaagcactctactcgagatcaacattagtagttcaagtgctctcttcctttgcacatatgagccctatggatactcaagcagaacattttctgaaattgactgtcaagttctacaagcttttaactcgcatgtcaaagtcccagattgtacctaaaggctacagacaatccattccaagcctcaagtttcagaaactggcagaagtaacttgcaaaatgctcaccgctcccctttatgattttgtgtttc

SEQ ID NO: 361842 - DNA, 265 bp, Zea mays
ctggcactccttaatgtgctcaataaggtttagaacgtgttgaggattaaaaagatagtttgcacgaaaatttggtacaagcatccaatagtaagttgcgtgctgctttttttttttagattattgtcgccttgagtgggaaacagtccaaaccttggatgaagatccctagctcgaaatgctgcccataggacagccatttcatgtattttggaacatatggatggcagacgttttaaatttttacttctatctggattcagtt

SEQ ID NO: 361843 - DNA, 263 bp, Zea mays
aaagagttggtgtggtatctggtaggcaccaactaaccatcagctaaaaaatctttatttatttatttatcttcttgttttgaacatacaaacaggcttaaggattgtctctctcttgacaggcttctgctttattggttacacccttctttgttttgtacacactcctaactgaaacattctggtttgtgcttcatttttggtgtccagctagtattagatgcttgttacaaattgactttgttcgtcacctaatctgaata

SEQ ID NO: 361844 - DNA, 130 bp, Zea mays
  unsure (1)..(130): unsure at all n locations
tgcagaaactgctagagtanaactcgcacttcaacagtcaatgtgctcctcaatggattcttcatttattcagggatactttcttctggatcagaagattgcagcattgaagtactcaagcaatgactgg

SEQ ID NO: 361845 - DNA, 243 bp, Zea mays
atgttaccttgcaaaacacatctacgaaggaaaatgaaaccctgatggccattggaactgcttatgttcaaggggaggatgttgctgctagaggacgggtgcttctgttctctttcagtaaaagtgaaaattctcaaaatctggttaccgaagtctactcaaaagagagcaaaggtgctgtatctgctgttgccgctcttcaaggtcatctactgatagcttctggtcctaagatcacactga

SEQ ID NO: 361846 - DNA, 162 bp, Zea mays
aaaacatactagttgtcctgatattatagctttcgtggtgtgtttacgtcactgtatatgaaagggtggggagagagaatgatatgccatgtattctgtcaaatgtttttttataatgtcaagagctctgacttttaattaagaagaaaaaggattatatat

SEQ ID NO: 361847 - DNA, 133 bp, Zea mays
tggacagtacgggctcccttctccagttctccttgcttgcgtcttcccggtcccgtctggttgcttgcgatcgactcataggcgcgagtgctctgaacaagccgatcacgatggccttcatgaggctcccgct

SEQ ID NO: 361848 - DNA, 132 bp, Zea mays
ctcgagccgcttcgcaacggtgcagcggcttcggacagggctctcgcgacgcgatcggcacatggcggcatctctgcaggcctcgtcctccctccgctcgcgcctcctctcgttctcctcggggtgttctct

SEQ ID NO: 361849 - DNA, 121 bp, Zea mays
cgctatgtcgtacaccggatatcctctagcgccgtcccacaatcgggcttctgaggttctgctgacgtcgaccgcgccgactacaccctcgattgcgtacctcgctgctgtgccctctcca

SEQ ID NO: 361850 - DNA, 136 bp, Zea mays
ctcgagcgctttttatttttttaatttaaataatgctcctgcataacttctgtgatccctacagcaatgtgcaaggcgtccttctagtgcttagagaatttgcagccagtctcaacgaatcttttaggattcacac

SEQ ID NO: 361851 - DNA, 269 bp, Zea mays
cctctccccccgactcctggcctgccaccccaccccagcgtttaccccaaagcacaatgccctggtcacttggcaagcggctgggcctgacggaggccgaggggcagaccggggctccagccagacccctgaaaggaagcaggtgctcccccacttccaggccttagttagggtgggggggccagctcctgggcctggggtcttctcacccccagccccttgtcctgggtaggcccctgcctgcccctctctgccttttcctcgggtgt

SEQ ID NO: 361852 - DNA, 195 bp, Zea mays
ttcggctcgaaggaagaccatgtaaagttgtttgcaatcctgacagagaagcgactttacacccaaagaatattgacccagatagacgggaaaactgtaacttgaggtgtacaaaatcacatcattggttgcactaggaagacaattgcagatgttgtggagtcacttcttggagtttttattgttgagtgcgga

SEQ ID NO: 361853 - DNA, 247 bp, Zea mays
cttgaggcgaacgtaggtgagccaaactgccaaagcccatcgggcaaccactagcaattcaactgctttcgcttcatcgctccatggctcaattcaatgcggtttcgtattttttgctcgcgaagtgcgaaggaccaactctttcgaagggaaattatatctcaggtgcttaggagtctgccatggccagcgagaataaggtattttaggttcaaggaagtcgccaagcagaacgtcaccaaggaat

SEQ ID NO: 361854 - DNA, 141 bp, Zea mays
gacgaacccttcttctgtgatgatggaatccaacctgttccccacattccaaggcatccttacggagttatgttgctagatggctaatgcaacggtatgcatcttactttgcaacgagaggctcaccttaaggctacccaa

SEQ ID NO: 361855 - DNA, 170 bp, Zea mays
ctgccgtgtacgctcgattcgggcgagagttaatgcgtgaagaaagccacgatggagagtggccgaacctttcggacagccgcgcgtgtcgttagttgatttcgagctgcctctgcttctgcttgcttgctgcttacttcggggcagcagccgtcccggcgatggactgg

SEQ ID NO: 361856 - DNA, 143 bp, Zea mays
ctcgagccgatcttccgcgagtgcgtctggcgctgcaagaattggctgggcctcggcaacgagaccacgctggcgcgcagctccgccaagtcgaccgctacctctcggccgtcatcaaggcgcgcaacttcgatctctccgcc

SEQ ID NO: 361857 - DNA, 161 bp, Zea mays
gctcctcacgccgccgccgccgccgccgtcgccgccaccacatccgtagcgcccagccgccggagaagaggagggagccagcaccagccaccatgggtcgcgtccgcaccaagaccgtgaagaagacctccaggcaggtgatcgagaagtactactcccgc

SEQ ID NO: 361858 - DNA, 215 bp, Zea mays
ggcaatggtggtatgggccaagggccaccagctgagggatgtaagcttcagatttcgtgatcagcagaggcttgggaacatcaaacttggagatgggctaatcctcactgacctcgatctcctcatcgaagatccggcgaattcgggcgatccaccgtgcttcatcaaatgtgaacgttggacatgatgtcaccatagcctaagggaataaaagt

SEQ ID NO: 361859 - DNA, 198 bp, Zea mays
taattgcctaacatggaagatgagtggatgatacagtggaatgcataccaggttttacacaaggctgccggttccttacctttctgattgaatcctgataatatatggtgcaatgccatcccttttttctcctaattttgttaaacacatgcacatcagcacatgacacaatatgtccaaacacactcacctttggtg

SEQ ID NO: 361860 - DNA, 286 bp, Zea mays
agaagagtcattagccaaagtaaagctcagccaagtaactaatgctcgagcaggcagctacagctgaggaatgaagcgccggctaagtgttgcgatcgcactgattggtgacccagaattggtttttctcgatgaacctgtgatgaaatagaaaaattttcattgtgttgttccttagactcccttgtggccctgtcacatgtcaatctaactaaatgtatatgctttgtagactactggcatggatccaataacaaggaggcatgtctgggacatcatagaggag

SEQ ID NO: 361861 - DNA, 100 bp, Zea mays
atctttcaaggtagaccttgttttaactgaagttgaactgcctttgatgtctgggttcctcctgttatccacgatcatggaacatgatgcgtccaagaac

SEQ ID NO: 361862 - DNA, 100 bp, Zea mays
tacaatctggtccgaatactagttcgatgactgaaaggggccacattattgaaagggatgcaggagttcaatctgtatctgataaacagaataatggtac

SEQ ID NO: 361863 - DNA, 296 bp, Zea mays
  unsure (1)..(296): unsure at all n locations
tctccctctcgcgtctacttccctgcgcacgcgccgcgccctggattcctctctctccctcgcgtcttcctcccactgccatggcgcccctctccctggtgctttcccatggcatgccccgagctcctcccagcccaaccgctccttcctctgctcctccctgtttgccatcgctctagctcgcctggtcgccaaactccaagaacctgcgccgctcgcctccctgtgccgacgtcgtattctggtggacgcgctccactcctgcacctccgcttccatggcnacgccgccccaag

SEQ ID NO: 361864 - DNA, 168 bp, Zea mays
aagccagcagaggtccaggcgattccgggctgctaaggacgcggctgatgcggcacggaggaagatatgctgaggaaggagtttgaagcagagggtaggactctagcccagaaagatgagtcggaggcaattgactccaatgtcatgactccagggacggagttcatg

SEQ ID NO: 361865 - DNA, 284 bp, Zea mays
gatcggtcgaatccagcaccccctccagatttgcgtcaccaatcttcttcttcttccgccgccgccgccgctcccccacaaggaggttagctgctatccccaaatcgattcatcaatcatccgtgtccttccatttcattccagtcggtcgccgcagcacggaccgagaacagagcatcacgtcacatcagactaacctaaccagcctcgtccctcgctgcgtatctgctgcactttcatcaacaccagtctttctcctcctggattgcatgcccaggcaagag

SEQ ID NO: 361866 - DNA, 123 bp, Zea mays
cgctattcaatatggtgataatatcatgcatataatactgaacaggtcacttgaagttagaactaccctttgactagagtgagcatacatccctgggacagtcccagtttatgtctattatcc

SEQ ID NO: 361867 - DNA, 275 bp, Zea mays
agttattttgaccttgaggactggtaaccttttcctagagctctggtttgaaccgtatgtattgcttcctcagttcctcttggactaactcatttgtgttacttcactagtgaaatcatagttcacatataattttatgttcatgcgaattatcacatttgtgtctctatatgtaatttggctttttactgcataggagttgctgtagcttttaatcgaatgaatcttgttatgggatcagactaatcatatggttcactgatgtacactccgac

SEQ ID NO: 361868 - DNA, 265 bp, Zea mays
ggacaccaccgagaggacctctctggtcctgctcgtggtggtcgtcgtcatcgcttcccgggcctgagaactgtgactgtagactacaattgcatcctgaagaataaaatggaccaacatgattccatggctgactcaccaaggaggcggcacaaccttttgcgtgacaaggtccaattggtagctaaggaacgattcagatcgctatgagatcgtccgcttccatgatccatgtcttttgagaaaggcttcttggtgtgatccg

SEQ ID NO: 361869 - DNA, 163 bp, Zea mays
ccttgcttcgactgctgatcgagtctttagttatactcagcaatgcctatcggttagcgttctacagtgttgaatgcagacacgtcaaacgggcttttagttcgaagagcgtgatggaacttagttgacgttgcaatcccttgaagacggtgctctatgttgg

SEQ ID NO: 361870 - DNA, 129 bp, Zea mays
gttcccttcctcctctcttttccccaccgctccctttcttggcgtctacccggcgcgatcaggaccgaatcctaaggccgccgtgcgccgctgctgcagcctactcccgttggacaggagtttggagta

SEQ ID NO: 361871 - DNA, 253 bp, Zea mays
ctcgagccgcttctgcggcaggcatctgatgaaaccctgcatcttgttctagaaaccctataatcagcaatcaaatctggtggagaacaatcaactttaattgagcctgtcatttcccccatcatactggatgttagggcacagcacattgctgacccgttcatcagcattgatgctgtcgaagtgttagaggctatcaagaatgctcctggatgcttacagccacttgtgtatcgaatccttccaacaattg

SEQ ID NO: 361872 - DNA, 288 bp, Zea mays
cccaaatccactgtcgcgcgcccttgccgctcaatctccgctcacattcaccaagaagcacttctgtcccccccaccgccccctcaaaaccccctgttggcgctgcatccacgttcacgtcgcttgaggaggtgagcactcggatctagctaagtgccgcaagcgagaccatgccatgttccatctccacgcacttttctcgtgagcacgctctgccatcccgcctcctcctagtaacgcgttgctcaaggttactggatctggtgagtcaccgttcagagttgggtt

SEQ ID NO: 361873 - DNA, 280 bp, Zea mays
gtttgcttcaagcatggaccagggaatgaattagatacctattcttgaccccttcccgcccaaggaggagcaggcaggaactccggtatatggtggtaattggtggcacctttatgtacttctttaggggcagcctaccatggcaggggctgaaagcaggatcaagaagcagaaatatgactcaaattagtgcgaaatggatactcccatggaggataccagttttgactggaccattttgaagtatcctcagataggctgcaacctgcggatgaaggca

SEQ ID NO: 361874 - DNA, 277 bp, Zea mays
gcttctagaaccaggtttctaaccctaccgcagaatgatgctttcttctccctagtagcctggggcggaggcatggacggcggcggggaggtgggctcgagcggcgggaggtcccctattctgcaggcgcacagggacccccagtcgaattgggaggtggacgttgccaagagcctcgaggattacctgctcaagatctgctcaggggacgtctccggcgaggacggggcccactctgtcaactttgccgaagcggcgttattactccaaggatcgg

SEQ ID NO: 361875 - DNA, 136 bp, Zea mays
tgaccccgcaaggataacggacaagagacgcggatgctgataggtagatgagacggaggaccaagagcggcgtcgatctaaaagcgttagcggcggccatggccaccgcggaccggacccggactttcatgaagga

SEQ ID NO: 361876 - DNA, 265 bp, Zea mays
gcaatggaggttctagtagtatagttaatggtgctccatccgatgaccaatttatgtatactggtaaagttgttcatggccttcctggtggcatggatgcttcatcaagcctgctaacagcacacaatcctgctgttgggcagtttaatggacacaatggagcaacaataaagacagaatttggctactcaagcaactcagattttggattcagcaatgaggccgtgttcctagagcagtcaattggagatgtatcaggtgcatc

SEQ ID NO: 361877 - DNA, 258 bp, Zea mays
gcggatgggcggcgtggcgtcggcgtcgcgccggatcaggcggggaggagcaaggggcgggagctggccaaggtcagagacgccgtgctccgccttctctgagcgcgcggtagcttattactagtattaactattaagcttaagctaggtggtggtcaaggtcaagcatgcatcgatctacgtactacacagctcactaaagcaaggaattagtgcatgttcgttgctcgatcgatcaaggtagctagctatctactg

SEQ ID NO: 361878 - DNA, 276 bp, Zea mays
gttttccgtaccgccgacatgtgaacgatttatatagggacttctctactactgctttaacacttctggactatctacttgcggtgtttgtcaattgagataatcttgggaaagagtgacagattcgatgagttgatggttgctgctgccgacgagaggggagaagttgaagatgaagagcaggcttgaaaaaacagtgccgaccatccctggtacgcgtgacgcctcctacgggggccggcggaggcgtcacgcgtggcagggatggtcggcccc

SEQ ID NO: 361879 - DNA, 160 bp, Zea mays
agtgaagatcaagagagaacacccggatctaagaactaggatgacacctgtgatgccacgggggcggcatgctcccttgagggtcagatatgtacgggtttcacaagttgatcagcttggaggtgaagaacggcctccagaagtgtgcgacgtacccacc

SEQ ID NO: 361880 - DNA, 164 bp, Zea mays
gcataccagaattcagccatctcactggaggggatctgcttggaccgtgactcgtagaaactcctgagaggctcctctcctccgaggatcgaacttctggccgggcaaggagtagaccttcttgtcggccttccctatacctctacctctgatgctgctggtgg

SEQ ID NO: 361881 - DNA, 198 bp, Zea mays
ggaaaagcaagttactattgattttgcgccattcaagcctatcaatgtgtacatcaacctattgtgacaacaagttaccacactagaggctttaatgagagctcttggacatctgatgcacaagtttggagttcattgttcatggatggtcaatggtactctattttggcacactaaagtggcaataacccgtgagtg

SEQ ID NO: 361882 - DNA, 160 bp, Zea mays
gttacttggacgggacaaagaaaaggaagaaggtactcaacggagtgcaatctctggtcaacagataatgatgaagcttgagaagacaacggaagacaaggcagcagagagcaagcgaaacgaactgttgaagtttcagaatgccagttacgattgatgt

SEQ ID NO: 361883 - DNA, 169 bp, Zea mays
gaagaatgctgaagaatggatgattgattacgcgcttaggagggcggtgacaaacttagctacctgctcggaagaagaaagtggagctacttgtccgggccttcgagactgtcctaccacatgacgaagctgcacagaaaaatgtctcaccctcaaggcctgtccaagc

SEQ ID NO: 361884 - DNA, 163 bp, Zea mays
gagcacgagcaaaaagatgtgggggcttgttctgcagcagctgcacccagcagcggatggttttccgtggacagggtgattcacctgttagactttgtgaacctagcaacagctagaggaagaagcacgaccatgagttgagatatgggacccaaatagagct

SEQ ID NO: 361885 - DNA, 172 bp, Zea mays
cgcacccccggcagccgagacgcccagtccccgtcagacccttcggcaggtcttcttcggccccttcgccggcgacgaggcaaaccaggggtaccatgtgtccacccaggccctaaactgagccggcccctaggactggttttcctgctgatttatgtagatttggctgccg

SEQ ID NO: 361886 - DNA, 169 bp, Zea mays
gtgagatcctccccgacgagatggcggggacgggagccaaggccacggcgcacaagtcggcgacaaggacaaggggaaaagccggcgcccgactcgcgctcctcccgcgccgcacctcaggcgaattcaactccgaagaacgatgtttatcacttgttcgctgagaagg

SEQ ID NO: 361887 - DNA, 201 bp, Zea mays
gaggttcctctgaccgggcgaggctctcatggcggcggctgatccccgagaacgcggcgacgctgcgaatgggaggtcgcggcgctgaggctgcgcatacaggagctggaggcagagaatccagaggctggacaacggacttgcttacgaccctgtcacctgcggattcaaggagggcagtgttggatccattactgcaca

SEQ ID NO: 361888 - DNA, 185 bp, Zea mays
atccgcaattcccccgcgcccgagacgaaaccccgcgccaggagtacgtttgttcttttatcgatcttatcgatctggcgagggaggagaatgtctcacatggccagctggctgagcaggccgaaaggtcatgaagagatggttgagtatatggagaaggtggctaagactgtagcagtggaaga

SEQ ID NO: 361889 - DNA, 141 bp, Zea mays
ttggacgtacatagctacactgtaccgcacgagccagacagaaaccgagggcgagaccagccgaccaaacgtacacagatcgagcaacgtgaccggtgtcacacctatcgggttacggacgacggactacgaaccccacgg

SEQ ID NO: 361890 - DNA, 213 bp, Zea mays
tatcgtagaagtaaagccgcaggacgattagacaacgggtacgtagctgtacgaacaagactagattacaagacactaggacgcaacaaacaaacgaggaaggacacagagatttacctagatgtagcgtacggcaaacgacagaatactagacgaggaacatgttacgaatgactacaacgagtatggacctccaacgatgtactacatcga

SEQ ID NO: 361891 - DNA, 163 bp, Zea mays
ctcgacaatcgatttccgctcttctactcctcgcgccgccgcaggaacccgacgacaggtaatggcttccgcgcggtgctccggaagccgaatctcgccgcctcttctctaccccaactccgtgctgctgcatctcggaccgacgtgctaccgatgcgcccgt

SEQ ID NO: 361892 - DNA, 176 bp, Zea mays
gggtttagccatggcggccgaggcccagactccttgtcacaagctccgccccggcaaagcccatacgcggaagacgacgcagagggccacgtggggccagcctatctccgccgccgacgccgctgaggagccgtcggtggcgccggagcagagcacccggcggggtagttgcggcg

SEQ ID NO: 361893 - DNA, 174 bp, Zea mays
acttgtgaccctccctcagccgcgtcgctacgcatcctacgctccaacgctcactctgctcgcgccatgggaagaactacccgaccgtgagcgccgagtacaggcagtgtggcgacggccaggcgcaagtccgagccctcatcgccgagaagagctgcgccccgactctgctcc

SEQ ID NO: 361894 - DNA, 157 bp, Zea mays
gactacgagacaagacttgactaactcgtgcatattctacgtaccgagacagacggcgaacggcagcagagcagagcagcatggaccgaaccacaaggacggagacctgtgaccgaagtacagtgcatggcacaagcatcaccgagacagttaccac

SEQ ID NO: 361895 - DNA, 167 bp, Zea mays
aagctcaacaaacgcctcgggatcccgccgccgctccatctgcctatgctcccccacccgacagcagcgagcgacagcctggcgaagggatggccaaggccaggtcgttggcgaacggaagcaggcgcagcatcaaacggcggcggcggccacggctagtcctccaa

SEQ ID NO: 361896 - DNA, 179 bp, Zea mays
acgctcctctcacaacccagtcgatcaaaaccctagagctctcgcctgctcgtctacgtcgccggagcgagctaccccatactacatccgtacaaccatggcgacccagatcagcacgaagaagaagttcgtcagcgagagtgttttctacgccgagctcaatgcgatgctgacgcggg

SEQ ID NO: 361897 - DNA, 177 bp, Zea mays
cgcacccccggcagccgagacacccagtccccgtcgagcccatcggcaggtcttcatcggccccttcgccgaagcagagcgcaaccaggcgtacatgtgtacacccaagcccttaactgagcccgcccctgagcctggttttcctgctggtttgtgtggatttggctgcggagcatt

SEQ ID NO: 361898 - DNA, 125 bp, Zea mays
aaggccactaatgatgtcaggaaaccaatatcaccaaccagatgtatgtccaaacaaatatacgaagctataccaaatacggacttacatactatcacgtaatgacataaacttacaacaacata

SEQ ID NO: 361899 - DNA, 162 bp, Zea mays
acacataactagttgtcctgatattatagctttcgtggtgtgtttacgtcactgtatatgcacgggtggggagcacgaatgctatgccatgtattctgtcaaatgtttttttatactgtcaagagctctgacttttaattacgcagacaaaggcttatatat

SEQ ID NO: 361900 - DNA, 173 bp, Zea mays
ggagatctttcaaggctcagggatggctcccttgatataagggccagttctggagatgcttcaaggctctctagtaatgctgaggcacttagttctacaggctttcaagatatgagcaatcaggctaacaaacaagagtttcttggtgatactccctgttaccaactggagtg

SEQ ID NO: 361901 - DNA, 158 bp, Zea mays
agggaacgaaggcagtaccccgatacgaacatctaccacgggcccaggacggtactatcaaacccgagcgctgacagccgctaccacagggcactacaccgtggccaacgccacctcgtcgacaacggctcaacgtcgcgctggcttcgacgcgaggg

SEQ ID NO: 361902 - DNA, 159 bp, Zea mays
gttgattggtattttggttccaaaattgagctcaaggacaataaggcaagcggttggggttgttggcagtgtaatcaatgccccacaatggtggttcttcattcagcactagtgcagtcaaggaaaatagatcggaattaaggatatcaagtcggtgaa

SEQ ID NO: 361903 - DNA, 286 bp, Zea mays
catcagcatagacaagatcagggccatgaacaagtacagcaagggcagtaggaggcagccgcagcttcttcctactctctcactctacttctacctggccgtcgccacctttgtcctctgcctgttgctcactagccctgcctggttccccgggctgtgctcggcccgcgcctcctccttcctcaccaccctccctggcttgttcacggccttcctgctcagccccaggtgcctcttcgtcgtcggcaacctcaatatcgccttgctcgtcggggagtctaggctg

SEQ ID NO: 361904 - DNA, 109 bp, Zea mays
gagagatcgagtgccacttcaacaagcaggatttgcagagcgataagagattcatgagtagtgcaccaactaagcgcagttggcttcgccaaggtgctgtcgggaaaga

SEQ ID NO: 361905 - DNA, 135 bp, Zea mays
gatagtgtcactctcaccgactttgaaacagagtgggcatgaatggttgaccagtatagtctcaaagacaacaagtggtgctctgctttgtacagctgtcggaggcaatgggcacctgggtatgtgcgtcattca

SEQ ID NO: 361906 - DNA, 136 bp, Zea mays
gtaggtgatgaagctcaggccaaggagaggcatcctggcactgaagtacccgattgaagcataggcattgtgcagacaactagggagtgacatggacgaaacatctggcatcacacctatctacaacgagcctccg

SEQ ID NO: 361907 - DNA, 128 bp, Zea mays
ccccgattaacatcccattggttcccctgtgtgcaagtcatctagctacatttattaacatgagactttcaacaccaacgtacggttgaggggcaggaactatgcactcccggattggcgcccgatca

SEQ ID NO: 361908 - DNA, 265 bp, Zea mays
ctcgagccgcaagaattcttctttgatctctctctctctcacttagcatgcttagaagccacacttatttaacctaatgacaaacatcgaacttacttaatcttcttcccttttttgttgtctcctggtgaggttggtcgatctgatggtcagttcacgtgtgtagctgggtagctatgttgtgtacagcatgagttgtatgctggtgaactgctttcaacagtccaaagttttggtacctggttttctcttgctgggaaaggat

SEQ ID NO: 361909 - DNA, 143 bp, Zea mays
ccagctcgctcctcgccccgcccccttctctcaccggcgcgcctcgggcgttcctaccctgcaccctctcgggactcccacgccgtcggcaaagcagccgggcaagagtccgatccagaccccgcgatgaatccttgatatac

SEQ ID NO: 361910 - DNA, 160 bp, Zea mays
tagagtcagaagagttacatgacgttccattgtttttcagtctccataacatagcaggcactgttaagtgcacatctccatctttggttacgtttcggtctgcagttctaaatgcagggtatcggatctcaagcacccatgttaacccacttgggattaa

SEQ ID NO: 361911 - DNA, 144 bp, Zea mays
tagcctacctggatgcaaagcttatcatctggcaactcagaagtggtagtcgaaacgaagttaagcatgggcaatataaggtcttgatcggagttactcatattccagagcttaataccctcaaagctatagaagatggcatac

SEQ ID NO: 361912 - DNA, 263 bp, Zea mays
gcataccagaattcagccatctcactggaggggacctgctccgacagtgactcgtagaaaatcctgagaggctccctctcctccggaggatcgaacttctggccgggcaaggagtagaccttcttgtcggcctaccctctacctctacctctgctgctgctggtggtggttccacgcttggtagctgccgcagctggggaggaggaggaggagaatttccccttggcctgcaccacagcatgagcatgagatatccccccgat

SEQ ID NO: 361913 - DNA, 260 bp, Zea mays
tccggattcgacctcgcggcctccgagagccgcccgccaccgccggtgaacatcacccgggttctcaccgacgcgcgtgggttctacgtggcggcctccatgctgcaggcttccggtgtagcgagcgagtttgaggccgacgagcgcggtgctggcatcaccgtcttcgtccccaccgacgacgcctttgccggcctccccgccaccgaccgcctccagtcactacccgctgagcgcaaggccgtcgtgctccgcttcca

SEQ ID NO: 361914 - DNA, 283 bp, Zea mays
atgctcgaagttcttgtagcagttgaactttgctaattgaagctgcaaaaggaacttcgatagatcagcattacgaggcacaacaacaagaatgatcagatgctcgacaaaggcatggtggtgatgggagctcctcaaggccaacaaaatggtttcaaggaggcagccaactcggtggagttcctaggttctctactatgtgtaatctcatatcaagattaatgagtatcgtgatcgtataattttgaatcctatcaacccatatggcaaggcaaagaaaatg

SEQ ID NO: 361915 - DNA, 110 bp, Zea mays
ccagatttacccaaatgggttggggatctcccgaatggtagagtgtgtccctgagatggaatcagcttgagtactctgcaattggtcacaactattcatgcttcctgtga

SEQ ID NO: 361916 - DNA, 131 bp, Zea mays
tatccactagcgagagagacagcatgcaagctagctagctaacatggagtgcggcacaaaaaagcaacacgcggtgtgttggcgctgctgcttatccagctggtgttagctccgacgacggcgacggcccg

SEQ ID NO: 361917 - DNA, 266 bp, Zea mays
cttgtatatgccacactcgcatacacatacctgacaaaaggaaacacaactgccgctttgaataccttggatggtatgacaaagaaccaattgtacataacaccccagatttacaactgcctgtgtacttcttatgctgatgagaaggaaaccctcaatatgctgtgggttcgtgctattgagagaggctaatcaagaagagcgtgtacaaactgatgcacgaagcaaggcatggatcaacaaagcttacagttgagactgggtga

SEQ ID NO: 361918 - DNA, 240 bp, Zea mays
cggcggtgacgacgcgctgctctctgacttctgtgccacactgctcggcgtttccggagccctgggtgcccagcaagtcttcgcctctgcggaagatcccctgcaggcggcagcccacgtgctggaagcaggcgagcacccgccggggcccctgggcacacgaggggctatgcacgaggtcgcccgcatcctgctgggcgagggcccgaccaaccagaaaggctacacgctggcagcact

SEQ ID NO: 361919 - DNA, 126 bp, Zea mays
gcgccggcggctccacttcgttttcctcactctctcctccagctcagggtccggcggcgaagggaaggcaagatgtacaccgcgaggaagaagatcccaaaggagaaagggcttgagccctccgag

SEQ ID NO: 361920 - DNA, 122 bp, Zea mays
caaaaaccaactccgcgagacgtgatgcggacaccaagcgggacctgacgaatgctacgcgagggatcgagcgggaccttgcgtcattacagcaggaggagaagacactcgttgctgaaatt

SEQ ID NO: 361921 - DNA, 154 bp, Zea mays
ggcgtgtcggtactactagctagcaggcagcaagatccgccaggcagcgcagcaggcttggcatgcaggacgcaggatcgagagatctcgcgggtcccctgcccgcgtgccaaaatgcagctcttccaaggagagaagccggcccacgatttcc

SEQ ID NO: 361922 - DNA, 251 bp, Zea mays
gtacatcaagcacatggtgaccaacttggggctcaacacctggggctttgtgctctacaacaatcttctctcgctgctaatggcaccggtgtttgggtttctgacaggggagcacttgtccgtcttcagagcttttgagtcaagggggcagagttggtttgagcttgatgcctttgtggcggttgcgttgtcctgcgtctttggtctgctcatcagcgtctttggtttcgctgcaagggaagcgatctctg

SEQ ID NO: 361923 - DNA, 228 bp, Zea mays
ggtggctgttgtcctcatcgaacatctcggcgacgtcctactcgagcgagatctcgctgcagtccctcgagatccgggctggttccgtgttgtgatcgtcgggtgtaaaaacctgcagcagaactaatatgttgcaggaggagattgacaaggagattgaggacaagaagacagagctggagcccaaggtcgtggaggcctacgaagcatctcctcctgaggtcaagg

SEQ ID NO: 361924 - DNA, 252 bp, Zea mays
ctcccgttcttcccttgcttccccgtcgcgctgttcaacgttcaaacccttacacctcctcctcccttggccgcgcagtcgccattgacgaccccctctcactctcccctcccttaaatccctcctctccccgcgtccttctccccatcaacgcttcattcgctccagtctcatcgaatccaattcacagtcagccagacagggcgggagatctccaagaagctatcttggaatccgagaacaccttgcatt

SEQ ID NO: 361925 - DNA, 99 bp, Zea mays
cttatattttgataagacagatgtgtgatgcgttgtttgatgcagaacactaagttacaaaatgcggactatattttgggcaatgcatcgatctgtgtt

SEQ ID NO: 361926 - DNA, 116 bp, Zea mays
tttatattttgatacgccagatgtgtgatgcgttgtttgatgcacaacactaagttacaaaatgcggactatattttgggaaatgcatcgatatgtgtttatgtgaaaaaccaaaa

SEQ ID NO: 361927 - DNA, 143 bp, Zea mays
catccattttggtatctgcactgagttactgtgctgctgagaaaattcttaccgcaggtgtacagttccatgctcaactagtgaaagtcggatatgtctcatctatatccactggcaacttgctgatcagtttttattcacga

SEQ ID NO: 361928 - DNA, 155 bp, Zea mays
ggaaattctttttgcacaagataatgaagagcaatcagttgccactttaatattggattcccttatacagtgtccgatagacaccaggaagcaactagcagagaatttggtagtcataggtggcacttctatgttgccaggatttctccacagat

SEQ ID NO: 361929 - DNA, 204 bp, Zea mays
ctcgactcggccgctctcgcgcttgtgcggtgtgtgccgcgcgggtgctggtgcgggatgcctcgcctgtcctagcgctaccggctgccgagctgggtgcgggcgcgacgagtcgacgggtagacaagggtgcagatttatgagtgaacccgggcacactgtacaagtccctaacctctcgagcagtgtatctgacagtgatct

SEQ ID NO: 361930 - DNA, 260 bp, Zea mays
ggcacagctatttatagggtttgacaagaggccaaatatagtaatggaggtgccaaatagttatgtgcactttgcactagaagactttgttagacaattactaataaacttgccataggtattacagcagaagtgcttcagtcattcacatgtgttacgtgtaattttaggttgctatagattgtttaagacagcttattttaaatgtagaaaactaggagattttgtaactgcttgccattaacttgctgctaaattcc

SEQ ID NO: 361931 - DNA, 271 bp, Zea mays
ctttcaggcatagagacagccagagagacagagaactctactaccaattacttctgttaatgatttagaagcactgtcatttcctcttaagctagcatctgactcattatcattaggaactgctggatccgttaatttattcatcagtgtgtattgcgcactgctgtgctgtgctaggtactcaggaagcaaggataaagacacagccccatcttaaagacgctcagacccatatactattacaagaagtaggtagatggtcatggcagta

SEQ ID NO: 361932 - DNA, 271 bp, Zea mays
attgcttagcatgctagcagaatacaatattcgcccacctcaaataaatgcttccatcattacaactgttacaaagcgtttgtaccaacagatgcatttgaagctcagatctttaaatgacaatttaggtgatatgactcaacctggaaatatatataatcccaatcttcagcaagtaaccctatcaagaaatgaaccttccccatcttataatttggattcaaataggaacactcttcaacagtatgctcaaggtccaagtgaccgacat

SEQ ID NO: 361933 - DNA, 261 bp, Zea mays
gcgttcccattggattacttcttaggctggaaagagtgaaagattcttaggctggaaagagtgaaagacctggatgcactaaatcctgttctggaacagttacggtcctggaattgatcccatgctgccgaacgggccctaagttggaacctgttcaggcggggggtcagctcgcagctgactggggatccggcatcgcatcgccagacgccaggaggggactatcagccatggcagcgaggcagccgccgacttcgtccg

SEQ ID NO: 361934 - DNA, 204 bp, Zea mays
tccaaaaaaaacaaaaagggtacgaaacgcgacgaaagcacaaacccccaccgatactcgcatacgtctccgactgcgcacgtcagatccaggtgcgccgcgacccccctacgcctacagctgcgacgatccatccatcgcaacaggcaggatgaacgggactccatggcatctcccgagccaagggcgggtatcagcttcgac

SEQ ID NO: 361935 - DNA, 189 bp, Zea mays
aaactcgcgctcaaccgctagctcctgagttgggcatccgggcatctgcctcaatgctgacgatcgacgcacgcaccaccttcgagcacgaccctggacgttcacccaagctgcactcctctcgccggagactcagcggatgacgctccctagacgggatcccctgacagccacatcgtccgcaccccc

SEQ ID NO: 361936 - DNA, 184 bp, Zea mays
cgtcaatgctattttcaccattcctccagagctggcttatggcgcatctggatccactaccaataatcccacccaatgcaaacctgcgattgatgttgagatgctttcatggaccagtgtgcacagccatttgctaagatggcggcttattcacgcagctaccttaaagagggagagccctggg

SEQ ID NO: 361937 - DNA, 165 bp, Zea mays
atcggcggtggcatgtgggcgtggcgggatgctgatccggagtgctgaccaagcgagctgatcacgcgccgcagtgtagacgccggcaagtcaagtacttcagtcgtcgtcgagctgttcgtgatcgagttcatcctgtttcatacgggagatcggaggtggcag

SEQ ID NO: 361938 - DNA, 175 bp, Zea mays
tgagaagtaatccaaatccaaaaaaaggctatggaaagattcctgttgtgggccaccagcaacaagcaaccatatcatggacatatgggcgctagcctttaaggaagcgtcagaacggctttgaccagtaagggcagctggtcatgagtgtggatgtctgcctatgttaaccaag

SEQ ID NO: 361939 - DNA, 178 bp, Zea mays
tgatagagtcgagcctacacaggaacacgctacaatatgtatagaagcatatggccgtgctggtgatccaaaagaggctgtgccatgtttgatcaaatgaggaggaagtttggacacgaagcagatgacagttcaattgctggtgtggtggccgcatacatgaagaataaccaactag

SEQ ID NO: 361940 - DNA, 186 bp, Zea mays
aaacaacgccatacctacagaccatcaccgaggggaagtacaggactgctgatacttggtggatcggcatcgacatcagagtttaaaacgcgactgtgatcacatactgagaaacggatgtgattcatccatctgattgttttgtacatcctaatatttttttgtcacatatgagaggagctttag

SEQ ID NO: 361941 - DNA, 113 bp, Zea mays
atctgtgtatggaggctgcttgaattacatgtaacacccaccgttggctaactatgcggtgtattttggatccatgcataagaatctcaaaatctatgccgacgcgttttttt

SEQ ID NO: 361942 - DNA, 192 bp, Zea mays
atcaagtcgacttcgcgaggtcgaaatccccaaggcgaggcgttgaaaccctataaccctacatccaccacaaaacggcgcaggcgggagagtgcaagtggactcaggaggcggcgggcgaaatgacagcttcaacgtacaagcaccctacaagggacacccaacttacgagcatcgcaggacgagaccccg

SEQ ID NO: 361943 - DNA, 266 bp, Zea mays
agatgcccagatctgcagagaggggggaggggactggagatgccggggacgagcctcatgggtctgattggtgggtcccactcccgcatgcatcatgtatgcaccggccggccggccggcctacctgtcaccgcctctcgctgcgggggctacaggcctgcctgcctgcctgtcagtggccctcccttgttgccttgtcccgacctattaattgatgcatgacagatcgatccatggaagtatgggtagattagatcaatcatcgg

SEQ ID NO: 361944 - DNA, 271 bp, Zea mays
ctcgagccggccggaccggtgggagttcgcgaacgagaatttccggcgaggcgagcaagagcctctgtccggcatccgttgccgcaagtcaacgacgccgcagccatccaagtacggcggcggcagcgtcgtgaacaccgcgttccctccgccgttgccctttccgcctcccgcgtcggtcaccacgtctggcggtggcggtggtgctggcgctggcaacgagcgcactcctacgtcggcatcgtcgccgccacggaccgaagacctgacc

SEQ ID NO: 361945 - DNA, 266 bp, Zea mays
cattactgtacagtctcatctgtgctgatagcaatacagcacctcaagatacggtgttatgtactttccatataacccagctgctttttgggcgcctaactcaattggtcctgggcgtagaacggtagaaggcgatagcagtatagcacccaagttcaaagtcctcgtccaggcaaatctgggtgcatatctcttaattaaaaagaaacctggttcacttgtttggaaacatgtttcgtgggaactgtggtttgatggtgtccatt

SEQ ID NO: 361946 - DNA, 175 bp, Zea mays
atttcgaatcccgacaacctccctccccaagctgcttagccgccggctgggcctcagacctgcgtcaagcttccggcggcagcccatcgagcaccacaatggcgtccggcggagcggccatctcggcggggcctacaccgccgtcggcgacggcgtcgtcggttgagtggcacca

SEQ ID NO: 361947 - DNA, 264 bp, Zea mays
ctacgtcaaaaggttactttgtctattgctgtcatggttcagcctgtatctggcccagtgtgtctttttggaagtgaattccaaaaggtttgcagggaaatcttagtggcaggatcagaacagggtatggaagctggacaagttggtcttcgattagtgactaagggtgaaaggatgatgactgttgctaaagagtggaatattggtgcgactagtattgcagatggcaggtggcatcttgtaactgtaactttagatgccgac

SEQ ID NO: 361948 - DNA, 238 bp, Zea mays
ctcgagccgtgtaaaagcccaaagcttgacaatatattcccgcggaacccaaggtgtatcaacattggaggcagcagagagtgcgtgcaaggcaggatcagacaagaaatcacttttcaggtacaaatatttcagtgttgcaaaggatgccaagggaggtataacttcagctgatagcggtgtatcctcaagatttagactttccagatatttgagatgctcaaatgcagacttagac

SEQ ID NO: 361949 - DNA, 218 bp, Zea mays
ctatgatagaagaggaagtgtgtccaagcagcgaaaccttaactgctgttgtttctgtattcgccaggcacaaatttcttccccatggcaagaagctgcactcctttgctattaggagtgggctcatggacacaatcttggtagcatcattgttgacctctatgcgaaatgcggtgagttagtgtcatcgattcagctgtttgagggattcaatgggg

SEQ ID NO: 361950 - DNA, 229 bp, Zea mays
aggaacagtcagactatagaatatttgaatcagagcttaagcagagagaaagatacaaatcacccggtatcatctatcaaacggcttgtttttgatgcagatgagggaaatttagacattagagctggaaatccaaagagcagtatgtgagattgcaggaaaacactcatcctgatagtcctaataagtgtcgtactagagatcgctcatccttagtggctggtgttgg

SEQ ID NO: 361951 - DNA, 284 bp, Zea mays
ctccagttctatgtaatatgattgaccgtgataatggtcatagaaaggatggatgctttatagttttaccaaagcatgcacctgtgctgtctatccgaagctcaatggacatgccttcatgcttggaaggctcctctcagggtaaaaataatctaaacatatccaatatttacaacaatggtaagtttcagattgattcttcccaggataaaccaagatcactgaagcaaattggcagtggcactgaagctcacttgagcagtgctcactggtttccaaatctt

SEQ ID NO: 361952 - DNA, 280 bp, Zea mays
atctggtgcaaattcgtacatttgctatggctgtgcttcaaatagctaacaatatttgttatttcagtaaaccagaaatacttcaagacgtgcccaaggaaacaaaaaaaaggaaggtgtcgtcaatgctgttgaggcgcttcttaatcaagagaactattcaaaatccacccatatgcctgataacatgcaacaaccagagactcaaaattgtcataagaaataagactacatgtttttgctatgcatttgatgcctatagatctgaagctgccgaaaa

SEQ ID NO: 361953 - DNA, 274 bp, Zea mays
cacgcacgcaaactcaaaggagtgtgaccacggaactgaagccaaggcggttacagttgagaagggctctatgggcgagccggcgctgctgctggagcgcaccgggcgatcaccctgcacggccgtgaccggaagggccgtgccgacgtcaggatcgtcggcaactactttccagcgcgcgcgctgggcggccgggcggaggaggcgctgcggtcgtacctgcgggagcgcatcctcgcggagatcggggtacgcgagttcgtggtcgtgtaca

SEQ ID NO: 361954 - DNA, 266 bp, Zea mays
  unsure (1)..(266): unsure at all n locations
gaggaactcaagatgctgaccatctcattgaggagacagggcatatttgaatctggaccgtaagtgctacaggacaatgatggggaaaaaagacatctctgtggaatggttggcatggtatcatagnaaaaagactagagaagatagaatttgggccaagccttgaaaagagtatgggtcgaattcagctggtgaaggatggcgaatttccagacctgtaggatgatctaattactccctactcacagagttggagtaattaagtc

SEQ ID NO: 361955 - DNA, 268 bp, Zea mays
ataatttaatagcatgctaaggtaacgaagcatatgtacctccattgtcatgctgaaattttccacattgatattattttctctttggagttattgaatagataacaagttaagtactttagtagttcagtttctttcagctgacacctttttaatatgttatactatcaataaagagatgcataatagattggctgataggacttctgtttccctgtttgtacttttcctctgtaccttctgttttccagggagtaacattctattt

SEQ ID NO: 361956 - DNA, 261 bp, Zea mays
ccagattcaaaaccttttatgtgtgtcactgctgattctgttcccattagagctctctcttgggcaccatatataagtgaagaaagcacaaatacctttgtcactgctggagaggatggtctaaagttctgggatttaagagatccataccatcctctttgggagctaactactgctccaagggctgtattaagtcttcattggctaaaagatggaagggggatcattatctcactggaagatggtacattgaagtttcta

SEQ ID NO: 361957 - DNA, 205 bp, Zea mays
gcaccgttgccggcaccggcaggagcaatgcgcagtggaggatggttcaggaccatccgcaccgcatcgacatcgattggcgcgacaaggccagcgtggtcatcgacggggttgtctacttcctcagcaagaactacgcgtcttcttcttctgctgctgctggatctgaggagcaagactggatagcgtcgttcgaccttgacgc

SEQ ID NO: 361958 - DNA, 178 bp, Zea mays
tctggaagatccccagagtaccttgatactgcagttgcatacagctcaaacacagccatacttggtcgcaacaatgcagctgagacggtggaactgttgatcgcatgtcatattcaaacgctgaaatgcctttagataaactgattactcggtctatggagctgactactgaattttt

SEQ ID NO: 361959 - DNA, 164 bp, Zea mays
agcgcctgttgatcatacgattcgatatgactcaagcctccggaggcttacacctgtacactatggcactcagtggtgcgcgtatagagggaaggaggtgaccactttattgtgactcccgaacacaggtatactacctacaagactaggaacacgcacgaatg

SEQ ID NO: 361960 - DNA, 179 bp, Zea mays
cggaatagtatccaatagtctccaggccatccgcaaacacaagtttgtggacatattagacgatacctggatccgctgatttgatgcctacgttgattttgcttcgatcaagcgctccgccgaggaagcttcagacgatatctcggtccatgggccaatgacgcgtcccagttcctggg

SEQ ID NO: 361961 - DNA, 176 bp, Zea mays
cgcaagtccgttcgatcacctacgactccattcattctcatctagggtttaaatccactcaaacacgcttacatctacaattcgtgattgctcattcgatagatcgtactaaaggaagcccatagatctagtatgatttatatacaattcagcgcaactgctcgtggggattcgat

SEQ ID NO: 361962 - DNA, 154 bp, Zea mays
ttcaaggtgttcttcatctaacaacgcagaacgagctgttcacgtcgctggcggtggtggtggtaccagataacgctggtccgggggagaccaaggacggagggcgggtggtggagatcatcaacaagctactgtggctggcgtcggtgtgcac

SEQ ID NO: 361963 - DNA, 133 bp, Zea mays
actcaaggcagaacagaaatctcatgaagaagcattagaagctactgaaggagatttctgagtacggcgtgaccaaacgatggttttcttgacagctgaacttatttgaagcaatgggactacaagttgatat

SEQ ID NO: 361964 - DNA, 117 bp, Zea mays
ctagaggaatactacaatagtttcaagttggatgactactagcggttcacatccaattgaggtggacataaatacatgttgatgaactagatgcgctatttgatgctataagctata

SEQ ID NO: 361965 - DNA, 158 bp, Zea mays
ctaaattctgttgccagtgccgtactaagcggcaaattgactccaatggtgtagttgcggcattttggtggcgcggttaacctgggtgtcactttcatctatctgctgagatatcagcaatgacagaagatctactggtttggtttacggactgaccg

SEQ ID NO: 361966 - DNA, 179 bp, Zea mays
aagcacgggcggactcgatgcaacttgcagagaaccagtcctctcgctttctcaacgagattcgactagcttacatacgattgattcgggagctcgaggagagagaggagaggagaggcagtgatgccgctggcagagtagaccccgtagcgccgaaagcaacagatttcttctccacg

SEQ ID NO: 361967 - DNA, 176 bp, Zea mays
tgcacgctaggtcggcggaagatatgggcgccgaggtggacgccgctgcacgtcgcggacactccgcgccctccgatgcaccaaggacctccactccacccccgacggcgccccaacccctatccaccgacggagaacaccaaaatggacaaccatgagatggcagaagcgccaga

SEQ ID NO: 361968 - DNA, 171 bp, Zea mays
tggagactctgctcatctcggaggagcgcaaccaccagctccaccacttcacgggtcacggaagaaggcgttagcacgtacgcctacagtaccacgacgcagtaacacatgacgtggcacactgaccagagacgttaccactaccggacatacaccgtacggacatacctg

SEQ ID NO: 361969 - DNA, 165 bp, Zea mays
gctaagggaactttgacaacatgcgtacttgtgactaagctcttgaacggtgaggttggacccaagatcaatccataatccatctagggataagactttcagtttttagatgactgactatgagatacaagaatgaaaggtctgatactattatcctagctggtg

SEQ ID NO: 361970 - DNA, 192 bp, Zea mays
  unsure (1)..(192): unsure at all n locations
gatgaatcctacacagggaggcaatcctttggatttacaaaactgtacgatngatactatgcaacatgacataatgactgaccaaagctagtttgcctgaacaaataagatccaaatatgcagacacctatgtatcagtacaatgcagatgtactgcaatttctgggaaaaggatgttatgccgatgctttt

SEQ ID NO: 361971 - DNA, 189 bp, Zea mays
gggagctggcggaggatggctaatctggcgtggaagtgcgcgtcacccgaatgcgcacggagaatcatactgccgagccacgcaacacagaaacgtgctacggacgcagaaaggagaccgcagaatacaggagagcttaacctaccgtcgatccagaagaaggttccaacttaccctagagaaatggcg

SEQ ID NO: 361972 - DNA, 122 bp, Zea mays
  unsure (1)..(122): unsure at all n locations
ctggcaggtggcagctaagcattctaattactacttggatacccagtcgagccnggcgccgtgcgctacaagagatcatcaagagagctactctgcttgatgatttcttgtagctgacagca

SEQ ID NO: 361973 - DNA, 274 bp, Zea mays
cgagcctctgcctgagaagccaggcgctgttcccccaccccagaagaggatggcaaaggtggctaaggacctcaacccaggagttaaaaagatgtccctgggccagctgcagtcagaaagaggtgtggcatgtttgggatgcaaggggacgtgttcgggcttcgatccacattcatggaggaaaatatgcaagtcttgcaaatgcagccaagaggaccactgcctaacatctgacctagaagacgatcggaaaattggccgcttactgatcgac

SEQ ID NO: 361974 - DNA, 274 bp, Zea mays
attcattatgtaaaattatttttacaacttatagcttttttcatttgatatagatattacatgtcattttttgtaagaactttgacttaggacaaatcccatattcgttatcgtagtatgaatgctttgtgctactgaagacaccatgtttaatttactttgtataaggactttgattttgctatatgcagcttaaatatagttgctttgctttacctgcataatgctcaaattatatgtgtttttctattgtaaactgatttagccatgtagc

SEQ ID NO: 361975 - DNA, 168 bp, Zea mays
gttttgtccctactgtttcagctccttcaggttccttgccacataaagttcttgcacttgattgtgaaatgtgcataacagaagctggatttgagcttacaagagtgacattaattgacattaaaggatcggtggtgctagatagactagttaagactgctaatccaa

SEQ ID NO: 361976 - DNA, 271 bp, Zea mays
ccgcacacccaagcgcgtcgagttttctacaccaccggagctcatggaggagctggtggatgctgagtatgatgtgggtgatcctctccgattccgcatcgtcgacagtgtgctgggtgctgcctctccacctggactagcaccacgcgttctggacagcggcgacctgctgttcactacggcggaggagcccacgacgttcaaggaggctgagcagagcccatgttggcgaagggcgatgctcgaggagatgaagtcgatcgaggaaaac

SEQ ID NO: 361977 - DNA, 232 bp, Zea mays
ggcatatggtccaattgtcaattcaagagattatttcttggtgtcatgcccatattttctggtgaatcacaatggagagaccagtttagcaggatcgcctgtatttactgaggatagcagttttgcaataggattcgttctacgagattgccacaatggtaatcaaatgaaggtggcaatatcaccaaaacgattacgtacagtaatgagagaattaatgagcgaactggaa

SEQ ID NO: 361978 - DNA, 257 bp, Zea mays
gcttacagttaactgctgtgaccttgtagaagaagcagtaatcaaaatgagcacaagcttagggtgggtgtccgtggacgtgagactgtgaattcagagggggacaactcagacaggatagcaagtttattacttggtaaagagcaaggatggtgtagacacaactttccacctcttggcatactacaactaggagttacccttcgaatatggagaagtataatttggaagacgaatgatgtctcatttcatctcaa

SEQ ID NO: 361979 - DNA, 280 bp, Zea mays
caaatggaggggccacgtatggacttgctgataacaaggtatcacagacatttgttgaggtagaagttggcaatttgatgagaaaaacaagtaccagtaagggtctaaatcctacatggaacagtacatttaacatggtacttcatggagagacaggcattgtcaagtttcttctgtatgaattggattctggcggtgtcaaattcaattacttgacaagctgtgagataaaggacactgaagcagtaatgtaaacaggtaaagtatgttcatgatggtt

SEQ ID NO: 361980 - DNA, 273 bp, Zea mays
ggccctcaagctcgtcgacgaggcttacgcggtgctgtctgatccagagaagcgagaggggtttgattcgagcaacgttttcacccggttcgttcggtccggtgtcgttgatgctccaccgcccggtggcacactcgtccgtctgacagggtgagcagccttcacacaaacaagattatggcgttaaatggtacgagcaatgcagtctcgcgtaccaaccacgccgacaggccatgctttgatggaagggattcccgtctttcaaatgtggcg

SEQ ID NO: 361981 - DNA, 271 bp, Zea mays
ctttatttctgtactatcgtattattatctgtggtcgcatgttacatttagaatccaatgtagtattaaccgatatccacattgattcaaccatggcccaaactaatctggtacgttgcaacagtcagcatgccccgttcttatcctctgatgcagaaccaacctttcacaatccctcctccgcctcagctagtttcttcatattctttggaaacaacaggttgtgcattcagccttgggtttgactctttcactacgatgtcccttggac

SEQ ID NO: 361982 - DNA, 139 bp, Zea mays
cttgctccaggagaagtatgaagcagcaatgacagcactttcacacatggagaagagagccggaatggcagacacaatgctggaagctacaaagcaataccaggttgggcaggttaaagccaaccaatctttcacttca

SEQ ID NO: 361983 - DNA, 277 bp, Zea mays
agttcacattgatggtttatagcttagcttttagccattcaccatcttggactttataaccatctggcagttattgatctatcactgccttactacatgttacctatctggcagttattgatctatcactgccttactacatgttacctatctggcaattatgagatgcctattcttttcatatgtaaatcctaaaatattcgaatccaatttatatgtaaatcctaaaattttcgaatccaaagccaccaattacaatattacgtactgaaattat

SEQ ID NO: 361984 - DNA, 184 bp, Zea mays
gagattctggaaacctcaagtcaatctctgaggaccataagagaagaaagcagaataccagcagcagggattattggtggacttcataaaggaatgaacggcaaggctgaagaaaatgcaaaaatgagagatcgtttgacattgcgagactccaacgaacagttggagtcaattttctacgaaa

SEQ ID NO: 361985 - DNA, 179 bp, Zea mays
tctggatggtacttctgggttggtgctgccgcgcaaagagccagcgtcaggttgggctttgtacccatgtcctcaagcgtgacctgcaaggtttgttgacgtcgcactcgattttgtcccactctcttaacaaggctctgttcaatgatatgtcaaaaacggcaccttggacattgtat

SEQ ID NO: 361986 - DNA, 178 bp, Zea mays
ggcttctatcgcattttcagaagtttggtcaagtaatagatatttatattccatctaacagtgaaaaagcttttgttcagtctcgagaagggacgatgctgaagctgccctaaaagctaccagatgctgttatgggaaaccgatttataaagactatggtgggaccaacagagataga

SEQ ID NO: 361987 - DNA, 191 bp, Zea mays
tacctgcgatacccctactacgattcctaccctacgtacgacctacatacaattacaagataccaatactttgactgactgccactacagcgataccgatacgttgctacgagcaaggtccagtggaccatgagcacgctgcagaccatacacctaccacctacctttaccgtacttcacttgacctatgg

SEQ ID NO: 361988 - DNA, 185 bp, Zea mays
agctacagtacccaatacaaaactgcattagataccgtacgcccgaagcaacacgcagccgcggcgaggtcgtacgtcgaattcggaggtcagttattactgaacagctaatacagtacctatggcttctctggacgccgtgcgaggtgacctcgccctgctgattctgtaactgaacaaggccg

SEQ ID NO: 361989 - DNA, 180 bp, Zea mays
  unsure (1)..(180): unsure at all n locations
cggacacaggcacgacacgagcctcagccggcgggacagcacgggaggagggcgaacgcttacggtcccccccaacccaactcctaccccttcccgacaaggcgacgcgaagagantgaccgctgtacgactgcatgctgctgctgaagacgacggtgaccagggcggtcctagcggaac

SEQ ID NO: 361990 - DNA, 210 bp, Zea mays
tggcagcacacggacggcgttgccacacgacgctatggtacttaccgaagactgcatgcatgcaccttgatgtacccagcgcatgattacctgtagtgacgatgcaagctagactactcaggacggacctaccttgcagttggacgcgggcacaagcacatactggtcaacgcgactacctgcaccaagaaaagactgaaagacatgctc

SEQ ID NO: 361991 - DNA, 181 bp, Zea mays
agagcacgagacgaccagcgccatccatcgcggcaaaagccgagacgacccaggaatctacggacaccgtcgacccccatctactacacgatacaaacgttgctgctggagcccactaccccacacaccgaccaccaaccatggatgaggcgacagttgtggagtacaaggatggaaccat

SEQ ID NO: 361992 - DNA, 110 bp, Zea mays
tcctgccgacctcgacgtccagctaccctcacttcccaccgacctcccgctgaccactctcagatcgatccactaccctccgcttctgctctgctgtccccgagtttgtc

SEQ ID NO: 361993 - DNA, 173 bp, Zea mays
cgccgaccgacgcctctccgacgagcaaatccacccccccacggagcagcagagccggatcccccagatggcgcagatcccgcacccggcgaacacggcggtgacggcggcgcgagcacgaataatggcggtgggcagcgcgcgatggacctctacgagaagctggagaaggt

SEQ ID NO: 361994 - DNA, 170 bp, Zea mays
gcagcctctccatggctaacgctccctgtcctcctcacggcgcgcgcccctgcgtaacctccccagcaggccgacctccactgctccatgccgacaccccctgttcctcttctactctacaccattccctctcccacgccacattttatctctgatctatggcacacggc

SEQ ID NO: 361995 - DNA, 170 bp, Zea mays
aacgccgtcaacgctaatagctcaaatagagattcggcagttcacatgtcatgcaaaccacagcagttgttctgaagtcgcttcatcggcctcaacaacactggccaaggacttgactgtgatatcttggatagtgatcacactggagaagctaaatttgaggggggttg

SEQ ID NO: 361996 - DNA, 173 bp, Zea mays
gtcccgcagaaagagaaagacaacgccgccgctcgctaacgacgttccccggcgacctcctccaacgatgaccgttgatccagctatggatcacttggacgaacatgcacgtgctgccatgaatgtcggggtcagcttcagcatggccccaccacactcagaaagacgaggtc

SEQ ID NO: 361997 - DNA, 158 bp, Zea mays
cgctccggcaagtaccgcaagtcaatctacaagaggatatccaacttgtccacgtgcagtaacctaacaatccttctgctctggattgttatgatattgctggtttactacataaagcatgttagccgcgaggtccaagtttttgagcctttcagtat

SEQ ID NO: 361998 - DNA, 205 bp, Zea mays
cccacagcaggtacatcagcaagatgtaggggatctgggatactcgcttggaagatatgaagataaatggactccagaagatcgatggtattcaaggaattacatgtgaaattttctgttgtacctaaaaagatgattgcatagtaccgtgttactatacaatcacttttaggggatcacagaaatgatgtttttagagtaccgg

SEQ ID NO: 361999 - DNA, 285 bp, Zea mays
  unsure (1)..(285): unsure at all n locations
cgctccttgcccctaagcctcgtttccggtgtacgactccaacgacgacgagatggcctccccgctccgtcggagcttcccctccctcggccgcgcgcttctcacgccggcgccggcgcggatgctctccgcggaggcctccgatgccctcgttgagatcaagcccagggagattgggatggtctccggcatccccgaggagcacctccgccgtaaggttgtaatttattcaccagctaggactgcatctcagcaaggttcaggcanagttgcggagtggaaaat

SEQ ID NO: 362000 - DNA, 261 bp, Zea mays
gtttgacctcacggagaattcaccaataatgacaaggcagagatctgaagtgaacaatacattgatgtctggacacaatatggacacaagggccgcaaaaaagctgagaacagacagatttggcaggactttggttcggcagtccaaatgtcatgcaaacaacagcagttgttctgaagttagcttatcaggcctcaacaacaatggaaaaggaattgactgtgatatcttggatagtgatcaaactggagaagctaattt

SEQ ID NO: 362001 - DNA, 171 bp, Zea mays
cttcgtcgatgcttgaattgggaccctttgtccgttttcctagactctgatgctgtatgcaactgaaacaagtaaatctatgatcttaaggctgcaaaaaaaaaaaaaaaaaaaaaaaaaaaaggggcgccccccgccaattgccccctcccccccgggaattattcccgg

SEQ ID NO: 362002 - DNA, 291 bp, Zea mays
aggcaaaaaaataaataaatcgaagtctagtggatggttctggcatgtggaattgtggattgttaatttcgacatacatactactatccaaactccaaaggttaaagaaaatttccgtagtgatccaaggtacaaagccatgaagcatgaagaaagggagactatatttaatgaatacatagtggaactaaaatctgctgaacaggaagcagagcaagctgccaaggccaaagtggatgagcaagccaagttaaaggagagggaacgtgaaacacgtaaaaggaaagaaag

SEQ ID NO: 362003 - DNA, 252 bp, Zea mays
ttcggtcggtcacgcagcaagacatagtctggcatattcagtcatttcatttctttcactttctcatgtcacacctgtttcatctgttgattgcaccaatggtctactgtttgttgctgagagctgtttgcatttggttgaactggttcatgggaagcgattgaatgcacaaaagttttcaattggagggactccaaggacagtgctataccataatgaaagcagaccatgttggtactgagaactgggcta

SEQ ID NO: 362004 - DNA, 108 bp, Zea mays
ttggtctgcggcaaaagcgagcactggatgtcatgtttcggcattatgcagcagatgcacaagcagctacttaatgctgaaacatgacttcagtgtccatttgtgtct

SEQ ID NO: 362005 - DNA, 260 bp, Zea mays
cgatgatatgatttcctgatctggtgtgcttgcagggatggtgaagcttcaaagttgactgaaaatggcttccaatttcttctgatggaacaaatgcacaactttggtacataatgagagaatacatttcatctgctgaggaacgtggagtggaccctacggagctgatatcatttctcttggaacttagctttcataaattgggagcggtaaagtgatagtactttcagaacatcacgttaagcaagtagctatacata

SEQ ID NO: 362006 - DNA, 252 bp, Zea mays
aaaccgacgacgacccccgggcagaggcgaggcgtatgcatgtagcccaaggaagcagtggggctagatttccccgcgcctcgttttctcggcacttgcgtcggcaagcatctccttcttctcagacagacacacggtgttggaccgacgatgatgacggtcggtttctgatccgtttctctcagctccaacgcagagaaggagagagaggaagacagccagacagaaactacaccggaagcacgcgaggac

SEQ ID NO: 362007 - DNA, 257 bp, Zea mays
agcaccttcatgcccaataatagctgacctggttactgtacgcaatctgtttgacgcacttacaagttcatctggaggccgattgcattttcttgtttatgacaagtatctcaagagtttagacagggaattgaggtctgtgaaaggtatcatgcaattatttattgcctcaagttttcatcttgatgctggagaatgcatattagctattgatggagacaagcccattcaaccggtactgcaacatattggatatc

SEQ ID NO: 362008 - DNA, 260 bp, Zea mays
ctctgctgaagaccacatgctgctacagagagctgccatagcatttctccacagatgcaatggcaaccattctgttcttccaataaaatactggtatggtgagagtgaaggttatccttctcagaaagggagagatcaagaaagatgagatataaattcatatgctaccagaacaagaaagatgagagcggttggtggacgagactcctaaaaaaggacctgtgttcttgaaggttgactggacaaatggtatgacgagg

SEQ ID NO: 362009 - DNA, 157 bp, Zea mays
cgtagtcgtagctcacacaatgggcgtgcagagagccagtggcgtgtccttgctccatgcactgcttgttgtgttctgggcattgtcttctcgtcgtgcggaggggcagaacccatctggccacctgagcgtggatgcctctctgcagaaatctagg

SEQ ID NO: 362010 - DNA, 272 bp, Zea mays
  unsure (1)..(272): unsure at all n locations
agcgtcgccgtcgccggcacttaaggacgtgcggtctgactcggaggactcgtgcaccagcaccagctgcgccagagcgacaagagcagcgtcgtgcagagctcccctccgccgccgacctctggcagccaccgcccccccgggaacaagcgccggaagggcgtcccgcaccggtcgcccttgggcagcctcatcgttcangtctaggactcttcttcagcgccaaggcaaggcaaggcaaggcaacgcactctgtactgtacatgacatag

SEQ ID NO: 362011 - DNA, 106 bp, Zea mays
gcctgctgcatttgtaatatattcgaaatccgtattttttttcttcacaagcactactctatatacgatgaataaaagggcgacaatacagtgtcatcttgtggcc

SEQ ID NO: 362012 - DNA, 106 bp, Zea mays
ctttattcagatcaaggttccttcgaagaaaaaagaggctcgggttacggtgacattggccaattgcaggttctgtcatgttgcttatgatgaaatatttggaaca

SEQ ID NO: 362013 - DNA, 109 bp, Zea mays
cggaggatgcagctcagtagacgcttgacgggagctttctacgttcagacacagaatgggcgtgattcgtcatatgctagttctctcagcgaacaggcatctacaatca

SEQ ID NO: 362014 - DNA, 245 bp, Zea mays
cggctcgagcggctcgagctcgaacgaattcggctcgagcggctcgaggcaaggttcgcttcctgtagaaactaacactccatccggtgccatggccgatccggcggaggagaccgttgtcacaccgccaccgacccctgcggccccagccgtgggcgcctcagacccgcccctgcaacctgctgctgacagcgcctcaacggaaaaggtgtctgctccggccgcgaagtaaagtcccggggatt

SEQ ID NO: 362015 - DNA, 255 bp, Zea mays
cttcttcgcagttatttgtggcataaaaagagatctaactgggacactattttatttttcctttgaaaggtcttgattaagcctaaagatcaaaatgttgcactaattgtcacaaaaactaatttcaagcatctgtaagtacactgctgattcggttttttttcactttaaatgctcatgtgttttagttggatgtaacccatcaaccatactgcatatgattttgccatagcacataacattggcacattgttg

SEQ ID NO: 362016 - DNA, 259 bp, Zea mays
cggctgattagtaggtgggagatcgaggtcgcgcccttgccccacacgccactaaaggccgcgccgacgggctcatcaggcgcgctggacgggctcgcttctgccgctccgcgcttgtgcggtgggtgaagtgctggtgctggtgcgggacgcgtcgccaaacctagcgggtgcagaccttggtgggggagcgaggagtcgaaacaagaaccctgagtgaaacagggcacactgtacaagtcactaacctctcgagcag

SEQ ID NO: 362017 - DNA, 252 bp, Zea mays
gccttctcgccgccgctgatgctccgcctgggagggtcgctgcaggacaaggtggtgtacggcaccgcggacctcgggcggccgtgcgcgccgttcgccaagaacgcgtcggagatgcacggcttcacgcagggctgcctgaccctgcgcatctgggacgagctcaacgccttcttccagaaatctggtgccaggctcgtgttcgggatcaacgcgctcaatggccgtgttccgttgccggatggatccatg

SEQ ID NO: 362018 - DNA, 275 bp, Zea mays
gtagcaagtcgcagcatactggccgacacgaatcgattaacgggcggcactcacccaccgtgtggcctgccaaactgtccccccggccaacggcaggggcaccgtcaagcagtactacctcggcgggaagagccccgaggagtgcgcccccaacaggggcctcctcaagctcgtcaggcacaggtccgccgtcgcctcgcgctccggccgcctctacctcgccgtccagctcagcaccgactacccgcagccgtacctgatctacgccgtcgggc

SEQ ID NO: 362019 - DNA, 268 bp, Zea mays
gctgcacgccatcgtcgacacctgccacagcggcaccatactcgacctcccctacctctgccgcctgtccaggtacgtacgtacgtacggagcatccatcgcgccacaccacagttaatccgcccaaaccaaagcggcaagggcaatcttcttgacgtcctcgtacgtgtgtcttctcttctctccatcaaggaccgggtactggcagtgggagaaccaacagacggcccgactcgccgcgtccggcgagaccaagtgcaccagcggc

SEQ ID NO: 362020 - DNA, 121 bp, Zea mays
aatactacaataacttatgcataaatatgtgttatagtgtaatgagaaacgattttgtaatctatttctagttgagttgtcgttgcattgctacggtttctatatatcacagttatgttgc

SEQ ID NO: 362021 - DNA, 247 bp, Zea mays
gatgaatttgaaggtgagagagcagatgaggacgacgaggaggacgatgatcatccagatggtgatgataatgatgatgatgaggaccaggagaactgagccctcgcattgatgcggtggagttatgtaacccgtttaggggatttgtgtcagttggttgacttagctcgatgtcaactgatatgactgtataggtgcggatgaagtctaccaacttgaaagggcgactggaaagcataaatagagg

SEQ ID NO: 362022 - DNA, 262 bp, Zea mays
gtaagttgctaggaaacatttagatggcattcttctctgaagtgaaatgaaagatttagggtatgtttggactgacgcctaggccgccacaccgtgccacacttttcaaaccgcagtgtggcggacgatttggccgccgcgggttagtcgcggtgtggcggcgtaggcgccacatcaaacatgcccttagtattcagtcttgatattctgcagaccaaacttgttgcatcatgccctcaagggagactcaaactggtggagt

SEQ ID NO: 362023 - DNA, 186 bp, Zea mays
acgtgagttgcctttgaaagcgtaaagacgtggacgagcgctacaccgactgtactctttctttctcgctttggtcgtccacctcgattaacgattactggtggggagggaaagggaacgggagacgggaggggaatccaattgcgatggcctaccgactcgggcgatttcggtggggagaacaag

SEQ ID NO: 362024 - DNA, 214 bp, Zea mays
aattacggcacaaacggactacaaggacaaaccgcgaacagcgcaccaacctacacgaatgacccggacgagaggagacacgcacaaagtaacgcggacaccgaaagctgtaggctaccgctaacccgtacacgcacaggtgcaacgtgtacagctacggcatgactggtgttcgagatccacggaggcggcgcaacctggagctgcagcaccc

SEQ ID NO: 362025 - DNA, 213 bp, Zea mays
cgaggttgaacaacttcagagtggcaggtttgcagatgtacgaagaattggtcatatactgaacataggagtaaatgacctgacctaacgagtcatgaagctgaagaacacaaggaatgaccccatacagggcaagaactagttgacacgaagatacttagacaagaaccctgagaccccaagtactaaattgtaaggaccaaaacagctgat

SEQ ID NO: 362026 - DNA, 193 bp, Zea mays
acttcacctccgatacgccaacactaggccgaccgccgccgccctacgctacaactgacccacctgagcctaggtcttacgactcttcgtcgtaacgcttataccgagcgggaagacatacccatacaccaccaggatgctttcattgaggtaccgtccatacgacaggatggcgctaaggggggtctggcac

SEQ ID NO: 362027 - DNA, 140 bp, Zea mays
gttacccgaggggtgggcgtgggcaggtgttgacggcggcacttactctaaagaagacggtaccatggtacgtgagggcggatacaaccccaaggtagcccaaggaaggaggccgtcgccatattccggccgactcctcc

SEQ ID NO: 362028 - DNA, 195 bp, Zea mays
acatacagaccacaaaaggataccgacacaccaacacaactacattgtatgaactgcaaaggagccagatactgaatacttccagctgaggactgtttacactccagaacacagtacagatacacaacaggtgatagacatctactaaacccagatattactgagtataggatgcatgggttagctacatctaaa

SEQ ID NO: 362029 - DNA, 183 bp, Zea mays
cgcgcgcccccgctcacttcacttctctcggtgcgcaccgatccgaaggtgcctgctctcctacctcgtcggcgaaaagctggcggtgcgctgctgacgcagccgatcgtgccgacgcgggtcacgcagttcacgcggccccacctcgaccgctacacgtgccttaagccaagctggcgcagg

SEQ ID NO: 362030 - DNA, 220 bp, Zea mays
aagcgcttcccaccctccctccacctccgcaaccctactcccgaccgcgcacgcacaacacctaccatatcgcgccgctaccccgcttacctcccgaaactaacacctcaccgaccatgtccccctacccgaccaacccgaacatacctgtctccccctactatctatcctaccctacaataccaggacgactcgactcccccatattaccccatctact

SEQ ID NO: 362031 - DNA, 205 bp, Zea mays
acaagaatctccctagcagcagatcctcgtgcaagcaaagcgctagccatacctaactgtacccagatagacccgacacgaagacagaacggacgaggacagtaccaactggacggacaaggagaccaagagaagacagctggaccaccaaggcggcgcgcaagtctaacccggcgaccgaggagtgaagaaaccccaccgattc

SEQ ID NO: 362032 - DNA, 215 bp, Zea mays
cgcatgacggaacgaacatgaagccaaccgaacagaacaaacataggaccgacctaccgacctaccagccgtactaccggacctacgacgaaggacactaccctaggaccagaccgacccgaggaatactaccaaccagacttacacgcggaggcagaccgggtagtcgacgaaggaaccccctgatgagcaggaacctggagaggaatggcagg

SEQ ID NO: 362033 - DNA, 138 bp, Zea mays
ccgcagtccgcactccctccccaatcgctccacccgagaccgcgctccgcagattcgttttcgccgctaggtgtccggcgagatgtaagtggtaaaggcggcgcagttttcggggcggacgttggaactggtaagtgg

SEQ ID NO: 362034 - DNA, 256 bp, Zea mays
ccgcgtcgaccttgtcgtcgatgttggcttgcaaggcgagcccgagccggccgtgcgtcgtcctccttgtttgcctgctggtggaggtggccgcagtcgtcgtcgtacgtggctcggcgccgacgcggaggcagcgttcgacgacaactacgtggcgcaatggggtagagatggttatcaccttgtcgtccggggcacggaggcgaatgtcaccatggaccagagctctagtgccgggttccggtccaagtgtacg

SEQ ID NO: 362035 - DNA, 271 bp, Zea mays
gttggatagaagttggcaataaagtttatacatttacagcagaaaacagatcaaagaaccaggtaaacaatgtcctggttgttcttgattgcttgcagtcacatatggatcacgagtatgatatactactgatcgagggtctggattgggattatcctgagcatatcaagttaagtttaaacactatataaatttgaagatgattgctcgttatgttcaagttcatttgaagaggcactcaataggaattgacatcacacctcaaatatct

SEQ ID NO: 362036 - DNA, 256 bp, Zea mays
cgagagggcaggagcagccgcagtcccggcgatcccgccgccggtcgccctcacacctcctcgtcactgccttcgtttctctttccaacaatcaagatgagccgtggcggtagcgcgggtggtggtcaaagttctctgggttacctctttggaagcggtgagccccccaaaccagcagtggcaccaccagctgtaagtgctccacctgctgctgcaggtgctccacctgctgagaaaccacctgctgcaaagcctg

SEQ ID NO: 362037 - DNA, 133 bp, Zea mays
ccagaataaactcaactgcgaccttgagcaagacaacttttgctatattgcatgaaggacagattgagaataaaactagtttttggcgaacgaactattgtattttattgtacaatttagtatccatatatgg

SEQ ID NO: 362038 - DNA, 249 bp, Zea mays
ggcaagtgtgcggcgccgtccacgccgtcgtccacgaccacgaggcggcgctgcggttcaagggcaccaaggccaagctcaacttcccggagcgcgtgcagggccgaaccgacctcggcttcgtcgtcacccgcggcatcccggaccaccaccggcacccgcgggcggcggcggtgaacctggcttttcatggccgtacggtggggagcaccacaggaataaaaaggacgcgtgatcgtccagctggcc

SEQ ID NO: 362039 - DNA, 279 bp, Zea mays
caaaatcccatgtgtttgggtggagaagaagaaaggaactccagtgcagcaaacaccccgtgttcgatgaaatgtttaaatcagaatcattagcatatccgcagttggtttagctatggtacgttaattaatcacgtgatgcggaagacgagccaagtcgaccccaagatgacgtaacgggtgggctactcctcatggtgatgctggtgggtgaacttgaagatttcgtgatcggatcaagcgccaggatgtgagatgctcgccaaatggacgtcgtct

SEQ ID NO: 362040 - DNA, 283 bp, Zea mays
ctcagactcagagcaagctctctcgtaagaggcatttggcggcaagtaacaagataagaatgagaatggcggcggcgagcaacggcgcccccctggtggtgttcgacttcgacaagaccatcgtcgactgcgacagcgacaactgggtcgtcgacgccctcggcgcgacccgccgcttcgacgagctcctgcgccacctcccatggaaccacgccatcgatgcaatgatgggcgagctgcactcggagggcaagacggccgaggacatcagaggcagcctcag

SEQ ID NO: 362041 - DNA, 135 bp, Zea mays
taccgaaccataagccactcggatccatctaccactctaccctcctcgtcatcggctgatccgactacacatccgctcgacccctgatccggatctacgacgccgactccagtatccctttactctccgccgtct

SEQ ID NO: 362042 - DNA, 260 bp, Zea mays
acttatttggttccgtacggtggaacgtgaaacgacgcgtttattcacagtgcctctgctacttggcagcgtatgcatggcctggacccggcggccacgccgcacgccgtggctgtcacactcacactcttgctgcgcgcgtacgtcgtccccggccgccaggcgtgtcgacgatcgactggtattggcgatgctacgaatgctagcgactattgagctagtcgacgacgactagcgtacgatcggtgcatggaccatcg

SEQ ID NO: 362043 - DNA, 239 bp, Zea mays
caggctcagatgaactttctgtagtgtttcctggtgttatcgcgcgctttgatggtgctgaccttcagaacgttcttaaaaaagcatttcaagatgtaaaatcacgcctgtggaaagataagtttgaagagcaagatgctgaggatgaggaaacttttggacgaataccctttcagatttggaatgtaaacaagttcagttcatgcgctgatgctgcaattgttggtctgatgccacct

SEQ ID NO: 362044 - DNA, 102 bp, Zea mays
ctcgccgtactcgggtttattcctcgactcgcttccttcctcagcagtcctcgtctcgaattcgctcacggtgggagaaatcggagcgcgaggatgaccgta

SEQ ID NO: 362045 - DNA, 251 bp, Zea mays
tgacaatggcaatggctcgggcaggttaagagcaacatcgtcacggggttcatggaacgctgcactctttgggagttggcggcatagctcgtctgatatagggccttctagggcggacaacattctgaaacgctcagagacaatcaaatcgtctggcgggagcaccggggaccattcatcctcccgcaggaggcactccacggagatcccccccgagccgtccggctctcgtgaccccgaggattaagcat

SEQ ID NO: 362046 - DNA, 134 bp, Zea mays
tgtgaccctccctcagccgcgtcgcgtcgcatcctacgatccaaagctctctctgctcgcagccatggcgaagaactacccgaccgtgagcgccgagtacagcgaggctgtggagaaggccaggcgcaactccg

SEQ ID NO: 362047 - DNA, 256 bp, Zea mays
gcaatgcgtaccctgcccccatcctcgggcctcgacgccccctccccttcaccacctcgtcctcggcgcaggcacgcagccccacctcgctgcctcttggtgtctctccagccgtcggcgtacctgcagtccagccgcctccaaccgtcgtggcgcagacgccccaccccgtcgcggaggaagaacaagaagggcatcatcggcaaccccagggcgctctggtggttgaggaccgcctgtgcgcgggccaaaagaa

SEQ ID NO: 362048 - DNA, 154 bp, Zea mays
gagaaacgcgacggaacgcccagcacgggctgcacggcaggtcggcactcggcagcacatccttttctttcttacggccctccgccgtcccagcacgacagcacttcctttgaccagttcccaggctcccaacgtccggcggtcccagcagtct

SEQ ID NO: 362049 - DNA, 203 bp, Zea mays
gcaatacttggtgcagattgcgagatgtttgtaattttgccactctcagttttggcttcctgttattatgccatcatgtgtctatgactggtgggaccatatgtgtctatgactggtggacctgatggtatattggcgaaacccattaatcataatggcaaaattaccaatgtctcataaaaaaagatagcaaaatgaaaggg

SEQ ID NO: 362050 - DNA, 134 bp, Zea mays
tgggcaaagcaaatcctatcctatcagtcggatcgtgcgtctcgtcgagcctcgatcctatccccgccacgccgatccctcgtcggtcgtccgaatctggtggactatctccatcgccgggctgtcatttttgg

SEQ ID NO: 362051 - DNA, 167 bp, Zea mays
agcctccctaaatcagacatgtcaagcaatcagccaacgtggtgtatttctcattcaatattttagtgtgaatggagacactgagataaagacatcgtgcagatataaatggggatacagttaaatgtagcaactcttgagttcattttgtcccactgtagcaaaat

SEQ ID NO: 362052 - DNA, 254 bp, Zea mays
ggcgaggagcgggagcatgagtcccagcaggttaaggaggcagtccacttccaaggctaccgagacaagagcaggcaacgccaaggctacagaagcaaggggtgggaacgcgacactcggagataacaacgtggctgatgagctcactctcaaatgcgcagtggccgatcataacaggaatgcatccacagggaagaggccggcggggagctcgaaggtcaggatcatcccgagccgctacagcctcacgcccg

SEQ ID NO: 362053 - DNA, 124 bp, Zea mays
gggagtctcactgacaagagcaagctcgatgcgcagctgagcttttcatccaccttgtctcagacaaggccacgaacacgctctccatcatcgacagcggcatcggcatgaccaagtccgacct

SEQ ID NO: 362054 - DNA, 265 bp, Zea mays
ctttttcaggaactgcttgctttggaagagcatattggctcagagactactgcccttactgaagagcaatttaccaagtgtgtaaaccaaagtgtgtatgaagcaagaaattcttatagagatgtaagcaagatcgcagcagatgatgtgaaatgtagcgtatgtcaggtatttttcactctagtatttcaatgtttaagtatcgatgaattgaaattactagccttgttcggttgcgtctggatcaaagactattggaggaggg

SEQ ID NO: 362055 - DNA, 271 bp, Zea mays
aagagggaagacgactttcctcctgtgagccaatgaggccagctggactacgccgagacaactgggagaggcgcgggactcgcacgttccgcggaacgccgggaaggggtcacctcctgatgaagtgtccggttccggtgtcagcggcggttgaattgccatggcaatgcggtgggcgcgcgcttgtcgtgttggtctcttgggaggtagcggggctaggccgggcgggtatccgctctcccagcttaggtgagcgtccccgggcgcctcc

SEQ ID NO: 362056 - DNA, 261 bp, Zea mays
ggacgagcttaagcagatgcaacctgaggatgaatcaaagaaaaagaggctagatatcctcaagcggctccacttggaagaagagatggcatcagatggtgaagatgagtccatgttatcagaggagcttattcaaaagttatgtctggggaagagataaagctggaagacctctctgattgtgaaatcaaacgattccgtcaagctctggcctcaggtgagctcagtaagatgattgaaccgtggacaccttggtggaaa

SEQ ID NO: 362057 - DNA, 236 bp, Zea mays
gcgacgaggcagtgatggacgatgaggattactacgactactgctacagcgtcgtgggtgacgccggcgacggcgggagcgtggagtcgcttgtgcccgtggactatgacgatggccttgaggccgatggtaccgaacgctgtgctgtccatactcgatcagtcatgtgtggttctaaatgacgactttatatctgcgcgtcaagaggaagatgtaaccccggtatcagccgtgtt

SEQ ID NO: 362058 - DNA, 254 bp, Zea mays
caccaaccaactgttgatattataaagatccgttatgcatatgagctgttgacaaatccagttttaaagagggactatgatctttttggactggatgagcataaggatgtccttgagagagtcaaagaacaatatcaaatggtgcactttctcaaaattgatcttccattgttaaaagactctgtagtcagtttgatcgatgatgccttcaatgtactcacacatgagtcgttcatgtctgctattagtgaaga

SEQ ID NO: 362059 - DNA, 189 bp, Zea mays
gtttgtaaagtacaaataggagtgtaggtagtgatcagtagcaggtcagaagcaggattagtgctaccacaggcaggttcctaagcagataaagatgagtatcatagccatgtcctttgactccttgactagagcaattgtgagcttcagtgtttcgcctcattattgtcaagagaaaaaagtggccac

SEQ ID NO: 362060 - DNA, 299 bp, Zea mays
  unsure (1)..(299): unsure at all n locations
aagataaactcatttttatcattcctttgtggagggcagcacatctccaacggcgaagaagagatataaacagnagccaatgctacgctcagctctcctcaaccagagatcctcttgtcgatgctattgtgtcgatccaccctctttgatgacggcaaaaaggtaaactgattttatctctattgttaaatttgcaccatttcagtcaatgctactatttaagtattgaatagttattctataattgttttgcgcacttctctgcccggtggctacaacttcaagttttgaattgcatt

SEQ ID NO: 362061 - DNA, 295 bp, Zea mays
  unsure (1)..(295): unsure at all n locations
cagagttcctgcagccatacatggtcatgcatttcaacttgcacatgcctccttccgaatataatgaataatnaataatcatgtacaaagtgttaagcttggcccctgcctacttggggatgctccaaaaacagatgtcatccctgctggtgatgaagtgaatgaggaacaaggttgttctgaaggttttccagatataagaatatatgatgaagatgtgagcatgaaatttcttctctgtggagttaaatgcnacctggatgcatgtttgttgggggcactagaagatggtttg

SEQ ID NO: 362062 - DNA, 294 bp, Zea mays
atgtaaatctgtacagattgtaatgaatcacgtggtctataatctggcaagctgaatttgccttccaacagtgattgtctgatcctaaccggttctcagcacaggtagagatgggaaccggttaggatcagacaatcactacctgtgctgagaatcattgtaggcgccttatcatttgttactacagcggggaatgctctagtgtgcatcggggacggctaaaaaaaaaactcaacaaaaaaaaaaagggggcccccccagaggcgacctcaccgacccggaaatttttccggg

SEQ ID NO: 362063 - DNA, 271 bp, Zea mays
atgctcttatcagcagatgagctaaagcctgtaattggtaatctccatccatcagaatacttctatgccaagcaacaagccgactatgtaatatctcaggctgacacgaacaaagatggacaattgagcatgaatgagatgatcgagaacccctatgtcttttacaatgctttattcacagaagatgattatgagcttcatgacgagctccgttagttcccaagtcaagtaagggcacaaacttgtactctgttcttgtttctgcatctgc

SEQ ID NO: 362064 - DNA, 257 bp, Zea mays
cgcaactatgcgaaacgaatcgatcctgacgctgatgcagacatgttagagggatgtgaagatgatggtgttgctgaaatggatcaaggttttgatgaagaccaagatcttgatgaccatcaagatcaggagaccaatcccctctgttagctctagatgaacagaggccaactaaagagcagattgtaaagcaatggtatagtcaggacgtgttcacagaagcagcaactggcattactgagcagagtgacactgaa

SEQ ID NO: 362065 - DNA, 260 bp, Zea mays
acaagtgcttggttatcagggcacttgttcaatacagagacatgcatactttttcctttatttgattttaaggtgctgaatagctagcagttgcttaagtaggagcgagtgaaccagtcagagtgattagctgtcctgctaatcttctgtattgtgatgaaatacatgctcctggttggtcctgttcaggggattatactacttcaagtcatatttatgctgggttacaggtgtactttttggaatgccttgtgattctt

SEQ ID NO: 362066 - DNA, 257 bp, Zea mays
cacccgaatcctagcttaatctatttaggtacgaaaccgagcatcagaaccctaatttttgggtatgtgtatttgtatctgcctaattacaagtttatataggcaacatgtcttataatttcgtttgttttgcaaaagttactgggtcacgcatgtcgtcttctgctgcggtggacgagatggagctggacggcattgatcggcaccgggataaggagaggatggagaggcataggagggaagagaaggatcacaat

SEQ ID NO: 362067 - DNA, 268 bp, Zea mays
agcacgaacttgagtggatcctgcgtggctttgggcagaatttcagagaccaaggaagaaatggccaagctaaaatcacagggacgtacgtatgcagagaaggctggggatccgaatttcggcgcacctttcctggattgaagctgcggcggcaattggagccgcgagcacagtgaaggtcacgaggcacaggccgccgaggcggagctgcgaggaccctgggctcagctccgcccacgagtagagggcgctatccttgagagcagag

SEQ ID NO: 362068 - DNA, 164 bp, Zea mays
gctgatctcaaatgtaaaggacagtacatgccagctctgatcaatctctgaagggcttgatctctgcggcattgtttcaccacattaactgcattgcttgaaagatgcctgtcatccattgctgctgttaacttttgatgggttaatattgaattattacatcg

SEQ ID NO: 362069 - DNA, 264 bp, Zea mays
caaatggggggccaaggattcttctatttgtagggtagtggcactttcaaagaaggccaaggattctatttgtagggtagtggcactttcaaagagtttctttctcttttaaaaactcgttaatctcgagctgttaacataaacataaaagattacgaatttctgatttctgaaaaaaaaaaaaaaaaaggggggccccccatcaagggacctcttcaccccgggatttattccgggacgggtacctgaaggggtacaagtttc

SEQ ID NO: 362070 - DNA, 258 bp, Zea mays
agtagtgctaccggcattagaacactagactactctatgtgaatggagtacatacagaaacagaatacaacttccttcgttagattctgattgatataatggtgatagggagtcaaaaagaatggatacctatgcatcctagagcacgtctgtacctgatattcatatgttacatcgtcgatcgcggcaattcatagctccgtgtcgtggaggcaatagtacaagaagaggaaaacttgagtttgtgctacctcgcat

SEQ ID NO: 362071 - DNA, 116 bp, Zea mays
aagctgcagcatgtaaaagtctgcgctgataattatcgaaattgatccaataattatcagcgcagagacatcatccatcgaggtgaagcatgtaaaagtctgcgtgcgtcgacagc

SEQ ID NO: 362072 - DNA, 281 bp, Zea mays
agtacgtcgacagacttaatcctaggctgcccgcagcctgttgcgatgatgctccaacttagacattgtaacgcgatagctcctctccaggatggtcagggagttactagactcacgatacagcctatccacattgtcatgagatccaacgagtgctcgttttcctcactgcacgcaagaacatcactaagcattgaagcaagcagagcaagaagcaggagcagccaaggaagtttacctacatgtgccatcttctcggagtcgagtgtgcattcagagag

SEQ ID NO: 362073 - DNA, 276 bp, Zea mays
cgttccctgtttaagtcatgttaggcacaaacccatatggcaacagaccaaaccttcttaaccacatttatactccaactatatccctaccactttggtatcacacccccaggctgataccataaagagaaaaagttatgatgtcccaaagtagagcacacactgctgcacacccaatttcagttaactgaaacagctctacactaagcgtgacagagagttttgcaactacctttttctctaaattatccgtatggcaagccaactctttgtatg

SEQ ID NO: 362074 - DNA, 276 bp, Zea mays
acctttgatgcctctgtttgtcttggtctggttccagtgatagctgtatcttgtgctaggttatggttatagcagttcatcatatgagcttttggagaccagcaagatatggaaagttcctggtaattacttaagtatcatttcactgaatgagtaatgctagctagttagtgaaaaggaacatgtcagcacctaactgcaccagatatcagaccgcaacatcaggatacaatacaatgcagcgagataaacagtctacccaacgagtataaatat

SEQ ID NO: 362075 - DNA, 269 bp, Zea mays
catactcccaagaggaacggagccggcgtgctcgacgactgaccagggacgccgatcggaacaacgctaaaaataccaatctcctgagtcccgacctaccaaggcggaaagggagagggggcgctgtggcgtcaggaaataactggaagccgagggctgagggcgagtttcagagtcaggtggttatcgctttctttttcgttttctttttccggagggtagtattggggatgccggttgctaggccggagccgcaggagccccgggtg

SEQ ID NO: 362076 - DNA, 287 bp, Zea mays
gaaaggcaggaaaagcatgtatctgactcgatccgatgtttctcacgggcaccatgggaatgggaattgctgttgccctcgttttaaactcatctagaggatattgcccacgcccagatcagtatgctctgtctctccatctccatgcttcacctccggcattgatgcagccagctgtatcaattctgcaaaagaaaagttcctatctggtaaactgctgatgaactaggagcctaggacaacatgaatttttgtttcgcttcagtgcttggtcagtgaaccgtcca

SEQ ID NO: 362077 - DNA, 279 bp, Zea mays
gcccgatgtacggggtgataaataaggtggttattgccagtgtacgtgggataataaggttgtatgctggtgtaggtgttctgcaggctgcagcgtgttactaattaagtgcatctcttgtcctattatgtattgctgaggtagttgttgtcgagttgaagtttcagtgtctcagatacatggggatagtgatgtacccagcactcggtcactagtgaagtcctggtcattggaaaaaaaaaaaaaaaaaaaaccaaaaaaaaaaaaaagaaagacaaa

SEQ ID NO: 362078 - DNA, 266 bp, Zea mays
atttattgctcgatagtttatttttaactaaaacgtgataaatataattctagatggagcagtcgttatagctctattttcatgtctatatttatatggatgattataaacctagacatatataaaacatatacattagttattgtattaattcagtcaaaaattcaagaacttttaatttaggacggatagagcactatttaattttaaataataagatattttgatcttctcaatttcctctgttactcttgcttccaaataat

SEQ ID NO: 362079 - DNA, 272 bp, Zea mays
agtgcaactgatgctggagctgaagttagcgtctgtttctaatttctaggtttctgtgtttcaatggcctcttgaaaattgaaaatggcctcttgtaggttgaaggatgtatgcatggaatagaagtcagataacacttttgtgcaacaggctgaagtcattcttgttgatgggaaattcctagaggctaatgctgaccaacttgctaaggtttaaatgcaggtcagtttgcctactaagcatccacaaaatctcattataagttctgagaa

SEQ ID NO: 362080 - DNA, 265 bp, Zea mays
gaagcaaacaccacccagactttcttcttagtttgccattatcacatctgtactcatcatgcacatgaaacttttggttatgtacaactcaaaggtagaaggaagaccttaaggtatgttgtcatagtaattgtgaaatggatttggcactggtatttgatattttctgacttctagcatcactctgaaggcacatgataaagctcgagctttatcgatggtcggacgatgataacgcgctggaagaagtaatgagtagagagta

SEQ ID NO: 362081 - DNA, 284 bp, Zea mays
cgaagatgtcgatgaccgtcgaaggtgagtgcgcctagacccttctccccccgattttccaacattttcctgtagtccagcttcgattcccgtcgtttgggacgccgattcgtgcatggagtcaggccgattgggttgttgctagggttccgttccagtccgatggatggactcggttgctctcttcggaatcagggctttggagatcccgaatagattaaggatggtgcgctgtaagttacctctggcagcgcagcgccagcactggattgctcgttcggtcg

SEQ ID NO: 362082 - DNA, 220 bp, Zea mays
ggcagctggtgaagtgcgcatacaattttattgcattcgcttatcaaatctgaatgatctcccgttttctggagtgcttggatagtagttctaacttgcagataccttttgaggatcagcgaagggttctgaaaggagcctgtgagaaccctgtttcccaaagaagatggtttgttttcccaaatttcttcgacaactaaaattagcttccacataacat

SEQ ID NO: 362083 - DNA, 222 bp, Zea mays
agtgattctgatgaagaaaatgacccgactgttcagccgccagctgtctatgaaaatactcctacatatgatgacagttttcctttcgtcactgatgctgccggatctggatatcctgaaaggtaccaggaggatgctagtgttggtacaagtggtcctggtttattgaggcagaacactggtgaatttgaaataaataactggcaaatgctttcttccaca

SEQ ID NO: 362084 - DNA, 165 bp, Zea mays
atctttgccaatttgtggatgaacaaattgtcctacagttgaatttcacctcagcttgcctattatgattggctgacgcagaatcatcaagtgctatttttatttccaaaatgtctgaagctttggtttgaattcaaaaaaaaaaaaaaaaagggcggccgccga

SEQ ID NO: 362085 - DNA, 250 bp, Zea mays
agcaaaatctcaaactgaaagcaagaacattgccaatagtttcgagttggacaatggacatgtcactaaagtacaacctatagattccacagggctgggcctagatgttgatagttcagttactatcaatgtgcctaaaaatcatcccagagatgtgccagttcctcttgcaacaaaaatgtatcattcacagggcaactaccgtcttcgatttgagcttggccagtttatcgcgaatcatgtgtgagat

SEQ ID NO: 362086 - DNA, 146 bp, Zea mays
acaattttagactatgttgcagactcaaactgtcgatgtatctgcattctgcctggtttgctttcttatcttaaattgtgttttactagatagtaaataagttcatgctattgcctttaatgcttgtcctagtggtcatctttttt

SEQ ID NO: 362087 - DNA, 239 bp, Zea mays
caagatatggaaggctgaactaagagcggttggatatggcatgcatgcatgttgctgctgtgcatatcttaggaatcaatcaatcagtcagtctgtactgaatttcttcaagttttctctttttttggcatcctgccatcgcagggaagaataatgggtggggtgacctgttgatgcaaaaaaaaaaataaaaaaaaggaaacttaggcttaaaaaaaagaatgagttgattctaaaat

SEQ ID NO: 362088 - DNA, 139 bp, Zea mays
  unsure (1)..(139): unsure at all n locations
ccgacgcgtccccacctccgtcgccgatgacaccgcgtgccccgcagattcggcatcacccgccgcacctcctcctcgccgaggctgtcgcctcctggcaccacttccacacaacatacgagatagngaaagggggatg

SEQ ID NO: 362089 - DNA, 285 bp, Zea mays
gcgatttagttgtgtgttgcttgaatccaacctattggagttgtttatatggtgcggtgtcggaggttccgtgcgacatttttgtttcttcaacaaggcaactggttgcttgaactccaaagtgtacaaccacatcttggtggacgatatgtggttgatggatgtccaaagatggatgaactccaaactgtagaaccatttttgcttcttcaacaaggcattcattcatcgttttgatggcttgcagcgatctacagtggccaaccctacttgcgggtgttggct

SEQ ID NO: 362090 - DNA, 261 bp, Zea mays
agactgtacaaaatattgtttacattatagactattgttttacattgtgtacagtcatacgtacgatctactagtcatagccttaatcagacccgctgcgatattaaattgaattactaaaacatgcaataggccatgactagtagatcgtccgtatgactgtacaaaatattgtttacattatagactattgttttacattgtgtactttgaaatgagagataattgtttacattaaaaaaccgaaaaaaaaaagggcgg

SEQ ID NO: 362091 - DNA, 286 bp, Zea mays
  unsure (1)..(286): unsure at all n locations
agaagatgcattcccgatgagcttccacttgacaatttcacgagcctggaagatgcattcccgatcagcgatttcatcggttcaagagatgagcatctgtatgagcactatattggcctggctgacattagccacctgcctcttccaatccatgatccagctttcaatctggatgcagagcttgattgaagtgggtttgacttcgctgcgattgaaggacancttgatgtccttttacgctgcaatcagtgatgtgttatactgaaacctgccttgcttatgttgt

SEQ ID NO: 362092 - DNA, 271 bp, Zea mays
aggaggaagtgacgacgatgatgatggtggagaggatgaagaggaggatgatgacgacgatgatgatggggatggtgacaatgaggaagatgaggaggaagaagaggaagaggatgatgacgatgatgtcccccaaccacctactaagaagaggaaatgatagatggctgtgatttggttggctgagcacttacatgcaggaatgctccctgttcgcccctgcctagcagtctcctgtttagtgggtagggggttttagcttgatcgggac

SEQ ID NO: 362093 - DNA, 244 bp, Zea mays
ggatctcgaagctacatcggtaacacgatcacacctgacgcggaagggggactggaaatcaggagggagaccgcagagctagaccgccggatatggatccgagatctgcgatctacagatccggcgcactccttctcctcgacgccatctctgcgttcgtcgacatctgcttatcggcaatcggagacaagtgctccgcctgctaggcgttgctgcggactacagatcggaatacgagtgagag

SEQ ID NO: 362094 - DNA, 283 bp, Zea mays
gatgatcttttcttttcaagtttcatctccagctttcgaatggcagcctctgcttttcgaaagctggagatgaaacttgaaaagaaaagatcatcgtcaatggacagaattctaggcaaactccgctctgctcagaagaaagcacatgctatgcgaagtgtagtttcttatagtgaagatcattgtggtgcgaggacaaccaagaagacatctttccttgtcaaaactggcaagcctttcagctgctgctttacctaccgtgcttgctagttgttgcacagct

SEQ ID NO: 362095 - DNA, 294 bp, Zea mays
tgtgaactagactattacaatggttctggtgattcaaatttcctggatcttgactggctttcagcttcagacaatgaaaggtcaaaagccataagcactcctgatgtgaatatttcaactgatcatccgttatcccatagattacatcatgaacaccatcatcagttgaaatccaggctcagggattatctaaggattttgtgcagtgggttaatcaaggagagacatgttggtactgatattccaagatgggcgtaccatgtagattcaagccacataatggttgcacttgca

SEQ ID NO: 362096 - DNA, 101 bp, Zea mays
tcatcttgtagaaaagaaagagtgagcgcgagattggcaagggtatagggttcttggtcgatcaaatatctttccccttttggattctcctcttcctgctt

SEQ ID NO: 362097 - DNA, 226 bp, Zea mays
  unsure (1)..(226): unsure at all n locations
aacatgtgattcaggggcgtattctcaagtgattcgccgttgtcagttgtatcctttagttagaatgttgtaaatgctatctgcttagtgcatattaggacataactacatagtgtaagcagtccccatgggggtcatgtcacgctactattantggctgccttgcctgtgagccatgcgacatatgtatcctgtcgcattaggatgagcgacaaccgacacggtc

SEQ ID NO: 362098 - DNA, 259 bp, Zea mays
caagaagctggtaatcaaggagagccacttcggtgacgccgctctcctcgcgggcgcgcacaggtacgagtcaatgcgcagtctctggatgtcgtcctgccagatcaccctggtagactaaagcgctttgcgaacattcaaaaatcaatatggagtcatccgtcgggcgagctttcatgcgatagatggtagtgtcagcggtgcgcgaaagtaggcatgtctacctctacgtatctggtggactagatgcgatcccaga

SEQ ID NO: 362099 - DNA, 125 bp, Zea mays
ctacacgaatgatgatgagttcctcggttgtggaaccctcctgataatctgatctcatggatgtcattcaggttgaagtgcagataagtgtgttattagcttgcttgtagaaaccttatgcgagt

SEQ ID NO: 362100 - DNA, 233 bp, Zea mays
acgatgatgaagtcattcctggcgaagtaatagatgacacagaaggttctgaaccaactctaccagtctccaacaaagacgccaacgaagagtctggtcacaccgtcttgggaaatggtaccattgaccaacaagaagatgatatcaggccactgactccggatgtacaagagagtcaacccgagtttgtggaatggaaggaggaagaagctgaacctggtgatgttgctgag

SEQ ID NO: 362101 - DNA, 266 bp, Zea mays
gactagttctagatcggaaaaatcctcctcctccgggtcttcctcaaccaaatccaaggtcccaccggcgaacctctcggcttaatcatgtctaggccgcggaagggccggaaagggtcctgggcaagggcggggccaaccgcaaccgcaagtgctgcgcgacaacaatccagggcatccaccaagccggcgattcgcagtttggcgaggaggggcgcgtcaacgcatctccgggctcatctacgaggagaccgcggcgtgctcag

SEQ ID NO: 362102 - DNA, 267 bp, Zea mays
gtataggctgtccagggaacttttagtggctgttgccagtggatgggataagcatgtggttatcatcgacaaaataattccccaggcttggaaggttagataccttttcctaatcttctatgttgattcatcaatcccttctacatgcatcacatcatcagactatttatatgttcagcagtctggttcaaacatgtacttatattacaccactgtttttcacactacactgtacttgtgaacaatcactctgatgcataccagaag

SEQ ID NO: 362103 - DNA, 268 bp, Zea mays
tggtgctgcccctacgacggcgaggagcaggagcaggagctgtggctgtgcttcgcacggcacacggggtacgggggatacggtgactggcccagaggagcgaggatccttgaggtcacggaggagccattctcggccgtgtcatggatacggatggagaacgggaccaggcacagcgacgttacactgacctcctgaatgcatctgcctgactgattctcttgtataatgtacagtatagaggatatgtctttatatatatagacta

SEQ ID NO: 362104 - DNA, 266 bp, Zea mays
gtgtattatgcttattttttataattttatataaatttaggcttttgattttgggcaacaaagatcatgcgttattttaatttaagttttattagcaattccacggggaaaagttgcatcctaattcctaaggatcttcttaaccgagcatcaaactaaaaggtctgctacagacaataaagtaatccactttgtttaagattttcaagaacaaaacttagtaacaactaaaacctcctcgttgccaaatcctgaaatcaagaggc

SEQ ID NO: 362105 - DNA, 258 bp, Zea mays
agtaatgacccgggtggttcttaagattgtgaaatgtgtacatgtgaggtttccccttggcaatgcacagaattggatttatataaattgcagcatgacttgtttaatctgaaaggcaaataattttgcatggataaccacacattgtatcagtatttaattcagaagattgtaatgccgactggactttggacttgtcttcacatatcattttgtgagcaaaatctgatgtatgctttcaaatgttttatgtgtgtc

SEQ ID NO: 362106 - DNA, 265 bp, Zea mays
gagggaaggggaagtgaacggagggagcggaagaagatctccggctctcaaagctacatcctgaacccatcgcgtaagaacgggcaaaagaatcggagctgatccggcagacgctctctctcggaatgagtacgatttgacgcaattgcggccgaactttcttgcacccaagatgagtgggcatggtgacactgcgacctcaggtatgcgtaaatggctttctgtgaccacctcggagtggcgttgcacaaattcctggtgctcg

SEQ ID NO: 362107 - DNA, 261 bp, Zea mays
gctaaggctacctctgttgaaggagatgacaagtctgaagaaagctctgttcatacacacgaggcaaatgacaactcaagctccgagattcttttcaatccgaatgtgtttacagagaaatcgctgctgacgaagagttggtaaaaagggctggtacatatcttgtagatatagtgatcccaaagtttgttcaggatctatgttcccttgatatctcccctatggatggacagactttaacagatgcattgcatctccatg

SEQ ID NO: 362108 - DNA, 274 bp, Zea mays
aggtgatgctatttgtatttgagtgcctttagaggtaaatgctttgaaattgcttttactatttgtgttcggagccacactttttttattttataacttgatggatgctgtcacagtattcatatgggaagctgcaggctccatccatttgttattattattattattatgctttttggctagttctctgatgccctatttggcacaggtaaggttgatggtcggtcttctaaaatctgttgggactggagatctaacaatgcagatgttgaga

SEQ ID NO: 362109 - DNA, 272 bp, Zea mays
  unsure (1)..(272): unsure at all n locations
ctctaggtgatgatctggtgggatgctacctgcatccaatgcctgtcttgtctgtcttgttnaacactagaaatcataacagcctctatatttatgtattgtgtggccttttggagagctgccaaaggttcctttatgtttactctatcactcccaaagaccagaaaaatgtgtcaccatgtattgttggttacactccccttgtactgcccaccttggaccattcttcaacaggagattttctgtatggtagatatggttgcattttacac

SEQ ID NO: 362110 - DNA, 266 bp, Zea mays
ctttgcctactgagagttatttagaagtctggtcaccagacttctaatccctcttattatagggaaagtatgtgatgcgcagacctcctttcagtttaatacttgaaagtgaaaaacaagagggctcactgtaagtttcatgtaactgcctttcatgattaatataatctggtctacatgatttgcgcggtggacgtttaggagtacgttttggcgaaatcgcatttcctttagtataattgaatatatttaatgctgataaggtt

SEQ ID NO: 362111 - DNA, 245 bp, Zea mays
aatcaaattttagcctacaaaagaggatgatgcaacaatgtagcatttcagaaaaggagcattttaagatattcaaaattcaaatgatcaaacacaaatatttggcactatatatttcttacctcatcaagttttacttcaagattgttaagtttcatctgtaaattttgaaaatccttgggtacctgctaaagggggtaaagtagaattaaacacataagaattcagaagttaagaactgttga

SEQ ID NO: 362112 - DNA, 127 bp, Zea mays
  unsure (1)..(127): unsure at all n locations
tctgtacataaaagctanagcactngtggtgngcccctattgctagtgtgcataacataggggtccaccacaagtgcgttaacttttactgtacagatctccacatcccaatgctattgggcagatc

SEQ ID NO: 362113 - DNA, 306 bp, Zea mays
cattgataagcaagagagttctatttatggtgaagcatgttcaatgtctccggtcataatttcttactttggatataagttgttgaacaccattcttagccctcatcatgaatggagtctaccacactagtgctcttcatgccatcagaattatgcaggtgcagtacttttctgattcttttaggtttgggtataatgacgtgctgaattgttattgtaaaacaaaagtggaaatattctcgtgattgtttggatattagttattcaatttttattgtcctgacttgcatgattacactgtaggct

SEQ ID NO: 362114 - DNA, 287 bp, Zea mays
attggatctatgagaataggaattggtaattcttatcaactgattggaatttccgcagcacctattgctccatttgatataaaggtttaagccctttttggggggcatttagctaaagtagggcattttgtatttaccttttggacgctcttttcatatgataatggtcatacagataaaaagagggccgccaaatcaaagttgtcaaagggtatatcttctgatgaggaaagtaatgaaggacagcacaagggccgccgtaacaatcttcaaaaaggagaaggaag

SEQ ID NO: 362115 - DNA, 290 bp, Zea mays
caaaactctttgcaaaaccctgtttcatattggacaggagatgctccagcatcaaaagtacatcccatggctgatacatctcgccaatctttgcaatctcaaaatgttgatttactagccatgctgcaaccaaaggagaagcctcaagttcctactggtaattcgggtctgccactatgctccaattaccctgaagcaagtatcgttaatcccaacttgcatagtggagatcttgctcaaggggcccttaatatgcgtcaagatatgcagaactcccagaacattggtat

SEQ ID NO: 362116 - DNA, 251 bp, Zea mays
gagaatacatacattaattattgcatgaatccagtaaaaagttaaaacgaattttaatttgagacggagggagtattacttaatttattttggcattctcatcaacttcatgccatagtaaatgatacttggcttcatgaccttcaccaagttgggtcttttttgaacttttgaaggagcataaacttggcttgtcttttcttacattttcagttgctcagtgcacgtgatatggctgaacggaaagtaat

SEQ ID NO: 362117 - DNA, 175 bp, Zea mays
gtttgatggttttctatgattatagcaaacagaacggtattaccaagcaacaaacaaaaggacatcgagcagtttgctataattgtttgatggttttctatgattatcgatcagcgggatgtgaagtactgtttacattgctcgcgttctaataaagtactgtttggacttgctt

SEQ ID NO: 362118 - DNA, 256 bp, Zea mays
tttctgttttgtccacagaattagacaggaacatcttgtgtctgatcctggtacacttattccttcagatgtttctgttttgtccacagaattagacaggaatttcgtctctgataatcaacactttggccaagatgataataccaatctgttgggatcttctcttagcggtgtatcgagctcagcgtatggttcttttgagtatgagttacttgaccgaagatccacttcaagcaatgttggtccttctgatact

SEQ ID NO: 362119 - DNA, 243 bp, Zea mays
ccaatcgtaatattgtcagtagctctagattggatcaaaatccaggcaagaggggaatctataggcggaattgatccaatcgtaatattgtcagtagctctagattcgtcggtagctccagcatgagtgtcggtggtagttctgtgcctgtaaaaacttgggatggttgatcacgtgtgatcagccgtcatgctcctccagtctctatgaacaagctaagctataatagtattttgctatcct

SEQ ID NO: 362120 - DNA, 292 bp, Zea mays
gttcgaaagaaagggagaaaatgttatgcttgcttgccttgagggaagcgtcgccgtctgcccacacccgcaccgcacccaaccgcagcggagccgggagccgaaggccgagggtattcttccttcgccgctaagcacgcctcctctccacaggcagccgacccaggggaagcgtcgccgagcagggaccaatcatattgaactcagatttggagcggacaggagggggagccattgccggtgttctgattgctgctggaggtcgagggatggtaggggtgctgtcgaatcg

SEQ ID NO: 362121 - DNA, 284 bp, Zea mays
cctcagttgccacagtttgccatgcctaaggttagacaaatttgaccgagctaggcatgtgattggtttatagccaagatttttcttctactgtgtaggtcccacttgtcaatttgtaaaagtgtggcatattcctttaggcataccacagttgtggcgcagaatttgagtgaggcaagtgtggcagaaatatgtggcaagttttggcaacttaagcatacaaccaaacccagttgttccatgttggctctttacttgagaaaataatcaagataacatacatg

SEQ ID NO: 362122 - DNA, 292 bp, Zea mays
gttcaatgatggctctaagagaaatggcacgtgtatttccgatggttgctctccaatagcatcaccaacagctagctttgtcattgactcattgagagcaaccatcggaaatacacgtgccatttctcttagagccatcattgagtcaatgacaaagctagctgttggtgatgctattggagagatttatgatggtacaattcgagtctatatcatagaaagtgtcacaaagataagaattcttgatgcaagtggaccaccaggccttccaagcttacttgcaggatcatcg

SEQ ID NO: 362123 - DNA, 287 bp, Zea mays
  unsure (1)..(287): unsure at all n locations
gcganttcagcgtcagaagatgtgntcttggaaaatgtatcattcttcgtgctacggggtacatctagtgatacaatcacattcgcaccatccatgcacgaagaatgatacattttccaagaacacatcttctgacgctgaaatgcctctgcctgttggaacctgtgagctcgtcgatagaccttcttccgagaatgacatgtctgagcacactcttttgatggtaaacggcctgcggatgataggactttcgaagagaacgaaatggctatgcctggtgatgaaaa

SEQ ID NO: 362124 - DNA, 284 bp, Zea mays
gataacatatcagttctcaagggttcgtcatttgcacatgctgagtggcaaggaataacgaacaatgtaccattaactgaagataatagtatgaacggacctctgtgtaagatcattgcaatgattgtgaatcatattatatccctggccaatgaagttgctagcagagatatctgcatatcatctgcagtggataaggcatacaaaactcctttcagacttatgctaaagcttgtttcatgctacccttctgctgctgctgtaactcttcatatactgaaaag

SEQ ID NO: 362125 - DNA, 268 bp, Zea mays
tctctgcccccgaagccgcccaagcgctcgtccaaaaagaaggggaaggagaagcttaaagcggcgcaccatcaacacacagagtcggcgccactggtcacgctggtcaccggtggtaaggcgggaagttagtcaccgccgagatgccgcgtgtggacctcctccgtgtgcttgcagaaatcgacgagaggttcttgaaggcgtcagagagcgccggtgaggtatctaaggcgctggaggccaacaggatgcattaccactccaattt

SEQ ID NO: 362126 - DNA, 269 bp, Zea mays
agaacaagtccagtctgtccagaaatacattaggagaaagagccaaagaggagaacaccggccggcgaagtggacgaagcggcccgccgaggaaatggcgtcgatgcagagctggcgcaaggctacggcgccatcaaggacaccaccaccgttagcctcgccaatctcaactccgacttcaaggtgtgccttcgatccggatctggatgtggcgatcgtgaaggcgactaaccacgtggagtgcccgcctaaggagcgacacctgcgca

SEQ ID NO: 362127 - DNA, 268 bp, Zea mays
attttaactaacctgaactcaattaaaatgagtttagttcacttgctatgctgatctatagttaacatttaacatcacaatgtctcatgcaggcaccccccgaatcctatgcttctttgtacctatacatatttcctccatatgcttttatgattccgggatggttgatgaggtgctggatgcagaggattcggggggtgcctgcatgagacattgtgatgttaaatgttaactatagatcagcatagcatatggaggaaatatgtat

SEQ ID NO: 362128 - DNA, 265 bp, Zea mays
actaaagattggcaaccgactgtcacggtagatgaggatgggatccttaaccaattgcactctgcactcctacattctcgagatgcccctgttgcgcaaacttttggcagtctacaacgccacaacggaacccccaccttccagctattcaagcatgtattgatgcaatcacagagcatcagaggctcaacactctgatgaagggagagctgataaaaggcttgttgccacagagtagtgtccgtgctgattacactgtccagag

SEQ ID NO: 362129 - DNA, 265 bp, Zea mays
tcctcctccccgaggaaaagatagggactgcactactcaagctgtcatctttgagcatggttgacacttgacacaacacctgtggtccatatctgctatagaacagaattcgtgagctaacgatatcagctatagaacacctgtcatccttgattagttttgtatgatcatattccgagtgaatacttagtcctttggtattatgtgttagcattttctgttcagaagttgtcagcagctgtaacgtaacagtctgatctcttga

SEQ ID NO: 362130 - DNA, 267 bp, Zea mays
ctatgatggatcacattgttaataggaaacagccagctccatttgatatggcacagtcgatacaccatagggtgatgtgctatcataggaggcctaccctgtagaagatgatacatattcgagaatcacgaggacgagatccaagtgcatcaggaccatatacttgaatgtgttctgcatcaccagggtaggcctcctatgatagcacctcaccctatgatggatcacattgttaataggaaacagccagctccatttgatatggca

SEQ ID NO: 362131 - DNA, 265 bp, Zea mays
ggaaagtttttataaaggtctgtgtctttctctgatattctcagtttctcagtctctactgtatatctgcttctaattatatgtgctcttatccctgttcttggtgcaaaaggtgatatgattttgtgggtggtttcattcattggaatgctcttcaattttcttacgcttatttacattggtgtaatgctttctctgttggttccaccactctatgagaagtaccaggaccaggttgatgagaaggttggtgtagcgtacagtg

SEQ ID NO: 362132 - DNA, 273 bp, Zea mays
tgagactgtatgtcactattatatgaggcaaaagatcattcggcgcgagacatttttcagaagagaaatggaaaaagatatactacttatcaaatggaaatggtgcagagatgagatggcttctgccttcgtttgaggtagatatactgtccctgaaggcaaaaatgcattttgctcccaaaaaattatttataatattgttctgtgttttacatcttgttaatgacaataatgatttgtaatcagttagtcatatataatttcagatggcat

SEQ ID NO: 362133 - DNA, 262 bp, Zea mays
cgacactgagatgcggaggctgacggacgccgtcgaggggccaaggtctttgatggctcgccacttcgaggtcgaggtggttccgcctcccccatcgtcgactgctgtcgtacccctgctggtcctcctccgaccgcataggcctggtcgtcaccctgcaggttttttgagatttgtgtaaactatgccaagaacttatttgtttcgaattttaagctctagttgtttgtcgtgttatttttcctgctgttttgtgcctatt

SEQ ID NO: 362134 - DNA, 252 bp, Zea mays
attttcttgttaatggataaccacctagttctccaaggttgggaaatggggtgaattatcctttggaagtagagttatgtggttgacaagatcttgaaaaactgcatatattatttttcatatgagcatgtgcatccattttctcaactcctgggaaattttctgacaataaatgcacgatccacattaatgtttggtggtgcaatttaactaagtatcattcccaaatagcttcctatgtgtcgtaatgca

SEQ ID NO: 362135 - DNA, 288 bp, Zea mays
atttaagtctacaaatgctgaaattagaatgtatatataatatgaaacaatccaaacattaagtacaaaatactatgttcgtgtctagtttttttaggtctcagtgtactggtgggccgacttagggtatgtcgcggcccacaagtaccacccactagatatgccgcggccttttgagtctaacaggactggcaagtatctggtgacaacgacagactaagagtatcaggctaacgtcaagtagcagacacaagatagcactggaatttctctatcataagagttgct

SEQ ID NO: 362136 - DNA, 152 bp, Zea mays
gtggaactgtggagaaagaaagatattactgggatctaccacaaatggcaaaatatgcaacctggatggagcaaagagagcaagttagttggtgtaaatgctatgcttgtccgtgttgttaagcagcccaagaacccccacttcatggcgaa

SEQ ID NO: 362137 - DNA, 151 bp, Zea mays
catgggtcatcttatgaggctgtaaatccgatgatctgctccatgtcttacgagtaggagggcgtcattgagacctccagaggcgctcctactcgtaagacatgggtcatcttatgagaccgtaaatccgatgatctgccccccttttttt

SEQ ID NO: 362138 - DNA, 284 bp, Zea mays
tttctttagagaagaagcagaagagccactgggattttgttctggaggagatggtctggatggcaaatgacttcacacaggagcgtttgtggaaaaatacagttgcagcacagatgtcccattggatttcttctagaggtcgagcggtatttgaagaagcaagcattcagagaaagcagaaatctgttgctagagttctagccaatggtattatgaacttttggtgttcagttcatactttacgagctagtggtggtattcctaaaccagtagaaatcgagcaa

SEQ ID NO: 362139 - DNA, 278 bp, Zea mays
atcagataagatttttcatctacacggcgtgactcgtttcattcaaagccaatgctgaagcctgaagctaagcacagccaaatcctaaactgttggtctctcatcttttaaacctatccttttttcttcgtgagatggtaatgactattatccatacggacaaaccacttcgacagatctggtatagtagtagacatagcgttaatagggcaaccattgatcgggttggttctctgaaacctttttagtcatcatgtgctgcttcacagtagctgaag

SEQ ID NO: 362140 - DNA, 276 bp, Zea mays
aaaacactgtcgcggagtgaagtttgaatgatgatgtggatgagtaagctgctggagatagcctaatgagtaagcacgaaccaactatcaaagaaacacaataactcaagtatgctttattacttacaaattaaaaactactccaattatgttcacagccgaaggtctcagttaaggctgtcaatagcatcccaccaaccaactgaaatgtttatctctatgttagagaactagcatgttcaaaactaactacaataaatgaattagaattttaaa

SEQ ID NO: 362141 - DNA, 199 bp, Zea mays
gtgcatgtatctggtggggatggtggggactgaggaccaaatggtgatatgtaagaaaaggtgtttacctatacaggctgatactcctgatcgagcaaatgtcacaacattgtcgggtgtagaaaatgcattacctcactgcatacatagcaaaaatcacaaaaacatactttgaaaacattccttttatagagaaccg

SEQ ID NO: 362142 - DNA, 239 bp, Zea mays
ataatcagacataatggtaggctgatcatccatgctgtcaaaaggctggttgaggattacgaatcaaagaaaaattcagtgacgtttcagattttaacaatgatatttgaggcttgcggcgccaagcatgagatttatcctgactaccttcgcgagtctgatgtggatgacgttgtggtctctcttgtcgacctagctaagaaaggtctggtggaagatatttacaactcaaagcataa

SEQ ID NO: 362143 - DNA, 292 bp, Zea mays
caggtttatgatagtacttgcagtagccaggactctgttccaggtttctatgtctctaatctctttgaatcggtacatgtatttgtctgtgcctagttggctttcactgctctgctgctcatctcctaactacgcctgcctgtttcctcccccgcaggattgatgagctcggcgagcttgtagcaccagcatgcagggggcaattaccagggtgagggcccccttcacgccgccgcagtggatcgagctggagcaccaggccctgatctacaagtacctgtctgcgaacagc

SEQ ID NO: 362144 - DNA, 259 bp, Zea mays
caaaaaggtgatcaagtaagctgtgatgttcagccaggtattgattcaatcactgcaccggagatgaatgttaaaccaagagtcccaagaagcacggattcatactcaagtcagagcatttcggatccaaacagcaagagtgaccctaaaacaaaaacgcgaaggagcaagaagagctcgtctcacaaaaccatttcggatagatctgagattcttcagtaccttctcagatctgtgacaaagcagagcatggttcaga

SEQ ID NO: 362145 - DNA, 298 bp, Zea mays
ccccgtcttcgcgatccctttcaccaactaggcaccacaaagaaacagactatgattctaggctcaacttatccggacaaggcgcactgcctgtttcagacctcaactcaaacgtcgtcatctggaagcaggatctccttgttaaggtcaaagaacaaggggacgagattgcacagctgagaaggcatctttctgactactctgtcaaggaggcccaaatacttaatgagaaacatgtcctggaaaaacgcattgcatatatgcgcatggcatttgatcagcagcagcaagatctggt

SEQ ID NO: 362146 - DNA, 294 bp, Zea mays
cataattgtacttttcttttctttttctatatactaaattttcttgtttttattaacacaattgtgaaggcttatcattacacgtccatgtgtcattgtgctcacttggatcttactaaagacaaagtatgggctgagaaagttcattggcatttgagtttgcatggctggccttattttggtcgtattttctgatgtgtgttcttcttatcgagcaagtatgaacaagcttcattttttatacatatggaattgcactattacagttctgatgtcatactgaatgcattttct

SEQ ID NO: 362147 - DNA, 285 bp, Zea mays
aatataagcgctttccaggccgcgtactagaaaatcgggatggacgttgtattttggatggtgggctaagcggcttgagaattaagcaaggtgtttgggtggacttatggcttagtttcaccaataagcgggaaataagcagatacaaacagggccttagtgaaggtaagcagtaggcccatgaacaatggattgtcaatacctttttcttcatatgcatttggactttggagatcattaccagtgcctgcttttggcaattctttcctaagtaaatatggcaca

SEQ ID NO: 362148 - DNA, 282 bp, Zea mays
ggtgaaggaggtgcctgaagcggaaccggaagagaagaaagactcgtaattttgttgcgtgtcatatccattgtttgtgaagggtcgttgtgtgtttaccatacaccatgggagagacctggtcatctatgaacccctgatgttcctcattcgtttacatgtgctccagtttttcagtttcttaaaaaaaaaataaataaaaaataataagaaaaagataaaatccaaaataaaaaaagtgggggccccccacttaattccccgttcacccggggttatttt

SEQ ID NO: 362149 - DNA, 264 bp, Zea mays
ttatggtcggacggatcacccccagcaaggagccgccacccgccactccgccagagcattgcagcgccagccacctcgccccctctcgctgtcccgcaccacccgctccgagggaaggagaggtaaccggtggcgggcgcggcggcgagcggagatcccgggaactccgatcgagcggagtggcgggactgcgggagcagagagcgcgcagggaggaaaatgagtagcgtggttcgatggtaagggagacgggatactacgacg

SEQ ID NO: 362150 - DNA, 225 bp, Zea mays
cggataatatttgaaacaaacattatccgtgtcaaccaaatcgacgtagaccagaatatagaaattataagcgtacagcactcgcagacaccgtctgcgtgaagaaaagctagaacatggccgtattctggtctacgtcgatttggttgacacggataatgtttgtttcaaatattctgttttccggttaaaaaaaaaaaaaaaaaaaaaaaaggggggcccccc

SEQ ID NO: 362151 - DNA, 270 bp, Zea mays
ggataacctggaactccaacaggatgtccctgatcagcacaggtggcgccgtggcgcttgactggtcatggtacatacactagtaagtcggctgacgggctgaggcctttttacagtggaaaatatcagattctttcttaaatgtgctccttggagacgcatatggaagacacgggaaaccctgagatgcaagttctttatctgactagcagttaaaaacaagtgttggacgtctgacagacttgcaaaaaaaaggactacctcactctt

SEQ ID NO: 362152 - DNA, 268 bp, Zea mays
agagatcttgcaggcggctcgttggcagcagtttctgttcacgctgaaagtcaaggaggagatctataatgatgcgccgcaagtcaagtgcaacattactaaagcagagaagctggatccggcaatagagagattcttaccttctaggggtaatcaatggcctgttgcaggatgacactggctcatcttctggggcgcaaggtgccatggcctacaatgctggtatcagcaacactggcgctggacgaatgtgccaacctccaacatg

SEQ ID NO: 362153 - DNA, 278 bp, Zea mays
accgaaacagttgcagtgattggccgttacataagtgagaactacaatggtgttgctctgcatccaattgattttatagatactagttctgggaagcttctggctgaggtgatggaccctgacataataacaatcagcccagtgaacaagctacatccgcaagatgacatcctagctacaggaagctcaaggtctattttcatatggaagccaaaaattgaagatgaacttactgaagatagagccaagcatgacaatagtagtgatgacgactcagg

SEQ ID NO: 362154 - DNA, 268 bp, Zea mays
aagcaatgccacctcttttttttaaataagctttctaggaaagtaagcaataatttagctgtgctgttgttaattgtttttggccgatcaatttgcatcactcattaaattttgaacatgtgtttacatgcatcttattcaaatttaaatcggcatgccgaccgatataaatttgaataaggtgcatgtgcagacatgttcacaatttaatccgggatgcaaatcctgaccgtgtgtttacatggatccaattcacctttaaatgggc

SEQ ID NO: 362155 - DNA, 276 bp, Zea mays
atggaatacccctggaacgatgaggtggtagctcagttctatgccaccctctggataaagaaagtagatgaggaagccgatgggtatgagtacccagtcatgtatttctttatccagggtaactggcacaaagtcagttatcgtcgttttgcccatattctaggcttctctgatacagacattcagggcagcaacatgcgagtgcatggcattcggctgcccatgcgggaagagacggaattcattcatgtctctactgagcgggagttctggaca

SEQ ID NO: 362156 - DNA, 267 bp, Zea mays
ttttcgacaaattatctctgttaagaagcttatcattggacattagccaaaaagaaaatagttatctgataagtcctgccttttctgtttggaagatgaatcaatttatcacctcttttttgaatgttactccctccgtttctttttatttgtcgctgcaaataaaaagaaacggaggaagtacatagctaagagaatgtggaatgtgattaacaacctgttgaactggaacgtgggtgaggacttggaatatgtgctgctgtttta

SEQ ID NO: 362157 - DNA, 106 bp, Zea mays
aaacaaacactatgaacaaaggcacacgatattcctagtgtatgtttacaggtgaaatcaacatgatagagatggattatcatgttgatttcacttgtggaacaaa

SEQ ID NO: 362158 - DNA, 263 bp, Zea mays
caaataaagtgaatccggatgtttcactcaacattggtcaggaaaaaatctagatctggaataaaaactggtgctacagtgaaggctgttcgttttgacaggtttgttgctgctcagtttcggccagcatagctgctgcccagtcccagtttcggccagctgctgtccagttttggtcaggataactgctcagctttgtttccaatgcacttgcacatacatacacatattaacaactaagcaacaatggtgtacatacatac

SEQ ID NO: 362159 - DNA, 289 bp, Zea mays
gaagaagaattttcaaatgatgtcaattctaggcatatttcaccaggtgctgtaggaaggctcatgggtcttgattcgttgccctcatctggaatccataataagcatagacataccaaaagtcatgcaccaaagacttcacctagtagttttcatggtcgaactggtttgcatgacattccacacaggaggagtgacaataccattaatgtttttgaacgtatggaagccacaaaaacaaatatgcaccggagtccaagatctaaaattggaagtacaacttccagat

SEQ ID NO: 362160 - DNA, 178 bp, Zea mays
tctaccatggcatcaactctctacttggcaggatgacagttgatgtcatggtaccatggcatcaagtgtcattctaccatggcatcaaaaccacctgccaaggagagagttgatgccatggtagaacgacagttgatgccatggttccatggcggcaactgtaattgtaccatggcat

SEQ ID NO: 362161 - DNA, 281 bp, Zea mays
aggaaatgccactaacagtaacaatgaaatggttgtgattaccgatgagaggcctgcaatttctggacctaattgtcaggaaaatatcccaaacagtattgaggagtcatacataatgactccatataaagattctgatgatgatgatgatgaggatttcgaacatatagaacattcaaggcgtaggaggaaattggttccttcatgggctcggggagagaacttggagaaaatcttgttatccaattatgttttggaccctaggaaaatctttgcacgaa

SEQ ID NO: 362162 - DNA, 282 bp, Zea mays
agaagtttgaacgtggacaagtatgggccctgtacaacaacattgataaactccccaagttctatgcctgggtaagaacagtcagggaagagccgtttagagtcgaggtgatctggctcgaggcctgccccgaacaggaccaggagaaacagtggctggagcaggacatacccatcagctgcgggacattcaagatccgaaaatggagagccgagtacggcacaaacgacaccttctctcatcaagtagatgccagagaaaccggcgcaaagtgggcgctcg

SEQ ID NO: 362163 - DNA, 183 bp, Zea mays
cgtggcccagacacttctgttcacggttggtgtgtgcgcatgtagctgtctgaagcgtatctgtgcgtacatcaaccgtggcccagcgccttctgtccaggcggtgactgtttgttcagtgtcatccgtgtcggactattctgccactatgagcaggcctatcctccgtcgagtttcacatgt

SEQ ID NO: 362164 - DNA, 182 bp, Zea mays
cttcttgtgatcctgatagctctaacatataccgagaaggaaataatgtgatcctgctagctctaacatatacagagattcaaggatcaccatatgtccttcttgtcttgaaaatgatacaggttgctttcatgatgcataaggaaaacattacttatgacacatcgtacaaagttctttct

SEQ ID NO: 362165 - DNA, 288 bp, Zea mays
tgtcaagtagagaagagtaggatttgaagagggtgcttctaatactggcagatttgaatctgttaagatacaatctggtcagatcatgagctaagtggacaggtatgcttataggctactagcaccgtcataacagtggaagtcattattgtgcataatttgattctgtcttttaaaaaaaatgtaagagcattatatgaagtagttctaacctctcctgatataataatgtgtactttctcacatagcaccaagcccacatgtgggcattagatggattacttctct

SEQ ID NO: 362166 - DNA, 271 bp, Zea mays
agaccacagtaaaaggatatgaagatcaacagcagcatgatgacgcatctagttcaagcaaagctaaacagaaatagaggataatttcagatttagatcccaaatggagcaggatgaacttacacgcttttatgaagcctaccgtcaacatgggaaggattggaaaaagatcagcatagcgataggcggtaagtcgtcggacatggtgcggtctctttacagtgcacatcggactttcttatctcttccagaacatcaagctactgccatg

SEQ ID NO: 362167 - DNA, 269 bp, Zea mays
aattcggctcgagcacggcagaggagattgctctcatggctgaatgcaacatgacactcatgatcgctcttgttacgaagaacggtgaaacacagatcatcgttcttcgtaacaacggtgataagaaggttcgcacggcagaggagattgctctcatggctgaatgcaacatgaaactcatgatcgccacgagtatcatggaagagtgtttcctgcctattctagatcccaggacagggatagacattattccctccatattgtataac

SEQ ID NO: 362168 - DNA, 276 bp, Zea mays
gaaaactacgcgaagcaaggcaagattgttcagcggaggagcgcaatgattttattaggagaaaatacgaggctcaacaatttttgactaacccccagctttcatgtcctccacgacgcaacgagaaacataatcaccaacagcatagtactagttcaagtcgacatggtttaggccattcattcaggaacagctggaggagaaaagagcacgaggccaaatcaacaaagaaaacaatcgaggtgggcatggtagagtttgtcgattgattaagat

SEQ ID NO: 362169 - DNA, 277 bp, Zea mays
cgcatctcctccaacatcgaacggcgacaaggtggacaacaagagcgaactcaaggcgatggggaaggcctcggttgcgccactcgatccggccaaggcggctgtggtatcatccccgggccacctgacttgcaaggggaggaaggggaaaggcgcggctgaccggagcgcagagatgagccggagcgatgctccggtgaaggtgaagacggccggtccgtcgccgccgcgaggcgtcaagtcgggcaacgttgggaaaccgaaactacagcgccca

SEQ ID NO: 362170 - DNA, 136 bp, Zea mays
gtgatacgaccgtcaacgctcccagagggatctgtaactggtgagacgtggcgctggcagagcatgccggcttgtacatacgtttgcaaaaacgaggtgtctgtacatactggtcgtcgtgtcgtgtcgtgtcagt

SEQ ID NO: 362171 - DNA, 215 bp, Zea mays
agcaagtggaatccgtggtgatcttaacaaagcctcacaacacttcggaaggatgcagaagtgatggagatggaagcaaaaaaggatcaaatgcaagagttacaagagaagtctgttgttgagttgactagacttggttttgggggtagtgaactgctcaaagccgctgctgtttttgtgaaggtccctaatcagatgacgatgcttttcgcgct

SEQ ID NO: 362172 - DNA, 268 bp, Zea mays
aatatgaagagtgtccatattccagtggattattgtttcattcgcctcctaaaagcacttgtgacgtgggctggaaccacagatgcctcatcagttaccatgacagcatcctgcttatgtgtaatgctgttggacatgacgtcagaagagtttctattgagctgctctcattttgacggcaatatccttgggagtttgtctgagatcatcatcagaagtttgcagcaggatatccctgacgatgacagtgagcaatcaagcagaagca

SEQ ID NO: 362173 - DNA, 259 bp, Zea mays
aataaagaagcttccaatccctgattacattgttccaagatgtgcacacagcacggaatctaatgtaatcagggattggaagcttccgtgctgtgtgcacatcttggaacaatgtctgcaaggatgtgtcatactgtccaagggtggacccatggctcttgctccccccaaaccagaatcctcttggtgctcagttcttacgcattcctgaaagaaagaatcaaagtatccgcctccctaacaccgcctcactgttcga

SEQ ID NO: 362174 - DNA, 296 bp, Zea mays
tgaaggagcatgtgcggacaagctcggtttgatgggcttgatccaaaagcccgcataggctgagcaccgtctagtcgtcgccagtttcgttccgctgcagcagcggcagcgctcccctcctcgacgccgcggcttctcctcatcctcgcccgctccgtccgctgactggaagtggtctacacagaaggttaccatattgttaagttaaagttggatcattggaacaatgccgccccataagattgagactgggcatcaagatgtggtccatgatattgccaggattactacgggaa

SEQ ID NO: 362175 - DNA, 290 bp, Zea mays
attcggctcgagcaaatactcatgcaaaataaacggtgacttttgttatatgactgcatgatggtgcaacagtaatcgttggacttgtatatagtattgaatgttagctgcatccatatgttgcacaggttaaacacatgcactggtatcaggttggagatacagtttcaccctgtgagtgtcgatgtagtagggctcgattgccacctagcaggtatacaatttttactatgctgcttgtgcggccatgttgcactcatgctggatatacttttctgattaatcggacc

SEQ ID NO: 362176 - DNA, 191 bp, Zea mays
agagagtcctcagcttgtgtttggtgataatagtcaccaatatttgtgacactggtggctagaccttgccatcgtgtcattgttgtggtgactgtatactttcattcaatctgctagcgtttctgttagacaccctcgggggtatgaaacgctagcgttttaggaaattcatctactcttggtttgtgttt

SEQ ID NO: 362177 - DNA, 221 bp, Zea mays
gcaaatcctagtgcccacgatcctcaagccagtgcctactatgcaagtacgacactgcaaggaccacatcatgggatgcttacctcatccatgacaccaccatctcggaggcctcttcctttagatgctgacgatactattaagccagagcaacaaaagccacaggtccctgtcttggaggaacatatagttggccaactaacaaggaggaacaagataca

SEQ ID NO: 362178 - DNA, 289 bp, Zea mays
aaatgattctccttcatggccagatagcaatttgagggtaaattttcagacgggagatgaaagagaagtaattggtggggactggatagataaggttgtagtgaacaacaataattcagtcggtgactgggagggtgacaatgcagctttacctgacttcttttaccagagatatcattcaggtatgagggagaagcagtaccagaggaataacacaagacaaaaggatgaccatgagtatgaagagcaaaggtctcgattttactctaccaatactgatgattctgat

SEQ ID NO: 362179 - DNA, 287 bp, Zea mays
gcgagaggggatcaccctggcgtaacccccctacaatgcttaatagaatctctcggatatccattaagaagcacttgagtcgaagaagaatcaagcaggtctgcctatgtagagttcttacacaaagaatcagctgaacgagcattgtcgttgaatggcacatcatttatgacccgtattctcaaggttgtccggcgaagttctcatgaagcagctcactttaatggttggcctggtagtggacggtcatcaatatatgggaggcatggtagatggcatacccaaga

SEQ ID NO: 362180 - DNA, 292 bp, Zea mays
tgagaatttcaccagttcaagcaaacaagaaactcccaaacttaagatcgacatggaagccaaattacgagcatggttggaatcaaaggggaaaacaaagagcatccaaagaatggatggtcttttctccccaattgccagcaagactccattgtctgtgagccatatgaagcaaccaacatcttcaagaattccttgtagagttaaggcaatggatcaggatggtggtacaatcaagaagatactttttgatccagtagtccatgttcccactgaaaatataccacgagag

SEQ ID NO: 362181 - DNA, 287 bp, Zea mays
gatcttggcttccgtctcctacccccagcacaagcacttgcagctcaaagcagccagccagaagcctcggtctcggagtcggagggacgcagccagccggcgccgcgcctggcgggcgggagagtgcgcttcaggcggcttcagtccagtccagtccactcccgccaagacgcaaaagcctgtctgtgcctccaccttctggttgctccagaaaacacagcgatgcaccaagacagtttcaggtcggtggtctgcagatccctctcgaagacctgcccccaaggagc

SEQ ID NO: 362182 - DNA, 287 bp, Zea mays
gatagaaagaaagtggttacagagaaggcctgcctatggaatggagcaaagagaccatgctacctgtttgcgagaaagttctaccctgagtccataaacaatctcttgacctccttcgcgaattatacacttatttgagcttctaggtggcgcttagaggctacacaggaaacattttgttatacaaaaccttgtacattggatagcaacagagtaggacattaattaacagaatagcaatagctattggtgaggagaaggctttcgctgagcaacacagtggcttc

SEQ ID NO: 362183 - DNA, 194 bp, Zea mays
agatgccaaggctgccttatgagaaggagcgccttgatgctgagttgaaattagtgggtgaatactgcacacgccacagctcacgcttgcacctcaggctccttctcataaggccgccttggcttcttgaaagtcttaccatagttgcgatagaagttcacgtgcaccatggatgacgctgcccacgccgctct

SEQ ID NO: 362184 - DNA, 279 bp, Zea mays
gaagcacacaccaaagcctgaattgttggatacgcgggtctcgaagttcacctattcttttaactggagaaggtgatgatggtgacatcgagtccgtggaatttccaaagtgtgtggtggcaagtaattaggcacatggtcacatactcacatggaggagatggaggagagggagagataggacccgagagaggagacatgagaggcacatggtcaatatattttgttggctgtaattgtaagcctgtaattgttggttgcaaccgtgctaacctggca

SEQ ID NO: 362185 - DNA, 122 bp, Zea mays
aaccgccaccgtttcttgatctcccatcttcatcttcttcgtagcgtcggcgctccatcttctgttccctcccatagtcgcgctcagcacgcgggtgacggcggcagcggcgacgctcatga

SEQ ID NO: 362186 - DNA, 275 bp, Zea mays
tgacacttggctgccttatttgcagtactatcacatcaacgcccggacaatgatttctttgatttcatcctttggtaaattttcgtattaacaaattctatgaagactttctgctggttcaggtgcgaatcatggggaagtttatgcatgacaaccaatgctatcatgtagtgaagtaaacagacatcactatagtcttgcggcagttgctgtcggtttgggactaggagttgccgggttatgcaaggcattgtatagtggtctgtccataccat

SEQ ID NO: 362187 - DNA, 273 bp, Zea mays
attgttctttgatgactgatttagtatgcttaggtagctgtgtgttattgttcatgtaatgattatttgttgttgagatgtttatgccttttcttgtgtctagtgttttatcagcaaaacaaattactttgtggcactgccagtgatgattgtctgcaaaatggatgtcctgtggactcaagtcccctgtttcagggagaacctactcgaggaaacatggtacataatatgacatcatctgattaaactgaggcattacagaagaaccttatt

SEQ ID NO: 362188 - DNA, 244 bp, Zea mays
ttccgaaatgacttttgactgcagttattggaatttatcagttcgggtattgattatacctctaatggccaagaacacaagatagtagttgggatactcatgccttggtttacatcattcgtcaagcaactttcttattgagcctgcataagccataatattgaacagttctttggtttctttaaccagtgttgtagtaaacaagcttgtgttaaaggcccactttatttccacacaatcagga

SEQ ID NO: 362189 - DNA, 277 bp, Zea mays
ggtgcaaagccatcctgtaaggaagtgattagttcaaaatcaaagcctacaaaactacttgttgaaaaatcatcaccatgtatcaacgtggattacgaatatgtgaatttattggctgataccccaggtatcaaaagaggactcgaatctccactgcatggaagtctccttggtatatcgatatgcacatgcactttcagggttttgtcagcccagcagacagaacttatgacgcgttaggattagtgaatcgtttaagcaagcacagtgctgctgc

SEQ ID NO: 362190 - DNA, 270 bp, Zea mays
ctgcagtgagccccgagcgagctcgtcccaagaagaagaggtcaccagtgaggttcctgcttgcccctcttgctctggttctgttgatggctgcagcgtttgtctgtgttccaccgccgccgggttatccggtcatgctgaacacctcatgtcaaaggtgtcagtcttactttcagttcaagaattgcatcctgtggagttggctgctaggctgaagcaatggtctagcagttcgttggacttcgtcacgtcctactgggaggctattgc

SEQ ID NO: 362191 - DNA, 266 bp, Zea mays
gttgatgaaactacaaaatatgcatgctagaatgaatgttgaattgtctctaatgtccataatctatatgctgaaattctgaatttttgaataatcgggtcaggtatggatacccatgggtatttagtacccggtcgggtatgcgttgggaggtttttttgtacccgaggtcgggttcggggatgggggcgggtctatgttcatgggtacgggtctagggagttaatccccactggggaattccccattgacatctctagtccggt

SEQ ID NO: 362192 - DNA, 243 bp, Zea mays
gtgatgaagaacatgagtgtgtgtgttgctcatcgcacctccagatgcaccacgaccaacacacacactcatgttcttcatcacaagctaaacacactcacacatcagatgcacgacaagaacacgagtgtgtgtgttggtactgggcatctggaggtgcgatgagcatgtgatgaaaaaaaaccaaacggctctatggtgatgtatgcaaaaagttgctttcgaacttgaaaagaaaaaaca

SEQ ID NO: 362193 - DNA, 201 bp, Zea mays
atcatgtacatattatttggaaatgatctcgtcacatcccataagttctgcattccaggaatactcagtgacaacttatagaactcagcttcctggaatgcagaacttatgggctgtgacgagatcatgtacatattatttggaaatgacttttttgatgccatcgaaaaaaaaaaaaaaaagggcggcggcaaattatta

SEQ ID NO: 362194 - DNA, 276 bp, Zea mays
attgaactttatagtacacttagtatcattacattggtccttttaggatggagggtgaactattagagttattattaagatggtggatgttagctacgctttcatggtggatgtttactatgttttgtcatgtaaacaactgcatgtctttaaatttgtctatcagtataaatagtcactgcacatgcttaataaggttagattacaacatctggtgcagtcctctccatatctgatatttttctgttgcatcgatagccccatggttattaaaaa

SEQ ID NO: 362195 - DNA, 269 bp, Zea mays
gaagaaaaccagaacctgaagaaccataacttgatgctgtcggtggagcatgataacctgaaagcacttcatcataacttagatattgagtgctgtcaactgaaggcaaccattgcagaaaccaaagctgaaaatgaatcattgaccacagaaaatcattcagctgaaagaaaactccagcaattgagggtagaaatagatggcttgatggctgagaccacagtgataatgaacaatctggacaaggaacgtatactgcagcagagaaa

SEQ ID NO: 362196 - DNA, 275 bp, Zea mays
ctcgagccgctcgcctctcgctgtctcgcctctccaagacacccagatcgccgccttcgactacaggcaccttgccgcctccgtccgctgcccgtggcttccatccacctccacctcactcacccactacatcgccgaccaagcgcacaccgcgcgtggaccagacgccgcccgtggcttccgtggaccagacgccgctcgtggcttccgtggacgcagcaccgtgcgtggaccagccgctgctacatcgccgaccagggtactaacaaatgggt

SEQ ID NO: 362197 - DNA, 278 bp, Zea mays
actccatttctaacccaagaaacacctccctctccctcacacacatctcttgcctctcccatttcaaatctttggagaggaatctttgagtgagcttgagagctgcggtttttgtgcttcatccccaaaactctcttgctcctcctcattcgagctttggtactacatcgagttccttggggaatcaatacccttgggggtttaagtcccaaaacggctagggggcccctgggagtctccaaatcttgtggaagaccacaagaagtttgtattacccg

SEQ ID NO: 362198 - DNA, 271 bp, Zea mays
ggggttccgcgacctccgcctgcaggcagaggtcgcggaaccccacgatcggcggcgtccaggggcgcggtgacgttgggttccgcgacctctgcctgcaggcactctacgcggggtccgtatccgtcgctgcctgccgcgacggcgtgcagtggtcgctctaccccgacggctccgtacgcccgcccgcgtggctcctccttcaatggcagtgcctggctgctgatgccagcgggggtgtgacggtgaaactctgcacggggctggatcg

SEQ ID NO: 362199 - DNA, 181 bp, Zea mays
gacagctcgaactcgaatccctcatcagcctgtcgctggcggcgcggccgcgcggtcgattgctcggatgatatccttgcccataagctgacctgaagcctgcacttatccgcggggcgaggaggcgtgcgaacgagacaaactatcgagcggagactcgagcccatcgactttgactatg

SEQ ID NO: 362200 - DNA, 276 bp, Zea mays
tggtactataacaatcacagcattatgggttggtctttaaaacaacatagcattcactgatagcccactgttgtctctagactagacttctagtgaagctgtatggcctactttatatacaaaaacatgacagtgtaatactaattatgtcattttcgcctagtgtttcttatatgaccaccaagatgacccctggaataaatgtttgttgacattatgcctctctaacaatatgttgttttgtatggtacctcacattatctcaactttagaact

SEQ ID NO: 362201 - DNA, 288 bp, Zea mays
agtggaaatgcataataaatgttgtatctatgagcaaagaaagatgtgttccataggagtcaaaatgaagcagttggtcatatttaggtcgctgaactgctagctatccacttgacacatctaacagtaaaaatcctgcagggctgtttgttttgctgtgcagcaatactcattgcattgattgcatctagcccaacaaaaggctggagtggtcgcagtttgagtctgctggatccaacctatgcaagcaagtacatccctataattgctagtgtgagcgaacaccaa

SEQ ID NO: 362202 - DNA, 290 bp, Zea mays
ctgccttctgcctcgcttgccagatctcttctctctgatggggggttcggtggtggaggacaaccacgacctcgaccacgacctcgacctcgacgatactcccttagcatctgcctcttctaaatcccaccagcaattccatagcttcgatttcaggatacaagtgttctagatttgcggcgctacatccatctttaacataacacgtatgagcaggagtatttattttgtcttaattaaagccaagatcaacctcttgcttccctttcgcccattcgccattctcctac

SEQ ID NO: 362203 - DNA, 296 bp, Zea mays
aagtactctctccgtcccaaaatattagttgtttaaactttttaacttttatgtctatgttcaaatagatgatgatgaatatagagacatatataaaataaatacattagttattgtatgaataactaaaaaggtaaaataaattttattttgggcggaggaagtatatatagagatagttcggtgagatctttctctgatatgcaatgtggactttctgttaatcatagatgtgattttgcataaaaatgatcttgtatgtatctgaataatcacatgggatcatcttttttgta

SEQ ID NO: 362204 - DNA, 294 bp, Zea mays
tcttattattttagttatacttatggtgatcataggtaaaactaaaataataagatctgaactaaggtttggtcaaagttgaagagttcaaatcttattattttagttttacctatgatcttcataagtatagttattggctggtggcagggagcttagctttctgtgtaccaactgctctcattcaatcttttacatctgaggtgatatccatgtactgtgcaccattgtaattcgtattttaagattctgtagccttcaaagtgcttaacattggatagctctcctacttaa

SEQ ID NO: 362205 - DNA, 288 bp, Zea mays
taatctcctaaataatctcaactaatcttctaatcttatctctaactatccttatctaatcccccttagggcccatggctgctgctaccgcagcccctctgtgggcctccttaggtcctgacagtcgttttattctataggtgtttggtttcattcaacatttcttattgcaggtgaaggctgcagataatagagtgatacaagatcagctgaatgagaagataactgaatgcatggaattgcatgctgaagttactcatctcaaagaacagctgtcccaagctcttg

SEQ ID NO: 362206 - DNA, 286 bp, Zea mays
gttagatgaagtgttggaatgcacaacatcagtgtcttctggtatgacaagcagcttagtggaaccaagccaagttgatggtggttcttcatcttcagttacaaaagaagatgtttctactggacagcttggtgatgtgtcaggctggtaatcaaaaacaattgctgatgcaatctcctctaagttggctgccatacaccacgtatctcaagctatcaaatcccttagatggaatcgacagctgcagaataatactcagcatggttgcggggacagtgcagatacc

SEQ ID NO: 362207 - DNA, 122 bp, Zea mays
gataatttccatctggataatctgtaaagccttgcaaatatatcatgagttcaatgttctttctggttcttgaatggaatctatattctttctgttgatgtactgtaacactcccttccctc

SEQ ID NO: 362208 - DNA, 99 bp, Zea mays
aggcgatccctgccctcaaggagaggaaggggtcgagctcggtggccatcagcaagtacgtcgaggggaagcatggcggcaagctccccacaaaattcg

SEQ ID NO: 362209 - DNA, 160 bp, Zea mays
attggttttcctagtttttgtacataaacatttggcgtatgcgttagtgtctctcacattatccgctatataacattacaattaagattcagctaaatactggtaatttgaaagcgacagaaataaaacttgtagatgaattattgtctccataggaaag

SEQ ID NO: 362210 - DNA, 296 bp, Zea mays
ggtggcccatgctgcaggccgaggtggccttcgcgcgtgtcttcgagttgtgcgcgctgctgcaggggtggcccgtgctggaggccgaggtggccttcgcgctgcatcagcgcgatctcctgctcgaagtcctgggaccttctgctcttcgtcgcgtatcatctgccgcactttggctagtgcggacacgcgctggcgcttggcctccagtatctctttctgcctctggggattgcggttcttgaggcgcagggtgtcacacccggttttaaaggacaaagccgggtgcatctcat

SEQ ID NO: 362211 - DNA, 152 bp, Zea mays
ccacaaaggtgtcctgttggtcgtcctcgaatgagtttggttctaccacaaaatcagcttctaatatcgatttgcatatcgtacatacaaaaggaaccatacaccaaataaataaacatccaccattacataaacaatcacattccacacaa

SEQ ID NO: 362212 - DNA, 295 bp, Zea mays
ctagtttttttttaactaactgtgcaagcatacaactgcggaggaaaaactccaggtcgtgtatgtttcacttcactaattgaaaattactgccagaacatggtaattttataaagggtgccttccacacaacttacgaaggaggcagctggatggtgtttgggcgaagaagatgaagggcagagaggaacggagacggcctttgggcggcggctgcagataatataggaactgctggcagccgatactgcttgcgagttagtcccgccaaagctgctggccgctcaagcgccgg

SEQ ID NO: 362213 - DNA, 296 bp, Zea mays
tggaagtggacagcaggatcattctctcttcggcgactcacgtaactgggaggtaccatttttgcagggtttcttgatggccccaaaccatgcaggtgcttcatcttcgattccccttaccactggcagttctaggggaccaaatcgacgctatgcttcacgctctgtacctggggttgggaatttgctcctaggtcctcaaattgacgaagctgaagctcatgctgtttcactaggtgctggttctgaaatcactgcgtccatgcttgctcctggtactgaattgccttgtacag

SEQ ID NO: 362214 - DNA, 301 bp, Zea mays
gaggcttccaaaaacgtcatattagctggagaatgttctttgttggattaccttgtactctagaaaaccgatgtttttttttttgcaaacttacagtcctcatgtatgtttgttctcttcctggtgtttgatgcatttctggaaaaccttgattgtaggatgtcttagctatctatgtatgcgggtataactagttagttattcaccattgttcttctgcaaccacttaatgcttcatctggtgctgaattcttccaactgtatgttttgctgacatcacaccaggtggacacatttgttt

SEQ ID NO: 362215 - DNA, 274 bp, Zea mays
actttactgatacttatcagatatacaagaacacatgcatttgtatcggagaattggaacctgctagttggagagatacttgttggctacctgagatctcacatgccaatgtgtcaacacttgctattgaggaaatagataacatgcttttccaggttgtggattttcatccaggagagattgagcagcttgagctttacatgataacgattgatccagtgggatctaggtccagtagatttttacaaatcagactgtaggtgccctgctgcag

SEQ ID NO: 362216 - DNA, 105 bp, Zea mays
gtggcaatgtagggatggttaatgctaatgtcctccactgtatggacgaagaaatagctgaaactagctagacgtcctgtgttgtttttctccgttagtacacta

SEQ ID NO: 362217 - DNA, 172 bp, Zea mays
ttcctttggagaaatattagcaattttagcaatatgatttgtgtgcttcgtccaaaggaaacaagatatataatgtttatcttcagacagcatgaagcaagataagatatatatcttgtttccttatgagaaatattagcaattttagcaatatgatttgtgtgcttcgtcc

SEQ ID NO: 362218 - DNA, 291 bp, Zea mays
agaaattaaaaagagcacagagggctgtcaaagaaattgctggaggtgatgatagcatggatgagcaggaggatgaaacacaagaaaatgtttggggcagaggtaaaaatgcatactatgctcctggtgaacaatctggtgatgatgaggtggattacgaggaggcacaaaggatacaaaaaattaaggaaaaaaggctgtctatgaaggattttggattagaagatggtgaaagtgatgaagagggtaatgcaacaaaggtatccaaccatgaatccaaaatgaaagaag

SEQ ID NO: 362219 - DNA, 278 bp, Zea mays
atggtggtggtcatcgtcctgcttgtcctcccgcgccgtcgctgctgcgctgctttgcctgctggtggctcacggcagcgatggaaccaggcacaacagcaacaatggcggtggtactggtagttccagcagcagcaataaccacaagcaaggcgtagggggacgagcccatgccgtgccgacgacaccgtctccgtatcagtctccgtctccggcggctggcaacaacagcagcagctacgacgagtggctgatcacccgtgcgacatagtacggtg

SEQ ID NO: 362220 - DNA, 253 bp, Zea mays
tactaactagatttagcaagtctatttagagaatcattggagaagcaattttctactcacttcttaaatttaagatttagagaattgtttagagaaccaatagagttgcccttgggaatagagggaatatagtcatctcaaccagtttggtagtcactgtggtttaagccttaagcattggcttggttgggacattgcttggttactgattgctgtaatcctcggggtggcaccggcaagaacggcgacgctc

SEQ ID NO: 362221 - DNA, 220 bp, Zea mays
aggaccacgacatgaaggagcgcctctgcctcgaggctgagcgccttggcctgtacgctatgatcattaggactcgcggttttggggtctctgggtaaccgagataagccgaaacttgcggatagttattgactaatgtgtacagcactgtctatgaaccgttatggatattcgctaccctaatgatgctgcagatgccagtggatatgcatcaggggcg

SEQ ID NO: 362222 - DNA, 158 bp, Zea mays
aagaatacgactaactgtggtgtaagacctcagtggataacaagatgaagccatggaacatgagaacgtccaagtgactctctcaacaactcgcttatcctcctgatcgcttggtagaagagattccaaacatgggaaattccagtagtgagagcaag

SEQ ID NO: 362223 - DNA, 279 bp, Zea mays
gaaagaattcctttaactactttaaggtgaaatcagcattttccaaggcgtactctgtgttaactgatgcaaacttgtttattagtttgggacataataggagcattctgggtaccattgtgagaccagattcagttctccttgaccggaaaggctggaacaatgaagatatgttagcggaaccctgggagccgatcacccaacagtttgacaccgagaatgatgcagtatacaattggcatgtgatagacgaggatgaaccattgcccagaaatagtc

SEQ ID NO: 362224 - DNA, 146 bp, Zea mays
gctcggcgcagacatggtgtgtttgtctgaagaattgttgtcaatgctggcttgctctggactcaagttgtttgtggggggtgaaaaaatgctagctactgtagaactgcagcaacaccagaaccgcaccaacggcgaggcgaggc

SEQ ID NO: 362225 - DNA, 280 bp, Zea mays
ccatcctcagacagaacaggcgaacagcctcccaagcgacacaacagcctcaggaggcacccccgcggttagtctcgaagcttccgttcggaaccagggttagggtttcgcgtcctcccgtcgtcatcctcagccatgtccgggcgcgaggtccgcgagtacaccaatctcagcgaccccaaagacaggaagtttggtaaagggaaggataagatcgacgatgaggacatcaccttccagcgcatggttgcaaagatgcaagaggttgctggtgataggg

SEQ ID NO: 362226 - DNA, 202 bp, Zea mays
gtctcggaaccaagcaagccgaaaaaaggtcgccgatccaggcatggggcaggagccgcgtcccgtgacaaactgcaccgaccagaatgcgccgcaccggggcggggtggtggctggctgacgaccggccacttgcgtgcggccgagtactagtacgttttcttggtaccaaagaaagtagtaattgattatcaccaccaca

SEQ ID NO: 362227 - DNA, 269 bp, Zea mays
agtatgagaggttgagaaaagagagggaggaaaagagagcgcagtttgatcggcttcgtcaacgtgcagaggcgcaggctgcttacgacaaaggccaagaggaaggagcaatggtaaattggttaataagaagttgattttccaaaaggtttccttgaagggatgcctggtggtggtttccctagagggatgcccggtggaggtttccccgggggtggcatgcctgggggtttccctgggggtggcatgcctggaggtttccctggtgg

SEQ ID NO: 362228 - DNA, 269 bp, Zea mays
gctggttcagtctcttttgagccggctactagaatttggaaaagttgggccccccaaggtgtaaattcttcatttggttggcttctctaaatcgttgctggacagcggatagattaagcagacgaggtctcgtgcatcctgtaaggtgccccctttgtgaccagcaggaggaaacagttcagcatatcttggtggcttgtgtgtttgccagagacacttggtggcagactttgcacaaggtagggctgcatcgcctgactccaggattg

SEQ ID NO: 362229 - DNA, 270 bp, Zea mays
  unsure (1)..(270): unsure at all n locations
acagcagaccattgaagatagagacggggagagacacagaggcctcactctacacagcatacgagattaanaagcaagaattaaagcgacgcgcaagtcgttataagatcaatcccttgaatccacgccgcaaaggaaagaagctgcttgtccttgacatggactatactctgtttgaccataagtcaacagctgagaatcctatggaactcatgcgcccatatcttcaccagttcctcacagctgcatatgcaaaatatgacatcatgg

SEQ ID NO: 362230 - DNA, 267 bp, Zea mays
aaagaactccttcgtcttgacccagcagaagaaggtggatacgtcttgctttccaacttgcatgcggctggaggtcactggaaccacagtgacaaagtgaggcagatcatggaaagaaaaggattgagaaaattagcaggtgctagtaattttggatcttgatgttgttgcttcacaagttcagatgccaggcaagactaccattttttttgaaatgcaagcttgtttcttctaatgaacggattaaatcttgtacatttcatggaa

SEQ ID NO: 362231 - DNA, 271 bp, Zea mays
gttgagtcatatgcaggacctcctccgattcctgaccattttgaagctccaccaggcccaatgcactatgggcgaccatcagatcctccaccagggcattgtgcaggctggtctaggccgcctaggatatctaataactattctccctcaagacattctgtggagcctccagtttcccatgcagctggagctggaggtatgtaacatgttgtgttgatatatatgctttttaatgaaagctgtttccattttctattaatatctgtttctg

SEQ ID NO: 362232 - DNA, 260 bp, Zea mays
gaaagtttgaaggaagcttgtgaactgctctgcaggagcatcactttctaactggtacacttgaggaagactccaacaggtcagacaacgagtattcagagcaaattaaactactatcagaggtcttcagccaagcgacagtcgccgatacaccaacagatgtgcccgattacctttgctgtcagataacattcgagatcttccgagatccagtgatcacaccgagtggtgtaacttatgagaggctgtacttgttgaac

SEQ ID NO: 362233 - DNA, 264 bp, Zea mays
ggttaccaactacaattttggtttcctttttttccctgttgccaataccactgttgccacaggatgtttttacttttcagtccgggagctattttatttggtttcatggataagcatccttgccagcattgtttacaaaaagaacattctactaccaaagctgcacaaaattagtggtttgagttctcgtgtactcttctatgctgcagcataatctgtttcgttttgggaattgggtactatgtttcttttttcattagtgac

SEQ ID NO: 362234 - DNA, 257 bp, Zea mays
aagctccttcagatgctcgtttgacctcctggtaagtttgatttcaggttgacttttgtctcatgtggatcattacattatgatgatgatgttatctagcttatgaatatgacctcttacaagttgtccgaaatttatgacttcaagtttttgttcctttctgtttacaagctgtttcacatttcaaaactgttgttgtaattaatcttaaatctatatcttctcatggattcaataggttgtaaaaatgctttgga

SEQ ID NO: 362235 - DNA, 260 bp, Zea mays
gaggaagcaatgcagtcagcttcaaagggcaaggttcagaccattcgccaaggctatctatctaagagatcttcaaacttgagaggtgattggaaaaggaggttctttgtcctcgacagtcgaggaatgttgtactattatcgcaagcagaacagtagaccatctagtggatattctaaccaaagaactagcattccctcagaacatggttctgggttgctcagcagatggttctcttctcattatcatggaggcgtgca

SEQ ID NO: 362236 - DNA, 272 bp, Zea mays
tgggcctacatggctttgattctgctactagttgttctaaccaagagattgtagtgtcaaccatgggactaaaagcttctggtgttgccaatagaggcgcctcaactgtaaaaaagtatgaagctacatcaacgaggagtacaaatctagcaagcaagtctccattgttgcagaaaaaactgcaaacaccaaccaggaacaggaaccagctaacttcgagcaccataggtggaagaagaacaccaaatggaaaattggcattgcaaagtaat

SEQ ID NO: 362237 - DNA, 272 bp, Zea mays
aggttgaagaactgaagcaagatcttaatcatgagaagaatctaaatgcagatcttcgtctacaactgcaaaagatgcaggaatctaactctgagctgcttctggctgtgaaagatcttgatgagatgttggagcaaaagaacagagacatttccattttgacagaggatacacaagacgatccacaggaggcagaataagagcatgcactgtcaaatgtgcataattctggacgcaaaattgccttatctgaaacgagttcataccaagag

SEQ ID NO: 362238 - DNA, 272 bp, Zea mays
atcaaacgcacatgtcgccacttccaaggtgtggaaaccgttaaggcagatctatcgtcgaacaaagtgactgttaccggcaaattggatgccgagaagctgcgagataagatcgccgagagaaccaagaagaaggttgacatcatctcagctcagaccaaaaaagaagccgccgccacggaaaatccaccggagaagaaggttgaagagaagaaacctgaagagaaaaaaccagaagaaaaacctaaagagagtatggtggttttgaagat

SEQ ID NO: 362239 - DNA, 267 bp, Zea mays
tgaggtggttgaggatctcgttcagacgatctacagctcagaccggtcggattccatgcagacaactatcagctagatcagataggcaaatgaccattatttgtcgcgacaccaagcgcttacgatggacctcggcaaacaccatgtgtctcagaaatttagtatcagtaactggagcatgctgatgaacattggcagttggcgagggggcgaaggcatgggcatcccaatcccttcaccagaaggaaataaaggagaggcgaagag

SEQ ID NO: 362240 - DNA, 267 bp, Zea mays
aatgcaataccttcttcatgctgtctgatggccagtcgtgggctatgctgcaaaatctcagggacaatgggcagtctgttgcatttgattgccctgagatggataaagttgttgatgaggttaaaaacgttgaagagtggctcaatcagtgccactgtactctacttctagatggaaataatagttctttgctctccatacttgtaaagataagaggattattggatgatgtttgcacgttatatgctgaggattgtatgaagttaa

SEQ ID NO: 362241 - DNA, 277 bp, Zea mays
gtagtctagaagaaaagctagttctctcctcctcagggcagtagaccagccttgttctctttcggaattcgggaaaaaaaagaagagcccgtcttcatagcgagccagctgcatcccaagtgtaaaaaaaaaagagaggaaacagctgcgaggcttaccctttttttctccccagttttgttaccctgatggttccttcctaattctcccttttctgcacatgtttttaggggaattaatgacattttccttttgttgaataataataagaatgggt

SEQ ID NO: 362242 - DNA, 147 bp, Zea mays
taggcgtgaagccaatggaggtggtatttgacagtggtagcacgcctagtgaacgtctatcgaagtacagtgttcctgagccaggtgagtagtagttcgataatcgttcactaggcgtgaagccaatggatgtggtatttgacagtg

SEQ ID NO: 362243 - DNA, 279 bp, Zea mays
agctgtattcgatggagtaaacccttccttgagctctgttaaaagtttgtttctgaatgagttaagttgctgggatagggctggggctaagcagttacctagcattgatcttcctgctgttttagtagggtctaggctgggttccaatctggtctagtgttttggcttgccctctgggcattgtactttggtcctcttgaacctttttcctctcttaaaataatggcgtgcatttctcctgcccgttcaagagaaaaaagtcaatgtccattctgaatt

SEQ ID NO: 362244 - DNA, 280 bp, Zea mays
ctaagaattttaaagcagtgtgcagtatttcctatcagtttcgtatgcgaacaatgaaaatgccatttttccttgtgacctctgtatatggaccaatactgtctatgcactgcatagcatttttacagatgcgcaaacatggcaatgtctgtaaacagcatttcaatgtttgcgcatctgtaaaaatgctatgcgtgctagacagtattgctccatatacagatgtcgacaaacattagaacatgctgttatacagatgtgtgccatttaccaaatctac

SEQ ID NO: 362245 - DNA, 275 bp, Zea mays
aaaataataattttatacatatgtttactgctatagtgtaaaccttttagaccgcctaggcgaccgtctaaatagagggcgactgatcctttaacgtttaggataacagtgtgaatcttctcctgctattgaacactaatcttggtagctattgaactctgctttctctcctttcgctgctgctgctgctgcttttttagtacaatattgcattcttcttcttctgtcgactgttgggtactctgttcactcggttttttttttttttttttttt

SEQ ID NO: 362246 - DNA, 276 bp, Zea mays
gaagagctgcggtgtgaggagatacaacgatggcgcaacatcaacaagcgatggaggatccatgaaccatcccacctccttcatctcgaccaccaggtctaccatggtgtggatttgactctagctatagtgggtctaatggtagtggctccagcgatgactggtctcgacctctacttggcgccattcctccacgaccatgacaatagtggagctcaagcagaggcattgtgcttggctcctcggcggcggcgacgcctccaaatctgagcgggt

SEQ ID NO: 362247 - DNA, 276 bp, Zea mays
gaaaaatgatgttagatgggtcaagtaaatgactattcccaaaacaccaatcattcctagtgcgccaaatagcccagaataaagcaccacaaccaaataacaccaactaagccatcgtgtcttttggtttacaaaaccaattgtcatacaaatctttgatattttttggaatagatctcaaattcagggcacttgaataactctccacatgtattgagcaatggggcaatagaaaaacaagtgatcaattgttggggtcgtgcttcggtacgccga

SEQ ID NO: 362248 - DNA, 272 bp, Zea mays
ggtgatgcttatcacaaaatttgtttgttgttctggattatcaaatgtggaacttccaaagttactgataggaagtttgcattttcttatgtcactcaccatttaccattttatgattttatatgcttcataacatgctgatagaagcttgttgaagtgcagagaagcaaaggatacactcaagctcccaagaaacgtcttggaagcaagaattcaaaagtgcaaattctaacactatatgtgctagagactctaagcaaaaattgtgggga

SEQ ID NO: 362249 - DNA, 271 bp, Zea mays
tgtgtcctcacaactgtggttgatgacttcttcgatgttggtggatcaaaagaagaattagaaaacctgatagcactagttgagaagtatgtctactcttttatgaagtaacactgatcacttatgcatggctaattaatctcctgtttctggctgatggttttcatagatggcatgcgcaccatgcattgagttctattcggaacaggtgaaaatagtattttctgctatttatacaacagtgaaccatctggagcatggcttctgcagc

SEQ ID NO: 362250 - DNA, 272 bp, Zea mays
gctctgggcgaagtatgcctcgcgagatgccttcccggggcgggcagcgggtgcgaagtcccgccttcgcgttggatttgcatggtcaggatcctgccgcattcgtgcgcgaacaatagacggtgcagcgaggatcgtggggcgctatgtgccgaagacagagggtctgaggagctgggatatccgggggccaacgatagattgaatcgggtcttcgaattgaactgcttgccatacagtggttatcccggggaagacgccgccgacagcca

SEQ ID NO: 362251 - DNA, 273 bp, Zea mays
cacacacggcgtcacactcacacagtcagacgctccattcttccagagttccagttccaggctccatcgccgcgccgccgccgccagcagcagccccacgtccagccaggcaaccagcagccaggtggtagccatcaagattcaagactcaagggctccaacgtcaagccgagccagcagccaggcgcagccgtacagggctccaacgtcaaaaggtggtccaggagggaagctgatatcttcggtggtggctgaagttgaatggtgagctgc

SEQ ID NO: 362252 - DNA, 273 bp, Zea mays
ataaagggaagtgggccagctaacacctcgcctagcataattaaaagtatgctcccaagggttcgtacaatcgttcgtttcagacctcagttagtaaaccctaacaacagtgaaggtgggataactggtattccctatgcaaatagacaagcacatagaaggaagtccaaaggataccaagtaaaaagttcgatgttacaaaacggagaactgtgccgatacatgattctaactctgtctgtggagtgctgctggaagatggtttttgtctgg

SEQ ID NO: 362253 - DNA, 266 bp, Zea mays
gaaaccgacaatcaaggttctagcctggaatcattttgggtagatctattggagtcatctatgaaaaatgatactcctgttgatgcttctgcttgcggtggatctttggttcaaatcagcagactaataatgggatgggagattctggaaataatatcttgtatattaatgccacaagtaatgctatcttttctccaccaactaatgtggtttcagaagcttatgctaatcctggccttagtcaagtatcagagagttactttgga

SEQ ID NO: 362254 - DNA, 265 bp, Zea mays
ggacttttgggaaattttgcccatggtgtaactgatgtaccttgccctagaccttgtgcacaggtggttaagttagcttcaataactagtttacaaattatgttggttaattttttccctgatcccactttgcctttacaaattatgctgtaccactaaactttaaagggcagtggtgttttctttgcaaataaaattagagagaagggaatcatgtttatactgatatttcaaaagaagtggccatcctgcatagacttgaagg

SEQ ID NO: 362255 - DNA, 186 bp, Zea mays
ctcatataacaaccggagaatcaaatctcgagcatgtgtaaaagcctcatcctttgccttcatgaagaacgcccaagaatagcgagaaaagtcgtcaatgaccacaagacataccacatcccccaaacgagcaaactcgggctagaccaacattgtccatatgaagcaattcaccgagttctgaag

SEQ ID NO: 362256 - DNA, 182 bp, Zea mays
atctgtcgctgatcaaatacgcacggcttctctggagagcgcatgcttgaatcagctgggatggtacttgtacaggcactaaaagaactcaggaggacccctgagatgttgttcagcttaggacgatgttggttcagtggcatcagtacctgctagagttttccttacatgagctaccattc

SEQ ID NO: 362257 - DNA, 111 bp, Zea mays
gaccatttaaattcccatctttaaatggtacatatctgaagaattcgcacagatcttgtgagtgccatttaaagttttgttgctttcatttattaaaaaatgatctgctta

SEQ ID NO: 362258 - DNA, 192 bp, Zea mays
acatggcacccacttccccaatcattcagtggaaaaacaaatattagggaatcagaacactgtgtcaacttcaagcaatacatcaaacactacacttgatgtcatagtggaaaatttttgggactcctgttggagcagaaattgagagagttgacatctggtgtgaaatcaccctacactaaaccagccgaa

SEQ ID NO: 362259 - DNA, 275 bp, Zea mays
gaatggtgtacagatggaaaactggatgggagccttggagttgctgacgtggtgcccattgtgctgtgccccaaagataactgttttcctgggctatactgctttggcttgcttagggatccatggcttactgatggacaaactatgattatatcttctgtctggggaagtagggaagtaatactttctgtaaatgttgtgagctgtgaactttcaagagtgagtccccaggactcagattattcatggaatgttcttgcagttgataagaacaa

SEQ ID NO: 362260 - DNA, 280 bp, Zea mays
caggatgtgaagcagaaccagatccttgagaagtcccttgttgtcacgcttcttgagcactttgggcgagaggtggctgacctgaggtcggaaaggagtgttctgaagcaagagtggcaagcaaagagtgaggagctgcagcagctgcagagtgaaaagcatgacctcctaaagataagctgtgagctacggaaggaaatggaggctcgtaaccgcaaagtggatgaactgaaatctgaggcaaagttcttggttcgacaactgtcggaattgcagagtc

SEQ ID NO: 362261 - DNA, 276 bp, Zea mays
gtcatcatatttaaagcagcttcgccaacaaaaagagggtcaggatggtgttgatttggaaatgaatatgaacgggacaaagtctacatttgaagacgatgagtttgacgatgtggtccgttttattttggtctttacatgctgcatgccgattttggtgattctttttatctctgtacatttgatattagcatgaggagtgcctatggactatgagtctgtcttcattggatatgagatgttagctgcatattagatattgacaagagagtgtgt

SEQ ID NO: 362262 - DNA, 233 bp, Zea mays
aatctcatgacgacactgttgtcattgcagcagcaccagctacaatacttggttcatatataagccaactggctacagaatctgcacacaactggtctatacgctgagaatgcacatgatactcgatggattctaagaagaattcggtctggaggctttagcatagtatactatggctagttggctgataggagagcgcttgcagtcaaacttcacacgaatgactcgtatca

SEQ ID NO: 362263 - DNA, 250 bp, Zea mays
tttgacaaactagctaaaatctctgttttcaaacaacttttggtatataatactacagtttttgagaatactgcattactcttccaaaactgtagtattatataccaaaagttgtttgacaaactagctaaaatctctgttttcaaaactaaaatattacaaatactgcagctcttttgaagtaacataaaaaaaaaaacaaatagaaaaaaaaagctaaaataaaaagaaaaaaaaaaaaaaacaaggg

SEQ ID NO: 362264 - DNA, 279 bp, Zea mays
taggaggataaaagaagacactaccttggcacatgcctgttgtcacaatggacaaaagaagattagtgttgtgtgagatttttttcattcctttgatctattgcatgctatttgtaccctaatcgacaaaatagatgagactcaattcaggagcaaatcaccagtcctgttcacagtccaattcactatggctaaaatatcaaacttatgctccttgaggtttgttttttccttatcttcctttaatatctgatgactgatggactggtgagttcatga

SEQ ID NO: 362265 - DNA, 275 bp, Zea mays
atcttttcttgtgaatttgtaagcttcaatctcaaatccgctggccccttcttttagaatgaaccgaacctccaatattctcttgatgatgcttaacatacagagaaacggtgtaacacaaaacagcacaatccatttctttgtactgtttctttttcaaatattttactgttttcaatattgaatctatgtcttgaatgaattgctagcttatctaattcatatttacattcttgacatttcaatatgtctttccaatgtttgatatagttatg

SEQ ID NO: 362266 - DNA, 291 bp, Zea mays
aggtaattgaatctgttgaagggcatgagggtgcatttactctcacatctgtcacaggtcctcttcctgttgcttttggtccatccaatcctatcagtataaagaaccacagccaaattaatgtttctggacttctcattccttctgttcaagaaaacagagactcatcctcacagagtaagttactagacaatgatattcaccgaagcactcttgttccccagaaaagctttctagctaatatcagcagacagattgaagcagagaaagcttccaactcgagaaattcat

SEQ ID NO: 362267 - DNA, 263 bp, Zea mays
gggagatagtgatggggaagaacgtgcacacctcctgcttcgccgtgaaggagcccgacgcggacgacgaggacaccggcgagagggaggcgacgatggccatcatcctcgcgctctaccgccgctcgctcgttgaacgcaccaagcaccaccttggagggaggtgttccccaaaggtatattgtcatgcttctacgtgagtcccattattcagtattcaaagcagcaagaatgtacaggatggattgcgtctaagtcgacac

SEQ ID NO: 362268 - DNA, 268 bp, Zea mays
taagaaggcacggaaggcctccgcatgagatgggtttcttagatgctgggtacttcacggtcttcggcttggccttggccttggcgaagaccgtgaagtccctgcttctaagaagggcacggacttgcctccgcatgatcatgggtttactttaggtctaagctctgattgtggttggtgtcagttaggtactctacaaactaagtgtgtgcccaaagtgtctcaggcggtgtgttatgtgcttagcaagttctatctatcagagtgt

SEQ ID NO: 362269 - DNA, 293 bp, Zea mays
atttgattgccctgcctgttgatggtgaaactagcgtctgtttgatagaacgcatttttgccggccagctccactcgagaatttgaaggaaatttaccaacgtggggagctgaatttttttgctcctctcattttccactctccacccgcgcctgactgcagctggctgcgatccccctatctaccgcctgattcatctttgtctccgtcggtgccgccctctacgccagcctgaccccagggatggctggaaaaggaagctatgtacctccacaatatattcccttatacag

SEQ ID NO: 362270 - DNA, 151 bp, Zea mays
cggttctggttaaccagtgtgtggtgtggtgtggtgtgtactcctaattcctagcagcagttaagcagtgtacatgccattgtggacgtcgataaaccacaagatgagccaatggcgaaggggatagccccactaagcagagtcatgggca

SEQ ID NO: 362271 - DNA, 288 bp, Zea mays
  unsure (1)..(288): unsure at all n locations
caacaagtcttgaagcttttcagcagggctcctagcaagaggaagacgtctgaacaacttatggatgcttttttacattttattagacacatacatcaaatattatatgaatgcaccactatcccataaggaatagtaaatcgagacagagggagtatctttgtactaaaatgtaaaaaagcatccataagttgttcagacgtcttcctctgtctcgatttactattccttttgggatagtggttgattcatattttgtttgatgtatgtgtntaatagatgtgtcta

SEQ ID NO: 362272 - DNA, 291 bp, Zea mays
acattgctgtcaccgcctctccaacctgctttcactagtgagctgcaactgcaatgtcttggacgagaaccaatattgattgataaaaggagagcagaccaagcaccttacgctttgctgtcctacacacagtggtatactgggtactcaacgagttcaaaaatgatcttacggagttcaagtaagccatgcgttttaagagcatgtttgttttagtttatagattatataacctagattatatatgagattaaataatctgaattatataataagattaataatttggac

SEQ ID NO: 362273 - DNA, 286 bp, Zea mays
gccggccagctgttatcgtaatcgatctggttgccactttgaccgtcctgactcggatctaacgaatctaaagtcgtacacgccagaactgcagaacatccacgtatatatagtcgactgtaaggctgtatccagcagctctcaggccttctttgaaataagcgaaaatttcctgtttcatgtgaaaataagctgattcctataaaatttctttatgatttctataaaattcctatgttacaaaggaggtcttatccaatctcctactggatctgctgtatagctt

SEQ ID NO: 362274 - DNA, 285 bp, Zea mays
acctgagtttggcgccttcagtgacgccagatttccttcttaaactttagcaaaagtacttagtttaccgttatatattcaaaaattattcttctcaagaaaggtaggggactgattgtgtcttcgattgagacagacccacaaacatgacaatggatctgttttgaacaatctgtgtccataaccataccatttagagatacacagtaattctcatgtagatgaactcatgacccaagatgcaaatatttgccattgaagtgcacataagaccatcaaataaaa

SEQ ID NO: 362275 - DNA, 278 bp, Zea mays
  unsure (1)..(278): unsure at all n locations
ggtgaacctcaagaatgctatgaatgctaaatttgatacgcgatgagaaataacacttgacatctagttgttgctgatgagaccaagaatgttattaactgcaagtagagatgacaatggggccctgatttacgactccccgttgggaattcttccattaggggatgaggatggggatggggaagtttctccccccacggggatgtaaacgggaaaatttttccactcgacgggtncttttagatggggacggggaagtaaccccatccccgttcccc

SEQ ID NO: 362276 - DNA, 263 bp, Zea mays
cacaaacttcatgcttttgttgagtatgatactattgaagatgctgctagagcgattgtggaacttaatgatgagaggaactggagaagtgggcttagagttcgattgttgagcacttgcatgacaaagggaggtaaagggaaaaagggtgggcatgaatctgatgggtatggtgacgaggagaatgtctctacttctgatcaaccatatgataaatatttagaagaaacacctcagatgtcagatgtgcctggagaacacat

SEQ ID NO: 362277 - DNA, 255 bp, Zea mays
cgactattaaggcacttaatattctataggcctcaccagtggtacaattattaccaactttaggtggataaatggaacaccaattgtaccacttgtgaggcctatagactattaaggcacttaatatttgtcagagaacttttgcctcttgggtaacacaaattttccactgccagtttgcatttcatttctgctactagtattgaaccagcaaggtttcctccattgctggataaaaatcaatggaatattccc

SEQ ID NO: 362278 - DNA, 284 bp, Zea mays
atgttaaggctgcgttctggtcgttgtttttcgatttatggttggtttgttattttacaggtgttatatctgaaacctttctttccttccatagtagtttccttagggatgttgcaacttaatgaggagctctactgaaataattaggagaattctttccctgttaagggctagtttgttagccagggaattggaggatagcaaggggtttcctcccccataggttacctctatttcccttgtcaccaaaccagcccttaggaatagttaggtctgaagttgac

SEQ ID NO: 362279 - DNA, 275 bp, Zea mays
ctctgatccggtggtctcggcggcgtcctctagcgacgacctactccaatcctctgtttatgcatgtggctattggttgagtccatactaggatatttttcattaattgtgatgtacgatgtaggtatttatgctattttctataatgatttatgctttacgcgataccagccatacaatttatgcaactacgctatgagaatgaaaataccattcaaaacttgtgtgcatgcattggaaactcacacgacctactataattttcagatctggat

SEQ ID NO: 362280 - DNA, 184 bp, Zea mays
tgatcacttagcattatatattctaatattgaggttatggccccaattgatagcttcaggggttgccgtgtggtagcatctgagggaagagctacgtacccatcagccgaaagcatctggggaagctgttgcatctcaagttcctagagatagtatacacgcctattgagtgagtcccgaagga

SEQ ID NO: 362281 - DNA, 280 bp, Zea mays
  unsure (1)..(280): unsure at all n locations
gatgtattaaaaaataaagatgacacaaaattgtgttgcagattaaatacaggatcatgatccaaagctgcttcaggggtcatgttcctgtatttaatctgcaacatgacccctgaagcagctttggatcatgtacgatccattaggcctcgagtgcttttggcaccctcgcagtggtcactcaagtagatctaaagttattctttgagtccatatgtggtgaggttggtcgctctttactccanacacaatctcccttctgtatagctagaagtttgca

SEQ ID NO: 362282 - DNA, 186 bp, Zea mays
caaaattacttgaggagataaaagagcataagaggcagattatgttgcaacaaaatgtaatatatgaatcaaacaaaaagagacagagagtggcagagcagtcatcagatggaatactaggggctgagctaattgcctcacatacaaaggacattgaccacagcaatctgtcaagttttgctctcc

SEQ ID NO: 362283 - DNA, 212 bp, Zea mays
tcgagaggaagatggatataatatttcgtctactcttttttctttttcatgtagttttgatttcgcatgtatgtgcatgcagtacagtggtgatgaattgtgcccatgggaatttggtcttgtgaggcgattttagttactgtccctttgtacagtagaggtatggcgttctctgtaactatgcatccatcagggcatcgggcttcgggcca

SEQ ID NO: 362284 - DNA, 276 bp, Zea mays
aatctaagcagatctggatagttaagtttacaactattaactaaaatcacaatgaatacgagatcggtcaatactctaccctatcgaaagctactgtcactcacagtttgctactaggtcactgttgcatcgggtactagttgattgtgcttgaggattttaattttttgaggtcatctagagtaatttattgattggggcacatctagagtaatttattgattggggctgtgctggcacaaaatgaagacaaatgcacacatggaactgatctgg

SEQ ID NO: 362285 - DNA, 114 bp, Zea mays
gtggaacagaaattactctttatttgtcatcatctctcagataaagagtaatttctgttccacgtgaaattactctttatttgagagatgatgacaaatatgagtttgctgacc

SEQ ID NO: 362286 - DNA, 275 bp, Zea mays
gttttgggattcgtcccgtctgttcgcttactctacatattcgtttagacttgctgtttagtacagaatttctagatttacagacttactacttgatatcctgtactaaacagcaaagccaaacgaatatgtagagtgctctggtcttcctccaatgtctgaagctgaggctcatgcttttgacgtcaactcttttgacctctacaaagaattatcagggcttgttgagttacgaggcatggacaataacttcaacaccagcaatgtggaaacac

SEQ ID NO: 362287 - DNA, 280 bp, Zea mays
cattgacataagtaatcttctcatgtcaatgttgttttgttgaccctgtaacataacaacattgacataagtaatcttctcatgtcagtgttgttttgttacagggtaaacagaggttccttgagcaatgcagtctctaacatcacaaactactgatattggtgtgagttgccgcttgatatgaactaagctttatttaccaataatataaacttcatgcctgttagttgtatataattgatttttttgttgaatgacatttgattactatgccctgtca

SEQ ID NO: 362288 - DNA, 278 bp, Zea mays
aagtaatttgaaggtcattggcactgatgtggaacgctgtctgtccatgtgtgttgaggagaggttacgggggtttataagaagtataataaggttctctaaacagagggttgaggttgaaaagtcaagacatcatttttatccattatcctcagatgttcgcagtcatattatgagagtgaatcgagaagcaagagaacagtgggagaaaaagcaggctgaagatgctgagagaattaggaaacaaaatgatggagatggcaatgcaaatgttgatc

SEQ ID NO: 362289 - DNA, 271 bp, Zea mays
cctgggcatataattgtgtagactcatattttctattgtgtatgctgcttattctgttagtcaataaatatgcatgcaaatttttgtttagaactatttttagaaaaaaacatacttcatgtgcaaaacattgcctggcgaatttttatgctttacttgtatatttgtggatcgtactatggtcttgtaactatagttgaatgtcagtggaacacaaacacatgaagttgttctgataacgataatccttcttgaataattcctatatgta

SEQ ID NO: 362290 - DNA, 285 bp, Zea mays
acaaaaacttctgtgagtaaatgtaatcggaatcctgtttggaatgaagagtttaagctgtcagtttaccagcagtgcgggcctctgaagcttcaagtgttcgaccacggcatgctgtcaaaggacaattcagaagcaagaattctggtttcagaaaaaagagtgtcgatggtacagttcaagaccttggaacacatgctgcttcactcagggcatcaagattctggatgtgctcagattctgcatcgacttgagggcaagtcgagttttaaggaggagggaatg

SEQ ID NO: 362291 - DNA, 282 bp, Zea mays
acccagggaaactgttgacgaatcctgtcatttacagagtcgcaaacaagcgttcttccctggggcttcccatagtttccttggtgctccggtctgttgtaccattgcttcatagatagcaacgattccttgttaaacgtgtgctgtgttgcaggttgcgttagggccaagtcctagcctttgtgatggtgattacatttaggggtggtcaagattcacttatttatgtttcttcaccctttcctggactcggcgacttttttcatgtcgaactctgaattt

SEQ ID NO: 362292 - DNA, 129 bp, Zea mays
gtcataatgtaccaattggtgtgtcaatgtacatctttataggacataatgactaccaacttcactcgctttcatcttctttcctaccaaagaaaatgaaagcaagtgaagttggtagtcataatgtac

SEQ ID NO: 362293 - DNA, 283 bp, Zea mays
atatagtcgtgtgctgcctaccaactgcataaaaaggtcccgaaagaaacaaacaggctatgattgtgcgtttatatggagctcatgacatattttcagggcgtgttatttgtgagcaactggacaattcaaaacatctgaatgggtacttcagccacagacttctggtgaggtgcagtgataacagcagagatatcccaatttgtatagcagataaatgtactgaacaaaccgtgggcattcttttaactatatacatgcatgacaattcttctctctctct

SEQ ID NO: 362294 - DNA, 295 bp, Zea mays
atcgcatcattaaccttcttggagataaactcggaaggggcgttctgtcattctgtaatatggccaatctgccatatccaaccaacatctccatgatctgttgatcagctgttcttcagtctgttcacttaagagcccagttttggcgtcttatacaaatgcatgaaaatctatagaagttgtattgaaaaaacaatacaacttccatcctttaaaactttcagaaaccatcttgcataacacaacagtttataatattcttattcttttgaagcagacatgatgctgtatttat

SEQ ID NO: 362295 - DNA, 123 bp, Zea mays
caaattgcatgagattataagatacccatcttagcatgtttaacttgtagaataatgtcattgaatttgatatccataacctcttgcgtttgtctgagtcatgttatggcatggcatcacatg

SEQ ID NO: 362296 - DNA, 277 bp, Zea mays
aaatattcgccaagaatcagtcaacgctcgaaataattgcttgggggggagtaagagagattaatgctttgttcattgaaacatgctggctagtcaaggtgcttgtactgtacttggtaagcactgaattgtggaatggttggaatagacactaccatctcaacacttgtctctgttactagtagttttccactaagagttacaagtaagagctaccctattttctctgtacagattgattgcaattgctctataacctacagacatgttggtccac

SEQ ID NO: 362297 - DNA, 116 bp, Zea mays
ctttgtaaaggggtgtaaacagaagtatatgatatggttaggttcgcaaacgtccattccgtatgcgaccctaaccatcccatatactactgatgacaccctttacaaagaagtat

SEQ ID NO: 362298 - DNA, 278 bp, Zea mays
gtattcggcaagatggtgggactgcagatgcatctcttcgtcgtgagatccaaactgaatcggttcagctaggaatttcgatgcaacatttgggtgctatgttctttgagcttggtcggacgatgatgatgcttgcgcacagggcaatctccttctgaggcttttgtaaattctgggcctgctgtttatataaactccacaggaccaaacccaatcatggttcagccatcttttcaaaacacccctccttttggtgtatctaatataccagttctggg

SEQ ID NO: 362299 - DNA, 269 bp, Zea mays
caatatttggaattgaagatcttcgcaaccgtgcagtgaaaaacaaacagttgcctccagtttataaggttacaaaaaatgtatacgcgtctcctagccgtgtaaattttcatcttgacagaagaaaggctgtagaaacactaccggcatatcccaacatctttttctctgtagacgacttcgatgatacttttgatgctgtggttttgtcagatcctgaacactgctattgtgtgattcttaacgcacatgatggggcagcattcccg

SEQ ID NO: 362300 - DNA, 263 bp, Zea mays
gaggaaacttaaatactgttcttacacgtgctcccaagtatatcacatcagcttctcgtatggtgaatgatggggctcgactgcttctgcccaatattagctgtgaaggttctgtttttgtcactgtctatgatgacgagccaaccagtgtagtgtcatatgctatgacatcacaagaatatgctgaacatgtcacacataaaatgaatgcaaatactagcttttcagattttactagcagtaatggacttgatggatctctg

SEQ ID NO: 362301 - DNA, 262 bp, Zea mays
gtccaggcagagatatttaagttaagggacaagcttgagatggcattggctttagctgaggaaaatgaagctgctgctattgaagttcgtcaaactgcagagattagtaaaatttatgctgaggaaaaagaagaggaggttaagattcttgaacgatctgtcgaggaacttgaaggaacagtaactgttcttgaggaagtggtatgcaaccttaaagaggaagtaaggaactatcaaatacataaacaatctgaagcccatt

SEQ ID NO: 362302 - DNA, 258 bp, Zea mays
gtcacatttcttaattgaggttgcattaataaacaggttgatgtagaccaatatggtttgtgtgtggtttacatgttttaaatataaatatatgtgggcagctaacacatctaaatgtcaaacaaatcccttttgatctttgagcttacaagtttcttcgataaaaaagtaatttgattaccaagcaactactaactttatgtatgccagacctctgaactgaatgttgtttaagtcttttgtgtgcattgagatatt

SEQ ID NO: 362303 - DNA, 259 bp, Zea mays
gtggcttcgtcaaagaagtgggaatcaaatgtgcacatagaaagtgtacaagaaccatatgaaggccacacgactaaaaaggtaaaatctgatgctaagaaaaagaagctgatagatgcaaaaaattcaaagaacagaaatgatattagtgcagttatgaaaaaggagattgatatagaaacagttgctggtcaaaagatcgtatccgaagctctcaacatatcattgctgtctgatcccagagccatggatgcaaaag

SEQ ID NO: 362304 - DNA, 260 bp, Zea mays
gtcactgtgtctggatcaacaactgtgtaggatacgcgaactacaaagccttcatcatttgtgtcctaaatgcaactattgggtctctttattcatttgtgatatttctatgcgacctacttctgaaagagcatgactttgatattctatatgtgaaaatactttatatcttggcaggtgtcctcttgttcttcttaagcttgacaataggttctctactaggctggcacatctatctattgtgtcataacatgacaacc

SEQ ID NO: 362305 - DNA, 259 bp, Zea mays
tgataagattctacaattattcattctattttggctgatctaaaaccttcagaagcaattcctatcagtcagccctgcatggatgatgaggaacaagatgttgaaagtgatcctgacgtcatgaatgattatgatgagctttgaatgtgagcctgcgactacgccgactagtcatggtgcttaatgcttggcaacatgtttggaatttagataaatatgttgctgtgtcaatgtgtgttgtgtccatgtttggcaactg

SEQ ID NO: 362306 - DNA, 121 bp, Zea mays
gcagcactgtctggccaccgaagtcggagctgcggcccgggatccgggcggtacgctcttcgaccgcaaagggatgaagtacaaccatgtgaagcttctcatgcgtttcgagtttgcctag

SEQ ID NO: 362307 - DNA, 258 bp, Zea mays
cattggtgtcgttcattgcagtattgtgtacattgctcggttcattgatcggattcttagctcgtcatttttaccctgtcaatgcaggaagtctccgtcaaccactttttcagcaggatacggaagcaattcctgaggacacagaggaaggcaactccgatcagcttctgcgacataaaaagcgcagttgctagcttcgtgccctacaccctcctgctgaaactagtaagacttggttccggttatctacacgtgatg

SEQ ID NO: 362308 - DNA, 254 bp, Zea mays
gcagcgttggcgggccttgtggcgaggaggaggaggagcagggggcgtggaggcgcggcgattgttcgcgggatgagctacggcggcagcagctccctcgcgcccggtgccaagaggccgttcgagtacgggagaacgcatgtggtgaggcccaagggcacgcacaaggccaccattgtctggctccacggccttggtgacaatggaaccagctggtctcaactgctggaaacgctcccccttcctaatataaa

SEQ ID NO: 362309 - DNA, 229 bp, Zea mays
gcagaatcgatctcctcccatcacctccatcacaacctctcgacggcagcttcatccccacctcaatcggcggcacctagggcttcatcccccacccccaattccatgtcatgtggatctgaatcagcccactcccaaatctccaatccactcgcgggcttttcctcgtgcccagttcacgacatttgctcggggatctgaccaatggcgtcttctgcgcgtgtccctc

SEQ ID NO: 362310 - DNA, 260 bp, Zea mays
ttcactgatatcccatgttttgacacgagcggtgggacgtgctgacggagatgggtggcgccgccgccgccgttcttgccgtcgcagccgcacgccggaaatctggtcccttcgtatccttgttctccagggcggcgcgcaggctccacgatgctgtagagactgcagcagcagcagcctccttcttggaccggaattccccgacacctgggacccttcatcgcgtgacacgacgccgcagtctcctccgcggtgtgccc

SEQ ID NO: 362311 - DNA, 198 bp, Zea mays
cattattatagacctgtaatgcgccgtcatataataatggtctcttctcgtgctagaaaagagaccattattatatggcagtgcattacaggtctatagtctattttttcatgcaatgacttaaattatgagcttacgaggaagggggtgataatgtacgtaattatcccatctatttatttattatattaatacaag

SEQ ID NO: 362312 - DNA, 251 bp, Zea mays
ataagggcagggatttcagaatacccttaaatggatccttcaatgatggcggaaaacaagatattgatatctggccaggagatttggggcatgtattgaagaaatctgaaggctctagttctcagccacaaaacacttcacctgaggatacaggtttgagtggcaaacatatatcagggttctatgaggaataccccatccttaaatcagagtatgttcagaatcttgttactgtcactgtgaggagagac

SEQ ID NO: 362313 - DNA, 266 bp, Zea mays
catcagagatgagcaatatggcacatcctgctagatttataaagatcattgctaatagggatcgtgggagataatgcaaagcactaaagatgacttctggtggatggtcaaacttcgaggatcaggcacttgttgtccttgtccatgatatacgtaaaaactgggaactagttagtgacgcaatcaacaacatcgtgcagttcaagtgtgtacataggcagcctaaagagtgcaaggagcgccacaaggttcttttggatagaagc

SEQ ID NO: 362314 - DNA, 129 bp, Zea mays
gtctgatcttgctctagcaaagaagatcgagtccggtcagagctagtgatgagtgaaaatcaggcacatgtaaatatatatagcatgactattcgagaacatctaatgctgcacaaattatgtaggtca

SEQ ID NO: 362315 - DNA, 192 bp, Zea mays
  unsure (1)..(192): unsure at all n locations
ggtgcttgtgacaagatcaagttctttagccttggacaatcttttgatcttgtcacaagcaccatctagtgaagaggaattcagtatatggtgcttgtgagaagttcaaaagctagagtanngtanagaattggttcaatctctaatttcttctcattaacagagcttgggctgctgcaaaagaatctacaa

SEQ ID NO: 362316 - DNA, 262 bp, Zea mays
catcagacatacctttgactgatggtattatttgaagttttataatccaagattttgaactgcatgcaaccaatgtgtgtctgccacctcacctgtgggaaacagtggtggcgtggccaaatcagcttgatatgcaaccaaacagcagccaagtcctgctgctggccaaacatttgacttggctcacattggcccataaccaaacatgcccaaatttccatagaacaaatcagcagaaatacaatttatattccagaacatg

SEQ ID NO: 362317 - DNA, 257 bp, Zea mays
atttgagagctttgatttttctcttccattggatagctcaactactgaagaaaaggcatttgggagtgttcatgattccatacaatttggtacatttaattcagatcccgctaataaacatgagatgagtgcagtaagtggcatgtatcagctattggcaactatgtcagggaaagctacaaactgcttgtttaatgatgatgaaaggcaacccggtgaaagtattgatggtagtgtaacagatatttttggttcaa

SEQ ID NO: 362318 - DNA, 261 bp, Zea mays
gtctagttctagatcgcgctcgttccctgcccgccgaaccactccccctcgtcgagttcatccctgcgcatgaacgaaatcacaaggttgaagacaaccccaaaatatttattttctaaatcatgttttgaatttattgtgaactattgttgtaatattgagatgatgcgatttggcgattcacgtatatgattttagagattcgatatatacgtgtaaccgaaatcgaaccccacgacaacgctttaatatgtgtatgat

SEQ ID NO: 362319 - DNA, 260 bp, Zea mays
ggttagaagagatgctccttggtgaagtgacgtgcatctcattttgcagtggtagtagactaatcaccctgcatgcttgtctctaatgcaactacttcactgacttggtgccattggacttagttttcgtcatgtaaaattacaaagctttttatcgaagctacgacttctgcgtgagtttcaagacagcagtgagcaggcagatggatcttccttgtcctgctgctggagcactgacacagtgacactgcggattggca

SEQ ID NO: 362320 - DNA, 258 bp, Zea mays
gtcaaacatatgtctgaatttcctgtgaagatttcagcattttgttctgtttgtctagaaattagaacaaatcaggatgccagagagactgtgctttgatgttgatgccaattacatggaattgcatatttgcattgtgtactttgtattgattgtgatttgatgggcttttctgaccaatgtgcctgtttctgttatcaagtggctatgatgcatgattatcatcccagttcataacacgaacaggtaaaatgcacc

SEQ ID NO: 362321 - DNA, 254 bp, Zea mays
accagatttgctttgctaatgattgaagaattattgtgaagttatgaagtgctgcagctatttgaggtttctgcagaacctaaaacctacctggctcccctcttatggacttccttgcaaaattggtagtgtctctgctaattgagccttcatggcattagtggaagcaatcgaaccatgctagcatatgtgatttcttactgtatgttaggtggcgattgcagattctaccgtatttctggacattctcaaca

SEQ ID NO: 362322 - DNA, 195 bp, Zea mays
agcgacagcaaccaacttcctgctccgtcacctgactcacacctacactcacctccggtccaccaacccctgccggccatggcggctgcggcggcgcagaagctcctcgaggacagcacgaagatcatcggcgccgggcgcaactacatcgcccacgacgacgagctcggcaacctggtccccaaggagcccgta

SEQ ID NO: 362323 - DNA, 273 bp, Zea mays
gcatcatatataatatatatatatgtgtgtatgtgtgggaatcttgatgatgctgcattggatatcaagggctatatatatatggatcatgcatatatatcagatcaccagtcatatcgagttcttccttccaggcttgctagaaggcaatatataataagaaaagactgaaaggaaaaggcaccactgcaatgatggaacgcatcagtgcatctgttttgttcttctaaacgattcaggtcatcaggtgagctaggttggctaataagtata

SEQ ID NO: 362324 - DNA, 270 bp, Zea mays
tgggttattgcccacggaagcttaaatacttggtgctgaactgctgaagtatgatgtctcactgaaaaacaacgagatggcaatgagaagtgttcaggaagaggggtaatatttactcagagcagcaaaggaaggtgctacttcatggtcatgagtatatgcaaagagacaatgctcataatagtttgctttgatatttgttgttcatgctaaggatgccacttactttatttgcaaacaagctatttcagatgattgacagctttggca

SEQ ID NO: 362325 - DNA, 281 bp, Zea mays
taacacagtttaatgcaacaactgaacaaacaaaaaaactttctattttatataagttattgatgaagcatgttctttgcaaaatagttgatataaaatctaacaaatttaaataatagatgccataaaatattcaggattttatattttgaaaataggaaaatcacatagattcaatcccacatgtctgtttaaacaaccaagcaattggttctccagtaatttcgtttgatcactgataaaaagacagctctgagcgctcccctaaggtaattgccaac

SEQ ID NO: 362326 - DNA, 271 bp, Zea mays
caatcacttgctaccaaactatgatgaaaattctatgttgcaatgtggtttatcttgggctcctgaacagaacagcggagccttagtacagatttctggaaaaatgttgaaactcaggcttcatcggtttccatgccaataaatggagcacctgttgcaagctttccagcaaatgttagattccacaatgcagcagcagcagcagaacctgctttaccgccacaggttgctccagctgaagcaggttctgatcagtcggggttggcctttc

SEQ ID NO: 362327 - DNA, 264 bp, Zea mays
cggagaaaaaggattagtcggctgtttctctcatggtgacgaaagtcgtactggaccacaaaagctggaagctgataaatggtttaatgaaatggctccaatgacacacagactcctttcggctttaattatggaagatgacctacctgattccaatggggtgcaaagagatatacttgttgaatttccaaatagccacaatccttacactgtcaacagatacttagaaaatgaacttcaagctagtgccataacatctaattt

SEQ ID NO: 362328 - DNA, 265 bp, Zea mays
cccgcacatcgccgtgatcctcaagacctcccctacgtcctcgaccacctctccggagcagcctcgccgccggtaagcccctccgcccttttctccgccgcgggtactaattaattggggaaaggaccgcgggttcgatttccagaaaccctagggggttttctgcagagccatagactcaaatgaatagtaccccggggacctgtctgtaattcctttaagaactttcgccagggaccccagtgcaaaactgcttttctttaaa

SEQ ID NO: 362329 - DNA, 259 bp, Zea mays
gcgagattgttcgagatgattagagtgtacatacgcggtaggaggtggccttagaagaatcaagattggctccaagccaaaccctaacctctgtacatgcccagccctggtgcccgctcacctcggcagaaattttgtgactgcatcttctcttagcctcttgctagctgtagtattgcccgatttctcagatttagaaaaaggagcctttcttaaaaaaaaaaaaaaaaaaaaaaaagggggggccgccgattattga

SEQ ID NO: 362330 - DNA, 264 bp, Zea mays
caacgcggcacgcttctccaggcgggtggatctccagcgctcctcgagctggagcaggcaggcgtgccggtcttctccaggcgggtggatcttcaccggcgcggcggcctaccgggcggacggatccggtcgatctccagctgctccgtgcctctgctgctcggcgtcctgagctccggccgtctcgcgctgttgcttgctccttgaatccgcacacatgtgattggtcaaataaatttctttgtcaaaaaaaaaaaaacaggg

SEQ ID NO: 362331 - DNA, 277 bp, Zea mays
ctatcagtctcaggaataggcttatagcagtgaatttctagaactaaatttcaggtatactcatcttgcctagcagtcccgttgtcggaattcactgctatcagtctcaggaataggctgggttgaacttatacatgagatatcccatgtccaggtgcattgtctgaatttgagtagaagtgtgtaatccgagttcttagaaaaaagcaactcaaaaagggccaaagtttggatgtaccttctgggttattgacgcagatatctttatcgctagatg

SEQ ID NO: 362332 - DNA, 278 bp, Zea mays
ctttcctgtgttggctccttcctttcctgcgcctgctgctgaccttgggcgcctttgatactggcggcccagaaactggtccagaagatccgtagaggtggacacgagaagaaatcaaagctgccactgggaaggatgaatgcatttcatgaaacacagtttgaaattaaggagtgtagatactgacgtcgaggattttgaaggaacaaaagacgccagcaaggaaccactggtgacaagctacaacagaaaattcatgggaacagtagactacatat

SEQ ID NO: 362333 - DNA, 278 bp, Zea mays
atgtagtggacgatgatcaacaatagcgaagagagtccgcatggttgaggatgcccaagcacgtaaagctcctgttcaaaggctcgcagattcgatcgcaggaccagttgtgtagactgtgatgacgttggctacaacaagctttcctactggtgtgctcttgtgtttggattgctgctatcgaaatcttatgactaataagagtgcctgtttatccctcaggcccttcagaaggtagtacagtggcacaatgatatctcctgaggttcttctgaatg

SEQ ID NO: 362334 - DNA, 272 bp, Zea mays
tgactcaagcagcacgccttagctgatcttcccatcgccgatttttcaggtcacccggtatgatcctttcagacttcgtctctcttttctccccatctcgatctcgtcctatcatccctacggcttactccgacgtctacaccatcaatggatctcatctgctatgatctgttctctttggcgtcatccgatcttccctggcttgttgaatccatcgacccatcacagaatgccctttcacagatctggcttagacgcggactgtagactcg

SEQ ID NO: 362335 - DNA, 268 bp, Zea mays
ttctggctggctcctgtcctcacgctgccagtggttctcgtcctagcagcaaccgcatcagctctcaccagatccgttcatcatttcatccccatgcctccggtgaattcgttcgtcctcatgcctctgctggatttgttgtcctcatagatccgtttgttgtgtttttggtgaggggctgtggtgaccctgagagcgagtttgagagtctgaggagggactgggaggtgctggtgcgtgagttgatgtggctgcagtgctagctgca

SEQ ID NO: 362336 - DNA, 266 bp, Zea mays
tattcatatcaccttggcataaagcaggatggtgaaccattaggtgatgttggtctccctccatgggcaaagggttccccagaagaatttattcatatcagtcgagaagcccttgaaagtgaatatgtaagctctatctagatcattggattgatctcagatttggttagtagctgcgaggctagcctgctgttgaggctgcaaagagatttgatgatctgacatatgagggtgccgttgatttggagaacatggatgatatgtta

SEQ ID NO: 362337 - DNA, 258 bp, Zea mays
gaacattatccttggaaagaagaattagaatgcttagtccgtgatgggcttccaatggccctgagaggagagctcgtggcaagcttttattggtattggagctcgtcgggtcgaagggtactatgagggcctccttgcagcggacagtgaaagtcaagaaaacaaatattcgggatctccaacttcggaatgtggtgatggaaaaccaaaaccatctcaaacattttcttctgaaaaatggaaagggcaatagagaag

SEQ ID NO: 362338 - DNA, 256 bp, Zea mays
cagatgttgatcctagggcaatagatcttgccatgagaattgccgaaaggatgttcctcaaaatgaaggaagatgaggcgaagaacaaaattgaagaagaaaatgatagatggagaccaaacgacgaatccacctcttcacaaggttcgtctttcaaatccacttctcatatgtgctttattgctaatgggagtgacagtgaaagcgaaagtgaggatgaggaggagcaagaaagtgatagtgaagatgaggatga

SEQ ID NO: 362339 - DNA, 260 bp, Zea mays
gcagctgcccgaagccgccaaacaccgccagtcccccaccacatccgccagaaccctccaaacaccgccagtcccccaccacatccgccagaaccctctccctccctccctccctccctcatcggcgcgccgccaatggccgtgtggtgaagcgcacccgacggaagaagcaggcaccaacagccaagccccctttgcccttgcccttgcccttgccctcgccgccgccgtccgcggaaggttgagtcccaggattcaga

SEQ ID NO: 362340 - DNA, 258 bp, Zea mays
gccgcaagtacgatcgatgcgacggggatcgccgcgccgccctgcacctggaccattatcctatcctgtcaaactggccacaaccggtacggtgccgacggggaccgtggcccgtcgccgcatgaacggaatcgaaaagagatttcgcggcgcggaggggcacctgttaccactacagatactacctcagccttgccagagggagaagaagatcacattcagactcaagacacaggcgtgcgaggcaaacgcaaacgg

SEQ ID NO: 362341 - DNA, 252 bp, Zea mays
aaagatttaccatggctaaggctaaatcttggtacaaaaccaaatgtgttgaaaaaggctccaaagtttaagtttggctggaggactaacaaagggttcgcgagagagacacttgcagttgtgaacccagtaatcatcaaacgcctcacggttagcgttcttgcatcatttggattggcaaaatacaccttgcccccatatattaactgagtacagagccttaaaagccttttatacattcgtaccagcaag

SEQ ID NO: 362342 - DNA, 253 bp, Zea mays
tagaccagcaaaatctgatccacctaagttacatgctgctggagatcgccatctccaggaaactaaaaagctgaacaatgagttggatttgaccaactcatcttcagctccaacggttccactggcagttagtacagagaatgccgacagcacagcagtaaccaatacaagctcaagaagaccatcttctgagggtactggtgagcctggagtggaaagcttcactgtttctgctgttgaatgtgacgaaagc

SEQ ID NO: 362343 - DNA, 257 bp, Zea mays
caaaagaaatgtctacctatattatttggaaactctcccttaattgttgagtgaagtgtgtcatttcgctcaacaattaagggagagtttccaaataagcttggacaggacaaaagaaatgtctacctatattattgggctctttgacaagtatgttgaggagacctccaaatcgcagagtcactcaaataatactcatgaagcacaaatgaaaagcattgaagattttcagatggtttaccgagagcaatccaaat

SEQ ID NO: 362344 - DNA, 262 bp, Zea mays
aaggtaagtgtgtgtttgcaagactaatggtcaaacaccgtataaccataaagttagaatactatattaatatattaaataaattaatccaatagacatagattaacccaattaacacaggataaataaatatctaattataaaagtatgaaacatggtataatcaatgttgttactgcgtagtaaatattcatacgagactaacacaactggaacggttcaatttagaattaaaatggggaagttacaatttccaaagttt

SEQ ID NO: 362345 - DNA, 274 bp, Zea mays
gagcattttggttatctacaatgtaattgactgaagctgaaccgctaaagcttgttggatctactttaatttctgcatttcctttattttctttctaattgtggttattacttattactgggaactgtaattcctttacctttgctaatgggaccctagggtcttgtgcaaaaaggatttctcaattaaacaggtgcatgtgaaacttgcaatcaagtatccaggaagtgttaatagactagtggtaaatgaaagcctacaaaatttgtacagt

SEQ ID NO: 362346 - DNA, 281 bp, Zea mays
gaaagttgatgccgttgaatgagcatggagatgattagataatactcagtttttctctttcaattatatgttctaactacctattaagaaatagaaggaacagtaccagttcaagatggtaatgtaatagtataccatagaaagataaggaaacacattgctcaacttgtaattgtatttttctcttcagaaatagatcttttggtttttgaatagcttgggagagtacattattatagtagtgcatgttgttaatccatcaatggagttctaccaagctc

SEQ ID NO: 362347 - DNA, 272 bp, Zea mays
ctcgagcgcatcaaatagcttgccttttgcccagtcttgttgatgtccttccaaacgctatatcagctaatcatccaggatatgcgtgcgtccttgcaaatgttcttgaagctgcaacctggattttgtctgatgcaaagttagcttctgattcagcggctgacatcattgctgtttgtacctcgttgtactgtacgttgccagcagtcacaacacctactgaaagggcagatgacgatgatgagatgcccatggatgtcaatattaaaatt

SEQ ID NO: 362348 - DNA, 273 bp, Zea mays
cttggcaccttggggtagcatatgctccccaatctcccagtctttattccataggactatgtacatagggactagggaataaagactgggagatgcggaagcacctgcttggcaccttggggtagcatatgctcgtgtctagctcagatgcagaagtcgcattctgaaactctgcggttatcgacctgttccctattttaactatctctgtatgagagccatttatgagactgaaccattttaccattttgttttcccccttctttcgtggtt

SEQ ID NO: 362349 - DNA, 273 bp, Zea mays
tctcaagcgcaaaaccgccgagaccgaccaaggctcgcagcgtgacctcccgctcgtctgcttcgaaagccactgcagcagtacagccttgtagatcatccaagcttgctgctagtgctagtgctagtggtatcgatgaggagacgccagatatcctgcacgaacctgactctctcagtaactgtgtcaagactactacttcaccgaacggaaaacgggtctcgccgccacataacgcgctcggcagctccccgaaccgaaaaggtggcagga

SEQ ID NO: 362350 - DNA, 275 bp, Zea mays
gttgtgatttgcactaaactgcttgttcttcattcccctatcataggcttctagcgtggagtatgaaaatatgtgatatatattgtggtggtattgttttctgatgaaatgaatattattaccccataagtggacacaggccagttgaaccaatacgaacccgatcaactacatcgatgcatcaccaacccaagcatcccaatccaaacaacttgtaatttgaaactagaggtacattatagtacccttttctttttagggaactagactattag

SEQ ID NO: 362351 - DNA, 271 bp, Zea mays
gtcatggtctcaagatcaagacttgggatgaatttgagaccacaggcactctcccttccccaagcagcagcatgctctgaccttggggaagggggttctcattctacatgtttcagtgacctacacctccttgacactcagacaatggaatggtcaagaccaaagcaacaaggtgttactccagaatcaagagcaggacatgcaggtgtaactattggagaatattggtttattactggtggtggaaatagtaggaaaggtgtctcagata

SEQ ID NO: 362352 - DNA, 124 bp, Zea mays
ctgtcattcgcttcttattcaagtcgcaactcactccatatctaagcaagagatgcgacttgaataagaaaccaatgacagatttgctcagatatggagtgagatgcagacagatttcttgccg

SEQ ID NO: 362353 - DNA, 133 bp, Zea mays
attatagcgtgtttgctttaatatatttgtttaacttcttggtacttacatatggtctagataaccacgcagttaaacaaatatattatagcgtgtttgctttaaggaatgagaaaatacatcttctcaaaaa

SEQ ID NO: 362354 - DNA, 125 bp, Zea mays
gagaccaaggccctgaattcctactcggaggcgattcagaacaccctgaagctgggttacaaggccgggatggccaaggggcttggcatcggctgcacctatggaatcgcctgtatgtcatgggc

SEQ ID NO: 362355 - DNA, 264 bp, Zea mays
acatcttgtaaaacatttatttcaatctgcttctgcgctccggaagggattaaggttttctttggcagcggcagctttatatgaactcaaagaactttgttttcacagagatgagagcactatgacaaatacctatttgcttgcacggcttgaagacgctaaattgctcagagctcaagggcagcttgatatggctattagtcttggaaaatacatactacagaagctttctgacaagaaaaacctgtcagatgtctatcgatt

SEQ ID NO: 362356 - DNA, 271 bp, Zea mays
acaagctggtggagtagctagcaactcgagggatgaattgaagactagatgataggcttctccttctgatgtgccaccgataaaactgcagctagctagcaccttgttgccaagcaatgcaagatctctctgctgagatcgatctgaatacctaaaatatctatccggccggtcatcagctcgatcttaagcaggataacaagatggcagaaacattcgacgtggtttcagtgcacggccgtcagttcaaaaggcgacttcgccttctacg

SEQ ID NO: 362357 - DNA, 182 bp, Zea mays
gcgtggccgtgggttttcatcgacgaacgacgacgactctgccgcgcgcgtttaggcgcgtcgccgccggccacccggccgccacttcgacgcggctgtggtggtttaaaattctccggctcgccgcccacggcctcgctgcacgtagttgcagatcaagctctctcacgagggtttatttt

SEQ ID NO: 362358 - DNA, 222 bp, Zea mays
agatgggggatctaagatttcactgaagtaaaaacacgtgccaaggcacgaccacggaaaaggagattttggtgatgttatcatctttgtaggaacaattctatgaagtacagtaaaaatagactaaaaacaggtagaacgagtataaaaatatattgaagaattatgtaaacattacgaataaaggagttgagttattacatgcactatatggattatagt

SEQ ID NO: 362359 - DNA, 278 bp, Zea mays
acgcattctctgaaggcggtcgacatctctctcaagatcgacaccgagctcgctcttcaggttggaagacgtacaaatcgtgcttgactccaccgcgttacgttgtacaagcgttgcccacatatgcaagatgatagagagacggggacgggcgttgcaaaatcaacttaaataacgtaggcctagtctgactaatatagtattgaacccaatccacatgtgctgaggtggattagggtcagtactagagtatccaaacaaagccttataggtgtttg

SEQ ID NO: 362360 - DNA, 261 bp, Zea mays
atttaaatcttacagttcaggcaccagctaagcctaagatgctgagtttccatatgtgataatgttggactgtcttgttcatatcggtgtggcatatcattatgcttgaggtggtggtatgtaccttccattaggagggatccaccaaggagtttgttcaacatggatgaagaatacaattcttctggaatatagcgaagatggcatttgggttcaaatctttgtggaggcagtcaaatttcaagttacgtgctgatctgt

SEQ ID NO: 362361 - DNA, 269 bp, Zea mays
acataacttacccaatcaatagagtcttaatggattgcataatctatcaaccaccacctaacatcaaacaaacttttgacctacatcatgtagtctatctcatccatacctatattaaccatattccccagcccaataatatacactaactcctaatcaatgagacaagcctgaagaagatgatcaacttcatcacagggggatgagcaccaactcaggtcttcaaggatcaagtgtggtcaccaagatgagtcaaggtccacaatctt

SEQ ID NO: 362362 - DNA, 290 bp, Zea mays
gaagtttcttctctctacaagagaagactacaaagctcctccggtgtgtgaatttgttatcaaaactgctttgtcaatggttgaaagacgccgtgttctgccaaacaggggaatgcagatccagtataacagatcctcttcggttaggttcctgaatggcttttttcttgtattgcgcgaacgatgtgaagcattgcaattgtcgaacacggcactagaggatcattctttgtcaaaaacttcgtgtgcaattaacgccgctcgttactgtgaaaacgtgcttcgggaat

SEQ ID NO: 362363 - DNA, 303 bp, Zea mays
ctcgtcaatgcccatcagtcgtcgtcggagatgtcatgtacaagctgcagagcgaagagaagtacatcatggttgtcgacgcggtccagatgactctgtcggcggtgccccttcctgatgccagaacgctcctctacgctggtaaccactggattggcaggacaccggacggccggctttgtttcttcgtgatcagggagcagcttactctcgccacctgggttctccaagcacctgggaagtgggtggagcagcaacccgtggacctgcgcacgctgatgcacccggcgtttatgggtgatc

SEQ ID NO: 362364 - DNA, 290 bp, Zea mays
caaacctctgtcgaaagtttcacctccggtcgctggtttcctccaatctccgtggtagttcagcgcgagcgggcggcggggtttgagctcgatggtcacttccggcgaacaatcggctgcggtcggcgagcaaggggaaggcggcggtcgtttccccggcggctgatgctcctcccaccatctctgctccgcgacgggcaaaaccatcttcagatgtcagcaagagcatgtgtttagacctttctgtgaaggataattctgccaaacccccacggaggcactcaatacaa

SEQ ID NO: 362365 - DNA, 289 bp, Zea mays
attagatatgtcgctgatggaagtccaactaatggcgaactgaagaccgctgaccttgtgtctacacccgcacattctgttgcatctatacctccttctacaccagcacttcatgttgctcctgcacttttgtctacccctgtcagatgctcatctctatttatcacgccaccatactgttcctcaggtatgcaagcaatttttatttgtgatctttctccttgttagcttgattgatctttctccaatacttatttgtgggcttggttaatctacgttccatttagtt

SEQ ID NO: 362366 - DNA, 289 bp, Zea mays
ccagagcgtgagtaccatggtcggggtaatggtttcattcctatagctgaatataaataattattgtctagactgtgtcggcagccaataattatttatattccagagcgtgagtaccatggtcggggtaatggtttcattcctatagctgaatatggtttggaattcaccaaaaatacaaagcagtggaagaaaaagacaccagtaagactattatacagtggaaggaaccattatgatttgcttgtgtgacatagttgcagagcaatgtatttttttagtgcccgtc

SEQ ID NO: 362367 - DNA, 287 bp, Zea mays
tcttgtgttaccaaaatataagtatatggttatgtgagcatatttgatgcttgtgctactctatatacttcataattatatgttgctcagttacattaagattttagattatgtatatgtaatctcgattaaccaaacagttgatgaaccttattgctataaatggctacatttacagttttgattaagacattatgataaaaaaaaaattcatgccagtgccacgtatatacgcggacgttttggttcttgttagaaccaacctcttaagagcttacatgaccgta

SEQ ID NO: 362368 - DNA, 282 bp, Zea mays
aatggtacaattttcaagtccccgaaacttcagtatttgttctaaactgaagtataatatttggaagtatcgttcttttaggtagtctatataatatttcatttttccataattgcatgatcatttctttaatcctatcaagaagcttaacaatatgtaagcctttaatgtctcgtctctgattattgaagatctttttctgtattcaatattgacctctaatgatattgaaccttagcaagaggtcttcaataacaagatataagacattcaagacttaag

SEQ ID NO: 362369 - DNA, 285 bp, Zea mays
caacaagaaaaactattggagcagtgacttatgtatatatttttttaaaggaacgaatggatctttcggagcctcggtttacaattacatacatgcatcgatctcactgacttactactgaatcaaacattactcagataccatgagtcacactgctcactgactttagtgctgcaaggctatatggggacatcttaaaaaaaaagctactaatggttgataaggttgaagcaaattttggtgagtggccaataatgaacaatactggaatataaagatgatact

SEQ ID NO: 362370 - DNA, 286 bp, Zea mays
gaccaaaggactgctatcgccatcaatattgggcacactgcattaactacgcctggcatcaagacgcgacatgaggaggagccagtctgcccccactcatgacctacgggtcctaggtctgagccccactcatgacctatgggccctagacctgatcccaccatgacctacgggccctaggcctaagtcctcttacaccctacgaagcacgtaagatgtcgaagggaagccagaggtcaggctacaaagtccaatggtcaagtcatgcagatgtggacaaaaggag

SEQ ID NO: 362371 - DNA, 286 bp, Zea mays
cctcagtcatccatatggcttaggtttatcacatcatcaaagatctgatatcgctcatccatatggcttaggtttctcacatcatcaaagatctgataaactcaacacagcaagttacgtggagaggatccgaatgagacctgatgttggaaattcagtaaatttttttgatttatcttcctatgctcgcttgctgaactccccgttcttgtcctcacaatctgatacatataaatccattgatgaagtgatgggaagagtatgcatgctgtcaaaggatcaagat

SEQ ID NO: 362372 - DNA, 288 bp, Zea mays
acaatggtgagtgttgtggcttgtctgtggcttagtctgactcaggaaaaacctacagccagcagcaagtatgtatccaggaactaatggtagtagcactataactgttcccttggctattcaataacatctgtttaaaaaactgatgcccagccccgcctaggcagtcataagtagagctgcatcgcctaggcatttctgtcttcttttgtgcatggaacctcactcatccctttcccagatcccaactcatgtgggagcctacgctattgggtatgtccttttttc

SEQ ID NO: 362373 - DNA, 288 bp, Zea mays
gaaggcttttacatcttggtgcagaaccagttctagagataggtcttggagatgaccaacacccttcaggatatgaaggggctttagatccttggttgctatctatgtggaagtctctgaatgaaattaatccgtcactcttacctagagtgtctgatatcaatgatcctaatttgagttttttgggggatccaaaagttcatgtcatttattactcttccaatgaagttacacaagatcctatgcttttggattccaataaaataataagtagcgcaagatcaatgt

SEQ ID NO: 362374 - DNA, 286 bp, Zea mays
gataagcacacactacattctttggcagctgctgcagctgcagtggttaagcctgggaaaggaggtgaaatgaaaatcgcagacaatgaggtaaagactgaacaagatgaaaactcagaggaacgagattttccaaagatcaggaggctttcagacctgtactgtaggccttcggaggacagcactgaaatttcccagcctatgcctgcacgcttgcccgacaagtttcaggagcagagacccgagaaacgtcttgtgcatccacgggaggaggtcgggcggcgat

SEQ ID NO: 362375 - DNA, 281 bp, Zea mays
ctcctcatgacgacaattcctttgtatttgtctaccgcgaagttaatacaatcagtcgtgtagagaatggggctcccattcttaaaaggaagtcagtggagggtggttctggaagtaagaggctaaagggtcttggtattggttctcctgatggtcctgtttcactagatgatgtccgaagactagaaaaatctaatgctgatctcagggaacaacttgaggcacatgttgtgacaattgagactttgagggctgaaataaaaacagcccaagtgcagcat

SEQ ID NO: 362376 - DNA, 282 bp, Zea mays
gaaaaagggaaaaaagtcaggcgtcgggtcctcagtcgtagcggcggcgatggcgcgcggcggcggggggcggtcgaagaaggaggatgaggaggagctgcggggggcgaacgcggttacaaggaggcgtcggcggagggtaatcgggaggaggaggcgcgctgggctaacgtcatcggcgacatctacaagcgccgctgcgagtacgtcgaggccctccggtggcttcgggcggactacgaggtctccgtaaagcacctcccgcagcggcacctcctcccc

SEQ ID NO: 362377 - DNA, 253 bp, Zea mays
cgagaaagaagaaacccacagcagaaaaggagatcaaagagaaaaagtcgtcaggaaaaaaggtgacaaaaggtaaaggagaatcagctgaagcagttcttcccagcaaggccgatctgaggaagaccattactgaaatcctcaagaaggttgccgtgttgaagtcaactttcttgaggatttcagtaatggtcttcctcagatcgtccttgctgggagaccacttactgatatcctcaagaaagttgacttc

SEQ ID NO: 362378 - DNA, 154 bp, Zea mays
cccgaaggcgatgttgatgaggatacagtaagaatctctgaacatcataagatctgtcactggtttgcattattgcatcatctggaccacggccaatcttatgatgttcagagattcttactgtatcctcatcaacatcataagattggccctg

SEQ ID NO: 362379 - DNA, 276 bp, Zea mays
gagattttgtgacatctgtggaacgatcaacaagtgaccacggactaaatttggtgggaccagttggagatgaagagacaatgagcagcatctcacaccaacattcttcagaaattaatcctgttgatgtatggcatgtgggcaatgtgaaggctcaaaatactgcagaaatggttaaggaaataaatgattcttttgacgattggcaagattctactaccatcggtcaagtccaggacacttcgttgaatcaaactggggacagatggaggtctc

SEQ ID NO: 362380 - DNA, 275 bp, Zea mays
aatctgctcacgtacgccatttggcctgacatttttatgtatgtactcccgatgcaaatttaaataaacactgccatctactaacaactacgacgacatatttgtttcttgggaaggccaggccaaaaactaaggttcatgagcagttgtctccttccctttgtttcctcatacatcaaagcaggacacatgctactgatcatcctgtcgtccgtcccatgcatatggagccagtagccacacaaagctagctgtaacttttacagttctacctc

SEQ ID NO: 362381 - DNA, 271 bp, Zea mays
gagctgctccgagccacctgagctcgagccaactcgcgagcctcaagctttttttccagcccctctttgtacttttgccaaagattgaaaagcagctacagttgggagattgttaatggataagattgaattagcagatgaagattcattgcttgaagaattggatggaagtaaatttacgccctagcagtggtacttcagttgtattctttctttagaagcctgcctcaatgcttgaagaattggatggaagtaatttactctctagcag

SEQ ID NO: 362382 - DNA, 271 bp, Zea mays
  unsure (1)..(271): unsure at all n locations
cataaaggtgaacaagggaccattaagctagaactatcacaataaccanatgagatgggagagctagtaggtcatgatatttagttgtttttagcttgtatgtaacaccctgaatttgggggtataaaatttctttcttattatcatccaaattcaagtgttactcttctctatctctccctagtttctctctctctctctctctagcttctctctctctctttctcttttggttagggttagcttaattagtgagggattattattttat

SEQ ID NO: 362383 - DNA, 293 bp, Zea mays
gattgagccacagtttgcttcaaacaattatacgtttgatgtgtatgtgaggacagatgggcgagtcaagctcatagatttcaatccatggggtggttataccttgccgctgctgtttacttgggaggagcttgaggagaaggggagagggtctgagctggagtttcgggtggtcatgcataagggtgcagtgaggccaggattgatgacagctgtgccatatgatatgctggattggggtgaggggagtggctgggatgtttttctgaagaaggctgacgaggagcttgaca

SEQ ID NO: 362384 - DNA, 287 bp, Zea mays
aaaataaagggcactgatgcctgctgtcttgttctgcccccctgttttccttttattctgctccgctctgttctcctgcgggcctggctgcgccggggaggcaaatgcttagcacagattcttcattttaagatatttgaaaattgaaatgtcggtaggacttggccttctggaatcccccgctaaaccataggcgtgttctattggaagtggaacaaaaccatggagagtgacatcatggcctcctatgaaacaaagcagaattgcgaaattagggtatttgagag

SEQ ID NO: 362385 - DNA, 288 bp, Zea mays
tactaaaggattacatcaacaaaatcttactgatttttttacaataagcatgttgatttttatttctttacatcttctcaatcaattaagcatcataatcggtatcaccttctttcacagcaacaccaagcttttcatggatttcagttggcctgcattaaacatattaacatgtaaggattcgaggaacacatggtggacacaaaatgcaaaaagtagggaaaggaaccttcgactttgagatgaagatgcgcacggtatgaaaggcacggtctggaagattgatga

SEQ ID NO: 362386 - DNA, 292 bp, Zea mays
cagcacacctacgacattggcgactacgagttccccgatgagttccgcaccccctctacgcccaccaagaacgtcatcagaagcgtcgccgcgcttaaagggaagctgcatttttgcttcatggaatcgcaccaaaacaagatgtgcgtcgttgacttagatttcccgtccgatcatggccaccctcccaccgcagagttccacgagtttgatgtctccccagagttcggcatcaagtttcctgacggcgtctgctctgccagcatccacttggtagagtccatggacgagc

SEQ ID NO: 362387 - DNA, 260 bp, Zea mays
ggataagggaaaagagaaagaacgtaatgaggagcatgaacggcgtcctggtggcgaacgagagagggaacaccatgacagagaaaagaacaagtcagggagaaggacaatctgaaaagatagggaccatgataagagaaggagaagagaagaagagaaggcagcatgcaacgtattataagttagcacgagagctctcttgctgtggagtcgcactcatggattagtacactgctcagagattctacactgatgtactg

SEQ ID NO: 362388 - DNA, 280 bp, Zea mays
gattgtctaggctgctgaaatcgcaaaaggattggagttctgttctcttgtgcctgtatgaagctggaaggcatgacaaagtgcagcttttggatatcttctgtgaggcagccagcccagattggcaaactgaaaatgcaccagataattacctatttgcgtctaaagtgcgtttattaggagtaaagcagggtctgctaaagatttatagcgcacgtattgaatacaataaggtacttgcgtacagaaattttgtgacacatcctcgaggtttggagca

SEQ ID NO: 362389 - DNA, 290 bp, Zea mays
gaacaatttcaagacatttcattgttctacttttttctatagcaccagcttattgagacttctgtcttagatgtggtatggacaaatatacatgccactttccagatgaagtgaagagaccaaatgtggatgtcaatcaatctctagatgaaggaatgaaaggaaggagctaagttattgcactggatgtacggggtctagaaaaggtgtcactttgatgccatttattagtgctgttgtacaaaagaaaaggttgaattgatgaattcatgggctaccttataaaataa

SEQ ID NO: 362390 - DNA, 275 bp, Zea mays
cggctcgagcaacaaacaaagtcttacaatcttcaatctcaacagcctactatacacacacacacacttctacactacagtcatttacacaacaaccgcaatcatgtctgacaactccaacaacaagccctctactctccagtcctacatcgactccgccactggtgccgtccagaatgccgtgggcagaatcgaaggcaactcgggcgatcaggccaagggagagcttcgtcaggacaaggctcaaactgagtacgacgcttcacaggcagcag

SEQ ID NO: 362391 - DNA, 266 bp, Zea mays
gctccttacaggttccaggcttccagccagccgccgcggcgccgcccagcttcatagctcctacctgtgcggctgtgctgttgcactgctgcacttgttcttcacgtgcagctcctccctgtgcggttgtgctgctgcacgcttgcactagttcttcacgtggcgccctccataagacagcagcaagcgccggacagcgacgagctgggtggaggcgcaggcactgtccctgcgatgttgtgggactcggacagcgatgatgaagt

SEQ ID NO: 362392 - DNA, 263 bp, Zea mays
gactgggcgaccgaccaaccgtcgctgcgctacgccaggtgccaaggtcttcttcgggtccttcgccggcgaccagcagcaccaggcatagacttgtgtaagaaatggatgcaactgccggttaattgcgacacagatttatatggacataggtattcggctcctccctgctccctccctctctgaaaatggctggcaactactgttacaatcttgtttcagctaacatcgtagcacgttccactgtttctatcttcagatat

SEQ ID NO: 362393 - DNA, 261 bp, Zea mays
atcattttcaacttgagcgttttgcacagcggctttgcgttctcagcaaaccaacatttcctgcatcggcgtcccacggcggagttttcttcgggtgttttgctctttttcctcacgataccatacatcttggtgttttgggcgtgctttttctcctctcaaacacattacggaagcggcgactttctctatcatcacgataaaaaaaggtcttaacggttgacgggtctcacaagctcatctcatcttcagagaaaagaa

SEQ ID NO: 362394 - DNA, 270 bp, Zea mays
ctcgtctgttgtatttattagtagacaggggttttcatcctagctgcctaattcttaaaagggaaaacaattggcgctgtccactttgtattttttagtgaaaagcgtaattaccatgttcgccttaaattaaatatattgcttcttgtaggttattaatctgacaggatgggttgcccctcggacatgtgtgatattgatatggctacattttttccattttgtcgtccacatattttttttacagtcaccaactccctccagtctaaa

SEQ ID NO: 362395 - DNA, 266 bp, Zea mays
ccggcggacaactatatgatgtcactctcggacccggactcggactccagcttgtggtgcctggccatgcagaaccagaccgacactgacggcgtggtagtaagcattctcggcaactaccagcagcaaaacatgcacatcctctacgacgttgggaaggagacattgtcgtttgctccggccaagtgcacaacgctgtgatcagaaatctattccaattcaaatgctgaaaaaatcgaactagactacgacaatgaacaggtaag

SEQ ID NO: 362396 - DNA, 266 bp, Zea mays
catcgttgaaaatgtggagcgcataggcaccattccattcatctctctttctagtttctacagagacaatgtcaatacgctccggtgctgagacgaggtaccggacaaatccggcgtttgccgacacacaattggtcattttatatcgtacgctgctgaagaagctgaacctggcgtacaagcgtctctgactaagcgacaaagctaaggctctctgcttggcacaacagacaaacgacgcaactccagagtctgagcttcgcttt

SEQ ID NO: 362397 - DNA, 263 bp, Zea mays
cgaaggacatggctagttataagtttgggggtggtgggaaaagggatatctatgtttttaagtgggtaagatctgataggagataaggattaagtatatttcaaaatagatagaaaaagactgcatagcaaattagagcccaagattagataatcaaaaaaaaaaaaaaaaaaaaaaaaaaaaaaaaaaaaaaaaaaagtgaattgttaagggggggccgcgcgagatggggcccgccgcccggtaaattttctgggaggggg

SEQ ID NO: 362398 - DNA, 264 bp, Zea mays
agttgacaagcattgccagccaggttcatgagagcacgacgagaaccagtatcgactctctttctccgtcagcacttaattttgagccattccgaaaggacatagatgactttaacaacaggattgctgcctggggagactattggcatgctgccttcgatacgtttcccaacccagagcctttccaaacacctctggtctgtctcttgagagattacatccgtctgtactccaactcggtatttctacatcgaatgatcgtct

SEQ ID NO: 362399 - DNA, 264 bp, Zea mays
tcggctcgagcacatgcgagccagcgtgtcagtgagatatgggagtcacatgtgcagaaactcaacctaggggagctgtatatcctaagtactttctcttgatcaggttcaggctgttcttttggtacttggagggtacgaggttccgcctggtttggtacacatggctgtttcttcagcaaatgatatgaagaatacaactgtggctgctagaagggttgcttccttaatgagattccgtgagaagagaaaggaaagatgttt

SEQ ID NO: 362400 - DNA, 175 bp, Zea mays
gtcgccgtcgccctctcgggatcgctggctcccctgcctctgtgcacactcctcaccattcccctctccattcgacgctcacgctgccggcgtggctccgacgtgctcggagtcggatacgaagacgtcatacagatgtagcgtggtcacacgtatcgctggcgacgtcagcaga

SEQ ID NO: 362401 - DNA, 262 bp, Zea mays
cggctcgagggcgccttcaacgtcgacgactacatctccctagtccgtggctgggatctccagggcctccgcaggagagccgctggcgtccaccgccgcttcgacgcgctgctggaggacatcctcaggcacaaggatgatgcgagggctgctcgtaggctcgaccaagacgacgacggacgatacagcagcaagcaggacaagaagcaggccacgcacagcaaggacctgctcgacatcctcatggacaaggcagacgacc

SEQ ID NO: 362402 - DNA, 261 bp, Zea mays
tgttacttagaagatagcagtatacaatcgtcgaagcaacaattaattctgggatgattcatgtagcatggggtcaggctgttatcgatagtagtctgtactgttaaagattagcacaatgatcgtcatgactgcttcgagcatagtctcaatgtggcagaagtagtaagtgcgacagtataacgatatcaatcttcagagaggactaaaagttcaaatttcttgcaaggctacgagggcatcctggaagcgatgaggaag

SEQ ID NO: 362403 - DNA, 229 bp, Zea mays
  unsure (1)..(229): unsure at all n locations
cagttgcccattcaagtagtcataggtctaactctccagctcaagactgtagaagcaagtcatctacattgcagcactaangtgtggagtgagaagagtgatgctggtgatattgctactgatctggattgaagactcctggtcttcatgtcatcacatgaggttgttacaagatctcttcggattgaaacaagagatgataaagagttatgatgcatctcatgaagag

SEQ ID NO: 362404 - DNA, 257 bp, Zea mays
aagcgacaggatgtgagtgataagtaacgcctatttttctagtccctcactcagtggacgataaacaggcttcgctcagcttcaaagggagcgggatatgcctcgggcagctatcggccgaaatgatttctaaaccgatcactcctctctttttgggattctcactcatggctaccgatactaacgattcacacccaacatcgacacccggatgcaagtcttttgaacagctgaatgattctgctggtcatcatttt

SEQ ID NO: 362405 - DNA, 106 bp, Zea mays
tgaattcttaggtcggtcaccacttggtcttctgctctcggacgtcgactaagccgacttcgtcagcacgatggagtgccttgacgcatgccttctctcctctgag

SEQ ID NO: 362406 - DNA, 260 bp, Zea mays
agccgacgtacctcaagggccgctacgatgtggtcacctccgtcgccgtcccgctcgccctcgcagtctccagcatgtacctcgttgggcgcgggatctacaacatgtctcacggcatagggaagaaggagtgaactctttgtacatgaacatgactcgtcgatcggtggactcttgtctcatatgtactgtatatattctgtaaatacagtgaggactcgaatgtggtggattggatatggggaaaacaaatccgtcca

SEQ ID NO: 362407 - DNA, 255 bp, Zea mays
gtgctgtctttgacagaagttgtttccaatgtgctgtcgggttcaagtaaatttcttcacaatgctggccttttacctgcctccaagagaagcaatacaaggactatctcgacaaggatgcaagagcttgagactcaattggacactgagaggcaagaaaaaaatggatttcgagatcactcggtaaccttaaaggcccagtcacaagcgtctaaggcaaccattgctaatcaatcgactgagattgcagatttg

SEQ ID NO: 362408 - DNA, 257 bp, Zea mays
  unsure (1)..(257): unsure at all n locations
gatccacgtcccggtcctcgtcgccgccgccgccgggggagntcgtcgttcgcggtctcccccttcccctcccgcatccccgcccagaaagaggcggcgggacgatgccggggacgacgacggtgtgagcgatgtggtgggggctctgagggccatcggagagggtttcctgcgagcggaggagacgaggccggaggccgcccgggagacgcagaggatgcggatggagatggcgcttcggcaccttgatgcacaga

SEQ ID NO: 362409 - DNA, 170 bp, Zea mays
gaggacatggattcaatgggagttgcgtcagtgatttgaatttccaatccagcggtttgctttcggctaagagaataatggagaacatgggctggaagcagggagaagcccttggaaaaagcagaaagggcattgtagaacctatacagccttccatcaacaaacatggt

SEQ ID NO: 362410 - DNA, 255 bp, Zea mays
gaaaaaaaagatgacagttgctgtggtcccctttatttgaggggagatgggaggttttttggtgacaaaaaagaaaaaagagcaatctgggaactgctggagcgtctccaccaatatataacagtttgatgagcatgaaggatgatattgccgaggtgctcttggacttcaaggagtatgccacaacagttaatgttgattctgtgcggaaagctgttcgtgcggtttggagatgtgcaattaaattggagagag

SEQ ID NO: 362411 - DNA, 176 bp, Zea mays
gtagcccaccgtggagtcacctcatcagcgtctcctcgctcctcgtccgttcgtcgagctcggcaagcccctcctcagccgtgccgagtctccaagccggctgtcgacgctcgcctttgtttctgtgttactggaaagattataatgtctttggcttaattagttacttcatgtgg

SEQ ID NO: 362412 - DNA, 248 bp, Zea mays
caatggagtcttctaatcccaatcaaaacccaaaccctaatccatctaccttcttcttttctcctagtcctagtaccgaccgtaatcttccttcccaaaacaaactcccccaggaattccttgcgcgttatagtcctgattttcaatatgtcgaagctttattatcaacccataccgacgtttctcaatacatcgaaaaaatctttcaacaaggaagtcctcataaacaattaagtcctcctaaagga

SEQ ID NO: 362413 - DNA, 244 bp, Zea mays
gtgttagactgccaagtcgaagacattctcaagtcatgggcaacgtaccttactatatcaagtgggaacactgtttttggagagcaaatgaactccatcactgtcatgctgaagaagtacaagaaatatctgcaagcgatagtggacaagtttgtcagcaatacacaagctatccggaatatgagcctcaagcgaattcttgaagaaacaagaggctgatggtgaaagtgatatatgagatagg

SEQ ID NO: 362414 - DNA, 235 bp, Zea mays
tgaacatgataagtctctacgccattctccaattcctcccgtgtaccgcctttatgtcacctggtcaagccaaccaaatggactatttcgtcgtgagcaggccggatttctcgccactgacgaactcccccgcctgtgcacgtgaaccggccgactccgaccacctctaataccgaccggtacctcgacgtgaccgttgtaacctccgtgaacacctcaccggagctatctcgct

SEQ ID NO: 362415 - DNA, 244 bp, Zea mays
tgcagtttggcgccattcagcgggcagtcagaggtttctttccattaacctggaaagcttggctcaagcttttgactcccaaaaggatactagaggaccggatgtttgtatatggtctggccaaggagaggctcgctcgccggatggctcatgatacagacagatatgactttgttcactatatgttgcagggatctgagacacttagatttgaggagatggtgtcgcaatcacaaatcctcct

SEQ ID NO: 362416 - DNA, 236 bp, Zea mays
gaaggaccaaagctaaaccccacgtccccctcacgcgctcccatctcccaccccccggcacgcgccgaaacccaagctcgcgcgaaatccaaggtaagaatccatggggggcggcggcgccctcacccccaccagcaccccctcctcaccgtcgagcccgtcggagtcctttcctcccgagttcgtcgagtgcgtaccgtctcgccggtctccgatgacgacgaatcagatgattg

SEQ ID NO: 362417 - DNA, 236 bp, Zea mays
gcatgggtggcgcgcgcgaggagtacgtgaggaacgcgaggggcgtgcagctcttcacctgcgtctggctgccggcggcggcctccgcgcccaccaaagcgctcgtcttcctctgccatggtacgtcgtcgtcgtcgtagaccacatccgcacaagcaccttgctctgctgtgcgttgctcaagctatatgcgtcgtcgtacgtacgtcccactcgatttcgatgcatgggttgat

SEQ ID NO: 362418 - DNA, 241 bp, Zea mays
caacactgaaggccagctctattccctgtacattgataaccgtggggtcagatggatccaagacttgagctcacatggcaaagtgatgacagttgcgccgggaaacagtgggtgcctatacacagtctttccacggaagtctatcgtggtggggattaatgcttcgacaggaaacatttcttggacgcagaatactggcccaatcagtaatgagaaaaacttaccaactgtcgattccaac

SEQ ID NO: 362419 - DNA, 212 bp, Zea mays
caccagtacctgcagcagcagcacgccatggcggcgcctatgatgatgatgcactcctcctgctgctccgccgacgggtcgtcgtcaaactccgattccatttccaactcctgctcgtcaccggtgaccacggcggcctcgccagcctacagccaccaccagacgacgttccaggcacctgcaccgccgccgtcatgcggcgcaatgacgat

SEQ ID NO: 362420 - DNA, 245 bp, Zea mays
gtgtttttgccggcaagacggcggggttgcatttgcattggcccctgccccctgctgtatgaggtgtatcagatgccgatgcctgatggtgcgtagacagtggaagaccccgctagctcgatcgggccagtgctgcctagacttcgagtcctgtgatgaggaaggacggaccggagaggtagccattaggcaagtccaaggagagacgaagacgagggctagctgctactagcttactgtgacgt

SEQ ID NO: 362421 - DNA, 240 bp, Zea mays
ccagagttaactcttggtgctaaaatcatttcttacctttggcagatatgggttaaaactccagaagttttagctcgtgatcggcttctaggctcattttctgtaagttgtacttactgacttctgtaaacgcaacattcttttatgatcagttagctctttgttttccattgagtatcagctgcatgccataaagcttattgagtgaacactgaactttacatgcacatggcatgagct

SEQ ID NO: 362422 - DNA, 242 bp, Zea mays
ccttgccctctcctggccatggcactagttctcactcgcgcggccagtgaccactgaaacccaccgcccgcatgagcaaagatggcatctgggcgatgggacgaatctcgtgcggcggccatcctcgcgttcacgcctccccggggccatccctctcccttgcggagctccctccacgcgcgccctgcctcccatggcggccgtccggctgctcggtcgccatctccatagccgcgcctacc

SEQ ID NO: 362423 - DNA, 252 bp, Zea mays
acgcatagccttcatcgctgcgcattgtccgcattgacgcagcagcccttccgttcattctccactcccctcgtcgcgtgtcatcaatctcgtgcttgctgcgcacccatcctcgtcgtcgtcaaaacccttgctagatgttgccgctgcgcctcgcgcgacgcatgattcggtgaaacacctaaaaccgtggaggcacgcgcgacacgagtcggctaggttgttcgcattgagtggttcacgatttgtttt

SEQ ID NO: 362424 - DNA, 253 bp, Zea mays
gaagacggcaggggtgaatccttgcgtagttgcgtgtgttttgcttgccgtcgacaaacaccagcggcgtgttgaccggactctggactctcggagcctggttagtacttagtagcagttggggagatccggcgttgctgccgagtgccgacgccccgtcgacgagcggcgtctctttgtatttcgcatgccgccttggcggccgtggcactatggggagcatgattgctgcttgcttggctggcagctggag

SEQ ID NO: 362425 - DNA, 248 bp, Zea mays
cggctgtggacgcggaggggatgggagagctagggttgcttgggggcaagggtcacgcacgcgatcgatagacgtcgaaaacgtacgcatgatggacaatgcagattaacacgcgtggacgtcgcagattaatgggaggcagaacaagggagaggcaggctaccccttgtagccttaataagtagtagagattacaggtactaatcagaacaataaatactatcaggacacaatcaggagtgtgtcca

SEQ ID NO: 362426 - DNA, 249 bp, Zea mays
  unsure (1)..(249): unsure at all n locations
gtctagagtagtatagcgtagtnagtagtagtagtagtagtagtagtagtagtaggggagtatcaactcataatgagttgatttgtaagtattgttacttcccttaatgaaaaatgactatctcctcctgcgccaattatttttgcttcatagtaaattgaactcttgttttgtgaagttgattcattcggaatagtatctaaataactcgggcatcatattgatgcttttagaaatagccaccgagta

SEQ ID NO: 362427 - DNA, 251 bp, Zea mays
gcggtagagcaggagagttctgatcatcgcgctctcggccgtgctcggcgcctcggttctcgcgtccgccgtgctctgcttgtgcttcgtcgcgcggaggaaaaggcggatggcgcgaccggcgccgctggagaaggagagcagcaagccgctgccgtggtcccaagagagctccgggtggctcctggagctgtcgagccggtcgggcgagggcacgaccggcgcgatgcacagggtgagcacgcagctcc

SEQ ID NO: 362428 - DNA, 122 bp, Zea mays
tcgaggggttgcagggagctgctggcagggcgggggatatcgggaagcgcgccgagcccgtcgagcacgccgtcggcatcccggggttcaacagccggctggacgcattccacacaacatac

SEQ ID NO: 362429 - DNA, 249 bp, Zea mays
ccttcccaggtggccggctgcaccgacctcaacaccaccgccttcctctaccgcgtcttccgcgccgaggaccccgacctcgtcgtcttcacagacaggaatggtgctccataagggatctctacatcggtgtgtattgttggatggccagtttactatagaatcagaaatatgcagaactgtgtacatgggggagaaggtcaaatacagacacatacacgcaggtttctgctgttgcatttttccatg

SEQ ID NO: 362430 - DNA, 124 bp, Zea mays
acagaatgtcacgtggacgtggacacggtggtcggatttttggcagcaactgctcgctgctgactattgattgactctttgtacaagtgtgaaggaagaaaggcagctgtctcatctgttgatc

SEQ ID NO: 362431 - DNA, 248 bp, Zea mays
ctaaaggcttatgaaagtgacagggagaggctgatttaattgatttgattcttttttccagcgctttgagtttgccctctcgttccgtgccataagttttgatagttttctctaactcagaaactgtggacacacatttttcatgctgcacttgcttttctgtcaactcttgtttagattcttgaagctcttgttcaattttctttacgagctcacctaacttgtgatgttcattttgctcaactctg

SEQ ID NO: 362432 - DNA, 255 bp, Zea mays
ccgggtatgaccgccccttctattcccttcctgctgtgaacaccctatccgaaccctaacttgagttatttgtattcgtacccgttctaatcgaagtgtgatacgtgtattgtacctccgccatttctttggcacgcagccgccaacctgaggttttgtgggctcagcgctccgagaagattttcttgactatctcattgccagatgcgaaagatgttgtgttaaagaccgatcctaagggcctctttaacttct

SEQ ID NO: 362433 - DNA, 190 bp, Zea mays
agcgcggcacatgttgtagagaagttgtaggggaagatgagcacgacgctcgacgcggcgatttattaaaatgcttgtatacaacggtgttagtacgcaaacaaaacaatgatagattcaatacacgtagctcgctcttgtctgatgtagtcattgacaagtttgatcttagagcgattgaggctgattc

SEQ ID NO: 362434 - DNA, 246 bp, Zea mays
accaatattaggctcggcttggttgaagttgaagaacaacctgaaatatcagaggcatatgaagttacaatgtttccatattttgttttctgcaagagtcaaatttggtctaacgattcagaagtgaaagctgctaaccggagttgtacaactgagaataattccaggggtgttgcgtatcctagccatgctctggatatggttcccataagaacacttcagtgaaatttgctgcataaatcagat

SEQ ID NO: 362435 - DNA, 244 bp, Zea mays
cttcctctgcatcctattcgctattgccgggggggggggggaaccgccggtggcgtccgtgtcgttccggcaagggtaaaaccttaattgcggtccctgcggaatttcccccatcccttgagatttgggccttaggacggtgaactctgggggatcccaaaccccctgctgagcccccgaaaaaagggcgggaatggctgaaaggaataccatcattctaatgaacccatcacagaaaagttcg

SEQ ID NO: 362436 - DNA, 248 bp, Zea mays
gtttgtctcctaggtcgaagaacggcgcccccatctgcggcgctggagcgtggtcaaaagcgtcggcggcggtcgacatctcccggcagcgcgtgctcgtcgtcggcgaaacccatttcaagcacaagtcgtaaaatggaccagttcactgagggagaaccttctcatggccacgaaccttttgtttacaccgaaggaattgatttaactcaatttgatgatgatgcaaccttccacaacgcttgcaa

SEQ ID NO: 362437 - DNA, 248 bp, Zea mays
gggttacgccgacgcccattcgctgtggcacgcaagcaccattccgctcacctgtctcttgtggagcttcatcaaggacgatgccaagttccgcacggcaacactcgtcaagaaggcaaagtaattaagcaaagggccacactgttaagatatagggtctgggacccatcgtgtacacgaggagcggtttggggcacacgtgttataccggacatcatgaaacctccagtatatttgctccccccccc

SEQ ID NO: 362438 - DNA, 200 bp, Zea mays
tatgttcagaggccctatcttttcatgcccatgtccatctcgctagtgatgtgtgagaaaccgattgattgattgattgatgtgtgatgcctcactagctccttcgtggcaaatctcatcagcaacagatacggctggtgtgacagcttgtgaagaaaacgccggctcgctcgctccgtctctctctctccacacaacat

SEQ ID NO: 362439 - DNA, 257 bp, Zea mays
ccgccgccgcccgcaaagcacgccgagagggagaggttcttccgagagaagagcatcgacggtgtggccagccttccgggccacatgaggggcctgtcgcagcacagccgggacggcagcagctcgtgtagcggcagcactgattacggcgactgaaaggggaggggtgagcagcagcagcagtacatatagggttccccttcttggggctggtctcacacttggtcaggccaggcaggcgatacattggtgttgtg

SEQ ID NO: 362440 - DNA, 181 bp, Zea mays
atgaaagtgcctgagtgcactaggccttgttgtggggattgtctatttggtcattgctattagatgtgagcagttggactatgccccagactccatttggcttgttgaatataatgcagcattgacatccgtctgcttgatgatgcttctgggatttgttgaggatgttcttgatgttcca

SEQ ID NO: 362441 - DNA, 283 bp, Zea mays
acaaggcagagtgggaaattgaatgttccatggtgagaggttgaagcatactggagcttagtactttggcctctgtggagagaatttgtctggggaggaattgcaggtgcatttggggaaggcatgatgcatccagttgacactctgaaaagaaggcttcagagtcaagctataatgagaggggctaaggctcagaagaatatattccagatggtcaggacagtttgggcttctgatggtctaagaggtttttacagaggaatcagcccaggtgttatggatc

SEQ ID NO: 362442 - DNA, 281 bp, Zea mays
acaatatgttattgcatgaattgcagcacagccagacaccttgctgtcaggaacccttcacaatattgatgtcaaaccttctggtgtagttatgccatctcagtcgttaaatgtgttcccggctagtgaaggcatctcacataatcaaaatccattggttataccatctcaatccccaagctttctggcatcagttcctccatccatgaaacatgaatcccttcttggatcaccttcaccatcaaccagtctgttgggtgggcttgatatggttaatcagc

SEQ ID NO: 362443 - DNA, 279 bp, Zea mays
tgattctacatattgaagaaaaaacatgccttcgctatggtgcgcaaaatagataaaaaataggagggaggtttccatctttgccatcagtggcggcgcctcctgcttcttcgttaatgaccacggtctccactgccattgtgaaggttatctatgacaaattgacaggaagaaactgtgaattcgggttgtgatcgtgtcttcgatcgaagaagttgaggcggttgctgagcaatttaatggctatggatcaatcctcaccatgaggacccaagggga

SEQ ID NO: 362444 - DNA, 272 bp, Zea mays
tctgtcgccaaccccggcacggatcggggatgtcgtctgctgctggccgcgcgccggcgccgacgccgatgggctccgccgatcgctggaaggtacagccatcggttctcgtctccgctctctcttcctctcctttgctccgagctctgtcatctcggtctgcttcctgcgacccgccgttgctgatcgacgggatcgtggcggcggagaaagccagcagaagctgcgtcgaatgctgcgccagcagcacgcccatgtggcgcagggccgac

SEQ ID NO: 362445 - DNA, 130 bp, Zea mays
tcgccaccgaagcacaaagcagcgtcgtcagggcgtgaaggcaccaccgaatctcgggtgcagcagctatggcgaggttcaacccatacgagaacaacggcggcacgtgcttggccgtcgccggcgccga

SEQ ID NO: 362446 - DNA, 240 bp, Zea mays
cacagggcatgagcaaaattcaccttgtttagagactttgagaccattacctcctgaatcacttcctaaaaaatggagatggagtgatgtaacttggaaagatcctcccgtggaattgagtgagagtctgggtctgaaagtgatagagatcaaaggaatgggaattttggtaacgacccagtccttcagtcatataggcccataaataactcaaatggcaatgaggaaacatcgacttca

SEQ ID NO: 362447 - DNA, 148 bp, Zea mays
agaggaactcccaccattacttctgagtggctctatgagtgtgtaaaacaggataaacttctccctgttgatcactttcagccaaaaccacttacatcacaggataaagatgcttatccgtgcactgcagccaatattccacacaaca

SEQ ID NO: 362448 - DNA, 173 bp, Zea mays
tcgacgcccttgggtttacgtgcgatccctgtgatgatgactctgacgacagaggcagctacctgctctgctccagtcaccctccgttttatttcctactgctacttgttgtgtcttgaataatttcgataaataaaggactccgccagagattggcacttgaatcgatccat

SEQ ID NO: 362449 - DNA, 254 bp, Zea mays
gacctctgcctctccttcgtggcggaagatccggcccttctccccccgtcgattaccgtcggcctcctccattgccgctggcattaaccgtctcttggtgcctgtagctttagagctaccctcggcgagattcatgagctgcctgccatggtgaaggacagcgcctactacgatgtcctggggctcagcgtcgacgcgtcccccgccgagatcaagaaggcgtattacattaaggcgaactggtgcatccggac

SEQ ID NO: 362450 - DNA, 249 bp, Zea mays
agtaaacgcaaatcatggctcgcgaccgcaccatccacgtcccaccggcatccgcacctgcgtcttcgagaatcctcaaggtccaaggcaaggaaatcgtcggcgaggatgggaaaccagtcatccttcgcggtgctggtctcggcgggcacctcaacatggagaacttcatcaccggctaccccggccacgaaaagtacatgcgcaaggccctcaagaacgccctcggcgaggaaaagtacgactact

SEQ ID NO: 362451 - DNA, 249 bp, Zea mays
gtgaaaacacgaatcctaaaaagaacaagaaaggcacaaaaaagaaaccaactgtttctactgatcagaagagtatgtcaaaggctgaccagaagagcacatcaaaagggaagaaacaaaaggaggtctcgaaggcacctagtaatgattgcgctaattgtggaggaacttttgagtcgaggaacaagttgttttctcacttggaagaaacaggtcacgcaatgctgaagacgcggcagaagaatcgtc

SEQ ID NO: 362452 - DNA, 248 bp, Zea mays
ctttcttttaaaataattatacttgatttgaattttttacataatctgttatattagatgttgcgttactgactgtgattcaatgtacactcagccatattcctgtgggaagtatcaatcctattgactttcttggcatgagccagaagctcttagtttctctaaggactttaagtataaagatataaactaatcaaaatgtgatgctagtgtcgaaataagaaacttattgtacaaaatgtatttta

SEQ ID NO: 362453 - DNA, 251 bp, Zea mays
  unsure (1)..(251): unsure at all n locations
aggcagactaattgttcccttaggtgggggttgtgaccctcgttcccagtcccatgtccctgtgggtggcagtgactgccctacctcctgtcatggtggtncaccctgtccagaggctccctccactcctcttgcaggatccctagagcagctcagccctgtcggtgttgtgattgtgcttaagtcttaaggtctcacctcatagtgcccccataagctgcccctctctgtgtggctcctgcccaggcgtg

SEQ ID NO: 362454 - DNA, 241 bp, Zea mays
gttgaagagaagctcagcgctggaagctgaacccgtaacatctgcagctgcagaaatagtggatgtgccaaggacaaaatagcacctttgcggccgtgggttatcaaacagtaggtgtcgtcgtaactcgtaaatgatcatgtgtaattacagattacataactcgtaaatgatcatgtgtaattacagattacaaaaatgtgtaggaatagtagccaaatatatgtgtagaggttggcat

SEQ ID NO: 362455 - DNA, 286 bp, Zea mays
catgagctgaacagcagcctcacatttctcgatacagattcattgccattcttttagcgtgaccattgtggccaatcttacgtcgacggttcagattttgtctgtagagctcaaaaggtcaaagggatacacaataggtttctatataaaaaagttgaaatttgttggcggcttcggatgttatacctcttgaggatgtatactgttatagccctcttgaacgattgaatctaacaggaggtattcgttgagacatgaaagaataaaagtaatgctgaaattttaa

SEQ ID NO: 362456 - DNA, 341 bp, Zea mays
  unsure (1)..(341): unsure at all n locations
gtgattgaggagatcatatatggcttagaatcaggcattttgtttgggatttcttcagtgatctctaagatgggatttgtgatgtccgagatgggttttccaaagattgttgtgcctgctgccatatcttgtagtgtttgctgcagtgcagtgggatgtgtgtatcagactcgaggcctcaagcatgggagggcaattgttgtatctacatgtacatcagtggcatctatagtgtccggtgttttgctggcatattgcattgatgaacatctgccanagctccacagtcgattttcctctactgggatggtctcatcacacagagtatactgctgtagtca

SEQ ID NO: 362457 - DNA, 330 bp, Zea mays
acatagtgtatatcttagtgcatattaaaacctatatatttagaaaagctaaattgtcttataaagtggaaatattactttaacgatgaagtttcgtgatcgaaatattttgtctgcaaaagcccaacgctgtcaagggtccggttcttcatctagcttctcctgcagggcaggatccagtgtcgtcacaacctgttcaagaacattgtctattctccaatttgtgaagtgtgtaatattgaagatgaacttctgatcagacatttccgctgtggtttgctgtggcttcttggaggcaattgttttcagggctactgatcaacgatcagc

SEQ ID NO: 362458 - DNA, 294 bp, Zea mays
  unsure (1)..(294): unsure at all n locations
caggatatccttgtgtatcaaagcggcatcaaaggctgctaactggactttttaaccattctgttcaggcgataatctctgtgagatcgaatcacaagtgttttccatcatctgaaggagtgctctcaggagatgatggcaacgctgaagattcctctgttcgacatgcatgagctccgtacctggagtacattgcatacctgtatcagaagatggatccgcttcctgagcangaacgctttgagattaattacagggattttgtgcagtctcctctcgagcgtctaatggata

SEQ ID NO: 362459 - DNA, 284 bp, Zea mays
cagaggtagcaacccatggcaagaaacgtggtggtatggctccgataacaagaagaggagatggcagcgacggacttggggaggcagattagtcttttggtgaactgaaatgttgtgctatccgaatctccttggtggttgtctctggagctgctaaactatcattgcacgctgtgaagaaaatcgaaaaaatattggctgccagatctggaatgaggaaactcactacagttcgcgagtttttgcagcgattaacgctagtgtactcgctggacctcgaggct

SEQ ID NO: 362460 - DNA, 148 bp, Zea mays
cgtcatttgtactggagaagcccatgttttgacaagtgaagttatcaaagttattccattaaataggggccaccatgtgcaactcaagcctggtgtttcggaacctagatttggatggcgcggtcaatcacgggatagcattgggaca

SEQ ID NO: 362461 - DNA, 115 bp, Zea mays
ccttgctttattctttggatgacgagtataaggagcatgtgcttgaataatcaccctggatttgataatggtgggattctgtggttccatagcttgactgagttcccacatggca

SEQ ID NO: 362462 - DNA, 262 bp, Zea mays
tgtcgaattccatgacgatttatttttctaatagtgtgcaaaagattttcccaagagataccaaaaatcaattgtctcaatccaattaattcctcggtctctcgctcgtccagacgtcggttcgctctgttctccgctctgaccgattcccctgctatttttttctctgagtgccatctccctgcagccatggtcgagctccttttcccctgccatggacgtgcccctccctgcacctcccctccatggtggcttccaacat

SEQ ID NO: 362463 - DNA, 321 bp, Zea mays
atttagggtggtgttcctaccaccggcacctaagcccaagaccaagaaagcatgattactcgtttatggatgctggtttagaagaaataagaaatagaggaaggtcacataagctcatgtgttgtacttgatttcctcaacttcccacaaactgggtgttgtgctctgttacttatttctcatcaataatttatgtttacttgtaattttgggctagtcaggatgtgtttttgtccttttatttagtttttatatgttttctttatgagtacagtaaaatcattgatctcaactgagttggaaatgagctgaggttggctc

SEQ ID NO: 362464 - DNA, 129 bp, Zea mays
tggaatcaagccatctgtttatgtgtgctagctggataaagcgctgcttgatgtacctacagggatatggccacatggctatgtacgccataggtacacctgcattacagggttgttaatgtatctcag

SEQ ID NO: 362465 - DNA, 218 bp, Zea mays
tgcgtgtgcaggaagaagatgaaggagatgacgacgggccttggactgacgggcttctcgctggtcttcgtcgcctcccttggtcgggtatgcaagcgccacggaagatcggtcgcagcaaccgattcagcagattcttgttatcttgtatatgagtgctggcatgaagttttacgctatgccatgcgacagggcaacggtgaaccagtgcatgtact

SEQ ID NO: 362466 - DNA, 214 bp, Zea mays
ggggaagcacaggacaggcggcatctcaactcaagctagctaggtagcaacctggccggattgggcagcttcctgcaagaagctcatccaaagttccaccagactaccagagggagggagagctagcgcgagagagaaagagagcagcttctccatctagctagtagttagagagatgtagtactagctagctagctagtactataccaccggc

SEQ ID NO: 362467 - DNA, 253 bp, Zea mays
  unsure (1)..(253): unsure at all n locations
gtggnagttattaaacaacatagcagagcaaaagatggcaagttgcttgccattggacactcaatggggggaattgtattgtatgcaatgctgtcaagatctggttatgaaggagtttcgtcaaatttagcagctattgtcactttggcttcttctgttgactatacaacatccaattcatcgctgaagctagtactgcctcttgtgagtanacaactggaagttgagatgattgctatgagcattcctgttt

SEQ ID NO: 362468 - DNA, 157 bp, Zea mays
caagcttcttggccaaatgctgtcactgcctcgccggaggtggagctgcggaatagatcaagaactgcctcctgcacgcctgctaagggcacccaacgaattgtgcgcatgagaaatggagttaatctgggatggtgatctatctttctgtatcaga

SEQ ID NO: 362469 - DNA, 344 bp, Zea mays
attgctgacaaggactacatatatgagttggaacttgatcaccacatagacaaaagtacgatggaacttgcaatattacagcatctacaagaggatgatgaaatgtttcaacttgaatctaagttattgccatttggagcgaagatcttagactttagagacgactgtctcaggatgttcctcaaggcaccaatattgacctcagattgtgaaatttatggacagaagtttaattgttctattgattcatttatttcagaccatgagctgctgatagagattgatacaataaatatggaaccacagatagtacagatcattcatgatgacatgtctgtagatat

SEQ ID NO: 362470 - DNA, 347 bp, Zea mays
taagatacgacccttcaggtcctcctccatgctcagcgtgctctctctctcattcggtgttgccatcgccgcctactggcccgcgcgcttcgacgtgcgtggcgacgcacaccagcatggcaagaagttcgacggctactacctctggccgtgaagcgccgagcagccagcatcgtcatgcatgcacatataccgcctggagtgatggtgacgatggtgagccgccaaggtgaagagtgtacacgttcccgttcatccatccatcgtctccttagtactgctgcccggtgattagtcgcatgaagagtgaacgtgcaggctacccacacacacacatttggtcgacg

SEQ ID NO: 362471 - DNA, 278 bp, Zea mays
cgtgggagctgccctgctacgtgacctacttcatcacagtcgtcatcctcggcgtcggcgtcaacgcgcagccgaccttacaatcgagcacgtgggcgcacagcaggcgctcgagcgctccagcagcaggagctcgccgctgcagaaacccaggccgagtgatccgcgcgtctagaggtctctcgaactctcggctgcctctgatttggttccactaagatggccacaatgtgcggtcctgaatgttctggacttctggtattgatggaacacgagct

SEQ ID NO: 362472 - DNA, 222 bp, Zea mays
acaatcaggatcgagtcatttgtttctttatatgcatggacattacctgttacacatgcagcattcgcctcctgtgccaccatagttgcacgtgtttgggactatgcttatatttctggatattattgaggaggtaaagaataagtaagaatagttaaattatcttgtgctttgtagatgatataccaaaattatgttgggtgtagacaatcatgggttagt

SEQ ID NO: 362473 - DNA, 160 bp, Zea mays
acaatagatggtttctcaaaaccacagaggaagtaatgttcaactgttgggaaacattgacagctggatgttggctgagaacctatgaatcatgatgtttaatcgtcataaacttgtagctgtaagacttatggtgaccattctgtccattcaatcaaga

SEQ ID NO: 362474 - DNA, 156 bp, Zea mays
cgtgtctgagcttactgaacagtttgaaccagtgcaactgcttagagcatatctgagggatgttgagaaactgtcacatgccaggactagcgcatgtctcctggagcacagaatgagatgaatcagcgtgagttgtgtgcactgaaatctgtcatt

SEQ ID NO: 362475 - DNA, 324 bp, Zea mays
tcaagacactagcagatgacctcattcccaatcaaacacttcgaagcacaatcagtaatatgttgggaacacagactagcagtggtggaagtggtatacaagacacagaagtttgtcaggcagcaaccctgaccccaaaatacagagccacactgcctcaacaagggaggtgaagcaacctagagaccaccagctaccagcagcatctgcacctgatgatgtgctccaggttgccacagaaggtgctctagtgaaccagcctcgggagaaattggcacccagtgctaatatccttggtaaagatggaggcattctgcacagtgt

SEQ ID NO: 362476 - DNA, 359 bp, Zea mays
  unsure (1)..(359): unsure at all n locations
ctagtaatttntagagtcaacttcgtgctgataggttctaacctctataatctagacgatttctatgtataacctgtctaggcactttctgagtagatcaaagctcacagtttgtctactggtagggtagaggagggagagggagtgtaggttttatacattcgagtccgagatggacagcggggtagcaatgggatcaggaagtggagcgcctacatcttggcttgtttctccttgcgtattagggcattggggcggagttttggtggtcggcgacataggaacgttagtctctatgagcgccatagctagggtaggatgatttctgtcactaggggctagagagagtctgagtctcg

SEQ ID NO: 362477 - DNA, 345 bp, Zea mays
agcaggccaacgagcaccaccaagagctgcgagtccaaatcgatcagcccgaccactccagctcgatggaactggaacggcgacgtcggcaggttcggcaccacggagcacgggcacagaacttccggcgggtggcttccatggactcgcggtcgccgccgccggtgtcagccgaggtcgatcctgaaggcgagccggccggcggcgaggagcaggggacatgcggtgctgtttgctgcgaggtgtcaccagagcctgctgagctgaagaggtcatggtccgccagcagccggtggacgctcctctagcggcattgccggcacgcagctcgctcctgccgctgtg

SEQ ID NO: 362478 - DNA, 221 bp, Zea mays
  unsure (1)..(221): unsure at all n locations
tgggcgacttgctgcgtgtgganacaaacggccgtggatcaccgccggctcgacgcaggaagaaggccacgcgccacggcacaggccgggcagggcagggcatccaaccggctgcgtctttttaccttcgttggttgacgaaaccgaatgacctctctcctcctgatctccgaaagatggagatggaggggggttggttgtgcgtgagtttttgcacggtt

SEQ ID NO: 362479 - DNA, 206 bp, Zea mays
  unsure (1)..(206): unsure at all n locations
atttaggtanatactaacatcatagttattgattttagcaccctggacattcaatccatcactgtttctgaaatgtctacatacactaagaacagagggttcangttatgctccatcatttgatcatggtgttggcgacccagttgagaatgacatatttgtaaagccacagcacaaaatagtgatagttaagggaactattgtta

SEQ ID NO: 362480 - DNA, 211 bp, Zea mays
gtgctgttgaggaaggcttacatgttgttatactgaccaagcgccagggaaaatctctgttttccagataatgtttttgcagtgatctgattgtattcaaaccggctgtctgcttgcctgcctgccccaccaattgttgaagaattgaaccatttggaagaagtctgcagaggtggtgcgagagccaaagctatttgctgctgcttctgtt

SEQ ID NO: 362481 - DNA, 211 bp, Zea mays
ctgaaaatcctttgttttcacaaagaatgatgtggaacattggttatgggcttttttattcaaaaatcaaaacaaactaaggttgatgaatcctcaacggtcggagtggactcgtcactcggaaagagtatcccagccgggtacaaaaaaatggggaaatggttaataaatctacgccaggcgctgagtagcagagtcacccatctgtgtc

SEQ ID NO: 362482 - DNA, 208 bp, Zea mays
tgactagttctagatcgcgagctgccgcccttttttttttttaggttggttttttccccttttccttctttcagacaccttgctagcacatcccatatctaaaagccgggatcatttttggtttaggtctcataatataaggcacatctcactacacacgtttatcgatgcagtgatatatagggattaaatacatcttttggttctt

SEQ ID NO: 362483 - DNA, 224 bp, Zea mays
ctttctgcggtctatgtagggctggtccagaaggactgccgctagcggttgtattcgtcggaacatcgctgagtcctccgacgcgctcctggcgctgctctgagaactggatatgctgggcctagcacccctccgctctgcgcctcttcctatccgcgcctccgccaccgcctgcggccgaaatactcgcagctcgccaatggctgccaactctctcttctcgc

SEQ ID NO: 362484 - DNA, 127 bp, Zea mays
ctcctggagggtggaaagcgcatgccgggtccgtcgggaggatattgatggcggaaaaaccatgcttgacgcggcgagaggcgcagcgcgatcacgaacagatgttgcgcttcatggccaaccgctt

SEQ ID NO: 362485 - DNA, 218 bp, Zea mays
tcgtctcgggcgtcgtgtcaggtctcaggtatcgtggcgctttctcctctccggcacggtggccgcgtcatcccagctctcccgcgaagcagctcgcgtcgccgtccgtttcctctcctgcgctcctcctgacgaatacagccagataattgcagctgaagtttaattgaccataggcgacactttgcgagtccttcgtgttgacggagcaattgtag

SEQ ID NO: 362486 - DNA, 365 bp, Zea mays
ctcaacaccaagcgaccacgcgggttgccctatcagtattctgtactgctagaactgcagctatgtggcgatttctggaaagttaagggcgtatgcatcagcatcatacaccgtgctcgatcatcaataggcgggccaataaccattggacatcagcattgtagcgaaccccttcctgttgcccttgccagtgcaccggcgccaaattttgatttttggtttcgctataaaaatataaggcatttagatgttgcccttgccattaaaccaatgtcatgtactccttctgtcataaattaaaattcgttttggtttctaatggattcatataatacttagtgtatgtgttatatatatataaaaac

SEQ ID NO: 362487 - DNA, 258 bp, Zea mays
tgtagacatcagagcacgaccagttgcaatgcctgcttcagcttttaaaatggtcgtgctctgctgtctcctcagccacgcacagcatcaaatgccgaagctggcattgccactggctttccaagatagagagacatcacatccaagcgtgattatctactacttgtaatgcatcctcttcttctcccccatgtcggtctatttttgggcgtgctaggatggacctggccggcgcgatatggttgagctgagcttgag

SEQ ID NO: 362488 - DNA, 351 bp, Zea mays
cgagtcggtacgacagcggatcgctcaccacttcgctggcacgcgccgtcgcgccgtatggccgtgtccacaccttcgatttccacgagcagagggccgcctcggcaagggaagactttgagaagaatggcctgagcagcctcatcacagtcaatgtgagggatatacaaggtgaagggtcccagaggaatattgtggtgctgctgatgctgtcttcctggacttgccacagccttggcttgcaataccatctgtcggattgatgctaaagaaagacggtgttctgtgctccttttcgccttgtattgagcaagtgcagcgtgcttgtgaggccatgaagacttgtttcac

SEQ ID NO: 362489 - DNA, 252 bp, Zea mays
accgctaacaacagtggcgcggagtatttctatgaaggatgtggtagcggcactcgagcgagagcctcagatgtcaaaatcctcattacttttccgcctatatggaaggacattgacagaaccatctgcaaagtaatttggatgataatcattgcagttcatattacagaggggcaacttttggtcaattatgaggaggctcaatcaccaagcgatggggctgattggtcgacgatcaattttgcggggatt

SEQ ID NO: 362490 - DNA, 252 bp, Zea mays
cttgacttgatcatggataagcacgctcgcgtgtgcgctgtagccgcgagctgctacgacataggccacctgacgtacgtcctcgacggcgacaacctcaggcacggactgagcatggaactcagattcggagcatatgacggcacgagaacatcagcagagggaagtagcagcactgtttggcgatactgacgtcgtctgacacgacaagctcatatcgaccgacagatgcgaacgaagcacgtgtcgcga

SEQ ID NO: 362491 - DNA, 251 bp, Zea mays
tacaattttcgaacagaagtcaatggtgtcataaatttgtgaacggtttaagatgcttttattcagacttttttttttattccagatgtccctagtaagtacgtttacgctaacagactaacagtaggccagatgccctgaacaagcatgcacttgtttgtatagatatggcgctcttccttttttttgcttatgcaaggtatggaaaattctttgttgttggaggttaaggttcatctgatcaggttctt

SEQ ID NO: 362492 - DNA, 351 bp, Zea mays
atcgctatagaattcctacaaaacttgaatcctacaaactggtttgtctttcatgtctttgttgctcatttaccttaggtgtaaaattactgttggaaattcagttgtgcatactcactcagatttgttctatgttgctattgcagatatgtaaatcaaacttaaaaccactctctctcatgttcttctccaagaactgcaagggaataagtgcttagtttttacctcatcagtggaatcaagccacagactaagcactttactgcgttttttcgaaaacttaccctttaaattcagtgaatattcacgtttgcagcgtgaatctactcgaaggtaagctgtctacattac

SEQ ID NO: 362493 - DNA, 338 bp, Zea mays
  unsure (1)..(338): unsure at all n locations
cgtcgccgcagatgagggcggcgtatgtggcagcggatgacgaggtttgggcacctggcgtcaccantatggctccaagcatgaggctggccggcttactggcgcaccaggttttcaggattcagaaaaccgcattgctttcgtctccccgtcacggacaagtagcaatcttcatactacagttctcggcgcctccacacccgtcaagctccctgctgaactccagttgcccgagggcagtgcagagctcccaacgccanagccagaagctacgccttcagctctcaagttatctgctgatccagaaccagacgtggcatgcgatgaaatcactgaag

SEQ ID NO: 362494 - DNA, 172 bp, Zea mays
attgactaccgaccagcggtctcctttcccgcaagcatgggtgtacgacacgcggatacgactcgcgtcgtccaacataggatcgagctcagagacacagactagcagcagaaggatgtcgacgtcggcggataccgacccgatggtgacggtgagcgagatgtggcaggca

SEQ ID NO: 362495 - DNA, 311 bp, Zea mays
  unsure (1)..(311): unsure at all n locations
gagagtcggaacggcagcggcacggaatcagtgtgcttcgcgcggcgcgattgccggtatcgtcgcgtcacacgcgatacgtctgcgagatgtgcggactggagtgcgccgccgtggacgcgtngcgggtggaatgccggagcgctggacttcaccgtcgtcatgaagcagccgctccgtgcacgcatcatcgccagatattagctccatgcgtggtattctgctggggataagatagctactattctagtacatcagtatcccttcgtggatgtactactaatctgttngcgatgcttgatgcttccaag

SEQ ID NO: 362496 - DNA, 148 bp, Zea mays
catggaatgactgcacttaatgatggaataccaagttagattaagaatgcaggaccttattcttcgactctagaagcagacatacatcatatggcattatattagaagtggatgatcactcatgagaagaatcgaagttcatagattc

SEQ ID NO: 362497 - DNA, 207 bp, Zea mays
  unsure (1)..(207): unsure at all n locations
gaagtcnctgttttccagtagcgaactatcaaatatactgttagggatagtttgggaaacacaaatccggagtggattggaggggctagaatcccctttttattcaattttgaatcagaagggtattctatcccttccggttttctccggttttctggctcccaaactagcccttaatgtgtccgactccttaagacttccctcgca

SEQ ID NO: 362498 - DNA, 349 bp, Zea mays
tcatgtgccacgtggactcctccgctgtctgattcagaaagacacagtgccggttaccagaaccatgacctgagccagatgacagcgacagcatcggtgatgaagcctcggatggttccgacggagacatcagctctgcagcaactgggaaagctacagatgccaccaatctaccagccatgtcaagaaaggattcgtatggggagctgctgactaacctcgctcgcattgcgtcgctaccacagttactcttcaagataccagagtgtacagagaactgaagctggaagtcaagacctcgcgacctgatgctgtaaagattgtagcccagcaataagagatccggtag

SEQ ID NO: 362499 - DNA, 341 bp, Zea mays
  unsure (1)..(341): unsure at all n locations
aactacttctgcagcagcaaaatggagaatcgaatcacccactccagagaagcttggatttacaagcaaaagggttgttgtgagttcgctctagcaggaatttacttgcagacacaggtacaaagacagatttgcatatcaattcgtggaagatggaggtcgatacagtcacacaaatgatgaagcctataatgacagtatcttccctggtgtgagcccatctcatatttcaagaagcattgaacttgttgaggagtgagccgtttatattttcacctcaatatctcattctcattcatgggacgttactanaacatccgaattatataatagatctaata

SEQ ID NO: 362500 - DNA, 349 bp, Zea mays
ttctcggtctctggcaagacttcgttcaccaatatctccggccagacagcacaccaccgagatgtcgaaccggagtcacggtccaggcagtctggttcgtcgaggatcactgaggagcagatcagcgaccttgtatcaaagctgcaggacctcctccccgaagctcgccttcagagcaatgcaagagtgccatctgcgagggtgttgcaggagacatgcaactacatcaggaacttgcaccaggaggtggacgacctgagcgagaggctgtcggagctgctggctacgtccgacatgagcagcgcgcaggcggctgtcatccggagccgctcatgtagctcagctctcg

SEQ ID NO: 362501 - DNA, 353 bp, Zea mays
  unsure (1)..(353): unsure at all n locations
gtcgagtttgtccctactgtgattctgggttcgtggctgaattggatgatgcaaatgctctcatgagccacttcgatgggatggaccctgatttccatcgtgacccaaggttcgggatcatggaggtaatctctgtcgtgatgcagcatgatatggcaaggatgaacaaggaggttgatgtcacaggaaggccgaacttcttttcagacctggagatagagtttgtgatcaaaattagggacagtccacccatgtcattggaggctttgctggaaacaatcagctgtctgtcagttcataatttnttgtcatggtttgggatcccggtggaattgatgccattatcggcttga

SEQ ID NO: 362502 - DNA, 344 bp, Zea mays
gcttattcctactccacgacagattttaagaaagtgaagagggagctttttctggcccaatcccaagcaaggtaggattgagcacccccctgatttctgcgactgatcgcaaaccgtcagggaagcggccttcctatgtgttgccaacaaggcctcctggcccaggttggcagtcatctgtgcctccaaaagctacgcccagggtgacctcgctcccaacaacgactcccaggataagcgagctgcatgagctgccccggcctccagcaaatgctggtttggttggatattctggccctctggtttcaaggcggccgatgcctactgctgtatcaccacccgtg

SEQ ID NO: 362503 - DNA, 329 bp, Zea mays
caacaatggagctggatctatggatctgaacatgagtatactcctcctattactcctcctaacttgtctaggggaacatcagcatctgaattgttacaggcagcaagctctggtgcatgcataagttctttagactctgaactgtcctcctaccttgacagtgacactcttcagaagtttgaggatgatttcaacctcttaaactggtggcatgagcataaactaacctttgctgttctctcaatattagctagagatgttatttcagttcctgtttcaacagtatcttctgagtctgcttcagtcttgtggcagacatcgagacgaga

SEQ ID NO: 362504 - DNA, 235 bp, Zea mays
gtcaggtctgagatcaggttgcgggagggcgtacaaagcctattgatgttctcctaaagaatcttaatttctcagatgaatttgacattgaattaaatgagccctatctggtgttcaagacagctgttgtatattctgacaccatcgcacagtacatcaaatgcattttataacttagcagttcctgaaatatgtgtatattgcaataaactggaggatgagatgcacgaggatg

SEQ ID NO: 362505 - DNA, 214 bp, Zea mays
cggagcgtaccgacggccggacgtcagcgctcctgtcctgacaacctcaagcttgcgctctgattcctgttccgtgtccctacgcactttctataattttgtaggcgaggtataggattataggaagagcagcgaaacatgggtgtaccaagtgaaatccagatctgaacaaagttttctgaaaaacacagttgcacgtgctttctacggcatt

SEQ ID NO: 362506 - DNA, 335 bp, Zea mays
accctcccagctcaagcccacctccctgctacagcccagccgtccactgcctggctccctcgtccggtcgttcccgtctccctcctcgcgtcgcgtccaccattgttcctgtcgacgctgcgccgcacggctcacaccgccgacagtgcctcagtcctatcgagcctccctcttcccagatcaggccctagctgggctacagccgccgccgccgctgccgcatccgtcaccttcacaccgggtgcgcgcgcgcgctctctctctctctctgcgacgactggacgggctaccgcagtcgcgcgcataggcaccacgctcttcgcgatctattcgct

SEQ ID NO: 362507 - DNA, 337 bp, Zea mays
  unsure (1)..(337): unsure at all n locations
gttgatatntgtatatcttatttcttattttcaatatatgtaacttgccactattctanagtgttattttctgctaatgctgcgaaatgagcatattctgtattgctctcgtatcttcggtgcccatgactcctctcncctcctagactgtcctatccgtcttcttcatttggcctaccctagtactccccccttccaatttatatgtcgttttggcttntctagatatataatgtttattgtgtatctagacatatagaatatctaggtagacatgtagtatatctatgtgtatatcaaaagttatgtatctaganaccccanacggacagagggt

SEQ ID NO: 362508 - DNA, 337 bp, Zea mays
aaacataatttaaatagattacatgtatatgaaaattgatgggaaacagacgttaaacttgtgtaatcacatattcatgaggctagtaggtttacaattaacttattttgaatatcaaataaatatcttcataaataaaagttattgtaggggctagcctcactattaaacgtaatcgctaggggctaatttgtaaaattaaccttcttctacatctggtttgcaagtagcaatgatacacggtctagaccctcggaacgacgtggaatggagcagaggacggagggatgacactgaatttcgtcggtgagaggcgtactccggcggtgaacagtga

SEQ ID NO: 362509 - DNA, 288 bp, Zea mays
atggcatatgtttaaccatcagtgatgcaattcaggaaacagatcctccaagccttgtatttcgggtagagatcagtgaggacgacactggctcgaaatgtgtattggcacgcgcccgtttgagcagaggttacttgacagcaacggctgggacagcgtcattgccggcgactatgacgactaaccagcggatgactgcttggctaaagctctgtatctgcgtcaaccacaggagtagctctcgtttttcgctctaagtctgacgagtcacggcagaggtcttctgca

SEQ ID NO: 362510 - DNA, 329 bp, Zea mays
gcgcggacatgctgctgacggaggcggactggacctgggcctggtgcggcgcgccacggtgttccactacggctccatctcgctcatctccgagccgtgccgctcggcgcacatggccgccatgcgcgcaccaaggccgcgggcgtgctctgctcctacgacttcatcaaggtcagcgacgacgaggtggccttcctcacgcgcggggacgccaacgacgagaagaacgtgctgtccctgtggtttgacggctcaagctgctcgtcgtcaccgacggggacaagggatgcaggtacttcaccaaggacttcaagggcagcgtgcccggc

SEQ ID NO: 362511 - DNA, 172 bp, Zea mays
aagtatgcccggtcgcattacattttatcagtcagcggtgatgggaatcagaccgggcgctgaatttcgcacagccctcgaagaggcaaagagaatgaatgtagatgtcatccgtacgacagagtaagcgatattacgtggcacagggcgatgagccggcttacactgggtg

SEQ ID NO: 362512 - DNA, 315 bp, Zea mays
tcagctcctgtgaagaagatctctgtgcctgctgtgagccgaagtaaattttctgatgcatcatcaaagacctctactctcgacaatggacaccaatatcgacaggctgataggtccaatattgacaatcaagctaataaaccctcgagaccttccatatagtaccacagataatggatttgggaggtcgatatcaaggaggtcacttgacatggctatccagcacatggacattcggcagaacttcggtggcattcgtggcacatccctgttatcccagagcatccgctcggctgctgccaaggtccgcccggt

SEQ ID NO: 362513 - DNA, 245 bp, Zea mays
tgaggatactgatgatattggtgctagttttggctaaaacgacgctttccagagctgtctggatctgacgtcacaaatagatgacggggattcagggaacgaactatgttctactggatcttgatatcagagggatgctgagcataatttcgggtactgatctagtgctgaaacagatttggatgaacgtgacagtagggactgcttactgtggtcagtatggtcctttacacgacggagtgaat

SEQ ID NO: 362514 - DNA, 266 bp, Zea mays
caccaagatcgtcctgaaggacggcttagtgctcatggaggatgatttccgggagcgcctggccgtgcccaagagaaccaaggcctaaaactgcctgcggtgggcgaaaatatccagggggagcatactcatagtagcttgtcattattcgggcacattcatacgaattgaatccataacgaatatacctctcgtcactgaaggatacacatagattcaacaggtgctatagctctgctagacgcagagtgagtctctctgtacta

SEQ ID NO: 362515 - DNA, 137 bp, Zea mays
  unsure (1)..(137): unsure at all n locations
cgangctaccgcatcctctacaagaagcggactcgccggattgtcgactatgaagcgcgctgaagagtaaaggcaagggaatacactgacgatggtagatctatgactcgccacattacctatgtgaacagtcttct

SEQ ID NO: 362516 - DNA, 138 bp, Zea mays
acatcaacgacgtactgtatctggttgatggtgtgacttggcctccattcctgacaccgggatagacggtcgagtgggtcactgcttccagcagttaggatcacgacgagtagcgtggccaggcttcgcgatgatact

SEQ ID NO: 362517 - DNA, 215 bp, Zea mays
ctgacacaagagagcacgctactactcatcactcgccaacgtgcagagatcagcgaggcggacactccatccatgaccgctcatggcgagtgtcactctacgtcgcgcggcctcgccgtcgtcaagcctccgcatcacacgcgagtgacaacaggcactcggccaagaaatcatgctcatcctgattccatataatcccgttcagtcgatttaaa

SEQ ID NO: 362518 - DNA, 99 bp, Zea mays
gtctccaatcatcattgcatccacctgtatgactcaatgtagcataccagcttcatgaaacccagcttctctactggaggaagctatccatctcatcat

SEQ ID NO: 362519 - DNA, 127 bp, Zea mays
cctatcgtctatgctatgtggaagagcaagatagtatgcatcagaggtccctcaaccaacactcgtgagatgatgtactagctgcagagactcgttgaaggtacacgcctaatatgccatggtgaca

SEQ ID NO: 362520 - DNA, 140 bp, Zea mays
tcggctcgagcaaacagcttacccagcctcacgtggatagacgaggtcctaaatacaagctgcataaattgacataattcaatatcggcatccagaatgatagacgtggactcggtaacgtactttggcacatgagacac

SEQ ID NO: 362521 - DNA, 194 bp, Zea mays
cactggtggttcctatagagggcgtgctccgatgaaagctggtgctagaagttacagtggaaacgggagcctcacgactattcaagtcagtcgaaactgacatgagttggcatgcctctaaagtgctcacgtgtaaagggagatgacgtagtattatgagacaagtgaccatctgtctacaaggtaatgcacag

SEQ ID NO: 362522 - DNA, 124 bp, Zea mays
ccttattcttctcgtgacattcatgagcatgagaatgatcaaactctggacagtttgcatgataaggtcagcgatctcaaaagaccactggcgatatcataacaatggaatacataccggatgc

SEQ ID NO: 362523 - DNA, 199 bp, Zea mays
ccggcatgggggcgtacaagtatgtgtcggaactatggaggaggaagcagtcggacgtgatgcgcttcgtgcagcgcgtgcgtgctgggagtacaggcagcagcgtccatcgtccgctcaccaggccagccgcccgaaaggccgtcgtctcgctacaggccaacaggaagtgtctacggtcggtaactgtgcagaagct

SEQ ID NO: 362524 - DNA, 237 bp, Zea mays
  unsure (1)..(237): unsure at all n locations
acatgctctgcatctgcaggcgttgtcgtcaccttggtggacgtagtacatcggtgcatggatttttcgntgtttaatttgtacgttcagttcattctgtttcttgtattcttttggttctttcctctgttatcatgatgatgagtgttctgatatctcggtcactgtacagtacagtagtcgcgttgccggacctcacgattattaggtgatcaggttgcagtatacataggtcac

SEQ ID NO: 362525 - DNA, 281 bp, Zea mays
  unsure (1)..(281): unsure at all n locations
cgtagtaactcggaatcggtcgaggctgagcagcgctttagactcagttcattagcagattagcggcgaaacagatccgcagaatgggcctgaactacatcaaggagaaagcccctgagcttctgtcggtcgtcgcctgcagtgaggtatctgatagcagcaagggcagcgccgagaagatgtgccatgaactcgggagtcctttccttggtaaagtgcccatggatccgcaactgtgcaaagcggctgagnagggaggtcatctttgtgatcagaatgca

SEQ ID NO: 362526 - DNA, 121 bp, Zea mays
cttgtgatcgaggccgtcgtggagaacgaagctgtccagaaggagcctttccttgaacctgattaggataacgagcccttgggcattcttcgcttcaacaacgagctccatctccataacc

SEQ ID NO: 362527 - DNA, 260 bp, Zea mays
tgcgtgcggacgcgcacccgagcaagtaccggggcaggacgccggagaagcacttcaccctgcacaacgactgcgtgcactggtgcctgcccggggccattgatacgtggaacgacatgctgcttcatatgttgaaatgatcatcagtaatttgaattaataatgccaaaccagtgtggctgtgtagtgtgtacaatacggtgctccctctgttgacaagtatatgatgactttgacgttttttcttcaaaaaataaaaa

SEQ ID NO: 362528 - DNA, 335 bp, Zea mays
caataattaagataggctttgtccgctacgagcagtccagtcagtgcaagcacatgatggatagcagcgtgagctatgcatccgcagcagcgaacgatgctggtgcatccggggaagaagatcaacaagactgagcgagctacggctctgcttgatgtactatatataagccagcacagcttggtgcggaacgtgtgactggtttcacatacagctaagaacatgtgatcttgtacagcagagtaaccagtgtcttcctcagactctctcgcagaaagggtacgcggtctagcgacgaggcgtcaagacgagctgtaggcgcaagctaacttagc

SEQ ID NO: 362529 - DNA, 295 bp, Zea mays
ttgcgttcgtgtgcttggtatagagaatggcaccagtgcctgtgctgcttgcgtattttcgtagggagtcaattatggctgcaaggtatcataacgtcgtattgctcgatgtactgggtgataatgaggtggtattgcagtgtactggataataggtgtatgcggtgtagtgtctgcagctgcacgtgtactaataagtgcatctctgtctgatatgatgctgagtagtgtgtcgagtgaagtcagtgctcagatacatgggtagtagtaccacatcggtatatgagctgtatgg

SEQ ID NO: 362530 - DNA, 217 bp, Zea mays
caccaacctgtctttagaattctgcctaccactagcagatactctgtgttcttcttttttatatagagtgttctattctcacatttagggaatgcatcctcttaggttcttaatcatttaaaatatttatcttataatatgtatttgccatttctattttcgaagtgtcttggagggcagtctagatgtatgtatctgttgatttgtcatcgtgggg

SEQ ID NO: 362531 - DNA, 356 bp, Zea mays
  unsure (1)..(356): unsure at all n locations
cattatcatcgtanccgccccccaattttaaatggtaaaaaactaaaatcatatataaatgaggatttaaaccatgtttgttaactctaaacttacattcacactcacttgaccaacacatatanttatgttttatactatatattcagacgaaaactatagctctgtcactagctagttgcactacaactaacaaaactatgaggatttnttttattatatatacatatttttgcagagcgtggctgacacgaaaaagcctcctgagatgatatccggcaacatgacaggagtgttgtgcgtgtactctgcgctcttcgtcaggacgcgtggatggtgcgactcggaactatttc

SEQ ID NO: 362532 - DNA, 318 bp, Zea mays
  unsure (1)..(318): unsure at all n locations
gcagcgcagcactgcaagcacactttcatgcaatcactgtggtaggttgttaaaccggagtagttacagttcatcaccancacaatggcttccaanggttgcgctcttccttgctctgaggcctcgtgtttgcctgcaccgcgcatggctgcgaaccaactgttctggccagtcgtccaacgccgcagtcgtgccgatcgtcgtcgacagcacggggctgccgatcgagcgctcagctcaagtgtcgcacgtctaggctcgtaaggtggctaccagtacgacatgtgccgtgctgaggctgtgactgagcgatgtgct

SEQ ID NO: 362533 - DNA, 355 bp, Zea mays
  unsure (1)..(355): unsure at all n locations
attcactgtttgacctgaatgttcctcaagaagaaagcctttttatgtcttctactctggttccttcttcctcaacgtattgtggaattttttttcagacaaccgtagagaaacttctgaaaaagagcatatcgctggtatcggatcaatgaaaggatcttctatcactgtggtcacgcccaactcagttgcagacagttcaagggatgtggtaactgaatcgccagttcaaccgaagtttctttttgaccttaatgtgtcgcttgaaaacaccgacatgccatcagaaatctgtgattatagagataaggatgtacataatgatgtaagtanaggaacagcaccctgtcgttct

SEQ ID NO: 362534 - DNA, 256 bp, Zea mays
  unsure (1)..(256): unsure at all n locations
agggcgatgtctcgcggaacccggccaatcagccggatgtactgtgactctcttgaggggtccgtctgctgggtttcgcgaaagaacttctagtctccggacgccatgtagcatgaagtngtaggacgtggcggctacgtcgagtattcagccgatagcgcggacgtcagtgtaggtgtggcgtagggactggagaccggacaacttntcggagtctcctgatttctntgcacatgaacgatcgagctgtaccact

SEQ ID NO: 362535 - DNA, 274 bp, Zea mays
  unsure (1)..(274): unsure at all n locations
aatgaaatggccaacaaaggattccacaccgataagatgtaacggggtgtaacttgagagtcttgattaaaggaggataaaattcgaggaggtagtaccaggtggttcataaactgcaagattcaggcatatcactccagacagtactctacaatacagtactgtttagggcatggcagaaatggganaacagatgatgctattgatgtgcttgctgatatggtgtcatgatggtgtatgcctgatgaatcgacctacataatactcatagaag

SEQ ID NO: 362536 - DNA, 144 bp, Zea mays
tggcgactgtctcgcggaactccggtcaatcagccgaatgtactgtgactctctgaggggatccgtctgctgggtttcgcgaaagaacttcttgtctccggacgccatgttgctgaaggtggtggaccgtagcggctcccgtcg

SEQ ID NO: 362537 - DNA, 153 bp, Zea mays
ggcgactgtcatcgcggaacccggccaatcagccggatgtactgtgactctctgaagggtcccgtctggtgggtttcgccgaagaacttccatgtctgcggacgccatgttggctgatgttgtcgaccgtagcggctaccgtcgagtattcag

SEQ ID NO: 362538 - DNA, 250 bp, Zea mays
  unsure (1)..(250): unsure at all n locations
attgtanagtagaagggtaatctgtaggttaggaaagttttgtgaaatcacctgagtccgtttcttgtaaatcaatgcgtaataaatataatgtatcctgtcttgtcgaccattttacctttactactgggagacagagacagctctattttgaagagcgtcctgaatctgacctaaccccaccagtaggtcaagagctgactcaaaactttaggatcctcatttgtttatgagacatattcctgtacat

SEQ ID NO: 362539 - DNA, 252 bp, Zea mays
gcttgtcagtggatctagaaagaagcatttaacgatcggtcgcaccagacgaaaccgtagcagcactcaactgaaggcgaccgcggccacaatgtccaccatccgcgctcattctttcttttgtatttccgttccatctattttttttgtattgtaccctatcatcacttttttatcaaacaactgtatatatgctttatgcaaaagagcatgatgatgctttattttgaatctgaaagaatgttccagcca

SEQ ID NO: 362540 - DNA, 254 bp, Zea mays
ggggcacagtgatggaatgcctggataggaactccagcacctggctcagaaatggacgtgacagcagcctgtcgctgggcatcaggaaggtggtgttacggggtatcttctcctgcaccattctgatgagcatgacgaaggtgaagtagcgcactcggctgcatgtcctatgccatggtggcaatgcacagtaaccatctttgtgtaagcaggcggcacacatgtttaaactacatggacgcccttattatgaa

SEQ ID NO: 362541 - DNA, 239 bp, Zea mays
ctgggccacttgtctttctcgtatggatggcaaactgattctgtcttattgttagtatcctttaagcatgagtgtgagaactctgtaataatgtcgactgtgatcccttgctcgtaaatgcttggagtctgcatttttcacaaacgcacatcgggatcaataggctcatctaaatataatgtacttttcttgtggcagacaaggttaggccaatcgagctgtcagagcgaggtcgcttc

SEQ ID NO: 362542 - DNA, 250 bp, Zea mays
ggaaacactagccgccatatctcacgatccactcgagcaccaagccgagggaaggtgaggagcgatggcgcgcggcgtggtgtcggcgaagggcggcgcggtcgcgggcaagaagaaggggtcggtttccttcacgatcgactgcaccaagccagtggaggacaagatcatggaggtcgcctcgctcggaagttcctgcaggagcgcatcaaggtcgccggcggcaaggctggcaacctcggcgactccg

SEQ ID NO: 362543 - DNA, 243 bp, Zea mays
gatgactcgtatggaagcaagaaccagtcaagctacggctcatcgaaccgtgacaacgacgactcgtacagctcctctaaccgcaaaaccaacgacgatgacttcggctcaagcaacaagacttatggctcaggaaacacttcttctgggtatggtggctcttcgggtcgtgacgacaatgttcgtacggaagttctgaacgccggaacgaggacagctatggctccaatgaccgcgagagtt

SEQ ID NO: 362544 - DNA, 260 bp, Zea mays
gtctgcacccaagaggtggaagaggacgggctttaggctggaagcgccttagaggagccattgtaccaggtggggccccacgcagacgctctgacagagagcctggccatagtcgcgcaccggggacgtggatcgcgtcccagacccgagcccccgacctcagccaaacccattccttctgctcttggaggccagaggggactctgagctccggaaaggtagggtcacggaggctgagagtccttaggcgaggtgggagg

SEQ ID NO: 362545 - DNA, 227 bp, Zea mays
  unsure (1)..(227): unsure at all n locations
gcttccacacagcatacgagcgggagtccatggtgtcagtcagcgtataaaggcatgtctacggacggtataatgtacgttntcagaatgtcaaccttggggcaggcatggataccaccttctggagattaaaggatgaagatcttctcccaagtaaatattttgaggttgactttccaatgattgtcacgagaaagctgcacagtatcaaatgcaagcctccccta

SEQ ID NO: 362546 - DNA, 367 bp, Zea mays
cttggagcgagggaaggagactgtcaagtcttaggtcacagccttgaagaaagaagtggcttactgggtcaaggaggaagagaggctccaggcctgcctgagagtttgatgctgccaaggggaatttcatcgaagtgcaacatcgcctaaaaaggacgaagagggagaatggtcgtctatcaaaggcggtagacgtcgcgcgcacacgatttagggtgccctttccttctaggcatgagcccctgatatctcactttgagcttttcacgggctaagttaacgagctcagggtggaggccttctgcatggggtcaaccaaaccttcatcatcgccatgtcccactatgtgggggaattgacttggaag

SEQ ID NO: 362547 - DNA, 343 bp, Zea mays
cactgagagagattatctccggaaaatcatagtgcagggaaggtcttccaagtcaactaaggttggcgacatcatgactgaagagaacaaactgatcacagtgaatcccgacaccaaggtcctgcaggcaatgcagctcatgacagaaaaccgcgtcagacacatcccggtgatcgacggcacggggatgctggggatggtctccatcggcgacgtcgtgcgcgcggtggtggccgagcacagggaggagctgaaccggctcaatgactacatccaataactcggaacaatgatgatgacgaaataggccgtgttttcttggacaatgatgttaagttcggca

SEQ ID NO: 362548 - DNA, 250 bp, Zea mays
tgccggtttgggcgttgagggtcacaccgacaaagaggagcccgcttcctggatggtaccccaggacgccgctccgtgatattacggccattgcagaggctattcagagaagtcgttcaaggattgctgcagctcagcagcgaagcagcacaagcagagcaggatgctcacattgctgaagcctcccatgctgttgcatctggctccggctcaactgaaagagaagctgtagcaaaccctgctactgttt

SEQ ID NO: 362549 - DNA, 221 bp, Zea mays
tctatctgctgtttctccctcgcttagtctccctaactcaccgcaccgggcccatacagcgctgagcgaattctcgttatgtaattcttggtccgtcgcagctgagagagtgttgatctcacctttgctggtggtcttgtcggcggcgatggagtctccagaggtgttcataacgatcatattcgacgcgctgctgctggtagtcatggtgaagctcctct

SEQ ID NO: 362550 - DNA, 353 bp, Zea mays
aaagattccccaacacgtgccaggtcaccaaggctcggccggcacaaggcagccagttctgctactgctcctgctcctgcagatggttctgtatcatgtgggagcccacggagcactgcaaattcgggcaaggtaaatgaaatcatggagaacatcaaacctcgtgtccctgctagaaaatctattcagaggccagtcacgaaaactccattgcaagtgtctgccaccacaaaggctgaaccaagacccatagctacaggtcctgatctggcttcacaattggttgcttcgaatgaagtcccagtccatggttgatcaattgcgcattttgcctatttatttccttcttgcag

SEQ ID NO: 362551 - DNA, 252 bp, Zea mays
cgggtttctctaagccacccgtcaactggaaatctacatacaacatttcgaatcaagggaccatagacaagcaggacaatcaagtagctatggatgacatgtcgaaaaggcttcgttggacgaaggtgtctgaagagggcacaatttctgtttggagaaagccgtcttcttgtaatctccattgcgaccaagaagcaaatgcaaagcttgctggattgccaccactctgcacaggagaagacccagatagtg

SEQ ID NO: 362552 - DNA, 352 bp, Zea mays
  unsure (1)..(352): unsure at all n locations
cgcccacggttcatcttcacgaattgctccctccgcagtcagcgcgcacgtccacggatccgtgcctaaagttccaaagccagaaccacccgcggccccatctttcgcctgcgcagttcgtcgcncccagacccctctcctcctcgtgcactgcccctcgccatggctgctccatgtctagaaaatgcacgctgcttcgacgagccgtcgagtctcatcagcatccgtggtcggtacaccctgcgatgccaagttcgtcttcgcttcgcgttgcgattagattgcgatttgttttcgtgcttcgaggaatcgcagatcaagcgttggcgaccaagtgatcaggctctttgag

SEQ ID NO: 362553 - DNA, 131 bp, Zea mays
tgagttcacatgctcgtctgtgttcgacttcgatcggtgtctcttcctcccggccggccgctagccgccgacagccgttgtggtaataaaaaaaaacatttgtggaattgcagagtgtaccgcggtcaaaa

SEQ ID NO: 362554 - DNA, 363 bp, Zea mays
tgacgtcaagtcgttgacacactatggtgaaccatatgatggcaatacacgattttttaagagtactctatttgttgcagcggttcgagcctgctatggtgaatcctgcctcctccacggtgttgaatggatgccacccaagggtggaataacagaaggacaaatgcttaaattcatggaaaacatacacttatccccaacacaagccaagattctgttggaggatgaaactgctggttttgcatacttgaatcttcaggaagcttgtccaccattggatggagtcatgaacttttcttattaaaactgcaagaaacatatattcgattattgggctcagggagcatattaagcaacggccac

SEQ ID NO: 362555 - DNA, 182 bp, Zea mays
  unsure (1)..(182): unsure at all n locations
aacaaaacaagcctaatgggtaatggcttcctcagttcctctccatctcacgccactgcgctgccctagaaccttcgacgccgcncctctttaggattaccgtgtcnacgatcgccctctggcacgctcgccccgatcgccccctggcacgctcgcccggatcctgcaccggaattccgtgt

SEQ ID NO: 362556 - DNA, 329 bp, Zea mays
  unsure (1)..(329): unsure at all n locations
cggtgccatcagcgtcggcaagactgtcatagatgagattttcatgttctgaagactgaattcaagatgatgggatgcttgtgatatcgacagttactggttctccaccaaagctgtgcatcaaggctcttggacagacgttttctaatgcaacagtcttgatgcacagctttggtggagaaccaggaactgtgcatcaaggctgttggtctgttcaacttctgtccaagagcattttcattgctgtcgatcgccggactannctgggttttgctaggccatgcagtgtcctagaaggcctattgaattcaatttgcagcagactgaaa

SEQ ID NO: 362557 - DNA, 287 bp, Zea mays
accggagcccgcccgacgtcgaggacccctgcccgcttctcttactcgattgacctccttgtcgagccatctccatttccctgcgcaagcgagaacccaagaagccgattgtgcggtaggcgattcgaatacgttcgaggacgacccgcaagacgcttttgagcaaggtttcaaaggggtggttcttcctcgcttgcaccatccttgccggagctccgcgttcctgtccgagtactccagactcgaggattatccaagggcaaccggctggttcagcaggtcctggt

SEQ ID NO: 362558 - DNA, 143 bp, Zea mays
cacgcggtacctgttttactactctctgtttggtggtttctgaggaagttgcccgtgtacttgtatcgtaaaaaccgagtgggacatcaacaacaagaacaaggggggcccgcgcgactaatgaccccgactccccggaaata

SEQ ID NO: 362559 - DNA, 333 bp, Zea mays
aggacctgttggctctgggagaagctatgggcaatgtcaacacaggcctggccgatgaaaaagtttccgagtgcgtgaaagaagtggtctgctgcagttctgaccacacgcagatggaccaagacgacggaagctgcgccatttgcctggtatattccatcgaacacgttctgttaaagacacgcttattaccattattactcactcaaccgttgccccgaaatctgctggactctacttgtgaccgacggatgcgttcgttccgacaggaggactacagagacaaggacgcgctgggaatactcaagtgcaggcacgacttccacgccggct

SEQ ID NO: 362560 - DNA, 322 bp, Zea mays
gctggtaacctgtattttgtgtggatttcaaacaatccattcatgtatctatagttgtctattgaagtagtttaacccatctgttgtagcgtaatatgtggatttcaggcaatagtagtctcctggctccgtctttgaagaaataaacctgcatgaccacacattctggcagtagtgcaacacatgccagatctgcagttgccaacttgactcagaggtggcaggcaatcctgctcgaccttgccctaagtacccttgagtagaaggtgggggagcagacatcgaaaaggcatggtgcggggctgcagtgagggctggtgca

SEQ ID NO: 362561 - DNA, 324 bp, Zea mays
aggccgcgggacctcgccggctacgtcgcggcaccggaggacgcaccgcagctgggagcctttgtgatctcgaccacaactgcagcagctgcataagccttgcatgttcccgcgcacattggctcgggcttcttcctgctgaacttttttctgctatgtgatgtgcctctgcatgcaaagtcgtatcgttttctctgcacccccttcattagactgttaggtttgtggctacctggcgttttatggttgtaactgtgtatttttgtgtggatggatgtggtggtggatttaggataaaggatgaatcatacgaaattattacat

SEQ ID NO: 362562 - DNA, 313 bp, Zea mays
gtggaggagggcctcaagttggcggaggcggtcaataacaagaaggaggtgatcgccacggccgtcgccgccttcacacttggcgtcttcgtctcgagtaggctcttctccaggacttaatcaacccatgcgtaatcatggaccagacatattcacgtatatgagcatgagaacatgagcataatcgccaggttatattgattcgtagacttgtacatgcatgatgcagcactaatattcatattatgtattaattattgctccctattgagcactatatgaatatgccgcagctcagaaggtcggacagtca

SEQ ID NO: 362563 - DNA, 336 bp, Zea mays
tgtggaacggacacccggtgaaggttggtacaaggttctgcatctgctacaaggagttgatccactgggtgacgctgccgcttcagatagcgtatgtgaccgacgtcgattcagacacgtccaaagggtgctcccggtccaagatgtttgccttcggcagcggcactctacagggccatctgctggttgatacatctacacaaaacaaatccaagggataggccggagaggagcggttctcggtacaggtggacgatgaggagcgggtgtggtacgaggtgctttctttctcgaagccggcgcacgtcctggcgacgctgtgctacccgtatgtgc

SEQ ID NO: 362564 - DNA, 318 bp, Zea mays
catggttctcagcaactgcagccccaggatcatcttgactctttagatggtttccagaagcatgacagtgattattctcttttaaaaacatctcaagtatcgccaaagatacagtgcgccgctgagatcttatgtgatatgagaaggagcactgaatcatggattggccaaggatacagcaatgggacaattaagtggccaaaatcaccacctgaaaaggcgatgaaagcccggaagccctcatcccagtttggtacaactgagagctcgtcaggttctcgtaacaatgaggcaacttggaatgggagcagtcactct

SEQ ID NO: 362565 - DNA, 255 bp, Zea mays
tgttccgccggtgatggaatcaattcgggcgtgcgcgtccatgccatcaagataagagtgcctgaagcatgctcgtgaaatgcggcctggtgattcagtagctgtgatcggagttagatgggttgggtcaaactgtttacagggtagcacaagcctttggagcttcccaagtcattgcagtggatgtccttgatgagaagcttcagaacgctacaacactgggagcaatccacactgtaagtgcagcaaaagatg

SEQ ID NO: 362566 - DNA, 347 bp, Zea mays
  unsure (1)..(347): unsure at all n locations
ctgctgcaagaaactttaaggaagcaggaaggatagctgcagaggcaaaagctcttaattccgaaaagaacgaactgcgtggcaagttggagaaagctgctgctgatctagagataatagaaaaggacattgcagcaactacagacaagatacaagaatgcgaagggcttattgtactgaaagaaaaggactcagcattgacaagttacaaaaggctgcggttggattgtgctgctgccagagcagaactgactgctgcaactgaaatacatgataatgaagaagttgagatactatgcaaagaagctgaaactgccgattctaaagcaatggagcntcaaacatgc

SEQ ID NO: 362567 - DNA, 182 bp, Zea mays
gttctagatcgccgtcagcggcgcgtgagtcgtgagcgatcgcggctggcgccggcacgcgtgctggcgcgggctatatatatctagctatcgactgcgtgattgacagtgtgactggcgtgtatcgactccctgattgatatatatatgtgaataacacacacgatcatgacgcgatgcgt

SEQ ID NO: 362568 - DNA, 127 bp, Zea mays
  unsure (1)..(127): unsure at all n locations
ccgcggtttcgcttcaccccgtcttcccaagcctttgcttcgctcttcgcttcggattccctctgctcatggccgggagagggaaggcgatcggctcanggggcgccaagaaggccatgtccaggag

SEQ ID NO: 362569 - DNA, 289 bp, Zea mays
  unsure (1)..(289): unsure at all n locations
ggttagctttggccattggattgtatgcctcatnttggcaatatannngctagacgtgtttactcgagtgtacccagaggtcgctaacgggttgtcaaatcttgtgcactgtttgtctgtgccagtcagccaattaatgccctggccttcatctttgacggtctacattaggtgtatcagatttgatattttgtcagtatatcgtgtggtgttacgcttcatcgtctgtatggtcgctgatcgctgctgattggctgttataatcagggtcgatgtcagatcgagtcta

SEQ ID NO: 362570 - DNA, 336 bp, Zea mays
  unsure (1)..(336): unsure at all n locations
caatcgactatctgacctatgcacccactcctctccctcccaaactctctcctcgcccaatctttccattatatatcctttccactctcattcgcttaattgcaggatggacatacacactctcagccatatggctattatggctactgttgccagtggcattgatattgaggccaatattgagggctttgaaagttccttcctatcactttccagaggactatggcatccgcgcctatgctcgctgtttcctgtttacantggnggatatcagtggagatggagggcagcggttctgaccccactgttatcctctccaatcacctctctgccctc

SEQ ID NO: 362571 - DNA, 333 bp, Zea mays
tgcgcgcgcgcatgcagtcgctgatcgagtcggagctccagcagatggagcatgagggctcctgtctggaactggaagacggcgatggtggtgtgctgcccaaggttctcggcccggcgaacgacggtgaaagggctaccattagcgttacctatgaccacaaggaggctcctgaagctgagaaggatactgtcagcctattggcaaaccgggactcatgataggaaatcgaatggtgtgttctaactctgagatttgacgggagtttcgtaaagtgaacccgggaatgcccatgttagacaaaggcttttaaattttgggcaaactgtaaca

SEQ ID NO: 362572 - DNA, 344 bp, Zea mays
cgacgtcgcggcgccggtcgtcgagtacgtgcggacgaggaggaggaagaggaaaccgacgacgacgcggagctggagctcacgctcgcggtgggtggagccggggccaagaagaggtacggcgagtacccgtccggtggggagagtctctcgtcgtcgtcgacggagtccgacgtgctcaccgtctccggccgtgactggcgccaggggcacggcacgccgtatcacaagaggaggccggcgaccgggctggaagtggtgcaggtggaagacggcgtcggggtgcagccgccgccgccgctgctgttccactggctcagcctcagatagcatgacgcgatgag

SEQ ID NO: 362573 - DNA, 347 bp, Zea mays
caccagccgatgatgggttgcagtgacctgccaaagtgtgtgcccaatgatcagaggaaattgactactctgcttactttgatttttttttagccgcgccactcgtctccgtgatgtgtgaagtgcaacgacgctggtgatgtgtgaagtgccttagcggcaaaaagacgggattttgacatgcgaggggggcaagaagttgatgaataaaggtgtgaggtggacaacacctaaattgctgagctcttctttgcaagcatcgtgagaggtagacagccagcacaaacttggtgtgccacaaagggcgcaccattgcctttgtagaacacaaagcctggaggagatcg

SEQ ID NO: 362574 - DNA, 227 bp, Zea mays
ctgcaagctggtgagatggatcggttgcagcagcggaacattacgaagggggagacggagatggaggaggcgcgcaaggatgaggagcggaagaaggaggcgtgggacagcattacccaggagccgcagcaaggtcaaggcctcagcctctcattcgccaacggcatcgacacggcgaggctgcaatgttgccgttgtggaacccttcagctgatcccacacagctt

SEQ ID NO: 362575 - DNA, 342 bp, Zea mays
actttcgtcacagattatcgctacagagctcaatcgttcaaaccaaacaaaacacaaccgtcaacatgcgcgcctccatcttcgtctccgctgttgctttcgccgttgcatcggcccaggactcatcttccgttccctcatcttccatcgacccggccccccagactacttacctcacccaaccaactctctcggtgtcgtaactggcatgcccgcggctgacacttccatcgctactcagcctgacgctgtcaccagccagcccgctgctgtcaccactcagccagtacctgctgacatccctgccgttggccctggtgtccacaccctcactcttgctgg

SEQ ID NO: 362576 - DNA, 337 bp, Zea mays
  unsure (1)..(337): unsure at all n locations
aaattttcatgcagggagcaggagatcatgaatatgtttgatcaagaggaatcagattggtatacactaattgcagagaaagaaattgctatttctgatattcaacaaactgttgaatctgttcagcttgacatcaagcaccttcttgaggcagcagcagcaaaagtggcagaagtcagctagaggtgaatcaactttatggttttgctgaaactctgaattcacttaacatcatccaagagcatgatactgttttcaaggatatgctcattgcagagtgcgaaagagaacttgactccctgcaggtgaatttagtgncagagaagcatcagtcaag

SEQ ID NO: 362577 - DNA, 324 bp, Zea mays
gtgggaggctgcaaaacctatacctgctgttgaacaaactcctatatatgatgaagatttagctgtgtgagtagagaacagattgactagttactgtgttgaatcttgacgcctgtcataaattataatcgaacaatataaccttgcagggagagcatctttgatgctttggaggtattgagccatcaaaactgtttgagcagctacttggcgtcattgtaagttcaataatgccacccccccttttttttgtctaactttttagctagctgaccttatttatcttacgacacatgttatcaccgtactgatttctatttgtga

SEQ ID NO: 362578 - DNA, 161 bp, Zea mays
ctcagagcagatgcaggagtatgaaccacagctcagcagtgcgtcacaacaggtcgaagctcttgtcaaggctcaactacggatggctaatacgattggaccgcataggttagcattcgataggcttactcagattgataccgcagaagcaatgtatgact

SEQ ID NO: 362579 - DNA, 273 bp, Zea mays
tgcaatgcaattctaagtgataaggcagaactttattcagatgatattcaagaggcttgtaaaattgatgagcttctcgattctgtcgaagaactgaacaccctgatcttcagtgcaacctacgagacgaatgacagcgagaaaaagaccaagatagcgaagttgcttaaagagacattgccaacatggcttcgatatattgagcagagattggaaatctttggagatggaacgtattcagtcggaagccagttgaccattgctgatttgaag

SEQ ID NO: 362580 - DNA, 343 bp, Zea mays
cggagatacattttgagaagaaaaaggcaaggagctaagccactggcttgtgtcaagtcattgattctatatacttttttctatatacattttgagaagaaaaaggcaaggatatgaaactcggtgttttggctttcgtgaaaaaaaaagaactgagcgaatgatgaatgtctcatgattatatttagctatttcaaatggaaactatccttgttattgtactgacttttgttcataattaaaacacagagggtaatggaatatctatatgcaaatatattaaatgcgtaccttttttttttgtccgatgatccaggtgcgcagagattctgtgactcttcct

SEQ ID NO: 362581 - DNA, 124 bp, Zea mays
gaagatggttgttgctccaaggactgatgcgccgagtcgccaaggtactggagggcctggggcaccatctggctatgcatggtccggtcggactcatttgtgaacagcctggagtggaccctga

SEQ ID NO: 362582 - DNA, 324 bp, Zea mays
aagagatcaggcaccgacgactggtatccgtaaggaggaagaagatcgtccggccgtccgatctagtttgggcagaggagattagaaagtcagataatgttccattgcattaaaaccaagccgctgatcggcaatccaaggactttggataggtgttggtgtggacgactcttgggccactgattcgagatctaacgaatgagacttcatatcagtttgtaaagataaggatctattcgtcggcacatgatttagatcctacggctcagatcggccgatatctcttcgattgtgtatgttttactaaagagacctatgttttct

SEQ ID NO: 362583 - DNA, 358 bp, Zea mays
ctggtgtcagatttcgggaagaatgacaccatctttactgtgatgacgcatcttgggcacctgctgaaccctggtgatcatagccttggggatgatctctatggtgccaagctagatgatgatgacatggacacatctatgactcggtacagctgtacctgatgcggttcttgtgaagaagaggctactatgagaggcctcgcacacggcgatgagagcttaatatgttgccggtggatgaagatgctgcacataaggccaatggtgattaggactagacgctagatgagtactatgctttcctcagtgatttagagctggaccatggatgcggtctgggtgagctgtagacgatgag

SEQ ID NO: 362584 - DNA, 226 bp, Zea mays
taggcggcaaggagcggtacgagcatcgagtatcgggagctcgcaaacggtcgccagctgtctacgggttcacacgtaactatatctaacgcaacggctggtgcatcgaggtcatcacgtgaaccgccgcccagcgatcagatggcatggctggcacatgctttcgttgcttggtcctcgtatcgtacgtccgccgtcgtcgtcttgcttctggttattgcgctgc

SEQ ID NO: 362585 - DNA, 344 bp, Zea mays
gagaaatccagagcataggcctactgctggggagctgctgaggcatccacatgtggaaccatatcttgctagatcgtccaactggtcagcgatctatcgtgcggtgaaatccaccagagggaacctggtagagaagcagtcaaagaagccaagcagtggcagaaagcgagctgtcaaagccaatggatccaatagaagattagagactgcagcagatcacgctgtggaagcgagagacgagctcacaaacttctcagatgtatcaactataggactcaggaaccttgatatagcaatgccgtggatctgatgctgaagcaggaagacagacgttgatgtgtacg

SEQ ID NO: 362586 - DNA, 297 bp, Zea mays
gttggccgctgggagaaggagcagttccgctctctcggataggtcgtacacgatgcataggagtccaacgctcacagcaacatgcgaccagtccgcgcagacgtggcactaggataggtgctcctgtcatcagcttcatatccacacgccgcggccaagctaatacttgcgctgacgccttagcatgaggcggccgctggcgatctcgagtcgccgtcgcctgctcctccttgtcgtcctcgtcgacgtcctctacactattcctgggacatgttcatccaggcatgtcacactcga

SEQ ID NO: 362587 - DNA, 325 bp, Zea mays
tcaagtgggtacactggtttagacatgacatgacgattgtacatatggttactaggtagatatcgtgccacgtgtttagtagatgaagctagtgtacgcagttgtctgcctgaacactgtgtacggatcagaagcatacaggatgctagaggttagtaatgtcgggagagcgacagcaagtgatgacagctaggcttcgcctctgtgtcgtgacagatctgcgactacagagctcaagttccataatgcgctgagctaacttgggcagatggaggtttcacatggacggaacacgagctcaataaaggtagtgttgagatggatc

SEQ ID NO: 362588 - DNA, 310 bp, Zea mays
cttctgtaagatatatgtagaggtttggttaccttgatgtcatgcaacagatgctaggacagttcaagcatgatgcatgaagcctttgccgaattgcagtttcagttcactcattccgtgccaatggaactttgttgagcaatagcgagaattattaggtaattggtggtgtaggtcatgcggcctagagatgagcctgtatcagcagtcgatgataaccatcctgtataatagtcatctatcgcagcagtgattaacatcctgctataccttacagatcggatttaacatcctgttagaagtaatgctc

SEQ ID NO: 362589 - DNA, 341 bp, Zea mays
agcacatcaccgacgcctggctcatggggccgtactgccgcccgcccatcctgcacaactaatcctcagtgcatatggacacgctggaccggaggccggcagcgcgttgtcttttctataaatagtttatttattattcgtacaagctttggttggatccatcgcggcgggggttattaattatagcattggttggtcctttcgttatatttgaccatatttttttttgtgttcggggtaaggtgtttattatattttgcgttgctcaagaaaaagagctgacgatggcaaagtgtacgtggaatacgatgataatgccatgattatttatagtccttagc

SEQ ID NO: 362590 - DNA, 196 bp, Zea mays
  unsure (1)..(196): unsure at all n locations
cacgaatccctcgagccgcagtccagtccatccggctgcaggctctctgagtctgagtacgttggcgtaccaggcgatagctagcttggcttggcacagtcgatcgtctccgatggcggcggacatgcagattgtcctggccgcgnggaggaagatcgaggcgcagtatgtggagatgaaggtgccgctctactcc

SEQ ID NO: 362591 - DNA, 346 bp, Zea mays
gcatgacctgcactttgcacccttagttttgcctgtccttcacatttcgtctagagttgggcaccccgaatgagcatgtatcattgtgataccacattctagtaattacttaatgtcacctctctgatgtttgcagatccttggtgcatctttatgaagtactcacttcgttccagaatactagttgtcttatctcttggtttttaagtctatattcagatatatgaagatgaacctagacacaaaaaagacatccttcaaatattgtatgaactcattaattaactagaacgaattttaatttgggacggaaggaggatgtggttgcctgtatgtcttgattaac

SEQ ID NO: 362592 - DNA, 300 bp, Zea mays
ggactatgttgtcgatccagacttgtgaatcacatggcgctgttctccagcctgcggtacaatttccatgccagcatactctaggagtgacaatacatgctttactcgcaatggctctatgcgagataggcacacactgaactctttacttagatgtggatgcttgaagagattacgttgttcaatagttgctaggtatagaggctctcggacagtggacgaatgcagtcgagtgacaagcctggtaatcctcctgcagaagcagttgttcacagggtctggatctctgtgcctctatac

SEQ ID NO: 362593 - DNA, 343 bp, Zea mays
gcttattccacattctaaaacgtataggcaagtgggtcctagctagattgcagatatcttgggcagttgggcatgtgtttggactttggagattgtgtgtgtgtgtttgtttttctctaatgaattactgcaagaagagcgcaggggtactgtactggttcttgtacttggttgggagaggaccgcagcaggatgagcctcgtctgtccctctctgtctatttgtttcacctgctgcagttttaatacctatggagccatgtgtctgaaagattacacgtactacgtaggagtagagccagaagacgatggctagctttagctagctgtggtctgtgggtaaa

SEQ ID NO: 362594 - DNA, 304 bp, Zea mays
caaaaacaatggatttatcgagtttgtacagaaagcaattgatgatatggaaggcatcatgagtgaaccagtacaagatggacatgaaccaaagttagcaaatgaagctgtttctcaggttgtcaaaatcaactacttttcttcgtgttgcaggtgtttgttcggcctccaagagtacctctagaggcacaatatcgtcacaggtccaagatctttagattaccttgagaatgagaagcaataaacggcagaacttcgacaagagttggataacatcgaaatggaatcagaaactttggtaaaa

SEQ ID NO: 362595 - DNA, 290 bp, Zea mays
gcagcagcacggatccggctgcgacttcggactcatcggcagctcgcctgatgatgccggcttaccaatccagctggagccggggactgtccagctgccggccaaggcgccgccgcacaagcgtgctcgccgggacggtgatcaggtgcaagctgctgcagcggcgaagaagcagtgtggtggcgtgggggccaggatgaagagcaagcaggccaagctggctgctcctgctcctaccaaggaccctcaaagcgtagctgcaaaggttcgaagagagaagatcgccgaga

SEQ ID NO: 362596 - DNA, 287 bp, Zea mays
gatggattttggttttaaagaaaacagtagtagcaccaggcttgccaggtgctcaaatagagaggtgctcaactcaaacaaactccttgaggcaacagaatagagatggctgacgatggtgagcctgtctgctctatggactgggatatgataagaacatggacccgattgacagccagcaacaccatatcaatagtttgtactccctgtcccaaaattattaaacatacattcattaattaacctataaatgcattttgtgtgaaaaaaaaaaaaaaaagggcggc

SEQ ID NO: 362597 - DNA, 350 bp, Zea mays
agcaaccagaccatttggtttggccactttacaacatcaacgatcctgtctccatccccagggatccggaccgtaatgggttcggctacagcttatctgtgtgggcacctccatacgctcggtgggatgatgctcgttctgcacactcgccactttacaggcacgctggaacttgaagtgggagactggaaagacaacacaaggtaccggatctctgcctttgatcacgacctctttagctttgcagatgtaacctttgacaagtggccgtagagtcttatcaccaatcctaagtcactcctctatagttgtgctaagcatgcaacactaaaggctcttctattcgacac

SEQ ID NO: 362598 - DNA, 330 bp, Zea mays
  unsure (1)..(330): unsure at all n locations
ggatgatccatgtcaggatcgtcaaggagctggagnaggaattcagcggcaaagatgttgtaattggtgccacaaggaagattcttaaggcggccaaggaagggtccagttgtcaagggccttggaacaaggatcctaattgttttcaataatggcatcttggaggatgttgtcttccaagctgagattgtggggaacgtgtcaggtacgtctggatggtgccagatcatcagatctctttggaccaaggagagggacacacagatacaagctgacactacactacgtctacgcagctgtgntggaagatgtgtctgagtaccctatgcg

SEQ ID NO: 362599 - DNA, 315 bp, Zea mays
ttcctatccagtctgtagacttctacggtttgggggatcatgttgtccatttgtgtaaatgtagatgttgacccgattggtatttattctaatatgtattgtattttatcgtatactatcctgtctgacgggtggggggtgggaagtataccactggttgcaaccagggcagctgcaggtttagatcgcaggcagcccaggaagcaagagaagcagctctcgtgagtcactctagatggcagcctctgggtagccacatcctaggttgttacctggaaccagaagccagacagtgttccttgtcacactcactca

SEQ ID NO: 362600 - DNA, 334 bp, Zea mays
  unsure (1)..(334): unsure at all n locations
aatatnttcacatgaccgagaaccagtgaaccaagtgggtctcttctgacaacattctttctatttcatatgctcagcagtagtccgattagatcaggtgatgagccaagaggcacatcaaggggcctgagaaggcagaggagacgctatctgtggggagagaatttgttaggtctccaatatgatgatgatgatgacgacgacgataacgaaggggaggatgatgaagtggatgctgtggatgaagttcagagaccaaggagtcgcctggagttcataagatcaagatcagaggagcgggcctaatacattgtggagatgtgatgatgtcttc

SEQ ID NO: 362601 - DNA, 307 bp, Zea mays
cttgttcttggagttgttggtgtctccggagctacaaaggcaccgccttttggctcattctcagactttagtactttaccatctgctccaagatagcgtcttggagatggcgcgcaccgagaagctcaccggcgatggctgctccggcggcgaagtccaagtggaggtggagctcggcatgagggtggacgggaaaggggtcatagagtgccggatatgccaggaggagggagatgacgccgctatggactcaccttgcgcttgcactggcacactcaagtttgcgcacaggaaatgcatacagaga

SEQ ID NO: 362602 - DNA, 342 bp, Zea mays
  unsure (1)..(342): unsure at all n locations
gcaagatggaatcacggtacatacaactcgctttgttttttaggttccattatttccgtccaaattgttcttcttctgcgaagtggagccaaagagtggcggagagacgccggttgtaccgagccattatgtctacaagaggatgaaggagaaattccccggatttgtggagaaactggagaaggacatgattgtatatacaagggttttaggagagggcgataacccgtcctcgtcaatcggtcgtggatggcaatcgacatttctcactanagatanagctgttgccgacggaaggagcgcaaagctcgggatacagctagaatgacgacgacgacgtga

SEQ ID NO: 362603 - DNA, 245 bp, Zea mays
gtacctggtacagctcctcatagcctggtgttgtatttattcaacctgtttacattagaattggagaaagggcactggatcttggtgggctgccactgtacccccaagagccttttgatagagggacttgggacacgttatggtctatcagggatgcttttaccacaaagaaatggtatggaatcaagtgggatgattgatgtatgattgacacagtaccacagtgcactcttcaatgtagatgt

SEQ ID NO: 362604 - DNA, 349 bp, Zea mays
  unsure (1)..(349): unsure at all n locations
ggagcatgcacaggtgtgcgagtgggagatccctgctncaagggattcttagcagtgcctgtgatcaagcactgcggagtcagctccacatccgtttcccactacaaatnnnttgtcagtattatttgggaaggagatatgccaggacaatgtcatcgtgctaccgtcatgcagaaaatcatgtatcctgttggcacaacgttgcgcagaagtaaacatgagcatgttgtaaccagtttgtcccgtcttcatctatcttatttatataacctgccagtgtgtgtctaagtatttgttttgtnttcttctgtctctttaagaaggacagcttgtcaaatctaactggcta

SEQ ID NO: 362605 - DNA, 105 bp, Zea mays
  unsure (1)..(105): unsure at all n locations
gttatctgtcactgagtattttcttcccatccggtcaactgaccaggcctggccagcggtntacttcctgtatgatctggtcacaattacagtcaccatcaaaga

SEQ ID NO: 362606 - DNA, 173 bp, Zea mays
cttagagcctccccatcaaccgtgggcaggcgctgggctctagtgcccgaccccaactccttgctggacagaatgtagaaagccatacactgtaacactgctgcacctcgctctcacctcctgcgctcatgagccttccccagatttgtgaactgtgagactctttaggaatc

SEQ ID NO: 362607 - DNA, 309 bp, Zea mays
tggaaatgatatccttttttagaaggatcggtggctgaatggtagatgcatcggagaggtggcacctgaggttcttgagcatgtacctaggtgtatggcttccagaaggctggttaaagatgctctgactgatctaaattgggtagctgacataaggggtgcgctttcagttacggcgctagcgcaagttctaggcctatgtgacctactggagggtcttgtacttcagcctggtattccagataggcatagttggcaattcaatgcttctggggactactctgctagtgctgcctacacagttcttct

SEQ ID NO: 362608 - DNA, 139 bp, Zea mays
cgtcattctgcttgtcaatctactagacatgctagggaccacagtatggtcgatttgtatcggcggtttcaaacttacatataaacccagtatggtgattgatgggcggctactgctacactttcatatcttctatcct

SEQ ID NO: 362609 - DNA, 152 bp, Zea mays
ttccgagctacacacgaagacatgcacttatacaggttgttcgaccgtcacaaccatcctagaatactgatggtggactacgattaactagcgtacatgctgcatcagttctatgcgtgctcgctacagactgttcggaggacatcaactca

SEQ ID NO: 362610 - DNA, 123 bp, Zea mays
gcaggcattacaagtaatctgttttgtacataaatgtgccaacagcttgatggtggcgtttttgaaatgtagaacaaagtgcttgcacaatgtaataaatactcttgtgtactttgtgtatct

SEQ ID NO: 362611 - DNA, 109 bp, Zea mays
aagatgtagtatgtagaacactctaagagattatgttttatgttcctgaagcgatcttgctcatgttcaagttactaatgtgtgaaatgtaagtgtgcaataaacgtat

SEQ ID NO: 362612 - DNA, 326 bp, Zea mays
tggagacacctgcggcgattgagtaccattgaacaatcggggtcctgtgacgcttgagagttccagttcattttggctagctgtaggtagctaaagatgcttgagaaataaacagaaaatgcctggctgctatgagtagcaaagatctcgtgggttgatcctaaaatcttttacgtgagtgtttgtaagtagagatacagacattgatacgtgcactgaatcttgtccagaacataccatcgacttggttggttccacagagaaaactttatatccgattgacagttttttttccctgaaaaggagcaacgaaggatgcgcgcgtc

SEQ ID NO: 362613 - DNA, 125 bp, Zea mays
tcgagtggtcaagacgcaaacaacaatgcctgacgccaagcccaagagctggccatgctggtgcaacagtcggggagaactggtacatagtctggaggtggcactattagaggtgctgtctctga

SEQ ID NO: 362614 - DNA, 121 bp, Zea mays
tcacgaaatagttggcaatattttacactgctcgtctctgataaggagtcgcttttggatgatcttgagggcgagcactctaatcacagtcgttcagacgtgtcacactagcaataggtat

SEQ ID NO: 362615 - DNA, 349 bp, Zea mays
tgtggcggcgaatcgcagggagctgtggagctgtactccgagctccggaacatgtacccctcccttgggtacaaccatcacaccttcttggcgctccttgtggccggcgcccagctcatggatagggagcttgccaggcaattccattgccatttggtggttcttgggttcttgtctgatgtgaaaattgccagctctcttcttgatgtttataggaaatgccattgtgttgatgatgctaggaatctgtttggcgaatgcatatcaaggatgtgcgtatgtcgacgacagtagtttgtgactgtgctgaagatggccactaggtaccgctcgtcagctctttgatcag

SEQ ID NO: 362616 - DNA, 299 bp, Zea mays
  unsure (1)..(299): unsure at all n locations
canagaacgaaggtggtactgatgatggtgatggtgatgacaatgatacggctgacaaggatgatgctgaatcaatggaacttgcttcaaggacaaagcgaatgtcaatagaagcagctgggccaaggaagaaaaaacccaagaaggagcagtaaggcattcgcaatttgtcaagactcaaatgaagaatttggtctcgttcggaagaagaagcgttatctatttgattattgggtcgtgtttcctcagatttgggtaacaatgactggatttgtgttagcatgtttatggttaacgcc

SEQ ID NO: 362617 - DNA, 351 bp, Zea mays
tcgacatgctgcttcttctgtggtttctcctccgccattgcctgccgtggcctccgcagaaggaacggatgctgacactactgcctcggctgatggcgctgtcggggcagatgacagtgtttccaggagccagtcttcgcctgtcaaccacgatgaagctggaccatctgctgttcccgctacacctgcagccgctctgaataacgctacgcctgcagctgctgctgctctgaatgacgcctcgtcgtcttcgaagcttgaacgcgcgccaggatcatgttcagtgagtttgcactaggtgtggttttcaagtgctttagatgcttgcaatgcaatgcgtcgcgtgtatag

SEQ ID NO: 362618 - DNA, 343 bp, Zea mays
gccgacgatagcagcacagcctcgtcgttcttgagcgacggagaggcggcgtcgcggccagcaggcgagcagcagtcgcactccgcagatttcttgagcgacggagaggcggcgtccggtggcattcagagacgtgcgtgacggtcggaggtcgtcgagcgcgtctagatagcatccaagacaaatagcgttgttcgcgatctgaggcagctggtaggcagtctgggcttgggcgcacgcgagccagagagggagggctgggagcacgtcatctccaagagcagcgacgacgtctcctacaaggcctggtgcgacaagccacggtagttgccaattgcgtaca

SEQ ID NO: 362619 - DNA, 292 bp, Zea mays
cgtatgctcatcgctccgtctatggccgactctcaccacgcagccgatcggtcccacccctgatacggctgcgcacagcgtcatagcaaaggagagaatcctcctaccgtggatggtcaccgtctgggtgacatggactcgggctgggatatcctgcaagaactcgggtgtcgtctccgcggattttgcatcactcgacgtctgtggcggtcatcgtctaggctcttctacgattcctagctgggtacggtgtgtactcggaagtgcggtttacacgcacgtgccgctctac

SEQ ID NO: 362620 - DNA, 254 bp, Zea mays
atctactgctgcgaaaccatctggtctgatgaacccgggacaatatcggcaatctaataccttatgctgccagctttacacgggcgcaatgagtcaaccgtattcttctggaccatgtgctccgtatcgaagcggagctcgaacaacatttcatcagcttgtagcacctgcctaatgtcatagtgctgttccaccagtatcttgtttaggtctaaacagtcgtgtacaaggatcagtccctaagcaggtgtttc

SEQ ID NO: 362621 - DNA, 240 bp, Zea mays
gttttctacttcggaccaaagtgtgacgtatcgttgctttctgtatatgcaagtacgaatgcatcatgtaacgagaatttggaatacaattgcgtgcgtttttatccgaaaaaaccatccagtaagacacatacacacgacaacaaccaccgcaatacaacgaggggggccgggcacttcttccgcctcgcccccggggaaatctcgcggaactggatatgagtcgctacccacttcacc

SEQ ID NO: 362622 - DNA, 221 bp, Zea mays
aagatggcatgcgagcattactaccataccacttgtatccaacagtggcttcagcaaaagaactggtgcccgatttgtaaatgtgacgcttctgccattagctcatagtgttcttgacagtaacagaagtatcagttcattgtaatcaaataggattacacaagtttttttggttctagaacaaattattcacttcaatcctatactgctcttcaattaaa

SEQ ID NO: 362623 - DNA, 314 bp, Zea mays
gcctgagcaataatgtatcatcattgccttattgttccggggcagttgtgttatttgtgtctgtttagttgctgctgctgttaccgcgtaatagcatatgtgttatttgtgtctgtttagttgctgctgctgttgccgcgtaataaaacttggtcatttacggggctccctcaagattaagaattgagttgtttgatggtagaatcctggtaaggttgttgtaactggggggcgctttgtttgggctggtagtgtatgcctaggcctcacttatctgatgctgtaatgcgacaagtattatgtggttgtctggt

SEQ ID NO: 362624 - DNA, 329 bp, Zea mays
  unsure (1)..(329): unsure at all n locations
atatgctaccgtcaacgccacacccaacagtactttcagttattcattcggaaattcctactatattaaatgtgttagtggatcagggccatgcagagagacaggtcctagttcgggatgatgaaacgggaaagtctgttgcatttgatcagaggatacggaatctgaaggaagtctatacttctgatggttgcacaatgttttgtagaggttctgttcagaccattcttcctgcaaataggaactggagagctggtcgtaagngcacttctctagaagataaataactcgaatggagcaggagctactgagttaagcaataactcaga

SEQ ID NO: 362625 - DNA, 330 bp, Zea mays
tggaaatgtagttgctgacttgaaggataaagtccaaaggatttctgtgcttgagaaagattttgtagagaatcttaatttcttggaaagcaaaatcagtgcataccagcttgaactccgtagtagggcgaggatcatatatgagttaaaaaatcgccttcaggatgagaagcttaacagcagttttcagccccatctggaagaacttaataaaactttgttggtgaaggattacgctattgatagattaacttcagagaatcaggtgattctgttgccaatgtttctgatttcaggacgtacaggatgtgaataatgaacaacatgaaa

SEQ ID NO: 362626 - DNA, 335 bp, Zea mays
ggggcggcggcgacaagctcatcctgcccggccttcagttccacggcttccacggcgtcctgcgggaggagaagacgctggggcagaagttcgtcgtcgacatcgacgcctggatggacctcgccgccggcgcgagtccgactgcatcgctgacaccgtcagctacaccgatatctacagatcccctgacaaccagttttgttgtctacccgcctccgcagcattgcgaaggatgtcgtcgagggcacgccacgcaacctcttggagtcggtagcccactcgatcgcagaggccacgctgctcaagttccctcaggtctccgcagtccgggtgaa

SEQ ID NO: 362627 - DNA, 330 bp, Zea mays
tgggctaggcccaataaccttggcctactaatacaactcccaaccctgagttagggtttcccacatttagattttagagatacatggcataatgttgccaatagtcagtttagagtcaaggaagatttcgtcctaagattttgcattattgtaagctttctatcttacttggtagaaaattgtattaccgattgtgttcgtaagttgggcacttatcttattatgcaccatatggctaaaccacatttcgtatcatggaataggttagcacaatgttcgcaactttggagagcattgcacagagtgatcctgaaactgctgagattgtgt

SEQ ID NO: 362628 - DNA, 232 bp, Zea mays
tgtagaagtgaagacaatcataggagcagagacaactgatgtcaatattctagtttattttttccagttttttttccccattcttaataacattgatagttactgaattctgtgttctactttacgtagcagtgcatactaaaatactttggtatattgtaaaagttctgaataaatcagttgctttataattcaccatctaaataaactataccatattgactcagcctgt

SEQ ID NO: 362629 - DNA, 101 bp, Zea mays
  unsure (1)..(101): unsure at all n locations
ganagatttgagaggattctatgaactgaagagtgtaattcctgtggatatgtttcctcatactcctcatattgagtgtgtatgcttattggagctgcgtt

SEQ ID NO: 362630 - DNA, 172 bp, Zea mays
ggcacacatcagactcgtgacagcagaaatgcacacgccctgtgtgagactcctgtcgaactgcgactcctgaagaactgctccgcagtacactatgtcactagcgatccacgtgagcaaaccctgtctccaaccaagtgagttgggaggacagacagagctctgctgcttc

SEQ ID NO: 362631 - DNA, 333 bp, Zea mays
  unsure (1)..(333): unsure at all n locations
gctaaaggcttctcatggatcaaacacaaaggcttctgagccaatggtcattgatgcaagctcatctcgaaaatctgtgaatgcttcacattttggtgggaacaatgatattctcatagatggatttgtcnctcctttaaccagtgttgctccaatgtttcccttctttgaaaacactgctgaatgggacgactttggtgaggtcatcaaccctgatgattatatgatgaaacaagaagaaatggataatactctgatgcttggccctggagatggattagatggtaggatcgatgatggctcagcacgcctgcttcttgattcaacgccctc

SEQ ID NO: 362632 - DNA, 352 bp, Zea mays
  unsure (1)..(352): unsure at all n locations
gctgaacaggttctggattttgttccatgagggcttccaactccttgtttaatttggcacgacaaaaaactcgcaccgggtgctctaatcggcggtcgattacagcgtccagtgcgagttctttgccgtgccaaaattgaaaggaggtcggctcggatgccggggcatgcatacaggacctagaacccgtttcggttgatgagaatgttcctggcatgtaatgcttccctagttgagttgtggtctaacctaggagtttgctttgagtggatctttgacaattgtacgtgtatatgatgtnttnttacattattcaggggaattggatcttagcttctgtgtgtgtatgcgt

SEQ ID NO: 362633 - DNA, 346 bp, Zea mays
atcagggagggttgtggtgatgaattggacaccacaactgtcatggaaggatcatctgatagttcatctacctctgctgactcaggtatttcatctacagcctatgatgaaagtgaggcttccgatgatgatggggccatatcactatctcagaagagtctcaaaggtggtctgcacattagctccatcctccgtggttcccgtagctataagaaggcaagatagaagctggaggagctgttacacgatgatgacaccattgtgcctgataccagcccacggatggtcttcggggttgaacatgcgtcaaccttatgcaattatccagctaatacggtgcagtttc

SEQ ID NO: 362634 - DNA, 355 bp, Zea mays
taaactttcacttaaagcaaccttaccccaaccacgtatcaagaaggatttgaaaaataaggatcctttgccaagtgaagttactggttgggctgctgtggagaacatgagcagtgtggatgttgatgctcagctatcaagtaccgaacatgaaaatggcacaactgaggaggcagctgcattttcgactccttcagttataattcgaagtgctgctgactgtgatgctcaagatgatgcaaatggttctaagaagcgggcgacagtgcaaagtcatctcctagaccaaataaaccagccagcgaatgccatgatgttaggcaagctaccgctaagacagctacaggtgccacta

SEQ ID NO: 362635 - DNA, 228 bp, Zea mays
tgggatgtccactggctgtcatcactgggcaacatcatgtcggtttgcagctttgccatgcacttcctggtactggtcagcaagctagcagctgtgagaaggggagacaagacgacacctttctccgccttgttgtgaatcgtgtcagttgtcacgatggtgatgcttgctggtctcaaaaccagtttcaaattggaataactaggaaatgggcagacacataccgac

SEQ ID NO: 362636 - DNA, 280 bp, Zea mays
gcgtagtaagtcggattcggtcgaggcttagtagctcgttattataaggggctggagcgtggggatagatgctcatgagtcatgtacatccatcgatcacacggttcacagtcagtcacagtgtactattgattcgatggtcgccgattcttttcttttgcttgggtgattgtgtgtatgtagcagaagtaataataattaaaaaaacatgtaacaagtagagggatgagctcacacttgtattgcatcaatgtagatgaatgccacgttcgtcgtactc

SEQ ID NO: 362637 - DNA, 307 bp, Zea mays
gtgctgcaggtgcacgagcactcggactatgagtatcacaagatgaagcagtggatgcagaccgtgatccagggcttgattgagcgcatgcgcatcacgaccgtcatctgggaataggctccggttaagaagtgcatgatgaggctgcctaaatggttcggcgatagactccagctagcagctgtctgctgctagagtcgccgccgctgaatagctgagacttggtattgtacattacgataggttgcccattggtatgtcactaccacttgtgttacaactagctgctattgtaacttgtaagtcg

SEQ ID NO: 362638 - DNA, 292 bp, Zea mays
  unsure (1)..(292): unsure at all n locations
cacactgccgccgagctctccaagcattcagcgacgcatgtgcatatattacgcatgtggtcataactctagtagcagtatgacgaggtgcaggcatctacgtgcaggcttttcaatgagtacaaggaggtatcacgagagaagtcagctgacgctgatatccagttaatatgtgatgtntcaacatattcgagtcgactgctcttattcagcggccttcgtgaacaccttatgcaggtggtgtgtatcacttgcgttcgcatgcagagcatatctctactgctcctcagtc

SEQ ID NO: 362639 - DNA, 341 bp, Zea mays
atttttaatcctttaattttattccattatagtccctaaattactacatatggaatttaaaatagagttttagtttccgtatttagcaatttagtgactaaaataaaataaaatggagggactatcagccacctgtctttgcatcgacagatagctctactgacagaaccgctgtggttgcgctgccaggaggtgttgggacgctggacgagctgtttgagatcttggcgctgattcaactagagaagatcgggtcagcgctccggtcacggtcttgcttctcaactacgattcttattactacaagcttctggaatttctgaatgactgccaggagtggg

SEQ ID NO: 362640 - DNA, 322 bp, Zea mays
tgcggcatgtactttcaataattaacggataattccggtcatttcattctaactgcaagtgttaacagagtatatacttatttcagcaactagtgccataaccgtgacgatagctggggtagtaaaagaagctgtaaccattttggttgcgggaattcatttccatgatgaatttacatgggtgaaaaggtttggtgctctcatcattatggttggtgttagcttgttcaattggtaccagtatgagagattctaaaagggtcagatctatgaggatgacgtcagctctccatttacttgtgacgtcaagtacattattata

SEQ ID NO: 362641 - DNA, 225 bp, Zea mays
tgaattccgcgcggttcctctgccctcggctcctcgtctctcctagtcgtcgatcggaatggatcgcaaagatggccgtctcatccgagttaaggtagccatcgagcacaacgatggttggatgcatgccctcgaatgacccattctctgcatcaataactgtggcttcttcggcagcgcggcgatcattaacatgtgctccaagtgccaccaggagatgataac

SEQ ID NO: 362642 - DNA, 183 bp, Zea mays
ccgtcatccttgatctgaagtgaagttgcgtggatatcgacgactgctggatgcacgatcatgtcttggtcatctgatgcgtttcggggcatctgttgcgcagtgctccatggcctgctgaacgtgtatgttggcatcgacacgagcttcgaccgtgacgtcgaattccgctgacgacgagga

SEQ ID NO: 362643 - DNA, 358 bp, Zea mays
tacagtacatgtgatcagatgcttcattttccaaacatcatctgggttcagtagttggatggtaacaaaaatattatcataatagtttggctctgcaaaaatccttgatgtatcttatagattttatacatctcccacaattcagaacccctaatgattttcttgcatatatgcagggaaaatatgaagagcagtttgaacgatcggatggatttcagcagcaattaataattaaagtacgtgaaattttgaccgacaaagaatggcgtaggagaaaaatgcaaatgaggatatcagaggaagaaggaagacttaagaaggatgaggaggaaacaatagagatgtggcagaggaagag

SEQ ID NO: 362644 - DNA, 185 bp, Zea mays
  unsure (1)..(185): unsure at all n locations
tcttctggcagcagggccgcaactgcccgctggccggcgacaacgacccgcgcgtcatcgtcgcgctcaccctggtcatgtacgccagctacttatatctgttcctccagatgtacctgaagaagcagcgctnggccgccaagcgtcgacaggagcgtcttctggccgcataggccgagcaggtc

SEQ ID NO: 362645 - DNA, 274 bp, Zea mays
gttcactacaaatactaaatcatactaaatctgctgctgttctcatccatgagcatctttgtcaaagtttcaatcttatgtgacatgctaactttgtgcaccacaagtagctgttttttttggaacacgcatgagagcgagtatcttatattaaagagaaggcagaaatggttcagtaatgacctttacaattaagccactcttacgccaccagtcgacagaggggttgtaagttgtagcactgaaaaacaaagatttcccaaggattctagga

SEQ ID NO: 362646 - DNA, 167 bp, Zea mays
attcagctagctagctgtgtgccgactgctggtgtctgatcggttgaagagcatgtttcagtattactgtttcttttcaccgacaaccgcgttggtttcttgtgaacattttttggtgcctattttcgcgataggaacttatggcaatataatgcttggcatatcaa

SEQ ID NO: 362647 - DNA, 347 bp, Zea mays
gtttaagacagaagctcgagaggataaatcatattaggccttgtttggatgcacatgtatccacctcaatccatgtgtgttggggtgagtttccataccaattcaccccaacacacatggattgtggcggatacatgggcatgcaaacatgcccttaagaatacgcttataaaacatgttaacgcaaagatgaggaccactcaggacatccacgtgtggtcggaaggactcttctttatggctgaaagttgttatatatgctcggtgcaggtgaacagtcatgcagcaggttggtatatgtttcacaaaaagaactagggttttcaaaccctctacataaatatttg

SEQ ID NO: 362648 - DNA, 217 bp, Zea mays
acgaaatcctctctgtagaggtcaagttcaacgaggatattcgcagactctcttgcccaatcaacaccaccttcgatgctcttagaaccgaagtgcttgcaaagtatggtctcgataccaacaccagactctgcttgaaatatgaggacgaagaaggagacctcatcactctcggttctgaagctgatctgaaggaagctctccagatcgttccagc

SEQ ID NO: 362649 - DNA, 256 bp, Zea mays
  unsure (1)..(256): unsure at all n locations
actcacttgcactctctctgacgattcttcagcttgtggtggcctccgaaaccgacgactcgtggtggttgctgtgttacatgttcttcgattccctgaccaccgtgtgctgccggctccgccaccaccgagcgaggaaaaaggaggccggccggccgcacacaaagcacagcgtcactgaaagtgttttgagcatgttggcgctactgtcngatacagtatcagtaaatcggtctacntcaaggcagtgtactgt

SEQ ID NO: 362650 - DNA, 238 bp, Zea mays
ctagcccattagacctcgttcctgtcgcggaccacgagctccacttcacatctcacccggcggcagcgcggtcagttgaacaatggcggactcgatggccatctcggcggtcaggctctgcacccgcaagttcttcaggagccgcatcctggaccgtaagcagttcgtgcttgaggtgatctagatcggccgcgccatcgtctccaaggcggagttgaaggagaggctaccaaggcgt

SEQ ID NO: 362651 - DNA, 323 bp, Zea mays
cttaaacaatatgctgcatgaaaatctttactttattcacaacacacctgagatggactgggcttgggcagctaaccggttaattgagaaggatgaggcataaactccatacgatgctcctttaaattatttgccgcagaagaggctaattttgacaagccagttgatccagcaacttctcgctgctataccagcgaccattttgagatgacaagctgtgtctacttacggaagtgcgacatacactctatcgatgttgacactaagggctgcatgcagcatggtagcatcattatcatcatcatataactcttgctcacctg

SEQ ID NO: 362652 - DNA, 340 bp, Zea mays
  unsure (1)..(340): unsure at all n locations
caaataacgaggagagaagagaaacaaggaagagacgtagaaggagaaggtccagatctagaaggaataggaaggccgctgttgaggtagatgccgcagcaaacacatgaactttggattggaaaaggcatactccaaacagaagtagagaaaaaagagaataacatatatgcaactacatttgtcattttgtagaaacaggctgcataagtaacagttattttcatattataaatggtttccttctgtggacttgattatgtactgtatttacactttatttcctgtaaaccgtgcctgtgttgtagctcatctaaagttcaaccanatgcgatgaaga

SEQ ID NO: 362653 - DNA, 340 bp, Zea mays
  unsure (1)..(340): unsure at all n locations
ctgaatattggtaactatgacaacacaatcaatgtgcagatctgcaccaagaaggaaaggatgcatgtnttactatcgttgcttgagagggacgcaccgaagtctgcaatcatatttgttgctgggcagtctgagagatcaaagaaggctggaaatcctccttcaaccatggtggtctctgatttcttgagaaatgaatacaagggaagccttgatgtgatgctgctggaagaagatatgaacttcaatgctcgagctgcctcgttctccgattcctgcaggaagtgaagggaagaggattcctgctggtttcaactgacatagcgagcagagggtttga

SEQ ID NO: 362654 - DNA, 342 bp, Zea mays
tgtccaatacagtgacctgacctccacgcgaagcaccaccacaactccacacgatctagaacctaagaacctgcagaggagaggaagaggagcttggggaggtgatggccggcgccgagggcgagaggtgggtggggctagcaacggactccccgttgattcccctctcggaattctctgaccctatcattgcgagcgaaatatggagcaaagccggacatagaaaccttggacatcctgaacactacagctacccagaaggatatcgtggtggttgtgaaagtcctgtggggtgatccgcgtgagaagctctgtcaagttatccatgataccccgctgagc

SEQ ID NO: 362655 - DNA, 322 bp, Zea mays
tgatgccttcctctttaaatgataatgtacatgttatatagttattacacagttcagtacttcagtgactatcccatcctgcagcggctgaacattcactgtctgatccgctggacagtgtccggcaacagttacagtgaaagcttgtcagaagtctgaaggaataccgcaatttatatgtcgtaaactccggataggcgggagactatattgacccagaatccctaaagtttttccccatatacatcctggcttctctgcataactcttgctcttcgtggaggatatgccgatgtatctctgatgaacgatgtgctgctgg

SEQ ID NO: 362656 - DNA, 244 bp, Zea mays
gaaggacgtgaaggggggtggaccacaagatgaagttggtggacaacccgaagaaggatggactgaaaaagtggatgctcgtcgagtgattaccctctagcaaacactagctagtgttggttctaggaagtccggttttatgcataacgttatatgtatttactgcaattattttgtaggcttgtattgcatatatgtgtttgatctagatcatgatcatccttatggaaaaaaaaggggcgcg

SEQ ID NO: 362657 - DNA, 297 bp, Zea mays
ctcagactcgcgctccacgtctaccgcgtaattgacatttgatccctactaaacgctaagcagcttgactctcgaagtctatatagcgattatcatacatagtggagcccaccaggcacaaggccacggctaccgggcgggcactggcgaccgctacctggccgccagcagcgctgtcctccaaccgctattgcgtatctactgtcttccggcttctgcgtctgagcatctcttgtgacggactggctgaatcgagacgtggaggcagccacctacaaggtagcactatgaaggtca

SEQ ID NO: 362658 - DNA, 345 bp, Zea mays
cttgtacatctagcacaaacaagtgggaatgctattctctggactatgccatgtccttctttcgccatcagtgttataattacttcagttttgtattgtaacctgttcaagaagcttccatggcagactccaaatcaaggggcagtacaccggcagctatgtgatattttttgtcagctggaaattgtattctatggaaaatataacatatataatcaggatcctttggtgagtcacgatgcaatcaagaacaagttcaccactttcccttggaatcctggtgcttcaaaggttctacatcggcttgggggcaagccgaagcttaagggaggggaatgtcacaca

SEQ ID NO: 362659 - DNA, 343 bp, Zea mays
  unsure (1)..(343): unsure at all n locations
gcagttggtcctcaggtacttgattttagtaaaagagtagcaagagatgctgttcaaacgtcaagaaatgaaagcaacaatccaagggccagttccggtccagttctgcctattgaaacatggtctaggcctggcgtggttgcaggggctaataacatgttgaagccaggtcaaaacctgaacgatcattccaaactgctatactccacgaatttcctgttgatagtgctatcaattcagttgtattatagcggaaagcaagaataataataataaggcgtccttgttgaagatagatctggagtttttcaggattcaaacagtangcacaggacacttgtaa

SEQ ID NO: 362660 - DNA, 194 bp, Zea mays
ccagcccattaacgctcgttcctgtagcgcagccacgacctccacttcacatctccaccggcggcggcgcggtcagttgagcaatggcggactccaacgccacctcggcggtcgacctccgcagccggaagttcatgaccaaccgcctcctggaccgcaagtacttcgtgattgacgtgatctacgccggcagc

SEQ ID NO: 362661 - DNA, 362 bp, Zea mays
  unsure (1)..(362): unsure at all n locations
tgccggtggctcgtcgtatctagcgactatgagccaccggagcttctcctaccacagtcgccgctccctctcccccatcctcctgaagtcctgccacgaagatggaccctgctaccgccgtcgtcatcaaggagtcataccggtcctactattgcgtgccggtgagtttgggatgctcattggctgtgttcctaatcaaatccgtcagtttctgggcatgtgaggacagacgttccatcattggtcggtttgatgtagcttcagtgtctgtagttgtttcatgagtttcttgaatttttgaatctanaaagtatgtagcttttaaacgctggttacatgcttacacttgcttgcaataacta

SEQ ID NO: 362662 - DNA, 359 bp, Zea mays
tcgccacatcaatcatccagcacgcctgcaatggtagtctacatctctatttagtttgcccattcacccgttctttatggtcacaagtgttatcttgtaacgacactgaactgccctgtacagattctccatcaagtccaagattgagagtgggcacatgagtcgttaacatatatatacctctgcaaacacctgctttccaatgtcgatgcacatacatgtaacccactgcagattctggccatccttgtcttccttagaagcccctagtcttctagccttatattctgaatacgtgagacaagcggccaatcctcgcccactccttcactgcaacgcctaagcaagtcacggttgcc

SEQ ID NO: 362663 - DNA, 328 bp, Zea mays
tggcaactacaagctgcccaagcactgcgacaacaacgaggtgctcaaggcgctgtgccgcgagcggggtgggtcgtcgaggacgacggcaccacctaccgaaagatccggtcggagctttggatgacctcacacgtgcgcttcttgcgtcgtcttggcagggatgcaagccgccgacggggatgatgagcccgtgctcgtcctcgcagctgctgagcgcgccgtcctcgagctcacgctcggcgtcggcgccaagtgagtgaaaagcggcgacggccgtcgtcgcgctcacagcaagctcgggatctttgagctcccgtactgcaat

SEQ ID NO: 362664 - DNA, 324 bp, Zea mays
tagggactaatctttcatctggtccgaagtgcaaaatctgtgctcaccagttctctgatgatgaagctcttggattacattggacaactgtccacaaaaaggaagcccggtggctgtttagaggttattcttgtgctgcatgcatggaatcatttaccaacaaaaaagtccttgaaagacatgtgcaggatgtacatggggctcaataccttcagtattcaattcttgtaatgtgaccaggaaggagagtctattcatcacttgcttgtttcttgtgtcctcgcgaggcaattttggtatcttctcctccagcgggtcggcctg

SEQ ID NO: 362665 - DNA, 356 bp, Zea mays
agatgtgctcctttatatttgtgcatacttgttggacaaccagtcaaccacagctttgtttgggctatttcttcatgggtgctcggtgatttctctctggttgcacaaacgtgaaggcttcagaaacatcttcagcttgctgcacctatgacacacgatagaaatagtgtcaatgtcaaggttttgttcttgttttcttggcaaaaggcaccaaggctctatgcctactatccaatatgtatgtacatggatggggctagtagttcatgcactaacccgttttgacttttgaggcatagttgtacgcttagggctgataacggcctataattcttgcactataagatttaagtatc

SEQ ID NO: 362666 - DNA, 361 bp, Zea mays
atatggcagcctgccgaagcataatggaggagatcacaaaaagagcttttgctgagggaatccttcttactaagaactgggacactgaaccactatttcctttgcctgaaagtgttgtgggcatggctggagcaagtgatttaagtcccttcttgtcagtatctaccccaaggaaacgtgtgaaaagtagatgggagcctgttgtggatgacaatgttaccaataaggtggaacaaatagcaaaaggattgatcagcagtaatgtccacagtactttggaccctagaaatagaattccacatcctgtgcggggtagcagtcgggatcgtgggaagtttctccagtcttgtcgagcatcatc

SEQ ID NO: 362667 - DNA, 293 bp, Zea mays
cggtcgagcacagtgagcagagggctctggctacagtaagctgctttcttcctaatccagttcagttgaccatggaatacattgtgcaatccctattgagtgtgagaaagatgacaggctgagttgcagacatgtccttgtgcactcacagaatactaagcatgctgcggtgcctgatcgttcagaactggattatcagtatagccagttttcaccatttgacaagtttatgatgagagccagttgctcatttgaaagcatgaattcagtagcggagttcttgtattctgatc

SEQ ID NO: 362668 - DNA, 257 bp, Zea mays
gcttctcgtggcttgcgtcatggattggtaattggttaagcttccgctggggttgcgcctgtgcttcgactgcgggcactgtaatgtaactactgtaatgggtcaaagtaggcttcacactggtggtgctggtctcctgtaattcctgacgagtatttgtagggagtgattttatcttcttcttttgtgtgaaagcctgtgtcagtctgcaaaaaaaaaaaaaaaaaaaaaaaaaagaaaaaatttacataaaggag

SEQ ID NO: 362669 - DNA, 148 bp, Zea mays
gacggagtgggttttggaatatatctcaatgggatgaacacagcagagcggtaacacctctgcattcacttgatgctgaattctccaagcccatgtggatttttggtgtcagctcctatggtttccttggaatagatgacacaagtca

SEQ ID NO: 362670 - DNA, 269 bp, Zea mays
gttcatcatgtggtcctttcccgacctgttccgatgacgacgacgacaccgctcgtctttgtaatactggcacataccaaaccaataacgcacactacccagtactgaccaggcaaggaatactaaagctcgctccaccagaacccaacaccgagacaggcaggaagcactgtgaaggtcctagaagcaatggtttttccagcttgctagatcctattctgtataagtagttgattctttttcatttcattcatagtgctgtagattgc

SEQ ID NO: 362671 - DNA, 231 bp, Zea mays
atgatattaagggcttcttttcttgttctctttattgtgtacatttattatcctttgatctgaaatcacctgactcatctgggccatggcaatagagctctattagggcctctatttgtaatggttgtattcaccggattcaaaggtttagtctggtgttctgcttctgtacctcaagcccaagcatgcctaaccttttaatggggttacaaatttgatgtgtgaacaatg

SEQ ID NO: 362672 - DNA, 264 bp, Zea mays
ggtaaagtcacttggtgctacacctggagcccctggacccccggtggaaactgcgagttcgtccccatgctctggagcggaaagcaagtcagcgacttcaagaagaacgtcgttggaaagaagttcaagcatgtcttgggattcaacgagcccgagatcagcggccagtctgagatgtccgtcggcgaagttgctccctctggaagcagtacatccagcccatggacgctattcgcgttgcacctgctgtcaccttgtctccca

SEQ ID NO: 362673 - DNA, 228 bp, Zea mays
gggttgaacctgctttcaactcttgcgtttatgcttgatccggggggatagtcttgtatcatgtccagagtggttaagtgtggtagtggtgttgcgttggttggtatgttgtgtcttgtgaggggtgtggtgcgtctgttggtatgttgtttgcggcgtgtgtgtgcgtgtgttgtaccttcttctatctatctattaatggaatgatacgcatatctcctgcgtagg

SEQ ID NO: 362674 - DNA, 268 bp, Zea mays
gaaaaagcaacagagaaagaaatgaatcacaattcactcttggttgcttctcaactcgaaatttttttacttctgacaagcaaggtccaggtggtactacgttgccctctgcatggccttccacatcctatcatcaccaacaccaggctaaagctaaagcttcatcatttcttcagctccaatcaagtccacaaaacatgatagtgatgggaaaggatgtgtcacaattctcttgtgtagagaagaaggtattctcaccctcttgtgc

SEQ ID NO: 362675 - DNA, 251 bp, Zea mays
tcatgaatatttctggttctaatgaggatcagttcaataatctgcatgggattgtcctgttgggacatcaacagtttgttttgccatttgatttgtcatctactcgttcgtattcttatgcatatatctctgagcaaaatactggggatgatgttggtcacattgcagacgtgcttgcaacaatattgtcgtcaccctcttcagtattggggccataagtgcacgttgggactgaggtaagtcatcttgat

SEQ ID NO: 362676 - DNA, 248 bp, Zea mays
ggaagaatgattacttggtgtggttattcaaaccaaaattaaccaaaataatatgatgactaaaaccactttggtgttttctctccctcttcgtattaaatatttttaacactagttccttacttgaaatcataccttttatttttttggtgacttagccttaagccctcataaaaactgtcctttgatttcagccttttttcttcttcaaaaactgttgtaggatggaatgctaaaacacaaaggta

SEQ ID NO: 362677 - DNA, 244 bp, Zea mays
ctcgagtgaaccggatgactatgagtgcaatgggcttcacaggcattctaagcaggtttcaatgagtgctcttatactcgggatgctcactacggtgctctctgttgtgtactcagcagtccgtgctggatcctcgactacattcctttcaccttcttccacctcatcttcgcccttgcaagcatgtattcagccatgctcctgaccggctggacgagcgctgcatcagagagctccgagctga

SEQ ID NO: 362678 - DNA, 314 bp, Zea mays
ttaggaagaggagagatgaggatgatgatgatatgatgatgtttttttacttatgctacatatgttaaatatgaggaacctgttgcaaattcgttccttgtaacttgctttggctcttatgttatagtgtgatcatgaccatgccaatgaataaaatcacttccattaaaacatgctttttgtacttaagtgtgcaaagttactccatttatgccttgtcttcgtggtctaacttgctcttatatatggtgcttatgacagagagctgcacctgaagacaccaatgaacattaggtattgcaaataagggctgt

SEQ ID NO: 362679 - DNA, 278 bp, Zea mays
cggcccgttgactgactctgctgtgctccgtgctcagctgtgttcggttcggagttcggacaatctcctggaaattctgatcgaacctcctgcttggagcttccagcaacacgtcctcaccggtgaaaagcacccactactattgcgctgtcttgtagatcaatcagtatttccttcgtcaatccgatccgtgatcgttaccgcgtccgaacgattcatcctacttcgtggtctcactatcggtcctcacttggaccttaaggtctcagtaagctatg

SEQ ID NO: 362680 - DNA, 226 bp, Zea mays
ggagcatggttcgtgatataagggcaagttttgggaatatatcgaggcggactttgaggtgaaattcaccaagagggaagtctcttgggactcggtgacttgcagacagcgctgagtcacaacagtggcacctctctagtgtctcatgtgatgaagtgagaatcatatgcgatgagattgtcgcacgtgaactgagtatcagtagtagcaaattcagtaatcaacc

SEQ ID NO: 362681 - DNA, 235 bp, Zea mays
caatttgtttctttatttgcatggacattaactgttacaaaatgccgccatcgcgctcctgtgcgcaccatagttgccacgtgttctgggatctatggttattatatcttggatagttattgaggcaggtaaaagaataaggttaagaatatgttaaattactccttgtgctttggttaatgatattaccacaaatatatgttgaggtgtaagacaattctgggtttaagtgttt

SEQ ID NO: 362682 - DNA, 309 bp, Zea mays
gggctatggtggtcctggatatgaccgtggtggcagaggcgcaggtggccctggcggcaggggctatgttcgaggccgtggacgaatgggtggcggccgtggacggggcaaccaaaactactattagagcaagggcattttccaaggccgtattgctgtatgtttcctctagtcttcgcaattttagtataatagccaatggtgcctgtaccattgcatcgattccgtgggattctgacattagtcctacagttaaccctgggacatcttacctgtatttaaagagagtgctattgatagctcatcagc

SEQ ID NO: 362683 - DNA, 265 bp, Zea mays
cttcctcgcagataaaatatgagagtaacttagcataacgccgtcaattaagaaaacaaatatatccccgaggtacttccgagcacaagaggctcttgattatggacttgccgatacgatattacactcgctggatggtactttcaaccaaaggactgaccgcgcactagtcaggccagcgatcgcagtcagcagcgtgcactgctggactgggaatgtcatccaacgaccagtagagatagaatgtaacagacatattgtcact

SEQ ID NO: 362684 - DNA, 251 bp, Zea mays
  unsure (1)..(251): unsure at all n locations
gtctgtcagtggatctaganagaagcatttaacgactggccgcaccagaccagaccgtagcagaactcaactgaaggcaaccgcggtcgcaatgagtcagcaggtccagcatctgtgctcatccttgcttgtatgttactgttccatctgattgttatgtattgtatcgctatcgtcactattgatcaagcaactgtatagtatgcgtagagaacgatgatgatgccatagcttgaatctgatagaatgtt

SEQ ID NO: 362685 - DNA, 347 bp, Zea mays
  unsure (1)..(347): unsure at all n locations
gtggtggtgatgacgaagatggtgaacctagtggtccatgttttgcagctaggacacaacctaaattagctacagaccaatataatggtcttggtcaagatgaacaagcagcgcctctccgtccaagatcaaaaaggcagaagaagctctccatcaagggcatgtacatgctttagaaggtaagtacatctaaatcattttgtacggtttggtcatgtaatctgaatcagattctctaattagactaggtgttgttgttgtttgccgtttgtgcatcagaaaaaactattgtatttctgttatgatataataaaaatggggtaatcctcttgtacaaanaagtacat

SEQ ID NO: 362686 - DNA, 329 bp, Zea mays
  unsure (1)..(329): unsure at all n locations
gatcaccgtatcagctcgtcagcacagtttcagaccactcaggccacaacccgtgttgctcaccaggttcaggaccacatgcgatgcggagactcnatgttctcttgctatgaatgagtctaacatgctacttgtgactgcacgaaactgcactgaagtgcctttgtgtttgcattaatgaccattcaacctgatggtgattcagagcagctgtgttcagtgcaacagatcagtggaatttccaatcgtcatgcaattgttgctcctagggaggaatataaaggaatattttcggtcaatccacgggctatcagtacaaacttcagact

SEQ ID NO: 362687 - DNA, 148 bp, Zea mays
  unsure (1)..(148): unsure at all n locations
ctccccaccagctccgttcattatcctatggtcttcacctccacctgtacctacatttccatttaccgncatcagatatgcatattcatcacattacttatgtattaatatgtgaatcacaattattgactgaatagcctcacactac

SEQ ID NO: 362688 - DNA, 380 bp, Zea mays
atttatgatagtattggctgttaataggttctcttatggattctactggtcctatgtctctatgcactaccatgatgcatgctgcatgttgtgtgtacgttcaccatggattacaatgcctttttcacggctaaggttaattggtttatccatgatttcgtgtttaattactaccgctttatctatgcatcatggatgactctcaatgtacttaacgcgatctgattgtatatattgatcatactcgtagatgagatatattgactgctaatccaattaactatctgttatgattctggatatagtctgtctgagagctagaaacggccactgcttgtgtcatcgatacaattgcatttctacttgagtcaacacctgat

SEQ ID NO: 362689 - DNA, 375 bp, Zea mays
tcaaattcttcggagagcgtactagtggtcggaagagacgggcgagagagaatggacgctcactggcaccgactggccattgtggccgcgcttgttcttctggcctccgcggcagaagaggcccttgccgttcgaagcccgggagccctgctggcgccacgaagcagtctggacgccttgccatccgcgagacttggtacgccggagaagaagagcacaggcacagcggcggccggtgcccgggatggctctgattcgtcggccgtcttcgaccccgacaggatgagcaagcgccgggtaagaagaggatctgacccgattcacaacaaatgctgaggtcgagtgtccaagaaacgagagaaggtctggttcttt

SEQ ID NO: 362690 - DNA, 360 bp, Zea mays
  unsure (1)..(360): unsure at all n locations
atntcttgagaaatatatcttcatggatgcctagcagacacatatcaactgctcaggaaggagaagacacaaggtttcctgggagagcacgaacacttggttctgtaggaactgaacccactgcaagggaggcaagtgcgcatttgcatgctaggttgttggataacacaactccaagtgacccactaacgaatacacagactcatgttttcttctataaaaaactcggccaaggagtgaatgactgtcctcccgatataatattaagaagagaccgaaacaaaggtcccgaccgagaaaatccccgaaccatagcctcgcatcactaacagatcggcgtcaaccgtccactttgcaacg

SEQ ID NO: 362691 - DNA, 356 bp, Zea mays
attcttcacttttgatgatttgcataaagtaatgtagaagaagagcttagcttcatatattgtgctgagcaagtgagcatactttatgaatttgacttctatagcaggacctttctttgttggaccttttatgcattccatttgcatttccttaccttatttttgttttgtataatacatgacctatttcatttaccatgatttgtgctcgaactcttgaaagagttgttttgttatttcagaagtaaaagatgcagttacttccttaaatgctaagaagactgtcagtaagaaaaataaacagagtcggcgccagaagaaacttaaagcatacgatctgtcggcactttctgagt

SEQ ID NO: 362692 - DNA, 354 bp, Zea mays
taccgagtctccaggcactccaaggcatcggccctctggttctcgcgcatcgtcaacgtcgacgctgccgcaggcagctatagctagagctgccatagactcggggaacagtccgcagcaagtacagagcattacatacacacatttctcgagctcgatgtagtgttgtgtcttacggtgagtgcacgcgggtatgtatgtatgtatatatgtaatctcaggatgtgctagtctgtcgttgatccgacgctggctgagacgtattctgcaagaacaagaacaaccacaagctcagcaccagataagcttttaatccatgcgactaatgaaggctgtattgtgttcagatgcata

SEQ ID NO: 362693 - DNA, 100 bp, Zea mays
gcgactgcaattcggcctctgtcgcttgcgagttcaatctcacatccaaacatgggtacagagaagtcccacatcgacattgtgagttattggccacgtt

SEQ ID NO: 362694 - DNA, 174 bp, Zea mays
atcagacactctcgtctttcatccgccttcgcctccaatcgcgagggctctacgtctcgtccaggaaagcgagagctctgcataagaacaacacatcaaaagcgtgatcagctcgacgccaacgtaacctcaacaagcaagcgtcaagactgatctcgacgtccagcttcgatc

SEQ ID NO: 362695 - DNA, 218 bp, Zea mays
ccaggagaaagttcgtgtgttaggttctttggcatcatccctgaccatgatgttgtcgtgaagtattgaattcatatgtcactgaggtgagatcagacgcatattttctagagggtattcagggcaacagtacatgcatgctgagaaatggatctatggactatctgatcgtacatcgcacaatgccgatgcacgtgaagtaagcggattcaacaaca

SEQ ID NO: 362696 - DNA, 284 bp, Zea mays
cacataattgcttatgtcgtgatcaaatccatacctctgaggagggactctgcaccagttcttggttcctttcgtaacgcaatgggcatatcatctgatggcaggtcctcaacctcaatctctggagctcgagcttcttcaatttcttcctggccactttcttgtataggagttaattgagccatgtcttctgtgtttgttcgagtcctgtacttccgtcttgtatacattttgagattactctgtcatgtatactttctcctctagaattctgggcttgaggt

SEQ ID NO: 362697 - DNA, 339 bp, Zea mays
  unsure (1)..(339): unsure at all n locations
acgagtggcattggtgtaaaggggaaggagttgattaaaccaacagacgcctcctcaccccttctaccaacaacaaaggtgatagaactgagggaatgcattacgtgtctgattgtgaactggacagtgatggtgaagagggctgggcagcacagatgcctcgttaccctttcgaaggtatacttccaaggagcaggcaccgtgattgctctttatacaggacacacaaaggtggtncaaagaatttcgtgttgcaaaccgtaatgagactcttttggagacagtgaagttattagatcccacaaattgtgtcttccgcgatgatggaacttgtgtact

SEQ ID NO: 362698 - DNA, 336 bp, Zea mays
tgatgagtggcctggttacgctcttatctacattggctgcatgtggactgactaatggtaagcacaatatgcagcttcccaagcaactaaagtttgctgcagtggagaatgtgatgctcctggcatgtgtaactgagtgagtgctatattgtctgttcagcagctcggcaatgatatgagtgaactcaagtgttctgtagagctattcctgggaggctggatcatgtaagaaagactcaacacaacaatgcttgaacttcatttgttgtgtgtctgattcaaaagagaagaggtatagatgaactttgcggtaagctgcagagtttcaaagtttcc

SEQ ID NO: 362699 - DNA, 262 bp, Zea mays
  unsure (1)..(262): unsure at all n locations
cttccgcttctcttcgacagaaaactagggttgtgctcttgcatctctctcntcgctgccgccgccgccggacagtgcaccgacgatacgacctcatctatcctccgatctagccttttcatgcgcggatcccgtacaagatgcttccctctcgctctcaagatcgccagggcaccgaatctcgtgagctgaagaatgtgagcgtacacggcatctggtcattgcgacacgggatgacatcgacttaggacgtattgcactc

SEQ ID NO: 362700 - DNA, 232 bp, Zea mays
cgacggcgcaaaggccgccgcctctgctcccgccgcgggggcaaccggcgcagggaagcgaggctgctgccatcgcaatagctcttggatgacgtggacgtgtgggggcccgcgtgcccactggtggtggagccaagcggtatgcgagactagcttcgttccgtggtagtgagatattttgctgtgagaagccgacgagtcgcggcggcccatctctcagtcaagactacag

SEQ ID NO: 362701 - DNA, 173 bp, Zea mays
  unsure (1)..(173): unsure at all n locations
ccttaccagcacacagtggagctagctagctagtagaggtcaatcaccaagatggcgaggcagctcgttgtacttgcgctgcttttcgagatcgctggtgtggcgcatgtcgtgaagggagtgcgggagagcctccgccgnacaggtggcgctgaggatggcgctatacatct

SEQ ID NO: 362702 - DNA, 255 bp, Zea mays
gtgaactttaggaaggacgccgttgtccgtcctgactcctgagcagtgagcaagcagcgttccattagggcccgtcagatcatttcacctccaaagttgctcttttgaaatgaaggttcagtgtcggaagctctggtgccatcctgtatcagactatgagaattgcgtgttacttggtcggtggtgtcgttatcatgcgtgtttctgaatgacatatatgcagcttaatgatcacgtacccattttagcagacca

SEQ ID NO: 362703 - DNA, 193 bp, Zea mays
  unsure (1)..(193): unsure at all n locations
gtttatgccanaggacatttctataatcgactcagggagtacatataggctacaaacacaagaaccacaacatctgcgtgcgtaggcagagactcaaaaggccagccctgtatgtactccctgagtcgattatagaaatgtttatgccaaaaaaacaaaaaaaaaagggcgcccgccaataaggaactctgta

SEQ ID NO: 362704 - DNA, 304 bp, Zea mays
gtttactgttgtacaagctacggatagctgaccagttctttgtgcagtggccccagctgcagcataagtatcctcgagcatgctacgcaggtcgtttgatgtgaagattccaccataactaaggggttcagatacaatgacaatatatgtatacttcgacaaatacaaatgtggctgccttaaaagaagctttacaacaacacgcttcatattgggctggaatgtattagctatagtgttggttgggattacatctagtggatgtcagtaatcaactcatgtggatatcgtcctctaacaaaaa

SEQ ID NO: 362705 - DNA, 345 bp, Zea mays
gccagctgttgtctatgctgcggtccggaaatgtgcaccgtgcagtgcagagccgagtccgacgggatgtgctgctttgcgagcacgaacgtagccgcttctttgccatccttggactgtgttgtgcggatcagagcatcgtctggacttccctggctgttgcagccttacccaaacctctgattcgagtactcgcggaggctcccaaccggggctccctggacctgcgctccgcagtctggcgatacgggttagctgttggttgcggcgatgatcgggaccttggtccctggtgctcgtctcctctactcgctccgatctatgcggtcagtcatgctccttgca

SEQ ID NO: 362706 - DNA, 340 bp, Zea mays
ctttgtgtccagactacattaagaggtcacgggttactatttcatttgactgaagattctccagttttagcagctgatagaagcaatgctgctgcaatcaagacttggcagatcaatgatggcaaggtaatgactgcaatggtcaacaacactaaaccaactatgattatgagtctgtccaaatttaccactgctaaggctatctggtcacatctgaaggatcgatttgttcaggatagcggtgctcttctacatacccttatgcagcagactcatgtgattgagcaacatgatatgtccattgatgaatattattctgcctttgatcggcttatgagtg

SEQ ID NO: 362707 - DNA, 339 bp, Zea mays
  unsure (1)..(339): unsure at all n locations
atttaccaagatttttcttttgtatttcttgccatcccatggaagctgagctaactcaatcggctaatggtgtggatgtacactcagatcacccaggttcaagtccttgtcgaggcgactttgggtgcctgttttcttcttaataaagccacctagctcctccttggctgatctagttttttcttgccatcccatttgttgtgcttctgtagttgtcaatacagtgctttaggctattcatgtattnttttaaatgaaccttcatatttgccttgcctacttgaatntcttaacaaatgcagataagcctcatttcagctttagtttatctgcattctg

SEQ ID NO: 362708 - DNA, 277 bp, Zea mays
gaacaagttatagacgtggaagttggctggggttacatgaggaaatgagactcgacatgcaaagaatttggagaagaaatttagggagagatgatagatgtattgctgataatgggaaggagatttccattcttggatgaggatgttataaggcttttgctcaatattccattgtgggaggtagccaacctcgatcaacctagtggcattggtgataaaaggattttaagagaggttgctgaattgcttggtttatatgaagcagcagttctgccaa

SEQ ID NO: 362709 - DNA, 213 bp, Zea mays
ggcctggcagtttcagacaggtagaccaacaaggagctggtgatgttaatgtaggacatgctcaaagttcaaatgctagtttagctccaatggtgcctcctccaccacaagcttctgcatctcctgatctcacattgaagctttaagtttaaggcttaagaaaatgacgatacatacacaagcaaaggccttcacaaagtaataaataagtgg

SEQ ID NO: 362710 - DNA, 271 bp, Zea mays
gcttgtatggttgggcaagcaagttaggctgcttgcgtcacacatgcatggtaatgcaaagcatataagcaacgaggttagttaggctgtttggttggtagcagaagcgatgtggcgcatgtaggtttcgtgtaccctttttacagatgctatttctgttctatcacaaaagaggtcagttggaaaaaaaaaaccttttctctggtcgatcagctgtgtagctagaacacaagaacagttattagctacacgcgatcgaggcccgcctgga

SEQ ID NO: 362711 - DNA, 121 bp, Zea mays
tgccccttgtaggggtgtgtgtgtgtgtgtttagcaagacatgcaaaaggagtggagagtcgagttgaatctccatgatgcgtggttgtacaaagccaaagatcactcttctttcttgtct

SEQ ID NO: 362712 - DNA, 262 bp, Zea mays
gctccagcaaaccctagtggacggcaatattatcagcattcgtagtggaaaacgaaacaccatggtaacgatttgtagagtgaggccaccttgagtgggcttgttactgtcaccaaatacagctcgtgtctccattcccaccaatgagcagctgatcagttgcccgcatttcagtacatagcatagcatagcataccattgtacagttttccattacataagggtcggggtcggttttgtgtgtgtgttttttttttgtaaa

SEQ ID NO: 362713 - DNA, 263 bp, Zea mays
atggatacgtgatacgccgataccctgatacactatttctcaaaaaacaccgatactgggatacacaaatatatattataaaaaaataaatgctgggatattggaccacacaagttctcaaccagtacatagttaataaagtttaggccatcaagccattaaacctaggaactttagtctttaggttctaacagactataatattccatcaagccagaggacttttacctccacacaatagtagggacagttaccatcattta

SEQ ID NO: 362714 - DNA, 222 bp, Zea mays
gttgcttcggttttgagctgggctgcaaaaagctgatgagttcgtaggtagctggtgggcgttctacaaatagttcaggtatacatgaatcattggatcacggtgctagtatatgtgattgtaaatatatccaaacctagaagcgcacagtggattacagtattgttgtggttcccgtcgaaattctgaaaaaacgataatatgacaataccaattagtttt

SEQ ID NO: 362715 - DNA, 263 bp, Zea mays
caaaaaatagatggtggttctgtcgatttgtcacaagagttgtttgccagtacagatgctggattcaggaatgattatggatctacggacatttctcatatgaaaaatccaactacctgtatttttaaaagaagggagcggcatgttcatctttgtgaaaccctgtctccagtggttcctccaaagttgttgcagtcattgagaggccctgcttttgttgattatttgtcttcaatcagccagatttccaaattagaaaactt

SEQ ID NO: 362716 - DNA, 319 bp, Zea mays
  unsure (1)..(319): unsure at all n locations
gcagcttctcgagagccttcacacagtggatcgtctactgctatgacgacntcttcagctgtattagacatgtgtgatgagctacctgctgcagcgcacagtgagtgtttgtgagagcaccagaccaaatgctccaaatggaacaaccgactgcaaatcaaaaggcaaagagtatagagagagggtacaaaaggataatttgaaagatgggaggaagaaagcagccctaactcgaataggatccattcatctgaacaagcagctgataatggagatctacagagaagcgcaggttgagcgctcacgcatatggcagagc

SEQ ID NO: 362717 - DNA, 142 bp, Zea mays
cacgcatcgcgcatcgctcgaaaaacaaagatcccaaactaatggcatgcatgtgcgacgcgagtcggtcaggttgttcaccttgaatgattcgtgatttattttatttacgtattcggtcgatgatgtgcctgcatgtgaa

SEQ ID NO: 362718 - DNA, 194 bp, Zea mays
aaaggccgagaggagatgaaccgtaggagttgccgccttttttatttggtattttgcagagaaggtcgagagaaggtgaaccgcgtaggagtcgccgttttcatacggtctttggcagagaccgacgacgggtctttgctggactgatgatactttgagacaaaggtgtctaatgtggacggggtctgtgaatt

SEQ ID NO: 362719 - DNA, 167 bp, Zea mays
  unsure (1)..(167): unsure at all n locations
agtgtctttattgggcatgtttgcttatatcgtccatgtttgagcatttatactttctagcagtatgtatactgttctgactggcaaccagtgttaccctaaacatttanatggactacaggtcacctactgtctagctatttattcggactaaatggcatttaaac

SEQ ID NO: 362720 - DNA, 233 bp, Zea mays
agtcaggggttcgtgcccctatgaggagctcgtctttagaacagttgccatctttgtcaagagttgccaatgttatgttactggtgatgagttccaggtgacggcaacattttagagattttgagtatttctattagttggtactatggtttgccaattataagttacttggcctaaaaaaaaaaaaaaaaaaaaaaaaagaaaaaaaaaaaaaagaaaaaaagtaaagaaaa

SEQ ID NO: 362721 - DNA, 176 bp, Zea mays
ggataatctaatccaccaaatcaggttggggagacttcagaaggtcttcgatccagatgcaaccgaacaaggcctcaagtggacgagcagacctccatctcatgcttacctgtcaaccaaagtagtcataggagtagatcagtactattcttacatggatgctttccattaagaag

SEQ ID NO: 362722 - DNA, 335 bp, Zea mays
cacagagcttagcacaatatctatgcaggatatcagtgcactcagtgaagttgaaattatgcaaaccgaagatgctagtgcaaaggacatgactgcagtatgtagcattgattgtattgatcttaaacaggctatcaacactacagcaaatgttacatatgcagctattgttgaagaaaagaagttgattgaaggcaccactgcaaggatgaatgggcgtgcgagagacatattatgttgaagaacagacacaagctagtgacacaaatgagttgagtgcagtacagaacatagggaattctgaagaaaataagcagactgaaaatactgatgca

SEQ ID NO: 362723 - DNA, 141 bp, Zea mays
gagcaaaactatgatattttttcccggacgcatagaagagctacgtattattatattaagaagagaggtctaacatagacctgccacaagataaaccagaccgaggacagaagaaaaaaaaaaagaaaaaaaggaaaagaa

SEQ ID NO: 362724 - DNA, 263 bp, Zea mays
gacaaggtccgcgtcgctctcaaagaaggcatccttgctcaagacatcaagcgtcagggctcaggtaaatcgcatgggcttgtgatggagtggagtcttccaagacatttttcatctctgctgttgcttataatgcaggccgtctcacagccacagcccaagaaactggcaccactgaggacgcaggtggacaggagcgacgattcgaaggacggtgagcgtaccccgaagaagacaagaagttctcaagtcatcctcagcag

SEQ ID NO: 362725 - DNA, 276 bp, Zea mays
atccaagacagatgaaaggcccagagtttgcagcaactagcagtgggtacacgaaggaggttgatgccacgctcaaagtgctatctgcgtcgatggtgtcctttattaggaattggcctgtgattgaaggccattcgccgggaacgctgtgggctcagcgtgtgcttcggacacattgccaggttacagagtgcttggaaacacgtggcgtgagtgactctcaaggcgtggaaagactggactggaccagaggatctgtccatagactccaaggag

SEQ ID NO: 362726 - DNA, 182 bp, Zea mays
accttttgtgtattattaggtatatgttcttaataatgctgcggagtgacgagtttatgcaaagttaggataacattataacatgcatgtcaaatagaggaatatgatgataatcttcaagcaaatgtcatggagtagcagggttatgttatctgcaagtgatatcttggacctcttggttg

SEQ ID NO: 362727 - DNA, 204 bp, Zea mays
tgacaaccaatttcagataaatttggtgccatcttagagttagaagtactatgtggatatcacatagtggaagtgttttctgtcaactacataattggattacggccgtcgttgcacggaggctgttttagaatgttgtattgtatgtggtatggattcgcttacgagcctgaaactgttctattggaatcgataattttattt

SEQ ID NO: 362728 - DNA, 277 bp, Zea mays
tacgcctttatgtctctgctgagtgaagttctacggtttgtacttagatgttgtgtggttttagaatcagctgtattgtaagcaagtctgtctactttagaagactggaaatgaaagaaatctttgccaaattctttggagaatactggatttgcgtatgaattaatcagtatccagcacttctgttaaatcaggcgtcctcccagtctgctcttgtctatagcatggctttagagcctgcctccttgacatgctgtatatattctattgtatttgt

SEQ ID NO: 362729 - DNA, 135 bp, Zea mays
cggcttaatggctcttgacatcgtgcagactctcatcgtggacatcgagccatacgagcatgtgaaccgcgcaatgtacgagatcgacgcagcttcgatggtcaaggcggctgcaaacgaaaaggcggaggcgga

SEQ ID NO: 362730 - DNA, 271 bp, Zea mays
gtaagatgcttgcttggtgcgtggctattgttcagagtcttcttattgtatcttctcgcaagcattacagcgttgatgttgttgttgcatggttagtaaatgtgtatttaactggatgattgtgctatgttttttcccctttgttgatgtatcttccttgcgtaggtatacggtgaatttggtggtcttttttgtggataagaagcttacaggtgggaaagaatgtccgccaatattggagtaatgttttggtatgtagttacatatatca

SEQ ID NO: 362731 - DNA, 287 bp, Zea mays
gagtagaaagaagcttcacaacttcagcttgcattcaaatgaatggcttgccaccttaggtccgcgactgttccttcgagccctccttgcacacaaaaccaacatctgtggagaactggctctcaagagaggacgcgacctgtctctgcaggccaaggctcagtcttacgctcagttggccaagataggcacagttagcacgttcaagaaggtcagcagcaaggctgcctctgaacattacaggttcgacatagtcatgctgttggctgaagcaaaggagattgctg

SEQ ID NO: 362732 - DNA, 333 bp, Zea mays
caatgatgcaggcccttcttgtgactcactacctgctactgggacaagtgggactattgatgattttatgtccatgcaaaccaattttggtagctttacttctttggttcgtgctgttgaagatgttccactgagcaggattattcaagatcagcggtgtgatttgcaactttgatttggtggccccaagcagcagatgtatccaagctttgagcaacagctaaggatggcctcggctggagctccgccttatgggaccatcggcaggcatgaccctatacctgtaccagagccaacattgatgctaggttatgcaccgcagctaggtaactg

SEQ ID NO: 362733 - DNA, 246 bp, Zea mays
cgtggatgctacatggaagagagagcaaccacgaaaggcaccattcgtgccccaagatgcagactcatctgtgaaaactgcatccaagcatctggccgccctgggatagatcctgcaatctgaggcttactctatgtatgtatgtggttcgtcatcaagatctgccaatgagatgtcatctaagcggcaaaaactagaatgttcggatcgcaaagagatcctctctcgcatcctggtcgtgagcgc

SEQ ID NO: 362734 - DNA, 263 bp, Zea mays
tggcatcgttaattgttagtagttcacgtcatccatacatgtgtcaccaaataagtaaggggatgtttatatgatattataatctacgtagattatataattcaacatactttaaattaagttagtttaaagtttattgtattatataatctggatagattataaacctaaacaagtgatataatagtaaagagaaaactcaatgtcgtcattacgtcatgtggtccgtggatatatatacacaagccaggtctggccttgtc

SEQ ID NO: 362735 - DNA, 336 bp, Zea mays
gtgggcctctggatcgtcctgcagtccgcgttgctgaaagagtaccccaacaagatgcttgtgacggtgacgcagtgcgtgttcagcatgacgcatcgttcgttgtggcggtggtggccgagaggggcgacttctccgagtggaagctccggttcgacattagcttgttagccatctttacacggggtttgtggtaacgggcgtgtcctactacctccaggcatggtgtatggagatgaaaggccccgtctttctggccatgtccaacccgctctgcttcgtcttcaccatattctgctcgtccttcttcctcggagagatcgttcaccttggcaa

SEQ ID NO: 362736 - DNA, 344 bp, Zea mays
ggggctctttgcattggctataaatctacaagtaagtatttccatggacattcctattcaaaatgagtcaaagccatatcactgtttgctccttattttcctttatatagatagttttattgcaatctcttgtatgcacagtaatgtacactagtgttaaaaggatgactctctaattacgctactcatttctagttgttgctcttgatagatgtatcttgtaacaatactatcattgtccactgttgtgacttgtgaaccagcaacacataatgcaagcatgattgcttttgcaggttcctggcactacaaactacagtatggtttctactttgttacgaaga

SEQ ID NO: 362737 - DNA, 342 bp, Zea mays
ggaatgaaacgacttcacagctgcaaacagtaccagaaacaacagaaattaagcccgagcccgagacagctgtccctcaagaacaaatggaaacaatgccatccgttgcaattgacaacccagttcaggacacgttgataaataatttggcggaacaaaagccagacgcaccacaggaaccagaaaataaggaacgatcggataaagacgaaaaggagattccaaaggttcccggcttgatagttacttcttggaaaccagaatgtgttcaaatatctctagctggtttgctggattacaacctcgcagataaaaacgacaaaacttcgaggtgtccttatt

SEQ ID NO: 362738 - DNA, 329 bp, Zea mays
aagacaagaacagaagctcttcaggcaatggaaactcttgttgtcgccttacggtgggccggtagagttactggtattatgtgctttacgttatcagtatcacctccttttgcattctcacccagcgtgtacagggttttagtatgttggtctaggttactttgctgatcaaggttcgaatgtatttgttcttttaaacatatgcactccgatctttatatgatggaccatttctttgacacaaagagatggtccatcatataaagatcggagtgcatatgtttaaaagaacaaatacactcgcgatcttgtatatgatgcgccatttc

SEQ ID NO: 362739 - DNA, 277 bp, Zea mays
gttgggggtcgtccatgatacaggtcatggccatgttcaaagacctgcaccttgaccccgacagcgacttcctcgatgggttctcgatcaactcatcgacgatagacgaatcggcagagaaaccgacttgatgctttctcatgagcctttgcagattttgattccatggtccctcgaggggtacgatacaacagcagctagctcaatcattttattttagattggtaggaaaaagagtggcctcctccgatttagtaggaaaagttgtgattttgat

SEQ ID NO: 362740 - DNA, 278 bp, Zea mays
aaataatgagattcctggtgatgccggtccaggccttgacaaggaccgagtgaccggtctaagccctcatacactcaagctgttgacgtagagatccattttccctttcacatgccaatcttgtgtctcgtactctcgttgtgaagaaaagaggcctgctttgtcttctccttgtaagttttcccttcccaaggttttgtgcatggaatggactgtatataataaagcaaaggatcccattcctcatgtctgaaaaaatctctctgttggtttcatgc

SEQ ID NO: 362741 - DNA, 289 bp, Zea mays
ggagatggtttccagacaggtttacaccttggaaatcacttgacgttgatgtctacaactctcctgagtataaggaaccatggccaccacccgcacagtttgtgatattgggtgctcgtgcctggctcacggttatttggcagctacttgaattggtgacaccaacctacgctggacagctgaagtttggtgaactcgcacggtttgattcttactctctatttcatgtgtttggcatccgtggttggggactacttgcagagatgagaactgtcagctctatggcgct

SEQ ID NO: 362742 - DNA, 277 bp, Zea mays
  unsure (1)..(277): unsure at all n locations
gtttctcatggcaaccaaacgcacccgttccatacttcagagccactcacaaangtacgttgttggacttggacccaagagttgtccattcaaatgacgctgacgcttcaaccggcatcgctgccgtagaacaagaaagcggcttcgacggcctccaagtagacccaaggcacgagaccgagttccgctacgtgaaggagatattcagaaagtcgagcttcagcaccgagacgctgttcgacgaatggtgctcacagaacatcagtgtcctccagga

SEQ ID NO: 362743 - DNA, 271 bp, Zea mays
ctgaatgccggattcttcgtcttacggcttgaatcgagctgggaggctgtggatctgagcacgggaggttctagagctagcgaaatcgcaaggctattagggttcctttcggagcgcgtctgaagcgatgatggctgaagtcggcggtgggatcgggatcttctctgccctgctccactcgggatgatgaatctgctgcgctgataattattggatgaatttcgataattattagatctaagagatgcgccgacttgaagaggcgaggtaa

SEQ ID NO: 362744 - DNA, 277 bp, Zea mays
gcttgtttatctcttttttttttgaaggaagcaatatattgcgcgttcgcgtacgtgcggccggcctgatccattgctgtcttgctgatgcgccatgagtcagacttgtgtcacctttgtgttgagtgttgacggaggggctagttgtccctcctcgcagaactctgcgttcaagaagaggtacgaaaaggatggttggttatcgataccactctttcgtttggaggaactatggttgttttttttatttatattctgtttgggcacctgttgtgaa

SEQ ID NO: 362745 - DNA, 275 bp, Zea mays
ggactatgcaattgaaacaccattggagattttgcccaattcagaaggacagcccctttatgaaatgcaaatcaaatttgataaagacattccaatcgccgctgtcaactttgttctaaaggaagaggaaacaggtgcatggtttcagcataagggcagggatttcagaatacccttaaatggatccttcaatgatggcggaaaacaagatattgatatctggccaggttgttaagaatttcattaacaattacatttatttggatcatagtgat

SEQ ID NO: 362746 - DNA, 280 bp, Zea mays
tgaaaaggctgttgaggagctggaattgctgaaagaggagctaagatcaacgcatgaacagtatgctgtattagccactgaaagggatgtagccgttaaaagggccaaggaagttgttcgtgctgcgaaggatactgagaagcaagtagaggaactcactttagaactgatcgcatccaaagagtctctcgagtcagcccacgcttcacaccatgaggttgaagagcacaggctcggggcagctttggcgaaagagcaggatttcctggcttgggagaaa

SEQ ID NO: 362747 - DNA, 277 bp, Zea mays
gagaaaaccgtccatcctcatgactcaaccagtgctcagggtggatggtatgatgtatcactggaaagtgacgtaaaggccatctctagttccaagagtacacatcaagagaagcgatcttcgaagagcattccaccatatgtttggtgttcattgagttgtgctcaaatcgagctccaacctgacagttgtgctagagttcctctaaaagtgtgcatttgcaccgggcacatacaatttttccaattatgagctgcaatggaaagtgcatctatct

SEQ ID NO: 362748 - DNA, 265 bp, Zea mays
caatgctaaacgtaggcgggaaaaataccagaaacaatcatccctcttgtcaaagctcactcgccaactcagcattcatgacaatagagcagcttcatatgggaacgatagttctggagctgagggtagcccccggtctcctggccactctggtgaggattggaagtctgccttcgactcagcaacaaatggctctgttgaccggtccagttcacagcatgagacaaggtcaaaaagtgctgacagtcgaggccggcgccatgaa

SEQ ID NO: 362749 - DNA, 213 bp, Zea mays
tggaagttcttctatcaaattttataagtgttaggtgtccaagaattgtgaagttaaagttataagtcgtttagtgtgctctctaaactaggtataatattctatgtgtgttagtcactttcataattgggatggatgttgattgctacctcgattgtttagctaggttgtaagggcatgattgccgtaagtaacaatatatcgataattagt

SEQ ID NO: 362750 - DNA, 220 bp, Zea mays
ctcaactgcagggtcatcaacagcggcagcagcagctctggattattccagcttcacacggcaaccgcctctgacgaggaattcgcccacgttgcaactaactagcagctactatatctctatccgtagaggatctagtgatctactgctactcagtgaccatgttcttcgatgttacaattagttccactacctgaatccagctttaacggagtgctcg

SEQ ID NO: 362751 - DNA, 293 bp, Zea mays
gtgtcgatctctctgcctgctaatggccattctgtgaattggtgatttatgggggtacttgctcagcctcgatataatggtatttctatctttctttctttctttcaagtcttcaggttcagtgagtcgagttggcgatgatttctcagttacaaatgtagccactcttgcttccacgatgctgagtgcatgcatgctgccctttgaaatcaccattcgacgtttctgtcgctggagaaccgatacagtgacgatgcatgcactagtgcctgctgtattattctagcttcgct

SEQ ID NO: 362752 - DNA, 289 bp, Zea mays
gttcatttcccacagagggcactggagcggcgactttctcgaggagcagtacgtggaccagatgatcgaggagcttctagactccaacttctctgtggagatctactagtttcacccgactcctctgctccgtctcatctctctgtttggtttcgtcagctcagctcagctagcggatgtagtgagttagtggtgagttagtacagtagtatcattagccatgccaggaggaacttgaggtttctttggttagactcttgagctctgatgtgtatacggtagcgtcgtc

SEQ ID NO: 362753 - DNA, 162 bp, Zea mays
tcggaacacaccgccggtcgattctctgtcttagatctgcttagcatcgtcacattgtgctcttttctccatgccagggtcagtggtacccccgatccatatatgcagagatatgacaggagatggacgatggatgccgctgcattctgcagatcctggtca

SEQ ID NO: 362754 - DNA, 251 bp, Zea mays
gtgcgcctcgtccacaacctcccaggagttggaaagaacctccaagaccaccccattgccacccaaagctcctcccaacccgccggtgttgctgcttgcgaaggatctggtcgtgacaccagattcgacctctggttccgtacttccttcaaggctgccgatgatcctcgccccgacattgagaccatcggatccaatgcttgcggtggagccttctgcctcgtgtacctcatggaccccaggtctcgtgg

SEQ ID NO: 362755 - DNA, 178 bp, Zea mays
gctgttatgtgtggatcggcgtggagtacaatatagcctgtgtagatcatatagatgtgtaacgctagtaatagtagactgagacatcaggttatcagccgttgcatggctacagtactctgccggcgcgtactctgtcgatctagcatgcgatgacgacagacttgtgttgttagta

SEQ ID NO: 362756 - DNA, 334 bp, Zea mays
gaggccacggtgcaggtgggcaatgtgaacgttgtggcatgtgattccaaactgctccgacagtaggtctgcgtacactcgaggtcaaggtaggaagctgataattgcggcgacgaggggtctgtctgctcgtcagtgtacacacctaggctaccgcgaggctgggtctgtctgcgtcagttctagacgcctatgctacagctcgaacggcatttcataggtcttctacgtaatgtatctgtgagtcctattatcccctagtatacgatctgctgcagctataccggccaatagtatggcatggtatggctgcaggcagccgcacacctgaggt

SEQ ID NO: 362757 - DNA, 321 bp, Zea mays
cgctcttcattgttgattgttagttgtattgatcgatccgtatgtgtgcgtgcgtgtgtggcgttgctctttcttcttgtgacgagctgtgccctgccaccggccgacgtgcgtgcatgccatagttgctgtcagcgttttctaatgtcatatactcgtgctgtgtgtaagtacatcgtacgtactcgattcctgctaaataagtatcctagtactagagtactcctctgaagcaaaaaagccgtcgaccacctctccggcttaacgtcgctaacgctattgatcgtgctctactagcagtcgtctagtgtccagaagtcg

SEQ ID NO: 362758 - DNA, 108 bp, Zea mays
tggcattagctactgatgtgtgtgaatatgttacgtctggggcagacagcgactaggataatcttgatattagatcaggacagctctctgtagtcggtaacagctgag

SEQ ID NO: 362759 - DNA, 309 bp, Zea mays
attcatttcgccgagacggcgagaactgcttcgcacctacgatactgctggagatccagccggcacaccatcgactaagaagactgcggagagaggatgatactggcagtgctctacgccaactccgatcgaaacatccatgttcgagcgattccatggggttccagaggaggagaggctcaagtggcgctcattactggtgaaactaggatccgagaacctcaaatggtccacgaacgaggagatccacgttgcctcgcaaaagtctgtgtctattgtgtataccacagtcggggatgtcagcctcta

SEQ ID NO: 362760 - DNA, 322 bp, Zea mays
  unsure (1)..(322): unsure at all n locations
atatataatgttagattgtttgttccatacccctgtgagttttcagaaaacattaaaccaatatttgcttgttgaagttctgttcatgcttatttaattaaactgcatttcagtatgtgtgtttgtgctccagagaattcagcaaaatggcaattttacaagatgccatgtgatagaaattctatgcaaataattacctagcatgactgtatgcagtagcagtttgtggaactcagctatgctcctataattggtaactaactagtgttacctgntagcaataagaaccctttttggtcttcatgacagagagtctctcacg

SEQ ID NO: 362761 - DNA, 336 bp, Zea mays
  unsure (1)..(336): unsure at all n locations
gcctcgtgtttaccgttcccgtctctctgctagtctctctctatcgcagcagccatggcggctagggtttacgccgccggcttccatccgtagaaaaacctcctcatccagtcgttgccctccatccccacatgcccacgctgctcgtcgcccctctccaccaccaggaatcattcagttcacctaatccagcgcatcgcatctgcaaccttgcgtccagttcctgctttgctcagctgacgcggtctctgcagtagatcaggcctgagataatggcncctagtgacaagattatggcacnatcgaaggataaaattaggagattcatgcaattac

SEQ ID NO: 362762 - DNA, 204 bp, Zea mays
gtacaactagtcggcgcgtcttcatgcgatctgtcgttcctagatactctggatctttttcatggctgtatcatcatgagattctctatgcagacggtcttctctctttagcaaattggatgccgagtgatttgtgacctgtacgaagacatagacacgggagctgccgtccggtcacgctgcgcacccgcgaattggttccgg

SEQ ID NO: 362763 - DNA, 361 bp, Zea mays
tcggctcgaggttcgcttcccgagcacgcaaccatggctcgactggcagccaccgccgcgctcctcctcctcgtcctctccctcctcgccgtcgcgcactgcggtgccctcgcagtcgcagcagagcacgacaccgagcccgaggaagcggctccgccacgctgatgagcacgacgaggacagcgacgacgaggaggatgagcaagtggaagagatggtccggcgcttcaggaaggcgatcatgaggaggaggttcggcgacggccacggccatggacgccgttcccgcttcttccaccacatccaccgccacgccgaggaggccaagaagcacgcagatgttgaagaagacgagagcggt

SEQ ID NO: 362764 - DNA, 344 bp, Zea mays
tgacgctgacgccacgagcaatggcaacgacgacgacgagatctcctccgtctcagagacgacgggcgcagaggaggaggcgtgtgggacggagggcgacgacgacgacgaggaggagtgcctacagaggcggctgctcggagacgcgcacctcgactacatctacacgcagcacaagggcaagccgtgagccgtgcccgtgaccaatgcatctcggcctcggcctcgccggtttgcatggatggcttggtttgttcagagtgcgtacattacatgcatgctgctgggaagaagtcgatgacagacgatccatcaggctgctgggatcgaatctagtgtgtgcg

SEQ ID NO: 362765 - DNA, 216 bp, Zea mays
tggtcagagtccgaccagaaccacatatatagttttaacaatgtctcaagttttgtgttattacctgctgtctgctgtctgccatatgtaatagtttcttttcaaaaggcaaaagcacttccttcccattttctttgaagtacttgtatcaaacactctgcgatgagaatcctgaatttcgttcttttctgaagaatatatgtactcctttctcat

SEQ ID NO: 362766 - DNA, 263 bp, Zea mays
gatcagcggaacctccgaggcattctccagtcgccacatttccaacagcttcctcctagatcgaattcttttacatttcaatcacacatcccctcgttgttaattagttatactaccatttaattgttatgtgttaattgttaattcttttacagatctaccagttaattttgttcctatcaaattggagagtcaattctcgatgttacggatccaagtctcttactagaaactggagcatagcctagtagcttggtacattg

SEQ ID NO: 362767 - DNA, 347 bp, Zea mays
cacaatttcacatcctttcaagagatctcataacacacaatgaattacggaagatcatactacggaggctactcatgaagccaaggattcggtcagtctggctatggcggcacttcggtcatagtggattcggaggctacggccagagtggcatcggtcatagcagctggagtcagggcggatatggtcatagcgggcttggaagctacggacagagtggtcttggaggctacggacagagcgactacggtcgaaataacttcagctctgactggaacgacagctacagaggccatagcaactggggtggctatggtggatccagcaacttaggtggctacggtggt

SEQ ID NO: 362768 - DNA, 342 bp, Zea mays
ccggttcgttccgcataatctatgtgcttgttaacctgaaggccgacaaaagcgaaaacgcgcacggacagcctccagatttaggtcgcagctaaaagtaaccccatgttgtacagctggtcccagtaattcgtgctgacgggagagtgaaggagtcatttgatcagttattagtggcggtgtatggagaggaagagtcttgcctgcttttccttattgagctttctcttgtgccttcacctgtgttacattctgagtcgagggctcctctaaagtgtgtgcagaggtgctcgaattaggtaccccagaacaaggcgcatgtacgtcggcgtcggcttctgc

SEQ ID NO: 362769 - DNA, 354 bp, Zea mays
  unsure (1)..(354): unsure at all n locations
gtgccatgatgctggccaagagaagccaagtggatagaaggctgttcagtggcaacgaacctaagacttagtgccaaggactgaaaccaagtaaacttgtaattttccatgatggatacgactacactntctcattagtggcctctacagcagttgcaccaaagaagcgtctcattgttttgttactacagttatgtgaagcatacaggcaaactcagaaagactgtgataaggctcgccagagatgcctgcacaggtgctgggggataagcaggaccatcctgaagggagatggtgtctgtggacaaagagctctgcagtgggtcttatgtgcatgattactgctggtggagg

SEQ ID NO: 362770 - DNA, 236 bp, Zea mays
gctaggatggcaggatgctgggcagtgtttctgccatcggcgctgctcgtgtggatcgtttgctgcaactgggtgctgatcatgagtgtggacgccgggtcaccgtacggcgcaacatgactgatctgatgcgccattgcagttcttgacgagacaagacgcctctacatccgaatactaagttatcgacgatacccgctcgattcttgcaacgacattgtcggcttaactctgaa

SEQ ID NO: 362771 - DNA, 334 bp, Zea mays
  unsure (1)..(334): unsure at all n locations
tatctatataatatatatagtgttatatatgactatatagtctatatatacatatatatgtcgcgcaaatacacaggacgaccaggggaacgattacgctcgatcaggggcgactaatcgccctgatcgtcgcctcatcgcgactaatcgcctgatcgcccagtggggtcggtcagacgaccaggcgttctgaaaacaatgatccgttgtttcttcacagttattactctcacaacaatgatgacttggaaatctgccgttgttacaaggctatttatgatattccagcaataaaagangatccaacaaagtggataccgattcttaggaggat

SEQ ID NO: 362772 - DNA, 342 bp, Zea mays
gtactactacgagctctgtaaggtagtagaaattttggggcagcaacagcaagcatgctcacatgatgcttgtgaattatggtcagcatggtttctgtgacagatgctaatcatgaaaactgggggtcgacctgattgattctcagacgccatcaattataggtttgtgttaagtaaactagtttttttaacaaggggcataaccccgccccccattaccaagatacgtaagcctaatcctggatcaattaggctttttttgagttcttgtggacctactccattaaaccgaatctggtcggcatggtatacctaattattaggcgcgagttcaaatgcaac

SEQ ID NO: 362773 - DNA, 119 bp, Zea mays
  unsure (1)..(119): unsure at all n locations
aanagattggtggatgtttgcactatgtatttttattggacattcatgtttgctctgctttttcatatggtagatgggtgatacatttgacaaggcaaattagacagatccacacaaca

SEQ ID NO: 362774 - DNA, 336 bp, Zea mays
  unsure (1)..(336): unsure at all n locations
tatttattcttcttcagttttttttaatttttatgattcctgttatttttttcttttttgtgtcatcacccgatgaatgtacatgatttaagtttcagccttgtctgaataacaatcaatatgttgatactcttcagatccatgttctgagggtgtttttgattgccttttctaactaaatttgattaattcgatttaaaaagttctatgtaagtagatagatgtctgtctctggtgatgatcanaatgcatactntcgttcttctgatgacgcgctttctcattgcgcactgcggaacaatcgagacctgaactgaagggacttatttagcgcgt

SEQ ID NO: 362775 - DNA, 273 bp, Zea mays
tgcgcacctccctccggttagtctgtctcggcgcggcgcactgtactgtagtacgtagctagtaaggatctgccgacagtttcgcttcacctacttctcggatttggactatgcagctgcccctcccacacggcgcagattccgtagagatatgcatgatatttttacatatatgggttcgctgcgatgtgttccctgcgtgagcaagtgagctggagataagggtgctgcaggacacgcacacaaaggagacgtcggcgctcacgcggcgcg

SEQ ID NO: 362776 - DNA, 303 bp, Zea mays
  unsure (1)..(303): unsure at all n locations
ggtcnctgaagatttgtcaatgcaaagagcaaaaaaaaaaagtacagaggcagcagattgtccatgtcggttgcacctgaagctgcagagatagacttctggcatgttcctggtatagctcagctcattcgctagtcaccacccagttttatttttctagttggcattacgctataaagtgactaacacgttgtaaacaaacggtacacacacaactagcatcctatcgtaccgtgaatttgcgatttggttactcagctggtgtttggtcaaaacgattccaatattgccatggaggtttag

SEQ ID NO: 362777 - DNA, 160 bp, Zea mays
  unsure (1)..(160): unsure at all n locations
gtagaccattcgcgcncctactccgatgcgtataagagggcgctgaagctgcagtcgtccactgatagggcagcaatgtcgccgaacgaggttacgctcacggagcttgaaccaagataagcatgcatgaacgccgacaagaatatacatatggccgaaa

SEQ ID NO: 362778 - DNA, 327 bp, Zea mays
acgagaccgatgaagatcctgatgagaccaatgaggagagttacacctctgatgcagtccaaatgatgcagggatctgggatagctgaagatgccaacgaagatgcctctactgaagatgatgatttcagtggcgacctaccaccagagtttgaaaatatcatgatattcagtggtgctgaaaccgagagtgacattgctcctccagtgctcgaggaaaacaaggatgctgttgtatctgcaacaaaaactgcaaagtccctggatgattctgccttaaaaacagggcaggctgaggagggtcctgaagaggttgacaacgttgtga

SEQ ID NO: 362779 - DNA, 248 bp, Zea mays
ctgcaaaatatttgaggaagttcagcaaaagggcaaagtgatggatgctagagacgatgtacccccatggggtcaacaattttttagatgccagaaccccccctcaaatcttagcaatggcggagttgagaaatgtcatctcctgcaatcattctctgcaattgaagatataggttttgatctagagatgcctcaaggagaggggttcctcgaaggcatgctgttggatggatggcttctgaatttgg

SEQ ID NO: 362780 - DNA, 186 bp, Zea mays
gctcgagatagaatctagctcggaatcgaatgcgcgtacgtgagatttagctcaagaatccacgcctgatatctcctcatcttcatcggccggagatgtcgtcttcgtcatccgcgctagccaaatgcaagtcggcaatcggatccgcagccggatctgccaaattcgaggccaaagggaaattct

SEQ ID NO: 362781 - DNA, 141 bp, Zea mays
gtcgttcagccgcagattagcaggccgcctacgctcctcctttcccctcagcctcccctcatctccggtgtacgtctccgccgagatgaccgcgccgctccagcgaaggtccactcccatggtcgcgcgcttctcacgccg

SEQ ID NO: 362782 - DNA, 342 bp, Zea mays
attcattgctgctcataaatctggcttcgtctgtccatatataaaatcgagagtttcttttatttattaatatgtactgtacctttgctcccacctaccttattattggttgcatcttagtctaatctggcaactaggtcactgaaacttgctacctgttcaaaatatcatttgatactactgggttaggaaataccagtagtgatttcattcatcctcccaccaggtgttgctgcagactccaaattcacttttacatgttcgaagcacagctatgtattgtagtcccctttaatgctcttgtagcaaggacatttttattttgatgaccacataagacac

SEQ ID NO: 362783 - DNA, 211 bp, Zea mays
atattgtgacccctgaatgatttgtcaatgtagacatgattgctggtctttgtaaactggcttatgttttgtcaaaatggttctaatgattcacatcaattaaggatacatcctgattggagcttgttgtttgttctagtaatgttgctttacggctctgtctgtgcaaccattgatgaaataaagttgccatcacaataatgaaataaaa

SEQ ID NO: 362784 - DNA, 333 bp, Zea mays
tcagttccgctcttcgtctttggggggcattgccgtgcgtcacccgagcccgtgcccggaatccttgtagaagcgtctggaggactcgcaccgacccacccggctgccagccatggctgagaatctggcgcccgagaagcgccactccttcgtgcacaacgggcagaaggtgttcgagtgggaccagacgctggaggaggtcaacatgtacatcgagctcccgaaggctgtgccaaccaagctatttcactgcaacatccaggctagccacgtcgaggtcggcatccgcggcaacccgccatacctcaaccatgacctacacacccagtgaag

SEQ ID NO: 362785 - DNA, 335 bp, Zea mays
gatatcctcaaagaccttattgagataagtaggttggaagttgcagccaggctgcaacaccagcaagaggaccaactccatatggtgtgggtcaggggactccaagacaggatttacatactatttttcgtccggcaagccagcttaataatgataacccatcggttatgcattctcaaggtttccgttcaacccatacccaaaatccaagtaatgcatcagatgcaggtcaagtgctgtgcacctcatgtggagcgctttgcatatcacgaattgctaatacagaggctaacagggggaggaggttctacaaatgtcaaatcctggctgtggct

SEQ ID NO: 362786 - DNA, 332 bp, Zea mays
tcactgtccagtaaggtattcagagactgctcctgtattctccctttaagtttcaaggtctgatgacaagttgtccctgaccaggccgagtagtcagaatatcttgatgctgaatttgatcttgtaaatgccatgtggtagctgtcgcagtgccagaccatgctgaagatgacaacaccatcaggggctgctctataggttcgggcacaacttcagactcgtcatctgttccctgactgaacatctcacggaaaagctcttccggattgtgagtactagagcagatgaaaatgaagtgagcagagtggaatatgtataaaatagattgcagc

SEQ ID NO: 362787 - DNA, 245 bp, Zea mays
cgtttatttcccgcttggctgttataggaaggatttgcaagaagctacttatgatataccgatgtggttgtactcgcggctgcttcattctttgaagcaaccactcttgatgttgacgtactattgctcattgtgggcgtattgcatttgcattgggcatcgttggccccattccctcctacatggcatcctgactcacatgtggattcagcatccgtgtgtttgtgtggtgttccggtgcgttc

SEQ ID NO: 362788 - DNA, 270 bp, Zea mays
  unsure (1)..(270): unsure at all n locations
tgttgtggatatacacctggaagagttggtggtagcattttaatnacgtatggaatgtctgggatgcctagctaggtagttgatgcgaacaggtgcatatgaccactattaattattttgatgtgttcatgcttcaagaaaacatgcactcgtaatcggtttccattagtttaacatgtcacatgcacagacgcaaacannanccagcatttcttcttagtttgccattatcacatctgtantcatcatgcacatgcacattttggttat

SEQ ID NO: 362789 - DNA, 192 bp, Zea mays
  unsure (1)..(192): unsure at all n locations
ggctcgcacggcacctggctgcgtctgtctcttctttgtgcggtgtgtagccattctcgtgctttcgttgtcccccctggtgtccactccagttttttgctgcgacactgccncgtgccgttcgtgtgttttgctggcggttccgtggcaccatcntcgcacactgccttgcccgctcgntatttcgggttg

SEQ ID NO: 362790 - DNA, 156 bp, Zea mays
  unsure (1)..(156): unsure at all n locations
ccttcttcgtttccgcggagggcgtcgtcgctgctcctttgcttccctccacacggtgtgccgccgttctgttgtcctncgtctgtggttcggttcgtcgttttattgcatctcgcccccacgcggtccctgttttcctcctctctgtttggtggt

SEQ ID NO: 362791 - DNA, 175 bp, Zea mays
gcagctagcctagcagagccttgaagcttcagcacagagggtatacccaggggccccacccactcaggagagaaggggaggagggatgggagaagactgtgggaggggcaatccggaatgggcagtgagcaggatgtaatgtgaataagtaaaaagaaaaaaaaaggggggccgc

SEQ ID NO: 362792 - DNA, 208 bp, Zea mays
cttactttggtttctgtgtcacaagatcagcctaacatgaacgacgaataccttggaaagaccaaactaggaagtcatatgcaacatacaccttcatacaaaccaattatttggaggtctcgtcttctactttgaaattgagttaggaataccagcctaggtatattagtaaatattactcagcagcaacttttgaaaagcggtttga

SEQ ID NO: 362793 - DNA, 204 bp, Zea mays
caaatacaagaaaagcctctgatgaatatcctgactcagaaagtgagtataaaagaaactgtccccagtttggagatgcactattcttgctaaatccagagttacctcttgaagttcatgtggacaacagtggttttgggattttaagagtttcaagagataattgtaaggaagatggaggtattggaggctctggctctgaaa

SEQ ID NO: 362794 - DNA, 200 bp, Zea mays
tgctcaagccgagcttctctccagcacacaccgctctgtctctggagaaaatatcccagccacgcctctgcttatcctcctggaatttttttttatctgctgcgtgagatttttgttccgtgttcttatctctctcttctcagtctcatccggtgatcggatttatcttacaagcgctcgttcttccatctgctggctcg

SEQ ID NO: 362795 - DNA, 304 bp, Zea mays
cctttgtgtatcaggctgccattcagccatatgacttgatctaaacaaccaccactgccatgatttcaatcgcaaaagctcatgccttaattttgatttataaaagcctgaataatatatccacggaccatggcataactcatgcttctggtttagattagaaataataatatcgcttatgcctgattggtgtaaattgatgagtgtttctaccatgcttccatttgttgtgaatggcactttccgcaactgtaggtcaatggaagagttattgcagcaagcttctttgacgtgaaaggagtac

SEQ ID NO: 362796 - DNA, 324 bp, Zea mays
agagcatgaggagatcaacatcaccttcactctgactactgcctggaatgccgatgactgtgctctccatggctactgtgagcaggttgtgttcacagcatgcataacgctcacagctgcccctggagtcttccctgtcaccgttcagccatctcactgtgtacccgacacatagagcaacgccacactctggtacaagatcttcacaactgccaagatgccaacacgcaatacgctcaagactacaacatcgtctggtgttacaagggcgccattgggaaagtctaccacgctttaaatcccaagctcaccgtcattgtccca

SEQ ID NO: 362797 - DNA, 318 bp, Zea mays
  unsure (1)..(318): unsure at all n locations
ccatgtttttgggagagagcagattgtcaaaaaaaacagccttttttttctagggctttgctatataggccgggggagtttgacttttacaaacctaatttttctttctccccttcgcccgtttgttgccctttaattcaccttgttttttccatgagaggatggtgtttttcaaacaccagcacctaccttcgccgtcctctcaaccttgacacactgctcccagaaaaaagcttcagttgtggagaaaatggcgccgtcttttnttttctcagctctgagggggactttgcaagctttgatttggaagtactgtag

SEQ ID NO: 362798 - DNA, 322 bp, Zea mays
atacaatgggatctattgagctataaaatgtgcatatatacagtggtcagcactgtctaggaacttctcttgaatccgtttataatatattgcgcatgctggggagttatatagactcttcaaggcgctgttaccctggctataaatttatataataaattgaaaaattcatcattcctctgtactcatgaccaaagcacataatgctaatgtaggctcagaggggaaatacagttctcctgcatatgtgaggaaatgtggagtcctgtcaagaaaatgtaataaacataatcatcgtagcctgctgacaccaaggaaaaag

SEQ ID NO: 362799 - DNA, 317 bp, Zea mays
gttgttggtaccttagatgtatgtataaggcatcctcgatatggggagaaatttcctgaggagcctggaaaaccgtctcttcactgtcgaatttatcagcctgatcagccaaaatttgggtatgtaaccaatgtatgtgttgctaaatatgcaaggcgtcaagggattgctagcaacatgttgttattggccatagatgctgcaaaacttacggtgctgaaaatatttacattcatgtgcataaagataacttaccagcatggaggctctatgatcagattggattcaagatcgttgatcaggatgacgcttgttca

SEQ ID NO: 362800 - DNA, 271 bp, Zea mays
gtaatgaaactggtttttatgctgaagcttataacagtgatatcttcaatggtactatcacagaaagtagtcttgcccagttgagtaatgtcattagtatgaaaaatgcttttgcaaactgttactcattatctgacctaaacacacttactggtggtactgcaactgatgatattgatatgcacaatattaggagttcttttgtcagctctaccagtcgcactgaaccaaatgagcactgcacgttggattttgatatcaagggttccat

SEQ ID NO: 362801 - DNA, 274 bp, Zea mays
atcgcaacaaatttcaccgatctgggtaaccaggagattctgctcatggctgcagagttcaagataagcatcaacgcttacttgtcgggcctactgtactctccagtccgctctctcgcacaagtcatagcgttcaacgaagcgcatcctgtagaggagaggctcaaagattttgggcagccggatctgatcgccgcggagaagaccaacggcatcggcacaagggagagagctgccatccggcggctgagggagatctccaccaatgggctgg

SEQ ID NO: 362802 - DNA, 256 bp, Zea mays
agggtcctgagtatcttaagtcgattttgtacacagtaggataatcaagtaattaatgctgtaggatacattggtatccagtttactgattggaatcacgtccttacaagcatcattagctcttacaacttgctgaagcaagctgccctacaaattttttccgctggatcagtagccttgaatatttgtccaggtttgcaggtgggctttgatgtccaataagctagctcgattgtgacagtagggtgctttatgt

SEQ ID NO: 362803 - DNA, 170 bp, Zea mays
gaattcgggtcgagatcaattgtttacgggggacaggatatttgctatgtatctctgtagcattggccatactgattatttgttacattgtgtgaatatatgcagctgtagagggcatcttctggtcagtttttatccatatcaatgcaatagtagagcatatgttgtct

SEQ ID NO: 362804 - DNA, 262 bp, Zea mays
gcagcacaatccaccagcgcactactgccacactgcacgacgcataggataggaggagcctgttactgactgtgagccaggaccacatgagagcttcttggagagccatggcggcggggcataccggccggaacagcaaacagcatgccgccgaccggttccgccgtgctttggctaacagtcgatcgctccatcatcatacatgcgctactatcgctgttgccaactttttctgtactgccggggcctctgctactgctag

SEQ ID NO: 362805 - DNA, 261 bp, Zea mays
gtgacaacgctttctgcagtgctgtggtcacagggtcccttcaaacagccctgtccagcatcttgacaggctgaggggctcggtgtacagatttctttctgtggatgccaagaaactgagcagagagccttcttaaaacccaccctaagggctaccaggtccatgtgcacatggtagggacccagcatatgctagcctgaccccttcgcccttatctatgtaggtacatgtggtagaggttggcttctcctgtctcaaaca

SEQ ID NO: 362806 - DNA, 314 bp, Zea mays
gaaccatacaatgagctatggtgaagtgatttatgtacatgatctcattcaggaggcactgaagggacagacacttgtcattgccaagtaagtcacatttaaattccctcaagccttgagaaataatgtgcgggacagtgcaactatagcacagtgatccctttggaccaggtcaactcctatgcctcctgggagcactgtagctgtgtgttcatctctatgcaaagagaagtatctagcgtcagctagatatgtcacagggtactatcctatataccagcgtacacctctatcaatacgtggtatgctgagac

SEQ ID NO: 362807 - DNA, 295 bp, Zea mays
ggagcggcgtcgtccctcgactgctggtagtgttcgtgttggaggagtcccggtcgcttcggcgccctctcccgcacctcgaagctccgaagcggcagatggctcaaacacaccctcgacgccggcggtggctccctcagcggagaagccgcgttcgctgcggttctccttcggcttgatgacgggcgctggggagacccccacctccaccaccacgccgaacgacgtcgacggaggcgagaagcggcggtctaggaagtcttcctttgggatgaagaaccctttcaacggggtc

SEQ ID NO: 362808 - DNA, 347 bp, Zea mays
cgagtgggaggtccgtttctatcctgattactggtacttcttcgaggacgatgactgcttcagcacttatggcgacgacgatcactccgagtgggtatgtctgaagctcatccttgtcagtgaaccccagaggaacctgagctggcggcttgtatgccccagcctcaccagccagcggcggcatcacggtatctgctggtccgaagagaagagggtgtcccatgtgtatgccagctactccagatgctcgcctgaacttcttctcattctgaagcacgagctaccatcgtcatggtatctcgtggacgattcactgaccgtggaatgcacggtcaacgtgctacgcg

SEQ ID NO: 362809 - DNA, 344 bp, Zea mays
accgagctcatcccaagattgcttttaaattctttggtcccttcacagtgctacaacatgttggatcagttgcttataagctggatgtaccttctacgactttggttcatctggtgtttcatgtgtctcagcttaaaccatttacgcccaagtatacaccagcttttttctgacatctctcagttggtcgacctgtctggccgggatgttcatcctgttcggttgctggatcgtcgtttagttcggcggggtcacaagcctgtggtacaagttcaggtggcctggtcagagctacagatgatgctactacggtggaagatattgatgtgtgaagactcggttcc

SEQ ID NO: 362810 - DNA, 214 bp, Zea mays
cttccctctttcacgaatgacctgatgcagcttgctatgggaaatctgactggtcgtgagcatctgttgtctatggaggcttagaactgaggctgagactatcgggccatgaaatcctggagatgattgctgcggtggtctgcactctggaatatgcgatacgcgctacgtcaccctacgaccagtttatatacagtcgcgacagcagaacttg

SEQ ID NO: 362811 - DNA, 227 bp, Zea mays
ctcgatgaagaacttccgtcagatcagccccgccgtccagaccacctcaagctcgtttacctcaccctatgcgtggcgctggcctcgtcggcggtcggcgcgtacctgcacgtcgtctggaacatcggcgcgatgctgacatgctcggctgcgtcggcacatcgcctggccttctcggtgccgtctactagacaggataagactggctgctgatgggagtgcctctg

SEQ ID NO: 362812 - DNA, 296 bp, Zea mays
  unsure (1)..(296): unsure at all n locations
ctcacctcagaccaaactccaatttaccctgatcttccatctaaatatggcatgcataatcgtttttaacaagtttgagtcaaggaatttaagagaaaccagtgtggattctatatgtactaactcatgttgtcagtgatgataattttggtgtctttctgttggattctgagcattgtgttgactgtagtaaagatgcatagttctgctgggctgttcggtagcacctccaggtgttngttatgctggtacttgcacactcatggccaggaattgcaatagagatcttgaaatgg

SEQ ID NO: 362813 - DNA, 271 bp, Zea mays
cgaggtctcgcgggaggaggtcgccgtcatcacccagtgcgcggcgctcggtgggaagttgccttttgaagatgcatcagttggtgcggttcttgcagtcattaaaaacgtggaaagcttgagggagcaattggttgctgatatcaggcgggtgctgaaagctggtggaagagtattggtgcagagccctgcaccctcatccagtcagaaggtattaacttatcagaatctgtcgttgttgtctcgtttctcttgcactgtcgatttaaag

SEQ ID NO: 362814 - DNA, 307 bp, Zea mays
attggagcgattctgacttatattctccatgagcattatgagttcttgtcatgcagctgtctggcatttgctcctcctgcatgtatgacatgggagctggcggagtcaggaaaggatttcatcacttctcttgtcaatagaaatgatgtggtaccagcattttcgaaagtttcttcggaagcctgcgatctgaggtgatggtttcatcaaagctggataatgtgcaggatcactttcaccatggtttattcgccactataagccagcgtgttgccttcatctaggtccatatgctctccatctctca

SEQ ID NO: 362815 - DNA, 236 bp, Zea mays
ggctggccttgctcctctccctgatcgttgcggccatgaactccgccggaacagcggcggcaactgcgagagccttttggcgggtactgctgctgcgccgtaggtacccgttgccagcactggtcaagcgcgtcagttttagtatggccgcactgggcttgatcggctccgtctggcattagttggaagatagtataaacagattggagatgcagatgcatactgttgtatgtggt

SEQ ID NO: 362816 - DNA, 127 bp, Zea mays
tatcgaaaacaaacttgcaattgcaccggttgacgatgaaagtggtagtgtagttttgttgctttcctggtggctgactattatccttaaggtcccgaatcttactaatggagtatgctattttctg

SEQ ID NO: 362817 - DNA, 305 bp, Zea mays
acaaattgcagctcagcgtgcagccaattctaaccttgataaactacatattacaaaaaagcagtgatcgacgtcctagaaaccctagctccggaagaagggtaggagctcgacctcctagaaatagaaccttcgtgtcatgagaacttcgaagaagggtcaagagaaaatcgaaggagcgaaaaccgactaggccacccttcgagagcgccccgacccagggaactaagcgaacgcgaagagttcactttccggttagttgagggtcataccgatggtgctcttttaagttatgcagttgctgc

SEQ ID NO: 362818 - DNA, 285 bp, Zea mays
ttgtgtgtttgtcctactgcctgctttgagcttggctagcttggtctcccctccacctgcatcggtgtagtacatccgagggcactccatctcttgcgtcccgtaacccctccaccaatgcaacccaatcccttaaccccgctccgtatccagacttcgaagcttccacttctcccggtctcggtcccggccccggctccggagccctgttcttggtactgatgacaaggactgatgggcgatcatctcgcgttgatcgttgacctgctgctgacagagtcgacg

SEQ ID NO: 362819 - DNA, 292 bp, Zea mays
ggtggaccatcttgtggccaaggggcgcgataacctcaagaagttctacaggaaggttgactccaacgtgctcaacaagataccaagaggccctgtcaagacaaaagctctctgatcaagatgtgtgctttgtcaatttgccggtgcacgccggtagtccccgtacataaagataaacagtaaccagtcaccagtccatctcaaatcagttcttatagtatcagattgtacgtgctaaactactactgcaatgatccaacatactttactgtatcagcagtagacaagccta

SEQ ID NO: 362820 - DNA, 287 bp, Zea mays
gtcgctcgctacgtcgctgacacaccacaccgctttgaggggggcttgcagctggagcatctctgttccgagttccttcctctttcctccaaggcaaggctcctccaacttgcgctccctgtttctctacagatccttctctcctcctctcgtccttcgtcgtcgtctcgtcgtcgcgtgatctcggcctcctgcgacctccatggctggcaaagctgctgcagacactggtaagtagtaggccgccaagaagactgatagagagaccatgcggatgcggcatgtcc

SEQ ID NO: 362821 - DNA, 245 bp, Zea mays
  unsure (1)..(245): unsure at all n locations
ctggatcgagggatgctacttctcacttgcgcacttgagggaccctggggagagatnncggctgggaagatggacgtatgaattctgggtaagaggaagtgagatctccgcttgcaggtcagcccagccttgcaggcgggctggctgactcaagcctgtgagatagagggccagccagccgcaccaagatccctgctctgttgtgatcgttgtgaacattggcgagactgtatttagtaatgctg

SEQ ID NO: 362822 - DNA, 162 bp, Zea mays
acataatcataatccaaaagattaagattgtgatgtggcatggcaccaattctgtcctgaatttgatcatgaatgtgtaagagatgagagtacacctgctgacatatataaaacagaagggtcccgatattgaccatgagtaggcatcatacaaagatgatg

SEQ ID NO: 362823 - DNA, 335 bp, Zea mays
tacatcgagtgtcatagtcatggaggaacatcatctcgaagttataagatgatgtatgagatgatcgcaagatgtatctgtagtgatatcgatatagattgctaatgcgactaagagataaggctcatagtcttgtcattacagagtactaaccagaggtcctacaacagtgtctcaaaagctcacagagcgcgtatattgaatgctgagagtatcgctgacaaatttgactggatcaataagttaaatgctggtattcctcgcagaggtggctctgttaagggtcccactgaagatggtcctatgagacaaagccgttcagatgggcacttgat

SEQ ID NO: 362824 - DNA, 223 bp, Zea mays
tgttagtagcatagttttggcttgtctcgtgtacactacacagtcggaaagagataccatggatcattatgtactatctgggatttattttaaatgttatttgagacatattgtacgcttatattgtaatattagaagaaggatataaaaagaatacagctacgaagtgtatattgtgtggctgctagttctatttccagtatccatcagtgtttagtttgta

SEQ ID NO: 362825 - DNA, 306 bp, Zea mays
atattctctgatttgtcttttgttggagggtaagattactcttcctaattttgattgatatgttaatttttgactgattatttggtccatccctaaggtagtcaataccatgctgtaaatcttggctttgattgttatttgcaaactaataaaccctctggccttgtctcacagtgctatttatgaagacatgatgcaagttgccagatgtgtaactatgaataaggctattggaatatctggggtcaatcttgaggatcacataggataggctagctttcctccagtgcaggcagtctcatcatt

SEQ ID NO: 362826 - DNA, 246 bp, Zea mays
taggagcagaatgataggtcataacttaaaggcattggtgataacactatttcggtcaatgatacgcacatggtaaactgaattcggcatagctactgtgcatataagcatatctgtgattaatgcttatatctggatggggatccctgttggaagccagtctttgcagtacaggttaagctccatttctcaatcacagttctgtcattttcatctgtgggagataatgaaatctgattcagattt

SEQ ID NO: 362827 - DNA, 303 bp, Zea mays
cacattatagtctggcaacagtacatgaattagagtctcgcaagctgtaccagaacagggtagctgctgtagactacaatgtagccctccagaatgatgtattattgtatacatatgatgggaatatggctagagcagtccagggccataggagatacgaaggattccagaagaccataaaccctgacaggcgcaacttgtcgagctcattgacagctatatgacgtaaatagattgacagagttgctatgaggtaatactgacatggtacagtcctgtagccgtatcagagctttcgtcgag

SEQ ID NO: 362828 - DNA, 186 bp, Zea mays
cgggtcgcagcggactaatcgtaggtaacatcttcccgtcgtctaggctgttgcagagtcttagcacggcgcgacgcaaggcgatagtgtcacgcgacgagttagcgcgcatctcgggcagatcaccgcgagccaaggaggcctggaccaggtatgacagtctcaacggacatgatcccgcctgtc

SEQ ID NO: 362829 - DNA, 254 bp, Zea mays
aaattcttgaaaatgtagtctgtgaaactactcatacctctcttccggcgaattttctcctaagaactaggtttggggtagaaatgaattgacattattttctcatttgctttgtatggtatgaaggatttgtaaagctttgctcaaagttgtgtgcatttgtaaacactatcatgatatgttcaatgttatgtgtaaattttattgtctgtttatggtgactctgacattaatggaagagaatattttccatt

SEQ ID NO: 362830 - DNA, 99 bp, Zea mays
ctccctactagtagtactcttcggtgcagtccgcatccccacatctgaccgactctcaaagttcacagctccaatcctggtgcaagcgcacagtagcgg

SEQ ID NO: 362831 - DNA, 239 bp, Zea mays
ttgtgcgatgagaatacaggagacctcgagcgtagcgctatcgtggaaatcgtggcatgcatcgtatggatggatgagttgttgttggctggcaatggcatccagaagtgaagtctgatggggggagctccaaactcagcgttgtaatcagggcgatcggcacaaagttactagtatttgagcagaggtgtatgtatgtcttgatgttgcttataactgctatagatgtgtagatccat

SEQ ID NO: 362832 - DNA, 103 bp, Zea mays
acccgaccctcttcaaataaagaatgcactggagatgaaatcgggcttaactgcttttgatggtgctcctgtttttcagtcagatctgccggttgtgaagaag

SEQ ID NO: 362833 - DNA, 248 bp, Zea mays
tttcaactccctgatcactatcgcatacacccagtggttcatgtctcacaattgaagcttgttgcaggttttaaaggaacagcttccccaacgcttccgatgtcacttccagagcgcgtgtgccaattcgtgtgctacaaactcgtggcctgtccaagagcaaccgtcttgtgcagcaagtcctggtggaatggtcttgggctccactttaacttgcaacatgggttaaccaggaggcgcttcgtcag

SEQ ID NO: 362834 - DNA, 261 bp, Zea mays
tttgaggataagaagataggtgatgagttcttttcgtttattgttgactataaagatctgaaggcatgtactattctattgaggggagcaagttgaaaattggtgcccactaatagtctggtgagtgtcttaattatatcaatgtcttctaggtgcccactgatgtatcatgaatgtcattatagcaatcttggctatagttaactttgatctttgcacacatagtatttccatcaacaaactggtaagtgtttgggtgta

SEQ ID NO: 362835 - DNA, 259 bp, Zea mays
caggtgcaaaactcagaaagaatctgcagttcaccctggtgtgctatagcttgcttttgctggttcatattgttggactcgtttgttgcagggattagtgcaccaaattaagttttgtggccatgtttcagtcgtcgggttgaaaaagggaactataccatgtcgtgcgtatggttgtggaaaacactattttgcagctgcaatggttagagatttgaaatatgagggccaatatgagatgagcctcatgctgttgtgc

SEQ ID NO: 362836 - DNA, 116 bp, Zea mays
caagtcaatgccatcagcggtcgtgatcacattatgtctagctagtgccagctgttagatcagcatgtaatgtatgtacagtgttttcttctctagtagcgtagctctctgcaagg

SEQ ID NO: 362837 - DNA, 234 bp, Zea mays
taaactatcaatcattgaggaagctaggaaaaggattgccgcccaacaagcaactgctgcttaaatctttaggaaatgaatagactttgagtgtttggtagttttatttaatggttttggtttctaatttattttgtcttgaaattttatccactgaatttcgtctcttaaatgctctatagaactttttattgcggcttctatgttcatgaaggaatctttccatttcctagt

SEQ ID NO: 362838 - DNA, 258 bp, Zea mays
aaaatatgtcatccttgagattgttgatctttggtgatggagaagtcgaaccaaatgaagagcaggtcttgcaaataacccttgagatttgcaaggaggacgtcatttccctgatcatccaggatctgccttccttgggctggggagtaagaaaagatctggttatctgctggtgcatcttgcttaggcagaagacccgacctacagcattatatacttcttttagtgtgtcagcatggatttttttattgtctatac

SEQ ID NO: 362839 - DNA, 255 bp, Zea mays
gtctgatatacacgctgaattgaataatacaagttattgtcaggcatggataaatgcagcctcctagaatggggtgattcaatgtcctggaatgatggcagaaccaggttaaagcttgaactcattgcagaatagcttttgtagctataatagaatggacgagtttcctcgcatcaactcggtcatattgttatttacacgtaggaagttcctggccatctttgttgtaccaaagctgtatttttttgtttgttt

SEQ ID NO: 362840 - DNA, 228 bp, Zea mays
cagagttcctgcggccagtgctccagctccgagctccattccaagatacacatggatatgtcgacaaacccatgagctttgtctgacttcttcctccttagctggaagcttgcagtctcctcaacgactccagggtggtcccccgccgtgctgaaatttgtcgaaatactccttcacctggacaacagcagttccctgaaggtgctccctgaggaagatgggctctct

SEQ ID NO: 362841 - DNA, 243 bp, Zea mays
tgcaaggcacttggttggagggcagaatgtgaggctttcatggggtcgcagcccttcaaacaaacaagttcagcctcaacaggactccaaccagtgggccggggctaatgctggatattatggctacggtcaaggctatgaggctatgggtaccccagtctcagacctaatatgattttatgagtggactatgtggctatcaattacacacaacatacaacaacgcgcagacatgaagtcatg

SEQ ID NO: 362842 - DNA, 330 bp, Zea mays
ctttaaataaaccggcgtctcctgccctggcggggacgccgctgctgacagggcacctgatcgattgatttcctcgggcagtcagcggcgctcaagagtcacgagcttactggttgtaagcaacgatcgaagacctactccagaagaagcagcagcagcagcagggggaggaagaagttcctgagctatttccagtgctgtaccagagcgtgaagaaactcccaagacttgttcttcctctgctgcgctgcgcaggtagctgcatgtttaggtttccttctgtaatgtatgtaaagcatgtctgcgtagttaaagtgtgtgatcctgtca

SEQ ID NO: 362843 - DNA, 313 bp, Zea mays
cgcgaaacgggatgcactatgagctaagcggactatagctgctgtgttcatgtacatatgactgccgaagttgatgcctttggttggacagaaggcaccggtttccatttattccatcggtaggatcactcgtcgttcttaagagtgatgccgctgttgatacccccttttcgagtatatgggaagtgataccgatacacgtaggtgggagcgagggcacctgtgcaactgtgatagatgatagcagggcgtgtgtgtgtgatgtgtgtgtacattatgtaactgctgggaatcaaatgtttcattggacatc

SEQ ID NO: 362844 - DNA, 326 bp, Zea mays
acatcgcacaatgtggggccctttcagaaagattgtgataatggatgctaggggatatttacatatcattaaagtttggggtgacctactaaacaaaaatgcactccgctgggcgttggctaaggaggattatggcataataattgggactatgtttagacggttcagaagacaagagtgcctcgagtcttcggatcataccgcaatacacttcaatccgttccatcacaacacccatcattttcgaccaatccaaaaagctttggtggcgctgaacaaccgtcagtttgctgttacatttcttgaagaagaaaggcgtagataga

SEQ ID NO: 362845 - DNA, 269 bp, Zea mays
catttgtcgtagcagctttattgggcatatcaagatatgcaggttgtaacaccttttttggtttcagaatttgtaatttgcttaaaacttatctagatgcagttacagagcttcgtaatcgctgggtgccaaaattttagcttccaaatacatatgactgtgcgataggctatatcatgttcttatgctgttatgcattcatgctgctgcattttacttttttctacaagtactttattgtctcatgataagaaagaaacagtggttga

SEQ ID NO: 362846 - DNA, 236 bp, Zea mays
cggctcgagctaaagcaagagtatgctggtgctggcgccatcttaagacctgtatctactgggacgcaggttgtaatcaggagagctcgcagtgtagcacaggcagcatggacaagaccagcactgcaactgtcctcatggacttgtattgggccaagacggcgaaataatatatctacctcagctgtcacatcagaggaaatactagcatctacaggcggtggatctgaatccat

SEQ ID NO: 362847 - DNA, 264 bp, Zea mays
atctgttgtggtcatcataatagttagtgttcttgcgtcagtccttctcaccattgccttgttcgggggctacaagtactggcagaagaagaagcgggagcaagaccaggcgcgattcctcaagctctttgaagagggagatgaccttgaagatgaactgggccttaccaatgaactctaaaacagtgctacagtcttacttcctatgttttcagatgtagtttccacgtatgatgtataggatgtttggttttcactgatttt

SEQ ID NO: 362848 - DNA, 282 bp, Zea mays
cttcaccaccgacctttctttttcatcttaccgtatttcttatcgcgttctcacttgactctcatcatgtcggaacctatcagaaataaaaaggctgatttcccagtcgctccaactcctcagaatacacctgctaccaatgctccgatttcttctcatgctcagcagcctggtgtagccagcatctcagaggaaaatcttgatgctgccgctgccgcaagcttgttcgcaaagaacccggctctggtctcaatgatccaaggccgtctgggttctctgatc

SEQ ID NO: 362849 - DNA, 281 bp, Zea mays
cgcgcgaggcccgactgttactcgtcacgtcgaggtattcccttccctgactaagcgaccgacccaccctccccacacgtgcagcccctggtctcttgatataatgccaaagatgtggggacttgtttttaacattgtcaaagatgtatttgattttatatgtagtaccattgccaaagacatggggacttaatattcaattgaaatatgaactttattataacattatgatctcatcacgagttgtgttaacttttgtgcatttgatttgatatatgtag

SEQ ID NO: 362850 - DNA, 284 bp, Zea mays
gttcagggaccgcctctaccgcgtcctccacatattctacggcaacagctcgctggtgatggccgtcgaggcaccttcgccggcgacggcgggtgccgcgtgcccgacttcaacgtgtcggccagcctcgcgctcctgcccgtcgacatcagcgccgccaacaggaacctcaccttcgtctacggctgcgacgtccctccgcggctacggctgcagccggcgtgcgacaacactactatgggggcgtacactccgacgacgacgactccgagccgctcggttcg

SEQ ID NO: 362851 - DNA, 274 bp, Zea mays
cgcgaaaaacagcatttgaggctgctaaaaaggaagcggcagaaaagcaggctgctaaattgagagatgcagcagcaacttcccaatctagtccagatttgcagaataatattgcaggaattcagcaaatatgaccgacaaattgccaaatccataagtaaacttatgccaactactgatagtgtcagagcaagggctagtgagcttattaaagctttagatggacaggattgtccccgtccaatctcttgttgtctatttgcaaacaagatta

SEQ ID NO: 362852 - DNA, 271 bp, Zea mays
gctagacttctgcaacttattttctttttctcatggcctggaaatttctgtcttggaccgatggttgacgttggcctaaaccggccagcgttagtggttgtgccagacaccgagccagttatcatgcatacagtgtattatgcaaagaatgctggtttgatcggcagcggcagccatgggctgtttgttcctataactgataaacgctctctctcgacttaaaacagaatgaaaaagtcgtcttgaatgcaagtacggagcagatcaagat

SEQ ID NO: 362853 - DNA, 200 bp, Zea mays
gccaagtgatagatggctcaagcgcctgcagctcggcgtaccagaccctgacgtccttggttccaagaccaagaggccaaaagtcggagacagtcctccgccacccaggcaaataaaccggtcctttgacgtggcactcccttgcaacccaggaaaacaggaggagcagagcttgaatggaggggggaaagtgcagggaa

SEQ ID NO: 362854 - DNA, 181 bp, Zea mays
ggcagtataaccattttgcccagtagaggtgaatggggatcatgtttctgtctatgtgcatgagtggctactaaccttgactggactcataacagatttaacacatttaggccatcatttgtcagtattcatcttagtccgatgcaatccggtataacgatgtgatgtgcaatcacgatgc

SEQ ID NO: 362855 - DNA, 147 bp, Zea mays
  unsure (1)..(147): unsure at all n locations
attctacgtcgccgcggtctcgcggacacgcagccgtcctagccgccctgtanccgcactatccgtctcgagctccacgaggcccttgtacatcttttccgtcgccggctcgtgcggtccgacgcctgcaaccggttcctcctctcg

SEQ ID NO: 362856 - DNA, 316 bp, Zea mays
tgttagactttggctcaacataaggaggcagcatggttagtgccctgtccaggtctccttgtcctttttgcactggatatctgtcatggtcgggcgcacgtatgtgaggcgacatcgtgcccgtgacgtgcgccgcgccctagagcaagcagcggccaggcaggacagctaagggataggataggatagcctgctgttatccagttccttagattgtggagtgctgttattcagttccttagattagggagttccttagattatggagtttgttgctcctttcggttgggcctctggccatataaaactgtaaccg

SEQ ID NO: 362857 - DNA, 108 bp, Zea mays
tgatcgacgagatcaaggctgcgctggaggaccggtgcccggtgactgtgtcgtgcgcggacatcgtggtgtacgcggcccgggacgcgtcgagcactgctgagcaac

SEQ ID NO: 362858 - DNA, 285 bp, Zea mays
  unsure (1)..(285): unsure at all n locations
ctcggaaccggaagcagaagtcgctgcagaacctgttcgggaccaactcgcagcgggcgaagaaggaagccgggaggaggtggtccaactttgggttcagaagctgaggaagctgcactgttggtcgacgtcaccgtcgtcaccgggcggtggtggcctttgtaacataaaggagggacgggaaaggggaaaaacacgtgtaaagatgttgttgtaggttattattattaggaatgtgatggtggtgttggtttgctgttanaaaaaaaaaaaaaaaagggcggc

SEQ ID NO: 362859 - DNA, 272 bp, Zea mays
ctcaagagccgatcagaccatttgtaccgacccccgagaggcgaccaggcagtccggaagcgcgtccgtccgttggtgctgctggtgccttgtggtcgagcgatgtcgaacgccgccgacgtggaggcgggcgcccaggcgagggcggcgccggcgacgacggggatcaagccgcccccggggcggtacaacaacatgaccagcaacgggccgtacacgccaccgtcgccgttctactacgaccccgcggcggcgcacgggtcggcacactg

SEQ ID NO: 362860 - DNA, 328 bp, Zea mays
gctcaggctgcacgactacccgagctgatcgaagaatctccaggatccgagcacattgaccaggctatcaaggacgccatggtttctttcaaacatgagaagtctgaccccgtggttgcctacgtcagtaaaatggtttctattcctgagagtgaacttcccgagaacaagagacgtgccggaacccagatgagtggcgaagaggctcgagagctcgcacgcaagaagcgagctgaagccgctcgagcccaggctgcggctggcgagaacggtattgacagcatggcggactcgatggatgccatcaaccttgatgattacgcccctg

SEQ ID NO: 362861 - DNA, 330 bp, Zea mays
ggagaaagagctacagaagaagaggcaaagggatcagaagaaaatccaggatcaactcaaagctgagcaggaagcgctctatggatcaaaaccaagtccttctaagcctcaaagcacgaagaaggcgcctaggcactccatgggtggtgcgaaccgaagactgtctcttggtggagccactatgcaagcccccaaaacagatatactgcactccaagacagctcgtgccgccaagaaggctgaagatttgggcgctttatctcctagtagtagaggcttggacattgccggtcttcccatcaagaagttatctttcaacgcaagcacttt

SEQ ID NO: 362862 - DNA, 330 bp, Zea mays
gtgaatactagattatccaaataaggccttagcgggaatgcaagcggtgccgaccaacacctctttgcccgccccgcaagaaagacctattgggcaatgcagccagccatcatagctattgcggtttggagcaggctgacctgcaaagcccagtgggtgatcagtggtgtcatgaaacaccagtcatacctgcaactgcaaggcccacttcaagtctgcgctagatcgctatgctgatagaggacaagcgatgcgacctggcacctgctggctggtcgtatttggtatggacgtcgtccttcacggtgaactcgtcgagccataacttga

SEQ ID NO: 362863 - DNA, 225 bp, Zea mays
  unsure (1)..(225): unsure at all n locations
tattttatattttttttctttcttttttttttgaacagataaaagtatttattcatacagagatcgaataatacaaaacgattanaacaaacagatcgaaaatcaatgcaagcaagggaagccaaatctgatcagacaagagctacgtgtacagaccagtacaaacgatacaaaccaaataaatctgaatccaaacgatccactacactcttcagcgacgagcgc

SEQ ID NO: 362864 - DNA, 193 bp, Zea mays
  unsure (1)..(193): unsure at all n locations
tgcagatctctaccagtgtagagatgggcagcccgtgctggtactgcccgtcttgcctttgccgagnttgtctgtgtgacaaagacgacgacctgagcattctgtgcgatagttgcgacgaggcttaccatatctactgcataacaccctcgcatacttcaataccccaagggcagtggtattgctcatcgtg

SEQ ID NO: 362865 - DNA, 342 bp, Zea mays
cacacatattggtctggctggccatggtggggctggggtttccgaggagcaaggaggcggcccgtagccacgcggtgtcgttcctcctcggcgcggcgctgcccactgccctcctcttcttcctcgcgtccgaccgcctcggcgacggcttgtccaccatctcgcacagctgggggaacgggccggcgggcgacgacgaagcaaaccagcatgccatgttcaagggcctagccgagctgctgccgagagttgccatggacgacaggacggtgatcatcacgtcggtgaacgaggcgtgggcgcggctcggctccctgctggacctctacctcgacagcttca

SEQ ID NO: 362866 - DNA, 333 bp, Zea mays
ctacttatctttcatcacgtcttaactcgtgacttccttactcatatacctcatcacctctacctcgcgtccacctcagcaccacgcgacatcttaccttccttgcgctaccggacctttctgcttcactgcagagaatattgatcgggtcttatactgtttgtcttgcatgatgagcagtgtagtgactctcgacatatataaaggtttctcaaagctcactggttcagactcacctttctagacaggcactcataactctttcctcactccctcttcccacacccatcgctcgaaagccaccatccaacaagcattcgattatccgccgaa

SEQ ID NO: 362867 - DNA, 199 bp, Zea mays
cgattggaagaggctgctgtatcatgccgatggggtgaaagagttgaattgttgaaacgttggttacgagcattgcaagatgttgatgctgaaaatggaagttcagatttaaaggtgtctgaagctaatgacgcttctggtgaaatggacactttgaaagcacaaactgctttgttctatgatgctgatattgatggtg

SEQ ID NO: 362868 - DNA, 314 bp, Zea mays
tgcagcgtgctgcgtgctgcgtcttcaccaggctcccggtcgccaccgcgcctctcgtgcgcgcggcggtccggcgtcgatgctaagcccttcccgctccatcgcttccgcctctctcgtgtaattctgacatggaccaacctctccatctcgtgcacgtcatatgttctcgccgcggaccttctctccttaaccgtacggcacacctctccgacgacgttcctccgctgcggccgtaaggttgcgcgtgcggactcgtcggagtcgtcgtctcgcgtgaccgcaggagaggttcctccgcttcctggtcgacg

SEQ ID NO: 362869 - DNA, 177 bp, Zea mays
  unsure (1)..(177): unsure at all n locations
cgccactagagaagctgctattgcaaggatgccatcaatgattgaanaacaagcagttgcagctgttgatgaagcatccgtcatactattcgttgtggatggtcaggctggtcttgtggcagctgatatagagatttctgattggttacgacgcaactactctgacaagtgtattct

SEQ ID NO: 362870 - DNA, 328 bp, Zea mays
gagactttcaggccacacaatcctcctgccagttcacgcatggtatcgaggcgcagatggcgatggtgacaagcataattgtgcaaagatggcaacacggataggtatatagcgagcggtggtgtttcacgtaggcagtaggcacggcagtttcacaccagtagtcagtagatatttgttcttgtctcagatgagccacatctgaacgggagcgttgaaatcggtgcactaatccacgggagttggcaaccctcagcctctggatttgaagttccggttgtcattcaacggtgcctgccccctggtgggactaaaaggcccgatgatg

SEQ ID NO: 362871 - DNA, 330 bp, Zea mays
gctgtttgctcttgcgagtgctcaatccagttactggttctcaactccgctccacattacttcagcggatgtagctgatttcaggggttgttatcttaatacctgcctctacgtttcccagagccctcgcaatcctgtcgacagcaagctttttggatatccccaaccacatcctgtctgggcggtacttacaatgactctttggttctatttttgagctctcctgaacgtccattggaaagttccaacaccttgtacatctctcccgttcacacttcgcacttcacggaaagtagcttcgatcctactccctatgttagagccgatcct

SEQ ID NO: 362872 - DNA, 151 bp, Zea mays
tcaacgccaagtcacactccacctccgcaaccaaacgcgctagggtttccgcaccgcacctctagtcgtccagccaccccacccgactaccggcgatggccacgcggcggcacacggcggtagcgacaagccggcgctccggaagcacgtc

SEQ ID NO: 362873 - DNA, 207 bp, Zea mays
gaaccggattgttcgaaacgccgatatgccagtagcagcggttcttcattgccgacatgtcttccatgcggattgcttggaggagggcactcccaagacagaagtccatgaaccaccctgtccgctgtgcacggcacccactgacgacgaagcacatgtgtcattctcggaacctctgcatgttgccctccgatctgcacgcaggaa

SEQ ID NO: 362874 - DNA, 150 bp, Zea mays
agctggacgctgagaatgtggtaagtagtgtcatggaagtattgcttaatgacaagtttaagcaatggttgtcatccaaatgtgaacagaatattgatggagaccatttgcttcctaagcaataccgcaatattatacatacggttgcag

SEQ ID NO: 362875 - DNA, 192 bp, Zea mays
  unsure (1)..(192): unsure at all n locations
tgggacaagcatggacgtgttgcacaatcaaacgccgcggacnccggacgaacgaaccattgatcgcaagctcctcatccatgactttcaagtgatcattctggctggaggtgttggcagaaatatgcgtcctatcaccagtgatacaatgccaaaatctcttctccctgtggctaacagaatcttgttgtc

SEQ ID NO: 362876 - DNA, 187 bp, Zea mays
  unsure (1)..(187): unsure at all n locations
actgccctcncactgctgcgggcgcctcacatcgtgcgctcgctcatggccttccccaccgatccggcagcggtcgaagagaaggtggaagcggaggacgaagccctccccgcggccgtcgccggcgccggggatcggggcgatgtgagccacgaggagtggcggcgctggggcacctcctcgccgc

SEQ ID NO: 362877 - DNA, 177 bp, Zea mays
ctcgcaccgacgaggtcaggtcagagacttcgagtactactagtcatggcccgcatctagaaggcagcaagatatgtgggcggatggggcgcgcgttcgtgtacgtgatcctgggcggcggcgtggccgccggctacgcgcgctcgagttcgcccgccgcggtgggtactcccgcgg

SEQ ID NO: 362878 - DNA, 178 bp, Zea mays
  unsure (1)..(178): unsure at all n locations
actctcncaaccttcaatttccatagagttgcatactgttgattgctccattgccattttcttttgcatcgcgacaaccccgactttgaccaccatgcttttcaagcagctcgcccttgcggcggcggccacggcctttgcgatcgttcccgagatatccgagccagacgagaacatc

SEQ ID NO: 362879 - DNA, 232 bp, Zea mays
  unsure (1)..(232): unsure at all n locations
tggcatccacttcagggtanagtcccctccacgagcggcggtgtccagggctccaggcagaaggtcgtgccggcgagttccgccgaggcgctaactccctcagtccctcctctccgcggaaggagccacaccatcgagcgtagaaggtggagttgacgtcgaggaagagcgatacaagagctcggatgatgggcacaacaacagcttgagcatggaggttgagcagcgtcga

SEQ ID NO: 362880 - DNA, 193 bp, Zea mays
cggctcgaggctgggttctcggccgcgctcaacagcggctacgagtcctggggcccgtcttcggtaaggagtcttcgccatgtgggtgatcatgcacctgtaccgttcctcaaggttcatgggccgcagatacgacgcgacatcggggctctggtcgtctctcgctcgctttcctctgtggcaaatgccatcg

SEQ ID NO: 362881 - DNA, 151 bp, Zea mays
gagaaaggcagacttggggagagagaggaatcgagagaccacacgccggcgccacgtagcttgatctaggcgatggaggtggcgcttgtggagcggttggaggcggcggtggcgcggctcgaagccgccgtggcctccggcgcctcgctcg

SEQ ID NO: 362882 - DNA, 217 bp, Zea mays
cgcatcgagagccaggccagccagccacctctgctaggtctccatggccgccgcgctcaggtctccggcctcggccaaggtctcgagccccgccgccgcctccaaggtgcgccaggcgtccagagtcgcggtgggcgggatccggcagcatccgcggagccgtgtcggccccgtggccgtgcgggcgtcgctgttctcgcccaagcccgcggcggcc

SEQ ID NO: 362883 - DNA, 206 bp, Zea mays
gttcttttctgtcctattttgtttggttttacccacactggtttcggttccctgcttttcctctgttcctgttttcaatcccactcgattatgcccaacttagtttgaattcacagttattttcaatatggtaaggacatgtttgctacttatatattagatcgcagccacattttcatccacatgctctcacttcgagattttga

SEQ ID NO: 362884 - DNA, 154 bp, Zea mays
cgtcgccatgtctaatgatatagatgtacctgttgtcaatgtgctttgcatgtcactatcattgtaggcgttttgaatgtgtaggcatactcgctagcattataaattgcatacaactacaccatttatgaactaaatggtactcaacaacatg

SEQ ID NO: 362885 - DNA, 126 bp, Zea mays
ctcctccatccaactcggcaactcctccatccaactcggcaactcctccaggcagcccggtgggtgggtcatctcttctccccacgtccacggcgatggcgctcgctcctccgcactgctgaccca

SEQ ID NO: 362886 - DNA, 147 bp, Zea mays
gctacattaatggcatgataagcctggaccaatctttgtctcatgctgtttatctgtagttctgtacatttactgtatgctcgccttttggtacaatgttttcagactattgctatcccctaatgattccacattcagtttggatgc

SEQ ID NO: 362887 - DNA, 141 bp, Zea mays
cagcagcggtgcgggatcagctggcagatgcagtcgctggaacgcaggctggcgcagatggaggagcgccagacgaacatcgtggcctccctgcgcgacatcctgctgccggtcggacacggggtcgtttcgtgggggtcg

SEQ ID NO: 362888 - DNA, 129 bp, Zea mays
tcctgttcctgcgcggcgacggcacgctcgcgccggtggccatcgagatgagcctccccgagctccgggacggcatcacggccgccaagagcacggtgtacacgccggcgccgcgacggccggcgcgga

SEQ ID NO: 362889 - DNA, 137 bp, Zea mays
aggatcaaggcaaacgcacgcgaggtcgaagcgctgctgagaggcatcatcaccaagcgggagaccgccatgaagaacggccatgccgacgacagcgacctgctcggcaagctaatgcagtccaacgttgaagaggc

SEQ ID NO: 362890 - DNA, 213 bp, Zea mays
aagaaacagagactggtcgatgagttcgctatcgagaacgcccaagttgttcaacgacgacgtgccaacgaggagaggtctaggcaactcaacccagaacataacaagggtgcaaaggctgaagctcagcccaagacaaatgctcagcataccagggatgacaagaagcgcggacgcacaggcgataagggtgatgaggctcataagggtggt

SEQ ID NO: 362891 - DNA, 218 bp, Zea mays
cagagaatgaagaacagggatggatgcgagccaggaatgcccattgagagagcctcctcgttgctagtcgaacctggtgcagataatgacttgtttgatatgtttggttctgaatttcatcagtcctcccacaacgttggtgctgatttggtcacctggagtggtacagagtctcagaactcagatagagatgtccctgaatcgtcaatatatttcaa

SEQ ID NO: 362892 - DNA, 217 bp, Zea mays
agccgacggccattggagggtggtgccgttgcctaccggtgctggcaacggggaggtggtgcaggagcaagacgacgtggacaagtacttcagcctcacgttcgctggcttcgtcatcgacggcgacgtgacggctgtcgactggcatccggacgtttttcacgtctcgactggcgttccggccgcgcacggtgaaggcatcagaagggtgtttgtt

SEQ ID NO: 362893 - DNA, 214 bp, Zea mays
ggttgctgagattacgcgttttgccgagcaagaggagttggtccggtcgctggaggcttagctggcacagaagagccgccattggaggagcgtcatcgcggggtccctcctaggttacacggctttccttgtctactccagtttccatcatgcttggtctccctaagaactgatttggacaccttcagccatcaatctttatgcagagctaaga

SEQ ID NO: 362894 - DNA, 297 bp, Zea mays
  unsure (1)..(297): unsure at all n locations
tcggattcggctcagcaatcctcagatccgcccctcctccacccttgcgccacgctttcacagctctcncgcctccggatccagatccgccgccaccaacgcctgctcctcgccctccggctgcaccaccaccatcaagaggtccagcagggcggcggcggcggcggcggcgacatggggcgtgacggcggtggcggtgtcgccggcggcatgtctgactcggtgctccggaaggtgctcctctcctacttctacgtgggcgtgtggatcttctctccttctcgtcacgtctacaca

SEQ ID NO: 362895 - DNA, 277 bp, Zea mays
  unsure (1)..(277): unsure at all n locations
tatatatccaccgatcatgatgaagggtggcagcaagaaggaagtggccggtgcggcggcggtggtggccatactgctggttctgcagctgatggcagctccaccgacggccatggccgcccgctcgccgcgcggaccgtgccggatggctccctcgcacgacgccanggtgacgatgctgtcagcacgctgtgctaacgaggaacatcaatacatactgctcatctgctgtctgtactatgagtcgcgtgtaatcaatatctgtgtgctagcatct

SEQ ID NO: 362896 - DNA, 237 bp, Zea mays
cggctcgagggaaactacggattatctcatgttgccacctgacagagaactgtcggctaatgattacatggaactagacgtctccttgctccgaccaagctcccatgatttctgctcagacacatatatgagacctctgtcagacatggaatagatcgcagtctcggcacatgcaattcgtgttcccatatgaccgaaggtcacatatgacacagagtctccagtgtcatgcaggcg

SEQ ID NO: 362897 - DNA, 335 bp, Zea mays
cggccggccgcacacacctcgcccgtttcttcccggccgtggcatgcacgccttgacatagacgcccctctcgttccttcttctccacactaccagtcaccagacccggtacataccccaggccgcccgcggctaagacataaagcagcgcacacttgcgccgccgatcgaggcatatcgtacagggcgaccgagggagcaaactgacccgtctatggtgttgagggcttgcgcaatggagggcactttcggcgtgccgtattacgagtggctcaagccgcggtcctcctcttcgacgccgccggcatcgccgtcgtcctcgtctacgtcctcga

SEQ ID NO: 362898 - DNA, 309 bp, Zea mays
gagaaattgattccaactggtaccttttttattttactgaactgttctgaagttatcatgaaaattttgttttttatactatgtaagtatgtatggtcttgtctaatggcagcagcccatcagttctagaagaaaaatgttcaaagaatgaacatgatgcagtcccagttggtttgtgtgggaagggaccacaaaatccccaagcagagcattcagaggatatttcagtgtctgcatctgaaccgtcgaacggacctggtgttgtggactctgaggacaaggatgaagcagatgaggagtctgacgatg

SEQ ID NO: 362899 - DNA, 357 bp, Zea mays
ctcggacgagctctacggcgacgtgcagaagaattgcgacttcagcttggtggagctgtccccggagtgcagcgaggacgtggaccagtacaccgcgctctacagggtcatcgacatctacagcctgtacaccgaccggtgcgagctcgggtacccggatttcaactactcggtgtcgccgaaaaccgcgcgcggcgccagtcgtcgtcgcggacgcctggactcttctcgaggtgccgatggggtacgacccgtgcacgcagacgtacgcgactgagtacttcaaccgcgtagacgtgcagaaggcgctgcacgcgaatgtcactggcgtgccttaaccctactcgctttgccgta

SEQ ID NO: 362900 - DNA, 348 bp, Zea mays
  unsure (1)..(348): unsure at all n locations
cgntcacactgccttctcttctcagcccccacgtcgcgtcttacaagatgcatcgcagcctccgattccccgagaggcggcacgtcggcacggcacgctcttctcctagcgcgggtggtgtgggtaaccgcggcgcgagaagctgctcgatcttgcagctcgtgccgggcgccgggggtgtgcggtgcgggtgctgcggacatgagctgcctgtgctggttcaagcggaggtccaggaaagggcgatcgtcgtcgtcggggaagcgaggtgcgtcgtcgacggcgacggtgtcggtgtcgggccccgctaccgcgaccgcgaccacgaccacgacggcgtctgcggag

SEQ ID NO: 362901 - DNA, 259 bp, Zea mays
  unsure (1)..(259): unsure at all n locations
aagatgtccatggactttgcacgtgccgctctggctgagcgccgcccttccttcttcctctcactggcanccactacttcatcttcctacccacagcccgacagacggccttcagtcaccgagagccccagttagacccgacggtgcctcatcagctcncanacanggcttcgagttctgaagctcagccncgtctactacggcgagcacattggnccagacaaggacgacttttatgacgntcgcgctgctccggaga

SEQ ID NO: 362902 - DNA, 302 bp, Zea mays
gattcctggaattgcgtgccattctggagacagggcaaacacctacaatggacgtgacagctatattgagtgatgcgaatcgtgtagtatgtgcactgcgtagtgtctcatcaaagctcaaagattcatgtgatcatctcgaggagtagattgaatagccgaaggccgagaagaatgagctgctagtcgagctgcgcaggctgatagccgtgaaggagagcctggagcagcatatctagttcctgaatgcatcggcatgcctcgtactatgccaactagtgatgccatgctccgcgttagct

SEQ ID NO: 362903 - DNA, 295 bp, Zea mays
tatcgtcattgcactggtcggaaacaagttggatttgaccgactctggggcaggaggtcaagataatggaaatggttctacggatgctgagaacaatggcgcaccgggccccgatgctgacggcgacgaggagattgagaacaatgatatctccacacgacggatgcgcgaaatctctactcgggaacaacacttatgctgagagaagtctcctttcgaacatgcaaacggcaaatgcgaaattttatgctacgcacgctaccgagagactgcagtgcagctgactgagcgcaac

SEQ ID NO: 362904 - DNA, 348 bp, Zea mays
  unsure (1)..(348): unsure at all n locations
ggcatgttgtgcagtagaaacgacaggagttcgaatgatacaagctacccgtttcaccttgaatgtcttgcgacagggcttggtcgagtgtttttggtgcaactaaaatgcggactaagacattaaatagttatgcaaaaatcagatgcttcaaggatagttttttgtgtgtatcagatgcaaaaatcagatgctttaaatagttatgaaataatagttatctgttcgcacatacttagcaaggaaaggaacgcaatggtgtcagatgtganatgcttatgaaatggttgagtagatgttttttacccatctctcgtaacataatcgagcgatatacgctagattcta

SEQ ID NO: 362905 - DNA, 336 bp, Zea mays
  unsure (1)..(336): unsure at all n locations
gggcttcgtgtccaacctcgtccacggcggcggcggccatggccatggaagcggctacggccatggccatggaaacggctacggccatgggaatggcggctacggcggcggccacgggtaccctcctcccgnagncgccggcgcgtaccctcatccgcacggagcgtaccctcacccgcacggcggccacgggtaccctcctcccgccacctaccccgcgcactcggcgcactacgggcacacggggtcgtaccacaccagccgccgtgggctccgccggcttcactatccacgangcacacgagaagaaggacggcaagaagcacgcccacaact

SEQ ID NO: 362906 - DNA, 340 bp, Zea mays
tgacgccgctgctgctgctgcgtacgtggctcaatgaccggcacatcggcatcaacctccaccgccacccggtgtccatggcgtgtggttacttcccggagtacatagcaggactcctcgctctctgtgcagatgcgacgagggcggcatcatcaccagcgtggaccgcgtcacgtacctcagcatcatcgagacgccggcgcttgtggccgtcgccttctgcgcgatggtgtcgtgtgagtcctgccgctacatgaatgatcgcatgcggcggtacttccgcacggcgcacgtctttgcgctggtccgcgaccgcgtcgtcgggttcgtggacggcgaa

SEQ ID NO: 362907 - DNA, 341 bp, Zea mays
gcagaactcgaagtcgtcggccgagtccgaggcgcgacactctcagatcccgtgctcatcaccatcctgcccctcgctcgccgcccccacctcaccaagagccttagccgtccctagagaagacacggaggtgcagtgccagtgctttcctcaagtgcacctcggattttcggtaccggccagattgggacgaattcaacattcatcggctccaccaaaacactgccactatgatgtgtatgcttgcgtcaggacaggggacccaaaagtacttcacagatgaatgtgacattttccacaagaacgagatacgaaatggccaaggactgctgacgatgatg

SEQ ID NO: 362908 - DNA, 236 bp, Zea mays
agggaaccgagaccgtgagaaaagggaagcagggagccttgtccgatccggtgcagcacgcgcgtccaactcccgggtaactgtggcatatgaatccaaaccctgatatcactggagtggtcagtacaatccgtaagtgggttcaagatggcaagtaagaaaagtaacaggtctacagtcacaccacacactgctctgcatatggaatgggacaggatttcttgccctatttgtat

SEQ ID NO: 362909 - DNA, 187 bp, Zea mays
aaccgcggcgtcgcgtgggggatgggcgttatacgagctgtacaggacaacgagccgcgtggacgcgccggcagtgctattgtggcggcgactgcaagggctggagcacccgacgcggtggccggagcggctaggacggccgtccgctgcgcgggctcggctcggctctccgctcgtgtggtttcat

SEQ ID NO: 362910 - DNA, 173 bp, Zea mays
cgctcgctagcttacttgagtctcgcctccatctctaccagtctcgtctcggtcagaccacgaagaattaagcgacgacgatgagccctagtaagctcgccgtcctcactgtgttcgccgtgctcggctccgtgtcatcccagggcggaacctactactacactcctccggct

SEQ ID NO: 362911 - DNA, 309 bp, Zea mays
  unsure (1)..(309): unsure at all n locations
cggctcgagcggctcgaggtcaagcaatattgaacgagaacatgagcaggagggcagtccataaggcgctcttcgagtcagcggcgctgatcgccgccagcgtcatccaagtctacctcctgcgccggctcttcgagcgcaactcngggacgtctcgggtttaaggcaccagtagccaacttgcagagataaccgttacgtcgaatcaaattcgaatggttgctagatcagctaataccacatgtttgtggacttgagttacatgtaatattttttgtgattccacagatgagaactcttcaaagttta

SEQ ID NO: 362912 - DNA, 194 bp, Zea mays
tcgtcgtctctcgctccctcggtccttccttcacccatctcacccgcgaccgcccttccctaagcatctctctctcactcgcatgcgtctcttatacttcagagcaaggaagcatgcctctagaaggacggcttgagcatcggctacttacggtctcgaacgagactggacggtagatggtggccggagattga

SEQ ID NO: 362913 - DNA, 181 bp, Zea mays
  unsure (1)..(181): unsure at all n locations
aagaacaaaggtcagaanatctctcaacatgggcttcacagcatccgccaacggaatctanaaggaggaacaggaagcgcaacgcggaggagcaggagcaccatgaagcacaatacaaccagcagcagcaggaacagaatgaaaacaagttaattcaaggaaagcggcatcagctgcatca

SEQ ID NO: 362914 - DNA, 206 bp, Zea mays
  unsure (1)..(206): unsure at all n locations
tgttanaatgtccacctcaagttctacatcgtcttcttcaaggcatagggacgagagggattcgagtaggacggagagagatagggacagagacaaggacagggacagggacagagacagggcgaggtcttcgaggaggagtcggagtcggagtcggagcagggagagagagagggacagggacaaagataggaggaggaattatc

SEQ ID NO: 362915 - DNA, 299 bp, Zea mays
cgacttcaccgtatttttggaatcgcacactattcgatcagtttgctcgccattttggaaattgtgattgtgggaattttcgaaaacgcagaggtcgacgcgggttactccgtttcgcccaaaaagttggaataaatggctaccgataccgaaacgctctctcttccgaccacaacggcgcctacagaggtcgctgggtcatcatgcttgcctcaagacgaacatcagtgccggggactcaaaagagaatggagcgccgacgagtgggacacgagcatcacgcccaattttcatttctc

SEQ ID NO: 362916 - DNA, 331 bp, Zea mays
cgttattgattgcatgcatatttggtttgctcagttctgctctgacggccttttcttttcccttcagctgatgcgctggtcaacaccggtctggcgaactgggctacgagtatgtcaacatagatgattgctgggcggagtctgacagggactaccaggtaaaccggatcaagtttgcccctgcagacgcagcacgctaacccgctaaccaccgccgcaatcgttttcagcactaataatggggagagaggaacttgtagaaagcaccatcgtaaatggagaggaactcgtcattatctggctcgctagagactctaaaacctttttttta

SEQ ID NO: 362917 - DNA, 205 bp, Zea mays
atctttctttccattgtttacatttgcgttagtgcttatgctggagtagtctttttgaaggaaattgtgtcatcactacagtaaacggaacaacgtccgacggccaaaaccgtcggacataaggattaaaaaaaaaaaaaaaaaaaaaaaaaaaacaaaaaaaaaaaaagaaaaaaaaaaaaataaacagaaaaaaaattgagaa

SEQ ID NO: 362918 - DNA, 166 bp, Zea mays
  unsure (1)..(166): unsure at all n locations
ccgactcgagccagccgaagcgcgatccgcgagctgagcaaggcggaagcggcggaaccgacgttgcagcagatgcagcggatctctggcgcctccggcatgncgcagccgtcgacggactcgccagtgctcgactcttcctagcacgtctacatctcctctctcg

SEQ ID NO: 362919 - DNA, 202 bp, Zea mays
  unsure (1)..(202): unsure at all n locations
tactctatgtttgtatgaaataaagtactgttatggtgttacacatgtattccaacgtcaactctacgtgctgctatttggtactactctcgttaattgatggtgtgttacataattggacccaagtctggtttcggttagaaaagtttggccttatacacaacggccgagctccgtaanaataatgctccggcaactctat

SEQ ID NO: 362920 - DNA, 319 bp, Zea mays
cgccgtcagtgagctcatgctctgggcagctccgagaaacacccgtggcggcaaagtcttgcaagagtggaggggatgtggcactccggtccagttacccgccgccggcgcataagaaactgaacgatccgttggcagactgctgcacatctgctcgctcagctgatagagcggttgattcaggtgtcctccgctgccagtcagccctgtcgtactcgtaccgcggagtttgctcgtccagggtactgccttcagaagaggatgatagcctcgcgagggctcttcggtcgtgccactcacagccattctcgttcgcaga

SEQ ID NO: 362921 - DNA, 311 bp, Zea mays
ggcaaagtgaattctcgacaaattcaccacttgaacaggccttgtcgcctttcatcctatactcgcatattacgactcgtggtctgcctggtgcagaggattctattctctcggcctttttaaaccatcgggtgtttggtggtgtttggtgtgtgccctgcgctctttccatcatcccactccgaaaagcaacaactgccaactttcccttcggagacatcctctccttctcctccccctcacactcgacttatcttctcctgaatctcacttcagatttgggagtcgtcaactacgaataccgcaatcat

SEQ ID NO: 362922 - DNA, 303 bp, Zea mays
  unsure (1)..(303): unsure at all n locations
caaggatgctcataacagagctcaagaatctgaagtgctttctctacaaaaagatctgagagcaatgtcatcaaaatgtatttattgcgtccaacaaattgaaattgtttttgacgatatggttgatcttggatatgcaatagacttggctacaggcagctcaagcatanggtctgaactagagcaactgtgtctgatctgaagaatgagatacagtgatatagtaagtgctgtacttgctgctacatgcaccttagtcagctgagatactacantaggctgtgtactcatgatgctcaatga

SEQ ID NO: 362923 - DNA, 227 bp, Zea mays
  unsure (1)..(227): unsure at all n locations
agcgcgccggccgccaagcagccggccgcgcgcaagcccacggcgcggctgtcgctcgcgggcctcgtcgtctcgatcttcctcgtcgncaccttcctgtacaacgaggacgtggtgaaggcgagctccagctccntcagctcagcaacaacatgcgacgccgctgaggtangcgtctccgggcgggcgaggtcacccgacctaagggtgctgcangaggcggcgca

SEQ ID NO: 362924 - DNA, 226 bp, Zea mays
atttttattttttttttgtgaaccaactactgattgattgttcacgcaaacgactgtacaacacattttacagaagataacacgcagagggtattacgcactcaagctatttagttagcacacacatcagcaagcatactaggataatgatgcagagtactacacatcgttcaactcaagaatgcgcactgacagctgactgctcacgacgctggcaatacgcgcg

SEQ ID NO: 362925 - DNA, 299 bp, Zea mays
aatgagttctgatccgctgagcgaactccagttgtgccttcaacagatatcgacgctgatgtatacctcagttggtgtgctgcagagggacgccccaactcaaggccacaagcccgaattcctccaaatgcaacgccaactagccctcgacttggccacggccgtccgtaaatttaataaaatcgtccaggaggacctgccaacgcatttcaaaggatatgatccggaggtggtgggtggccagcgtgacgaaatcaagagatatgggcagaggctaggcagtgcagctggatgacaga

SEQ ID NO: 362926 - DNA, 131 bp, Zea mays
acctgatgagagggtaatagctgtgaacaactttcccaaacatcacatcaggggaaagcatttgtgacagatggcaaatttctgctggagacgaatctagtgactatatgtgtgatgcaagacccctgtgc

SEQ ID NO: 362927 - DNA, 335 bp, Zea mays
ttccgtgcgcagcacaaagctagcttatttcccttcccttcacgcggcaagcggcggccggccttccgccgccatggccaccaccaccgcgcccgtcctcctcgtcttcctcgttgccattgccacgtccgtcgccccctcattccccatcctgacgatggcggcggacgcggacaacggcaccacccacctgagcttcttcatgcacgacatcacgtcgggcgccagcgaccgtcggtgaaggtgatcaaggggcccggcgcggggtccaccccgacggcgccggcgctgggcatgacgttcggcgacaccatggtgatcgacgacccgctgac

SEQ ID NO: 362928 - DNA, 342 bp, Zea mays
  unsure (1)..(342): unsure at all n locations
atctttgttgactgtaaatttaataaatatgcatatcacacaaactttgtttaaatactatccaagatggatgcccaaaccacaaggaggcaattcatttctacgtaaacaagctttgtataaattgacttttgcgcaaccaggtcgggctaggaattgttatcgattagctaccagatgttttattcgtcatttacaaatcgatcaagaagaatctaaacaaagatacagttattttcgtgatttaaactcacagcgaatttacgctgcctgtgaagatttggggtatccttataaatacttcattggaaaacttcctanaatgggaatgaaattgatcgt

SEQ ID NO: 362929 - DNA, 202 bp, Zea mays
  unsure (1)..(202): unsure at all n locations
cganagtttacttctgcctgtctatgccgaaattatgaaaaatgatctgcagggcgaaatagtatcggaagaagaagagacatcccagttaggagcattattaatcggagttctttttgcctctcacgatacattatcaaagcctacaatgggatgatattaatatacaccgccaatatctgagcgctaagcgatgggaggt

SEQ ID NO: 362930 - DNA, 335 bp, Zea mays
  unsure (1)..(335): unsure at all n locations
tccggagggcagagcagcaacagtacatcgagcgagggagtagagtaaattgaatcaggtttcgtgtcgattcggaggctttcgcttctgcttgcggagttgcggtggagatttgaggcctgcggcgaagatggcacctgcggaatccggggagaaggcgaccagcttcgccatggcctgcagcctgctcagccgctacgtcaggcagaacggtgccgccgctgccgatctcggcctcgctatcagaggtgaacctcttctcttgttgagganaaatttggggtctcgaggaggtcggtaggtgctctttatctgttgggagtctagcggtgttt

SEQ ID NO: 362931 - DNA, 306 bp, Zea mays
ggcgttacggcgagctagggttccggcgagtgcacccaatggcatcggaggcggcgcggcggcggcaggagatggcagaggaggggcaacggcacctggaggagactatcgcagcctcgttccagatcctcgtatccatgaacgacgagctctgcaacgccggcctttggtcctcctcatccgtctcggccaccgctgcggctggctaccagcaccatcactctgctactcttccgaccccacactctgtagattccgacgctgccgacgcaggcggcgcgccaagccccggcgtgtcgctcgacg

SEQ ID NO: 362932 - DNA, 204 bp, Zea mays
tcggctcgagcgctcattgagatctctcacaatggctggcacaagcaaatctctcgtcctcgaccctgctctgcagaaatactatgagctcaacgcaaaccgctacaaatagttcaaatggacaccgcgatacgcatggttgactctactctacgtcggcattgtgcctagtatcattggctatgttgcgtataccactgatgg

SEQ ID NO: 362933 - DNA, 249 bp, Zea mays
aagatacagaagttcgagtttgagaagacgacgccaccagttgagatctgtaacacgctttggaaaacaatttagggcgtgcagatcgttgttactgtctgttaacgaagattgtcaattgtacttgtatatatagctgactagctgaggatggtggacctctcatcttcaattgtgcttgtttatatagctgaggattgtcaattgtgcttgaatttagggcgtgcaaaccgtcattactgtctgttg

SEQ ID NO: 362934 - DNA, 128 bp, Zea mays
cggctcgagataaaggcggcagcacagcgccacccctcctgtcacgccgagttcggagcgcaggcaatggcggggggaggagcaagtagtcgtcggtctccctcctccggctcaccaccaggcttact

SEQ ID NO: 362935 - DNA, 145 bp, Zea mays
cggctcgagcttgaatccctagacacttacgaacgaaccgcaaacatggctgccgcgcccgatattggaagtttcttcgcagtcgagatccccgtaacacaacttgagcgcgcacagaagttctattcagaaatatttgcctggg

SEQ ID NO: 362936 - DNA, 220 bp, Zea mays
gacttccaaacctgaatcttcttggctctcttcttacccggaatcaaaccgtcctcctacgaacagctacagctacctctcgacacaacacaagactactcagcaataccagatccctcaacatgtcaaacgacaacgattacatggctttcctgaacaaggccaaccaagacaccggcgctgatgccgcgactcaggaaaaggctaccttcaagaccaa

SEQ ID NO: 362937 - DNA, 221 bp, Zea mays
cttttcgtaaatcgcgtcgatctcgttcctctacaagatgaccctccttggttcaatcgttcgtcaatttgtctccatcccctcgttgccggcgactcttagcttcaagggacagaccgtgctcatcacaggtgccaatacaggcctgggacttgctaccgcgagagaatgtgtcggacggggagcagaaaaagtaattcttgctgttcgtgaccaggcca

SEQ ID NO: 362938 - DNA, 167 bp, Zea mays
atgacaccgagactttcgtaccaaacccggattactacaggcaagcctatgtaccaaatatgccactacaaacttgatttgctacctccatatgcaatggcactaaaccacggtatatattcagtgccttgttgtggcatcagctcatggggacaggagttctttct

SEQ ID NO: 362939 - DNA, 133 bp, Zea mays
ctcggatatcggctcgagatcactcactaacggccgtgcttgcactcgcagcgcatcacttgctactgtggtagtggagatcagatataacagagctagattattctcaacaagctacagcaaattagttgct

SEQ ID NO: 362940 - DNA, 231 bp, Zea mays
  unsure (1)..(231): unsure at all n locations
ccatccaatacaaacacctttccgtcaacataaacgagctttcgatacccgacagacaacgcccaggaccgacgaattgtcaagaanagaagaaatattaacagtatacaactcacgaaactaggatcggaataaaggtattcacaatgtctgccgaagacgagcgtcaggctgcccttaactcctatcgcacgaaactcatggagtcgcgagaatgggaggcaaagctca

SEQ ID NO: 362941 - DNA, 99 bp, Zea mays
gtgcagcgtgcttgtgaggccatgaagacttgtttcacagatattagaacctttgagatccttcttcgcacgtatgaagtacgagacgttgctctgaag

SEQ ID NO: 362942 - DNA, 100 bp, Zea mays
  unsure (1)..(100): unsure at all n locations
ccanaatgcagggagggattgtcatggctggcggcggcaaccgtcctggtctgcctcggccatcgtcgccactgtcgcgagtgggtacacatcctcagga

SEQ ID NO: 362943 - DNA, 137 bp, Zea mays
  unsure (1)..(137): unsure at all n locations
ctaacagattattgataagacataggtgacagacgcacaacatctacagttataataaatacgtcaaaatgatgatagattgactanagattagacttttgacaatagtgacagacatagaggcccaaagtacctat

SEQ ID NO: 362944 - DNA, 298 bp, Zea mays
acggcttcttcaaccggggcctcgtgccgggcctctgcttcggcgcggtgagtctctctctgccgattgccgacggttcctttcggacctttcctgccgtcgctttctcgcctcgcacacccgcctgccgactccactcggagctggagtcggtcccagaaaaacattagaatttgacccaggcgtacgtgttgaactgaacgcggcccagcaaggtcgccgctgatgattcggtggcgcccgcccggagctcggatgccgcggcgccggcgtcgtggatcgactagaagctgcttgt

SEQ ID NO: 362945 - DNA, 110 bp, Zea mays
tgtagttagtgcctagtaggaatgatttatagagcagagaacatccattcagagtaggtactagttcagggttttaattggtagcgacatcaggtcctatgcaaggtact

SEQ ID NO: 362946 - DNA, 107 bp, Zea mays
  unsure (1)..(107): unsure at all n locations
tgcaccgtcatggacctcacacacgtagtcgacgaggctcncgcaggcaccgccggcatgtcattccacggcggcgacatgttcgagcacatcccgtcggctgacga

SEQ ID NO: 362947 - DNA, 108 bp, Zea mays
gtaagctactagagatagcctaagacagaatggcatatcatagttgtggcaatgaaccaaagcactacagaaaaactatgacatgactaatacttcattcgtcccaaa

SEQ ID NO: 362948 - DNA, 150 bp, Zea mays
gtcgtcaacgagagcgatgcgcttgcagtcgcgcagcaggctagtccagtttcaattaaagcctgtacgtaacaacccaccagtcgagctacctgctctgagtagccagaacgctacaactatgactatcggcaatgcagcctttagatg

SEQ ID NO: 362949 - DNA, 164 bp, Zea mays
actagttctagatcgcgagcagtcgcccttttttttttttgttgcacgcacgggtctcgtgcatgtgttgtacaactgcatgataattctagcatggacattgatgttcttgccgactgtccatatagaaactgatggataatgcaaacgactattcagatatc

SEQ ID NO: 362950 - DNA, 196 bp, Zea mays
  unsure (1)..(196): unsure at all n locations
tcggacatcggctcgagccgacgcgctgacggccgtcacggcgggcccgcgctcgcgcaggtgcaccagagcttcccgctctacatcttcctgggcggcgacgacagctgcacgtcgtcgcagcggctgatgcggcgcgtggagatcgggntcgacgagacgcggtcccgtttatgatgatgagcaggatgagatg

SEQ ID NO: 362951 - DNA, 129 bp, Zea mays
  unsure (1)..(129): unsure at all n locations
tctcggatatctgctcgatctctccaactccttcgatctcttccctcctctcgccgccggccgattcacttcttccatcattcgnataatgaatcaaatgcaaggcgctattccctcgggngactcgat

SEQ ID NO: 362952 - DNA, 136 bp, Zea mays
  unsure (1)..(136): unsure at all n locations
cggctcgaggtcaatgaacaggatggttcagctgatgattttcaggttgctaatgatgaaagaagagctttanaaacaaagtatacaatggatactgcattggaggacaagatgtgtgatctgtatgatatgtatg

SEQ ID NO: 362953 - DNA, 170 bp, Zea mays
cgccgtccttcctagcctagccagtaagccaggaggaacaacagccacacccaggcctatacgcgcgcgcaatggcctccgccttcttcttcgacgccgagccggactgcgagcccagcctgctgcccacgctggacgcctgcgcgctctgcgccaagccgctgggacgc

SEQ ID NO: 362954 - DNA, 165 bp, Zea mays
attcaagcagcattgactgaaaccagaagggttctgaatgagcttgttctggaacctctgaaagaagagcagtactatgaggttagggagccgttctccatcatgtcacttttgaagagccccatggggttaatggttggttttatggtcttaatggtctttgtg

SEQ ID NO: 362955 - DNA, 164 bp, Zea mays
  unsure (1)..(164): unsure at all n locations
gatcgtcgaaaggatagcttgaatcncaccacaacaattgctgctataaacttgagtggcagtgatgttcatgcttacatatgctctatattgaagaaccagaggtgctgatcagcggcaacgatttctatgcatttcctcgcattgatcanaataaaaagcgg

SEQ ID NO: 362956 - DNA, 242 bp, Zea mays
cggctcgaggccggggagccggcgcgcgcgcaacctaacgcgaaaaaaaggaacggagataccaaaaaacacaaagggagctaccgtctggtggtggacgtggaaagcctcgcggtttccatgattaggtcgccagttccatcgcataaactgcttcgaaactaagaaatgtaaacgtcagccagcatgtgcttgctaattcaaccactccttgttgtttttttttcttttcgtctagttta

SEQ ID NO: 362957 - DNA, 242 bp, Zea mays
ggcagccatctcttgaggctgtctgggagctgcaccccatcgtcgtgccggacggcggcctcgcgctgagcctcaggtgcaacagtgacgccgaacaagctagagcaacaaggccttggcccttcgctaacggcactgcagcaaccggcgacagtgagctcatcactttgtcctgcgccaaggtggcggcgacaactccaaatgtgccgccatggcttcagggctaccaagttcaagatacg

SEQ ID NO: 362958 - DNA, 231 bp, Zea mays
ctgcgacctctacgcctcgccggagatcttcaaggccttcaacatcagcctcgaccaggccctcggcctctccaagcgttgcggcctcagcgacaccaccgccgcctgcataggcctttctcctacgcagtctcctccaggttcgccgccatcaggcgcagcagcaacgccgcccgtcgcgctctgccggccagtttcgcgggactggtgacgagcttgttcctagctctg

SEQ ID NO: 362959 - DNA, 159 bp, Zea mays
acgccattgcaggtgcccgcgtttgacacggagaggtggccgcgtgttggactcgtagagaagacgacgaggaccgggagtcggatgcgtgcctgtacgacgacgcgtgcgtgactaggtgaatcgcgagagggacccgatgaggatgacgaggaaggt

SEQ ID NO: 362960 - DNA, 253 bp, Zea mays
  unsure (1)..(253): unsure at all n locations
tgtgtgtccattcctggtcnctggaggaccacacaatagtgtatcaacagaaaacaatttgtaatttctactgattcaagttgcatatcattccagagcttctcagcagacaatctcagccccctagtttaagtctacgtcctcaggggcgccctttacttggttgagatctaaccaatacaaaactgtgatatttgaatctgaatttaggcagtttccgagtcattgagcacgtaatatgttatgtgtactt

SEQ ID NO: 362961 - DNA, 219 bp, Zea mays
gctcttgattcacatcaattgagaacaagtggaaaacagctactaaaaactaccgatatttaaagctaaaatggcttgtagtttggaacgaggaaaatacccttcaagtgaattggcttaagaactatggtatcaaagccatgcaataccctacacgtatgctaaagatatgccagcgccttctttgttacaggttggagttcgttgaagcaaatggaa

SEQ ID NO: 362962 - DNA, 346 bp, Zea mays
  unsure (1)..(346): unsure at all n locations
ctagaacncaccatttacgaacgctatcctgctacttcgtctgctaccattaccactcgacttatcttatcggctaccggtccgagctcattgcataatcacgctaaccaaaagccagcgggctattccggaaccgagacacctcgaggaccacaatacgatttcttcaacctctccattgcttcctagctattaagcgcgaggtcattcatcagcgcagggtattttcgtcgaatctacaacataaaaaagcagcaaaaatgcgtaccaccgcagtcctgaggagagccgctcgcagtcctttgatcaagtttctcggaaagcgcacgacgccagcttccgttga

SEQ ID NO: 362963 - DNA, 184 bp, Zea mays
  unsure (1)..(184): unsure at all n locations
atggaattcgcgaatgcctgtctgtactgacgatgtttgtttgttgtactataagacatcgcattctaattgggcctcacacaggcatatgtcanacttatggataacagtggttcctccttatctgtttctgacgaaaccagtatcactagcatgacactgctactggtattcttcaactcat

SEQ ID NO: 362964 - DNA, 172 bp, Zea mays
ccggcgcggttccttccttctgccgagcagagagcacaaaaccaagaaacagctgatgcggagatgtagctacctgagtcaatcggtgtcgcaatggctgcagcgggtatcaccagggcgccgccgatcgggcagaatccgaggctcgcgtgctacgccccgaggaggggcg

SEQ ID NO: 362965 - DNA, 166 bp, Zea mays
  unsure (1)..(166): unsure at all n locations
tcgncgtcgttgtaaaccgcgggtgcagggtcagggtcaggccgctctggtggtggtggtgatttcagtggtggccgccgccgcgacgccgctccgctcgccggctgtcgtgtcctgtgtccactgtccacacgggcgtttggccgttgcctgaacccgttcgaac

SEQ ID NO: 362966 - DNA, 169 bp, Zea mays
tacacatcggagtctcgcgcgcgggctcaagcacttgttcttagctgcttagctgctttcttcgttgtaggaactgcaacaatggctacaccctaccgtcttccttgctgctgctatgccctcgtcactgtgctcgtgctcttcttctccgtcgacgctactgagggcg

SEQ ID NO: 362967 - DNA, 241 bp, Zea mays
tacagcttaccctacccaagaaaacatcaaagagcaaattgctgccgtatggaaacgttacggcctcgacaagaagacagtcttcgatactcgcatcacttccgtgaaaaagaactcggccgggagatggattatcaacgacaatgaagcagagtatggcacatttgacggcattattgcagcagtcggctcatgcggagaccctcaaatgccccatctccctgaccacgagaagttcagc

SEQ ID NO: 362968 - DNA, 168 bp, Zea mays
aagaaacatcgccgccttttcctctgcctcatgtgagagaacagagaagccgagcgagatcggaggatgctgctgaggagctcgtccacgccgttcccgctccccttcctctccagctcctcctcctccctgcacctccgcagcgccttctccgacgcccacctcccc

SEQ ID NO: 362969 - DNA, 309 bp, Zea mays
  unsure (1)..(309): unsure at all n locations
tgcacaaccagggagttgaggtaaccgagagcatccatggganggagaataggtccgccgcgggggaaatcgacagcgcgctggcgctaatgcctcggatggtgcatagggagcttctctagattgccaggaacctgggtgtggtggtggcgggcgctgcgatgacccggtggctcggtaattgctcgccatcgccggggatccgcgctccgccatggctagactggtcatcacaacaatcaacggtgagacacacctatccagtccgcgatcgactgagcttcgtgcaacacctatccttagtagatg

SEQ ID NO: 362970 - DNA, 179 bp, Zea mays
  unsure (1)..(179): unsure at all n locations
cagcagtataatgtccattcatggagactcagaaaagattttacaggactcgtcatgctgttcaaatgaaagcacttctgcggagcctgcgttttatgaaggccatttccttattgacaatgagactgaattaagggatacattcatatcgtttcgtggttggaancaaagtgttgctt

SEQ ID NO: 362971 - DNA, 160 bp, Zea mays
cgtcactcgtgtacacgtgtagcaagcacgaagcagcaaaggcgggatcggcagccatggcgatgatggacaagtggacaggcctgggctcggcgctggcaagcatgctcttcctctggtccatggtgcagaaccacctccccgccgccttcggctaccg

SEQ ID NO: 362972 - DNA, 245 bp, Zea mays
ctcagccgcttcggtgtcgtcgccatgaccgatcgatcgctggtagttgttgttgttagtctgccaacatgattttttgttcgcgcggaccgtcggtggtagaagaacaccgcgccaggcgcgcggcagagggggattcgagtggtagcgggctgtcccttttttttcttcttcttcttctcaccttttgtaccctgtagattatatagaatgtacaatgttttttgttgttgttgttgcaaata

SEQ ID NO: 362973 - DNA, 234 bp, Zea mays
  unsure (1)..(234): unsure at all n locations
ctncgatatatcactagctgccctcaccgatgaggagagggcccagcgtgatcaacgggcccggcttgctcaacatgccgagggggctcggcaatatagccttgctcccgctacgactgctcccgcgcaatggctccctctgctccagaccctccgccccggtcaggctttggcgcagaatacggttgggaccaagcggagggtggcacgccaatgttgcctctgaactgagcg

SEQ ID NO: 362974 - DNA, 233 bp, Zea mays
cttcatcggccaaccgattgccactgactccggccatcggcgactgtccctcggtttttctttaacgatttccgatttgattccatggccggctggaccgattccagcgcatccctcctcctcgtgatgcccgctcccccaaggacctgtgcctgcagcagccggaggagatcaggacgctcaaatatgtcgtcctgtttctgcacgtggagccggagccatagttcgaccgc

SEQ ID NO: 362975 - DNA, 169 bp, Zea mays
  unsure (1)..(169): unsure at all n locations
aaccggttcaagtacgacgacaagatgngccatgcattcctggagctgcatgctgttgcggcggcaaccaagctgcggattgcgctgcggctcacagctggcgagacgagcctgcggaaagtgaacccgggacgcgacaactgtctgctctcagatagcttcgtgacgt

SEQ ID NO: 362976 - DNA, 171 bp, Zea mays
  unsure (1)..(171): unsure at all n locations
gtcgtcggcagccacaacccggtctgcgtattaacttgaggagacctgtgtcatcttggaacttgtagaaaaactgcaaaggctgcagcatcactactcaacagcagcaaactattcaggtcatacatactgggagatgacaanaggccagcgtgcattattattttgttg

SEQ ID NO: 362977 - DNA, 160 bp, Zea mays
tgtcagcgccggtgcaggtcctgagctccatcttctcatctttcgtcgccacacacggcgcttcgctatcttccatgaacagcggatctcctcccagagaccaactctccggggcaccgccgggcttccaggtcgaaaagaggcccaggcttgagagaac

SEQ ID NO: 362978 - DNA, 160 bp, Zea mays
atttacatcgacattactcgtacttagtagtcgctatagtccgacacgatgatcaagcaagtcgtagtcgtattggtcgtccttttgggaatggcctctgctcgatacgttactttggaacaattccaatgcatgttccctcaagtcagagcctctaaga

SEQ ID NO: 362979 - DNA, 250 bp, Zea mays
tatcaattttagagttagactcattacgagacctatgacactgcttctgttaatgctagtatgtgaaaatggccagagtgaacccacctgacataattgtcattactagtacaccaaaattctttggtcaaggctttattgccataaagggtgtacccagtgggagaacaattggttttgagggtcgaaagagctactacgagctggtgaataaacaggcagactacactcagactacataatatgttta

SEQ ID NO: 362980 - DNA, 326 bp, Zea mays
ggccggcatccagtacatgcgcacgcttcccaactgcggggaggactgtgtttggcgcgcgtcactcgtcgttagtttcggtgtctggtgtgtccgccgagtgctggacatgtctctggtggaaagcaggccagaactttggggcaagtatacctatgtccttaaccgtcttcaggggatcttggaccctgcgttctccaagcctcggggtgctctgacaatatgcacctgccttcagaaagacaccagagtgcgcaatagcccaccccacagtgggctagcagccatgggaccggtccccacaccgataccgggagccttcacga

SEQ ID NO: 362981 - DNA, 160 bp, Zea mays
  unsure (1)..(160): unsure at all n locations
aaagctgcacatctctcctcgtccaaagactccaagctcctgtagcggctgtggtctgctagcagatcttagtcacatctccccgngtagcgacccgtcgtccgncgacaactttagcgctgggaaagatcacaggggatcggcgcgaagactggggact

SEQ ID NO: 362982 - DNA, 161 bp, Zea mays
gcgccacccctacaggtggatgtaacgaatccgccgccggcgtcatctcctcctcccacctcgactcgccttgctcgcacggggggccttttcttcgccgcgcggcgagtcgcccatgttgagctcgcggctgatctgatgggcttgttgtgatctcctgc

SEQ ID NO: 362983 - DNA, 179 bp, Zea mays
  unsure (1)..(179): unsure at all n locations
taccgaaacnccaccccgcaccaatcatggacgccgccgacgcgcgtccatcggcaccgtcggcacgtgctgccgcagtcgccggggcctccgtcgcggacgagccccgggacgcgcgggtggtgcgggagatcctgcgctcgatgggtctcagtgagggcgagtacgagccccgcgtc

SEQ ID NO: 362984 - DNA, 191 bp, Zea mays
  unsure (1)..(191): unsure at all n locations
tcagcctgcctgtccactgttggcatggtgacttcctccgctccgctcncctccgctcccgaacggtcgatctttgcatggcagcagcagctggctccaagggtgcggcgatcgctggaagcttcgtcagccgcgtcctcgccggcaatgccgcctcgccgatgagggccgtgcacgcctcagcgtacgac

SEQ ID NO: 362985 - DNA, 167 bp, Zea mays
ctttctttgcgttaaatgcacgtgcgtgtccgcgccgctactcgaccgcccagtgcatgcacgcccgatactgctagccaaggccaatccagcgcaggcgcggtggtgtgtgctgttctcgtcgcgcactcgccgccagcgatggagccccgccgctccgtgctgct

SEQ ID NO: 362986 - DNA, 162 bp, Zea mays
taatgcggcggcgactgccgtgctggtgcggcacgttggcacctgtgagtgggtggagtcttgacttgacgcgtgaaccacccttggaaaaaggcaccgccgcgacgccacgccactccaccctcgtggcctttccgtggcgacgtttcggttgctacacgc

SEQ ID NO: 362987 - DNA, 160 bp, Zea mays
  unsure (1)..(160): unsure at all n locations
taaagaatactgtanaccctccatcagtgggagtaattttgtgtgggcataaacagatgagtgaggagatcacaagagttcttgttgccgatggtttgtcaaaagatagaatcttaactaacttctgatcgccagaaggacattgttccatcctttgtag

SEQ ID NO: 362988 - DNA, 354 bp, Zea mays
cggctcgagaacaaagtaccggaacgggtagtcgagcgcctgctcatgtgcgcgtatcacgcccggcacgaattcggcctgccccaggtacgcaaaaggtgcccaaccagggtacacgacgtcgacaatcatgaggacggcttgggctggcgcccagatgaagatgttgcctggctggtgattgagaccctggtacgagagttccagcgtctggttgcccacccgcagcgagtactcctcggtgaaggtgatgtcgggtagaggccggttcgggtccggggtggcgtgcagaatctcgctttgtgaggcgtgtgcaatacgcgtcacattgcgtccgtagacgtacgcagcacc

SEQ ID NO: 362989 - DNA, 339 bp, Zea mays
  unsure (1)..(339): unsure at all n locations
taccgcctccactacagggctttgctcctcccaactctcgaaaccctacccacccgatgagagatcgatcggtcgagcgcgaattctccagccgcgagctgggggatcggccgccgcccggggtgctgggcaccccgcgccgcgggccggcgtacaagacgaattgtgcgcgctgtggcagctcggcggctgttcccgcgacacatgcagcttcgcgcacggacacgccgagctccgccggttccccggatcgcgcacctcgttcgcaccccgcgccgactcctgagcagatttattagattcaactgctgctacgagataagatgacttntatataga

SEQ ID NO: 362990 - DNA, 311 bp, Zea mays
tctcggtgctcgccttctcgcctcgcctcaatctccagcctctctttctcgctcgctggccacccgccgcacgctctccatcaggccagcagcgaggaagaatggagtacgagaggattcatcagaaagcgcagcctggtgctctttctccaacaaagctgaggatgaagatcctgggagcccacaatcgagttagagtcatcaccagcaactcgtcatcgcggacgtcgcctgcgaaaaccatcgaggcttcacaggcgcagaacaggctactagtttgtgatgttctttgagagacagcgcagatagca

SEQ ID NO: 362991 - DNA, 332 bp, Zea mays
gaatcaggcagctcagccccgattcaagagagcttctgagctctgcgtggggcttggaagcaacatggaaaggcgtcagcatcaaatcaagggcttaagaggtccagtctctccgatccacttagcactgttgctccagaagctgtgaaatctcttcaaaagggacaatcaagtgcagtgctgtattcacaggagggaaatggtgttgagcacagcgtgacagagacaaagcttgctgcacgtgctgcttcagatgatatacgtggtggtgctttgtcttcacgagtcaatgggggcaacactatgctgaaaatagaagagcacacttctgg

SEQ ID NO: 362992 - DNA, 322 bp, Zea mays
  unsure (1)..(322): unsure at all n locations
ggcagcgagtgaaatggattgccggttggacaggttagcttggctgcatggcagaatgtatcaggagatagcctgtgcctgtgcatggccatgacctgtgggccttatatgcagggagccagggaggcaatcagtttctgatgaatactagtactaatactagaccatgattgaagggctcctgtccaataaaactggaaaatgagtaagactttgtttgtttgcgtcggattacacctggaatcgttcgaactaaggccttgttcgtttgtgccggattagtgaggtcgaacgattcctagccgnaatagttccagctaat

SEQ ID NO: 362993 - DNA, 312 bp, Zea mays
  unsure (1)..(312): unsure at all n locations
tatgatgatgaaggagctcatgtagctgcgcttgctctggcagaggtatttcaaagaggaggctcacctcaggtttctgaaacatccaaatggtgatcacatgttcctgtctcctgttaaaagtagtgacagaaaaaatgctgattcagagatgggaagctcaaagttgcatgggtttcatttggatgctgattaccccgaaggtagcttaggaagcagggangccgagactggtgaatattgcagaggttcatcatttttgacganaaatgaaggttctggtaagcctctgaagaaggggaaacagtctca

SEQ ID NO: 362994 - DNA, 239 bp, Zea mays
  unsure (1)..(239): unsure at all n locations
cgggaaggccacggtgtcgctggcgctgcacgccgccgcgctggcctgcttcgccgcgctctcactcgtctccgccttcacggtgttcagcagcaggtgccacccgccgcctgaacgtgacggccagccgcccaagcacgcacgggacgaagagcaacgggtgtagcactactgacggcaaggcgtgtctccattccattgccanacaaataacatcctgctcccctgtgtattactac

SEQ ID NO: 362995 - DNA, 174 bp, Zea mays
attcctcgctactcgctagtagccacttctcccgtagcaccccgcgtatctcttctcgttgcgacgactgggcgatccctgcagcaccccgtatcccgctccccgcagccaagtgcccaggttgtagccgggcccttcgccggcgatgagcacccaacaggaggttactgagaa

SEQ ID NO: 362996 - DNA, 171 bp, Zea mays
caatttccatcctcgcaatgtttttgaattcataggccttggcttggccgctgcagccagaggagagcactccaccgagcagctgctgctgccaactttctcccaccccacggtgtttgatgatgacgacgggcatgaatgggacatggatcttgtgaacaacggcattga

SEQ ID NO: 362997 - DNA, 166 bp, Zea mays
atattccaagcaccaggctgagaatgctaaggctgtggatgaccttttatcaacaggcaaaagttgcaggcggtactcgaaacatgaaatagagctcgccactgattacttttctgatgcaaagaagattggtgagggtggctatgggaatgtatacaggtgtacc

SEQ ID NO: 362998 - DNA, 296 bp, Zea mays
atccacaccattctagtgcagactgtgctgaggattttgctgaaaaaattgtttgtaccatatgtgaactcgtatctcaagcatggcttccggttgcccatcatcaagggtttctccgtcacagatgcatatatcctcacttcttactcaagaatgattgttagctgcgatgttgccttcattgagccagaggttctgtctcctgtccaaaagtccacaccacggagattgtcatatgaggtctggctcctgtcaagagtcaagaccacgagagtgacaacgagattgtcatgagt

SEQ ID NO: 362999 - DNA, 350 bp, Zea mays
  unsure (1)..(350): unsure at all n locations
cacatttggcagttgtttttatcataatagtgcatgaatttggcaatgatgttataatatcacatgatgacaanaatctgtacacgatataagcatggatagagtagttgtcgctcgtgttgttgcctgaatttgcatttgtgcatttggtgaactggtaagctcagtactctgtaaaaccttttttctgaacaaatataaaagcagggatcctacctggtttacaaaatattataaatatacctgtttgaattgactgtacttcctgttattgacaaccaatgcaacaggtaatgccgtccctcagtttgctaattttcctgntggggttcactgatttgctccttcta

SEQ ID NO: 363000 - DNA, 339 bp, Zea mays
gctaggccgttgcgccacccttccgccgccgcgtgcgcgccatttaagcaggcaggcgatcagctctccaccacgccactgtcccgacgagagcaggagctagctcgcgtcgagtcatattttctgcctaaggtcggggtcgcgccgtacgacgcaggcgctgcttggagatggagctggtgctggtgatctcgctgccgctcgtggccctcgtcgtcatcgtcgccatcatcctctgcatcatctgccgctgatcgcagacgatggcctcttcagcctgcacggccgtatgcgttgcgacgccggcgtcgcctgctcatcagtacctcaattgtttgt

SEQ ID NO: 363001 - DNA, 175 bp, Zea mays
  unsure (1)..(175): unsure at all n locations
caacatattgggatgtactttgggttcagcttgttcttttaccatacactttgtttttatggatcaaattctatgctagatggtggtataagtcttctttttgtanagaagaatacggcgaagaagaaaaaatatatttgattcgtcgaaatttanaactttcacaaggtcaatg

SEQ ID NO: 363002 - DNA, 169 bp, Zea mays
  unsure (1)..(169): unsure at all n locations
cgcaaatcatgcttgggcggctactgcaacaatttgcctggagaatacgagtgccggtgcccgcgangaatgcacggcaacgcttatgcgccgggcggttgcatcgacaacaagttcccgacangtttagttattggtttgtcagttgctagtggcccggcgctgtttc

SEQ ID NO: 363003 - DNA, 167 bp, Zea mays
ctgacattttctcgaggagctcatgagttaggtactgaaaagattattgatctttgcccaggaggagaggatgtcagtgtgaatatcgggaacagaaagcattacattgatcttcttattaagaatatctttgtggactctatttcatctcagctaacccattttgg

SEQ ID NO: 363004 - DNA, 167 bp, Zea mays
gcagaaccatcagatctagcagaactctctcgacctcatcggcgttggcggacgcgtgttgaccggagatggcgccgagcgggtggaggaggagcgcagccgcgctggtcgcctggcgcccggccacggtttgcctgtagctcgcgctcgccgccgccgcactgacg

SEQ ID NO: 363005 - DNA, 328 bp, Zea mays
  unsure (1)..(328): unsure at all n locations
aaccgtcncaccgcccaagccactcgagggccgatcttgctgctgccctggcccctggcccctgggccctggcccttcgccctccgccctcctcctcggcaccgtctcgtccgaccatggctgctgactcgggcaagatgccgtccgccggcggcaaggcgccgccgcccaagtcatccgaatccggcatcatgaagaggctcccgcgcctggcgctcgtcttcgctgtggcgctgctgtaccggcagctgcaggccccggctcctagggtcccggaacgccggcggccccccgtgacgtcgccgagatcaggctcaagaggcagcac

SEQ ID NO: 363006 - DNA, 331 bp, Zea mays
  unsure (1)..(331): unsure at all n locations
accacttttgaggataacggacagagagtgtatctgaccttattacgtcncaggcaggcttaactttcatcatccttcagagcaggccgtcttgctgaaagtacaagaagagactgatgagtgatgacacgtggaggagaacttggaatctgaataataataatgcgtatactcttcatcatttgaggacgagacttgtttgggccaccgatgggcttccatttctcgaatgtgcgtgcgacaaataaagggaccctcttctgatgcagacagctcgctgctgcaactgctgctcggtcaatatcgatctatcatagagacgagcttatgt

SEQ ID NO: 363007 - DNA, 301 bp, Zea mays
aaacaagtgagagacaggagagcgaggtccttcttgccttctcgttcgtttgctctcctcgctgttcttgcggttacctcctccttttgctttcaatgctaccgcgttactgctggatctggcacacccaccgcgtccgccgcctcctcagctaatcttggtcccgggctccccaagattctcttggtctttcggaattgcgtcttcctttgctgcctctgcttcgcagcagcatccgcgtgcggcggcgtggaacaagtgctgtgcgtgccgatttgagcgagcagtttctcgtgcggta

SEQ ID NO: 363008 - DNA, 347 bp, Zea mays
ctttaagatacgcagactttgtctaccatacacaacaacgaacaactaatactctctctacctcaacataaccacttacaccacccacctactttacacccaccacacacatcaaaatgcgcgccaacacctttgctctcgccattgtcgccgccgccgcctcgggcgcccaggccgacctcctgtctgatgtcacctccgtctttggtgacgtgacctcgggtgccgtctctgtcgcgaccaacatcgcctcgcatgccacctcggcctttggtgacgtgacgtctggcggtgcttctgtcgccacgacattgccctcaaggcacatcggcgtcggtgatgcactc

SEQ ID NO: 363009 - DNA, 335 bp, Zea mays
  unsure (1)..(335): unsure at all n locations
taagacataatgcctcaacatcagttataccagtcatgtagtgataagttcaaccttagcagtgccatgccagagatctctaatgctgaaaaattacaaaaattatctgctggagctcaaaattcttctgctacttctttggaaactgacggacgaattaaaaggccaattttttttgtggatgaggaatcaattgaagaacattctccanaagtattactgtccaagagaaagattatgtcaccaacgtctcaggagaagctttgcagtgctgtgactggtattgnattgtgtgatggagtcccaagatcgatagcaaatcattattgagatgt

SEQ ID NO: 363010 - DNA, 162 bp, Zea mays
ccgccggcactccgcgccctcgacgtgtagtagctccgcggccgacgatgatgtcgtctcggcgttggacgacgacgacgaggtggacgtgccgcccaggaatgacatgaccatcaccgggaagctgaacgcggaggaggacaccatcttcctgaaggtgca

SEQ ID NO: 363011 - DNA, 324 bp, Zea mays
taaatggtcgaccttgcctaaactatacctggacgtattggaaagcaatgctgggaaagctatgccatgaaagatatttgtagcagtgttacatgatggcatcaagtgctgggaaaatatttattaatttatggttttgtttctatggaatataggagtcatgattttgtgcatttgatcagagactacattaactagaggatactttctttttttctaaattacaaaaacaatactaagtgtacctattattgtctactcgtctcatgatgattactatgtagataaatgctctaagctatgaacagtgaccaatgaaatata

SEQ ID NO: 363012 - DNA, 312 bp, Zea mays
tgcatggcgtccgggctcagcaccggccggatgcgctacgtgacgcggccgatcgcgttcgccgtcaaggcgccgtggaagatgctcaccgtcgtgccggggttctcggcgatgaagcagcccgtcgaggcgttcttcatgtccggcgccgccgacgggagcacgcatgcccacgacccgaacggcgcggggtacctcacccggccgcctctgatcgaggagatcatgatgccctcggtgtccgagcttgccaacatcggcgtccagttctgcccccacgcaggcgtactgtccatcatcgcgttcgacgcc

SEQ ID NO: 363013 - DNA, 328 bp, Zea mays
ctctacgcgcaaactcctcgtgatcttgtggttatcatcaattgcatcttcacatccatcacaatgctttcccgatcattgtgggcgcgccaggttgcgccgctccggcgtcaggttgttgctgctcctttcgcagctcgtcgctcagtgaccaccgacgccgcatcagcgcatgccgagaacattcctgaggcagatgacaagcccttcacagtcagactttccgacgagagcttcgagacctacgagcttgatccacctcgctacactctggagactacaagaagagctgaacagatgtactatgacatgtgcatcggcgaatgaa

SEQ ID NO: 363014 - DNA, 286 bp, Zea mays
ctcgtctgttcagtcttcagagctgggttcggtctattcctcatcctctcttgttgatccggagtgccttaagttttggccgtcttgttactgtctgctgttccacagtcgacgaatcacgaatgctaatggaggaagaatgcgtagaggcaccgtcgtacatccacattgacagcaacgctttctcctacagaaagcataagagtcagacagaggaggacatagctgtgtgtgagtgccagtatgatatcttggatccagagagtccatgtggagaccggtgttt

SEQ ID NO: 363015 - DNA, 137 bp, Zea mays
cgcggcggcgacaagacacaatggggtgccggtcctgtgacaagcccaagatgaactaccgcaacgggctgtggtctcctgaggaggaccagcggctcagggactacatcctcaagcatggcctcggctgctggagt

SEQ ID NO: 363016 - DNA, 197 bp, Zea mays
ctaataattcacctgaagtggagttcctgatgcttattctggcgtccgcctagcggcgccgcgctgctactagctcgctcgttaggtggcttctggtgtgggtgttctgaaacaatacgacttctgcccacgcgccgcccccccacactccacccgtgctgtccatttgcttgaatatattctttttcgttgtcatg

SEQ ID NO: 363017 - DNA, 231 bp, Zea mays
tgtgcgatctttatgtgcgacgtgacagaggtgatgggtttttgagcgattttacgttactagtggggctggagtcattatttattgcctgttatttgtagggcagcacgatctgattttggtgactttgtatatggaccttgggagttcttttgaagagtcaaaactaaagatctatgtgcagtagtttcttgtggggtgtgattgggcctgagttcttggtgttgatta

SEQ ID NO: 363018 - DNA, 107 bp, Zea mays
tctgctcgagctgctcgagctgctcgagctacgacggcttcctaaagggctgtaccgacctctgcagctcccagagcatcatggtcaacacgttccgctcgctggag

SEQ ID NO: 363019 - DNA, 266 bp, Zea mays
  unsure (1)..(266): unsure at all n locations
cacgaaccaaagccgccgtgggggggaagccactgcgaccgaactgtgcgtggccgccgccgtggcaaaacgctaatgccgtcgcgtcagagacgataggtggttgggacgactcncctggtaccgggggtcacgactgtgaggaattgtgaccggacgtgcagggtgggtcggttaattgctcaccggagcatcacatccgccgtggcgccgcaccttgccatggtcggaccgctcgggcctctttgccgcgaggttacgagtca

SEQ ID NO: 363020 - DNA, 274 bp, Zea mays
cggacttctgcagagtgagcagcaccgcaatcatgctcttactttcgctctcgtcgccagcgtccagcctccgccgctccccgtcgatgagccgccccaggaacgcgtcccttctgcccacggcgtcgaggatcttgttcctcacgccgaacacgtcgaaccagcgcacaccggcaggtagtcccagcggttggccgtgccgatgtacggcacgagctcgtcgacgatctgcttgaactcgtgggcctcggtcgacatgtccgagtcggcgtcg

SEQ ID NO: 363021 - DNA, 191 bp, Zea mays
ctaaactagacacttttacacagcgtggcaggtcagcggcaagcagatcgcgagctaaagacaatggcagctgctgggagcgtccagggccacggcgcgctgttcgcggcggcgtgctgcgtgctcagccggtacgtaaaagcagcagcggtggcgactacgacgacggtggagctgctgccggcgggcac

SEQ ID NO: 363022 - DNA, 277 bp, Zea mays
atctctatcattatcagcgcctgacgaaggttataccccgagttgctgccaagacacgttcaaggatccttgcccgaaatactgatttccgagccttacaatagaagggtagttactctcaggaccccatgaccaagggccttccttggtcttgactaacagacaacaccaacactaactcgttttatacaagggtgctcctaactaggcctactagaccatataacatggcatattagaataagccctcggagccccttgcgtcctagggcattta

SEQ ID NO: 363023 - DNA, 102 bp, Zea mays
ggtactcagggagctggccaaagacgacgaggccaagagactcggtgtgctcctcgacgacaaggatgcatttgccaagaccattattgagcatcggacaag

SEQ ID NO: 363024 - DNA, 279 bp, Zea mays
tgagcgacatgaggctcagctctgtccggcctgttgacccagatgcatggtgtatttaacaagcacacaatcccgccacccactgcacccatggcctctcactcacgttggacatggatcatgctgcatgcatcttcttaaccacctgactaatactgcctctttgtgctttatttctccacatactactaccggcgcaaacgctgtcatggcagcgcttctggcgatactaatgcacctcctggtcccggcgctgctgctgatgagagtcgtggcagt

SEQ ID NO: 363025 - DNA, 285 bp, Zea mays
ctttgtgcagttgatgcggttccaacaccgtgttcgttggttgcttgtgaaaatgggtgcccgtacatgctataaagcagacattgatgccacagttctctgtgggatatgcaaacgtgactgctatgtagctcacattatgtgtaactgcagagcagatgcaatttgcctttgtcatgaggaagagattagtaagtgttcttgcaactgcgaccgtgttgtttttgtgaggaaagacatctttgaattggaggaaatatcaaagaagtttgaggagattggaat

SEQ ID NO: 363026 - DNA, 288 bp, Zea mays
cttggctacctctgtctgtctgtgtcttgtccagtccgggtctccagggctccggcaccggcaggcagagagctaccaaaccccaccaccacgaacggccgccgccgacgagacgggggcgcatggcgactgcatcctccttcaccgccatcttcttcagcagcgccttcgcggcctgcttcgcggagccaaagtgcggctccagctgcaaaggaaggcaccactaccgtcgccaccagtggctgcagcagctgctgctggaggcacgctagccacaatcatgtgcat

SEQ ID NO: 363027 - DNA, 275 bp, Zea mays
cgatcaaataaagagagacatcggtatcataaagacccagatatttgcacttatgccaacagcattgggcaattgcagccctcctgtcccgcccatgtaactgggccctgagcaagatacttccgctgccttcatgcaggccctgcagtagtacacgcttcttcctttgctgtgagtacaaaacgcagcgaacttgatgttatggaggaagtcctatgtatatacctcgatggcttaatagtttataggtatacacatattcaggatagttgaca

SEQ ID NO: 363028 - DNA, 281 bp, Zea mays
gtttttcatgtggttggtcgctcacaagaaggtgtggacagctgataggttgcaaagaagaggtatggatcatccggagaggtgtccattatgtgatcaggatcaggaaaccttaaatgatatgctgctgggctgcgtttttgctagagaattttggttcaagctgcttcttcttgtaaatctacaacacttggcccatcagtcctataaaagggtttttatggattggtggcaagacttgagcaccaagattcctgggattgcaagaaatggtcttaact

SEQ ID NO: 363029 - DNA, 279 bp, Zea mays
cagggacgcgccttgacttctcacgtcgtgtcgtgtgtgagcgcagatagctgctgatctgcgattcctccacgccacaccctacctgaccacccgacaggtaatcctactccctcttgcgcgccgcgcggcggcgcggcatcttcggtctccgtgcgggtgtttccgttcggcgattactggccgggcgagcgcggcattggaggagtcgggatgatggagacaggaggcgtgatcgatggggaactgcgtggcgagctggggcgctacgacggtcac

SEQ ID NO: 363030 - DNA, 275 bp, Zea mays
ctcttgtgcttctcctccttatacttcgggtgctgcatgcaaggctttacagttgttggccaaaggaaaagttaaaccaaccgaactaagagcaaaaaccaggaaaatgcatgccaagttaagagaagtattcggagaaaagagtgtttctcgttcgtcttctacttcatctattagtattggaaagaaagcatcgaaagatagcggcaatggtccctttgagaacgtgagccacccagattccccttatattcatttaagattgaaagaagaat

SEQ ID NO: 363031 - DNA, 251 bp, Zea mays
cttgaggccgccggttggctctgaaggtggtggtggtgcaacggtggcgccacgatggaaatagcagccatactcagtttgaccacaacaaggagcaaggcggcggcggcacgggtgccgggcacgacaccccggggttctggagcggcatgatcggcggcagtggcgcttcttggtaatggagaaacatgcacggccgggggcggcgccatgcatgcatggctcatgcaaaggctccctgcctgcgagcg

SEQ ID NO: 363032 - DNA, 260 bp, Zea mays
cgctcacttttcaatcatatccactctacaagttttcagattcctgatattctctaacttcacatttctttttatcttttctggacatggctattaccatcacccttggccctaacggccagtatcaagtcaacggttctgccaatgaactgaacacaaacctggacttggtgcctatctctggagcaacaaagctccgtagaatgctcaatgagacagatgagctaatcgtctgtccgggcgtttatgatggcttatcg

SEQ ID NO: 363033 - DNA, 101 bp, Zea mays
ggttggagcctagcttcgagctgagcatacccaccaccagttggagctttcttgagagagcatttgagagttcgagcactagctagcttgtaggggatgaa

SEQ ID NO: 363034 - DNA, 104 bp, Zea mays
tctctacccacctcgtgcaattgcaacccctccaccaacgaggagaactcgatcccaatttacagcggcgttgaataagtccgtcggtaattcgagcggggaga

SEQ ID NO: 363035 - DNA, 101 bp, Zea mays
agcgccgtatccatggcgacggcatccactacgctgctcgtctcgcttgccttcctcgcattcgcctggagggcgtcgagatagccggatgaagaggcgat

SEQ ID NO: 363036 - DNA, 106 bp, Zea mays
tgtcggcctactcgccgcgctcgcattcctcacgcggtcccacgcacggatcgcgctcaaagacagccacgtcttcatcacgggcgggtacagcggcatctggctc

SEQ ID NO: 363037 - DNA, 241 bp, Zea mays
ggagtcgggttcaggtcaggcggcggcggcggcgggcacaagctgtccctggtgccgctcatcttcctcatcttcttcgaggtggcggggtggccctacggcgcggaccggcggtgcaggccgcgggcccgctgtacgcgctgctgggcttcctcatcttccccttcatctgggccatcccggatgcgctggtcaccgcggagctctccacggcgatgccgggcaacggcggcatcgtgct

SEQ ID NO: 363038 - DNA, 258 bp, Zea mays
ctgcttttcagtatagaacagctgcacaaccacatacatcacacaaggacaaagaaaaagggaaaattgcaaccatgcttcgaagaactcctgaacaagttctggatgagaagctttcctcagggtcacaccaccaaaccaccatggaagcatgcactaagtctaaggctgacagagattatgtcaacaagcaatgggctatgtggttctatgagtgtggtttaccttttaacgtcattaattctaagcaatttcaca

SEQ ID NO: 363039 - DNA, 238 bp, Zea mays
acagcagcaaagcagaccaacccagcgcagcgcaacacctcgccaattgcgacgccgccgccgtcactgtcgccgcaggagtgcgaaccacgctgccgcccgctcccgccgcccaaacagctttatccgagccccgattcgccggatcacatgctgcggccacctctcaaatgacctctcaactccagagcactttgctcctgctcccgctcttcgccgccgctgctttgggccgcgg

SEQ ID NO: 363040 - DNA, 219 bp, Zea mays
aatctcaacaaccattcccagtcctccctctcccctctctctcgtctcaacggacgccgcgacttcacttcctcgccgtactaggccgaagcacagagacagcgcccggcggttcggcacttcggccatgcggcgatcagagtgggaggaccggtgcaatcggcacccggaccaccgcacgtccaaaggcgtctgcccgtactgcctccgcgaccacct

SEQ ID NO: 363041 - DNA, 228 bp, Zea mays
cccgctttctccttccttcctcctccggtcctccccgctcccctcagcccagccaccggccatgtctgtggagacggagcgcactccatccgagtcctccggggcctccgggctcgacttcgaggacaccgcgctcatgctcaccctcctcctcccgggctccgcgccttccgccgcggcctccctgtccctcatctcctcctcgtcgtcctccgccttccccgaccc

SEQ ID NO: 363042 - DNA, 155 bp, Zea mays
tgcttgcttcttgttcgctccattgtctgcatgcgtactgttgcgtgtttaaatttagcaaatcttatacgtagtcgttactggtactacgtattctgtggttgacaatacattgttgcggtttaagggcgcatccgtttggtggacttgcacat

SEQ ID NO: 363043 - DNA, 266 bp, Zea mays
cctgcactggctagggcgcactctttgtggtcgctcatgctgacctcagtgttggtgacatcgacgacgacttcaggccgtcgccggagctgtggaggctgtttgttccatgcattgagccagcatccatcatattggccatacaggtgactttcctcaagttcggaggtgtggtgctatggcaggctctccaccacacggctagcgcatgcctcaagcgcgttcgcattcttccacacgtggtcagccttgtgcaagtatggcga

SEQ ID NO: 363044 - DNA, 128 bp, Zea mays
gtcagtcgatgctcttctagacttgttttctttataatctgcagttattgtttcaaaaagtgttttgttgctgcaaaattgttacttcagtcggtcgttgcttgtgatatttaattagtcaaactcaa

SEQ ID NO: 363045 - DNA, 155 bp, Zea mays
cggctcgagggaaaaaatgaattttccaaactagtccgaaatataggataagtggtgaaactaaatactagagctttgacatgacccacgtacggtcttgggggtgcatgcacttatgcgtgcagtggatgcatgccacccgagttcttctgcga

SEQ ID NO: 363046 - DNA, 123 bp, Zea mays
tcatgattagattcttgagaacttacttctggagactcatagcccttaggggctaggggcgatgaagaaaactggatgtccacaaaactctacttgctcaatacgatggaacgtagctccagc

SEQ ID NO: 363047 - DNA, 142 bp, Zea mays
gctcgagcccgccagcacaacacatacgcatacctcaccttcctttcctcctcccgtccaccatcaaaagaaggcagggaaagatctgatctggggggtgagagatcaggacgagaaatccaagccattgccctcccctctt

SEQ ID NO: 363048 - DNA, 300 bp, Zea mays
tggcgtgggtcgacgcgctcatggggctggacgccaaatccgcgcgcacgtccgcgcagatggacgccttcctggaacaggtgatcgcggaccaccgccggaggcacgtggcggccaccgtgaaggtggtgacgatcaccgggacttcgtcgacgtgctgttggacgtgaacgaggacgaggcgcacgccggtggagccacgttcgacgacgtggccatcaaggccattatcgtggccattatccaggacatgtttgccgccgccacggacacttcgtacacgacgctggtatgggccat

SEQ ID NO: 363049 - DNA, 117 bp, Zea mays
ctttattcttttctgcttagttttgttagattgtgaaagcctgcctccagatagtattgcagcatgccagcatttacatgctaatgggttcagtttattcgcagggacagtagtgga

SEQ ID NO: 363050 - DNA, 163 bp, Zea mays
agggtggatatgctacctagaggaggaacaggtgccgcaagtccgcaaagcgccatgcatgcatgctttgctcggcgcactgttcttagcgctcgacatgagtactatcactacctcaaattggataaagcatatgactttagaatattgtttatgtctttga

SEQ ID NO: 363051 - DNA, 192 bp, Zea mays
cggttccagacaacgaagggattctaggccgcacaggcctccgggaagaaccgcaagatcagcacactggcgtatcctcagattcctgagagaccgcatcatccgcacggagaactgagtgagcctggggcaggagacaatctccagagattccagcgacgggatgttctcgaagcacggaggaaaccgtct

SEQ ID NO: 363052 - DNA, 177 bp, Zea mays
  unsure (1)..(177): unsure at all n locations
cgcggcgcctactgctcgccgccggtgttcgacaatggcatgacgagcctgctgtaagttcgcgtacatacgtgctgatactagcagctagcttgcgtgctaataatgtgcgctgtcgccgtcgntgcgtcgcgtcacacgtaacgtacgtcgtggcagcggctatactcaatgctc

SEQ ID NO: 363053 - DNA, 160 bp, Zea mays
  unsure (1)..(160): unsure at all n locations
cagtanaggagcagccttccaaatcgtccaacaagtcgaagaaggactcaaaatcacagcttgagtctgatgcctctgttggtctcaatatgaaggcgtccactgaggcaggtgacatggaggtcagcaaacaggcaacccgaattggccgtcggcagaa

SEQ ID NO: 363054 - DNA, 146 bp, Zea mays
  unsure (1)..(146): unsure at all n locations
ctcacatctcccaagacctcctcagacccgagaagcgcagtgcgtgccatggacgccaccggcactggagctggagggattgcgaagaagggagctcgcggtcgcaangacggcgggccgatgaagaagtcggtgacgatgtccgt

SEQ ID NO: 363055 - DNA, 163 bp, Zea mays
cggctcgagcagaatgtcatggttgaacaactccaatgatcagctgtgagaagaaatgacacacatatatctctctcatactacataggagtacgtacgtcgtcagatgaagaactgatgaaaagttgaatgatatatatgatagatggagcgatcgagaaac

SEQ ID NO: 363056 - DNA, 220 bp, Zea mays
caacaacacaaccaagatgagatcagccgtcaccgttgctttccttctcgtgtgcgttctcttcgcctccttcaccgaggccaagaagatcaagcctgctgctccccaactcaacctttgcggagtctgcattgactttatggatgaagcccttaacgaattaatcgaaatcattgccaacggaggtgttatcggaacttgcggtgctctctgcagtgct

SEQ ID NO: 363057 - DNA, 154 bp, Zea mays
  unsure (1)..(154): unsure at all n locations
cgnctcatncaccgcaaaatccccaaatccgcggcggatatgggagagccggagacaggggcgcactagagagatcggagaaggggaagaagatggtgctggtggcgacctacttcgcgatgaccttcggggcgttcctcttctggcagtccat

SEQ ID NO: 363058 - DNA, 153 bp, Zea mays
cgatattgaaggcaaagggagcatctctctgatagagataaacagaagacagagagacacagtttgcagggaaagattgagctggaccagcaaaagaaggatggtgattcaacatggaagcatgatggatttttccagttggaggaagcagca

SEQ ID NO: 363059 - DNA, 180 bp, Zea mays
attcagagacttgtggaagacatggatggtccattggctgttctctataggtttcttgactactatagcaaatttgattgggataacaaggggatcagcttgtttggtcctatttcactatcttcactacccgagctagtcaccgagccaccatatactcgtgatgatggttttctctca

SEQ ID NO: 363060 - DNA, 203 bp, Zea mays
attggatctcccaactttctctgaatatgctaatgaccttcatcttgcctgagtccggctttgtcattgcaagctctcacctcactacctcacgtttgtatttgttattgttaacaagcaaacatgatgatgccagctgcgttttcttctatgaagacttcatatggaatgcacttcttgctcggagaagattagagaagaga

SEQ ID NO: 363061 - DNA, 162 bp, Zea mays
ctaactgtacgataccgtgaaaggcaagctgtcgctgggggcgaggatcctgctggcggtcggcgtggggaacgtgttccggcgctggttctcctcgcccgtcggctgcggctgcgagcagctgctcacggcgtcgcagtgctacctgtcgaccacagccgg

SEQ ID NO: 363062 - DNA, 163 bp, Zea mays
  unsure (1)..(163): unsure at all n locations
tgctctactacgtactgctaccaccaccaccagagtgaccaagtcaagttagggattgttacataggtcggccgttcgttcgcgagattgnttcgctgctggagacgcgcatgcatgcatgcatgctcgcagcagcttcgctggtccgcgtggccgcgtcgtg

SEQ ID NO: 363063 - DNA, 132 bp, Zea mays
  unsure (1)..(132): unsure at all n locations
aaagcttcgagctttctctctatactccattgagaaggaatgaagccggcacagtctactggccatgtggtgccggcaactgactaggatcgatnaataaggttcttcgagatctgccggtccatggcacag

SEQ ID NO: 363064 - DNA, 305 bp, Zea mays
  unsure (1)..(305): unsure at all n locations
cgatctgtcnccattatcttctgctcgatcctttattttcttcctcctcccggagcctcaattcactctcctgtcgggctcatgagtgccgcgccgtgcgccgacgacagagctacagatactagccgcctcgagtcgagaggcgggccggctcctcctgcggcgacgacgatgaggatcatggcgcgtacgctccgcggggaccgggtggcgctggacgtcgacggcgccaacacggtggcgcactcaagtccatgatcatggcccgcgagggcgtagcgccggcgaccagcggctcttcttcg

SEQ ID NO: 363065 - DNA, 323 bp, Zea mays
actcggaatcggctcgagggaatccactggtggtattaattaggtgacgcgagcaattaagcaaagcgtggtagtactcgtactacactgcaaattaaactccggtggatcccagcgtagtaggtgaacgatggacagggcccggccggtcacttacgcgtacactgctcgatccacctcatcggccggctcttgtgctgcacacgaaagcaaagcggccgtcagctgaagaagggcgaacgtatggggggcggttcaggtgaaccactcttttgtgtgtatcatcactgacgctgacactggctagagcgcgtcctgtgcaa

SEQ ID NO: 363066 - DNA, 165 bp, Zea mays
  unsure (1)..(165): unsure at all n locations
cgcanacgcagcagcagcagcagccgcggcacggcccgaggtcagaggtcgggtcgccccgcgaaatcacctcgcgcaccacagaaaatcctccagccacctccaccgccggcgctacgctctctctccgctcgccgcactttggccggcttcgcgctcgcggta

SEQ ID NO: 363067 - DNA, 135 bp, Zea mays
ctgtccatgttgttgaatatatatatgatggcaagcagcctgatcttttcaattcttcttccattactacctcgctttgcttcagatgtcctatgattcagatggcactgagttgtcaacgactccaggatgcta

SEQ ID NO: 363068 - DNA, 201 bp, Zea mays
gtgtgttgaacctggggagcagaatagcttaatgcttaatggaaatatcatatctaatgcaaatgctggagatttttttaataattccagccccagtgatgggttcctagagctgaaggattttgcagatgctgcagatctggatttccctttgggcaatggatcaaccatatggccttcagatggttgggcatggcaaac

SEQ ID NO: 363069 - DNA, 230 bp, Zea mays
cggtcctccacgaaaagtcgaaaaccaagtccagcagacggacgcgaactgataaaaatctcacgtgacgacgacggacgcggcggcgatggcgtgccgcgcacttgccctccgcttcctgctcctcccggacccgctacaccgcctcccggccacgccgccatctgttgggagggcatccggctcccgcggtggtcgccgtccgcacctccgctgcagctccggcggcg

SEQ ID NO: 363070 - DNA, 361 bp, Zea mays
  unsure (1)..(361): unsure at all n locations
aanaccacaaacctggcagccctccggctgatccagcgtcttcctcgccatcgccgacacgctcaccggcgatccactgctcggctcacgtccggcgtaggcgcgtcgtggccacgggtcgtcacacggtgctctcagcgaacttgccccaccggcccgcacttcccgggccttacctgattccccgtcctccagcgctgggcgctggctgtgctgcagcgtagcgcacctccagacctccgccgggtcccctggctgctggcgacgaacgcccctgcgcagtgcgtgtgcgccagtgcctgccggcggccgaccgcagttctttgccttgcctctgttgctcgtcttcttgcatttctga

SEQ ID NO: 363071 - DNA, 150 bp, Zea mays
cactggcacagctgctgtagctggcttaactgcagctgcaattggggcttctgttgctggtggattaactgctgaaaagggtgtggcgaaggatgggctaactgctgcagatcatttaggggaggatttctacaaagttttacttcagca

SEQ ID NO: 363072 - DNA, 227 bp, Zea mays
ctcaggtctggctggcctaccaccaagaacacacgctgcggcctgcggctgcggtcacgctactcaagtgtgaacaaaaagatagtttcttcagtccgacaccgcttctagcttcccctcggcgatctgtgaagctatgaagccacctctcgagaggaacccgactaagaagcgccactcgtggtggtgggacagtcacattagccctaagaactcgaaatggctcg

SEQ ID NO: 363073 - DNA, 100 bp, Zea mays
ccagaggcaattgggagactgcaaatggttcgtgtatatatttggcttagctgttttaaccttttaggtctgtggtgagccgcagttggaccttctcgtg

SEQ ID NO: 363074 - DNA, 216 bp, Zea mays
gccagttgcagcagctgccactgctgctgcagttgttgctactacagctgctgttaaccaacaatatgaatacttggatccgggttgtcaattgctcttgcttgccaagttcatcaaataaattaatccaaaaaggtagacatgacttgttggatgatgatcagctggaaacaaatcatggacaggataatgcccttgagcgtgaaaaggatttgg

SEQ ID NO: 363075 - DNA, 253 bp, Zea mays
cgtcacgggcacgacgagattcggcggggatggcgcggatggcgggcgcggcgcctgctgcctctggccaccttcgtcacactcggcatgatccttgttgcattttgcttcgcttttccctgaacataggatctttgcatcagttagcagttcttcatcgactagatggctattcagtgcatgcagatagtgatccagaggctgttcttcttcgccttggatatgtgaagcctgaagttatcagctggacgcc

SEQ ID NO: 363076 - DNA, 296 bp, Zea mays
gaccacacctggatgtggtctcacgacaatgtcagcattccatctgtctcgcctctcgcaacgtagacacactttcggaaatcagagactgtgtacactcataaccgattttattgatctctatttatctctgatttcgcatgtttagatttcgttcttagctggcaaggcacttcaccatgaagcttttgtaccccacctctctcaaactcgacattcaaagcctcaaaggatttgcggtcaccctccatccgtacgatgtccaggcgcccataccggacgagttaattgatgct

SEQ ID NO: 363077 - DNA, 107 bp, Zea mays
cgtctggcactgcatgggcacagcaagtgtgcaatatcagtgtttaatgagatgacgggtcaacgggttgaacctgatgtgattactttcgttggactgcttaatgc

SEQ ID NO: 363078 - DNA, 121 bp, Zea mays
tacacgggacacgggagattagaatatgattgttcgagacatttctattacaatgatattaatcttcagcttgtagaaccaattggtagaatgtagtatcttccttttaaatgaaccagct

SEQ ID NO: 363079 - DNA, 229 bp, Zea mays
ctcgcattccttgtgcatgggttgtgagcttttgggactcaagcagagctatagcttcggatggcgtttcttctaacgctgctactaccgtggtggccgctgtcgccgtggctcagccccgctgcggcgtggttcatcttcttcaacgccgtcgtcagcgccattgccgtcatgtctaccagctgcagcgacagcggcggcgccggggccacgccgccgtcgcctcggc

SEQ ID NO: 363080 - DNA, 144 bp, Zea mays
cgattctcagaggtaaccgaccttatcctcgatcccactgcgtcgccttacttcgagagctcttcacttcttcgagtcaaaagatagccccagacgtccaagtctttgatcgaccgttgcgcaattcgcgctctctataacccc

SEQ ID NO: 363081 - DNA, 193 bp, Zea mays
gcttcttcctccccgcggtctccccttcacctctcggatccggcggccatggcgaggaaccccggctgcaccgtcttcatagatctctgggcaagacaaaccctcattaaatggcaatattcctgtaattcctagtttaaactctgtaccacagccaaagcctcctcatcaacataatgaggtctagtgatac

SEQ ID NO: 363082 - DNA, 171 bp, Zea mays
cttccttcgtgcaggtggttggacttgggtacaaatctgtggcacactttttaattgcgacacatcgagcatcatcagataactcagaggattcaagcccagctggcaaagagaagtcgctgtctgctaaatctgaaagctcatgcatttccgatcatgatggcccggatg

SEQ ID NO: 363083 - DNA, 185 bp, Zea mays
cgcttccttctccttttcttcctctcctccccactctcaattccttcctcgttcggttgttccttcccacttcctctctctcgcgcgcctgtactacttttgaagccgcaacgtcagaacagaggatccacctctcagttcgattttcggtggctgaagtccttctacctcggggggtttgagcg

SEQ ID NO: 363084 - DNA, 212 bp, Zea mays
ctgctcgagcaccaccaccactagcacccaccgtcacggcgcggagaccgcttccctcactccattttgtgatctaatcatcggtagatgaagaaacaatggcgaaggtgccatggctttatcatcgtcgcgtcttgcttcagtggaacagcatgaatggtccccaccccctctaggtttactggcggatcggctgcagcgagttctcatct

SEQ ID NO: 363085 - DNA, 181 bp, Zea mays
cagcaaaaacactggcatgtgccatcacaaacggaactccggttccccctccgcatgtacgaacaaccccactccgagggggaaggcctgcgcgacaacggaaggccgacgaacggcgcgccgtcacctgctccagcagcggcgacgacgacgacttctgctccggggggttgaacagcgg

SEQ ID NO: 363086 - DNA, 303 bp, Zea mays
  unsure (1)..(303): unsure at all n locations
cggttacagtgttcagtgcattgcctagccactacatggccgatttttttgtattttagccctttatcaggtttaaaatcacgtttagacctanaaaaattttaaactcaattttggacccttagctcggcaccatagcctgtggcgccgagctaacatagctcagcgccacagcctatggcgccgagctatgacgtggcagcaacggctagttgcgtctagggctgacctggctctgacgtggtggcggcgcggcctcgtagctcggcgccacagatcttagcgccgactacgaattcctat

SEQ ID NO: 363087 - DNA, 312 bp, Zea mays
  unsure (1)..(312): unsure at all n locations
ctggttcagaggaaggtgataaatcgccgtgtgctatattagacgatgacaacagcaggacacctgatgattctgttaaggatacacatgcatcacgagttgcatgctcgtcacatacgaatgaaaaaggtgtcggcgaaactaaggtgggaactccgttcagcccgatgaatgctcttattgaaatcaagtactctgaagctagtcattcacagcaagctggagatgacactgctatgaatcttcttgctagtgtggctggggaaatatctaaatctgaattggtttcnccagcttcttcacccagaagtc

SEQ ID NO: 363088 - DNA, 305 bp, Zea mays
ctagttctagatcgcgagcagccgccctttttttttttttttacagccgaacactgatgctcacatcaaatgcaatacactattttgccggagagatttttttaagcatttgactaaagaacgcattggttaggatttacaaaacttagacagggaacagatcaaaaggcagcagacgatttttttttccttgttttactttcctatgctttactttccaaacctccatatcctatttacggcgaggttggtatttttcttgtggaacgctggagtgggatgaaggttgcccctccttcgggggc

SEQ ID NO: 363089 - DNA, 296 bp, Zea mays
cagcttatctgtgactgcagttgtgtgagacgcgaactaatatactactgctgctaatcagctttccttcctcccggccaatgggaccaccagagcgctagagaacctgattagtttagctgggatggaggaggttgtaccttccttgacgttggtggaggaggcatggctggcgcacaggcaacagtggcggggaaggaatgattcggaggtccaccaatggcggaggcacaaggcatcacatgctcacaggctcccctggcaaaggcaccgccggcaccgagcccacaccaccg

SEQ ID NO: 363090 - DNA, 295 bp, Zea mays
ccgacgtataggtttggagacctggaactacaaatcaatagtattgggacttaagtgacaacctgaacaagtttaggaacaacttgctagaaaatttttatgctttctaccaatcttacaacgataatttgaaagttgatatttatggtacttatttggtccaggaactagattttttgtacattctttcggatctggattaaacaacgctctctttgtatatgaacaatgctctataaatatacgtttgataattttatatgatatttaataaatagtagctactgtgactgtt

SEQ ID NO: 363091 - DNA, 238 bp, Zea mays
agtcagcatgttccgacacaagcccaacaagcagtattagggcccggcgcgtttccagcctcgtattagtgatgcgtacatatgggctcgctccgacgacatggcgggcgtctgtaggacacgttcagtcccggtgaaattagattaagagattccgtagtttctattgttcctaattttttttcttctgtttatgttccttcgttgtatgagtaaataaagatgcttattcatgtcc

SEQ ID NO: 363092 - DNA, 352 bp, Zea mays
cacgggtttaaatttgaagtactcatcacgatgaactgcttgcatcgcatgtcttttaatcagctaggataagttctgtttccgtgttctaccattgactcatttttcgcaataatggtcttgtacctaaagctcaaggtggatattgttgctaatggtaaaagctattctgtccctgcaagtatgctttatcctgttgctcaacccaacattggtaacaactattgattggcaaatattatcttttgtatcatgtttagcaaatgtctcatattctccatatccacagttggtataactctgcatacgctcttcctttcttactatgtcttctgcactgaattgagctttc

SEQ ID NO: 363093 - DNA, 180 bp, Zea mays
gcagatctcctcgcgtcgctgccgtggtcgacgcggctcaagatcgccgtcgggcggccaaggggctggcgttcctgcacgaagacgagacgcccgtcatctaccgcgacttcaaggcctccaatattctcctcgactcggtaataaagaagcccgcctcaccaagtccaatctcttctc

SEQ ID NO: 363094 - DNA, 124 bp, Zea mays
ataaatttctctgctttcagctgaggatggcaacgtcggccaacaaggaggcaagatgacgtgcgacgagaacagcgtggacgatcggttcacgtacgcccggccgaccgtgtgcgagctgtcc

SEQ ID NO: 363095 - DNA, 100 bp, Zea mays
ccggctaaccctagcagcggcaccgtggcgacggcgaccagtagagggctagtcgcgccaccggcgaaaggattcagcggtctacccgtcctacgacaca

SEQ ID NO: 363096 - DNA, 295 bp, Zea mays
ctggaatttcctcggtgctctttacttggaacgtcgaaactttgactgtgctgccacaacacatatcgatggtggccgtccgtgtctctctggacgaacagtagcctatcgaaccaagattctacaggacgaattttcaccaatgacttcactaatgaggagtggtggtttggcaaataccaacttaatgcggatgatgataacttcatcacccgttggatggtctcgcatggctgggagacttatattcagtaccatccagaagttgaagtcaagaccactcttgagaacaacc

SEQ ID NO: 363097 - DNA, 218 bp, Zea mays
aaaaggaccaaaatgtcgtctgagtatcctggggaccaccagataattagtggaggggatagggagaaggaactagcagctggagggcctccaggtgcaagtgcacatgtggttgaaggatcaagtgcggggaagcagcctaaccagtatgcaagtagccaaagtagctcagcagattccaaggacaccataggttcgcatggtacatttggcataga

SEQ ID NO: 363098 - DNA, 161 bp, Zea mays
ccgaaagcggaaagcaaatagcagacggcagacaacagtcgaggggacacaggaaagcgcgaagaagaccgagatcctcgcccaacgccatcacgccactcccccaatactcaggtgtcaggacagcgagcaggcacaagcagatctcactccacgttgct

SEQ ID NO: 363099 - DNA, 368 bp, Zea mays
  unsure (1)..(368): unsure at all n locations
accgtcagcctcgtcaggtatgtctcgtgttccctaaccttgacgcttctcccttctcggcgcctgcttcgttggttgccttcagcggacgccgccgattcggctctcctgttcggcgccctccccagagccctccacccaccgtcagcctcgtcagggtcctcccaggacaaaccatgctccggagacagaggcggcagagctggggcaggagcagagccatcacagaaattcttgtctccagccgcgagaggtctcagacagataagatggtcgacggcatggacttcgaggagctctgcagcgacttcgaatgcataagcagcccctacgtggagtccataatgatgcangtcgcgcgggacatc

SEQ ID NO: 363100 - DNA, 253 bp, Zea mays
tgtttgtcagctaggttgtcatgtttgacttcctttctctagctcctcttagactgtgtataattttgatctcatacactgtgatttgtggatctctcctgttcttagtgttttcaggttataagtattacctggtggttcttgatgagtgctctcattattcatgacttttcctttgcgtttgaagcctgatacgtttctgactctcttgcacttctttgcttggggtttcactcagtttggtcgcacatta

SEQ ID NO: 363101 - DNA, 375 bp, Zea mays
ctccgagccaagcgtgcccacgccgggatccagccctcgcctggccatcctctcctcggacggtcgcgcctggagctcctcgccgagcgcccccacgccgggccacctcgggcaccggagcgccactaccaagggccgaccgaaccagcaccgggggcgagccatagtctggtgccaagcgaccgcgccggccgagcgcgctcaccgaggagccgccgggtgggcttcttgcatcgcgccatggctgccatgccgcggtcggcgtccgtgcccgagacagcagtcggtgccatagccacctgccatggtccagtcctgcgccgcaccaagcgccatgggccgactggatcttgcccacaccggagatgctccaag

SEQ ID NO: 363102 - DNA, 367 bp, Zea mays
cgcactggagcgagagaactctaaacaagcttacagcccggatgcgtcgccgacatggtgaatgcagtggctacaatcatatctacagtagcctcaactgcgacagtggtagtaatcgtcgccctcatcagaaggtgccgcgtcgtgaggacgaagatgaagaagaaaatcgtgaagaaagtcctggaggagattgagaaaaagaaccgcgagatgcaggccagcaacgccgtggaagatgtggcgatcgaggtcgggccagtggagacgtttctcaaccagatcctcaacgagaagccgatgcgtttcagctccgagcagctggcggcctgcacccggaactactcgtcggagctagggtccggcg

SEQ ID NO: 363103 - DNA, 287 bp, Zea mays
ggaatgggagaattgtcagcacaaggaatagctgcagaattgatgtttggtgagacaagaatggcatggacagtgatttccagacatcgccacgcgctccatacagtggatttgatggaacagcttgcaaggcatttcataaggccccttactaaggatcaaatggaggcaattatggagttggcaattcagggaaaggacaaggaagggaccaagaagaagggcagaaaggtggcacctctcaaggctcctttcatagaggctgctgagaagatctgagtgatgtt

SEQ ID NO: 363104 - DNA, 283 bp, Zea mays
ccgaacaggagatcgtcaccaggaacgagcagaccggggctgctcgcgcggccggacacggcgtggaccggtgtccggactccgaagatcgtcacgccgacgacgtaacatgcggaacgctactagtacaagaaacaacatccaagtgtacaatcccctgtactttgtagtcttgtttaggcaaactgttcatccgatcgatcaaacgagatcgttacaattttttttttaaaaaaaaaaaaaaaaaaaaaaaaaaaaaaaaaaaaaaaaaagggcggccgcc

SEQ ID NO: 363105 - DNA, 282 bp, Zea mays
agataccgccccccgagttgacggccatggcgtcacgtgcgaacaccatgccaggcaagtctgttgtcctctccctcgtcacgcttctcgtcgtcctcatctccgccgcggagagctacgacggccggtatgccgtctcgcactcggccatggcgcgccgctcccgcctggggacccggcacgcgcggcaccaccgcagccacaagaaccgggtgcgcaactggatcatcggcttcgtggtggggtccctcgccggcgtcatctccgggatggtgctgtcgg

SEQ ID NO: 363106 - DNA, 306 bp, Zea mays
cccaactgattttcgccatccgcgcgcgggtatggtcaagatccgctcgaccggtcttctccatgctcgcattggggtgaagctaatcccgcatccatcgcgggctcaactggtcagcgcaacagacgacgccgatcccgcgctggccgtcgtggcttccgctgcggaccaactacctgaaccgcgtatcgctgcagcgaagtccgccccagcaacagctcttcttctcagccggaagattaggccaggttgttgggtcgcccggcaatcgcgctaaccacagctacacctcgtcgcagcttcaaa

SEQ ID NO: 363107 - DNA, 310 bp, Zea mays
gtttcatcagcttggtcatggagaggacagtgctctgggtgtgaaagacatcctttttctattttttcagctgtccagcatttgtctctaatagtcaaccaaataaaaaccttgcattttggaggcgcccaagatttccataaccttttccaaggttcaaatttaatggagcctagaaagaaggtttttatagcaggtcttagggcttgtttggaaacttaaatcccctccgggatttccagggctaattttcccctcaatcctcaggagtcccggaggggatgtaagtttccaaactagcccttagaag

SEQ ID NO: 363108 - DNA, 192 bp, Zea mays
agatgctgtagctgctggtaggcaacaagcaaacaatcccagtcaatctgttgtgctgcaaccttatacagaagttcaaccacaagcagctactgcctctgccactgctggaccaattgttccacatacaaaggcacagttgagctgggtaaacacactccttggtgcaggtctttttcttggtttaggggc

SEQ ID NO: 363109 - DNA, 187 bp, Zea mays
ggctcgcaggtcgaggaagaacgtagctagatacgttaatcggtgttatatgcaatagcttttaatacatcactcgactttctaatgcacaatgcggctggtttcttttgaaaccagcctcatctgactgagagtatcgttcgtctaaattttaaatttaacttgttaaatttaatataaaaattta

SEQ ID NO: 363110 - DNA, 159 bp, Zea mays
  unsure (1)..(159): unsure at all n locations
ctcggaatcggctcgacgcccgctaagtcgtccgatggcatggagtccacgangattgacgtgacagctcgaggccatgccagtaacttgaaagggtcccgcgaagtcccatcggtgaaggctgacgttgtggganagggcanggacatgctgttgttg

SEQ ID NO: 363111 - DNA, 308 bp, Zea mays
cttctatgtggcatattctactgttatcttgcgtcttaattacctgcacctcatggtttcattggtgtcgtatgtcatccttgcattggtgggcaattcatggccgcgcagggtgcgcgtatggtggttttgcttattttatccagtctatgggtagcaaagggattgttgtatggttgcatgacaagtttggtcaggtttgctaaaatgatggatttgtttgccctctaccatttgggctgttgctggctagcgcacaacactactggataggttaatgcaagtatgcaatgtactctatcccaggt

SEQ ID NO: 363112 - DNA, 303 bp, Zea mays
cggctcgaggcacgctggccgcagcgccagcacggagggccgcagcagcagcattgccataaccagatggagccacagaagcgggcggcggcggcggaccattccgaggccgccgttgccgccagtctcgccggagggcagcagccgcagcagcgacgacgacgaggcgccggcgctggcgccaccgccgcggcgggcgcagcgccacctcgacatcgacctgaacctgtccatcagcctcgcgaggtaccagccgccggacggaaccggcagcgccatcgagccactgacggcgacgacgaa

SEQ ID NO: 363113 - DNA, 311 bp, Zea mays
ctcgtctctaccaccggtttcaacataacgaggacgattatctgtggacctttttttttttttttgcagattgtcggcttcataattggaggaacgcctctgattagaaatgctataatcggcgacagctccccgcttcgtgttcttcaggaatcgactgagttgataggtggaggagcgattccgtccgtcacgttgatcatgggagcaaaccttctgaacggagtacgaagcggggcaagagttcctccgtcggtgatagccggcgtcgtagccgtgagatacatcctgctgccgctgctcggcaccgc

SEQ ID NO: 363114 - DNA, 283 bp, Zea mays
catacctcctgggagcatcgggcttctcccagcactgacgatgcttgacctgtccgacaatgagatcaccggcagcatcccgtcagacgtaagcaacgtgttcaacttgcttaacttgtcatcaaaccagctcaccggcgaggtgccggcgcactgcagagtgcagcctacgaccagagcttcctcggcaaccggctctgcgccagggcggactcaggcacgaacctcccaacgtgtccagccggatgccgggggtgccacgacgagctttccaagggcctga

SEQ ID NO: 363115 - DNA, 301 bp, Zea mays
ctctccactgccatcttcaccccgccatggcttcgcccgcggcggcttctcgccatgttcagcgcgtggtctcgcaagcccgcctgcgctcagcacggcctttgagaagccaattggctctcaaccgatgggcttcctcctcttcaggcgctcggcggtctcccgccagctttggagcttcttccgcatcttcctcggcagctatatggcttgcagcagccgctattggcatcactgctcccttggcttacagcttgtcaacggcagagtctgccaagctggatgtctcgtcacttgccga

SEQ ID NO: 363116 - DNA, 289 bp, Zea mays
cggcgccggcgcgcaactgggaggaagcagctgccaccgagccctctggccatcccgttcctcggccacctccacctcgtcaagacgccgttccactcggcgctgcgccgcctcgggaggccacggcccggtgttctccctgcgcatggggtggcgccgcgcggtggtcgtgtcctcgccggagtgcgccagggcgtgtttcacggagcacgaccagagcttcgccaaccgcccgcgcttcgagtccatgcgcctcgtgtccttcgacggcgccatgctctcggtgtcc

SEQ ID NO: 363117 - DNA, 265 bp, Zea mays
ccgctctagaataactataatgatactactgattcatccattcgcttgtcctgttgtcaccctggcatgaatcttcgctagcaagtagtagtcgcacattgcaatccatcagcttgggaatttgcatcgcattattgctgcctttgtgcgaaagaaaggaagaaaatctggatgagtggcagatagctggtgccttggtggccgcttgtcatgctacttcgtggctgccacgtgcctgacatgattgagatacgcagtgtgcaaa

SEQ ID NO: 363118 - DNA, 309 bp, Zea mays
caaatctacgagtctcgcaaatcgtttaggatgcggtactatacctcgagagacacggtgtgaattgtattctccgaggatgagaaagctttggttgcaagcctgtgaagaaaatgatctacaagggtttgaggctgctgctatacagcgcaggcagatacaagaattcgctcagaacggaatattacagattcgcttgaggcaaatcagacaacaagatcagcagacacgattgttcatggcttctattcagaatcaaggcttggagggaatgtctattgctgtaggacagcatccgtcatatgagta

SEQ ID NO: 363119 - DNA, 310 bp, Zea mays
gaagacagtagctagtattatgtgttgtaattgtatgccttcgtttcatgttctgggtgcgtgacttgtcgactttgctgcttctggggttctgaccttggtaaggagagaataaagagataatatgagtgcgagatgcttgctgaactggtgctcagtaaattgatcccttgattgaatggttctgttctgttatcttttgccgcacttctccgaaaaagtttcaggtatgccatcaaattttatactcattcattatgtgtcacaaaaattgtgtgtatgacatgtggaaccagtggtacacaagaaa

SEQ ID NO: 363120 - DNA, 311 bp, Zea mays
  unsure (1)..(311): unsure at all n locations
ctcnctcaactctcctctgtcagccaactgaccaagcatcgtgccggaggggctacagtcacagatgggccaaggcgtaaggctaaggaagagaagcgtaaagacgtttggaccggcttgggttaatgggctgagtgagtgcgcgtgagagcgatatgtacactgttgtctgctggggagggtagcgaataatcagaactcatcttcatctccaagacattgtgctctctgcttcctgccttcttcctccttactctgaatctactctgagtattgtatccagtatatgcgagagtgtaacaagtggtatc

SEQ ID NO: 363121 - DNA, 296 bp, Zea mays
  unsure (1)..(296): unsure at all n locations
gctcaccagtccatcaacccatcatcaaaccctgccgccagcgtcattttttcatatttatcaacttttattccgaactgcaagccccgtactacaacaccctaggtccgatttatttctagtgcctgggcctgctggttcttccgtcacgatgaacggcactggcgatcccgagaggaaccaggccatcgaagattacaagaagacgcttttggatctccgagaatgggaggcaaagctcaagtcgctccgtatggagattanagactctcagaaagagtacgatattacagaag

SEQ ID NO: 363122 - DNA, 246 bp, Zea mays
cgatgatgaacacagctttggcagcaaggttgttgcagctcctctgaggttgctcgcgtttcttggcggtgcggggctgttcttcctgggcccttgaacgaagatataaaagaactagcgatgtgatccgcgtaaatatatactccgtatatagcatgacatgagtatctagtttgtcttatatggtaaaccatactaaattttcttgtatggcattaaaaaaaattaagactttattagttaatt

SEQ ID NO: 363123 - DNA, 299 bp, Zea mays
gtagaagcaagtcttctgaagttgaaggcagatcttggtatgataaattgataaatctcatctaccagtggttagatttatatatatgttacagtttgaggttgcattataatattatattgtatttctcaaataagtaactattagtgtgatctgccactattggacttatatatattagagattgaggctgagttagtgtaataaggtaaatggtactacttattagtgtgattgtgtctacatctactgttaaaacaaaatttcttaagcaagggagatctcatcctggtagaaaa

SEQ ID NO: 363124 - DNA, 291 bp, Zea mays
gtctggaaaagtttagacccccgtgcagcctgttctttacacgccaagttggcctttcgttttcatcgatcgacgtaaacgtctagcggatgctcctgcgcgtgtattcaaccgtacgacgagttccaaacctgccgacgatcgacaagcaacgagctgcgttctattcatcagactccagagacggagttcagacgtgcacgtgaggctacccaccagagctttgtttgatcagatcaatgtctcgctctcacgcgctctgaacttgtcaaatcggctgcacacgcgttc

SEQ ID NO: 363125 - DNA, 291 bp, Zea mays
cgccgaggccaagccgcccaagaaggggcccgccgccgccgccgccgacggtgacgacctgcacaacaccctccggctcacgcgcgacaacatcaaggccatcatcatggacgtgatgtttggcgggacggagaccgtggctgagctggatggacctgcagggcatcaaccgccgcctccgcgccgcccgatccgcgctggaccggttcatcgacaagatcatcgacgagcacgtgaggcgggggaagaaccccgacaacgccgacgccgacatggtcgacgacatgctcg

SEQ ID NO: 363126 - DNA, 291 bp, Zea mays
ctagttctagatcgcgagccgccgcccttttttttttttttttgaagaatgaaagtctgcaacccagcgaaactgattaataattatcacaccctacatatctgggatggcattatcgctgcatccctattcttgaaatgcctcagctgaatcaacaacaagtggccacaatcgctcacaagatggcagactcaagagcagatggtgctcctggataggtgaaggtgatcaatctctatcctttcttttaccagttatcgattcatccttattttctgtcagcccctgctg

SEQ ID NO: 363127 - DNA, 269 bp, Zea mays
gcaggaggaggacgaggaggcgatgccttcgctctcctgccacaacctcctcgacctcgccgctgccgacgaggtgcccctgccgtcgccgacgccgctccgcctcccgcgcgtcatgtccgtcgcgtccccggcctcgcccacctcgccgtccccgcccgccccgccgcgccgcgtcatcgtctcccaccgtctgccgctccgcgcgtcgccggatccttccgcgcccttcggattcaggttctccgtcgacgccggcaccgtcgcgt

SEQ ID NO: 363128 - DNA, 182 bp, Zea mays
ctcactcgctgctcgttgccggctgcgcccgcccactccaccgctgatatttgtcatcgtctcgttcctgccctcgggcctccccaactccagcaggcagatcagatacatccattcgcggaccggaagtaatcatcaggaaaggaaagggttgaaccatgagcgccgtggctgtttcgtcg

SEQ ID NO: 363129 - DNA, 293 bp, Zea mays
ggctcaagcagtacctgagaaaagtagtgaaaccgtgtaaattatctgaccgtgaaggagtactaccgccagtaactggcgcatgttcgtccagtagttatggtaagaatgtaggaggtggagactggttaatgtgtagggtcgttttttttgttttgttttgatattactaccattttgttgtaatgttcgtcggtacttccagcagtagtgtagctggccacgttttgttcgtccgccatgatgtaaatgatcatcgcccaactgtaatgcatgttctctctgatcgtttc

SEQ ID NO: 363130 - DNA, 306 bp, Zea mays
ggcgagggtgtcggagctcctgaccaaagggaccgccgcagccgcagccgcgctgggggcggagccgtcctcggttaccgcctgagcggtccagcgaaccgcgaggagaaagagaaccgatcaagcaatcacgtctgccgcacttgcgtgctcctgctccgaacagatgccacgacggacggtgacgctgtcgcgtctgtttgcgctgtggcgttggcgtcgtgtctctgcctttctggccgcatgtgttcgctgtggtaacatttgaataaaagaaaacgcagatttgtttgcactgcaccccct

SEQ ID NO: 363131 - DNA, 298 bp, Zea mays
aacgttaccggccggtcagcctctagtccacccgcgcgcggccggccggtccgtccgtccgccgcagcagagcctctagctagccagttggttccccgcccgcggccggcgacagatcgatgcggcgtgcgtggacgcccgccgacgagcgagcagcgacgacgacgagcgagcaccggcggcggaggcggatggggaagtacgagatggggcggacgctcggggagggccacttcgggaaggtgaggctggcgcgggacgcgggcacgggccgggccttcgccatcaagatcctcga

SEQ ID NO: 363132 - DNA, 299 bp, Zea mays
cgactacggggatctcgatgaactcgaggactctgaggatgactcttagcacgacgctcggctcgctgtttattgtgtttgtttgatgctttttcctcacagagaattcagaaaaaaaaacagaaagttagaactcaacgcatcaatcagcgttgcgctaaacaggcttttgggtcttacacaataattttttcagaacaatattagagtattgtaagtcgtgattgttgggtgcctcagtagcataatctccatcttggttatttttaactctttcagcttttatttaaggccgagtt

SEQ ID NO: 363133 - DNA, 279 bp, Zea mays
ctcgctaccttcctcagccggagtcgtgggcagagcagagcgatcgaggcctgcttcagcagttcagctgcagccgccgcccgcccgtcccccagtccccaccttcttttataaatcccacgcctgcgcttcctcttttgacgaatcggtcgcgaggggagaaagataggagtcaattaatttgcctgttctgcttgctgctgaccttgtgagtgagccgccggtcttccccttcctcgccgaggggaaataataaggcagccacacccagggccgccc

SEQ ID NO: 363134 - DNA, 292 bp, Zea mays
cggctcgaggctgctcctgctggtcccgaggagactcccgcggccgagcaggaggcagccgcaccggaggaggctgctgctgctcctcctgctggtgccgaggagcccgccgcggccgagccggacgccgaggcagaggctgctgctcccgaggagctcgccgcggacgagccggaggtcctagctcctgctggtccccaggagccggccgccgaggcggaggaggttgctgctcctgaggagcccgagaaggccagcgtatgaggccgtgcgcacgcagcggcggcggcca

SEQ ID NO: 363135 - DNA, 140 bp, Zea mays
attttaccccgacgggtaaacggggatacgtctggggaagcattccccatccccgttccccgcggggacccgttaaacttacatgtgacgatgttttcatataatagttaatgataaaaaataaataattatcatgccac

SEQ ID NO: 363136 - DNA, 306 bp, Zea mays
cggctcgaggctcgaggtgcgggaccctgctgcctcaagaaggtgctgttcctgcgcctcggcatctccggcgtcgcggccatgaagatccgccgctccgagtgaggcggggccctggtcgcgccgcgcaggtccgggtcgctgtcggcgcgcctcagcgcgcgctgtccggtggcctggcgccggcgccgcggcggtgtgaggagaaggtggaggtcaactccgccatattccccaagggcccgccggtgccgctcccggttcagaagatggccaggcacatcgacaccaccgaggtgagctgag

SEQ ID NO: 363137 - DNA, 315 bp, Zea mays
gaggagctcctcgactgcgccgtggcggacgtcgcgtcggagtgccaccgcatcgcgcgcctcggcctggaccgcagcgtcgacggcgaggaggaggagctccgcgtctgggcggcacgtgcgtctgactccgccgctggaggtgaccaccaccaccctggaggaggcgaggccgcgaggagggtgggagcaagggcggggtcgacgtgttcggccagacgcaccccgccatcgccgccgatgtcgtcgagtgtatgaactgcggtcgccctgtcgtcgacggcctgttcgcctcgcacctcgagaagtgcatgg

SEQ ID NO: 363138 - DNA, 306 bp, Zea mays
gctactgctcgtcattctcccttcccacacgtagtagagaaaaaaacccatccatcccgcttccttgattcagcctaggacgactgaatcaaacccatacgtgatcggaggagttggattgcctcccgcctctcggaggtcgcttccatctattaatcaagaaattccaaacttctcgcccaaatccgtgcggacttggtgaagcagggtaaattgggccaggagacgtcggtcccggccacggagtccccctccccttcaggccgttcttgttgggggagataaaaggcatcggtgcgtctgatc

SEQ ID NO: 363139 - DNA, 243 bp, Zea mays
catgaacgaatccttttattcaaaacggaacctgcagccattttgtctgaggaactgcaggttcaggttacagtagggccttggattgcaggctgtagtttagagttgtacagcacgcagagcgcaagcaccagagtgctaccagactaccagagtgaggtcaaaatacgatgacccagaacgaacgaacgaacgttaaagaatggtagccgatcagagaacgcaacaaaccaatcaacaaaa

SEQ ID NO: 363140 - DNA, 298 bp, Zea mays
tgtcactttcatctttgtggagcaaatttaatcgcttccatctggtgttcttattataggatcccacactcagatctaaataattaaatttacaggatgaagctctacttacagattggaagcagcagttggatcgtgatgttgaaacccttaaagccaaatcaaacattggtagcattcgcacggtaagctgcagaattgaagacagagttatatggggttcttggaacttaatatatcccactgtcaactgtacatcgttctttaaactgttgggcctgagatgtctgatgctata

SEQ ID NO: 363141 - DNA, 289 bp, Zea mays
ctcgaatccccgcgcccccgcgtctgaatccggcgccccccgccccgatccgtccgcttcgcgccgaatcgccgttgctcggggcggaaccctagcccgatctccacctgtttcctcgcgatgggcgccggtcgtgtctgccgcggcggccctttctccgcctcccccgccgctggcgccgccgcggggcggccgttcccgccgctcaccgcgtcctcctcctcatctccttcatcggccccttccgagacagcgtcacgtcggtcacaagacggtgacggctccacca

SEQ ID NO: 363142 - DNA, 244 bp, Zea mays
cgtagtaactcgaatcggctcgagacgcggctttgtttcggattcttgattaggaatgctcggtttttggtttgggaaggtccccttccgaggcgatgaatttggtgcgggttgatggcgtcctgtcaggagtccgctatgcaatgatgggttctttgaacccgaggtgaatctttgacctgcctagtttccgattccaaattccgagctcccagcgcttcttgatccgccgggcgccatgggc

SEQ ID NO: 363143 - DNA, 227 bp, Zea mays
gaacaagtcacttgcagcgtggataatacctgtatcctttgctctggcttccgctagatgtgaatacagtattttcggagtattgaaagctacgcttctgtcatttcgttgccaagacaagtgcctggctccacgtgaactcgtggccttgacctgaagaaaaatcattttctctctctcactcatagtgtatttttttaatctttgcagccaaagctactgattgc

SEQ ID NO: 363144 - DNA, 224 bp, Zea mays
ctttctttcttcgcctggcgttcccgttccctgccacctcgcccgctcttctcccccctctcgaccatctcctcgggagtagaggggggctgctttgggcgtggtgcggcccccagatctgggtcggcgggcggagggcgggatgaagtcgtcggtgatgagccggcaggagccgcggtgggtcagcaatggcgtcatcatcggtgccatgctgctgtccctct

SEQ ID NO: 363145 - DNA, 225 bp, Zea mays
acaccgctggcttcacctcgtcggggccgccggagcaccagccgttccagttccactccggctgctggccatcgtcgacggagcagacctgcagcagctcgcagtggtgggagttcgagtccctcagtgagtgagtgtctgagtgatcgatcgccagaccatgcgacggcgggtcactcggttccaacttccaagcacacacacacacacacgtaagcacgaata

SEQ ID NO: 363146 - DNA, 225 bp, Zea mays
agatgatagtttgaagaactattttaaacaactgtgtgacaacttgcgttcactggttcagtgcacggagaacatccagagtctctccataatgacatgctgctccctggttttcatggatgatttgggtgagaattggacccctcaatgtctccagaagctcgaggtcggttgcagcgcatttgacatattgccaagttggtttggctcactttctagtatctc

SEQ ID NO: 363147 - DNA, 107 bp, Zea mays
acctcctctaccaacgatgtactctggtgcatttatgggactcgtcaaaagcatgctgcgcaaaagtccagatcatagaccaagagctgcagaactgcttaagcatc

SEQ ID NO: 363148 - DNA, 150 bp, Zea mays
tatcgagtcgcccgtcaccacagctgatattgatgcgacgcgccggtcgtccatatcaaccagaaaagatttaaagagtaaacagtagtcatgtcgcggctcctcctcctcggggccgctgtgctgcttctcgcgtcggccgtcacggcg

SEQ ID NO: 363149 - DNA, 194 bp, Zea mays
agaccctcatcccggcgaccgtctctctcttccttgctctcgccgacggcagccccgaccaataacaatgtttttgcatttgcttttattggtcacttcggtcgaaccaatatctttttcttgcatattacgttctgctctcaatgcctcccagttacaatgatgcaccatgaccttctctgactccagaagca

SEQ ID NO: 363150 - DNA, 101 bp, Zea mays
tatacaatccagtaaggaagtcactgtcacttggtaggatctgaggccctcatcgccgccgtcctcgttgctctcctcgtgctgctttgccgtcgcggcca

SEQ ID NO: 363151 - DNA, 208 bp, Zea mays
cgatgcccaccactgcgcagccacacgctcaccatcgccgtcgcgtcgtgcctcgcctcacctcacagccgtgcggcctggtcgtcgttgagcagggagccagcgctaagctcgttgtgcccggactcgacctcgccaccatcaccgcctcgcccggagcagccttggcccaccgcgtcgcgccattgcctcgtccgtcgttgccatg

SEQ ID NO: 363152 - DNA, 131 bp, Zea mays
  unsure (1)..(131): unsure at all n locations
cggcgaagagacctcgggagtgagntggccgctgggagatgagacaacactgcaacggggtgcgctccctcccgttccggtctccgtcgacaccggtcgcccgctgccgatccatggggttgtcgcgggct

SEQ ID NO: 363153 - DNA, 299 bp, Zea mays
aagcgagtaagcaaccaagaaacgcaggcttgggccatggccagtaaccagcaccaccacctcctccttgctctattcctcatggctgctgccggcaccaccacagccaccacctcatcatcaggcaactcgacgacgccgacggcgtacgagatgctggagcggtacgatttcccgcgcggcatcctcccggagggcgtgcagcggtacgagctccgccccgacggctccttcgaggtgttcctctcgggtcgtagctgcgagttccgcgtcggcgaccgctacctgctccggtacga

SEQ ID NO: 363154 - DNA, 143 bp, Zea mays
agagaatatatagcatgggccatgggggaaacaggtcgccgtcgttccacgaatctgacggcgaaaggaggtgagggcggcgagcagccatcgtcagcaagtgataatcatgttcatgtcaaaaaaaaaaaaaagatgcatat

SEQ ID NO: 363155 - DNA, 127 bp, Zea mays
ctggatcgccgctgtcgcctcctgcgcctctgggaggtgccgcatgagcgccgtggacaattcctccgagcccacgcatcatcgatacgatccgtggtcattggcggcagctcgggcttctgcggca

SEQ ID NO: 363156 - DNA, 243 bp, Zea mays
ctcgcccttaaatgcagtttctgttcctggtgtgcccagcgcgtctcctggtatgtaaattgcgcgtgtcttttgcgtcttaaaagagtgatgacaaacaagctttcacgatgtttcagttccggctccctcgtccggggccccagacttcgggcagtcgccgacgccgtcgccgtcaaccccttcgggatcaccggcagcaacccggagccagaccagcagcgctccagcgcctccccagcg

SEQ ID NO: 363157 - DNA, 131 bp, Zea mays
ggtcccagctgcggctcaagacgcgggagcggaactctacaccaacaactacggcggctgcagcgggccggacgcgcacgagatgctgtggtcgtcgcacccgttcgggcacccgtccacgttcgacacgc

SEQ ID NO: 363158 - DNA, 193 bp, Zea mays
gcgacggcatgtcacagtaaccgtcggaacacccgctccgtagatcgattggagctaaggattgcagggccaagcttggatcgattggagctgaggattgcagcgttggtctatcggacagggttgccccagtattcatatccacgagtaatgatccaaatcgcagcttgcaaaaaacaatctctatataaac

SEQ ID NO: 363159 - DNA, 225 bp, Zea mays
agcaggtctggaggataagaaggttaccaagtcttagaagcaactccaaactgggtgggctaccctttttcaattttttttagtgacgtgctgtggacagcatgttcttataatggaccgatggatttgattaatcgacttgctttgctgccaagtacagccgtcactgcgacagtcatacagaatccaatatataagactttctatgacaatgttatactttgt

SEQ ID NO: 363160 - DNA, 222 bp, Zea mays
tccaccttgcatttgccagtggaatatttagctacctttgcaacgtcatagtaggccgtagacgtgaagcctttttacaccagtgggctttggtgcgagactccttttccccccctgcaggtatctatgctattcttgcaagattatcctacctaacacaaggtcacgataacaatgtttcccaacgtggttagtatagtacagctagcttgggatcctatc

SEQ ID NO: 363161 - DNA, 208 bp, Zea mays
tcggaattagaatatttaatatatttaaatatgtagaaagcatgtcacttatttctctaaatattacaacaataaggagcaggttacaacacatggtctttgtgttccacgtgctcagccttcggaattctcgacggtcttcgttctgacccattgagatggagggagcacccaagccttcgcccgctctatgcgcttcctccgtagc

SEQ ID NO: 363162 - DNA, 219 bp, Zea mays
aacgccaattcgacctaggcgtgtcaaaatattctgttaccgccattcgtttttctctttatttttttttttatttttttcaccctctcgttttcatatattcactcgtcctctgctgtcaaaccacactcgcttccacgaagagtcagtattgtctggcagtcactgagggtcaaattctgcctaccctgccgtctcttaatcgacatcaatattttc

SEQ ID NO: 363163 - DNA, 310 bp, Zea mays
  unsure (1)..(310): unsure at all n locations
ganaagagcaaggatgtcaccacgcttgactggaatggtgaaggtacactactcgctacgggctcctacgatggacaggcaagaatatggagtagagatggtgagtgaacaactgtatctgtatcatacctagttggctttagctcttcattctgatgttaaggtttgtttgatagacaatgtgggcccatcataaatgtaggattcttgtttttgactaatggtgcacattattcattgtgccttaaatttctgtaaaaatgatctggtgataggctgtttgttgatctggcataaactcattgtattt

SEQ ID NO: 363164 - DNA, 291 bp, Zea mays
  unsure (1)..(291): unsure at all n locations
cgnctccacagcaacccgtatcgtcttctccgtcttgtccggttcgggtggtccgcggtcggggtcagtgagtgagcaggtttgcttctccatctccccgttcccttccctccgcagcgccccggcccggcggcggtgcgtgaccctgacgccgcagcgctacctatctcgccggaatcgcacgtggcggcgcgcgagctgagagcacaggagcacctgaccggctcgggcaggcgaccgccacaaaagaccgcgggagagcagctgtggagactgcggcggcggcggcac

SEQ ID NO: 363165 - DNA, 308 bp, Zea mays
gtcaaccacctcgcttatcctcctcatctccctcttggtctgcacctacgcccagaagaagcctgtttggcctactgctgcctccgcttctctcttcatcaccggctttggtgaaagacgcgacgaaagacacttcttccgttatttctacaaccaagacttcgaacgttttgatggtcctcgtaactttttcggtgaacaatactggaccaccgccatccacgacgttaagggaaagcaagaatggttcatcgcctaccaacgtgacctcgttgactgcgaaagcttcgccaacaaccgcactctcc

SEQ ID NO: 363166 - DNA, 297 bp, Zea mays
atatttgttgttaagttttttaaaacaaaagtggtcaatcgcacacgattagaaaccaccgagattagaaatgtcaaaagccacatcaacattccccttgcagaggccagccatctgcagcaccacgatcgcattcacagccatgcatgccgtcatgtctgccaaatcctcgctatgcaaaataagctacagtacctcctgctaacgactagctctacgagatacgtgtatcgacaaggttccaccaccgaccctacgccatgcagcggtcgagacctctttgcattggttcacaag

SEQ ID NO: 363167 - DNA, 291 bp, Zea mays
tatgatctggctcctgttgctgacgactgtatggatcattcagagaaggggatcatcactctaaatgatcattcaggaggtcaagctgcttctgatgctcaaagaagtccagaggcagtctctgccagacaattagctgccgtaccatcagatcaagttgctggcccagtcaagagaagtccggagccaccggagcaggaatttgttggtatggttgatcattcactcgagcacagttcttacgaccggaaacaaactgccagcgaaagcgatcagtcatatgaaatagta

SEQ ID NO: 363168 - DNA, 288 bp, Zea mays
gttctgcttctgctacataaaattagaggatccatgggtattggttctatgaagtgaaaggaaaatgtgcccttggaccatttctataatgttttggtgattaagtgtccaacacatagtgagtgagttattatgtactaaacaaccaagaagtgcaaatcatataacaaggtatgtttctagacttagtaaattggtttttgtatactaatgtgtttgtctaagtgctagaaacagtgaccaaagaaaaggaaaaagagttggctatgtgcagccaacaccaacttt

SEQ ID NO: 363169 - DNA, 289 bp, Zea mays
atttagtcgttttgggtttattctaaattaaactattttaattttaatcaacaatatatataattaaattattttaaacttaaaagaattatatattatgatagtttaattcatgataaatttagtaaaattacttttgtattgtaaaaccttataaaaggttcgatatatatataactggtcaaaattgatagggaacgacttagaacaaacttaaaataactagattaaactaaattatatggacgaaggggtaggtacctactccacagtacttaatttcctctag

SEQ ID NO: 363170 - DNA, 230 bp, Zea mays
agcaatgcttacaaggcggatccttggtgaagaaaatgacaaggtagcggagtctcctgacacagatcagattgaccgatacatcacttcttcagtcaaaaatactttcttgaagatggcacattctgtagagttcaaagcagacactacaaatgagcatgttttagcatctctagctgaggagacaaagaaactgctgaaaaaagatacagccatttttacacctgttt

SEQ ID NO: 363171 - DNA, 215 bp, Zea mays
atcttacgcactcgacgccttcaggtacgagcctcactatggagaggatgacagcgatcaagttgtgagtggatttatgtccctatccaaggcaccctttgcaaaggatcaatatttcttcagtcgaactgcacagtttcgggaacaactacaagaggcacttgacagattgggctccatgattgttgatctgaatgagttggtgatgttcttgg

SEQ ID NO: 363172 - DNA, 210 bp, Zea mays
agcaataccacgtatgatgcaagcgcgcgccgggcgccgagggcttatatcacctcgacatactatagtgcatgagataattttagctttacaaccatgatagttggtcgatatgtctctgggactgagacacaacggtgggcctcatggttcagtctcagcgtaaccactatctttcttttataaggccctgaagatgttctgcaaact

SEQ ID NO: 363173 - DNA, 175 bp, Zea mays
  unsure (1)..(175): unsure at all n locations
cgaccatgaccgacaacgacagctaggagcgttgttgtttgatgcgcttttattgtggttgttcgtgtgtaattggttgccctccggccanttggcatgcactgtgtagggtcacactggtctaggtttcccagattgataacctagaccagtgtgaccctacacagtgcatgcc

SEQ ID NO: 363174 - DNA, 212 bp, Zea mays
ctgtattgttcgactccaaggcctgtgctcctcctcacggccatccatcgcgcgagcacctacctaccaacaattgattaaccgttctccatggctgtgctcctcctcacggccatcctgcttggctcatctttctcgcgtgcctcccagaggctggccttgctcgccatctcgcagctgctgcttccccgcccgccaccctctgcggtgcg

SEQ ID NO: 363175 - DNA, 165 bp, Zea mays
ctcggagatcggctcgatatgcaacctaacaccaaaccatgccaacctcagccaaagggttgcaaagagaagacgaggtagaaccccaacacctgggaagtatcttggcacgaaatcatcccgtggacggaggtactccacgagctagtcacctgatcggagggg

SEQ ID NO: 363176 - DNA, 270 bp, Zea mays
agacgacccaagactttctcacccccctttgcttcctgcgcaattcctgcggcacgcctttctctctttcaatggacagcgactacgttgccagcctgctcatgggcatgggctcatccgcccctgcgctcgacttcgccgcgctggacgccgggttcctcgaaacgctctgctgcggcggcggcggcctcttcggggtgtccggtgtcgccgcgggggccgggtgtggcggcgtgtccccggaggtgtcgtcggtgtccgacccggcgt

SEQ ID NO: 363177 - DNA, 295 bp, Zea mays
tatcatgtcatccaaaaaatcgaatggactcaatgttctctttgttcgacgagaagactacctggcccacccgcgccacagtggtaaggttgaatcgagactaagcaatgagcaggaggtgtatgatgctattgacaagtgggcacaaggcctgaaatgcaaagtgaatgtcgtgaacggtctttttgcccacatgaccatgaaggagcaactccgtgctatcctggaagcttcagtggtaataggggctcatggggctggtctaacacacttggtttcagcaactcctgataca

SEQ ID NO: 363178 - DNA, 298 bp, Zea mays
  unsure (1)..(298): unsure at all n locations
tctaggcnccaaacacacacccaatacagataaaaaacttgccccaaaaaactacatgaccacctaaccacaccggtatataacccccggagtcagcaacctagctatgatctgtccattggaatttcaactggaaagcattcggtccttttgtttaatggtattttatggtttttgtaattatatttggtgggtaacaggtgaagtgtgctgtgcgatgaagcaaacatgaaaaatgtcttagatataatctaatatgttccctgttagaaacaacaccaaagttatttgtgctaaa

SEQ ID NO: 363179 - DNA, 313 bp, Zea mays
tctgcctcgccgccgatatccccgatgcagacccaccatgcacgtccccacagcttctcgcctctgccacacacgtcgacgaccacgaccacgaccgccaccgccaccgggtacccaaagaagcagcacgcaccgccacgggccgtgtacggcgccgccacttccagcggcctcgagcaccaccacctccagctccaggacgggtgcgcgctgcaggccgggccgtcgtcggcggcggcggcgtcggcggacgcgatgcgggaggcgatcttccgcatcgccgcgctgcagccggtggaggatcagacgacta

SEQ ID NO: 363180 - DNA, 295 bp, Zea mays
gctctctctcccgctccttcaccctcgcacgtcgtctctttcctcgcgagcgacggcgcttctcacccgcctcgccgatggagacgccgctgtccaccaggaggatcacccgctcgctggccgccgcatccgcccagaagatcgtcgccgcaggatggactccgccgccatcttctccctgtccaagaacgccgccgcgggggagacacacgcacagacgcgcgcggcccttcacgacatcaccaacgactcccccgtcgtcggcctcgccacgggcagcctccacgccaccgac

SEQ ID NO: 363181 - DNA, 297 bp, Zea mays
tatgtgaagtgtattggattgcccacgacatattccgtctaccatggactttgagacatgtgctggaacaggtcagaaagtttttagatcgaacaactagtgaaatagttgtgctagattttcacaggttcccaattggtttcaaatcaccaaattcatcggaaactaaatttagattccaaaacatgtttaatttagttaaggaaattttaggacctcatattgttaaaagtacgagcagtctttacaatgtaaaagtatcaagtataatggataaacaaagcagtaaagtaatca

SEQ ID NO: 363182 - DNA, 295 bp, Zea mays
gtcgaggtttcgcaagcatttaatttgttgcttggctcttacaaaaaacttgaaactttgccaaataatcgaaatgcattgttaaatatggttacattagcaatttattcaactgattttcgagtgcgcaaaagttttcgcaacaatttgcttgcaaacttctacactcctttggctaaaaccaatttcagtttgtttggacgagaaacaatgaacagtgtaaatcaatggataaactctaagactcatggacgagtaaagcaactgttagcaagtcctttgcagcccgacactc

SEQ ID NO: 363183 - DNA, 295 bp, Zea mays
atcggaccggctcgttcctcgccgtcgacatctacccgtgcttgagccagatgcagcagccggacgacatccgcctggagtgacgcctgggggacgcccagcacgccgtgctcgacggcagcaacaagtactacagcctcctggacgcgcagctcgacgccacgcactgcgccatggaggccctcgggttcggcaacgtggatgccgttctcggggagaccgggtgccccaacaaagggaggataggaaagcgacgaccaccccggcgtggcgtcggaagcagcaggcgccgtct

SEQ ID NO: 363184 - DNA, 296 bp, Zea mays
ctgacttttacttgttttttttagtcaacattttgattaaagatggcccgcaaagtgatatctcgtaaagtccgcacaggagccccacgtaaaaatgtgctttctgttcgtccatttgcaacagctttgcgtaaaaagctccgagttgctttagacaaacgtgaacagcgtcgtgtatcaaaagtcacattgacaactgaggagaaaaagttgcttaataatactttgcagaccctttctactccaaagccacgcatccacaaatttaagtccggcattgaagctggtcgcgttgt

SEQ ID NO: 363185 - DNA, 298 bp, Zea mays
tccaggtttccagagccgcacggctgcagctgcctgccaacccctctacccccagctctgcaggctgcaccctaaagcagcgagcctttttaccactcttcctgctaccaccccacacggcgcacacaccaccatctctcgtcgcctcgcctccacttcctgggctacgtacccatctcaatcgcttcgactcctccgccgccgccgccatgtcggggctctacagccagggcttctcccctgcgcgaaacctctcccctcagattagaagcaacccggatgtcgatagccagtactt

SEQ ID NO: 363186 - DNA, 185 bp, Zea mays
tcccggaagcaggtccagatcaagaaggacaacgggaagactgtcatggtgccggccttccagacccttgagaccatagccggagaggtagtgctagtgccagttgtggttccttttcctctctgttcacgctggtgtgagtgacttgagtgggttaagtccatacgaaattgcatgcaggtgtc

SEQ ID NO: 363187 - DNA, 293 bp, Zea mays
atcgactctgtccgctttctaactgactcatcagcgcttggataggtatcatcatgattgaaacgcaaattgaaatcgctgccccgccttctaaggtgcgagaaattctgctcgacttttccaactatccacaatggcactcagcattaatcaagttgctcgagcctgaggatagttctaagtcgctctcgtcactcaaaccgggcgacaaagtcaaatgtaacatcgatgacatgaagtttgtcgcgaccatcacggcgaactcagaaaagctatttcagtggcaaggccca

SEQ ID NO: 363188 - DNA, 293 bp, Zea mays
ttcaggacgagcatgcatgcatttttaattaaacaaatggaaaaatttagtaaggacttaaattatgaccaactaagttccccagtaccattttgttttaattagagagaagttgagtcttatttttttcttgttctttttataattcttttcttttacttacgcttaaccgtacacagatggcttcccacggatcctcagacgacggaaatgcactatcccacactgacaggcttgcacgtgagggctttccccgcattttgtgggaggtacttcagggggccggatacacg

SEQ ID NO: 363189 - DNA, 264 bp, Zea mays
cttctgtattgctgtcacgtcgtttgttataggataggaaaacgatgcacacgcagttcaggacatgatgatgtgctgttcctaactgttaccgggaagaagagagaagaaaagagcgttgcataaaagatcgccacccgacgttgtacgctaatacgcaagttgctacccgagatgttacgacacgttctgtgtgcagttgcctagtgcccaatacactacacgcgctcgtccgtccgggctgcaggcttcaggctgcggtca

SEQ ID NO: 363190 - DNA, 279 bp, Zea mays
cgacacaattgagcgccacatggtcgtccatcagttcgtgtggcttgtcgccctagaagcccgatagtccaccacctatccatctaacttgccatagaggttgtcatgcataccctagggtttttcctgtcctgtgatggcatattgcacgacacatttctgtccttctctatctacgacgacaaggacaacctttgaacaagctcaactattaactattgcgaccaatatcttcgtgggcagcattctctcattgaggcacctcctgtgctgggccct

SEQ ID NO: 363191 - DNA, 299 bp, Zea mays
acctcacagatacgggtttgcaagaatgcatggaaatcatgaaaaaactatagacgacgggggaaatgaaatgtctataccttccattccattatcttgctgggatgtatgcatgcaaccaccaattttggaaatattttcttcagtatcatggtgggaaaaaggttctgacacatgagtattttcgagtgcagacttgacatggcaaccttttgattcaccaaatccattctgagtatgagttgttgcagaagcaggtgcaccatattccacagattcatgtatgctttcctgccaga

SEQ ID NO: 363192 - DNA, 296 bp, Zea mays
  unsure (1)..(296): unsure at all n locations
caactgtgatcgtttaagtagctcctcgtttagtttgccttcatcaaacatatcgagctcaccttctaattattattcttcaactggattaagagctcgtccaaaatcatttgacgcttcttcatcgtccgctccttgtgatacgatttcagtcgatgataaagaatcaaataaattaacattanaaaaagatttgtccggacaaccaatccatagtcaagatgtaactacaatcaaaactaatgattcggaagatgtcaaggattacgaattactgtatgaacagttattagttg

SEQ ID NO: 363193 - DNA, 296 bp, Zea mays
tagccacccacccttggtaatccggccggcggcggggctaaaggccgacaaggcatggagttggcggtgggggcgtcggcggctactttgaagtcgctcctgagcaagcttgggagcctcctcgctgagcagtacaccctcatccgtggcgtccgcggcgacatccagttcatcgccgacgagctcgccagcatgcaggccttcctcagcaacctgagcaagtgcaagaagagccacgacgaccagacggaggactggataaagcagatccgcgacatctcctacgacattgaaga

SEQ ID NO: 363194 - DNA, 273 bp, Zea mays
catagtcgagtcctgcataaaggccgagcatgttgagtcaccatcctgttgaggagatcagcaagatgaacaagttcgttccctggacaataatgcatcaaccactaagcccatggaaaaagccacttcccatgcaagggcagcaagcccaggacaagcttccacgtgctatgttggcaaacacagacattctccttccagaagcgcagaggggtcggatcagaattttgatgaggaatcccaagggactggagcatcaagacatgaatacaa

SEQ ID NO: 363195 - DNA, 285 bp, Zea mays
aagatatagaacttttaattgtagattaattagattgatttaaatgtaattgatcaatgttttattatttttgtagttacaaacacttaatttatattataaattaattgaagttaatattaaaacaaatttaaaatgttttctttttactttgtatccaatcaaatttatttttttgccgccaaaagttgtttgagaaaaaacaatttaaaatttaaagtttattatgacatatttacaattatatgacttaaattttacaaatgaattaaagttgatttctta

SEQ ID NO: 363196 - DNA, 284 bp, Zea mays
accttcctgagtttgtgatgtttgaaggcattgcggagattacagagatgacacacacaaagggagaaaggatgcacaagagtgaggatgatgttctgagcaaggagaagaaatcgaggcgcgctgggagatcacgtagcaaaggagaggctttaccagaggctgcaaatgatgatgctatagatgaagacagcaatggaggggcaggaaatgatacgttgagtcagggggaaaagtcaaagcgtgtgaagagttcatcgaagaagaaaacagacatttacaaa

SEQ ID NO: 363197 - DNA, 284 bp, Zea mays
cggaggtccagctgccggatggcggggaacgcagcgtagagcgcggcgatgtggcgggactccgcggacgaaactgtgggcagcgccgtcacgagggagatgtcgcaaccgtggccggcggaaagcgcgaccgcgaggcgggtgaacgggaccaggtggcccatgccagcgctcgggaagaggacgatgcgcggggagcttcgtgagccgtggctggacctggagggcgatgatggtgccggcgaggacatggtcgaacacctgggttgtgtggccgaagggtg

SEQ ID NO: 363198 - DNA, 235 bp, Zea mays
ctgaggacctcttgctgctaggatagcagatcgatcacaagcactcggagaagcaactaaactcggcatgttccatcaggcaagctttagaagcagaaatttgtctctgacttgttacacggccagccaaaacggtatcgaagtggtttttgatgacatccagcagccaaaactggctccgcgcgctgacagtaaagtagaactgactgaagattgcgggcgacacgcacccaat

SEQ ID NO: 363199 - DNA, 230 bp, Zea mays
attcttgacctctgagtcaccagagtgatggcatcgatgcccggatggccagaatcgcgagaactggtggacgaactatcatgacagaaaaaagaactgccggcaaaattctgtccaacttgagcttgttcggttacttttattatatatggatgggatgaaattgaaaactcaaaaaaaaataaaaaaaattgacctgctgattaagaaggcagagaaatgcctggaaa

SEQ ID NO: 363200 - DNA, 220 bp, Zea mays
cggctcgagcggctcgagcggctcgaggtcgcgacgccggttgctcaagccgttaccacctgagggcccccacattgccaagccgatgccgatcacggaggcaacggcacaggatagtatcgggagcgcgtcaatgcctaaacaggatgacgtggcagacggtatcgttggcaacggcgagccgcggccgaagctcaagccgctgcactgggacaaggtg

SEQ ID NO: 363201 - DNA, 224 bp, Zea mays
gacgagaccgccgttgagcccgaggaggatgcttcacacgccgaccctgacgctatggatgttgacatgcctcctcccgccaaaccttcaaagtcgagcagcaacatttaccaaccacccgatatccccgcgaaccctcaattccccttcttcacacagaccgtctcactctacgagcctcttttccccattggctgggcgcagctgtcacaagctgccagcaa

SEQ ID NO: 363202 - DNA, 219 bp, Zea mays
gctggcggctggccggcctctttctctttctcgtttctgccccctctgcttgcccccctttcatctcaggcgtcgaagagagagagagagagagagaggagttgcaagttggtgagatggatctgttggagcggaatattaagacggagacggaggagacgcgcaaggaacaggagcgtaaggaggaggaggcggaggcggaggcggaggcgggggaga

SEQ ID NO: 363203 - DNA, 217 bp, Zea mays
cacctcactgcatcatatatactaactgacgacagcaactaactaactaaccgagaggggttttccgacgcatgcatgcaggtgttcgggttcgtgaagctggcggagctctactacgccggcagccacggcatggacatcaagggtccggccaattgcaaggcctcttcttcccggcacgagaaggccaaggtgacacatcatcgcgtcgcctagc

SEQ ID NO: 363204 - DNA, 218 bp, Zea mays
ctcgagccgcgaagtcgaggtggtcgaagttcgagcatcaacggtacggtggggtgacacaacaatggacaacaacagactcgtggaccttcttgattctttccgtgtccggtcatcgaggagcctcgccaaggaagccggcgcacgcatgcgtctgcgctggtcaaggtggctgcgctcgctagaggggccgcgccggcctccggccagtggaggcg

SEQ ID NO: 363205 - DNA, 295 bp, Zea mays
agcagcagcgcctgcagctgctgcggctgctcctgctcctgctcctagtaaatatattcccaagtttaaacgcggtgagcatagcagcagcatcccttctggcagccgcgatgaagatcgctggggttcacgtggtccgctcaggcaagatggtcctcctgcacgactggatgcaccctcatcacgccaagatactgatcgctggcgtggatcaagattttcctctaactcaacgtcctcttcatcaacctggagccgttcacggaactgatcctatgctgcaggacttttttct

SEQ ID NO: 363206 - DNA, 294 bp, Zea mays
tagctgcaaaacttgctgaactagatggtgaagttgttgacgacaatctgaataatatcaggaattttgatatcccaaaggtggttttgaacaagaaattatcaccaagcacttcatccatggagcacagggtgttgtctactaatggcaaggacgaaaagtcgcagcctactgaagtgaaggccctgtacaaacagattattcgagatgatatgatgaatgactcaaacatggatgacacatgctctactgctaacttgaaagtgacaaggaaaagatctagcagtgatagtg

SEQ ID NO: 363207 - DNA, 289 bp, Zea mays
gcactttctcagagcggacaagaagctgggcctcgccgtgccgccgccggacgtcgagacggttcagctcccgttgtctccggacgacctgcgcttcgctcaggtgtacaggttcgtcggcgacgtcttcggctgtggcgcgatgtggccggtcgaggcgcactgcagaggctgctgggcgcggaccctgtagtcgtggacaccatcctacgggtgctggccaacctccaagacaacttccctccctgtagcttgtaggtcgacaatattttgtagccagttacgttat

SEQ ID NO: 363208 - DNA, 291 bp, Zea mays
aacagatggatgatgtcgaagaagagcatgatcttggaaatgatggtggtgatgatgatcttggggatgtttttgattggtactagtttgatcatggctggatgatgtggaagaagagcatgatcttggaaatgatggtggtgatgatgatcttggggatgtttttgattggatctagtttgatcatggctgggattaggactcacgatattatgattatgattctgctaatgttttgagtccgggccgatgcggacacttggtttgagaggcagcagcaggaagaggaga

SEQ ID NO: 363209 - DNA, 287 bp, Zea mays
cgacgacgtctacagcgacgacgaggaccggctgtccgactccgagagccccaagaaggccggctacgtcatcatccacgacgctgacgagtacggcgccggtaagaactagggctggggatccgtcttcggtctcgccggggggtcagcagaaggattttcgtaataacatttgcatgattgcttggaattgtgcagtatactctatgcacctttttaatcatgtgtgtcgcgtctgtcggtatgtatgtcgtctgggggaaaggaaatttaagttatatgaaatg

SEQ ID NO: 363210 - DNA, 288 bp, Zea mays
attctagatcgcgtacagctgccctttttttttttttttttttttttttttttttttttttttttaatcacatcacaaaatttctcatttccatttgtttatcacccaacaataataagcaattctcgtggcataaaccaccagaggacggattacacatacaaaatttgcagatacatctctgtatgtgtacgaacaagaagtggaggaatcggacagcgtgtataaaggagtaattaataagagaatgcccctaacaattagttagggccccagcagacgaggtgg

SEQ ID NO: 363211 - DNA, 284 bp, Zea mays
ggtgtcggcgctgctcctgaggtgcctctttagggtgtccgggccgggcaaggccaagaagttccagcagatcctggtgctgatggggaggcggtgggtgttcatgcagacggaggcgagccgcgttctcggcatggacctggaccgcggggacaacacgcacaccttcatacgctcggactcgccgccactgctcacccggaacagcatcaaccagagtccgaagttgctccaccccgtgcctcagccctgtctccaaggacttcgagcacaaggactgcagc

SEQ ID NO: 363212 - DNA, 279 bp, Zea mays
tattttttttttttttttttttttttttttttaactgtcgttggagagaactcgtggcgtgaatcaacagtaccgtaagtatgcagctacatgaatcaacagtacagcggttgacagacaatccatctcgatctgtctccttgcacacctagctcttggtcatcaatgtgcccagcccaacacgctgcgactgcgacgtggctggcaaattggcaatggcaaacttcaagtatccgcgcttcatcattcattcatgcattccgaaaacaccaccaaggc

SEQ ID NO: 363213 - DNA, 311 bp, Zea mays
atctcttcagaatccacttttagtttaactggcaggatcatcgacgagcggaggaggagattgaagtctgatgtggttgaaatgttgacatgcattaaagattgggaggatgctgaagcaaggatgcaacacatggtggatgacaaagagcttgaagaaacatttgaaaatctttatcttgattagtcttactctctttgtgaccatttctgtaatgggactgtaatattatgcacctggacactagactggactcgactgtaaacatttgaaaaacattttaatgagctgggctgtactcttttttcctg

SEQ ID NO: 363214 - DNA, 311 bp, Zea mays
agcacgccgcacctgagtccgttcatgaagccgctgggctccaacttctccaacggcgtcaacttcgccattgcagggtccacggccatgccgggagtaaccaccttctcgctggacgtgcaggtggatcagttcgtcttcttcaaggagagatgcctcgactccatcgagagaggtttggtttgttcagcgcttctgtgtttctttatcaaacaatcgtcatctattttttttgacttccctgaaccattcaccttttactcaaactgacgaacgaacaaaaaacaaatgttgtctggtattcttatctg

SEQ ID NO: 363215 - DNA, 303 bp, Zea mays
cttctgtttagcatacctgtatatataagaggttggatttcgcaccagaattgatggctgattctgtatccttcaggctcactctagatattgacattaacatctactttcctctctttctacaatgatctccttcgttgcccttctagctgccggagcagccttggcatcaccaattgagcgccaggccagtacagcaggcttgccgttgaagcgtgtttcgaatctcacgtcgccaaaaagtctcgttagtaaaggccaggctcgcctgaataaggtgaacggtgtggctgtcaaggccgt

SEQ ID NO: 363216 - DNA, 303 bp, Zea mays
cggctcgagcacaactgggacaagctcaacagtcacggggcccgtcattgtcgacgcccatccgccgcactaccaccatggacacgagcttgtgcacgcaccgccgcacgagattgtgctcccacaccgcagccggagtcggcaccacagccacagccgacatgcgagccgtgacctggtgcgcgctgagcgtctgtcgacaggggagctggtactctacgaggaggaggtggagcacgtcgaacagacgaggaacggggtgcggatcgagaaggataagagaggtaggatgtctattagcgt

SEQ ID NO: 363217 - DNA, 307 bp, Zea mays
gtttgctcggcctgaactgaacctcaagccattcaaactgatgtcgacggacgctcgccattaacttaaaaatggagcattgtgctgtctagctcatgctcatcggtggtgatccactcctaacttctgacacaggtaagggacttccgcgtcgctgaaacagaggaagacatcggattctatgctggttttcttgctgcgtcgtacatggtgggcagaggcttctcttccatcttctggggcgtcatcgcagaccgcgttggacggaagcctgtcatcacgttttcgatactgtccgtgtacggtc

SEQ ID NO: 363218 - DNA, 307 bp, Zea mays
catgtctgcagtactcgtccaacctgatgatgcagccgggcactcggtacatgccaccgcagtccgggcagatgatgaacccgcagtcgctgatggcggcgcggtcctccatgatgtacgcgcacccgtccctgtcgccactccagcagcagcaggcggcgcacggacagctgggtatggctccagggggcggcggtggcggcacgaccagcgggttcagcatcctccacggcgaggccagcatgggcggtggtggtgctggcgcaggcgccggcaacaacatgatgaacgccggcatgttctcggg

SEQ ID NO: 363219 - DNA, 299 bp, Zea mays
gtcgtgcctccacgtgcccctgcgcgacgaccggatgaactgcatccccgagtggccccaccagcgcacgcacgaggagtgcatcgccttcgagcaccgcccgccggtgcactgcggcgccaacggctgcattgttcatcacccgctgtgaagctccggcatacgcatacgcatgcatgcatggccatacatgcatgtgggttctatcgaaacggtgacggtctttctgcgactaaaaaatggtatttgctataggcaaagttgttttggatcataaattcgcgtgattttgatttgtg

SEQ ID NO: 363220 - DNA, 299 bp, Zea mays
cggctcgagcggctcgagggggttccgtagggcaggcgtcctatcttgccctagtggttaccttccaggaggatcgcgtgctggtggaggtctccaacggtagtgtccgtggaagacagttactcggcgccgtcatggcggcggccggtggcggaaaggaagccaccacatccggctgtggtctcaagcgccgctacgcaccacacgaccaggaggaggagacgatgaatcaagatcagccttctaaggaagatcggtgtgggcgaatttggagtgggatcgacttgctcaaggacgtc

SEQ ID NO: 363221 - DNA, 293 bp, Zea mays
gctgaaatcatcaaggtggctttggacctggggacccgcttttatgattccaagacgctagtcatacgtctgaatcacggtaaacttgctgaagcaatttgctcttgggcaggggtttctcaggatcaaagacaaaatgttgctgagtttctgtcttcaactattgttcagtattggccaaatgaagctgaccgcaagtcacagtggagtttgattagggggcaacttttacaggatcttcgtctttctgaagaagttgttgagaagctacataaagcagatcagcggttttg

SEQ ID NO: 363222 - DNA, 289 bp, Zea mays
cattttggtcgtccttggccaccaccacgcacgctcgtgtccctaggatgaactcaaattcactagaaactggtaggatttggctggcacggtggcacctcttgtattcgaagttcagccgatccgtgtgtgtatacatgaccacgacctactagatgaggcggtagagcgccatgagctaacaacccaagtagaaccactcatgtctactgcgtcctttgtcacctaccttcagcggccccgggagcagccggcaccggagttccgggcgccgccgccgtccccggtt

SEQ ID NO: 363223 - DNA, 220 bp, Zea mays
ggctcgagcaagaacatacctacgcaactagcagagcttacagatttgcacccacaggactctgaataaagctggggctttttgcagcacaaggacatggagtacccaagaaggacactgctgcacacccctttctccgggcatccctctggtccaagccagccaatagatggagccacggccacagacggaagcaacttcgacgcgaacgtggtcatga

SEQ ID NO: 363224 - DNA, 289 bp, Zea mays
aagattaagaaaaagggatgatgagatccatgtgggtgattttaccgatgatgacgatgacactgacagctgctcaactcctctaccaccacccctgtcacccggtatagattgggaggacttggatccttacaacgttcgccccttgagtttcccatctccatttgctgacaggaacgatgaagaggtggcctcgcaggttgccatggacaatggtcctgaggtacacacagaatttgatggagaggacgatgaaagtgtgcttggcattgtaggataggtccatgtg

SEQ ID NO: 363225 - DNA, 173 bp, Zea mays
ccccttgtgtcgcgacaacgctgggagcccattctcgcaccgcacttcgttaggttagtttagatcacatcattctcaggtttgttttaggcttttagcctacacctgtcgcctcaattaattcgctgtggagggggagattcggaggcattagcagaatcaaaatccatggt

SEQ ID NO: 363226 - DNA, 298 bp, Zea mays
gcaggccttccatagccattaaccagaaccgaccgagcaacagaggtggaggagagagcgcgctgagagatggatggctacagcaacctggccttgtcccctccgactccgactccgactccgacggcgagcggcgctcccagggcggcgaggccgtcgatggagctgaccaacacgaaggagaccaaggcgtgggagggcctggccatcggcgcggtcacgctggcccggaccttctccacgggctcgcacaggttctgcaggtccggcagcgagaggaggagccggagccggagcg

SEQ ID NO: 363227 - DNA, 308 bp, Zea mays
gctttatcaagtgttaaacattaggccaatgaagtgcagacttcatcatggaacacagataagtaatttgtatggatgaaacaccaaatggtcttgtttgacttgttatgttgctagcactttatcttgtccattaccattagtggtgatactatatagtgttcctgtaatatgattgaatgattttagccgcatcaatgttgtatggtccattgcagaaggcagtcatcagtctttatttgtgtcactgatactcacattttctgcattatctctaaatagccctttgtatatgttgaaaacatgta

SEQ ID NO: 363228 - DNA, 158 bp, Zea mays
gtaggcttaagtttcaaaaacctgaccattttatagttgtacactctccatggatcaactatactgaaaagcttagtctactatgacctcactagtcatagagatttttgcaagtacttatgtgaactcgttatgctaggcgatggtaactgtggtac

SEQ ID NO: 363229 - DNA, 157 bp, Zea mays
cgacgacgctggtacgaggtgggcggcgcgctccggtggaggcgaacggcggacgcgcgtcatggtgtacgtccagggccctgacgccggcgtcgacctcatggtcgcggggctccaggtgttccccgtggaccggaaggcccgcgtcaagcacctc

SEQ ID NO: 363230 - DNA, 290 bp, Zea mays
  unsure (1)..(290): unsure at all n locations
gtctcctcgcccactcttctacttcttgctgtcgtcgtcttctctcgactcnccgtcccctccctctgcctctctcatccgccgcttccggattccgccgcccgtgcgctcgccaccaggaattccactcggaccgctgcgtggattcctcggctcgccgtccggatctggcctcgctgagctgcagctgccgcgaatcccgactcgattcggccgcgctcggatctcgccggactagcggggatcgaggcctctcgattcgcctcggggccgagatggatcatgtggtc

SEQ ID NO: 363231 - DNA, 275 bp, Zea mays
gatcgaaatccgttgagaaacgaaagtccacgtaataaaatacggtagtttttgtttacagtaaattatgctacaacttgttggtaggatggatcagtgtcgaaacaacgcaacttattctgcaacaggaagcacacagagcgcacacatggtagctcgacgtggaccggatcggatcacatcgccgctgcttggctcgccgaccaggcgatggcaatggggctcgtgaccttgtgctcaccgtcgctccacacgatggacccgaacgtgtactt

SEQ ID NO: 363232 - DNA, 293 bp, Zea mays
atcggttcagatgtgatttatgcttagatttggttaaccagtgtacagaattggataaaagacttgatatggaagcagcttgatctaagttatccaaacatgccaaatgcaaaggttaatgccaatgaagtttatgtcatattctctttagaaaagaaaaataaatcgaaagcgttattcatttgtttgtattcctctggttaaaggtgcacagtggatttttctcctcgtataacaatacaattttgcgtctagctatcacaagtgctgtgcacaaggcaagaaagtcatat

SEQ ID NO: 363233 - DNA, 168 bp, Zea mays
  unsure (1)..(168): unsure at all n locations
cgggactcctactattcttcggtcagatccccactgctctcataagaaagggccttctggtggagagatgttacacaattactcacctacttcagaggatatgccatgcctcgtgtgggtgatggaagcattatcctcttttggcangatgtttggaacaatcacgcc

SEQ ID NO: 363234 - DNA, 132 bp, Zea mays
gtacctctcgctgccggagcggctggacatcgccattggctccgcggaagctatcgcctacatgcactcccttgacaatcaaaagcgtgtccatggagacatcaagccttccaacatcctccttgacgatga

SEQ ID NO: 363235 - DNA, 294 bp, Zea mays
cggtgagggtgttacaacgcaaaccgaagagtctggtaagaaagataagaagaaaaagaagaaaaggcatgccgatgatgagtgagacattcttcggaagagaatgtgcgggtaccaaatgctgggactcagctgttctgtaaaatgggtatcacggggttagaaaacatattgagatcagtttttggggttacctggtttttttgggggacctggcttgtattcaacaattacttgctcggtctagatgatgatggaatttttaacttttgctgttgtaaccccataaattta

SEQ ID NO: 363236 - DNA, 291 bp, Zea mays
ggcgctcaccgccgcgacgctctccaagctctcgccgtcctccgccgcgaacgtgcccctcgccggcgcacagcgtccccgttcgagtacgtcacgggctctgacggtgcgccgctcatcaggatcttgcccgagttcatcgagaaggtgatcacgtcgtgcggcggcggcaagtgcggcgccgtggcggcggagcagctgtgcagcacgccggagctgaggaagcactacatgcagctcgtgcgtgcgcgggcggagaggccgtggtcgccggggctcgagacgatatcc

SEQ ID NO: 363237 - DNA, 278 bp, Zea mays
cggctcgagcagtgagcgatgcacgcacctgatggatgactcaaatgaaccatgctttctttctcctgtctgtggtttcgatcggtgcacgtgctctgccagcttcctcggcgccgtcgacgacaccgcctgcttcggcatcgccaacatggacctcacggcggcctccgccgacgccgccgccggcaaatcggatggcgtggacacgagcgccttcttcgcccacaacgaccaccgcggcgccctgccgatgcgccaagacgagcagcagccagtgt

SEQ ID NO: 363238 - DNA, 279 bp, Zea mays
tttttctgttagttcctgcctgcacttccaaaacaaatctgcatgtggaatttggctggaagcttttgatgatggacttgtatagattgttcaccagatctctttcagcaaattgctcaatacagacctcaataatgcataacacatgccaatgccatcggggaccccttattgttcttgtacaaccagtttgaaattttgcgcaccttataaaaaactcattgggttctgtcacctactgaacttgcgatcacagaaattgcaatgccttcttataaa

SEQ ID NO: 363239 - DNA, 198 bp, Zea mays
agaccaccaatctagtcatcccttacgcagcacagcgagcggcgagccggcgacgcgattaacctcgactcagcggcgagaacaggaagaacaaggggaaggatccgtacgtgctgcgcggccaatccatgggcaactgcgccgtcacgcagcacgcggtgacgtcgtgggcggactacggcgagtaggacgtgccct

SEQ ID NO: 363240 - DNA, 228 bp, Zea mays
cggctcgagctggcgtcttatgccgactacctgcgctcagcgcattcacggacacttacggcccactctcacgttcccgcgtctgctgcacgcgcgaagtctgcctgccttcgcttcctgctggacatcagtgttcgccttcgccaatcgccgtctcctttgctgcgccgctccacttgtggtggccaaaggtggattttcaggagtgtctccagattctagccaagg

SEQ ID NO: 363241 - DNA, 369 bp, Zea mays
aggagatggtgaacgccgccgaacccatttcagacacctgtactcgctgcattttcagaaacaatggcaccaccgagcagtatagcagcatcaggtgagcagccatctatgaacgcgccccccgccacagaggcctgtgctggcagcataagccatcgggtgggatctcagccatgtgcttctatcagcacagtgcagacgataaattccgaagcattagcaagccagcaatgcggatccgtaccacaggtttctataaaccgaggcgaacgtgctgttgagatgaagggcagcactaataatcttcacgggcaccggccatgccgcaaactatgaatggtttcaatgccgttccaggacgggtgctgt

SEQ ID NO: 363242 - DNA, 301 bp, Zea mays
cggctcgaggttctctttgattcctaatcaattgtctgccatttgtaggctgtggagtacggagttcacaaaatctaggagatgaacaacctcagggtaaccctctcactgtctcatgccagcagccgcacccacgtcctgttctgtctcgcacgctctcgccaacttgtggttgtccatccgccgccaagcacccggtcccagcagtcgcaatgtcagtgtttttcttttacagcaagcttctgttctgaaattatattgtctatgatttgtaacttgcttggtggtatcaacaagcttt

SEQ ID NO: 363243 - DNA, 297 bp, Zea mays
cttcctcgcgcacaccaccggagccccctcctcttcctcgcgcaacggcggcttcctctccctctccaagccgccgccgcccaccgcctcagttcgcggatgcctcatcttcctcgtgtagaccaccggagcccccttctcttcctcacgcagagcaccggatcccccttttcctacgcgcagagcacgacgcataggaggtctgcaaagtctcatcaagatggcaggagatctacaaagttcaaatcagtaaccatctgctgaaggtgatacactgtaataggtgcaagcataaga

SEQ ID NO: 363244 - DNA, 250 bp, Zea mays
  unsure (1)..(250): unsure at all n locations
cggcgacgataaggttggacgccctgatcggcgcgctgtgctcgtttgngcgtcgcagccgccaccgcctgcgtctttctcatcggcggcaggctgcatcatcaccacacgcagcagcacaaaattcagctgcagttcttcggcgatgataagaggatccagcaagttgtgcgccagacgtcaaggctgaaccagaaggccatgtcgtttgcgacgggggcaggagcgtcacgacattttggaagggcac

SEQ ID NO: 363245 - DNA, 245 bp, Zea mays
  unsure (1)..(245): unsure at all n locations
cgccatagaaaccaatataattaaggatggcaaccgcctccgatgccactcgcggatataattccaaacccgtacttgaatacttgaatccgcgatgttttcaggtcacctacgtgtttttactcattgtacgcatttaaacaattattagccagttgcacgtgctttgctatggttgttatatatcatataaatanatattaagatatttatttaaatataatttttgtttatttcgaaacact

SEQ ID NO: 363246 - DNA, 352 bp, Zea mays
cgcagccgccgccgcctaccatcctccacctcaccgggtcccgccgccgcgccggatggaggaagacgacgagttcggcgacctctacaccgacatactcatccccactcagccccccacatccaagtccgcgttatccaaccctgttacagtcgaaaccctaccccgtccgcctccaaaccctaatcctagccctgtggcggcggcggcggcggcgggggtggaggaagacgacgactggatcctaggagggagcgaccccatacccggggtcgactcgaccggcgactgggccgacgatgacgacgacgaaggcgaccctgcgccgcacgtgaagctgcccgccgctgat

SEQ ID NO: 363247 - DNA, 358 bp, Zea mays
  unsure (1)..(358): unsure at all n locations
gcaaaagcggcgggtgtgcgctgcttggattgcagccattaagagagagaaacaagggtagaaggacgtgggtccattcgcgggtgagaattgagctcgtccgcaaccttcacgcatgccagacaatggtgcatccttgcactacgcgaggactcgcccacggggtcactgtgtcggagaccgggtgcctcgttgtcgacgtcaagagatccggcgcgccaccagtctccgtggacaactacactggtgcctcgaaaacgcacggttgggcaagctcgctccaggaatcaaatcaatctggtgctcaatcccacgaatgggaggacattctggaggtaactcagagggannaacatct

SEQ ID NO: 363248 - DNA, 354 bp, Zea mays
cgttgacgagctcctctggcagcagctggtgagcgacaccactcccgccaaaacatctagaacgatgggaacgccgagcggcgagcgtgcccagcggccttcacgcacacctccacgtcggccatggcgataggcaacgggcggacgagccggttcgcttctgctctcttccctgtcgatctgacgaggcgaagtgttgtgcttctgcgcttgtggtgggccactgagggagactagcagttatagatagcaggaggggcaccgcgacggtcattgggacggctgttgcctcctgctcacctctacaacgacggcggcggtgcgcgtgcggctagccagtgaatggactgtctc

SEQ ID NO: 363249 - DNA, 352 bp, Zea mays
cagctcacaattaagtaggagagcgagcccaccacaatggccagtccgacccaattcctgaccatattccctttaatctcccttgtgatcctagcagccatggcaactgcttcagctgcttgtgttggaccactgtgctgctactttggctgtgaacaagagatcagatttcccacctacttcttgtaccaagctcatgggaatacaaatgccaaccaatacataatagtgccatccagtcatgcatttgggtttggaaccattgctgctaatgactgggcaatacttgacgcgccacagcaaggcgcaaaggtcattgcacgtgcaagaggcatgcagatccaagttgacc

SEQ ID NO: 363250 - DNA, 355 bp, Zea mays
  unsure (1)..(355): unsure at all n locations
tctctcncgacttttccttcccttcatcgcacgacgagtgacgacgaccatcccccaaccccacgccgcggagcgcaccaaatctcaccccgcatcctttagggttagggttctgcccgcacctgtgaattccgttgcgcaatctctcatatcctgagtcgagaatcgcagtttcccgctcggttcgtttggggaaatcggttattttcgtccggccgcgtgggctctctgaagcgtttgggctgtcggctatttgccccgagttttcaggtaagaaatcgcgttcggtctggaatttagtttttttgctgacttctgacaagaaagctgcgttttttcttttggtttgtgggag

SEQ ID NO: 363251 - DNA, 299 bp, Zea mays
gggtgctccagcggctcaaggccatggaggccgggctgcaggtgacggcgatccggacgcgcttctccgcgggaggcgtgtggatgaacatcggagtggaaggccaggtatccgcttgtgatgtggacaagtcaataacaaacgccttgatagagctggaggggaacgatccaagaagcagcaagcccagattcagctgtcaagtcgaaactgtccagatggattgatcttgtttagttgtcgatcaaaatatagtagcagctagagatgataatctatctgctgccgctttaaaccaa

SEQ ID NO: 363252 - DNA, 151 bp, Zea mays
tcgtgctttcctcaacctcgccacttccgtggcgcgcagtttgtccgctgcttcacggaaattcctacgggacctgtatatattcgctgcgcaggcggccccgcctccggccgttgttgtctccgctcaccccgccagtctcccggcgtcc

SEQ ID NO: 363253 - DNA, 327 bp, Zea mays
cagaggagaagggagacctccaggcttgatgccctctcaccttcagcttcagtctggtgcgtgcacaatacagatagtagcatcatcatagattgtgtttctgatcagaacaacaggatcagatcatagggtacagagctgatacaaagaaacatagtggtaagccgacataaatttctgcaaaatgtttctttttttatgcaaagcaaatggtaaacattgagttcaaataaacggttatttgtacagaaagaaacattctcttgaactgttcttgtgtgacactggtagcttgcaccagcacctcgaagaaggaattgcagttca

SEQ ID NO: 363254 - DNA, 144 bp, Zea mays
  unsure (1)..(144): unsure at all n locations
tgtcaaccctgtccatcgaaagatgaagctaagagagttgcatgcttgaacacatgatcnaacttcatgaactcggtgctttgacagattttcttctacctggccaaggctctagaaagattaaggtatctacaacaaataatt

SEQ ID NO: 363255 - DNA, 323 bp, Zea mays
cgcatctccatctgcaatcctcgctcgctcacgctcggcagccatggcgtcgtcgcgcaccggagccggagccggagccggcggccgtgtggtggtcttcgcgttcccgttccagggccacttcaacccggtgatgcggctggcccgcgcgctgcacgcccggggcctcgcgattaccgtcttccacagcggcatcgtcgtcacctgggcgccgcagacgaggtgtcgcgcaccggccgtcggggcttcctcaacacaacggttggacatccacgtcgtagcatctcggaggcgtgctatggtctctgccggtgacgggacag

SEQ ID NO: 363256 - DNA, 349 bp, Zea mays
  unsure (1)..(349): unsure at all n locations
ggcanaacttcatgggacaatgggttgccatcgtttggaagtgactcatggcaacccttttcgagttcaacactatcagttcagaatgcaggtggagaatcagaagctgatccatggtctaagaaaacttctgccaaagatgattctgatccatggggtaagaaaactgatggtgattctgatcgatggggtaagaaaactgatggtgattctgatccatggggcaaggaagcggtatctgctgctgatggtgattccaatccatggggtaaggaaacagtaccttccgctgctggtgattctgatccatggggtaagaaagtggtgtcttctgctgatggtgattctg

SEQ ID NO: 363257 - DNA, 294 bp, Zea mays
atatggcgtatatgctctgtcatggagtggctgctgtgatcttaatcaagcatatcctagagaagtttccctcatgcgcatcttttggggaggcgcttttggtgtcaggtggtcttgttctctactttggtgatatgttggcacatacactttcaaagatggagttctccatgtcatcaaaagcattcattcacacacctcaaactagaagcgatatgaccgcaattattcagagttctcttaaagtttggtattgctggaccaaggagagaaagcaacaaacacaaacacctg

SEQ ID NO: 363258 - DNA, 287 bp, Zea mays
atgcccacgggcttcaccatcctggcgcaccaggcgtggcacacgctgacgctgggcctgggcaccaacaagtccaaggcggcgctcttcgtgttcgagtccgaggccatgaaggcggccgtggaccgcctgtggcccgccgtcatcccgctcggggacgtcaacaggaggctcatccgcggcctcacgggcagcgagatggcgcgcttcaagttccgcataggctgcctcaccatctacgtctacgccgtgcgccggctcggcgccgccgggttcatgcgcaccga

SEQ ID NO: 363259 - DNA, 238 bp, Zea mays
cggctcgagatcacctccttcccacgcagcgagaggatgaaaccacgacgcggatatacacagacgtagtcagctagccgcttctacctccctctccccccacgactgcgcgctgcagcgagaactcgttcctgctggggaactgcgccggcgtgcatgggaacgccgatatcaacacttccctcagtgcgcccaattcctcatggaccgccggctctcagagcgtcacaagaacgcg

SEQ ID NO: 363260 - DNA, 165 bp, Zea mays
caattgctgggaacttgctctacgtttgccgcccacatgcccaacacttacacctcctcgctcgtcgtccaagctgatgcccacctggctggcctgtggctgcatgtatatatataagatacgacgcatgttttccgtccaagtccaacgcaattaatccaaggt

SEQ ID NO: 363261 - DNA, 182 bp, Zea mays
ctagttctagatcgcgagcagccgccgcctcagcgtggtcttgtacaatggcggaagattctggcgccatcctccgccacatctcctccgtcaaggatatggtcgacaaggttaatgaagagattgaacaaaacatacagaagaccagggaaatagaatcagagatagtgcaacattctgaa

SEQ ID NO: 363262 - DNA, 182 bp, Zea mays
taatagcatatcaatggatccatagaatccaaagtctaacttggaaataaaaccatgaaaatagaggagagaactgaattttattcaataaataaaagtataatttaataacttcatcgcagtaggtatgatcaaactaaataattattcagtgtacaagagtgccacaaagtttgaattta

SEQ ID NO: 363263 - DNA, 190 bp, Zea mays
cgtgcgaggactgcatcctgcttcttccggtcgcgcccgacccggccgcagaatcagatccggtgccactggtgccttccctcctcctcatcgaagctttggggcccgtcgccgcctccctgcatcgcaccctgttactgccttctgcgtgagagatatggttgggaacagtgtgatgtggcaacacctg

SEQ ID NO: 363264 - DNA, 252 bp, Zea mays
cggccttccccaccactcccacacgcacaagccttcccaccacctccctctctccatcctccggccatcccgacccagaacccactccacttccccggtgaggctgagcgatccaccaccaccaccacggcaacgacgacgacggctaggagccaccgcgcgcacggtggcagcaggtttgctctctgaacccttctcgtagaatacaagctagtagaaaaaaggaggcctttcttgctgctgctattggat

SEQ ID NO: 363265 - DNA, 334 bp, Zea mays
catcactgcaagtagcagagcacgagcttgaagcagtcaatgaagagagagaaaggtttcaggagaaactagcgtgcacagaatcagcagttgctgaagccaaccacgctgtgcaggaggcaaaggccgagaaggagaggcttcaagagaagcttgcacacacggaatcagaggttgctgtggccaacatggctgcacttgattctaagatggatttcgacagcttccaggagaatttttacacagagttgtgtggttgtctcagacacacaaaagctctttcaaggaagccaaaggctgagagttcgcatctgaaggagcggttacttgacaa

SEQ ID NO: 363266 - DNA, 171 bp, Zea mays
cgttgattgtgagcaatgaggctggacaccgcaacaacggagcagtggacagccctagcacagcccagtttcagcttcaaaaggtgcctcagcttcagaaactgcaactccagaaattgccggttgttcagaagacaccgcagctagggaaccagcagcctatgcagacac

SEQ ID NO: 363267 - DNA, 299 bp, Zea mays
  unsure (1)..(299): unsure at all n locations
aggagcaaccgcagcaggtcaggtctgcctatgacccaacaaagctcggtacaaaccactaggaaggaggaggtcgccagaaaccactagctaggaaggagtgagggaggactcaggagtctagctagtttgttcgtccctccctcccgcgtcagaagtcagaactagcctagcctaagccgaaagccgaaaggactcggtgcttgcgtgcggcggatggcgacttcgtcgtcgttctctggccccggcgggtcnccggcccacgcgtctccgggaggcggaggcgcggcggcgcggcg

SEQ ID NO: 363268 - DNA, 173 bp, Zea mays
ctcgaactctctctcgccctcctcagtcctctctcacacacacactcactctcgtcaccgaagactagcaaggctagctactagctcgtactggaactagctcgtttcaaggaacttgccgcgtgccaattgcataagtacgtcgtacggttaggcctccctcagttatctct

SEQ ID NO: 363269 - DNA, 260 bp, Zea mays
  unsure (1)..(260): unsure at all n locations
agccgatcgagagcaaatggcacatgataaccgcagccgggcttccgttccagtcggcaaccctcctgccactccagctgctgctacggaggttaagcctccggcggctgctccaggtagcgaccctccagctacgactccaggcagtgattgtacggctgctcccacgcaaggtccgccgggtgaacgaaagctcaagaacgatccatttccaccattccctgatccaatacctcngcagtgatagtcggaatccagta

SEQ ID NO: 363270 - DNA, 344 bp, Zea mays
acacttggctttggtattttgattgctgtttgtttctttcaaaataagtaccgcttttgtattcaactataaaaatgttgacctgctaagagcttaactcctctcagtagaaattgtaactttgagcaaacaagccaaggctaggattagtgagccgctgcttctttttcaaagttgtacatgactggaaattaacatatccaggcttttcaattacatttctgttgcaagttttagctgctaagaaggtgtgtctatccgatactatgaaacttatagattgagtggaattgaacaatttgatcaaccagaaaatattctccaatgtttaaactcactttggg

SEQ ID NO: 363271 - DNA, 333 bp, Zea mays
ccagtcactcttttcggctttcagcctaccacactcttttttatacttaataattttaggttgctttacagcttcttattatccaaccccgtctctcttttccttcgatacaattactatataccgtaattcctaaatccagccttcaagatgcagttcaccatctccgccgctgccctcatggccttcgccgccaaggccctcgcccaggtcgccgacttcgaccccgttctcactcccaccaactgggaggaggtctccgctggcaccaccctcgacatccactggctagccaagcccaagtactccggcgagaagatctccatctctctg

SEQ ID NO: 363272 - DNA, 334 bp, Zea mays
agatacttcatcactactctgccatgctgatgtctgttataagtctcacatgggagataaaggggcaacctaattgtgcacgcaagcagagaggcgtggaactttttctgtgctgggccataatgcaaggatttgtcatgatgttgcagaatagatatcagcgtcaaagattatatactaggattgctttggggaaggctaaaaggatggatgttgtatggggagagactgctggtgttgaaggtcaattgttgctgttgtgccctctcctttttctattgcaggtggtgttctgtgggatcctgctgatttccatggcaattggcaacttcgc

SEQ ID NO: 363273 - DNA, 315 bp, Zea mays
gacaagtacatatgtcaatatgtgtcgcatgcttgaagaacacaagaagttgacagtagatgtaaacttgtgacattagttaatgttatatgatgtattttggtccttactttgtatcagtatgcatttcaagtttattattatgcatatagcggaatgatataacatatctctgcaagtccaatagcatatatgatcttactaatgtgctccctaattcacaatatctgtccaatttattaggatttacttcttacagtatctctctgttgggagtatgccaatggtttgagcaagccattgaaaaggagacta

SEQ ID NO: 363274 - DNA, 327 bp, Zea mays
  unsure (1)..(327): unsure at all n locations
agtanacaaaacgacgggcccactccccgacggctgacgccctcccacggccccttccatgaggcagctgcacctctcgccgcagctctccccctccacggtcctctcctcttacttctcgccgccgccggggagggcctcgtcctggcggcggcggctgcaccggggacgggccttccaaccgccgctctcctcgctgcgggatcccaacaaggccacgctccgcaaggcctcgtccaacgtccccttccgcctcggcggtggcgggagctgcagcccaaggaccgccgccccgccgacgacgacaaggcggacgaggaggccgag

SEQ ID NO: 363275 - DNA, 315 bp, Zea mays
agcgctttctcttttgcttacttgtttctctcacacacacccaatgggccgggtgctcaaatttgttcggctgaggaaaatacatttctcgtcgggggcatgatgttttgtggctatagctagagaggatgaagagacataacttggttaggatggatcgagtgacaattaagctagaacaagtacttactgatgatggaccgggtgcgacagtgaagagaaagagatgttgcgatcataaaaggccacacgatgacacgaggtgggtcatatatcattaaagggagatcaagcaagtgttgatctatgttattg

SEQ ID NO: 363276 - DNA, 309 bp, Zea mays
aggagacaagcaaatggtttataatacaaaacatcattctacagcaagagatgcaatcggaatataatataacacaatacaaatgaaaatgaaaaaggaaaaagattaaaacacaaaacatcggatctcactgacctttagtttattgagctagctgttccatgcatccaatctgtagcttctcttcttgtcctcgattaatcatcgctaaaacttcttaaaacgcctcatgacttccgatccagtgcatcctcctcacggcgtaaacgcatgcattatactatagcgcctagatgaaaagtctctcct

SEQ ID NO: 363277 - DNA, 323 bp, Zea mays
cttcattctcagttcaccttaaatcaatcaacatcaactgacctcactacgttaggcgcacttcttctaacagaattacaacatcctgcccatcatggctagcaaagtcagagtcttgttgaaccccaagtaccagcgcaatggcaccaagtcatatgtccacctcctgcgcaagtacgggttcgacaccaccctcgatggcccctactttcacgcatcgcacgtccaacagcaaggcaagttcaccgctaccggccagaagcctgttggtggccgggcccgcgttcaccgtgccttgcagaagaaagtagacggccagacag

SEQ ID NO: 363278 - DNA, 305 bp, Zea mays
tctgtcgacgagcggaatccttcctccatcttcaggctgctagtactcagtagtcagtacagtacagtggtgctgactacatgacgaagatctcccgctcgttgctcgtcgtcatcgctctggtcctcctctgccctcacctcccgctatccgatgcgctgacgctcaatcagggcgtcatgtccaagaccttcctgtccccgctcatccttcttctgtcggtcgacgttgccgacaagttctactacgacatccccttcacccgttgccacctggcgctcaagagcttcaacgtcgatgtggtt

SEQ ID NO: 363279 - DNA, 192 bp, Zea mays
cttaaccgggacagtcgagaggaccttttctcgtttttttttatcggctagcaccttgcgacttgcgagcgccgcatcgccggcgagcgccgttccgctgcaccctccgcgattccgccccaacctctgcgttcgaatctcccgcgaaacagtcacggcgatggcggcggccggcggcgtttcaactgatga

SEQ ID NO: 363280 - DNA, 180 bp, Zea mays
atcgtacatggactcggagatcatgtccatcatgtcccagtacatgccgctggacagccagaacaacgagaaccagcctctgcaggcacacgattcggaggctctgaggtaacttcaactctgctgctgcacccatgttgaggacgacgagcgaatggcaccggattctgatgcccagat

SEQ ID NO: 363281 - DNA, 178 bp, Zea mays
attacaatcaacaactaactactaaccaacgcaatgagtcttacacgatttttagccgatccatttgcggatgtgtttgacactcgcatggcatccttcgatccgttccttggagagaagggcggactgatgagccaatggcgtcctaaagtcgatgtgaaagagaccgacaaagctt

SEQ ID NO: 363282 - DNA, 159 bp, Zea mays
ggcctgtgttctttcgcagcatccgaggacgtgggaggcgcagttccagtgcggcatccaggtgcacacttttaggccttgacaaatcgcaatccggccccttttgatcagaggcagcagcgagcgctagctagcgtgtgggctgtggggcctacctct

SEQ ID NO: 363283 - DNA, 322 bp, Zea mays
gcgagtcatatatgatttagctgattagacagtgcagcactgtatgttgggatgggtacttgtttgttttgttgtgtcaatgaaaggaggctaggtgtgatctgtgctgctggttgtgtcatctcatctcctggtagttgaagggctgccatctgcagaagaaggaaaaaaatgaaaaagaaagaaagagcagtctgctagctcctgtggtagtgagcggtctcgctcagcgggatggaatggaaatgtaaaggaaatgtaaaccagatttaattctaaaccagaagcagagtgagcacaaaaagagagaagaggctgctgg

SEQ ID NO: 363284 - DNA, 161 bp, Zea mays
cgtggctatctgcgattcctggacgatgcacttgaatacaggattcatgtcagcgggccaaaccactcacgaaccgagagaacgcgtgcggggacaaccaaaaccccaaggtgcggcacggcggatcgcggtcctgctgtagcagctcacggagacgagca

SEQ ID NO: 363285 - DNA, 161 bp, Zea mays
cctttctctctcttctgttctgtgcactgactgttgtttggttttttttaagaaagctcgaccggtattaaataccctagcggcaactgattcggcctggagggagtaccccgaattattacattttcctcgatgtccccttgcacgcttagatttgccca

SEQ ID NO: 363286 - DNA, 308 bp, Zea mays
attttgtcaatgactacaagcagaaaaatcgagactgtctcactcaggtaatccataatcagatcttttgtgtggacatactggagtgagacagtctgtccacacaaaagatctgattatggattacctgagataaatttatttttgcttgcttcaatcagctttacaaaatggaccctgcagctctttgacacatggtgcaatattctcaaacgtgttcccaacagcgcattatggcttttaagattcccggcagctggtgaaactagagtgagagcatatgctgctgccagaggagtaagatcaga

SEQ ID NO: 363287 - DNA, 320 bp, Zea mays
gaaagtagtaccttcaatggtgaactgatcagccaccaaagaaatctgacactaacgttagaaggatgagtgttcaggatgcaattaacctttttgagagcaagcagaaggatcagaatccagattcacaaaataagaaagctggcttgtttgccactaagtctgtcttgagaaggtggagtgcaggaatgggtgattctttgaatgaaaactcagaaggaaaagtctcagattccacatctgaaagtaaatcaaacaacatagcttctgaaactgagaaggttgaagctgaaatgaaggctgaactaggtaacatacca

SEQ ID NO: 363288 - DNA, 312 bp, Zea mays
actatggccaagagcttcctggcgtcgagagtgcacctgatgcgctccgcaagaccggattggccgacaagatcaagtctttaggtttccgcgtggaagatgcaggaaacgttgatattcctgttggtgtagctacgagaaaagctggagagcgccttatgagccccgaggagtgcaccaccgcatgcaagaaaatccacgacgcatctacaagcatgcccgagaccgcgataactttgttactattattggaggagaccatagcattgctcttggctctatttcaggaattatgaaggcacgtcctgatac

SEQ ID NO: 363289 - DNA, 302 bp, Zea mays
cgcgacggccgcccttttttttttttttttgcaagttaaaaacatttctttaagtcagtcatgaacatggctacagtgaattgctccatcaaatgaatgcaatcggtgtcgaacgtaaactatagactgtactttttaaaaacaaaatagtactgtatccattattctacaagcgattgattaacatgtctcttaacgttcgtgttctacgctacgattgcctcgccagcaccagcgacaccggcagcgaaccggcgcacgcgaagcacgcggctgatccggcaagatctcaggcaccgccg

SEQ ID NO: 363290 - DNA, 333 bp, Zea mays
cgaggaggcgacacggggacggagcccaggagggatatgaacaacgggactctggtttttaacggcagctagaggatagcctggagtgagcatttcattctggagatacaatgggtggctgctgctgctgctgttctgcaagggcatctgattcagatagagcaccgcaccgacaaaatcccgaggaacatgcacccttgtcgtcagcctttgatggaccatcgccaacttctgctatagttgcagttgacacaaatcttgatacaccatctcttgacacttaccgagcaccacctgcacctttgccatatgatgtttgcttcacagtttcag

SEQ ID NO: 363291 - DNA, 320 bp, Zea mays
caaggccgcgccaaagcagtcctcgatcgatgcaacaatggcttcggttagtcgtcgcgtcctgctagcgctgctgtcccttctcctgctcgcgctccggcacgcggcgctgtccgctcccgtggccacattcccgggcgacaaggcggcgctcgcggcgctgaggtccgccgtggccgcgtcctcggtcccgccccactcctgcctctcgtcgtgggacttctcccgcgacccctgcgaggcgttcccgtgcggcgtcagtgctacgctcctcccgccgccaactcctcctacctccgcgtcaccgccgtcgcgctcga

SEQ ID NO: 363292 - DNA, 327 bp, Zea mays
  unsure (1)..(327): unsure at all n locations
agcanagagacgaatatgaaagaactgttgaagaagaacgcaagagaaaggaacttgaacctgaagtccctgaaatcaccttcaaccttcttagagccaaatacaatgatttaaagagaggaatcgacaatactgattatataaagaaggctttggaaatctccagtaacagaaaacaagaaaaggaatatttggacgccaagtatgattatacaaataaaagagttgtcaaggaacccactgaagaagataaggctaatcctgatgttattcttggattcaagagcggtattttggaacaattgaatactggaagatacaagattt

SEQ ID NO: 363293 - DNA, 327 bp, Zea mays
ccacgcaggctccgtgatgagggggcggggagctacgagtgtgcgtctgctgctgcggggtgagttcttggaaggaggccgtcggggaagtccctactgctgctccaggtggcagggagcaggctgcgcagggtcgtgacggtgtgggggcgagcaactgagccatggtcgcgctcgcggggagccgacccgcgtctgggacagcggcggcgcaatgctggcccacgcctaggacgacggcggcggggaagttggccatggggctggtggtgacatcgcagggggtggcgcggtggctgggagcgcggctggtgcaccggcggataa

SEQ ID NO: 363294 - DNA, 304 bp, Zea mays
gttgcagtatcagtgcatcaccaccagcggggcgagctagaaacagagagagagccttgcctgctcgaatggcgttcaagatagcggccatcggactctcttcccttctcctcatcctcgtcctcctcctcgtcgcgcccagcgctaccgcggcgagaccgacgcgtcagctgacttccgacgacgacgacgacggcactggtgctgcggcgcccgctgccgcaccggccatagcgcaccctgctgctgacgcaccggtcactgccgatgccagtccacctgtggtaggaggctccggtgtggt

SEQ ID NO: 363295 - DNA, 317 bp, Zea mays
acggctcgagcgcaacgggaggcgtccctggcaacaaaggcagcaatggcgacggggtggctcacacggtctctccccctccgctccgcatccacagccccgtcggcggccagggcccagcctctcccctccgccgccgcgccacgccgcatcccagcgcgactttcggttgccacgggcgggggcgagcagcagctcgtcaccgcagcggaaccggcgcacgcagaacctgattatggagttgtcagcattcaccatgtcgggatcctgtgcgagaatcttgagaggtcactggcgttctacaaggacctactggg

SEQ ID NO: 363296 - DNA, 323 bp, Zea mays
caccggtgcacgtcgccgccgtcagtctgttccttcggtgcagcaaactgtacgtgacggaggagccgagaagaaacggcgctgtgctctgctgctctgctcatggtgggtggggcattgtcgctactcgctagtcctggtaatccgcagagatctgcggggttttttttatcacaaagagagggagagagagaggatgcctcgtcggcctcgcctgtgtgcctgagcctgccactgtagttttgatccaaaggctgccggctggcaggccagtggtgcgccccccatcattcctttcctagctcgcttttcttctcgctttc

SEQ ID NO: 363297 - DNA, 323 bp, Zea mays
aacaattgcagcttatagtagagtagaagttaatcctccgtctccttttccaactcgtttatttggaacaatcactaaactgtttggatgcaattgtgttatacattctgatagtcgtaactacatatgttcaaacgagcagcttatttcatacgaggttggcgaaagagtggaatttagtgtaattagacaagataacgcttttagagcggatagaattatatcatgtcaacgttcaaataatgacttgaataaactagacaaatgtaatgttttaaaatataatccatgttcgtatgacagagtgattcaacgtggattca

SEQ ID NO: 363298 - DNA, 175 bp, Zea mays
acttaatcccgtgcgtattagttgcatgaacatgtttacttctattattaggtagctgttgcatgatgtaatcaacggtgtatgcgccatgacttgtgctgcgttcacaatgcggtgactaggtcctctgccatgaccggatgaaggaaaacggccctgcgctttaggcgggcgc

SEQ ID NO: 363299 - DNA, 318 bp, Zea mays
aggacagctgattcttcaaaagaaaaatagaagtgcgagtgataataatcagttaccgtcaaacggaaaagctgatgcaattgatgctagactcacaagtaaagctctgatctggggcagctctgtactcctactggaggatgttgtctctgtatcatataattctggagtcaaacattttacattgcatgcatactcaactaaaaagtctttatttaaaaagacatgcagagttcagaaagatttctgctttatagcctctacccttgacgaggccattttgtgggtgacagctttgctgaacaaagtatatatgta

SEQ ID NO: 363300 - DNA, 170 bp, Zea mays
tggtcctgatgaccttccagctacaagaggtggtgtgctcggagtacgcgtccgccgtcatcgtcaacagcttcgacgtgctggagtggtttgtgctcgacgtcatgcgtgccaccatcctggccgtatacaccatcggtccgctcgcttccgtcatggtgcaggtcgtc

SEQ ID NO: 363301 - DNA, 300 bp, Zea mays
gctctctccggcgtcggtcaacaggcaggattgagcaccgagctcatccatggcgcctcccatggcgcgggccctcctctggtccagtgcgcgcgacgagtcacccatggccgagctcccttcttccctctcggcctcgtctgccctaggtccggcactcctccccacagcagcaaatcgccggtgccctctcgtagcagcgtgccacgacactttctgctcgtgcgcaggattgctggcagggtcctgccatggccggacctgcctcctctagctcggctgcctcgctgctagcttcca

SEQ ID NO: 363302 - DNA, 260 bp, Zea mays
cgtcttcctccgcggatccctcctcttcgcggacgacgcgattctacaccgcgaaccctccctccctccctggattggtcgatgtgctcgtccatctccgctccgtccctcgcctcgccatttcgtagcttctttctttttcccttgtccctcactttcgggttctgcttgattcatcacattagtttactggtagggagggagacgttacgtcggctcggcgcctcagcgactgcgtgctccgcctcgggagtagccga

SEQ ID NO: 363303 - DNA, 142 bp, Zea mays
tcagagtcgcgtcctcaaccaacacgccctctctagctctctgaatctgtgcttcgacccggccaacttcctcctccagatgcagcaagcactgccgcatcacgaccagcatcatgatcagcaccatgaaggccacgacgac

SEQ ID NO: 363304 - DNA, 231 bp, Zea mays
agactgacgtccgtggctctgggaaggatgagcaaggacgatatctcatgcattgtcatccgttttcgatgctgactcttgggtaatccagctcatccattgccctaagctgcctgtgtgcatcagcagaactgtttcctccgtatcgtagctggtagcgtctggatctgtttgcagctcaggatcagattggtgattggactggacaggttattgaccaaagaatagaag

SEQ ID NO: 363305 - DNA, 334 bp, Zea mays
ctatatttcacccacgacgcagctagcgtgatagcgcgcgtgtaggcattctacgagcagctcggtcttgtcgttggagagatgaagaagaacaccatgagggatttcttgggtttcttgttcggagtagctgccgcggcggcctgcttcggcctgctcctgctgcatgttccatgcccccgtggcctcttgcccgcacagcaaggcctcatcatcttgggtaggagtactactaacggaacaaacgctgatcccactcccagcaccaagaaacctggcatcgcccctgctccagctccaggtgacgacaagctggaggcgctgctgaggcgag

SEQ ID NO: 363306 - DNA, 223 bp, Zea mays
acttaaatctggacttgactaatcctttgctggctaaagctatccaagccttcagtccgctgcgcatcagagttggaggctccttacaagatcaagtgttatatggcacaccaaatttaggattgccatgcgacccatttacaaaggtttcaagtggcctttttgggttttctcaaggatgcataacattggaaagatgggatgatattaatgatatgttcct

SEQ ID NO: 363307 - DNA, 215 bp, Zea mays
caacaagacgtagggacagcgccaaggaaccagatgggccgcgcgttctgttacgtgatactaggcggaggcgtggccgcgggctacgcgggctccagttcatccgcctcggctgcgaaaccgccgcccaagccggagagttctgcatcatctccgacgaggccgttccaccttatgaacgtcctacgctgagcaaaggctatttgttcccagaa

SEQ ID NO: 363308 - DNA, 145 bp, Zea mays
aggaagggagcagcctgtctccggggagattagcgtggatgacatggatattttgctgtagtttattgatagcaaaaaaaaaacacatgggagtacggaaattagccgatgcaataaaaacctcttttaacgaacagtaccatcg

SEQ ID NO: 363309 - DNA, 268 bp, Zea mays
cggctcgagcaccgagtaagcgtggatcacccaaaattataagaatgttttattttgatggcatgaattctcggtgttactctgcataattttgcttctcctgggcttccagaagcgtttcgaatgctttttctttttatgcattattgattcccttcccggcattcgtcatgtgtaacgatcaagacttgtttctttttcttctcctttgaatgttctgactattatcctatataaactatatggccgtatatcaaagtgatcaatg

SEQ ID NO: 363310 - DNA, 100 bp, Zea mays
cttcgttcctactgggcaccgccggggtggagcggagataggatccgccgagagctgattccttctctcgtagtctagtttgatgcggattcattcgctg

SEQ ID NO: 363311 - DNA, 185 bp, Zea mays
cactccaactgctcgaagaaagcacttgcatctcgtaatagtcataccatatcgtccctagcttgatcggtcgaccatggcagcatcagcagcagcagccacgagactcagcggcggcggcgtcgcactcttgctcctggcgctgctggccgccggcacctccacctcgtcggcgcagtctccac

SEQ ID NO: 363312 - DNA, 325 bp, Zea mays
caaccgccctcgcccctttccctccctcccacttaaaacgcaaccaaaggaaagcgacgacgaacgatacgaacacaaccgccccgcccccaagcgcggagtccagtccaagtccaggaaaggcgcgcgagatccaacgagcggtgaagtgaccctgatcttccaagatgctccgccgagcaagggttccctgcgccgacgcgcccgcgcccgcggtcgttgtggcggtggcgctcctggcactcagcgccgtggccgcagccgacttcttctcgcctctcgcgcacatcttctcccccgtcatcaactccatatgcagcacggt

SEQ ID NO: 363313 - DNA, 186 bp, Zea mays
ggcaacttcatccgctactccacggcgccgggccccgtggcgcactcttcctacggctagaccttcttccaccgtgtcaccggctgctggttcgactgctgcctcatcgttgacttcatcgtggatcggctgtggtacccgcgctggccgccgtacctgtacgggaagagcaaggacgacttcctg

SEQ ID NO: 363314 - DNA, 184 bp, Zea mays
cacatctcatatatttgattttaattctatagttttactgtgtctaaaacctttagaatctagagtctcctgccataacttcaatttcttatttactcctgctcgactttcaccaatcaatactacactgtctgcaaaaatgcatacaccaagggatatcctcctgtatgtcccgtatgatatc

SEQ ID NO: 363315 - DNA, 324 bp, Zea mays
  unsure (1)..(324): unsure at all n locations
accggcctggcgatcgccgacctgggctgttcctccggcccaaacacgcttgtgctcgtgtcgacggccgtcgccgccgtccgccgccgctgctcggagctccggcggcagcaccggagctctgcgtgcacctcaacgacctcccaaacaacgacttcaacctggtaaccaagagcctggccacgtacgcgagagcccaagaaagcttgggccctcctgtcctgaccagcatcgatcncggctcgttccacgcccggctaatcagcaagcgtaccttcacctggtctgctcaaacgcgagcttgcagtggctctcaaaggcact

SEQ ID NO: 363316 - DNA, 176 bp, Zea mays
tccaggccggctgccgattgaattcctcgtcgaggcccccctcggcaataaattggtgcggggaattcctccctgacctaaccggccagccagcatgtcgcggtcgaggttctcttctcggctcgatttcctcccgctgcggatggccggccgggtggagcatgcgtcgcgtgctg

SEQ ID NO: 363317 - DNA, 317 bp, Zea mays
cggatgagcattcgcttgcccgggcggacgcctgacaactgaaaggaatggaggtactcttccgaggaacttactggtgtcgtttctgggggatgcttcaaaggcataaagtggacactagaagcatgagggaggcctgcagacttttggagacatcgatgatgcaagtcttctcgacgcatggttggaccttctgtaatagattaactatgtgatgtttgtctattctcccaactgcgtttgggttttgtggccaaatgtggcgttgtttcggtaccttttgttggggtgtgtggacggccgtcatcagctgatgt

SEQ ID NO: 363318 - DNA, 183 bp, Zea mays
ctctcctctgcacagactgcactgcactatccaactcggagctgcattggcactgccactgctgcaccgctctgcctactgacgccactccttgaccggttccagttccgtacatggtcgcgcccacggcgtcgtctccgtcctcgtccttcctcggcacgatcttcgtggtcctctccgtct

SEQ ID NO: 363319 - DNA, 207 bp, Zea mays
gtcagcttgtgctctctggttgacgtgttggctcggattttttcggttcggtcggattttttttatttgagtagatttttttagattaggttaggttttaggtcaaaaatcgtaactcatatctgtaaattattgcggatcaagaatttgagttgtattggttggatgagatcggggttagtcccgaaattagcagccggcatacac

SEQ ID NO: 363320 - DNA, 149 bp, Zea mays
atggcaaacaaggcagttcaagttattgatatcgaagatgactcaccaattgaagctggtgcttgtgacacttcaaagtcaaaaggtgagatggtatattctagcatggagggctcgatgaaccctccggcaaacaacgatgctctaca

SEQ ID NO: 363321 - DNA, 130 bp, Zea mays
cacaaggctacaacagcggcggctgcttcgccggcaggccggccgccccctcctgtagcgcgctgagcaagtcaagtaagatggccggcgagcggcgacgtcttgccatcgggatcgatctgggcacgac

SEQ ID NO: 363322 - DNA, 226 bp, Zea mays
taaaccataaacccctgccccagtcacaccttcacccggggccgttctgcacgctctcgtactggcccgacgacagggctcccagcaccgcgaagaaaggggaggctgttgccttggacaagcacattacccaggacgccgacgtacggatagcaccatacaagatcgccattctagccagccgcgccttagatagcatcatgtcctctcatcctcctacacgagc

SEQ ID NO: 363323 - DNA, 354 bp, Zea mays
ataaagaatcgttaagcttggttgatgtcatataacgatccaagcagttgtctttcagtgatgtttctgtctgcaaaatggatgtgctatgtatccaagtccctgttttaggcagaacctacttggagaaacagcatcgaatgtgacatgaatacagagactgagattgtagtgctgctttattgttatgttctatttctctctttcagttgaagtttcgtggaatcgtagttattttttgtcttgactatgcatcgtgcaatttaaatattgattgatgaacctggaatcatttttttgtgcacctaaatagcttctgaaccttgcaaactcgtatctacagagaggaattac

SEQ ID NO: 363324 - DNA, 396 bp, Zea mays
  unsure (1)..(396): unsure at all n locations
tgccggctntagggggagtgtcgtccggcgacgccaccggtgcttggtactatcgacagccttcagacgccccgcagcgtggctcttggacactgccgcgttctgcgacggcgccggcattattgccgtcgtcccggcgtacgggaaccagcagcagtatgtcgacgcccgagcgggaggcgccgactagggccaggaagcggtggcggcgggcgcagaactgcaagtccccggaggcggccgagacctactggatgacgcccatatccggagagcgctatccctgtctccagatgaacgagcacctctgcgcgcttcgttcaccatgcccgaggcatccaacagaggggggccaacctttcatcatgggaggggcaatctcttcttgagggagct

SEQ ID NO: 363325 - DNA, 299 bp, Zea mays
  unsure (1)..(299): unsure at all n locations
gtttcaatatatngcagnctttgcaagtaagcaatatatgattagaattttaattatggattgcatatattgctgtctttgcaagtaagcaatatacgattctattttggatacatatatgtttgtacaactgtgaaggacaggcctggcacagtggtgagaagcctttccactgaaccaaaggtcctggatcgacgcagtctctctgtaaaatacaggggtaaggcttgccttcggtatcctttccttagatcccactcatgtgggagccgtcagcagtcagcactgggtttggcctt

SEQ ID NO: 363326 - DNA, 142 bp, Zea mays
cgaccggcttttacggggtgtatctaccccatgcgatggcaccactgtaggaggggagctaaacacgtgcctgcgcatgggatgctcaggggcacttgtgtgcgtgggcgatcggcctgaagattaccatccggtgctgaac

SEQ ID NO: 363327 - DNA, 325 bp, Zea mays
aaatatattgagacgaggtgtgttgatacttccctacaaataaatgtgtttctgtttgctgaggagttcattttgagtcttcatcagctatgttacagtatcaagagtctcaaaacttatatgtcagtatgctgattcttatctaccaacgatgattcttcatatagaggtcagcttccttgatgaatagtccatcacctgtctaccggaatcatgggtaatatatgtctaggggttctagatgtatatacacaagctagataactggttccagatgtttgaactttagcaattcatatttctgaattaagagagttgaaatggg

SEQ ID NO: 363328 - DNA, 433 bp, Zea mays
tccttatcggggggggtttataaaagagttggggcttttacatcaccggaggcattttttttttcttcatcaggcttctggatcttacctggcctccatcatggaacatgacggcacgaacctgctggctgtcaatgaggttctgcgctcggtacagctgctcaagattgacggctactgcgccaccgctaccatgagcgagctggagttcatcaaatccagatggtgcaccaatggccacgagtgggaggtccgtttccatcctacttacaagtggaacgggcggtgggtagcggtgaagctcatacttatcagtgaacctctgagggacaagctgagggtgagcctgagctgccggatgagacccaacaactttcagcgggatctcggtgcctcttatgagcagagtttgtcccatatatttcccagtgac

SEQ ID NO: 363329 - DNA, 430 bp, Zea mays
ctatggctcccagagccggccgccgtagatctagctccgcagctcccagatgaggtggatgtggaaccagacggagtggatccggcatccccgctgctcgtcgttagccccagcctcgtcgtggatcctgccccaccactccctctcgattgcaaggtggatcgacacagagatgaccccttccagcccgccgtggagacgacgcttgccttccagtctgacacggagaggatcctgctactgcgttctctgtccatccccaggacacaggtgacagcgatgacagatcggcatacttgtacttcaagtgccaggagaaggaccaccactcccactagctcgtgggttgctggactagctcttccatcttgatgaagaaaccaacatgggtgccaagagttacaaaagagttgcaagacaaatgaaatgt

SEQ ID NO: 363330 - DNA, 201 bp, Zea mays
tgggagagaggggtggtgattcgccagaacacacgtctctggacgagggtatcccgtgcggggagcctgccacggggaacgaatgcgggcacagaagcaggcaggggacgttcgagctggtgagcgtggcgaaccaagcagagcaccaacgtggaccacaggaacttgcccgcgacacctgacgcccttgtactacaagca

SEQ ID NO: 363331 - DNA, 343 bp, Zea mays
catagcgggggtttggttcaagcagcttaataagtgatcaagtgggagagaaaaatcgtgttgaatctgacagagacaataacaccgtgtggagcactgatttactagaagggtatggtgcatccatagaaagctctggttcaagcagcctgttagcaaatgatcaagtgggagagaacaatcattctgaagctgccagagccaatgacagcatggggaacattactttgcttgaagcttacggtggtgcatacataggaacctctggtttatgcaacctgttaacaagcgatctattcaggcagaacggttgggctgaagctaccaaacacattgacaattt

SEQ ID NO: 363332 - DNA, 400 bp, Zea mays
tctccgatccctcggctccccccacaattcacacgcgcgatggctcccctgctcctgctcctccccgtcgtccagctcctcctggccgtagccgacgccgtccccgattcctgcgccaaagccacatgcgccggccatgagatacactaccctttccggctggactcctctatgcccgacgactgcgtggtgtaccccgtccccgggatcggcctcatctgccaggacaactacacgctgatccttccctttgagtcgcacaggtacacagtgctgagcatcaactacaaggcgcacaccatcctagtcttcgacgccgacatcggcgacgagtactcggcggcggcggcgggcgccggcttgccgcgccttcacgtgaacctgaccatggacgccttct

SEQ ID NO: 363333 - DNA, 369 bp, Zea mays
tataggtttggagggtatttttttgagccctggcgttgtttatactaccattcctgcctggtagattgatgtctattacatctacttagggggtgtttgggaacaaagtttttctgcagtattgaagcaatactgtagtattgagcaatactgtggtattatatactttgaggtgtttggcaactcatctgaaatctctgtatactaaaatgtagtattgtaaatactgcacttgttttgcagttttggaaactttggtctcagccaaagttttttttctgtaaagagaccaatcagccagagcgggacccagctggctgattggtctcaaccaaagttttttccaaacatcttgatgtattggatact

SEQ ID NO: 363334 - DNA, 361 bp, Zea mays
gcggagacatgggatgttgcttcagcaagaagcgcaagacccgtccggtggccggagcctctgccttcccgcaccggtgcgagcccgaggaccgcgacccgccgtcgccagaggagacggtcaaggaggtgctctcggagacaccgaacactaagccgagggccgagtcgaagctcgtcggcaatggcgtcgtccccgccgcggacgagcgggaattggagaaggccaagaagcaagacagtgtcgacgccgcggtgagcgacctcggcagctgcgtgtcgctctcgctcgccaccgacgagcggtccgaggcggtgtctgagtcctcggtcgccaccagctcggtgacacgtccggagcg

SEQ ID NO: 363335 - DNA, 455 bp, Zea mays
  unsure (1)..(455): unsure at all n locations
ggagcaggagggggcttcattagatgtaggggggggcatggaactggggcaccttgaagagatcctcgtcgtcgtccttctctgtcgtcggcgcggcgaagaagaaggtccctgcctgaaagtactgggtgacgggcatgtcgtcccacaggttccagtcgccgaacgccgggacttggcgccacttgcagtcgtcttgcgcctatcagaaaaaacgaaacggaacaaagcttactcctctggactctggtgaaagcttggaagccagtcttggaagcaagaaagacagtgtgtgaatgtatgacacatacgtgcttgtttgaaaagaaaataaacactgttaagagcatagtatgtctcttagattaacagtagataactactactatctctattcttttttggttgtcacgttttagttaaaattaaactagcggcgacanatatttaagaac

SEQ ID NO: 363336 - DNA, 338 bp, Zea mays
gggttagctagcaagttacttagttacttaccaacctacctgtgctttgtttcggttggttggcgccatagccattgccgaggaccgagggagcacccgggcgggcagtcaggaggcggtgagtaagcatgctgggagcgagccccaggcaggaaggcgcggccgccgtgaactgggtcggcaagaagcgccggcggtcggtggaggagggagcggcggcaaggtgccggcggaggaggtgtgggaaggtgcggccccgcgggatgctggtgcaaaaagagggccgcggcgaccactagccctcgtccaacgtgaagcccgtgcccaccatccgggtc

SEQ ID NO: 363337 - DNA, 460 bp, Zea mays
ggcctcgccggccggctttatgcgaaaacgcggtgcccttacccgattccctccggcgtttcctggtgagtttacgccagcgccgacttctccgatcaggtcccatcggttttgggtgcgcgcacctcgtttggcttcgcgtcgttcttcggtgcgcgcacgcgattcgtggatccggcggtcggatcccgcgccgtccgcagcgatggctgctccccaacccttgcttctttgcgcgcaccccttccccacggtcttttagtttttacatggagaggggcgaccctcgctagccgcagggtccctctgcatcctcaccgctttcttcctctgcaggtcccttagtgcaagcaaggacacccgtcctatagcgagctctgttctgaagcggcaagaaagatgattaatcttttcaaaataaagggtcaaaagaaagaagaggcagcaagtgctgcttgga

SEQ ID NO: 363338 - DNA, 318 bp, Zea mays
tggagtggccgtatggaagatagcatgcttcaaggatgcattcctgtaataattcaggatggaatttttctgccatatgagaacgtgctcaactacaatagttttgcagtccgcatacaggaagatgacatcccaggcctcataagcacactctcgggaataaacgatacgcaagtagagtttatgctgggaaatgtccgccagatgtggcagaggtttttctatcgagactctatattgttagaggcgcaaagacagaaaaaactcttctctgaagaggcaccctggtctgttgaggtatcgaaacttcctgatgac

SEQ ID NO: 363339 - DNA, 455 bp, Zea mays
agcttggggtgtttgattggatcagggggcgtgggttatactgtgccaggttcagctcatagagactgctcaatttgggaccgtcgtcgaaattagacctgagatctggttgtatgtgacattcaacacgttgagggacaccaggcttccgagtttaggcgacattgttccagttttgctttcttcagttcaaattttctagattttacagattcatgaatagccccttattattggtgcaactaatattcagtctgctaaaatatcaatggcccacctaatttcgtaaaaaaggatgagcactacacgaaccattcctatactttgtgaactttgttttcaaacatgccttctagctttaccatattaacaatagacaaccaattcagttgatgctttgacttcttctttccggcgtaagtagtacccctgctcctcaagtacaacatgagcga

SEQ ID NO: 363340 - DNA, 187 bp, Zea mays
taccggaggcggcgctcatggaccgtaatgccacgtgcactgtgtgcgcggctctacagactaccgcacgaccgacggagggagacccctcaagagcaggactgtctcgctacaaggtcgtggccacagcaggcagtacacctacagagcagagctactgagacctcgcggaggctgcagatcgcag

SEQ ID NO: 363341 - DNA, 170 bp, Zea mays
cccgacgccccccaagccgacgccacccacatacactcccgcccctacgccccacaaacccacttccactccttcgacgtacaccccttccccaaacctacgacacctaagccgaccccggcttacgtacacttcaagcccctagccaccggctaccaagccttccacgc

SEQ ID NO: 363342 - DNA, 109 bp, Zea mays
gtgtgttgaactgaacggaagcttacagcgcaatgagacccatgggccgctatgcgactatgctgtgctgatagacatgctatggccgtgtgccacacatgtcagatct

SEQ ID NO: 363343 - DNA, 182 bp, Zea mays
ggcgatgcggaacgccatctagggcaatgaacggcaaggagctggacggccgcaacatcaccgttaacgaggcccattcccgcagtggccgtggaggcggctgcggtagggactgtggtggccaaggaggctgcggctacggtggtggcgggcgccgtgattgctgtggcggttactgcggt

SEQ ID NO: 363344 - DNA, 225 bp, Zea mays
tgctagctgtgatgggcaagaaaactctgacagccctgtttctcatccagcattagatacaaaggggctgttgcacacagaagatcagcagagtgtggtacaggtagatgaaagtgaattcaagaactcaacatctgggattcacaaaggaagatttcaagcatgagcaaggaataagcactgcaacagtgaacagcaggcatgcactttggcttctaactttgc

SEQ ID NO: 363345 - DNA, 242 bp, Zea mays
cgacgctcggcgccagcctcccatcactccctccatcgcagtctccacctccgtctccccacccgcggcgcacccgcggaccggccccgcgccacggctgacccgtcgtccgcgctcgacgcggcggccggggagggggccgtcggtgccaccaccgcgctgctcgacgtgagcggcatgatgtgcggcggctgcgcggcgcgggtgcgggccatcctggcggcagacccaccggtggagat

SEQ ID NO: 363346 - DNA, 240 bp, Zea mays
gtcctccctcgtcgccaacctctccctcgccgacatcaagaacgcactccgcctcctcaccctgctcgactacttcgacgagaagaagctgactcatcggcttcgctctcactcaccacctgtctacgaccaccggcaggccggggcgacatgggcacgtaacataccgcctaccgggcaggcgcttggtcgcggccgggcagtcagcactacacaggcgcgcgacttcggcacttcgct

SEQ ID NO: 363347 - DNA, 538 bp, Zea mays
gcggacgcgtgggcggacgcgtgggggggttgtttgttcgcttgcgtgcgcgctttttactgttccgcagtcagtcgccaccacatccattctccgtcttcttcctcgcccgccgacccctgaccctgaggccctgaccaccgccgctgcgcccgctgacatttgtctccccggtcgccgaagaggcgaacgtttacgttgctggattcgcgtttatcttcccccgcattacttaccgttgccccacgtcagaggatctcgttccgctcctggagcctgcttggcttctcttgacttgggctttcgcagcgctgctggctgttgctacgtcccctcgctcttcctctcctctgctctgctctcagggtcgcttccttcctctgcccagattgattgttctcgaggttcagatcttggacttggaccctttcgtcggctactcagagttccagaacccgttccgcgcttggtccagcagattcagagatggccgaggtgaagcctgaggacatggtgcatcatctgcccatggaccagc

SEQ ID NO: 363348 - DNA, 428 bp, Zea mays
aagaggagacaagattgcctggggggggtgtatttggatacaggcgggcgtgctcaacactgcacagatgtgtggcaagcagcaagctatcatcatggctggctggagcaaagcactggctgggtgaggtcacattgatctgacaagctcggaggatgggtttgcactaatggcggcatttgggtaatttccatacatgtatgtatattggtagtctagaatcgtaggatgtagaaatgcctccctcatttgtgtttgagggtaggaccttgtaactcgaccacatggaaattttgttgagcaggtaccaacatagaagggaaaagaagaggccctcagcatcacccatttgtcgctgtatctctggttatgttcattctctggttaatccaatgctgtttggctcaaaaaataaagatcatttccta

SEQ ID NO: 363349 - DNA, 266 bp, Zea mays
agagtttataagtgatggggggtagataagataagcctgggggggttctaaaagccaagttttgaatcactgctttttacatagtttcctgttctgggctgagccatccacctgtttcctacatttcgttgtagccttttaatttaaggggctaggaaattgaactaagagtttggtactgtttcgtgggagtgtgacttcactccaatatttgatatctatctgtgacacttgctatttaaaaaatataacttcatacgtaaaaa

SEQ ID NO: 363350 - DNA, 405 bp, Zea mays
  unsure (1)..(405): unsure at all n locations
gagcacacgtacttgcataccatgccatggatcttggatatactggaaactcatgaaaatagtagtacaaggccctgatcatgggagaaaacattctgtatttcacagccatagtttgcatatggtaccatgtactccatagtttagcattcagaagagcagatcctcctaatgtggtatggctgtcatggcgtgcatcctgctcacatcatncgtgttgtcttagctacctctccaatttgtaaaatacaactccttcaatggcttgtggcttgaagaaacgaatttcaatgcgccgtggaccagggtaaaagacaaccactgggcttattcgttcttcatgccatttctccccatgtaccaacaagcaacgagtgcacatttaacatggaggggtgaggagta

SEQ ID NO: 363351 - DNA, 155 bp, Zea mays
ggcggcggatgtggagaggttagggttccggcgcatgttctaagtctgtgccatcgtgcctggtgaggcgcccgtcgtgcgctggaaggccgatctatccagcaacctcttcatcttctgttgaagcaatgctgtaccccagagtgaaggactta

SEQ ID NO: 363352 - DNA, 433 bp, Zea mays
  unsure (1)..(433): unsure at all n locations
cgagggagtagctcgcggcggaccagttgttccatatgaccagagcgcgagagcgagcaaagctcacaaggcgaagcggaattgattgcgaccaccaccaccacgtcttctccacctccgtccgatccgtcgtcaccaagccaccatcattggcgccaccgcgccgcccgcccgcgggagcccagctgcgcattcttaactgtttctctcttggcttctcggcgaagtgttgcggttgcgggggtactggagtgcggagagcagcgcggcggtacgtgtgcgttgctgcgctgtgcttccacagtgagctaggggagagcgagggaggaagcaccacccaccacaccacctncattaaaggcgctcacgcgccgtcccttcgtctncacgagaaagcgaggcgggagcgagtgagcaggggcgtacgttcgtc

SEQ ID NO: 363353 - DNA, 72 bp, Zea mays
gtgtatgagagaggatacatggtgggacaataactactagaatccgcctctttcacaaaaaggaggacgaag

SEQ ID NO: 363354 - DNA, 288 bp, Zea mays
aagaagccggcgtttcttccccccaggacggctttgaccgcaaggcctatggcgtccggaccggcgagacgctgtgcccggggatctcttgcgaggagagcgccttacacaaggtggtgattttattcattggagtttactgcctttaggttgctcaagattcaattttgcttagaccatcagaataaactctactagcacatactctgactttagtattgacatgagagagagactggaaatttgtctgatgcaaaaaaatattcgataagtcaaaccttaagataa

SEQ ID NO: 363355 - DNA, 435 bp, Zea mays
ttctctctcttctcttctatgctgtaactaaaaatacttaccgggggtttctctactacccgggccacccccaccaagcaccgtcggtcactatccctccttggtcttctcccttctcagagcagggaggggaagcggatgagggaggcgagagcacgggaaacctgatctgatttgcttttggtcgccacaagagaagggagttggtgcagtttgtaggcgtgcctttgtgtctccgtgtgtgtggagatggaccccaagtttcccacacccctagcgctaaacaaaacggagcctaccaccgtgacgaccaccaccaccttgaccgtgcagtatcattagttggatcctaaggactactcagagcagacggcgcagcatcaggagcagcagtagtaccaccatcaccctcacctgcaaatccaaatccaccag

SEQ ID NO: 363356 - DNA, 452 bp, Zea mays
gtccgacgacctgtctgggcgggtgttagttatatagggccggggttcttgcacgcgcggggtatcgccgacatacgcgcggacgccggctcgaccaccttgctcgtcggcacccctaagccttaaggaggagaacgaggagcacctgatccggttttcgtcggcggagagcgagctggtgtgcgatggcctcttctaccaccccaacgagatttgggacctcaaatcatgccccttcgatcacagggttttctccacagtctacacgtctgtgtgatctggtggccacttggaaagcatgattaactaattagcattgatgaccgaaatatttttctctggaacatagacacgttaaaaaaaaattgctttaggtgatctcacagggatcaactgacttgcttacaaatttacgtgggggagcttgtgatccacacaatcataatttagtt

SEQ ID NO: 363357 - DNA, 226 bp, Zea mays
tagagatgaattctgcgggggagaataagaagacaagcgggggtttctgacatggcacctaagaaggcagcggttgtctagaaagcggtcgaggaagttgatgtggatgatcgtggtggacggtgacaaggctggtgatggggagggctacggtgactaggacgactatggggaaggcggtgacgaggaggatgatgatgaggaggtggatggggaggagatagtt

SEQ ID NO: 363358 - DNA, 269 bp, Zea mays
ccacgcgtccggtgagacggggaggtttaatttattaggatccgtcattttctccacagaggaggcgatgcggaacgccatcgagggcatgaacggcaaggagctggacggccgtaacattaccgtcaacgaggcccagtcccgcggcggccgtggaggcggcggcggtgggtacggtggtggccgtggaggcggcggctactgcggtggcgggcgccgtgatggcggtggcggcttacggcggtggcagcagctaccgtggcggcggt

SEQ ID NO: 363359 - DNA, 473 bp, Zea mays
gactagctacatcttttaggtacgggtttatttatggaggcgcaggggtctctaccctagctgttaaggctttcgagtccaagtcctgggttcgattactatcgaagacgaattttttcgggcttggttaaaaaaatcccctggctgtgcctcatccgctctccggatgggccgttgcagcgtggacggttgacaccggctcgttagtgatgggaggccagagtttggggattttctgggggaccattgttttggtctattcttaatataataccgggaggacggtcatttcctccctggctgagttttacaaactagatgttgacatgcatattcatgtgaagagtgtagttttatgcagccgtatctcatcataaactgtagcttgaacttgaaatgtagattgtccaagatatcccaaatcccttgcccggtaatttaccaatggttcttataaagccacctgaagcatg

SEQ ID NO: 363360 - DNA, 330 bp, Zea mays
aggcgcagatggaatgagcgacttttctctgctccgccgctggcctgccgccgcaccgcgccgtcgatcgccgcgccatgaacggtccccgcggctaccccctttcttcaccggcaccttacccccgtatggtgagcgccgagatttgagctgccgtctctccttcgcatcggttgaattcttgcccccgctttttttttcatgttccggactgttgattcctagggaggcgtgaattttgcgtgtttgtttaagggattagtggagattcttgccttctttttttggttcccccatcctcatcctcctggtggtggttggtttgcaggc

SEQ ID NO: 363361 - DNA, 424 bp, Zea mays
ggagtatgcaacactgaggtacatattgacttcaagatgggctggtgctaatgatgatgatgatgatggggcagctccagtgaagaagaaaagtctgtctcctgcagactcctctgtggcagggcagtggaaaagagcaagtccagaacctggtgaagtatctggaggaaggacaatgtctaggtcatctgactctgggaaaatgagtaatgatgagaaagaagactttgaagcaaatgaagatgactatatggatgtcgacaagggacatgctagtgacagtgatacagaaaaccgtatgtcagatactgactcagacaatgaaatacacagacctgagacccctgaaagagagaaggcaccacacaggtgtattaatatgcttcaagattgcataaatgttgatgagtttgagaggcttaac

SEQ ID NO: 363362 - DNA, 398 bp, Zea mays
tgggcggacgcgtgggcggacgcgtgggcgccttctcttcttccctccgctcgttccatcgtcgctccctactccggggcgccctccctcggtttcttcctcgtctcgagctctcgtctagacgtcactgtcctcgcaccgctcccttctccggcatccgagccgtagccctgccctccgcatccacaatttgatgcggagggctcggccgccatgtcgtggggcctcggctggaaacgcagctccgagatcttccacctcacgctcgactatggggactacgacgacaacgacgaccatcagccctcgtccccgtcccctccggcgtcctcttccccttccgcctcggcatcgtcgaccccgggatccttcttcttggccaccgtcacccgcaacgg

SEQ ID NO: 363363 - DNA, 473 bp, Zea mays
ctctggaggagttcttggtcggagggttttataaatggagcaccccgttttttctcctccagcgccgtcatccatggagccgtcgcggccggtacctgttgcccctaaaagctccgtcttttttggggatttaccgggtgccgacgacgacgcagttacggcagcggttgggtttgcaccggtcggcatggtggatctggccctgataccgcccagggcggcaggcatgggaggcagcgccatggttgttgcaaacagcggtgagccattttgattctgtcgggaagggatacagtgacctgtcgtcgctgacggagccagaaactttttcgtttgaaagaatgattccggggagaaggcttggaggccgattgaataagtgtaggaaaggcggctgctgaggatgatcaataacagggagttcgtcgcgaggtcccgagcgcgcacacaggcttatacaatggaggttgaag

SEQ ID NO: 363364 - DNA, 304 bp, Zea mays
  unsure (1)..(304): unsure at all n locations
tgttctggattcaatcgggggggaaataaataaatggcctgccctttctctcccaagaccngaagaaagctggcagccttagactttacataccaaaattcaaatctattgtttgtgatctggatggtacgctgcttaacagttaaagtcaagtatgaccatggtatgcacaagctctaagggaagctcggtcaagaggagcaaacatagtttattgtcactggaaaggcacgtcctgctgtcatcgacactcttagtatggtggacttatctgtaaggactggggctgttggtttatggcttg

SEQ ID NO: 363365 - DNA, 125 bp, Zea mays
gggacagaggtagtataatggtcattgccccggaaaggggagatcgactatgaggtgcgccaggcacccgtacgagggcggtgtctgcgtttgcgcgccgtgccttcgtgaccgactgcttgcgc

SEQ ID NO: 363366 - DNA, 534 bp, Zea mays
  unsure (1)..(534): unsure at all n locations
tttgaaaagctgtgcctgcataccctgggtcttttgaaccttcaactgcacaaccggctaatccgngcaattctctacaatgcctaccagggaaagtgcccgccaccttcactggatgcagggagacctgtaggagcatcagtaaagaaggcttatcaggctgctgaagtgttgaatgcttgcaatggtgatgccaggttgttacagattcagagattgaggcctgtggccagagcacaggatcatactttaaaagacagtacaaataacacgggtccaaattgtagggtggctgctgccaatcacaaccaagttactcacgatgcttctggatctctggagaatggtacactaaatcaacttgagttgaagagattgcgttttaacaatgcgaacctgtagagccagtggcaaagcatccgcgtgtggaacagtgccacccaataatttgcctgtacagagaagaagcatgagcagcactgcaaacagtctgcagaaatatgagaagtctgtcgagctcactgggattcattt

SEQ ID NO: 363367 - DNA, 495 bp, Zea mays
tgacctcttggtggaggaagaggcttaatatatggcgtgagcattttgtctacattgttcaatggggacaaaggggacacgacctttcagttggatgagtcttttgatgacatcaatagacgctttatgcataggatccaagaatatgatgttagagtggtactgaaaaggatgaaatagggtaaggcgatgagccctgatggtggcatggagatgcctcagggacataactatagtatcgctaaccaagttgttcaaccatatcttttggtcgaacaaaatacctaacaagtggagaagtatattagtagatgaacaagaataagggagatatttaaagtggtaccatttatcgaagaattaagttgatggggcatgctatgaggctattggagttatcgagcatcgtctgagaggaataacgaggatctgtatgaaccaatttggtttatgcccggaaggtcaaccgtggaagccattttattaatgggattg

SEQ ID NO: 363368 - DNA, 426 bp, Zea mays
cgttcctccgcaaataatttggagtcttgttatggaggacgagggctactgtcttggctaatcaaatcgaccgatctagtggctggtgcccaggagaagggacgcgggcagtgcggctcgtcgtggtcagcagcttgtggcgaccggtcgccagggaatcaatcaattcaatcagaaagttgcaattttgattgagctcgattcgtcatccacaagacattagggaatcgaaccaccacaaagcaagaaggcagtccagtgcatagagagagagagagagaccaagaagagaaagagaaagggaaagagaagcaaagcaatggatccaccgcatcaccgtgctgtgctgcggcggcctcgtcctcctcctcctcccttctgccctttttataggccgccttcgcttcgtcgtcttggcaagacctg

SEQ ID NO: 363369 - DNA, 287 bp, Zea mays
  unsure (1)..(287): unsure at all n locations
ggganaaatattaggtatcttgggctcgattgctggcatggtcaaacattttaccacacttacaggacttgttttctgctgaaataatagttagatctgcaaagcatgttatcaaggatatactgaggcaaagttgggatcatgatatagggccagctattgttcatttcttgaactgattcatggggaaagttttaagtggcttctacagagggtagtctaagttgacatgcagtcaaagacttcgatgggtcatcaaaatagccaaacttaaaaatctactaaag

SEQ ID NO: 363370 - DNA, 337 bp, Zea mays
agctgtccatctcttccgtcggtctcctctgcccgcccgcctgccatcattttcgccccgcccaagctgggagcagggaggcggtaagcagcatgctgggagcgagcgccagcaggggcaggaaggcggcgccgccatcagtgaagctgggggcggctgaatgaggcgccggcgaccgtggccgcagccgtcttcggcggcaaggtgtctgctgaggaggtgtgggaggtgcggtccggcgggatgctggtgcagaagcggggcggggcggccgacgacgagccgtcttccggtgtcaagccggtgggcaccatccgggttaagggcaagcatgccg

SEQ ID NO: 363371 - DNA, 379 bp, Zea mays
ttgaaagatctttgtggggggttaataaatgaggcctgccgttctttccccacgagctcgatgtaaggtctaatcattcctccgctgtctatgttagctttcaattcgagtcatcttagttgtggaatgacgcaccgttttaacgactaattcaattgatgaatagattaatagttatattagtcacgatggtttcttttatataggcggtgtgcgaggtattgatctctaggttttttgacatgtctgagtgctgtcccttcggagtgcagggatgcattctcttgtttgttttttaatggtgataattgtgggtatgtctaggtgatgttaaagtgttttcttacttaagatgtggttattgtgttaataagtatga

SEQ ID NO: 363372 - DNA, 336 bp, Zea mays
ttgcaccccttaatggtggggtacgggtttttatttgagcgctaccctttcttcaacacggccagggaggaagggacggacgaggggctcagggacgacttcggcgcctggtcgcggtctggcgaggccgctgacactgtctgcgacactgcgggggaaagcctgaccgatagcgtcacacctccagggaaggacctgcttaaggacttgcttgaggaggtcgaggacgaggacagcatccatagcctcatgcttggggtgcttgacaacaggtttgtaatcagctgctcagggatacaggcgggcaaacacgtgcgccacagcttgcaccgcaag

SEQ ID NO: 363373 - DNA, 324 bp, Zea mays
tgatggaaatgggaagggtttgtttctgaaagtgttccctcattccacaaacaaaagatgctacagtggttccagttggccgtgattttagaaaaaggattggagatttatcgatcggcgtggaagattgaagtgcaccatcctattgctggaaactataatccggctaatctaggcaatacctgtggaggaacggggctaatagcagcctgtactggtagacaggtttaattggaggttccagagttaaggatggacataacgagataatgctactcaggaggatactccatgatgatggcaaaggcgttgacgaggacctta

SEQ ID NO: 363374 - DNA, 392 bp, Zea mays
  unsure (1)..(392): unsure at all n locations
aaaaaaaatcacaacctggncggtttctgtttttacctccgtccgtccctgcctccctgcgagcggatcctctgccgttacttgccgggactgccacgccgcggcaccatgtctctcctcctcaagcccaagccccacctctccgccaccggcctcatcatcttcctgcgccatctctgcgaggggtcaccaagccagccgggccaaacgggtacggacacctcgcccccgcccctgacccgcgatgacaccaagctcgtggacgccctgctcgcggcgcttttagaccaccgtcgtgccaacccggtcgccgagctcccggttccttttttatccaacacgcttccgttccttttcgtccgcatcttcgacctggttcctttcccggcttc

SEQ ID NO: 363375 - DNA, 177 bp, Zea mays
  unsure (1)..(177): unsure at all n locations
ggcaatgctattgggaccggtttaataatgggtacatccctttttttccaagannnaggagctttcttaaactaacgttgttgctgagcagcatgaaattctgattagcgcaaatatgtttcctagattttttgagtaatgcctctgaagactcttaaaaaaaaaaaaaaaaaatat

SEQ ID NO: 363376 - DNA, 282 bp, Zea mays
  unsure (1)..(282): unsure at all n locations
ttccccacttccgttggccgggtttaccgtgtgcgctctttcctttcttccctcactgngngcgacgactgggtgggctaccgctgccgccctacccatgtgctgaggcttctgcctacctcttcgccggcgaagagcgcccagcagttgaatatttgatcagctattgacttcgctgctggcctgttttcttctttggagaccaaagaagccatggcgggccgggaggagagatatgtgaggtttcatgactggaaatcagagcaatctgtttctgttatt

SEQ ID NO: 363377 - DNA, 254 bp, Zea mays
agccaaccagaagagctggtttttattgagagtgtgtgtgagagagtggatgatgggtggcagcggcagggctgctctgctgctggccctggtggccgtgagcctggccgtggagatccaggccgacgccgggtacgggtacaccccgacgccgacgccggtcaccccgaccccgaagccggagaagacccccaccaaggggcccaagccggagaagccgtcaaaggaggacaagccgcccaaggagcacgggc

SEQ ID NO: 363378 - DNA, 198 bp, Zea mays
  unsure (1)..(198): unsure at all n locations
aatcgagaggacgcgggggggtttttatatgagggacttgcgcgcgtatttccacgaggnnaactccgggcgaggggcggcgtcgtccgggacaaccaggtgtggagcgtcgaccggtgaacatgacttgcgggaaaccagagtgtaccgggaccgctgagcgctgcggtgggcgcggaagcccaacgccatagaact

SEQ ID NO: 363379 - DNA, 328 bp, Zea mays
aaccagccgcagcgcagaattgctgttacgtggcgaagcgggttggccgaggtcgaggccgggaatggtggcgggtggcggcgtggcaaaagctactgctctgctctgctcgctgcccgctcccagagtctgatccaaacgcctcgctggtgtcatgctgatgcgccctcccctcagttaactattctactcttctgctctgtcagcagaccacgagacgcgcgcgcgaaactcttctctctcctttgcgcacctctttcgtcgtcgtcgtcgtcgatcttcctccggtcagttttcaccgcttttactttacagtccactcgtaccc

SEQ ID NO: 363380 - DNA, 204 bp, Zea mays
atttgacgctgtacagtcggattctgaactaagcaccgtcgaagaaaaaaaatcgaggttgtacctattaagataggtacactcaggacctgaagttcgactcacatgctgcatatactatcgtcccccttcattggagtgctcagccactaggtgcaactacctggcagctgacatgaaatagcatgcttgggctggcagtgc

SEQ ID NO: 363381 - DNA, 173 bp, Zea mays
ttacgcccctggtgctgcgagtacacacgcttgacaccgtggatcagctaggcgctacgggatcacatcggggagatgagggacaccgcaatctacggtctttgcatctagcatcaagcggggtggggatccaccgcacgcacatgatgggcgtcgacatcgaccaggatctc

SEQ ID NO: 363382 - DNA, 481 bp, Zea mays
gctcaaaataagagtgcatgcagggctgttgtagttaacaaaaggacattgtcaatcttggagctcaattatgttacatatttgaagtccgtccattcatttttccctataccttttagaaacaaataggtcactatatgcttgcttatattcaactaaccttaagatgtttttgtctgttttctgtagtcatggacgcgagggtcactttctactagttatagtgtctgctcttacgaaaatagtaaatgcatggctgactaattttactggtttgcactttgtagtaaaaggggaagagaatgaaagctgctaaacgtattattttggtcaatggcaaagtctacgtgtctcacttttagctccgcaactgcaaacctgcttatttggtaattgatatttcactgacctccttaactggcatttctggtactagtcaccaaatgccttgtgtactctgactggcaaaacttacaggtca

SEQ ID NO: 363383 - DNA, 223 bp, Zea mays
tctatcaagcagcaggagatcaggagctttttctcaaaagaagagccctgcttctctggtaggaatgcagaagctgttcaagtgcaggatactaagctctcccggacagatgtgcagaacatcacgagagactggactaaggatcagaagcggacaacgcggaaggcatcctggaatccggggttaatagagaatgaaggcctatatcccggcgaggaacact

SEQ ID NO: 363384 - DNA, 180 bp, Zea mays
ccacgcgtccgcccacgcgtcgggggccttcttggggcattggtctttttcactcatgagaatatttcggggtatttttaacggttaaccaaactgctagctaatataatgctccttcaacttcaggttgtaagtttttccagcactgcttgctcacccatttctcaattagaaaacctc

SEQ ID NO: 363385 - DNA, 470 bp, Zea mays
gggatatggttgatgcctaaggggcatgtttcagttggtcgacatttgtattggcgtacatgctaaatgcagatacttgttcatatgacagtagatactatgtttttaatccttgaatgatgattaagccctttttggattgtatactttcgttgctgatctttcttcgatacatcatgttcacgtcttcgtgaccaattcttaaactaaagttacgtagtttggcgatgggcttcctaactgtgatatcattgtccaacatgttcaccctttaaatagacctaaacagtgacatccaatttaagcatggcttttaagactttgtacctttcttataggtgactggcataacaaatcaataacttgagatacatttcacaagcttagtcccataggttgtaacagataatgtgctaatgtccagcatgatgagtttctatgagcactagctgtgctgagttcatgtatga

SEQ ID NO: 363386 - DNA, 476 bp, Zea mays
ccacgccacacacaggatggcgagttgtttctacggcggcggcggtggatctagggttttgatccggcctcgccggctaggctgcgccgccccgacgccgaagccatggacagggagcttctagagacgtttgacgcggccaagaaggcggccgacgaggcggcaggggacggcaactcgccggaggctggccgctgcctcgacgcgctgcggcggctgcgcgacattcgcgtcaacaccgacatcctggtctcgacgcagatatgcctcgtcgaatcgacggcctgtttcccctccctctcctctaagacgacgccgggtagacgcgcgcaagaaacagggccttcgtttggaactagatctattgagttcctgtctctattatgggtggatactggataggttggcaaacgccttcgaccccttactaagcatcctcactcaggcattcaagcagttgctgcagacctttttgg

SEQ ID NO: 363387 - DNA, 346 bp, Zea mays
gccggccccgttgtccgttgtggcggccgtggggcccggcgccgcggtggcggcttacgggcacgggcacgggcacgggcagccgctgtgcggcggcggggcgaggaagaggaaggacgtccgggaccatgaggttggattgccgggtagcgacggccgcgcggcggcgcggcgtggggccgggctgttcgtgctggagacggtggaggaggaggaggaggaagaaggggcggacgccgagaggtcgtcgtccgtcggcgcggcgtccgaggacgactcggaggaagaggaggacggtgacggtgacgaggtggacagcggcgggacgaggtggacagcatggaag

SEQ ID NO: 363388 - DNA, 422 bp, Zea mays
  unsure (1)..(422): unsure at all n locations
gtgttggactttgccacagggactggtataatcttgagaaatcttatcttgcgaagncatttcgttgtggagaatatgatgaatgtatagaaaaagccaaggctctagttcgccggcaaaagaagacacatactgaagggagatatgttcgcagagaggatgccattatgcatgcccttgaaatcgaaaggtctcattttccaaataactgtgatgatcttgaagaggacgcggacaatgatatatgtgcatcccagaatatatgttctgcaaagtctataaatataaatgggctcaacaaaaaatctcgtggtgcaaggagtttgtatgatatagaaataaattcagctcaagagttgtctcaaacattgacactgtataaacagccacaaaatttatcctctttaagcactaagtatgca

SEQ ID NO: 363389 - DNA, 440 bp, Zea mays
catgccggctttgttgaccactcacggttcttccactgccacttctgatgctgctgtacacgacaaggaagcgaccgaaaacgatgcgtggctgagacacgtggctgcggcgctactcggcagccgtagcgagatcaggagaccgttcctggaggcgctgtccacgtgcctgggctcccccgacgccggcctggtgggggcgtgcctgacgatggcctggtggaggttatcagtgagaaagtagatatctgggtaaaccacctcttcagctatgattttgcactctggttgtatgcaaatgttgcctatcatattattgaattgcaattatttttttgtactggttaaatactaatagtgccatgagttaacgctagtgtttgtaattctttacaggctcttgggtgtctcttgtatagaatctgcacagaatattaact

SEQ ID NO: 363390 - DNA, 263 bp, Zea mays
cccctgtttgaggggggctcctggggggggggggggggttttttcccccccaaagaccaaaacaaccctttttccccaaaaattaaaaaaagaccccaggcaagttttactggaaaccgcctgtcccaaggccgtaagcgggaagctgccgaacagttaccccccaaggcatgggaatggacaccggcggcggaaagctgccgaacagttaccccgcccaccaggacggaaagctggtgaagagcttcagccgagtggagccc

SEQ ID NO: 363391 - DNA, 148 bp, Zea mays
tcatctggagtaaatggtggtgtggccaatccattacccaataaggataaactctggcgatcaaagcagcatctcttacagcaagcatgacaaagaagtgtacgccgttggcacctatgaagactctgcagcctgagcaatgcatttc

SEQ ID NO: 363392 - DNA, 273 bp, Zea mays
acccagggggggattttaaaaagcgacggcccgttcagcccccacagagagagggagagagagagtgtgcaccccagaagcacggcaagcgaggaggaggcgggcaagaggaagaaaacaaagaggagaccacggagacagagtcggaggaggacgtccgggaccgacagaggccggcgagcacggggccaaacaagatgactacgacggcacagaagaacagggagcccacaggcaccctgccgaggagaccacacagggctagaccgacag

SEQ ID NO: 363393 - DNA, 185 bp, Zea mays
gtaaaatctaggaaaacccaatcaaaaccatggaggggacctcatggcgaaccaagcgcctgcgtctgcggaaggctacaaagaagcataatcaccggggtgacaatcaggggccaagcaggccaagaacagggaacagcaccaacgaccaaaagcgcccgttcaggatccacaccccaccgagc

SEQ ID NO: 363394 - DNA, 289 bp, Zea mays
  unsure (1)..(289): unsure at all n locations
gcagaacccgggggacgtcccacgcgggttatctaaaggttccaaccaaaaaggcatccgggcgtgggtagtagaaacaagctgctagcaaagacagtaagagcgagcgagggaaaaagaaagaaaacatctaagatatactccatcatcttcgtttgataaacccgcccagaaaagccatgggtactaatgatagagcggacaggactcaggaacgccgcgtgtgcatcgctagccgctcgtcctagggtgccggtgaaactgancgtgagcagaagcgcttgacagg

SEQ ID NO: 363395 - DNA, 422 bp, Zea mays
tttctttagttacaaaccccgccgcccctccggggggctttttaataccgactcccgtgtcctctcttcagccccgttcgctccccctcatcgcaaaaaccctaacccctcgacctctcaagatggcgtcgccgccgtcgcctcccgccgcagccgcagccccagccgccgcggcgtccggaccgccgccgccggcgcaagtggtgggcaacgccttcgtgcatcagtactacaacggcactgtcggaggggatacagtgactgtgcctcaggatgcttcgccgcagcccgagtgccaggtggcagagcctgcacttaatccgaaggaggaagttttgaacagggaggtggtttgtaacccaccaaatgacgtgaatcctattgttgaggaaacaccggttcctgaggtcataaatgaagtg

SEQ ID NO: 363396 - DNA, 294 bp, Zea mays
  unsure (1)..(294): unsure at all n locations
ccgaacagccgggacgaaccacacgcgggtttgtaagccagccggncggacgcccagcggggggagaataaaaagaggagggccgcgaaaaaccgccacggaggcaggggagcaggaccaccgccgcaaacaggaggacacccagcagcagagaaaagcgaagaccacaagaaaaagaagggagggacaaccaagaacggcgcggcggcgcagccagcagaagatcaaggaggcaaggggacaacaagggaggaagggacaagagcagagaccgcatacaagaggacccaaggc

SEQ ID NO: 363397 - DNA, 99 bp, Zea mays
  unsure (1)..(99): unsure at all n locations
gcgggacggcncaaggaccccgagcgggccttggtctgacggaccgtcggcatgtcaacgacaggctgggaggccatgatatcagctggggacaaagca

SEQ ID NO: 363398 - DNA, 144 bp, Zea mays
  unsure (1)..(144): unsure at all n locations
gggccgggtccgcaaaacccggttggtcctacccgcccgtttagtattccccaaacggnggccacgggggaaggggggccatatttacacataagggggcgggaaacaagacaccgtcatactaggacaatcctaatgacagca

SEQ ID NO: 363399 - DNA, 400 bp, Zea mays
  unsure (1)..(400): unsure at all n locations
cccggggggcactggcccggaatncctttgtcgtcccacgcgggaccattttccaagcacaccaccactccacagggcggcngcattttatacagcaacagccatgtgagcaccagacagcagcagctgctgccatggaggcgtggagatctctcctcgcgagctacgtgctcgccgagctggccgcgcaagccttggtggccgtggtcgagtccaggaccggtcccgtggagcaggcgagcgaaggtgacgacgtgaagaagccggactgcgtgccggggatggacccgcgctcgttcccggggaccggcggcggccacggcatcacgcccgtgacgccatcgcacggaggctccagctccccgacgccgtcccacggcggcggcggcgggtacgttcc

SEQ ID NO: 363400 - DNA, 226 bp, Zea mays
gctttctttcagcgcagcgcagcgcaggcgcgcggggggccccttccacagccggcgggcccctgccacacgcatggaccggacggctctgcccccccgcctgctgactgctctgccgcggctgctgtcgcaagcgcgccaccaacccgccgatgcgcgcggagcggcgtaggtaccatcagcatgcatccccgcgacgacccaccacccacccctgcagtctgca

SEQ ID NO: 363401 - DNA, 390 bp, Zea mays
ataatacgattgtatgtgtactgagtctgtgtcatcaacttgatactacaaatgcatggaattatatgagaatgctgatgcatttaaggttatgatcttagtgaaagggctcgtcctgtttcatgcaaaagatgacaattcaaattactttaggcgggctataggttacactgtatttagcagtggcttgtggaccattgaagatcgcagcaacctaggtcttttgttattgttatgcccaagaacatgcccttacctgcaaaatcaatgtatgttgtgaacgatgggcccagttgcaagctttggacagtgtgcaaagaccaccaacgagaacgcaggactttgacagcatataagacgtcacaccctagctgtagtggagtactggag

SEQ ID NO: 363402 - DNA, 58 bp, Zea mays
gagccgaggtgcattacgttgccacagggagacacatgattcgagccccattccgcag

SEQ ID NO: 363403 - DNA, 374 bp, Zea mays
  unsure (1)..(374): unsure at all n locations
tttccttctcgtccgcccacgcgtccgctctggagggctttattatctagaggacagcttgactgtcctccgnagncgctttagcatctagaggacagcagtcgctttttgactgtcctctgtagtcgctttagcatctagaggacaacagtcgctaatgactggcctctgtagtctctttagcatctagaggacaatcctgttgtgtagtgtgtgtgagaaggtgtgggagtgcagcccctagggctataaatatgtgtccccaacccctctaagggtatggcattgtgtagagtttgaagaaataaacagaaaaatgccccaactcatagtgtcatcctcttgatgagagttagagtccctctacttacata

SEQ ID NO: 363404 - DNA, 287 bp, Zea mays
  unsure (1)..(287): unsure at all n locations
ngtttatttctcggccaccagctgngaccgcctccgggcccatcttaaacngntcctccagaccccacccccccgcaggagcggcgcggcggaggcggcggcaaagccaaaggcaagatgcacgggcgcgcgccgaagaagagcgacaacaccaagtactacgagagcctcggggtgcccaagtcggcgccccaggacgacctcaagaaggcctaccgcaagggagcaatcaagaaccaccccgacaagggcggtgaccccgagaagttcaaggagctcgcacaagc

SEQ ID NO: 363405 - DNA, 396 bp, Zea mays
  unsure (1)..(396): unsure at all n locations
agagcnacagaggangcnacgggggcggatatagacagaaccccggtcacagaagcnggccggcaccgtntgcctcgccggctccaggtccgccgcctgctgcgccaacgccaaaacgcggcccgcacagcaaccagagcgccgcaggcacgagccgcggacctcctctccgggctcgccggcccgcgcgccgcggcgcgggtaccggcggcggaggccacgcggctccacgcctgcctccggaaccacgccccggccaaccccacggccccaaaggactcgtcaaggagccgcggagccccccggaagagccccctcgatggttgcgatgcgggggcggccgaggcggacgagacggtgatgtggccgacggccccgatctaggacctggcgcgg

SEQ ID NO: 363406 - DNA, 339 bp, Zea mays
  unsure (1)..(339): unsure at all n locations
cgcgagcgccgcccggnanannggggggggttttataaggaaaccggccggtactcaaccagaccacagttgaggaaggccaacgggaaacaccaacaggaacaggaacaggggggcacaaaagcaggagaacaacaaaacgaaaggacgacgagtgaaggaaaggacacacaaaaaagggccctggacaagcaaggcatgggatggcatgaacgagggagaagtttggctacaacagcaccccggcaggcaagggtgcatcccgcagaggaacgccaccaaccgccagcaagggagaagcccacaaggggagggcgacacaaaaaagccgcaagagga

SEQ ID NO: 363407 - DNA, 367 bp, Zea mays
  unsure (1)..(367): unsure at all n locations
acgcacggcccgccaccggggcgttcatgcgccagctccacacgtgcacgcgcaangccgccgacaccgncgactacctgctcaccctcctctccgtcgccggcgcgcgggaccaccgccccggcgtgggccggagcagcgaggcggagctgcgggcgccggcgccggcgcccgcgcaggccggccggagctgcgaggcgcagctgcaggcgcagccggaccacgcggcgcggagccggaacctgtcgtgggccacgcacccggcgtgcgcgccgcgcgggtacgtgcactacctgcgcctcaactactgcgccttccgcggcgcgccgtggctcggggccgccgcgctcgcgctcaggctgctgct

SEQ ID NO: 363408 - DNA, 462 bp, Zea mays
  unsure (1)..(462): unsure at all n locations
cggaagacccaacaaaaaganggggggggttttttcaaaatatcggcttacctaatttacaggctggttcgaaagtggaccaccctgcaatgaccccattagctcaacaccagcaacagcctcaccatgtattgcaacaacagcaggtccaaccactgcagcatagttctgcgatcctacagcaacagcaagcccagttgttgcagcaaaatgccattcacttgcagcagcagcaagaacaactgcaacggcaacaatcacagccgcagcaacagttcatagctactgcatgtcttcagtcatcggatcagcacaagctgaaagagcaacagccttcaggtggacaagctgcctcacaagtacatttgttaaaccagattttgcaaccatcttcactgagctacaacagctgggtttacccaagtcacctactcagcgctcagggttaccaagtctaacaac

SEQ ID NO: 363409 - DNA, 180 bp, Zea mays
gggggaattgtaaagacaagacccgggtgcaacccaaaggaaagggaactggcaccaggagcgagaagccgaagcaagaatacaggagcggcggccaaattgctgagaagaataagatggcgaacatggaggggagcacccatagcatagacctggaggagctacagagggcggctgcag

SEQ ID NO: 363410 - DNA, 309 bp, Zea mays
  unsure (1)..(309): unsure at all n locations
aattgaagcaanatgctgtaggggagcgttttttataaaaccaaccgcttcttctcggaaancgncaccatattgccctagaggatgaggtgcaccgtttctgttgagaaggctaatatggttgtcttgaaagacaacaatgaaattggcaaacatagtttctgctttattttcttttactggaataactattctgttcatatactgcatctgatagtacaaaataatagttggactcctcccgaaaaaaaaaaaaaaaaaaaaaaacttctccaaaaaaaaaaaaaaaatggcggcaaggttttccag

SEQ ID NO: 363411 - DNA, 138 bp, Zea mays
  unsure (1)..(138): unsure at all n locations
nggccttaagcgcccggncgcaccggcggagaggaggggggttgttggagggacgcgccggattcaaccacaggcgagggaaccagtgctgggcccaccagcgctactccggcacgcaggacggaaagcacgactacc

SEQ ID NO: 363412 - DNA, 303 bp, Zea mays
  unsure (1)..(303): unsure at all n locations
aacccggttcgacccacgcgcccgttactttgagccccccgnggaaaacnaaacaaccgggngtatgaagagacctaccccaggaacagcccaacattggggcattcaataaagagagctaaggaagccagcagaaacgcacaaggggaactgccccatagaaaaaaaggaagacaggcgaacattctgatgaccatgactgcgactagggatagcaggagaatcctgctggcctgaagacccggtgtaaacggctgctgaaaatcagaatcaacggagaaaaaaaggaaagaaaaaacaccc

SEQ ID NO: 363413 - DNA, 180 bp, Zea mays
  unsure (1)..(180): unsure at all n locations
cgcgagcgccgccctnnnnttnngggggggtttttataagggaaagcccggggaaacaaccaaaccacatttgattatggccaaaaggacacactaacaggaacaggaacagggggccacaagagcaggataacaacaaaacgaaagggcgacgatggaaggaaaggacacacgaaaaag

SEQ ID NO: 363414 - DNA, 479 bp, Zea mays
  unsure (1)..(479): unsure at all n locations
gggcgggcngggcccaccaacggggggttttttgccgtataggcgtttgttcctccaccgttacgccaggttgtcgttcagagtggaaagcttcttgggacaccaaggttctgccacaccactgccggcatgtcagaatgtctcccggacgtctacgccagtcaggtactgaaggttctcaagtccaccagtgctgacaacacggatctcagcggtgctcttcatcagttcgcggtccacatggatgaggatattatcctcatggtcctccagaagcagcggtccaactggcaggtcgccctggcattcttcaactgggcggcaaccctgccggggtatgcccacgggtcaagggcctacaccgagatgctggacattcttgggcggatgaagaaggtcagacacatgaggcagctgtttgacgagattcctgaggagcgacgtcaggtggtcgtgacgaataagatgtttgccgtgct

SEQ ID NO: 363415 - DNA, 424 bp, Zea mays
  unsure (1)..(424): unsure at all n locations
gctttcattgcgtccgcccacgcgnccgcccacgcggggggttctcgaagatgagacacagtaccagcaggggtacaaaaatggcgataatgatggtccggcacctggaaaggaagaggggaggcaggacggcacaaagatgggattccagggcggcgaagaactgggcgacatacagggctgacaggatgagaggacgactgcaactcacaacgatcagaatgcctgcacagctcgggtcaggaagaacatcgagcaactggctgcactggtgggcagctatccgctgtctgatccggagaatgaacaaacccaagacgcgatggagaagaaaaggctgaaacttaaggtcatcactgcaagctgaggggtgacgttagagcatgaagggcaccccaaatcatctaaacaggatgctgaggag

SEQ ID NO: 363416 - DNA, 370 bp, Zea mays
  unsure (1)..(370): unsure at all n locations
ntttcattgcgcccgcccacgcgnccgcccacgcgggcggcccttaaagacggagcgccgtctaaaccgccgaagcacgagggaaacagcaacccgcggcccacctnctacaactacgagcgctcgcaggccgagcagcggctctaccgaccgaccgatgacccagacctcgacgacatcgcctactacgacgacgccccctcagatgcccaagccagcaccgcggtagaaggaaaggccgagaatgaggaggagatggacccgctcgacgcctacatggccgagatccaggaggagagccgtgcgccgcccccgacgcccaagcccgaagcgcttcgccgcacggattccgacgatgacgaggatgacc

SEQ ID NO: 363417 - DNA, 321 bp, Zea mays
  unsure (1)..(321): unsure at all n locations
aggaccaggaccgncatatgaaccggatacattacttgctgggcgaccatactcaggactaggacgtgatcgctatcggagatctcctgcttatcgaccaaggtccccacctgcgaaacgaagagcatatgactaatcgagaaccctctgttatgccatatatggcctaagaacaccctgtagcaagaacttactgtacctgtaccggagcgtcaccttaatgtccttaaattcccgtgtttaatggtctgtacatggctatgctatgcgactgccaagatgcactgcatgcaatattgacatttggctgcttnacaaaaa

SEQ ID NO: 363418 - DNA, 111 bp, Zea mays
ccggaacgccccggcccggacccaacccacgcgattgatctaccaagcagggggccgcggggaaaaggcgggccgagaacgacaacccggaggggcaacaaacacacacaa

SEQ ID NO: 363419 - DNA, 239 bp, Zea mays
  unsure (1)..(239): unsure at all n locations
gggcctgaccggaatacccgttacgtcccacgcgcccggattcattttttgacccgcacccagacgcnccagggaggctttagacaatcgacgctgctggcaattaacagcccgatggctatctttacttagctatataatgtatctgagactgcaaactatgtgtcagacaaactgctcgaggttatatgctgtttgcgtgggtcatcacgtgtgattaccttcgcacgcattgacgc

SEQ ID NO: 363420 - DNA, 277 bp, Zea mays
  unsure (1)..(277): unsure at all n locations
ggtcaggttggaggnnccgcaccaccaccaccacgacgggggtggccgagacgacggcgaagaccaccgcagaggcccgaccaccccgggcaacgggggctacaggcagacaccgngacaagacccggacggccgggcgcccggagaccgccaagcagacggncgacctgcgaacgagcccgagcacgggggggccggggacgcccacggacacaggggccaacgcaacagagcccccgccgggctacgggcgccggggggggcacggcagacgcag

SEQ ID NO: 363421 - DNA, 323 bp, Zea mays
ggacactgccgcgacaaaaggggccgggcttaacttgggatggcgcacgtgcggtgacaaagcaatgaacttatcagaatctgcggaccaagcgacagagagcacataggcactatctacgagacagaacaatagctgcaccagtcactgctcaagctgatagtggaggcgagatcagctctggtgacaccacgcacgatgctgggtctgcttcatgcaatgggactacagagaaacaggtgagtgcacacacaaagaagggagggaggtatcccgatgtgaacatgtggatagggtccaaacatcgaaagcccgtgaagaaa

SEQ ID NO: 363422 - DNA, 345 bp, Zea mays
  unsure (1)..(345): unsure at all n locations
aataaggttaccagcaggcaagcgaacaagagaggagggggaagaacaaacagggcgggcgagcaaaaaaagccgagccgcaagggcacgaagcggagaccggacgagggagaccgcccatgcgaagacaccggcagaatccgccggcgaaaccgccagaccacggaggggcgcaagcacccccacgcacccggacaggacccaacgcgccgggacgccacccgagacctcggccgaccgcgcgtgggccaaagcaccggaaggcaccggcacccaacgacgacgtnccggacgaggggcaccacacacacggagcccacgtcgcaaggggaagtaaaaaggaac

SEQ ID NO: 363423 - DNA, 467 bp, Zea mays
gacactgccgcgagcaaacgagccgggattaaattggggtgtcaaccgtgcggaaacaaagaaaggaactcctgaggatcggctgactaatggacagagagctgatgagctctatctacgagacagaacaatgctgcacacagtcactgctcaagcagatagtggaggctagaacagatgcggtgacacaacgcacgatgatgcgtctgaatcacgcaatggaactacgaaaaaacaggtggctgaacacatgaggaagggagggaggtctgccgagggcaacatatacatgaggtacaaacatcgaaagcccatgaagagcgcgagccgcttgagaaagtaagaggaaagacaaggattaccatgccaatgaccgagagagctattcatgcttgaatgatctgcacttgtctgctgtcagctgccagtgcacacctgaccgctatgcttgcttaaacatacaaatc

SEQ ID NO: 363424 - DNA, 340 bp, Zea mays
  unsure (1)..(340): unsure at all n locations
cggaacccccgggccgacccacgcgaccggataagataagacgagcaaggaagcccccngcacagggggtcaggtcaaaggcaaccagggaaaacaacagcaagaagccccgacggcgaaaacacagcgagcggggccccaggaacagngccnacacaacaggccggcgaaagaaggcaggacccagaagacgaacagaggcaccgggggcagaaccgaagagngccggaacaaagaaggcagcaagaacgcngccggaccaccaacaacacagacagcgngaaggaagaccggaggaagaccaaccagcaaggcggngcaaaacaaaccaaacacaagg

SEQ ID NO: 363425 - DNA, 427 bp, Zea mays
  unsure (1)..(427): unsure at all n locations
ataaatacgcgcccgagcggagancaaagaaggggagggcgaaacgaaggcaaccgacgagccgacaaaggccgncgagccgaggaaaaagggcaacgncaagnacccccaccaacggggccaaccacgccaccaaggcccccgncaccccaggccacgacaccggggagaagagcggagcggcgacgcacaccaagaaggacccgaggancacggacgngcagcnggagaacccganagggaaccngagccncaacccgcacagcgggcccaacgccggcgcgcgcacgaccgacaggaccgggcgccgccagaccgnggacnacgccgccgccaacaacaccgcggggacgcagcacaagggccccgccgagaacaacggcaagcccacggcgggccggaacgaggccggagccggcgggggcca

SEQ ID NO: 363426 - DNA, 179 bp, Zea mays
  unsure (1)..(179): unsure at all n locations
agaagaaaaagggcccaaaacggaccagcacaagnacaagaaaaaacaaccaccncacggnggccaaaaacgaaaanacagaaaaacgnccanacaacaccaagagaacgaccgcgnnanagcccaggaaaaggagccgcnagaagagagaggcgcnnggccccngccaaaacccacaa

SEQ ID NO: 363427 - DNA, 322 bp, Zea mays
  unsure (1)..(322): unsure at all n locations
atcggtttgatgngagngcaaaccancanaccggacncggcgacacaaaaggaagcgcgagacgccagaagaagcagancgccgagacaaacgaccnagacgagcggccanacacnancggcaanggggngcacnggnggaaccgcgggcaggagacaaccaccacaaggcccncccggaggccgccggaaagcaagagcccccggaggcccccnccgngcgagacaacacgaacaggggccccccaacaacaagggcancgcacacaaagcngaaggaggacgacgcaagacaaaaagagcacgagaccagacccgagaac

SEQ ID NO: 363428 - DNA, 374 bp, Zea mays
  unsure (1)..(374): unsure at all n locations
ggccggaccggaacccccgggccgacccacgccgcccgggttggtttacggcnccccgagaggcggaanccagggcggagaaaagccagaggagccgaccacccaccaccaacaagcaggcgccaccgcagcaaccgccccgaagaaaatcccccaaagacaacaagaagagaccacaaccgcaggcccaacaaccagcacgacacaaaaccaaacgacaacaccgaggcgagaagcccaaaggacccaaggcaccacgaaaaaagggaaaggacgagaaccacaaaccgaagcgaggcaccaagggaaggccgaaccatcagagaccaaaagacacacccaaccacacaagtacccaccacgagagcccaacg

SEQ ID NO: 363429 - DNA, 407 bp, Zea mays
  unsure (1)..(407): unsure at all n locations
gggccggaanccccggancgacccacgcgcccgcaatccgataggcacgcnngagagccacacacggggaccgcacacacggaaggccgccgccgcggacaacaccggcggcagcggcagccacaatgaagcggagccgaacccgggccgcggccatgccaacgccatgatgaacctgagccgcctcctcgcagcccggggcgcggcggacaccttcgacgacaccgaggagaggctcggacacaaccgcaccacccccgccgccgccgaagccgagccggccggcaaccgcagccgcaccaaccccaacgtcaacccatccgagcacggccgcgccgacaaccactcaggccgactcgacgccgtacccacagagagagaggcgcccttcgacccgccactagacg

SEQ ID NO: 363430 - DNA, 366 bp, Zea mays
  unsure (1)..(366): unsure at all n locations
atcgattacgcgnccgcccacgcgnccgcccacgcgggggcccacgcgaccgcgcgaggggagcaggccgcacacacaaggaaggggacaaccacaagcgccaaagaacccgaccaccgcgacgagaaccncgccgaggcggcgaccgacgagggagcgccacggcgccgaggggcgcccccgcgacgcagggcaccgcggcagcgccgctgccgcctctcgcgcggaggaggacggcccgcggggagggggaggccatggcggccaccaacaacaggcgagcacggcggatccctcgcctctcgccgtctaccgcaccgtgacacgctaacctacgcggaagagcgcaggaacctgggagccacg

SEQ ID NO: 363431 - DNA, 251 bp, Zea mays
  unsure (1)..(251): unsure at all n locations
atagttaaaacccnagcncgcccnccccaagggcccgggacaaacacacccagcggggcggcacggcaccaccccagcaacaggacacctgagccagcgacgccggtagaagccatggacagctcacacgcgagcgcggcggcgatagccgagcagcgccagaagatcgagcagtaccgccacaaccacgccaccgaccgctcgacggccccaccggacaacccgcaggccaagcgcttcctcgaccacaa

SEQ ID NO: 363432 - DNA, 394 bp, Zea mays
  unsure (1)..(394): unsure at all n locations
ataggctaccccgcgcaggggaacgcgccggcggcggggcggcaacagangcgaaggccgggccaacccccacagggaccccggcgccaggaagaggccgcagacaccgggcggggggcgacgagcacagcacngacgagaacgagcaggcnnccggcggccacaacgccgccgccgccggcggcaacaacggggaggcggacccggngaccaacaccgaggagaacgggcgcacgaccggcaacggccacacgaccagcaccgaggacgggcagcagccgcggcacgggacgaggaacncgaccaccaacaccgncgacgaaaggacgggcacnagagacggcaagccacaccggccganggggaacacgccggcgagcgaggngccgcagca

SEQ ID NO: 363433 - DNA, 332 bp, Zea mays
  unsure (1)..(332): unsure at all n locations
atagaataaagcccnggnaccccncaccgccggggcgggggcaagggagctaccaggcgcgcacaccaacaacgagagcaagcagcggtagcggccgccaccaagacgcacccgcacccgaccgagaacccaagtcccagcctagaagccgcagacggagggggccacagaacagatcgccgccggctggttcgcaaaggagccggctcccgagcggcccgagggcaagccgaggaccggcacaaccagacgccacaacgcgcaggcgccggagaacgagccgcgggggccgccgccaccggcgccggcggaagagcagccgcctccgccgc

SEQ ID NO: 363434 - DNA, 409 bp, Zea mays
  unsure (1)..(409): unsure at all n locations
accgaaccccaataccctggacgacccacgcgaatagtttcgcgcccggggcgancccaccccggggcaggagaaaatcaaagacccgggccgacaaaacaaacnnnagctggacaagcacaagccccagccagcaacaagccacacggacgggaagccaccagcccacggaccgccacccaaggccacagccgaggaccagaccccgaccgccgaggcgaccgaagaagcgcccgcggaggagaccccggcgccagccgccgacgagccccaagaggccgcccccgccgcccaggccaagggggacgagccagccgccccggcggagaccgagccagctgcccaccaagagcccgaagccgcccccgcggaggccgaggaagaaaccccaaaggaggcagagcccgaa

SEQ ID NO: 363435 - DNA, 312 bp, Zea mays
  unsure (1)..(312): unsure at all n locations
ctaccgaccacnggagcccgaggaaggggttcatttctaagagggggcgccaagccagccgacancgagcaccaacgacacaccccagagacggacagcnangaggcggccgacgacgacccacgcaanggacgagccgacgcacgcagaagccanccncagcaaccaagaccgggccgccnccgcggaggacaggcacgacgagggcaccacggacggcgacgaccgcagagaccacgaccgnncnggccggcaggaggcgncgcngggccncgaccagcgnncnggcgcnggcnncaacnccacgcgcaa

SEQ ID NO: 363436 - DNA, 348 bp, Zea mays
  unsure (1)..(348): unsure at all n locations
aacccgtgccgacccacgcgaataagtaaccaaccccagcganacnncccagggggggcacaacaaaaacagccggcgcggccacacaaggccgaacaccagccaaaggacgaggccccgaccgagacagagcgggacaacggcaccaaggcggaggccacgcacgagggcggcgagcaggcgaggcgccccgccgccggcggcaacggagaggggcaggagcggcggcaggagccggagacggaggagcacgggccccagacggacgggaggcagcacaaaatccgcgaccaccgccgccagcggaggcggcaaagggaaagggggaggaggggaagggaaaccgag

SEQ ID NO: 363437 - DNA, 249 bp, Zea mays
  unsure (1)..(249): unsure at all n locations
accaaaagagaaaccagncggnccaccacnagaccnggggggnccaaaaaagcaaccaccagcacgaccngacaaaangaangngancaagggancaaanancacggggacngaccccaaaccccnggagccaaaaacanangnagaagaagaagnnnnngnnacagangaancngggaccaagaaaaggacacggccagaggacaacaccgngcgggggagaaccacnaggaacgcaganggcaccac

SEQ ID NO: 363438 - DNA, 226 bp, Zea mays
  unsure (1)..(226): unsure at all n locations
cggaacccccgggacgacccacgcgaccgcgatcatttagctcaccagaggcagcccgcccaaggccgggctgaagcaaggcagagggcgggccaacacggacgcgcgggacaggaaacagcaggcccccaggcggcagcaggaacacaggcccncaacgacggcgacccgaaccaggcancagcccagcagcggaagcaccacaacnagagnncaagaggacggc

SEQ ID NO: 363439 - DNA, 368 bp, Zea mays
  unsure (1)..(368): unsure at all n locations
ccacgacggacagccncancaaggcggggtaggtcgagccggggacgacgaacagacggctgcngagcgcgaagaggacgaggacccgcgacggccagnggagccgccgccaccccggcaggcaaggcanccacgaccgcaggaggaacccgaccagcagcgcgcaggagccncagcgnngcncnncagagaagnncgacancaacaggaagccgnnccaccgcngaaaaggacgacgncncggcggcggcgaaaaccaaacaagancngagagacaccgnngngcngngaaacaccatcagttcaacccttgtgcatatgtgccatgtaattatattttacgcgtgaatcaagtcatgcctctcgcc

SEQ ID NO: 363440 - DNA, 343 bp, Zea mays
  unsure (1)..(343): unsure at all n locations
cggaacccccgggccgacccacgcgaccgatttagctaccggagaacgcnagcaccgcgacaaggcggggcaaaaacgaaggcagggggcgggaccgaacccaaggngcgagccgacacccggaagaccggcggccaggcgggggcggaggcaagccggccgaccaacaaccgcacgggcgggcngaacagggacaagaacagccaagagcngcccaacgaaagcgccaaagacggaaccggggnagngaaagacacaaaccncacgggccaggagcacgagaccgagggacggaggcagcggaanccggcaggaagccaaaccacgccgaagcggacagagc

SEQ ID NO: 363441 - DNA, 288 bp, Zea mays
  unsure (1)..(288): unsure at all n locations
ccgggagacacagggggaggcatnactatccggggaccgggggctaccacacacagcnccaagccacnggagcngcaccgggacaggagcggcgagacgcccagagacgacaaggccaagaccgacaacgagcaagaacccaacccacggcacgagngggagagaacacggccacggcnggagaagcccgaggccgggcggcacaaccaggaccccaacggcggccggaagggcagcancgcnccgcaagcgacgccgcncccgcaccggaaggggaaccngnacaac

SEQ ID NO: 363442 - DNA, 463 bp, Zea mays
  unsure (1)..(463): unsure at all n locations
aatgatttagaacagaacgnagcagccaaggaggccgggctccaagggagccaggaagccgaaacaccccccacccggccaacaccaccacgccaacaaagccaccgaggcgaacgcggcgacggcgacggcgacgcgcgcggcggccgacgacaggggcgcgggcgccccgacgcagacggaganggaggcggacccggagaaccagngcgagcacacggngaacgggcggacggggcccaacnggaagggcggcacggacncgaccaacggcgagacgcagcngggccccgacggcacgggcaaccggaaccgggaccnggcggggcggggcggccncaagggcgccggccacgacaaccacgagcgcggcaaccnggacaacaacagcggacggggcccccgcaggagccaggcgcccngcgccaggaaccncaccnccgacggcaccggcgcgcaccac

SEQ ID NO: 363443 - DNA, 195 bp, Zea mays
  unsure (1)..(195): unsure at all n locations
gaattcccgttccgtcccacgcgattgaatcngcgcccgcagaganncgngggcagaggggggttgatttgaacacaccgagccgacaagaccacacagaaancanccnccacagcnggcccccagcngaagagcnggcaacancaaggaacggacagcccnggcaccggaaggcgcagcaggacgcacaggaaa

SEQ ID NO: 363444 - DNA, 238 bp, Zea mays
atcggtaaaccgagcaacaaccggagcacgaggagggggcacacgacaaagagggggcgaacacgaccacagcaccgcaggcaaaggacaaaccgaagaagcagaaggcacaacggcccagggagacccacaacaaagccaaacgagacgaggagcacaacaaccagccgcacgcccagcagacgagcaggccgccggagaagacggcagcacaggcgacacaagcaacggaagagag

SEQ ID NO: 363445 - DNA, 453 bp, Zea mays
ggccggaacccccgggacgacccacgcgaccgcaattgttaaccagcgcccctccatcctcggccgggaaggtgcggtgagctccgagggggggcaacaacaaacccacgccgcagaagccgcgcgtcctgatcgcgcgggggtcgaggagaggggaagcgcggcgccgcggacgcctgccaccgcaccgccgcaggagaaggaagaggagcccgtatccctccgccccgcagcccgccggaccgatggactccgagcactggagcacgcgcctggccgccgcgaagcgcttctacgcggcgcagctcggccacagcgaacgggccgggatggatgagctggagatggacgaggaggtcaggcccgagttcccctgcccctactgctacgaggaccacgacgtcggatccctctgcgcgcacctggaggaggagcacccgttcgaaccccaag

SEQ ID NO: 363446 - DNA, 206 bp, Zea mays
  unsure (1)..(206): unsure at all n locations
agacaggaaagaagcagcgacaggacacagcngncaaccacgggaaaacagcaggccaacgaggagaaggccgaggcgccacaccacagaggagcaaacgacaacggacccgggcagncagcaaaagncacgcggccggcggagcaagaccccccacggggagacacggcacaagcggacacacggggagcagcagccgggaaaaa

SEQ ID NO: 363447 - DNA, 462 bp, Zea mays
gggccggaacccccgggccgacccacgcgcccgaaatcgattccgcagcagccgagcacaccaccagggagggacacaaccagcaaggggccaggcaacccagcagccagcggcggagccaagaaggccgagcagcgagctccacaccccacacctcagaagaaaaaggcgatggcgcaacagccgccgcgggcgccgagcgccgcgccgcaggaccactggccgacggcggcgggggaggaccagggccccgccgcggccaggcgcggcgcgcaccgccgctccgcgagcgacccggacgcgaccctcgaggccgagcccattgacgacgacggcgtcacaggcggcggcggcggcggcggcgacgacaacgaccgccccgaccacgaccagctccaggccatgagcgacgacgatgacagccccgcacacgacacccgacccggcagcgccggggagagg

SEQ ID NO: 363448 - DNA, 269 bp, Zea mays
  unsure (1)..(269): unsure at all n locations
cacaggaagagcagcnaacgaccccaaaagcncagannaccccncngncngaaaccnaggaaaaacagaaggacaagngaacanccanaaagcaagaaaangaacaagcngaaagagagcccaacgcngggcgnncnaaacagaaggaangcgacacacaganaaaccgnanggccaaggaacagcagaaaccccaacagaagnnaagngacncaaangcngagaggaagaaaacggaaaacgaggccaagaggacggagacagagcag

SEQ ID NO: 363449 - DNA, 283 bp, Zea mays
  unsure (1)..(283): unsure at all n locations
aatgatacgcacccgcggacacgggggcaagaggggggggtaaaaacagaaggaggagcggacccacaaacgccnggggaaggggacggaacnggcacacggggcggcagacgcccgcgacggggaaccacccaccgaggaccccgacggcccaagngaacaccacccaccgcccgcggcacgacacccgcgcgagaagcaacaaggagcagggaccccaccgccaggacaagaaccagcaaaggacggggcagagggaacacnaacagacagcgcgcagaca

SEQ ID NO: 363450 - DNA, 354 bp, Zea mays
  unsure (1)..(354): unsure at all n locations
aatgattacgcgaccgagcgcaccacaccnccggggggcgccgacgacaaaaacgggacggacacacagcgcaccctgcagccagccctgacagcggcgaccgggcggaccaccgaagcccgcgctcacgcgggcgaagagcgcccaccagacgccgaggcggacagagaacacggcgaccaccaaaccagcagaaacggagaaacaacaagaccggacggagagggacgagccagacgaggcagacgaagaggaagaagacgagcaagaggaacacgaggaggaggccaaggacgaggagacaaacgacgaggagggaccgaccgaagcgggcgccaagacacagcaaaacac

SEQ ID NO: 363451 - DNA, 225 bp, Zea mays
  unsure (1)..(225): unsure at all n locations
caggacaggacggaccggcggacggctttggttaaaangcccgaagaaaggaacaccacacgaacanggaaanggccgcaagcaagaagcgacaacacncggcccagacagccaaaccgacaagccaacacangncngcaangccgcnggcgngaccggaaggcccacaggcgacnggngngaaacgcacaagccggacaccanccgcaccaanngagngggcac

SEQ ID NO: 363452 - DNA, 334 bp, Zea mays
ccggaccggcaggcccggcccgacccacgcgatatgtactcgaccaaggggaaaggcccgcaaggggggggatcaagcaaaacaacgagggccagggccgagccggcggaggacaacgaaggcacgccgccaccgacccctgcggccccagccgagggcgccccagacacgcccctgcagcctgaagcagacggcgccacaacggagaaggaggcagccccggcgccggagggaagggcccggggattcaggctgcacggagaggacacaaccgcgcacaaagcccttgggggcggcaaaaccgcagacgatcaggtatggaaagacaagaaaa

SEQ ID NO: 363453 - DNA, 374 bp, Zea mays
  unsure (1)..(374): unsure at all n locations
aataagttcgcgcgggcgcgcacagcaacgagaggggggcatggatcagcgggccgagcggcggacaagaggagcaacccaacgagggcaacaacagcgaccggagcaccncgaagaagggccggaggaggcccaacaaccccgcgggaagcagcaacaacggccacncagggggggagaccgggaccncggcggacaacgggcggcgccncggcgacaccaaggagcaccgcagaacgnncaccggctcccgcaggaccgccgccgccgncaacaaagacggacncnggaaccacgacancgccaacaacacggnccagggaccggcncgcgcgaagagggccgaccaggccgcaggacagcacggccccaac

SEQ ID NO: 363454 - DNA, 409 bp, Zea mays
attgttaatgtaggacgggagaaaagcagccagggggggtttattctgtggacataacaggataacagaagcgcaaaatgggcattagtgtggtagagacacacttcaagcttctaacaagaaaatggaagcggctgagtccgagctcgaggacaatggcggattaatgcctcgctttacagggatgcatgtgtgtatccagctcatcggttctgttagtgcaaatcaaaaaagaaaaagacaaagcgctattgggtttcggctgatcaactgccatcctgccaagcatatgacaccaaacatgtgaaacaaatattaacagaccaaggtgacatcttgttgatatgacaaccttgagggaacagccaaatggctacagcgcattgactgacataactgtagtacggga

SEQ ID NO: 363455 - DNA, 124 bp, Zea mays
ggccctttatttacaaccctttaacagggtaaaactttggttatccccaaacaaaatttctgtttctaaaaaaacctttattacttaattgtttaaaaggtaaagggctttaacatttgatttt

SEQ ID NO: 363456 - DNA, 213 bp, Zea mays
gatccggccgacgatgactcgctcgacgactgtcgtgaaccggtggcatgggattcggggaccgccataccacctgccagtgactaagacatggagagctagcccggctctgtgcgaaaggggtcacatcctgcgctagttcctgatcgaatggaaggtgctgccgagaacgaactgtgtcggctatggcatgatagccttatggctaaaaac

SEQ ID NO: 363457 - DNA, 513 bp, Zea mays
cccatggaagctaatgagggaggcttacattaagaagacctgaccaaagtgacagcagaagcaatgattccgctaaatccactgaagacgatgacgatgatgaggatgaaattgaagcagctcgaatggcagcaatcaacaaggaaattaagcgtgtgttgactgaggtccttttgaaggttactgatgagctttttgatgagatagcaacaaaagttctaaatgaagacgactcagctgaatccaatgaagccactggtgttttcggatcaaaggagactggtctgggaagatcaagagccaaggcctcggctaaagttgttctccctgctaagtcaacaaatagttctgatcataaagatagtactgggttaagttcccctaaaggtgctcttctcggcctggctagttatgattcagatgatgacgacgatgctgacactgacagcaaggataagatgccaatatcaaatttatcttctaaagataatgcttgtgctgtaaatactgaag

SEQ ID NO: 363458 - DNA, 423 bp, Zea mays
ccacgcgtacgccgaaccggagaattttgtctctgcacgcaatcggggaacctacccacgagccgagccatgctgagccgactcgccggggcgaggcgacagttactgctatccccggccgtcgcgtaccgcatcctactcagcagcggcgacagcgtcggcggtccacgagagagcagcgcccgactgggcctccgtgctcccggacaccctcgaaaggggcttctacgcgtaccagcgcatcacggtcgccgccggcgggacgctctccgacctgcgcgcccgcagtctcccaggtgctgctcggaggaggcgccgcggcggtgaggcggaacgcggcacgtgggaagctgctacctcgggaccgcatcgaccgactgctcgaccccggcgcgtccttgctcgagctctagcagcttgcat

SEQ ID NO: 363459 - DNA, 476 bp, Zea mays
ttcgtcgacggcggcggccgtcggttgctttgtcgtgctcagcgcgaggtctcgccggggctcgcgctcggtggtgcgatgtgtcgccacgacgggtggtgagctctttctgtcgagcgtgtaccttcagcagtcagcactatctcaaactaagtgaatcggagtcaccatgccaaacctgtgcggttcaccgcaaaagacctcctcctcctcatcctaaattcgccaagcaatgtgcgatgccggcttcgccaactgtgattccttatgccgccgaatcccatcacctcgaaatcctccgtagtagtctttgcggtgacctcttttgttggtaagaaatgttaaattgttagttttgttccagcggacctttctttagcgtgagcattcaaatcaaggtaactttttttttcctatcaattcggttggtaatgggtttgttcgctgcatgacatcctgtcaatccgattcatgca

SEQ ID NO: 363460 - DNA, 390 bp, Zea mays
ctgcgcgacgccggacggcgcccgcgtgttctacgatggcctcaaccgagctgtcaacgtttacctcaaggttcatgcggatctgagtgaagaagagaacgacaaggtgagcggcctgaagcacaggctgaaggtcacgctgcacgcctgcacgcacgcagggcataacgaacggatggcgctgcagacggtcttgctggagctcttcttgctgcagctgcacctgcgtcggaccatcattcagaccatcatggcgaacgaaggctgcgcagacgaatcaggtgaggaaggcggtgagagcgcctgcggcgttacatggcgcgtggcggaactgctcaaccagatgctgcagatcgtcatggacagcatgccgaacctcgtgcacgagct

SEQ ID NO: 363461 - DNA, 505 bp, Zea mays
ttccatgtcggcattagctgggtttagtattaacttgatgcgttatctatcggggaaaggaacagcaggacagtcaataatgtatcaagttaaaacttagctgagataatgtcaacttaagcttttccatgtcggcatatgtgcttcccacaatcttcggatggtcttttttttaaaaaaatctttggcctgcttcatcaagaactagatttgatcatgttcttctctgtgttgatgaattatctacagtttagctataaacacatctgaaatgttagtctattgaaggatacttggatactgaagccatgcatctttaaattgttaacttttctttttgtggtttagtatggatgaataaaaggggaaaaagcaaaagggaacaagcatcctctgatctttattttgatgatgcaatcttagaaaccctacctgaactgaacacctcttttggcattttaaaagtgctgcaaaggaaacaagcatcctcttgcttttgattctt

SEQ ID NO: 363462 - DNA, 336 bp, Zea mays
tatatatatatatatataggtggtataattaaatatatgtcgggggtatatctccacagatgaccatatacttcataggaattcaggaggtcccaggaacagcttcaatcaaatagcattcgttcttggacagaaatataatagacacagactcattcaaccaaaagtgtacgcttaagggatggttgcgtcctttgagtatatactgtgatacttcatgcagaggagtttttaacacggtcagtatttgttgtctcgactgatccaaaggaagctgacatcatctgggtgcgcctgcgaggagactcagaagtgaagaatgctgtgggggtcaca

SEQ ID NO: 363463 - DNA, 512 bp, Zea mays
  unsure (1)..(512): unsure at all n locations
tctccctccaacaagctaggtaggttttttttacctatgctggcttgtttcattatccatggcggaggagaagcaccaccaccaccacctgttccaccacaagaaggacgaggagcagctcgccgccggcgggtacggcgagtccgccgagtacacggaggccacggtgacggaggtggtgtccacgggcgagaacgagtacgacgagtacaagaaggaggagaaggagcacaagcacaagcagcacctcggcgaggccggcgccatcgccgccggcgccttcgcactctacgagaagcacgaggcgaagaaggacccggagcacgcgcaccgccacaagatcgaggaggaggtcgcggcggcggcggccgtcggctccggcggcttcgccttccacgagcaccacgagaagaagaaggaccacatggaggccgaggaggccggcggcgagaagaagcaccacttcttggctgattgatcctnccgtatcgtcgtccctccccgtgtgctac

SEQ ID NO: 363464 - DNA, 271 bp, Zea mays
gcaccatgttggaataatttaggggacggtgctgtcccacccggatgagttcgtgaccgaacgactggtttgactatggccctacagggccatggctcttccaaggaggacacgatgacgaacgatgaactgatggctcgcactggaaggctgagggagcaagctgaacacggagatgtacagccatgactgcggactgaaagaaggagctggctcatcccagtggttgagctgctatatgagcttgatgacacaaggcctaattttgtcg

SEQ ID NO: 363465 - DNA, 504 bp, Zea mays
ccacgcgtccgctcctctggacgttttacttggatgaatcactgaccaacatcagaaacccagttcaggctgggcaagagttgctaaagagggggatccgcacaaagcaggttgtcatcaaaatgggctccaggggttcgatcatgatcactaagaacacaatattctgtgcgcctgctttcaagatcgacgttgtggacacagttggatgtggagatagctttacggctgctatagcttttgggttcctccatgacttgccagcagttaacacattaaccctggcaaatgcagttggtgccgcaaccgctactggctgtggggctggcagaaatgttgctcgcctggataaagtactacagctcatgagagaagccgatctcaatgaagacatcacgttgtggactgagctgactgaaggaaactctctccgtatagaggtctcgattctgtctgggatagcaagaaatggttttagtgagaacattgtggctggtcctgtta

SEQ ID NO: 363466 - DNA, 489 bp, Zea mays
cccaccataaacagacataaacatttgggccgggccctccctttgcctctccctccctccataggccctagcccatagccccgtcgtcgcaatcgcagtcgccacccgccgccgttccgccggcaagccgtccgtctccgccgcccgccccatccaggagaagcctgccaccagaacattcaactggccttcgttggaaatccgtccgttccccacaactgaactgacaggccacccatggcgctgctccgcgccgccgtatccgagctccgccgccggggccgcggggctcttacccctctcccggcgctgtcatctctcctctcctcgctgtctccccggagcccagcctccacccgccccgagcctaataacccccacgccgaccggcgtcacgtcatcgcgctccgccggtgcccaccgctcccggcgtcggccgtcctcgcccccgagctgctccacgccaggggtctccttccgaggcactgg

SEQ ID NO: 363467 - DNA, 280 bp, Zea mays
  unsure (1)..(280): unsure at all n locations
accacttgctcgcaagaaagaaacanaccgangcaggggggagaggaaataaacacggggcgaccgaaaacccaaaacggcggacgagacacccaaaaaccaaaaaaaccgcgnacgggcagaaggagcncaacncagggaaaaggccccccgaaaagcacaggaacacccacaagagacacacaagaagccggcccaaagcggaacgcaagaacgacaggcgcccnaggggaacagaagcgcagcaaaaccggangacgacgagcagccaaagcacgca

SEQ ID NO: 363468 - DNA, 267 bp, Zea mays
  unsure (1)..(267): unsure at all n locations
cttgctcgcaagccggggaagagncacncgcacgcgaccgctggcggcaggcaggccagggcacgccaccaccacggcaccgaacagcaaccagacaagacnacacacggngcagngancggccgancgccagcgccaacgccaacgccaccaagaacggcggnggcccccggcagaagcaaccgcgcgcgcgcgcgnacgccgcacccgcacgcacacgcaccgccgcnccggacacaagcangcangnacagcagcccaancaga

SEQ ID NO: 363469 - DNA, 378 bp, Zea mays
  unsure (1)..(378): unsure at all n locations
ttcacgcgccggcccggtccgacaaaaccaacgggacaacggccacgagggagacccagtgagacacngcggcccccgccctcccaccnncanccagcgggggaaganaaccccccgaaccggcgcaggcnacgcaaaccggaccaggcacaaagcacaaaaaagngacccncccaccnaacagagacgggggagcaccccacacagacgggagcccgcaagcagggaccggcaccggcacaggagcacgagcgaaaagacangancccncaanncncccacnggcnacaagcacaagaaacnccacgacgggaaacaaaacnggcaagcccgncnncagngagcncaaacccacagagcccagcncacgggagagca

SEQ ID NO: 363470 - DNA, 330 bp, Zea mays
accggccggagcccggttgacccacgcgccggggctcgttgcagcaagggagagggagagcgggcggcgattgtgtcaagcagagccgcgctggcgggacgcgtcggcgagccgggacggatgcgaaacgcgggctacggggcgagaggagccacctggacgcgtgcgactacgacacctgctggggcctactgaccatacgctaggggtcgactcacaagcccacgaccggaacccaggataatagcagcacgatgctggaactggcgcagctgatcgacgctgacgaagaaatgtaccagggacagaatgaggagagggggcaagaag

SEQ ID NO: 363471 - DNA, 327 bp, Zea mays
  unsure (1)..(327): unsure at all n locations
gcaccggcccaaccgagcgacggcccgccgcccccccggcggcgccagcacagcgacaaccaggacgaaggcgcanaccnagacgacagcaagggcctaagcaacggggaggaacccccccatgccccaggagccaccaaaagggccagcnatgcacacgangagcnaacccacctaagcgacncaagaaggagcacaagcaaacnggggccaccttagtggaagtagctactattatggctagtttgagagtccaaaaaccgaagagggttagaaaaactaaaatctgcgccttattcaattttaaataagggctaggctgggaac

SEQ ID NO: 363472 - DNA, 514 bp, Zea mays
  unsure (1)..(514): unsure at all n locations
ccgggccggaannccttggttgacctacgcgaccgacccttgccccaaccccaaccccaacccagcggccccaggcccccctttcgacgctccgcaccctgcagccgccggggccggccagggcgcgcgccccgagcacgcggacgccgacccacgccaaggagcaccacgacgaggccgccgcggccgaggacgcgacgacggaggcggccagggngcccgccgccgncggcaacaggacgggggaggagccgcgcggggccgcggcgaggcggggcggccggcgcacccggagccgcgcgaacgagaacggccacggccggacgccgcagagggggaggaacagcaggaaccacgacggcngcgggaacaacgagaaccncancaagcagacagccgangcgcnggncaacaccgggcaggcgaagcngggccacgagcangccaacacagangacngcngggcggagccagacagggaccaccagggaagcnacgnngcaaacagacaaac

SEQ ID NO: 363473 - DNA, 432 bp, Zea mays
  unsure (1)..(432): unsure at all n locations
ccgggtcttcccacgcggccgcccaccctccccggcggcacagcgccaggaaccacagcaggcggcggttatagacgcagacgcaccccgcgccacggngaacacnccaggcgcacaagaaaacaccgagccaccaccaggcgcggggaacagagcaacaggaacacagggagcacgcgaccagacaaangngcggccgacgccacaacaagccacgacaganacaagcaaggagcngaccggcagacaacagacgcaaggggacagaggggggccncgaggagaagccagacgcaagcacgagaaacggcgagaggacacgggcaccaagaacacaaacagagcgatcgcgacctggactaaccgggactgccgtacaatgccggagacggaacgcagactgaagagaatcaggaagccccctgatctaac

SEQ ID NO: 363474 - DNA, 377 bp, Zea mays
  unsure (1)..(377): unsure at all n locations
caggaaaggaccaacaaaagaggggaatttggagcccgagcccgcaccgccgccccgaccgaacacaggcccacacagagccgcaggggggccacccggacaagaaaccgggaagccaccgcgaggcgcgcgcccaggcaagacagggcccgacccaaaccacaacaacagacagcaacaggaacgccaggacagacaagggaacccagcacaaccaaaaagggggccaaacacgagaaacgcgagcacngcccgccnccgggaagcagacgggccgacggccaccaaccaaaacaagcgaaagcaaggaaaaaaaaaaaaaaaaaaaaaagggcggccgccccagaggaaccaagccaacgaacgcgggcaagcga

SEQ ID NO: 363475 - DNA, 232 bp, Zea mays
  unsure (1)..(232): unsure at all n locations
caagaggngagcaccaggaaaagaggatcacacgcggacccccaagacgcacacgaaacagacangcaagagaagacagcaacacagaaaggagaacacccaangagcaaaaacgacagcgccaagaaaggcagcgaacaaaagcgggcccagcccgaaggcgaacaacagaaaccacaccggccaagcgacaaaaaacgaaggcaagcaggacaacgcaccaaaagccaca

SEQ ID NO: 363476 - DNA, 363 bp, Zea mays
  unsure (1)..(363): unsure at all n locations
aagaaaggagaaaaggacaggcggaaggtatcaaaagaggagccccccaccgcccccgangagccccaaagcagaaggcaaccgcagggacacacagagccaaggcaagacgaccgagccagagaaacagcagccagaaaggagcacacacgaccgggaagaccacaagagggcaaaggagccagaggacgaagaaccaggcaaaccaccagagaaggaggccgcgggagcggaacgcacagaaaaccgggggaaagcacgaggcaggcacacgaggcaccggagccaagaaggaagacggcaaacaaacacggagcgacagcgaaacgaacaacccccgacagggcaaggcagcaggcggga

SEQ ID NO: 363477 - DNA, 359 bp, Zea mays
  unsure (1)..(359): unsure at all n locations
ccgccctcccgcccggacgcgggggcgccgcagcaggggcgatgcggaggccccccccaaggaccccaccgccgcagaaaacgagacagacagaggcaanccacagcggcggaagacagccagcaacgcagaagaccaacaangccagggggagggcggcaagcacggcngcaagccagcaanaccccccgacanacaaagacacagacgagancacggaccaggggcaccccgggagaagcgaaaacaccgagggcaccaaccgaaccaggaggcgaacgaccngacgagaacacacgcgaccgcacaaacgcgcgcggagaggccgccaagacacacagccgagaacggaaccggac

SEQ ID NO: 363478 - DNA, 103 bp, Zea mays
  unsure (1)..(103): unsure at all n locations
cccctccggaaagaagancgcaacgnacgcgaangcccggacaactatagaggccagaaagggtgccggcaaggcacacagcactgccttccgagcaggagca

SEQ ID NO: 363479 - DNA, 294 bp, Zea mays
  unsure (1)..(294): unsure at all n locations
agaccacaccaaaggaggangccgcggggggaattttaaaggaaccgccagcaagagccgccgcagacaaaggagacccacagcgcgagccaccgaagcaagcaggccgagccacccccaccccggggagaacaagcgggagggaaccaaaggcccaaagaagccacaccccccaaaggggcaccacngagaaggccggccaacccaccgcaaccgggcagcgaggcaacgcacccaagaaggccaaccccggggaaagggccaggagacacaaaccccgagagcaccggccca

SEQ ID NO: 363480 - DNA, 476 bp, Zea mays
  unsure (1)..(476): unsure at all n locations
aaccgcggtcccgagggcggacgcgcgggggcaaaagcagcggcaacgatgagaaggcccaacaccgcgaaagccccggacacagcacgcggaccgcggcagaaaacaacagaaagcccacaaaacaggaggagcaccagcacaccagagaaggaccgggcgcgggcagcgaagcggacaaccgagaaggaggaagcagaaaccacagacganacgacgagacagaacgcaccgcggaagaggccaagcaggacaacccaggcgagacagcaacgacgccccccaagaccagcaaccacccngagagcacaagcagcgccggcgncagaaagggcgacacacacncnagcaaggcngacaccaagggaagcacgcagcanggcagcaccagcaacaaaaaacccncgcacccccgaggaggaagaaaagaacccacgcgaacaaacaagaagngccaagaaaacggaagacaaagc

SEQ ID NO: 363481 - DNA, 302 bp, Zea mays
  unsure (1)..(302): unsure at all n locations
aggacgcaaagggcggggactttttaggacaacgccaccaaggacaaggcaaaaggaaaggcagggaacacaccgacgaagcccacaaagccacagcnngaggcccagagaagacaaccgacacgaacaggccagggaaccagggaacagccaagggacagcccacccaggacagccaaaaagagcgcagagaagggcacgcacccgaagaaccaaaccagcaagcaggacacacgggccgaaacgaaggcgaaccgcnggaaacccgaccaggagaaggcccggcaccagagggaccagaa

SEQ ID NO: 363482 - DNA, 398 bp, Zea mays
  unsure (1)..(398): unsure at all n locations
ggctcctgccacccaccagggagacgggagggcacggggagctttaacagancgcacgacgagncgcgacccgaagacaagacggcacgggacacacatggggaagcacccagcgggaggggccagcgcggggcaacaagcgagaaacagaaggcacccgacacaggccggaaagacggggagcacgcacacacaagaggagaaccagccccacangaaccacgaccaaaagccagggaagggaaggagccaagccgccccaagacgggccaaaccggggggaacacaaaagcgcggggccacggaaaaaccacccagaagaaacccncgccgcagncgggagcgcgcccggagggggcaccnaggagcacagggcagggagggccaacacagagggc

SEQ ID NO: 363483 - DNA, 342 bp, Zea mays
  unsure (1)..(342): unsure at all n locations
ccgaccctcccgaaaacccgcagcaagccaggacgggaggggagacaaaaggagagagacaaggccagaaccccagacgcaggcgcaccagcccgagaccgaggccccaaaagacgcagcaggaaagccccccgaccagacccccaaccagaaacgcacaacgagaggaagaccggcggcaagccggacgagcaacccaaagacaccaacagagacggcaacgggaaccgaaacagccaccaagagagcaacgcagaaagacaacaagccggaggacaagcnggaggacgacaccgcggacgaaaccgcgaaggctactgcggagcccaaggaggagaaaaa

SEQ ID NO: 363484 - DNA, 227 bp, Zea mays
  unsure (1)..(227): unsure at all n locations
tgtccctccgacagcccagggcaaacgaagcagaagggcggaagattcgagaagagaagcacaacagaggggacgangcaaggcgagcacgcgcanggaacagaccaaaacccgccggaaacacacccaaaggcaagaaaaaacgcacaaggaaaagcacaagccccggaccgaaagaccgcaccgccaaaccaaaancaccgaacgggagaaaggcaaaaaacgac

SEQ ID NO: 363485 - DNA, 239 bp, Zea mays
  unsure (1)..(239): unsure at all n locations
aacggtaggtcacaacacccccaacggaacgggaacgggggcgggaggaacaacggggaccggcgccgcggcccagcggaacgagaaggcggcgacggacgcagagcaccgcngcaacgncggcggacacgcccgggccacggacgaccacncaccgcacaacgccgacagcaccgacggcgaggaccgcgagaccaagaaccaaccncgaccgggagacgcagagggcccgcggcaac

SEQ ID NO: 363486 - DNA, 372 bp, Zea mays
  unsure (1)..(372): unsure at all n locations
aacgattcgtgaaacggcgaacggagggcccgaggcagcgccgcttttttcccggcggcgcgccggctccagggacccgaaccncaacgagngccgcaacaacggcgacgacacggacgccgccgcgcagcacagcggagccgacaacgaccacaacgcggacaacaccaaccgcggaggcgccgacggacgaaaacngaccaacacccccacngacccccacaacaccggccggccgaccggcagactataggtgacctcccttccggattccggatacggatccgcttcctagatcatcggcggcgtgttccggtgctacgcggaggtgttctccgtcttcgtcgccgttctcgagaccgagtgggcacc

SEQ ID NO: 363487 - DNA, 411 bp, Zea mays
aacggagggcccgaggcatcgccgctgttttcccggcggcgcgccggctccagggacccgttcctcatcgtgtgccgcttcttcggcgtcgtcacggccgccgccgcgctgctctgcgtcgtcgccaacgtcctctccgcggactactccttccgaggtggcgctgacgtacgtaatctgaccaacaccccctctggcctactcatcaccggccggacgtccggctgactattggtgacctcccttacggattccggattcggatccgctcctcagatcataggcggcgtgttccggtgctacgcggcggtgtactccgtcttcggcgccgttctcgagaccgagtgggcacccgtcatcaggctctggaagatatttgagtacttgccggcaaggggaatgctgcagatc

SEQ ID NO: 363488 - DNA, 143 bp, Zea mays
ggcacacggcccctacccgccaccggcaaggcaaccaagcgcgaagaccaaacgcgcgaaacaacggaaccacacgaacaaggaagaaacaccaccgcggcgcggacaaagaagggcaaaacaaacctggcaaacgacggaca

SEQ ID NO: 363489 - DNA, 319 bp, Zea mays
  unsure (1)..(319): unsure at all n locations
cgggccggacagcccgggttgacttacgcgaccgcgcggatcggtgacncggcggcngacgccaacaacaacggcggcgggcgtgtctttcggnggcacggagcccnaaggcgacggcgaccacgacagaggcggcggacatggagccggaccggccaaaccaggaggactaccacccgcccgacacgcacccgcaggaggcgccccggaaacaccaacggcgcgaacngcaggacaacacgccggcgcacaccgaggcagcgggcgccaaggacgangacaccnncacacggggctnaaagacaaanncnccagagcc

SEQ ID NO: 363490 - DNA, 189 bp, Zea mays
ccgggacgacccacgcgaccgcccactttggtgagcaacgcagggaaccggacacaccacgcagggaggaacacaaggagaaccgcgcccaccgcccgacaaggacagaccgcggccacggagcaaaatggaaggcagcaaaacaaagcagagacaccaccaggaagcgaaagggccaaaagggaaaag

SEQ ID NO: 363491 - DNA, 332 bp, Zea mays
  unsure (1)..(332): unsure at all n locations
cgaacaacaccagggcgggagaactgactaaagcnaagacccgcanangcagccgaanangaanacnnacccgcanaacaaggcccaagaacacgaangacaaagaagacngagggcaaaaaccacaccggccagacaaacggaacaacgggacacgaagaagcngcagcccagggaacaacaaccggaaacaacgcagcaaggcacacggaagggaaaacacnaaacacccccgagagggaaagcagacacacaggaaccacaaccgangaacnngcnacaaaagacncgagagagccccancgcaggccaacaagcncgacagaacaccg

SEQ ID NO: 363492 - DNA, 315 bp, Zea mays
  unsure (1)..(315): unsure at all n locations
gcaggcgagggaagcagcggcagcggaggaaggattgtagcgagagggagaggagcgccggcaacgcgagaccaagangncaagggcgacgagccccagggnggccggaccgcggcgacgcagcacgaagccgacggccgacaacaccggcgaggacaaaccccncaaccgaaggcncaaacagagagggagagaaccgggaaacaacaccggcacaccccanacaggaccggcaacaaggaaacaaagccnnccggccacacangcanggagcnaancgcnccngaaaccaaggcacacgcaaggagcagaccg

SEQ ID NO: 363493 - DNA, 324 bp, Zea mays
  unsure (1)..(324): unsure at all n locations
gaccggccggaccccgggcacccacgcgacggctggtacagacacacccaggaggaccaccccacgagccccacgccggggaggcagcagcccgcccaccacaggaccaaccaggagagaaccggcccgagacgganggcacagcacagccngcacaccaccgaagagccgaggaaacgagaagccaccgccaaggggcgaccgagaaacagcaaagagcccacgacagcggaaagaaccacgcggagaaacgacacccggggccgacaagcgccaacgcaaacaaggggagccaaggccaagaaaaagcgaaccaagggacgg

SEQ ID NO: 363494 - DNA, 416 bp, Zea mays
  unsure (1)..(416): unsure at all n locations
atttgtaaaaaaacanagcaccgaacaccaaagcagggggcccgacgagagaaaacccaaccgcaaaaagggagcgaaacaggaacnncccagaagcagcaccgccgaccaccaaccaccaccgaaccggccgccgcaagcgagccgaaaagaccccncgccaggcaacccggccggcaagaggcngaaacaggcggccacgaacaccaccgcgcggcagaggaaggagaacacgcggacgcacaggggccggggcgcgcacgacgggacaccggaagaacccgacggagacaccggcgaggcaacagcggagcacgagcaccacccgccacaagaacgccgccaagcacgccaccaccaccagcgacaagagaacccacccccncgccgacgacgacggcacggcagcaagcacg

SEQ ID NO: 363495 - DNA, 184 bp, Zea mays
cacgcgaacgaccacacgaccggaggggggactgaaaaggaagcccacggagcccaccaagaagcggcgcaaggcgaaaaaagacgcccccgccggggagaaaccacagccagaaagacacaacaccgcgacacgaacaacgaacccgaaaagaccggcagcagagaaggagccaacaacggca

SEQ ID NO: 363496 - DNA, 428 bp, Zea mays
  unsure (1)..(428): unsure at all n locations
agccggaccggcacgccctgatcgacccacgcgcccgatttgtcgaccgcaaccagcagacaacacacaaccgcaggggcggaggcgaagagcgcgccgaacggacacggagacaagcgggaggaggaggagagcggcggcgcgggccaccaggagccccgccacggngaaccagaggcacgcgcccgccgcagcagcaccgacgcacgcccaggcaaagaaggaccaaacggaggaaacccacaaggccaaccacgaagccgagaacgacggcaagcccgcaggacggaangcaaggggcaacacgggaagaccgccccnaagacagcagagaacngccgagcaccaagcacaggagagaaaggaacnggcaagagaggcaaagcnccccaccacaagggaagaacanaccacagaagcaaacccag

SEQ ID NO: 363497 - DNA, 379 bp, Zea mays
  unsure (1)..(379): unsure at all n locations
gaaaaaccggaggatatgatcaccacggaacacccngagacacccccagcaaacgaacccaagnacccccaaaaagacnggcngacaagccacgagacacncgaaacacccgnggcacccaggccacccaaaaagcccaangaagacaacgaacangcccncaacaccgagacaccaaacgccaaggacgaagacaaccccaagggccgngcccgcgagaagggacaacagaaccgcgaacncgagaacagaccngaagcacaggaaagccggangcaggagaaggagaagctactgcgagaccaagaagctatgaggaccactcttcttcagtggtgttatgccagctacagcgaggtattcagttcctggatgcact

SEQ ID NO: 363498 - DNA, 306 bp, Zea mays
  unsure (1)..(306): unsure at all n locations
acgcacaagtcgttgagcaacccagcgaagcacggcacagacggacgggggcatttggccaaagaagatacaagcggcagcgaaanagagggaggacaaagcagcaaaaggcacgggaggacacaaaagaaacgaacccggagcaacgcaccncaggggagaagcggaagcccagcgggggcaaacaagagcagnccancccaaagnncnncaccnggaaagcagagcaggccaccacnngcnaagcgacaccacncngcagaggacggcaacgacacagaaggcagagacgcccagcaagagggc

SEQ ID NO: 363499 - DNA, 294 bp, Zea mays
  unsure (1)..(294): unsure at all n locations
ggacaaagaaactagccagnnnagaagctattgttagatgtttgctatttatttgttgcatgataatatgaagttatgctgtttgaccttcaaaatgagtatgtgtaattcttttacagtttttaacttatggttactgtacagtagaaactttctacaattttaatgcattgagtagaagttgagaacatgtttataaatttcacttgtctttgctcagaaagctgtaattgtccctgctccaattccacataagaattgttttcttggtcgactaccaatttaaactgacat

SEQ ID NO: 363500 - DNA, 317 bp, Zea mays
ggtgggtgagcagcaacgagcaccgacgccgcaccgacggcgcccgccgacaggacggcccccgcgaccccgccaacgaccgcgcgaaacccagacggaccagcagcgccaaccgaagcagaagaaacagaagaagcaaacaccaggaaacagcgcaagcccaagcgagaacgaggaccaaaagcgcaaaaacgaccacacgacacgcaaacgcaccaaaaccaacaccaaccacggagaagccggcggccggaaaggaacccaaaggccacaaaacaggaggccaaaagcccccgaccaacgaaagggggagcacg

SEQ ID NO: 363501 - DNA, 380 bp, Zea mays
  unsure (1)..(380): unsure at all n locations
cggtccggaacacctttgttgacccacgcgcccgcccatggaccgcccacgcgaccggcacaccacggggccaganttcttgcgcaagcaacccccgcgcggccaccacggcgccggagcagaagccagcgaccgcggccaagcagacgccggagcccaccaccaccaccccgggacaccacaacaaagggggcaagaagcacgcgacaaccgcggagacgcngangcagcgggagcccgacnccangcncgccgccanggacagcgggcggcacacgcaccangaacacccaaccacggggaagggagaggaccacgaggacagggacgggaagcacacccgccacgggcacaaaaggcccagggacggcgccaacccc

SEQ ID NO: 363502 - DNA, 312 bp, Zea mays
  unsure (1)..(312): unsure at all n locations
gggctggaccaccccgccgcccgcaccaaaggcggggcgggccagctccaaaggcacccacccacgcgccaccgccagcccgccgacagcacacagcgacggcaccaaggacaacgacgggcacagggcgcagaccaagcacggaacggcggagacgacaggcccgaanggcagcgcngggaaccacacagcggacaaccggagaaccncccacaggcggcccaaaaagaaggcgaccagagcccgcaacacgangangccnannggnaccccacgngagccagaccgaacaccnggggaaggaaccnggca

SEQ ID NO: 363503 - DNA, 365 bp, Zea mays
  unsure (1)..(365): unsure at all n locations
acgaacgngggtggaccagccggcgagaagaacggaggagggggggaccggaaggaggagccagcccccggaccggcccacaagcagaggcnngggaaggacaccgacgccaacgaccgcgccaaggacgacccacgcgcagacgcgaacgcggcagacaaggacgaagacaaggcaacaaaggacgagccgaaggcggcggacggcgaaccggagacggacgcggcgcagaaggccgacgagggccccaggaacgacgaggagaaccggaaggacgaccaagaggaggacgacgcagaagagcaacccggggagagggaagagcgggaggaccaagcagacaaaaggaaaaagcgaaaaaggaa

SEQ ID NO: 363504 - DNA, 251 bp, Zea mays
  unsure (1)..(251): unsure at all n locations
accggccggaaaccgggtaccccgcgacgaagcggtggtccgcgacgcccgggcgaacaaggacggggggacacaagcgaggagacaccaacacaacagacaccaggaggcaggcggagaaaaccaggcgcgaagaggggaggacacgagaggcacaagggggaangagcgcaagacagccaaacgaagaaaaggaggaaagaaagacgaaaggccacaacagacgaagaccgcaacgggaaaggaaagca

SEQ ID NO: 363505 - DNA, 319 bp, Zea mays
  unsure (1)..(319): unsure at all n locations
gcccacgcgaccgagcagcacaccgaccccgagttctgaaggccgcagcaccaggcgcggccccccacgcgagagaccgaganggcgctgccgaancaggggaccgangannaccccagcnacaagcncgncaacgacggcgaagggggaacccggaaaacnacanccgcgaagaggcaacncacnggagagcccgagaagaaacacgaaccaaccacnggngnggaagcncaaccgccggaanncaccaccaacggggggaagaacaggcaccacggcagggacaccgcagggcaagagaagaacggcggccacaggg

SEQ ID NO: 363506 - DNA, 316 bp, Zea mays
  unsure (1)..(316): unsure at all n locations
cgggttgacccacgcgaccgccgagtggcccaacagcccagaccagcacacgaccgggggaccatagagaaggacgcccccacaaaacaccccgacgaggagaagccancgaacacaggaacgagagaccaagagggaacagaccaaaagaaaagaccgaaaaaacgagcaccnggcaacgacgagccgaggccaaaaaaaaacacagaggaacgagggcaacacgaaccaccaaagaaggcaaccgccaaacaagcanaagaaaaaccaacaacaacgcagcgccaggcacaacccaaggcacagccagggagag

SEQ ID NO: 363507 - DNA, 311 bp, Zea mays
cccacgtgggtgggcaaccaaggagacagagacacgccggggagggaaaaagaaaaaaaggacggacgggacccacccaccagacaagcaacagcgagcaagcgacgccacagcagaaacacagagaaaccaaaaggcaacggcaacggacgaagagacacaagggcgagacagggaaaaccaggccgccacccaacacaagggcgcggcaacgcaaacccccgggggcagccggcgcaatagagaaggggcccgaaccgaacgacccaccgaaaagggaggcagcccaaaaggccaacgggacgcgcccg

SEQ ID NO: 363508 - DNA, 516 bp, Zea mays
  unsure (1)..(516): unsure at all n locations
gggcacaccangaaaaacanngncggaggggcttgtatgaccgnnctcgcacaganaaaaaccagnnggacgaaccgaaggaaangccgaagggcacaaacgaggcnatcaaggacanagngacgaccnccagcgaaanaaccgcagaacnaccgcacaccannccaccgnacaagnngngcccnggaacngaagacgacagcnggaaaaganncncacaaaaggctccngggaacngagacggagagaacacngaccnnaagaaaancggaaaggaaacagcaaaaaggcgcgagggaacaccaccacngactcattctcttggtttagttgtacaaaatgaagtcacaaatgtgtggttagctgcaagggatgaagagatatggaaactagaaagaagagttgccactaaaatagaattggtttcaccattatatcaaatatacaatgacttctcctcaactattaaaatgcgctttctataattatccatatttcctaaagggtctacaatag

SEQ ID NO: 363509 - DNA, 462 bp, Zea mays
  unsure (1)..(462): unsure at all n locations
acgcacccggccggcggaggtggagacccaccgacggcgcgcccgagccccgaggcccactcacgacagcaaccggcccccatccaccncgcccgcgacgagagaaggagccccaccccgccgcgcgaaccaagaggaccaacagcgccgccgacgccagcaccaggggcgccgcaccccccaggcccacgcgcgccgccacccacgccagcgccggcgccaggcgcccgcccccgagcgcaccgagcnggccacacggacacaagccnagaggagccggcacaggacgacacgcagaacgcaaaggagccgcgccaaagggagaacggcccgccaancaacgacanagcggccaggcaggggcaacgcagccgcagacactgccggcccaccgccccctcgaaggagacagaagaggagccgggagccccccanaacaccccagagaagaccaaccgggac

SEQ ID NO: 363510 - DNA, 357 bp, Zea mays
  unsure (1)..(357): unsure at all n locations
ccggctcgacccacgcgaccgccgagaataaaacaccgagccaaggagcacacccaccgaccaaccagcaggaagcaacaccgccacnaagccccangagaagangagagcaaacgagggcgcgcccaccgacaccacaacgagcaccaacggagacacgacggccaagagnccaggggccccaaccagcagaaagcgcaccaacaaacgccaagcaacaagggagacgcccccgccaccacaggaagaacgccncaagaaaagggncacagaggccccaggagcaaaccgacacgacgcccagaaggaccnagcgccaaccagcacagaggacgaaancaagaaaaagcccccaga

SEQ ID NO: 363511 - DNA, 230 bp, Zea mays
  unsure (1)..(230): unsure at all n locations
aaaaaaaacancacagccaccggaggaggaaggacancacccangaagccaacccacacaccagggaagagaccacaacagaccacccccgaccgccgccaacgccaccgagccagggcacagcgaggccnccaccganaccgacgggcacgaacgaggcaggccgacacccgacgaccgcgncgacgaggccccagacgcgcgccnccacagggnccaagaagaggacc

SEQ ID NO: 363512 - DNA, 190 bp, Zea mays
  unsure (1)..(190): unsure at all n locations
cgccgaggagcggcaccccacgcagttttttgcaaccaaggctcggggaccgaagaagcacccgaagaggcncaacgcgcccaagcaccggaggcccgacaagccaggcggaccacccgcacccaagccaacaacaggaccacacaagaccagggagagccccccaccgaaccacaacaccaggaacagg

SEQ ID NO: 363513 - DNA, 513 bp, Zea mays
  unsure (1)..(513): unsure at all n locations
cccccgggacgtcccactcggccgcccatataacggaaccgcgcacggcgcaccagcaggaccgggagttttagaggcggcacggccgacggccccgaccacggcccccagcgccacgcgcagcaccacgccgagcaagaacgccagaacgaccagcaggcagcccaacaagcacgacgagcacccngaagaggaggccgaacacgaggaggagcacaaggcggagacccgggccccgacccccgcccagaacgacacggagaaggaccngctcacaccgacgcggagacgggacggcgagctgcagggcacggagacggagcccgacacgaagccgaccgagaaggcggaggagaaggacgagccgcncaacccagccgacccccgggaagacgcgctggaagccacgcagaacgccacgaacaaggcccngaaccaagcggagaagcgacaggaagaccnggacacgacagggacaggcaagagcggaacaagaaccgcaaaagaaagacc

SEQ ID NO: 363514 - DNA, 394 bp, Zea mays
  unsure (1)..(394): unsure at all n locations
naataacgaccgcacacgcgaccgcccacgcgnccgggcgacccttaccgccccacccatcctngaccacgagcgagccgccgcaggcgccacaccgccgccagaggcgccagcagacggcgagcccgaacccaaggcccgggcaacaggcgacgacgaccaccagagggccgacgagaggncccacgccaccgccaccggctagaaggacccgacgcccacggaacaccccccacaaggccgaccacgagcgagccgccgcgggcaacacgccgccgcaaaaaacacaagccggcggcgaggaccaggcccacgcagccgggagcgacgaccaccaacagacccagcccgccgagccaaaccagagggccgaggagccaccccccccgcctag

SEQ ID NO: 363515 - DNA, 511 bp, Zea mays
  unsure (1)..(511): unsure at all n locations
cccacgctaacgagcgacaagccgcagcggggcccaggggcgctaacttgccgcaaaagggccgagatcggaccaagcnccaggctnggcaaaaagagccncccaggccacnaaacagacccaaacgggccacaacccnanaaacgaacgaaacgaagcgcccaaagagagagacccgcggcacaccagccaanaaagcaaaaagagagcacgccctaacgaagaccaacgccaccccacccccacgngggcgcagcncaagcagcacaggaggcgccaaccccacaaccacaggcagaagggagcccaggcgcggcgcccagaacagggactagtggcccgttctgttcggatgtaaaggaaagaagaaaaacttttctcaaacagtggggaaagggccccatacgtcaaagccagataaagaatctccaacaagattcgaaattggatcgctcaagtccaaaggatagagaagaaatcctcatggtcaccagaagatttttcatcgaga

SEQ ID NO: 363516 - DNA, 174 bp, Zea mays
  unsure (1)..(174): unsure at all n locations
cgcgaagcacgagcaattgtttagaaccgagaaccccnacccaccaccaagaagaaacccccggcaanggagccccgcgcgaacccagggacggacaccagagaggcacaggaaaaggaacccaccaaagggaccccaaaaacgaaccccggcaacgaaacggccagaaggggc

SEQ ID NO: 363517 - DNA, 309 bp, Zea mays
caaataagaccgccgacgcgagggcgcacccgcgggggaggaagtagagggggcgccggcgggggaacccgcccaccaagggaacgaggaagaacggggaggcacagacccgcgcacagccacccgaggagaggacagcggcggcaggggaaggagcccaccacccaggagaggacacggcggcggacgcggagaccaaggcgacagacagccaacccggccacgcaacaaggccagagagaggcaggcccgaggaacaacaggcaccactcaaacaggacggcccggcacgggaggcacaccagccaa

SEQ ID NO: 363518 - DNA, 262 bp, Zea mays
cacccacgccggacgtttttgccgccagccaccacggcggaggcggacagagagcaaatttccacaagccgcccggaggcagacaaggcacgcaagaacaccaccaaccgcaacaaacgccaccagggagggagggcccaaaccgccaaacacaacccccaagcgcaagacccgggagggaacagaggagacaccgacaacgggacagagggaaaaaaccgacaaccgggacaaagcagaacatgcgacgatacaaaccagg

SEQ ID NO: 363519 - DNA, 507 bp, Zea mays
  unsure (1)..(507): unsure at all n locations
ggagcggagacggcggagaagaagcgatgttccggcactcgcaaggatgaggcggcgacacgcgagnacactancaaccaccacaaacgccnccacgganggcaaggccccaaaccgccccaaccaccnnccaaacccaagcnncgcgnggcagcagagcagaaccgccggggggagagcacaccgcagnacaaaaaccgcgacgggcacgcatgtgcgatgctggtgcggcgggttgcggcctgtgagcacttctggggcttgcgattggttgatatacctgattggatccagtattctttaccagctagattacagtcggggatcacctgaccgagcgggaatagcttctagtcgatctcgctcttgtatctgatccaacatttatcacgcgttcagtgttattaaaactacgtttaaacgtcaaaaacttaattagaggttgaaataacgttttagcgttttggcgttcaaactgtaaacacaaagttttatgtatttaaacca

SEQ ID NO: 363520 - DNA, 181 bp, Zea mays
  unsure (1)..(181): unsure at all n locations
ccggttcgacccacgcgcccgcaattttaccgcgcgcacgccggcaaccgggatccacgggcgacttctggggaacacgaacaggagccccgcgcgcncggcagccagcgaagcgcacggaccgcacgcaaaccaccnggcanngcanncaccgcacccgacgacaggagggacgcggagg

SEQ ID NO: 363521 - DNA, 145 bp, Zea mays
accagaaataaacagccgcacgcggaaagccacgccagacagacagctggaaacaaacaggaccgcagacaccgccggcggaaagccacaggagcaagcagccaagaacagagagagcgagacggaagcgaaccacgagcacgcc

SEQ ID NO: 363522 - DNA, 248 bp, Zea mays
  unsure (1)..(248): unsure at all n locations
anaataaggcacgacccgccaccaaagccgccagaggggaacagacaaagcggaggcgcgcgcgcacgacaagaagaaggagccgngcccaaccaagcaccgccccaagcgccaacacaacagagaaggcaagagagcccaggaggccgccggcaaggaggaccggacccgcccaaagagcaaggacaccaagcaacagcagcaagaggcgaaagaagaaaggcaagaagccaacggggacaacggcc

SEQ ID NO: 363523 - DNA, 288 bp, Zea mays
gctcgcgcctgacaaagggagggtgtgcttcacagcccctgggcgctccctcggcttctctcggtcacgcacccttgttcttggcgcccagcgcttggaagtcggatcccatcaaacccttgccccttggccttggccttggacttggatggaacttcccagccgcagcagcagatgcacagagagctaatgagcctagggcatcaccataaccctctcagctcaccacctcacacatacaatacaatacaatacaatacagccgttgcttactatgcttttggggtc

SEQ ID NO: 363524 - DNA, 163 bp, Zea mays
tccaccgcctgcggacctagaacccggagcccctcgcgctgcggctcgccacctcgctggcggcgcccaccacccccggcgacctgcgcgccatggcgggggtagctcctccgaaaggccctctcccaggacccgccttccgacgcggtctccaacaacgaca

SEQ ID NO: 363525 - DNA, 163 bp, Zea mays
  unsure (1)..(163): unsure at all n locations
taccgtgaaccgctcngnggccccancnagggcggggtgngatggcagctgcgggagggacgataaacgcannaggatccacaaatgaaaacccccacacagaaaaaaaagcgagccgatggcaggacacgatccacaaaaaccggcccgaagacatcagcaa

SEQ ID NO: 363526 - DNA, 454 bp, Zea mays
ccacgctaccgtggacgcgcgggcggacgcgtgggtggaattgtggttccaattccagattatgggagaatgacacttccatattctcattgggcaccgatgagaaagttggagatcctaccaaaactcataatggctctgagaaagttgcagcaacagaaccactcggtagatgctccttacttattacaccaactgaagatagaactgatggtattactgagcctgtggaccttgcaaagaataatgagaatgcaccccaagaataccaagctgcatctgaaattatccctgataaagttgcagagggtaatgatgtgtcttccacaggaattactaaggatactactggccatagtgcagatggtaaagctctcacttcagaaccgcatataggggaaacacatgtcaactcagcttcagaatccataccaaatgacgcagctcccccaac

SEQ ID NO: 363527 - DNA, 356 bp, Zea mays
ttgttttagaaatgactactatcgataagtaagaagaggattatactaacattaattatttacttatggataagaagacgattttcccaaatatgagaattcatcgaattttaccaaatatggggaatatgataaattaccggattttcccgaatacaggaacttactggattttcccaaaaatccgaaaaaggtcggtaaagacatctcaccgtttattgtaccgttttcggaacccattatcccagtttcgtaccgtttttcatatatcccaataaatccgaaaatgggcgaaaaaatccggtaaacggtaccggaaaattaccggattttctaaccgttttattcttacccac

SEQ ID NO: 363528 - DNA, 214 bp, Zea mays
ttggtttataaacgactacacaccatacacagtgtgcggttcatttaaacacgtgtgggtggactaacgggtacaattctgggctccctacttgccgccttcatcctattggacctattatatcgctaataataaattaccaaattattccggatactacaccaaacgggattttctggattattactcaaaagggccttgacgactcttttgc

SEQ ID NO: 363529 - DNA, 353 bp, Zea mays
tcggttacaaatccgggggcgtcctgcgggggggagttaattgagtgggggatcatcgggtctccggcgccattggcgcggggcatgaccaatcccggaggtgatgaagcatgtgacgccaggggacagacaggacacgggagcgaagcaaagcgaaggaaggagtttccagtgagcgcggatcgcggaggcggtttatatagccggagggcgcgcgctccggtccgctaacgtcctgcagggagggaagggcaggattaggcagggcagcgccgcgccggcgggaccggccgtcctgctcgccgttcacgagccacggactttcggccatgggggacgctggcgctgacgcc

SEQ ID NO: 363530 - DNA, 504 bp, Zea mays
tggactcttgggtaaatatctctgaaaaaaacggtggcatttggtcaaaatgagcatcgagtccatttgttgtacctaatacatatattaccttaatgagggaaatagataaggctgaagcaggttctatctacaagataatcaaacagttagagagaaatctgtaccatgctttctcaactactttgctgcacacgtgcgaaacactattgaaggtaaatttcaagtttatataatagagaaaattatttgtatgccactgtaattttgcccaataccttatttaccgtcgtaaatgttctaatcccttctatgccattggagatgatatggaagcgtaagaaattgcatctgagtggcttagaagggattaggatatttgagatgataaataagacaatagacaaaattgcagtggtatatagggaattgtccggatataatatgaccatttagttattggatgcatatcaagctgacttgaatgaattatatctttgtaaa

SEQ ID NO: 363531 - DNA, 305 bp, Zea mays
  unsure (1)..(305): unsure at all n locations
agaacaancattaaagggatggttattataacgacggggagaggacgtttaaacgttttttaaactataaaacgctgacaggaagtgaaacgacaaaacgttttacgattcgtcgtaaaacgttgtttaacgtcgtttaaacgtcgcgttttgacgtttaaacgcggtatagagtgaaacgccgtgtttaatgcgtctgctgctagtaattggcccattccaattagaaacttccgcccagcccacccaaaccgccggtacaagccgtactttcaccagcccaattagtaacttgcgttcttacc

SEQ ID NO: 363532 - DNA, 293 bp, Zea mays
  unsure (1)..(293): unsure at all n locations
gagcgggacggggcanaccaagggccggggataacccacgggcgccagggaaacacccggcgagcagcacgcaccggctgcggcgagagaagacgcgcccgtcaagaggcctgcacccgacggggggaccaagaagttcaccccccagagagggggaagaaccgagatcgggtatgattcgccagaggcggaggaaaggaacaacaagaggcaaccaagccaatacctaaaggcacaccctggaggcccagctgccacagaataagaacggggaactggcgataccccaaggc

SEQ ID NO: 363533 - DNA, 398 bp, Zea mays
cgctccggtattccttggttttcccacgctaccgtcacgcgtccgggcggcgaagggaggggtaggtgcttttgaggcggcggcgtggagtggcagtggtctccgcgcgaaccaggccgggcgcgccagctgccgcggcgcctagagcgagcgcctggacgtggtctctctcgcagtccgagttggagcttgggttttggcgcggagggacgccggggttctggttctggcaacgcggctggaggaaggggggaaacggagatggcggtcggggacgcgctgcgacggctgtgcgaggagatcgggtggtcctacgccgtcttctggaaggccatcggcgccgtcgaccccgtgcatttggtgcgggaggacggttactgtggccacactttatgccc

SEQ ID NO: 363534 - DNA, 437 bp, Zea mays
cacatccgcagcagactcgaggcgaacggtttgttattggcggcgggtgcggcaatggcggggctgtcgctactgtgcggtgactgctgcgcgcacctgcttagtgtggaggaggcgcaggcgcactccgaggccaccaaccacgccaacttcgtcgagtccaccgaggccgtcctcaacttactatggtgcgactgcgggaagccatgccgatgccacaccgaggaggacctgcacaccaagcgcacgggccatacagagttcgcggacaagaccgcggaggcagccaaacccatcgatctcgaggcgccgcttaagccggccttcgaggatgtcatggacgtagacacgtccgcttcggcgagtggggagccacaagagatggttgtcccggaggtgaacaaggagatgctcacggaccttgagggcatgggttt

SEQ ID NO: 363535 - DNA, 481 bp, Zea mays
  unsure (1)..(481): unsure at all n locations
aaagcaanaccccggcaagggccggaccggacaacccgggncgacccacgcgcccgttgactcccgggcggacgcgagggcagaacgggcggggtaaaaaaaatcccgcaaccggaacgacaacggcgaagagcgtgcggaacggaaacggagacaagcgagtggaggaggagagcggcagcgcgggcctccaggagccccgccacggggaacctgtggctcgcgctcgccgcagcagcactgacgctcgcccaggctaagaaggacctaacggagaggacccacaagggctactccgacggccaaaacgacggcaagcccgcaggtccgattgacaaggggcaataaagggaagactggtcccaagacagcagaaaaacctcccagctctttgcacaagaaaaaaaagaaacggcaaaagtagcaaaaacccccaccacaaaggaagcacaatccacaaaaacaatccaacttcaagccc

SEQ ID NO: 363536 - DNA, 253 bp, Zea mays
cctccgcatgcatccagagctggcgagccggtgagcactgccgcgcgccacatcaggtaggagggcgctagctagccatggatcatgtctccgccatcgtggaggagatggtgctaccaacagtgggcctccatggacaggtacaccgacatggaccacgccgatgctgataacaaagctcggccgcaacgctggctgtattcgtcgacaagactccggcggagaaaacgccggctgggccggggaggaacac

SEQ ID NO: 363537 - DNA, 469 bp, Zea mays
ctaggtttgtccaccaacaccgttagccacgcctgattgtcctgcaccgacgcccacaccttcggggacgacgtcaacaactttggtccgcgatgaacatcacacgttgcttgccactccactatccaatgatgagggttgcatcgacgcctaccacgacgatgagcctctgcactaccgcactatggacaacatctcagtgagtagtatacccctagagtggtgcactacaacttagaggcggagctacacctggcgcatgatgacatcgagtcccgctccttcagtgaggcatagggggacacgccgcaatgcagtaaccaaatgtgggagttggttgaccttgctggccatcacatcatcacccttaagtgggtcttcatgctcaagtagaatgagtcccgtgcggtgattaagcacaaggcgtgtctggtggtgcactggttcattcaacaggagggagttgatt

SEQ ID NO: 363538 - DNA, 155 bp, Zea mays
ggttccttcgaggctttccgtccgcccggggtgggggtcaagacctgccggctgtccactactggcgcagcctacgggagtccaggctatatcatcgagcacggcttgtcttggtaccacatcacacgtcaccaggccgaaatggatactatcgt

SEQ ID NO: 363539 - DNA, 401 bp, Zea mays
acctcggacgcgtgggctttcctctcgtattgccagaagtacttatgttgcaacatgaaatgctttctagtctccttattaattcctcacattcgtttgtgatgcaaatacactgagctgtaatgttgtatatatctgaaaggaacttgagcctgtgtactgtttatgtgaataactcgtctatgttgatttctgtagaaatgccctatatcttatgccatacaatgcctgcactgcattgcattacacaatgcattatgcatgtagttgtgtatggctctcttaactcaacatgctcatatgtcacaaatacagtgcttgtatatatctaaatggactctgattttctactaagaataatgagccttttcgaggctaggttattctgcatcaataggaat

SEQ ID NO: 363540 - DNA, 382 bp, Zea mays
ccgcccgaattcccgggcacccacgcgctgacttctctagatggaatgagacctgggattcttttcaggctttcgctcaagcatcacctcagctatgcactgagcagtacggaagcaaacaaatggctggaagagaaaaggccgggactgggcgtaaaaccagaagacaatggatcatgcacactaaactacagatatctttagtactcgtgcagacactgacatgggtcttccagttgatacggcgaaatcatacatgcggacattacctccttggcaatccccattcttaggccatcaaaagtatgacacattaccctccaaacactctatcttgacaacaaaggacactacaaaggaggactacctctacagcttttgg

SEQ ID NO: 363541 - DNA, 351 bp, Zea mays
gcctgaggaccggccggaattcggtcgcccacgcttctttccgagcccttgtaccccttaccgccgccggtgctgctagggagcttccatccgcgcgcgcctacaacgagagctagcagcgatagcggccgttatcttgtcgctccggctccgctcgtgtacccaagtgccagcctagatgccgcacatggaggggaccactgatcagatcgccgtcggctggttcgctaaggagccggcttacgagcggcccgggggcttgccgaggaccggctcttacagtcgtctcaacgcgcaggcgccggagatcgtggcgcgggggccggcgacaccggtgccggtggttgtgct

SEQ ID NO: 363542 - DNA, 454 bp, Zea mays
  unsure (1)..(454): unsure at all n locations
aatgaaaaagaacgacacccctgcgaggcaaggaatcccttacccgctactactgtttcggctcgccggttcgccgtctcgcacactacacttcctacaccgacaccgagcactggctcagtttcatacccagcctcgaagtcgcctatgactagaacctgctctgncagcaccaactagaatgaatccctcaggacggtatgggggactagaggccagggccagcgcgataatggccaatcctgacgacaaccacacgcgccaggtggatgagatcaccaccgacaaggctcatgtggagaaagacaccacgcggatggacgctgccctcctcatgcggactacgcccaagatggacgagcttcacaccgggggcgatctggactcaagtggaagtggaagcggcatctaggggccaagcgcctccaaaagacagctacaaagaaggggatcg

SEQ ID NO: 363543 - DNA, 135 bp, Zea mays
caccctggcatcgaatggggatggcagctacctcccgccctgaaaaaagacggcggcagcagcaagatcccgcacagccgacggcggacacctgcagcgccttcactctcacttcccccagaaggcgtacgacgt

SEQ ID NO: 363544 - DNA, 246 bp, Zea mays
gtcttcagcggacacgcctccacagaacccgggggtccttaatgaaagggccaaaagggccagcgcccaaggcaggagagaacgagggcgcgacccggagacgaacaaagccagcaagaacggccacaccacctgcccgggcgaggcgaccgcgcggaggccagccgaaaaagcgacggcgcacgccacgagccacacctgagaggcgcagctcaacccggcggcgagcctggccttgggcaccag

SEQ ID NO: 363545 - DNA, 447 bp, Zea mays
  unsure (1)..(447): unsure at all n locations
tgcggtccggccggaattccgggtcgccacgcggctgngctggcgaaggtggtgaaagcggttctgtggtcgtggctagctgtgtttatggtccgaattcaccaagacagaagagtaggctgacaacttcagagagttccatggtaaatgctgtgcttgagaatgtacccagcaaccccttgcagtacttgagcatcgatgcctccagcggtatgaatggtaatgtggccaatggaactgctgatacctgtgatgcttttggccaccctgatcaagacaagtcatttaaaaggcgttcaggccaaagatctagggtccggaaacttcaatacattgctgaacttgaaagaactgttgactcacttcagaacattggtgctgatttggcttgcagagtgtcatcacttttcccagttcataatgctctatctatggaaaacaagcagc

SEQ ID NO: 363546 - DNA, 370 bp, Zea mays
ctccaccacacctcgtcgtttgcttttcctgggtgcgggcggtgcggcacaagcccccagaccggctgcctccattactgagctgtgcgtgcgtggtggctgtctgccttgtggcggcgccggtcatggtgatggtggagatggacggtggcgtgggaggaggaggatgaggatgtcagacgccggccacaccatggtgtgatcaccatcaacttttccagcacatggtccacaaccagctgctgaatgtgtgccaaatcaaggtagttcccgctcatggagttctgacagttacaggccttactatggacaattctctgatgacttgctcaggccagcgtctgctgctttggcaccacatcccatctat

SEQ ID NO: 363547 - DNA, 275 bp, Zea mays
  unsure (1)..(275): unsure at all n locations
ccttgtctcngagcgggagagcgcacgagctattcaggggggaattttagaacgcacgccaacgcctggcacgccggcggcgacccgcggctccccacggagatcgcagacctctgcgagggcctctactgcaccggtagaggaggggcgaacactgcgcgtatgcagactaacgcacgcttcggaacggtctacaaagggaacaaagtctgagacccaggctcctcgcgcagtggatgcggaaccccatgctcagctactgctgcggacccaac

SEQ ID NO: 363548 - DNA, 365 bp, Zea mays
cctggaagcaccccgccgtaatcggttcgacccacgcggccgataggatacagcaaaccgacgtgacgagtacgggagatgttttatgtgaacccggccccgcttgaccaaagctgacctgatcatgaatacttgcttacagatgaagctggtaagctcgtgcttggcgcttgctattctaaacaatgggccatggcggaggatcccaatattgtctcatctctctatgtgttcatagaacttgccttttgactgtagctttaatgggaaaaatatcataagatgcaaaaccatattactttactgcccatgtatggggatacgaaactcctacgcattggacagggcagtatgttccgcgggta

SEQ ID NO: 363549 - DNA, 455 bp, Zea mays
tgaacttgtttggatttaaggggcataataagataagtttatggtggttgagtatattagtaagtggctctatgaattaaagaaaccagatcttagcataccttacttatgtgagttgtcatgtgcatggatttctaagctcaaattagcaccccatagtgatctgaaagtcactggaacatactgtgtggttgttactactagtttcctaatatatagggaaatcacattggcgttgatcatctaatttagaactagtcaagaaataatggttgcagatggctagcaaaggctatgtcaattcaaggaccatggttccagtgtgctaactgaagtttctcacacacagttgagtgaaacaaatggggtcatcaaggaatgtgcccccaaagtgatgcatgatgagatcacaccctttctcccgatcaaggtgaagaggatgcagttatgagttc

SEQ ID NO: 363550 - DNA, 109 bp, Zea mays
tctacgcgtgcggcccctgctccgttctgccagccttagtggactccgcccaccaaggcaccaacgcattagacccccattcagtcaattattgtcacgttgctgctac

SEQ ID NO: 363551 - DNA, 352 bp, Zea mays
ttgttcgcgtgggtcgctcgctgggctgtccgaccgggctctgctccctcgttatacccgcacccgccgcaacgcctagaagacgcgagagggagggaggaggtgagccaccggaagcggagacgtgtgcagtcgaccaacctcatcgatccatctgctggccggcgcgctagagctctaccgatcatggtggtggaggatatcgccgagggggtgaagaacctcactgataccggagacactgtaggatcaggcggagagggtcagatgacgcgcgctggcgtgagcagcaaccgcatccaggtgtgcaacaccaagaaagccctctacttctacgacaagcctcccaaga

SEQ ID NO: 363552 - DNA, 374 bp, Zea mays
acgccgctgagcacgcggccgcgcgcggggccgccaggggggctcagatcgcgagcggacgcgcacccgccgcaacgccgagaagacgcgagagggagggaggaggcgagccaccggaagcggagacgtgagcaggcgaccaaccccgacgatccggctgcggcccagggcgctagaccgcgtaccggcctggagggggaggagagcgccgagggggtgaagaaccgcaccggtaccggagacccggaggctacaggcggagaggggcacaggacgggcggcggcggcagcagaaaccgcatccaggtgtgcaacaccaagaaacccgcctagtacaacgacaacctccccaagaggcatatgcaacagcacga

SEQ ID NO: 363553 - DNA, 297 bp, Zea mays
tctcgttcgcgtgggccgaccacacgctcggggcgtgggtcacttgccaacttctgcaattgaaggtcaacgcgggcgagctctctggaacccagcttgccagggcagccgagactgcacctttgatgacgaccacacgcgtgggcacacctgcagctagagaggagctggccctcggagtcgacacacacacatgtgcgaaggcggacaagacaccctggcagctggacgctacacaggaccatcctgtgaccctgagacacccaccaggttgaatgggcacacacagcacatcac

SEQ ID NO: 363554 - DNA, 165 bp, Zea mays
tttctcgcgtgcgcacacgcgtgcgcgctcgcgtacagccttggcagatcttgagagctaccttctggaccggctggccagatcccttgaggcgcagcagcccgccgagatgctcccagcttggtgctgttgcatgagatgcactgagaaataggatggaggcag

SEQ ID NO: 363555 - DNA, 165 bp, Zea mays
ttctttgcgtgcgtccacatttggtggaattcgttaggggtggaatcggctccagcacttgccttctcgaaggggccagacacagcgtctttagtacaccatgggttttctagcaagacatagctcatagagatgatgtaggcgcacaagcaccatgaactgcga

SEQ ID NO: 363556 - DNA, 361 bp, Zea mays
ctagacctacacacgctaggaccttctcaagaggggtttcttgctggcttcccagaggtctcgccggaaggacactagcagatccatcattcccacataaaatgacttaggagattatagctaccatggcgtcctctatctggtgtgaaacgaatattcgcacagagaggtataatcaaccatgggatctggtgacaggtactgctatgactgcagcttgacgcaacttgaaagctataggactcttagcaccatgccagtcatctgcgtggacatcttgatgtgactaccacaatgcaactgagaaacttgcgaacaacagattttgacaagagctatccgtttgagagagtcagatcta

SEQ ID NO: 363557 - DNA, 273 bp, Zea mays
tctatgcggcagcgcgcgccaccaccgtcggctggtgccaaggtagccgtcgggtagatatcctatgctgggctgcacgcaaccgaatcatgcatggggtgggctcggagagaatcgatcactcagacgatgccagacctgatgtaagttactgctctgatttgcctggtgacgacatctattcaggagtagcggttcctccgacccatgatccgtcagctggcacacatggtcatacactgtggatgttgctctgttggacagtgaccggat

SEQ ID NO: 363558 - DNA, 383 bp, Zea mays
aaccccggggcgacccacgctgctgacaaggcaagccaccagaaaagccaaagggggcccaatgaggcgagccaaaggaagaaccaactgccgcggccggagaagacgctccagcagaacgaggagcaccggacgggcccccaggagcaccaccgggaccagaaccgccaaagcacaagaagcgagagaaggagggagaccgggcccccccccacagggtcctgccgctgcccagcccggaccaggcggggtacaaccggaccacaggggcccaaaggctggggaaagactccggactgacccacacctgcagctacaacggtaagcaagcctggcaccacagggaggccaccgccttaggagagcccgggccgatgcaccgc

SEQ ID NO: 363559 - DNA, 353 bp, Zea mays
cctaaaaaaccccggcacgccccttctccccaaacagcttgtaaacgcatcccaacgctagtgctgctctatttatatgtgttaatgctatccaaataaagcctcagtatttagctattgaatgtacactgagctactatattttctgaatgttgctgccttagggcatcaccaagagactagttaaatgtgctgctgttcggaaagaagggggggcggattttttctggaaaaaaaaaaccatcaactaaccgtgggaagcgtggcaagtgaaagacctatttgttaaaagaccacaacacccgttaatattggacccatggggtggattccttttgcgcattgaaaccccc

SEQ ID NO: 363560 - DNA, 397 bp, Zea mays
ttgtgcacatacaggacgcgattggaagacggtggtattctatccaccgccataccagtgtatgtattgtaccatacacagcatgtcaatgtaaggatagtagaaaagccactttaggatcctccgtggatggctacccttgcaaaccaaacacatacattccttgtgtgcctggttagatatgttgttagacatacagcctttcccttagaaaattattgatgtcgactgagatgaagccgtctaaacaacccgccacgtgatcacggctgcacagaatcaaaaaggtttgactgtaccttatgtgtgcaaatgcaataggggacaaacgatgaatggaagcttatgacatgcctgcatgatacttgctggccactgaatgattgactgcacagga

SEQ ID NO: 363561 - DNA, 456 bp, Zea mays
ggaggaccgcccggaattttggttgacccacgctccttgcccagagacaaacgccagagggcggaattttaaaggagcacgccgaccaccccccaatggagaacggtgacgaaaccctcgcctcccccacggccgccgacgagacggacgcgctcaacggcggcgccacggaggaggagcaggtccccatcacccaccccgcacagtcctacgtcacgctcggcgacgacaaccccgctcctaacggaggcagcgtgaaagaggaggagggcggcgcccacaccaccgcgaagtcctacgcagctgtcgccgcccaagccgagatcgaggacctccagaccgccaagctcgacctgcaggagaagctcgctgaggcccgccgtgagaacaagtccctcggcgaggagacgcaccgcagcgaggggatcctcacgcaggctccggaggaggtcacca

SEQ ID NO: 363562 - DNA, 253 bp, Zea mays
ctcacgcgtccggtggacgacaaacatcatcatcagaaagttagaagtgcaaatgcttcaaggactggccccccagcactacggtcagacgaccgcaggcgcgacggagagccaggggctgagccactacggccctgtcctcatgcagctagaggactgcaccttcctgcgcgacacctgcacgaccatcaaccaggggtactgtcccgggctggagcgctacagcacagagggtgcacgcgggcctggagac

SEQ ID NO: 363563 - DNA, 479 bp, Zea mays
tgctcatgtcaaaagacaacagttgtggtggagcgggtggtgcgggaggttgggatgtttctgctggcaactggaataaatcatctgttgtggctgatgcacaggatgaaggttggggcaaaggaaactggtcatctgctgagtctgaagaaacaaacaatcaaagcggaaattggaacaaaactggagcttcggaccaagctggttacaacaattgggataaaccgaaatcctttggtggtcatggttggaacaagggtgatgatcagaatagcagttggaacaggcctgaaaattttggaggtggacgtggctttgggcgtggacaagggagaggtaggggtcaacaatctggatatctcaatggcagaaatgatcaaggaagctggaagatgtcatggggtagtgacaatgctgaaagaccctcttggaggtctgataatcaagtagacaatgaggctggagagtctggtggatat

SEQ ID NO: 363564 - DNA, 116 bp, Zea mays
  unsure (1)..(116): unsure at all n locations
tttctgtctngagatcgaggacaccttcgacggcgtgcgtacacatacccaccagggcaccgcgttggctatcgtccagcaattaagcggctacactacacaggtcatgcacgggc

SEQ ID NO: 363565 - DNA, 306 bp, Zea mays
ctcgcccacgcgtccgcccacgcgtcctcgggcgcgtttttggacgcgtggggcgctaggcaaaaaaaatgactgattttaaaagagcacgctttgtacgatcgaccacatggacagaagggactaacagcattgatagcggaccacagcactggtacagacggtcgcatgcaatcacacggcccatagttgctagtgtacgacaggcgacactagaggatagggggggcctgacacgacccaaccgggaccatgtggaattataatcgtacgcacaggaaatctctaggtggcctgggccccttg

SEQ ID NO: 363566 - DNA, 398 bp, Zea mays
tgcttcgcgtgcggccacacatgcgtccacgcgtccggctgcatgcggcgcacccaaaggatggcctcccctggctccctgcgacttctgcaggcccggcgctcatctgcgcgcaagagcgcaaccgtgagtggccgggcatgcgcctgggctgcgccacggccactgatggacgtgcgcgcctaggctgttgacgcgaacaacaggtatgccatgctcaagggctttcacgagaacagggctctcaagataatatccggtgttcaaaactttgacaggagcagtgctgcacatgttgacacagctgcgtgataagggatgtgcaacacatgttgacatatcatgcgacacggacttagtagagctagccatggatcctaccaaccttcctatctgag

SEQ ID NO: 363567 - DNA, 263 bp, Zea mays
  unsure (1)..(263): unsure at all n locations
nntttccaggcggaggacaaaggcagcaccgacgggggggttagagaacagccaccagaggccccacacccggcggggccacaacagaaccgcggcagcggggagaccgggacacgcgagggggcgacggccacggcgaaggaggagacggaccanggagcgagcagaggaagaagcacccagcgcggagaggccccaaagcgagcgggccagaagaggcgagggggggcaccaaggcagacacagaggccacggcagacaag

SEQ ID NO: 363568 - DNA, 406 bp, Zea mays
tccttcgcgtccgcccacgcgtgcgcggacgcgtgggtccgatagcatcaaacatttgtgaagcacactgatagcaacagaaactataattaaatgagtgttatcactcacactagatctggtacatcaccttctgatctgactactactgagctgaacaggacaggaaaggtgccattctgacccaacggctcactggccaccaaattaaaggatggaaggggcatacggcctaacgattcccatggcatgctctgcgggaggctggatgctccagggctacagagggcatgccgctctgcggaggggtcatgcacaggttccaggtgcgctccccgtggatggaccgctgggacctcatactgagacccgccgcgcgacagatcgagtgcaactacttcagcat

SEQ ID NO: 363569 - DNA, 241 bp, Zea mays
tttctttgcgtccggccagtcgttcgcagacacgcgggtcctttagcacgaataattggcgaagcacagggatgtcgactcgaacccagacaccatggatgtgatcactcatcctagatgtgctcataaccattgccaacctgcctcgtaacgagcttcaccgcatagatatggccccactcatggacaaggactctgtggccatccacacaaacgacgtaaagggcatcgagcttaccga

SEQ ID NO: 363570 - DNA, 247 bp, Zea mays
ttcgtcacttgcgaagccgctgcaccatgcaccgggggggactatatcacagcacgcgcgtgggacaccaagcagagcgaggcagaggctacggctcggaagaccccaggagacgatctaaatgagaatggacaagcttaaacagacccccagaaagacactgcccaagaccttacccggagcgcaccgcacgacaaaaaggagctgatcagcactgaccgatcgccgaaagaggaacgggatctca

SEQ ID NO: 363571 - DNA, 327 bp, Zea mays
ctctttgttactacctagcgacccataacaatggggagataatttgacatcacccacgttcgccaaggccaaccgaagctggtggcaaggactgtgcagcaggcgacaaggctacgcttgtttcaagagaagccagcgagagaccactgaaagttgagtggcgaccctgctgagggggatcaaaaccccaaaccctccatttggttagagcaactatttgggtcggcggatggcttctgcagattgctaaacttatttacagggcattgggtcaggccttccgagatgaacagctgatgcaattacccggataggttcgattcccag

SEQ ID NO: 363572 - DNA, 383 bp, Zea mays
ttcttttgtccccactccgtatcctgcggctccgactgatgccgttgccgctccttctcatcgacgccgtgccagtcccggcgtcgctcccctcctctggctaaacgcaggtcaagctacattctgtgctattcaaaggccccaaggatgacagagagattagcaactccctgactgtctgggactgagagctaacggacttgcgccagaatgtgagtatatatggtcaaagatgatagaagtactactttcctatgagttagtgtgagcaacaaggatgcggaagataaccagctggtgcactaacggctacatgcagaattgcagaccatgagttcaaccccatcctttcacacgggactcatgagactctctatggaata

SEQ ID NO: 363573 - DNA, 331 bp, Zea mays
cctcctcgtccgcccacgcgtccgtaaaaaaaaaaggaaaatcaaaaaaaaagacaaaccataaaaaaaaaaaagggcagagaggaacaccgacctcgggcagccgcgggtgcttcggagctcgggctctgctgctggccgtcctcttggcggtgaccgtggcggctccccccgccgcggcgcgcgcgtcgctgaggtgctccaccgtgtccagcaccctgatgccctgcctgcctgtgccggctgtgggcggggccatgctgccccagccgtgctgcagcggcatcacgcacccctgatgggccagccaatgtcagcccccttggcctca

SEQ ID NO: 363574 - DNA, 268 bp, Zea mays
acccgcagggcgaccgtgctgtggatgcacgcaggtcatgctacaccctgtgctcagcaacggccccaaggacgacagtaagagtcgcagctccccgtctgtgctgaaaatgcgagctaacggacttgagccaaactgacagctgatatgatcaaagcagacagaagcacgacatctctatgagataggaccagcaacaaggatgtggaagataaccaactgctgcactcacggggacatgcagatttgaacaccatgagtggagccc

SEQ ID NO: 363575 - DNA, 493 bp, Zea mays
ttctttgtccccactccgtctcctccggctccgtgtcatcccgatgccgctccttctcatcggcgtcgacccagtcccggagtcgctcccctcctctggctaagcgcaggacaagctacactctgtgctattcaaaggccccaaggatgacggtgagatttgcaactccctgtctgtctgggtctgcgagctaacggacttgtgccaaattgccagcttatatgttcaaagcagatagaagtactactttcctatgagttagtttcagcaacaaggatgtggaagtaaaccaactgctgctctaacggttacatgcagaattgcagaccatgagttcagccccatcttttcacatggcactcatcaaactctttatggaatagttgacattagtgttattaaggacaaaagttagatgcataattaagtgaggctataatgtgcatgccatataaaggagcactcatgtactacccgtgaatagttatttagc

SEQ ID NO: 363576 - DNA, 406 bp, Zea mays
aaaagaaaagaaggaacccccgcaggaaccggcgcggaagaaccgcggggacccacgcggccggtcgttagaaccagcaccgaccggcagggcaacgacgaccaggacgccaccagcggcaaggagaccccagcgaacaagagagccccggggacaacaccaaccggagggagacggaagaccggagacgagggagaaccaggaccgaggcggacagcagggcagggcaacaggggccccgcccgaggaacgccgccgcaggaggaacgcgccagggcccgggacgcacgaacccagagggccggggggaggaacagggaacgaaaaccacgcgcgggagcacagagaacaccggcgaacaagacgaaaaacagggagcagagggaaacaacagggacgggggcag

SEQ ID NO: 363577 - DNA, 306 bp, Zea mays
gcctcctacgtgtcccgccacgcgtgcgcaacaacgccaacaccgtctatggactgggaccagacacagccccctcttggaccttccaccaaccgagccgagccgcgatgaccggtactgtgtccaagctggcggccgctcagtcgtgagtacctgcacctcctgccggcgtccctccggaccgccgccctcgtcttagacccttccccgtgccgagcgcgtgctttcgtgctcggcagaaccatgatccccatgatcgacatggtttcggtcaaggcaggaagcggaccaccgaccaacaggact

SEQ ID NO: 363578 - DNA, 449 bp, Zea mays
gcctgcgtgaatgcgaacccatggacccgacacttggggcaggctttttttcaggaccgtcgttcctgtctcgctctaggggcccgggggggaccggaacaatgaggcaagaccttgatcaacaggtggcagacaaggtcgagctatcttctaggtgctgactccaggtgccacgctgacttgaagacaggccggtgcgcctgtgacgacccactcgtcacctctgtcgaccacgcagtggggggggcgaagactaagcagacacgggctggcttcgacatccggactaagcgaccaggctcgtgatccgagcccgagatgccggtccgggcgcgctgctaccgcgatctaggcaacctgaacgccggactcatcctggacactgcggtgacctccgacggggcgcccgaagccaaaccaggatacgtgaagacgatgtgcactgtcca

SEQ ID NO: 363579 - DNA, 359 bp, Zea mays
agatcatcccgtaccgccgacgccgggggcaccacttacttatgacgccgtcaccacccactgtgtgtctcccgcgccaccgctttgggcgttgcgaaatggcgctctactgcagctgatgtgacccaccagtgtatcacgcgagcatcgtcaacttcactcagcgccgacgaggcggcgcggtgcccggcggaggcagctctggcgcagagagagacccgcccgggcttgtgctcctgacttctggagatcatctagggcaggggattggcttgtcggcaggatgaccgcctgctcgccacggtgtattgtaagaacagtatcaaccgctactggcggaattgtcgagactcgtatgg

SEQ ID NO: 363580 - DNA, 294 bp, Zea mays
  unsure (1)..(294): unsure at all n locations
atcgtccacgcgtccgcgtccatatctgatagataattgggcatgtcctctggaacatcatcggtttatagtaagtatatgaaatggtgtctaagcatctaattccatattgntgtctggtttagattttccattcaaccatccatctcggtgataacctcctccgactctccgnctttcanagtctcaagntgcattgagacttactcctgtngacactgcccccctatttattacatttgttgcatgcctcactgcatatggaactggataggctgctttaagtctttcctt

SEQ ID NO: 363581 - DNA, 238 bp, Zea mays
tctttcagacgcacttacacacaacctacccagactggcagaccccgagccgacccactggtgcccggacaactagctcaacaagctggagatgctcgcgctcttacaccactcttgcaccaggtacaggtggtccacctctcaagatcgagagaggtgcgcagttggtccactttttgctgccgatgaacggtgtgctcatgaccttggtgcggacggactgatgagacctcaacag

SEQ ID NO: 363582 - DNA, 158 bp, Zea mays
ctttttgtctgatgatcaggcaggcaattggcctatattgtcatgtaaaagtgcaggagctgtctcccaacataatcgaaactaggagcagcacctgactgaccgttcgcatatgttgaacatacaaggtggaactctgggagagctgcagtgcatga

SEQ ID NO: 363583 - DNA, 417 bp, Zea mays
  unsure (1)..(417): unsure at all n locations
ggaaagcaggcacgccggcagggaccgggccggaaaggccggaccgacccacgcgttcgtttagacgcggacggcgggagaaacacgagggcgcagaggaagacgacaacccaaccaaccccggagacgccaacggccgcgcagcagacgacaacgccaagcggagccaggagagcgaggcgcagcgagttacaccccgggagcaaccagggtagcccnggcatgggcgcngaacngntgggtcgggcgcaggggaagaaacgcaccccctacgactggggctgcagggacctttacccggcgcaggcaccccccaaacgggccctcaccaaaggacacgcgaagaggccaacggaagcaggcacacgaggggggggggaaacggacgcgagcgccatgaacaccagggaccacgac

SEQ ID NO: 363584 - DNA, 244 bp, Zea mays
ccccacggggcggcggaaacgacgccgccggccgccccacgaacaggtttgttgaccaccgagcccgccgcgggaggagaccacgaggaagcaagcagcagccgatgctgcaggcggcccacccagaggagcgggccgcccaacaaccggcgaaaaggcggccccgcggcaccagagccccgcggaggaggagcccacgaaagaagaacaagcggccgcccgcccgcgcgcgcggggacaacaa

SEQ ID NO: 363585 - DNA, 318 bp, Zea mays
cttgttttgctagccttcactcgggacataatgcgcggttttaggggaacccaactccctgatccactctctccacgccgccagagagccgtgtgggcacccgggcctggggcctgtgcatagatctcggctctgagcgcaatcacggtcgctaagatgggtgacctcgaggagggtgcccgctccctgcaagaactcttccgtgagggtgaccatcggatgctaaaggctgtcgcaattgagcatcgtgaagatgttgagaccgcggatgctactggacttgatgaagtcatgccgatcatgacaggatcatctgga

SEQ ID NO: 363586 - DNA, 462 bp, Zea mays
ttttctcgtgggcggacgcgtggggtcgcgatcgcgacgcagcctccaattcgcgccgatgcctgcccccgcgccgtggcccgtgtcgcaggacgtcgcggcgctcgccgatcgcgccagcgccttctcccgtgccgtcgtcgggccccgcaacgacctgggtgctctcgcggcggcgctccttcggatccaacccgtagcccgcgagctcgagcgctggaggtggctcacgcccggcgaccctgaggtgcccgacctgcacgcctggctcttcgagctcagggacgcggtggccgacgccgagagcatcctagatgagctccaccgccggcgccagatcggccctccgctctcggcctgcgtatacgccacgttccgtggccccggacggaagctgaggcggctgacggagaggctcaaccgcgcccgcgacgattcggagcgtctgcgacctggcagcgc

SEQ ID NO: 363587 - DNA, 313 bp, Zea mays
aaaggaaagaagcaaccccagcagggaccgggacgaaaaaaccggaacgacccaccgcaaaacggttttgaaccaccaccgccgcaaagcagcccacgaggggagcaaagccagccccagagcgccagacaacggcgcaacgaaaggggaggagcccacaaagaccgcaaccaacaccgccgaaacaccgaggggaaaacgaggcggccaggagccgaacagaacaaggcgccagcgccagcacaaaaggccgaaacaaaacgagccacagagccgggcagcccagaccgagacaacaaccgacgcaccgcga

SEQ ID NO: 363588 - DNA, 349 bp, Zea mays
ttttctcgtgggctcactttcaagccgaccacggatggggctaaggcatacacatttttgacggcatcaagagcagcatctcatcatgcctgacattgcagggcatatccaccatgtgaccaagtagatgctgtttgagacttgtctgcgacatgcccagaaagatgcatgttcccagccttatgcgctggaaacatatctgctgtgaagactgtgtataccaatggctcgagagggagcgaacgttccctctgtgcagggcatatgaggagccagaagacctgcgctcgttcagcgacggctcaacaagcctattctttcagctattctagtccgagacagccaaaag

SEQ ID NO: 363589 - DNA, 216 bp, Zea mays
ccgggtgcgacccaccccgccggcgtgcttgggcggactacaagccgaccacggggggggctaaagctcacccgggtttgacggcacctagagcagcatctcaacaagacttacattacggggcatacccaacaagtgagcaggcagaagctgctggacactcggctgccacatgacacgaaccaaggcacgttccccgcccttggcactgcaaac

SEQ ID NO: 363590 - DNA, 332 bp, Zea mays
ttgtttgcgtgcgacaaccacgcacgagaaccgacggggttcaatcggggtagtcagtgagccgtgctagcagtgaagaggctcgtaaggcggtgaggagcagaacaggaagggaacgcaaggaaggactgctacaacaagagcatcaacgcgctgtacgaagcggtcacaggcggcggtgacaaccgcaacaacgagcgacgtgttcgtgctctacagcagaccagggagggcgggttcgacgtcgattaccaggaaggagaggaccaggctgccgccgatggcgagtacgttaggagcgaccgctaccacatggcaaatgatggaacgga

SEQ ID NO: 363591 - DNA, 441 bp, Zea mays
aatggttaaggcaaaagcagtcccaaaggtcatacatgtgcagggactattgactctgtgtatgtctctttatatgtcttttcttcttgaaaccgacgccctttctctcctgggagctttgacgtgaagcatagcatacatagtttgagaaacattaaaactcaccttgtgttttcttacccatcttgcagtgttctcttcctgagaaagagaggacgggctcacatggaaagtttcctttctgtagccctgggtgaattggtgactagatcaataaatttcatcatcaacaagttctcgaagccgccgacacttgccatggaggaaagcctacaaaggactcttcttcgagcacaggtcatcgacgaggaggccatggggcggcacattccaaatcaagccatgatccaacagttaggcatgctgagagatgccatgcac

SEQ ID NO: 363592 - DNA, 367 bp, Zea mays
actgcatacgccggcggagtcgtcagtcgtgcgtgccggtgtccgtaccgttctgccccgctcccctcccccgactccctcactcttcctcttccgttccattcaagatccctgcagccgtccgtgcatccatccattcatccgttaagaggagaggggaggccggccggccggacggtggcgcggagatgagggggcagacagagacaggccggcggcgaggaggcgacggcgttgccgcgtggtgggtggacgcggtggccctgcagctgggccattcgctgagccgctcgcggacggagctgctggagtccaacccgggccttgcctacaacttataccagagcagctgccccagcgcggagtc

SEQ ID NO: 363593 - DNA, 393 bp, Zea mays
ggtcagcccacggcgggccgccgagggcgcgagcgggcgcagaagagcggaggcgcggcaaccgcgcccgacgggcacagagggccgcacctactacgccgggccgacccgccgagaccgagaccgagccaagggggcaacgcgcgcaggacacgcgcccacagccgcgcgccgaacccgcaccggaagcacgcgcaacacccggaccggggggccaacgacgggagcacccacgcaatccgccgcagcgagcgccacgggcacgccgaggggcgcacacacacgaccgggaccagacaacgagccacccccgaggcgagcggcccgcacgaagacgacaggcgcgaccacgcgcacgcccgggccaaccagccggaggacgcgcacgaggca

SEQ ID NO: 363594 - DNA, 289 bp, Zea mays
tgatcggcgtagttactatgctgctccgtgctgcgtcatttgaaggctcgagcaaaagggcggagcacggttgggagcgaagcactctatttgactggctggtcggtcggccggtcggacgagcggactgatgctctaccatgcactcgctgctacgtgtacgtcactggtctgtgatacaagaactcactaactcactcggaactgatcttgttagaaattaggccagtgagaacgcatcacattggctagtcagcaggtacattcttcactagatctcttgctgctt

SEQ ID NO: 363595 - DNA, 411 bp, Zea mays
  unsure (1)..(411): unsure at all n locations
accttcttgtggccgaccgcgngggccgccggcttgggcttttgtttccgctgcgcttccgtacccgggagggcagcctggagtgcgcgctcgcgttcacctattcagtgatctcttgagatttcctcggttggtgcttcgtgtggacctgagtgtagggtcgagtgcaagcttggttgtggccatggcgacaggcattccgctaggtgctgtgctcgtcttggtggtcgtcttcgtcgtggtcggctgagctaatggtccagctgataccacaccaggtgatacatatactgatcgctctactgttcagacagtgcttgagaatgtgcagccacatgatcaggcagatcctgttacggagcatgtgagccaccatgaaggtggtgttagtgatgacattggtgacgacaa

SEQ ID NO: 363596 - DNA, 560 bp, Zea mays
  unsure (1)..(560): unsure at all n locations
aatgactacgcgtccgcccacgcgtccgcccacgcgtccgagatcccaaactttcttattttgttgatattctcccagctgcagcatgagcttataagtagctgcgattcttggttttgcattgctttaccagggacaaaattatgtagccctttgttactggttgagttagtgtctctctgtatgtagcctaagaaaaagaccaaaactgttgttgagaagtattgggattgggagctttcaaatgagacacaacctatttggctaagatccatctttgttctttttattgatataatcatggctgtctaagcatgtatttttggaaatgtcaatgcctgaggcttatgtggtaatcatgcctttttttggtgttgtatcaaacctggaaatgtacccttgtgaattggaaactctaggtaatagagttctgttctatttttttatgggcagtacaacactgcaatctctacagcttngatgcacctttttgctagagctagcactgacgaatgcttctgtagtacaccagtcagatcttttggatcttgattgctgat

SEQ ID NO: 363597 - DNA, 279 bp, Zea mays
tcgtccacgccgaccgcccacgcgaccgacggggcggacgagaacccaaacccgggaaagccgccgagaacgaacgagggggagcacgagcaaacaagcagccgcgaccccgggagcagcaaggccgaaccagggacaaaaacagggcgcccaccgcaacagggcgagcaagcgaaccgcagcacgcagcctaagaaaaagaccaaaacggcagcagagaagaagtgggaaagggagcccacaaacgagacacagcccaccaggcaaagacccaccccc

SEQ ID NO: 363598 - DNA, 293 bp, Zea mays
acggtggacacgcgcacggaacaaaggcccaagggggggagaggaaaaagagcacagcaccgaccccaagaggccagaagacaagtcccagcgcctgcccccccaggacgtgaacaagagcggaggaacaggaacagaaccgggaggcagagaggagacaggagacaacaagcccggacaggcagccaccgcgggaccaacaggccagacaaccgaggagaagactggagagacgcaccacgaggcacaccaggacggacagccgggagacaaagcaggcaccaacgcgaaga

SEQ ID NO: 363599 - DNA, 341 bp, Zea mays
tcctggcgtccggccacgagagaggcccggggcggatcatacagggggacggggcgagccgggccccgaccgccgcagcggcggaagcacctctgcagaccgacagagggagaggggccagggaaaacccggcgccggcgaccaacccggcctacgccacgccgacgccagcgcggcagctgccggactaccagcagccagggcgacgcaagtacctgaagctggggtaccagaacctcagcacccacggcatgaaccagctgctgaccccgccgagggcgcccgcggccatgaaccactgcacgcacaccccgcgcgacgacgacgaccagggggcgcac

SEQ ID NO: 363600 - DNA, 307 bp, Zea mays
  unsure (1)..(307): unsure at all n locations
ttttngcgcacggggacgcgagggcggacgcgggggcaaccaggcccaggcaccgcgggaccgccaaaccacgagggggaggagcaaccgacccaaccgagcccaaaccccaggacagccagagccccgccgacgccggcgagagcacggcaacagaaccgccgagacggccgaccgccgcaccagagacacagcggcgcgccagccggcggccagcgccgcggcagaggccgggaacgcgcgcgaggacaccacggccagcgccgccgcgaccggagggcaagggcccgacgcgaccccggagcga

SEQ ID NO: 363601 - DNA, 489 bp, Zea mays
  unsure (1)..(489): unsure at all n locations
nttgaccacgcgtccgcttgcttgcttgtaaactgccatggctggccgggtaccggcacatcgactgcgcgccgctatacaagaacgagaaggaggtagctagccgccgcaatccacgttccaccctgcaattaagtatcttcgattcacatttgcgatggcagttcggttatagttgcgaccactaacgtgttcccagatcggcgttgctctgaacaagctctttgatgacggcgtcgtcaagcgagaagaccttttcatcacctcaaagatatggtactaccatggatactgtgttactgctctcgtgtccatcagtctcgtaacaacctgagcgtcaagctacacaggtgcagcgatctcgcacctgaagacgtgccgttggcgatcgacatcaccctgaatgatctgcagctagattatcttgacctgtacctgatacactggccctttcagataaagagaggcagcgagctcaagccagagaac

SEQ ID NO: 363602 - DNA, 411 bp, Zea mays
  unsure (1)..(411): unsure at all n locations
cggaagacctgggacgacccacgcgaccgctccgcgaccggccagaggcgccggaagcggggggccaggcaaaagagccgcgacgagccaacaaaacccagaggangagggaactggacggcgccaccgcagatcagcaggcgcgcacggcaagggcggacggaagagccagcgcgccggcccgaggagcacaccgcaagacgaccggaaggcggaccacccgggcataaccaccggccacacacgcggcgggccggaagccaagcccaccgaagagcggggccaaacagaaccggagccgcacccgacgggaagcagcacgggagagcggcaaggacggacacggcgcgggaccggccaacagcccgacctcccaaggggccagggagaccgcagcggaaagccaaaaca

SEQ ID NO: 363603 - DNA, 343 bp, Zea mays
tgttcgcgtggggacccaaggcgccgccggggagcggatcagagccaacccgcgccgacgcgccgaccagcatcaggacgagaagaaaaaaagtgggtgacgggcactggcaccggcaagacgcgacggtacaccgacccgagcaagaacggcgagctccccagcgctccagccaaccagacagagacacggacggcgccaggacttcgccggacacgacgacacgctcaaggtgtaccaggacaacgacctggtccgcaagagcctcgacgagagaggccactgcagggccctcgcggacggcggcggctgcagcaagcgcggcgccatcctaagcgggaac

SEQ ID NO: 363604 - DNA, 254 bp, Zea mays
  unsure (1)..(254): unsure at all n locations
ggtacgcacgcgaacggaggaaaggcacaaaggtggggaaaaaaaagggcaccggccggggcacccccgcgacaaggaggtgngaagaaaaaccagacccaggacggagaagggacaccggcggaagagggagacaggcacagaaaaccgacgacgaccacaagacccagaccccaaggagcgccggagcaggaaggcggacgaggaaaagcagggagagcgccagaaaagacggaacgacgagggagagaggc

SEQ ID NO: 363605 - DNA, 255 bp, Zea mays
ccctgacgctggtgctgctgctagactgctagaggaggaggccggggcacgcagttagcgagctcgatcgcctggcgggcccgagctggagtcgatggtgctggatctcaatgccgagtcgccgacgcacggctcggcctcggacgactcgagctccagcgacgtagtgggcgggggctttttccggttcgacctgctcggagggacacccgacgaggagggttgctcgccctcgccacccatcgtgacgcgcca

SEQ ID NO: 363606 - DNA, 305 bp, Zea mays
  unsure (1)..(305): unsure at all n locations
cgcgccgaagccaggggcggggggtgtaaaagaacagggccagcgggaccgccacccaccgagngaccacggacgccgccgccgagcacagacgcagcaggggcagagagacagccagaggaggaggccggggcaggcagcacgcgagcacgaccgcccggcgggcccgagccggagacgacggtgcaggaacacaaggccgagacgccgacgcccggcacggacacggccgacacgagccccagcgaacgagcgggcgggggcggcaaccggaaagacccgcacggagggacacccgacgagga

SEQ ID NO: 363607 - DNA, 398 bp, Zea mays
ttgtcttccacgcgtccgctttcccttctgtgtggcttcgcatcccagtcccagacccggcaagcgccggccatcgccatttcggatccgggcccgctcagcgcgcgggttcccgaacccggccggccggccgcgctcctcgccaccgccgccgccggccatgaagcgcgcgcgcagctccgaggtattcatcggcgtaggccggctgcgcgcacgcaggggcctggcgccgtttctcgcagcgggggctttcgcctacctactgttcgtgtccgtcaagctcacttacctcggcagcgctgggcccgcgcctgccgtcggccgcctggccaccaccggcgcgggcgagccagctgcgcgcgcgcgctcgagcggcggcggtgccgtgtccgggtacg

SEQ ID NO: 363608 - DNA, 362 bp, Zea mays
ccttgtctttctcactctgccgggctgctttgccttatagtcttgctctgcggcttgatctgcttcatcttttttgttcttcaatcttgtcactcctaaggcttcccccctctggttgtcttgattgcccgcgtggcaatgtgtgaagtttaacaggattttttctggctgatgtcgcatgcctctggccgggggcatgcccatgctatgcttgcttggataagcttacgcaagaagaactggcgctttgcacgatgcgttgttcctaggatcccgatcgcactaggatgagctgaccactatttcgtggattgcccggggcgtgcgctgaagatggcttcggcagcttgggttaattttta

SEQ ID NO: 363609 - DNA, 423 bp, Zea mays
gggtcgacccactcgcttccgacgcgccagccagcgccgcacggagacctttacttcgagacaccacaacgcccccgcccagcaaaccgcacggaacagcaccgcacgcaaaggcccacccggccaccaaggcggccaaggccgcaccggcgcaagagcagcaggccaacggcaacggcaacggcgagcagaagacgcgccactccgaggccggccacaacagcctgcccaggagcgacgaccgggaccaggagaacaagctgagcgcaacgagcgggggacaaagacacggacctgagactatgaccgcgggggaagactgatccgagaaacattccgcaaaccagcgtgtacccgtgggagccggagagcatggacgagctgggcgagctcacctcaagcacccaggaacctgatgaccac

SEQ ID NO: 363610 - DNA, 286 bp, Zea mays
tttccacgcgtccgcccacgcgtccgggttgatgtaggatattggcggcctcttattcatcgattgtataatatgtgtacagaacagtgcattgatccattaaatttatattgagtgatatttgtgacttgcgaacacccgtgattgtttatagcccgtgccgtgatactacccagagcgcggcgcggagcctatgacctcactcatggctcatgaggagtacgggtaccaggacggtatacatgaactactggcgctggttgacctggacgatcctaaccatgcc

SEQ ID NO: 363611 - DNA, 335 bp, Zea mays
acctgtccactcgtccgggccgccaaggataaatcgaatccggatctttcttaatctcgtagggcggcccgagagagaagagaccccacctacaaggacaggcgccacgaccagagccaaggagcaatgataagagctcacggctaagacgacgccggccaccggggagcgccgtgggttgctgcacgagcagacggggatccgccccgcagtgccgccaccccggaagacgcccctggccgaccgagaccggaacctctgggtcacactggcagaaccgaggagcaagatcaacgggcttgtgccgcccgcgcaggcggcggtgccggacaagc

SEQ ID NO: 363612 - DNA, 283 bp, Zea mays
tccacgcgtccggtgcgttatctggaaggctggtctttatattctgtaatttattactaccactgatgggacttcgctatgtatatgggctgtaagagtcagagatcttttttcataattgatatcattagggaatactgatattgggcatccattgcttggctgagcctgattgccgtatgtatgaacatgcagcatttcgattgcggtaggaggtaccaaaggaaatgagcaaaacatagcgtacacgtgttagatgctgcaggagcacatcacgtacatt

SEQ ID NO: 363613 - DNA, 191 bp, Zea mays
tttcctgttgaccgagccatcggctacatgcgcgtgcggttatcttcgatccatcaccggggagacgaatacgatctggtgcggacggatagatggcggcggtgacaacaacacactggtatgacgacaacttcaacgacgtggagtatcagtgggagcacgatgaccacggttgtcgcagccagcgtgag

SEQ ID NO: 363614 - DNA, 152 bp, Zea mays
tcttcctttcaagtcgtcgtcggcagcgagcgtgtgtgatcttctacgcatcgcgccaaggacgatagagagatcgccgttcaccttctcagagtgaggggtgcgcgtgccctccctcctggggcagatctgtctggtcacagatctatctg

SEQ ID NO: 363615 - DNA, 144 bp, Zea mays
ttcattcgttcggcgagatggagtatcggccgctggagcccagctagcgtgcgcctactggtgtttatgttaaataggccatcaacgatgacgtcgcgcgatcgcgtggaccggatcatatcccaggtaactaccacccatggc

SEQ ID NO: 363616 - DNA, 305 bp, Zea mays
ttcgtttgcgaagctgctgctcttctgctgcggcgccgcgggcgcgggcgtgacgggccacttcgccccggtctcccgcttctccaagacgtccgggcggagcttcctgccgcgccgctgcgcgggggacctgctgtacgtgtcggacccctgcgagcacgccgtggcgggcgccgacgacgtcggcgtctaccgcggcgtgttcccggggtttcatgcggtcccggacgcgggcgtggctggtggggccaccgcgccgtgctggacccccgcgcgcgatgcccctactgcggtgcgcgcgtctg

SEQ ID NO: 363617 - DNA, 414 bp, Zea mays
  unsure (1)..(414): unsure at all n locations
tttccgtcagagcactagagcactgctgcctaccctggcgtattgtgtttacacttcacaatatggcaagagctcttgcctacggtggagcagctgccgcagctgggttcgtctcgccgtggcttgccgtgctcggtgtggccatgctctccgtctggaccatcacgctcgccatcctcctctgtggcgacagctcagacaacccgagaccaccaagatacaatcctgccgttagtgcggctatagcagctggtggcggagggggctgtggtggcgggggcggtggtggtgtagggggcatgcatattncttacatatctagaacctctcaacagaggcatttcggctgagcaattgatcaaagctttcataatgtctacctaagagtccttttgtggtctgagatcaccattt

SEQ ID NO: 363618 - DNA, 280 bp, Zea mays
tcactcgtccgcccacgcgttcgaaaaaaactgcttgagcttcgggttagtgcactcacatctagaggtgctaaggtatggcttggaggaatggaattgaggggcaagatcttgtgagggattatttgttacgaccatctggtacataacaagtgtttttacacgggccctaagctgcatagtactgacggatatatatgggagatggtatctgtaccaaacaatggtgctaatcactatggacttgctatctgcttccatctgctcatggtgctcatta

SEQ ID NO: 363619 - DNA, 172 bp, Zea mays
ttccgttggtgcctcgtctgctgactcctgttcgtactcgcgtccttgctcgccaccttgctaggcaacttgcatggccaggagactaaccaggacaccaggtcgcctatatcttgtaactggatcagagaacggaccataatactgacgtcaatgctgctgtcagtgatga

SEQ ID NO: 363620 - DNA, 382 bp, Zea mays
ttctttcgtccgcttcccagtgtagttttgcagctgatctcgacagcaacacacctgtcaccgaaatgcttcggtgaccctagatatcaaccgatgcacgatccatctcgatcctgtgatcgaataccggcgtaggtactaccaataaagtcaggccccgtcaaatgctttacatggtgattgaagtctggagcttctcagcaccaccatatattgtgttcagttcctgtgtttattgccatagctaccctttttttctgtgatctacgagctagacgtagctttgtgcttggagattccactactatgtttgctctgtcctgtgtatgctttaacggagatgcacgttgtacccgtggtaatatatataaatttgcgttgt

SEQ ID NO: 363621 - DNA, 249 bp, Zea mays
tcctctcgtccgcccacgcgtccgcccacgcgtccgggataaaaaaagaaagcagagagaaaaaaaaaaacgcgacaagaattctagatggtcggccgctctggaggtggcaagcggtcgcacgccatgctgcggcgggactcctcacctttcgtgcatccataatttaattcattggccgtactggggcttcggcgtgcttggcagaactcattcgtctcgcatcttagtcagcttgcgcgacatccc

SEQ ID NO: 363622 - DNA, 490 bp, Zea mays
ggttctctcatcggtgtaagcagaggtcgtgggccttcgcaaggtggtggcagaggtggaagccctatgtatcatcctcttatatggaatgcaggaattacatcaccacgtggtagaggccgtgggcgaggtcgaggcagtggccgaggtcgtagaaacaagagcagtgataggcagttagccattcaagcatccggtggatcttttgcattacaggctcagcccgaaacggtctgtgcaccagcacacatggtgcaagctacaaccagcagttcaacacggggtactgttgttccagctgcttggtgtgatatatgccacgtggggtgtaatagcaaggaaatccttgagcagcacataaatggaaagaggcataaacggtctgttcagagaatgcaagatatggctcgcctgcaaggtacgactcctgctatagctgacatgggtgctccatcatcttctcaagtagctgaagtagaaggcccctcta

SEQ ID NO: 363623 - DNA, 498 bp, Zea mays
gtggctcctgccgccccaagtcgcggtcgtcctcgcgccgcgccagcgccccgctgctggacgcccgcagcagcggcagcggcggcggcgaggagtggtgcgccaacaaccccgcgtcctcgccgctgccgtgctacctgccctccgggccgcggcgcatcgccgtgccgacctcgcgccagttcccggactacgactggtgcgtgctggagaaggcacggccggccacggcgcagagcacgccgcggtacctgcaagcgcacgcgccggccaccccgaccaagtccgtcgcgggctactcgccgtcgctcaacgcctgcccgaactacatgtcgagcacgcaggcgtccgaggccaaggtgcggtctcagagcgcgcccaagcagcgccccgagctcgcctgctgcggcggcggaccgcggaagcgggtgccgctcagcgaagtagttgtcgtggagtcgtcccgcgccagcctgagcgccgtcatgggcatgcagc

SEQ ID NO: 363624 - DNA, 455 bp, Zea mays
ctcccgtccgcccgcatccgacttgcccgccgaccacctcatccctcctaccgtgtagccctagccccaaccccttggtggcctagctccgtcggtcggcggccaaccgtagcagtcgctcgtcagcaacatcacccagccctagcctcacactgctctcaccagcagtcgccaacaacagcagccagtggcagtgagcatccgcgcacagcacagctcccgccttgattccccgccctccgctcgcggcctcgcgctccagtcactaacaggtagcatcagcaagcagtggcatcgaaggcgtggagaccggccagccgccaacgccctctgtagatcgctcggcctctccaaacgaccagggccagaagtagtgctagtcaacatctcatggaggaccactgagggtgaactatgggccaccgccacccatggctctgttgaggaggtcaaca

SEQ ID NO: 363625 - DNA, 473 bp, Zea mays
acctgcaaaggttttaaatttccggtgattgtttttccccttatgtttgagattaaagtcatgagccataaagtcccaaattacctagtaccttgtaatagcagatctctagctattacaaggtaccaggtctctagctattacaaggctcactgaatctccatatatgaactaccattgcctagcatgatgctttgaaaactggtttcaaaagggcaaattctctctctttaattcttgggttgtgttggggtgctccggcgggagcaatttgtatgtgtgaccccccccccccttccccccttttttgtgggccggcctttggtgacccgtattatttttatgtacttcctccttaattgataggcagtgctcctgccactttcattcaatttttttttgtagatgttcctttggcagtatatatgactggcagctttgaagttgcactttatgttatggctcccagtatt

SEQ ID NO: 363626 - DNA, 468 bp, Zea mays
gaacccaaccgattccatgctcttccgcttgctgctgcgactcgcctgtagccgccgcccccaagccaccgcctggccgtctcccccagaatccacccgcctggccgcctccccaagccaccgcttggtcgtcttctcgcctgaagccgctggctgtctccccgagaatccccccgcctggccgtctcccccaagccaccgcctggtcgtctactggcctgaagccgccgcccgcatggatcccgtcgaccaaggggcgccacacccgaaacagggccgccgcagctccaaatcctcctcaactgcgccgtcgtaaccacagtagcgccgccgtacctccttgcttgctgccctagacgcgaccgggtgagttgaacctgggaccttcgatcagtctgcagagcacaccatgggcatctgtacatcgatctactgagggcagcgctgatccctcgacggtgatgcctg

SEQ ID NO: 363627 - DNA, 484 bp, Zea mays
gcaattgtttactctttagagtagctgaattcagctatgatgtggtaaattatactagctatttactcttgcactgaatgtgaatatgagaacaaaatgccggactaaaaagttttctacgctctatattgtcataaaatcggaatatatcgactgctgacataaaagccaatttacaccacggctagattatactatggctcatgatagacaccttgattctccttgcctgcctcttcttttagcgattctgaaagaagctcctatctgcttgtagctgcgtctgtaagcatcatgatgacaaaatcttctgtgcatcctgcgctgtacactaatttaactgatcattattctgtcatccaggctgccgtgttatttgaatggctcatttgctctcattggtgatcgacaagtgttacgatggaaagttgcaaaagcccgtcaagtatggagtgcctaacagtgactttggcaacttatattt

SEQ ID NO: 363628 - DNA, 481 bp, Zea mays
cggactcttgggtttttttttttatcgatcgcctagctaatcttttctctactaccatatactactacttaattacattccagcagagcagagcagagcagctagctgcggaacggaattagttctgctgcacgcgcaagcaagcaagcacacacgagtcgaacggacgaagcgcatgcatgcatacatgtgcgcagcagagaatgggatcgatatgccaggtttcggcagctggggttgcttttgcaatcggctagtctactcgacgatttctctcatgtatatatgcatcatcatcagcatcagtctccggcgatcggtctcggctacgacgagacgactagctgctgctgctgatggacgacggcggcgtcgccgtcgtcgtcgaggtcggcggcggcggcgagggcgaccatcttgagcgcggaggcgccggtggtgaaagccttcttgcggacgcccatgtactcgggccacgtga

SEQ ID NO: 363629 - DNA, 414 bp, Zea mays
cccagggaccgggccagtaattcccgggtttttcccacgcgtacggagtccttcacctgcacgcgcccacgcacccgcaccaagatccactcttgggcctgttcctgccgcatttcacacgcgcaacggggggcgcgccgcgcaggcgatggtctccgcccgcctcgtcgcgctggccgtcttacaccttctcgtcctcttggccatgggcccgggcgaggcgcgcgcggcggacggcggcgaggcgcgcgcgctgctggcgctgggggccgcgctggacccgacgggccgtctgctcccgtagtgggcgcccggccgtgacccctgcgcgccgtcgccgtccgggggctccgatggcgtcgcgttgcgacgacagtggcgccgtctcctacgttttgcttcaagggaaggggc

SEQ ID NO: 363630 - DNA, 353 bp, Zea mays
agcctcaaagccgcagataagggatactgccggccaacaggagctttaggaccggctcatgcagatgcagctactaccgaggggctcatggcatattgttgtgacacttacccacggggtacgcgggtatgggtactgcacacccgacggggtacgcgggaatgggtactgcacacccgacggggtacgcgggtatgggtactgcacaccctaatccgaacctgttttacccgatgggtagaggtttccgcctaatcgcgtatccgtgggttgcccggatgcagggataggaggcaagcccatccatggcctcatataggcctccagttgtcactctactcgactgagcccat

SEQ ID NO: 363631 - DNA, 514 bp, Zea mays
cccactcttccgcccacgcgtccgcagaattctagattccaggcgtccaaggctccaagccatcctccggtcctcccatccaccaccggtccaccgccactccgccagccgaccactaggtcaccaggccgcaccgctgcagctcgcaatcgggggtcggaggtcggccagtcgccctcgcccaggtctccactctcccgcacccagtgacccaggtctcccgtctcccaggtatgctgtcgctgctgatgtcttcgtcggtatcggctacgccgagcccacagtccatagagaacggtgaccatgacccaagctctaggccagcagcctcgtcccctcctctgcagattcaggcaggggacttatcatcctctccggagacgaccagctcagacatcgcaaggtgagctgtgagcactgagcacaatctgctcgcttgattgttggtatatccgattcaatatatggctgttcttgttgcgtttgacatctgggcgattggactgaacaccga

SEQ ID NO: 363632 - DNA, 443 bp, Zea mays
cctcctcgtccgcggacgcgtgggcgcgttccattccgaacagcgtgcacaaccaccgctgctgcgatctcgccgtctccctcctccacgccgtctcggtctccctcccatggccggctacccgcctcccggctccggctacccctacggtcccggcgggggctacggcgccccgccgccgccctacggctcctcgcccgcgccctccgccccgccgtacggcgagaagccgcccaaggaaggcaagacctcgacctcctccgcgcccccctactacggcgcgcctcccccatcctacggcgcgccgcccccctcccagccctacggcggcgggggcgggggcgggggcgggtacgggtacggcgcctcgcagccgccgccctacggcggcgccccgcagcagcagcccccgtacggtggcggggccccggcagggttcggca

SEQ ID NO: 363633 - DNA, 420 bp, Zea mays
cttatgcgtccgtaaattctgagttcatcctcaattcggggctcttggtttaagccgttggacgattcattgtaccgcggaggattttttatggctcatgttgcctcgtgacattgtggtctgaccaaaagctgcttttacatctccttcatgggctgttcagcttccaagtgttgctcacaattgaagtgctctttgtgctcaaatgggtgcctggggcaggcacctgactccccgagggaatccaggggaaagtcaagtcgggggagagggagggtagattctagtggttcagatgattcttctggtgatgatctcggggaagatgacgatgcttttaaccatatgaatgctacaagggaatcaactgctggcattagccgactgtcaaggagtgtcgcacagtttcttcctcccgat

SEQ ID NO: 363634 - DNA, 464 bp, Zea mays
tggttgggagggataagaggcgacgagcggcgccgctcgaaggcgacgagcagcagttgcggcggaggctggaggaagcggcgctcctcctccgcaggatcaaagggcttgcgcgctggatcgtcgaagaggttgccgccggccgctccccgtctatagtgctccaccggtaccggaactattgctcctccgccgactctgcgtccccgtccccatgtgcctgcagctacgacatccccgtcggcacggacgtcctctctctgctccacaaggactaccacacctcccgcctcaatgtgctcctgagggtgctgctcgtggtgcagcagctcctgcagcagaacaagcactgctccaagagggacatctactacatgtacccctccatcttcgtagaagtagcagctgttgaccgtgccatcaacgatatctgcatactcttcaagtgcagccggcacaatctc

SEQ ID NO: 363635 - DNA, 127 bp, Zea mays
tcatcacgtccgggcacgcgactggccaggggggggaacaaatagggaggccacgcctaccttcaagagaaacctgcgcatcatagtggaggaaggcgccaatcacaaccttactgacaggggcggc

SEQ ID NO: 363636 - DNA, 144 bp, Zea mays
tttctttcacccgtggcggcgcgcaaggcgagagagtcgcatataggcggtgcgagtgctgctcccatctgagcttgccaccatggctgacgattgaaagcattcgagaggctcaatgccccagcattgatgctcgcaagcttg

SEQ ID NO: 363637 - DNA, 259 bp, Zea mays
ttcttctcgtccgggtacgcgtgggctgaagggcggggtcagttagggagggcccacgtagattcagaagagtctgaacattagggagaggtcaggcgagcttgacctccatattgagatgggtggcaccgagaatctagtgagcacgttgtacaccagcaaacgcagcactgagatagtccgcgaggcaaggcaaggtgaggaggaccaagtgttcctccgcacgctaaaggttcatgacatgacctgccagaacaat

SEQ ID NO: 363638 - DNA, 175 bp, Zea mays
gggtcggacccaaacgcgtccgtttatcgcgttcgggtacgcatgtgctgaagcgcgaccacagtatggagagcccagaagatagagatcagtctgcacattagggagaggtcagtcgagcttgacctccttactgagatgggcggcaccgagaatcttgtgagcacgctctaca

SEQ ID NO: 363639 - DNA, 115 bp, Zea mays
gggtgaattttttagcttgtgtctgtactactacaactcagtgttctccaccttctcgtcgcgctacgtgcgcgagcgcctgccgcggtaccggatgccggagcggtcgatcccg

SEQ ID NO: 363640 - DNA, 156 bp, Zea mays
  unsure (1)..(156): unsure at all n locations
cgtctcggtgcgcgtccattgaagacnatgtgggagtccagaggtctattgccatgccggtgagcgcgagcgcgggctcgtacctgtcggcggcggaggctcctcgggccggtacgaggcagcgctcaagaacgacggctttgttcgaagagacca

SEQ ID NO: 363641 - DNA, 132 bp, Zea mays
tctgcaacgcgcacagccaagcaagaagcgagggggggacaaaaacaggcacgcccggcgacaccccaggaacggcagaaacgggacggacgcacacggacccaacggccggcaagacggcccaggagcaga

SEQ ID NO: 363642 - DNA, 173 bp, Zea mays
  unsure (1)..(173): unsure at all n locations
cgggccggaatgtcccggagtcgacgccacgtctctctttgtgagccacaccgnccccatctacgagggatacgcctcccacgccatccttcgcttgacctggcggtggacctaccgactacctgatgaagacctgactggcgcggctactcttaccaccaccgtgagcggaa

SEQ ID NO: 363643 - DNA, 139 bp, Zea mays
tcttttttcgtacggatacgcggagcgggaggcgggcgatttatttgaagaggcatgcgtctacagaacccgttaggtcttttacagcactagtgtatcaactgcctgcgatgaggtgacaaagatagttgaagccaag

SEQ ID NO: 363644 - DNA, 217 bp, Zea mays
ccaactttgccaagaggaagaagccgtacgagctcgaccttcaacgggagaaggaggcccaggagaagcatgccaagaagctgcaagccaagaaaatccaagattgaagaatagattggtgcttgaacaagaaaacgtcaacggtgtgccaatttaaaggttcggcaatgaataaaggtgaagaacgaaacctttcagccttagccaaaagccaaag

SEQ ID NO: 363645 - DNA, 174 bp, Zea mays
atcgaacccaacgctgttttttcagacgactacgacatcgagacactccgtctgcaatggcgacgggccgcgcacccctctcgctcaacgcctacaccctggccgccaggctccgagccggagtggaaccggcgggcacacagtggaggcagccgcagggcgggcggatggtgg

SEQ ID NO: 363646 - DNA, 117 bp, Zea mays
cgctggagcgctgaggatccagcagagccaggggaggactttttgaggctgcaccgacacacgatctaaagcctgagactacttagtggatgacctgtcatttctgcaaaaagggga

SEQ ID NO: 363647 - DNA, 106 bp, Zea mays
tagtacccctgccatgcgcgggccaaagcggaggtgtttttacccggaggtccgagtgttcattggcgaatctataaagtccctggcaagaagacggaagcagcca

SEQ ID NO: 363648 - DNA, 100 bp, Zea mays
gttcacacgggcacgcaaggagcagagtggggcgtatcagatggcgggccgcccacgaacacaagtgacactctgcctggcaacggacgaggaagggccg

SEQ ID NO: 363649 - DNA, 220 bp, Zea mays
ctacacacacacagacaagtggtttccaaagccaagtgtgtgtactagcaaccagctagctcgggcggcagcaggcagccatcatgtcggaggagaagcaccaccacttcttcaaccaccacaagaaggacgaggagcagcccgccggcgagtacgggtactccgagaccgaggtggtcaccgccaccggcgagggcgaagtcgagaggtacacgaagga

SEQ ID NO: 363650 - DNA, 140 bp, Zea mays
cacgtcgttcgttcacgcggccgcacacgcgaccacaagacggcgcgagaccaaaacgggaggcacggcgacaccgcaagaacaacaacagagcggaaggcgaagacgggtcaccccacgccccaccggggacggggaca

SEQ ID NO: 363651 - DNA, 135 bp, Zea mays
  unsure (1)..(135): unsure at all n locations
tcctttaaaccctgccgnctctgaagtttcagagctcagaattgcgccatggcagtgagacggaaccttcgatttcaggctggatcaaccagctgtctactcatatcacacctttactccaacaggagacttctc

SEQ ID NO: 363652 - DNA, 113 bp, Zea mays
ctcggtcccacagcgaaccaaagccggcaacgggcagagccagaagacagcccgctgctgcacatcgaccgaagatgaacccccaggcctgggctcccggcaccgcgctgccg

SEQ ID NO: 363653 - DNA, 236 bp, Zea mays
ccggaatacctggtccgacccacgcgaccgatcagaccgccccccacggcccacaccggcgatgagaatggtactaaaggctacagggcgcccgaaccagcagccaagaagccccacatatcaagagacgtgaaactcgaagaggtcaaagcttgggactggaaaggtacagaacaacagagcccatcagcatctgtaattgatgtggagcattacagcattgcaaaaccaggaac

SEQ ID NO: 363654 - DNA, 166 bp, Zea mays
tcctgatcgatcgacacccatggtcttcaattggttactggagaagaggtactaaaggttacagggtgtatgatccagtagccaagaagcttcatatatcaagagatgtgatattcgaagaggccaaagcttgggactggataggtacagaacaacagagtccatc

SEQ ID NO: 363655 - DNA, 117 bp, Zea mays
ggtaacaacccaagaaacaggccttgctgtagacgccgaagagatatgctatgcacacgactatatatgaatccagttcaaatagcatgatagcgagacattgattcaactgagatg

SEQ ID NO: 363656 - DNA, 131 bp, Zea mays
tttatcgttcgcacgcatggctccattggttctgagaaatgtctaaggtacagcgggatgaccagagccaaaagttatatttaaggatgtgaattcgaagaggacaagcttgggactggatgggcagaaca

SEQ ID NO: 363657 - DNA, 152 bp, Zea mays
ttcacgcgggcgaacacgcgaaaaaccaggcggcggaccaaaaggcggacacaagaaccccagcagaggacgacagagcgggggccggacaagggacaaccagggccacacacacgaagcggacaggaaggaacgggggccccacccggagg

SEQ ID NO: 363658 - DNA, 342 bp, Zea mays
  unsure (1)..(342): unsure at all n locations
tcgacccacgcgcccgatgataaaacctggcacccgagggcacaggagcgagtgttttatgaggangctcgagccacttctgcaccagcacaaactagtattgagtgcagcatgttttgcagctcggacagggaatacgtttttgggttccctactgtggatcgactatgccaggtggataggcgtacagtaggcttaagcatgggtacacaaatgcagctgctcggagttccagcaacttgggttcttcgtgattttatattaccacgctttctccaactggcaagtactcgtctgctttatgggagactcttaggacagattttgatatcattctttaaa

SEQ ID NO: 363659 - DNA, 140 bp, Zea mays
ccggaacgccgggacgacccacgcgttcgtcacgcggacgacacgcgagcaaggacggggccgaaaaaagggggcccgcacccccgagacaacaaaagacggggcagacaagagcgaccagagccaaacaggagcggaca

SEQ ID NO: 363660 - DNA, 181 bp, Zea mays
actgaacacccctacacaaaagcgagcaaccgggcgggttcttgaacagaatgccacggaacaccccacaatggattgtttcatgctgcagaactgcactgcctatgaagcgcgctattccggaagtagaatgcgccaatcattgcatatacaatctaatggttatgctgcttgacgatca

SEQ ID NO: 363661 - DNA, 100 bp, Zea mays
actggccacacggccccacacgcgacccacgaggggcgtgatttaaacgaggcgccaggcgataccccaagaaccagaaaagcgctaccggagggaacgg

SEQ ID NO: 363662 - DNA, 299 bp, Zea mays
tggaattcgctaactcgttcgtaaatagtctctcaaaacccaggtaattaaatcaaggtaaggctcaagagctatctgcaatggctccaggtccagtaatgcgattcaaggtcgaggacgagtactgcactttgtattcaccattactttcttgcttattgcatcatgtggaaaatgaccgattgcgcctctgaacatcgaactcaacatcaattaggtcagttataccagctgtaattacctgggttttgagagactatttatgaatatgctaagctgttcgggacgcatttttttgt

SEQ ID NO: 363663 - DNA, 193 bp, Zea mays
ccggaccggaaggttcagggcacgacccattcgactgcgcacgctgcgcagagacagcgccgccaaggccagctccaaaaaccacaccgcggccgacaaggtagcacaagaagagaagaccgcagcagcgggagccacggccgcggacgaggccagagctgagcctacaccagcaccggagcggcaaccgcag

SEQ ID NO: 363664 - DNA, 158 bp, Zea mays
ttcgctggcaccagcctgtcccggagggctggaacgccttcgtctacgtcgtcgacggcgagggcgtattcggacgggagacggcctctgcacaccactgtcttgtcctcggttccagcgacggtgtttgtctttggtacaggttctccttgcctttt

SEQ ID NO: 363665 - DNA, 352 bp, Zea mays
ttgtctgctccttttcctcccaccgttcctgtcacccacgcagcacgccggagcagcagtagcagtcgagctcggcatcagctcccttgctgctcactttgcagcacctcgccagctccctggtaacactctgcacctgccgtcgaactctctcagcttccgtcgctgggtgcgtgctcatcttccgtcgcgtgccacctggtcgatagaatgagcagtttggtcgtccccatctcgccgtggttcgtcctcaccatgttttcagatgtgtttgggctgagatgccattcaaaatcgatgatctgttcgtcgccaccggccgcaagcaccagttcttgttgaacgtgagaac

SEQ ID NO: 363666 - DNA, 227 bp, Zea mays
tggaaaggcatatttttcttatgcacaagcattattaaattggttgtggctgcatttgtaaattgagatactaaactagtggaagcaaaggacttatttgagttgtttaactagtctaagtgaaaactaaacccaacgtttctgtcagacccatcagattatcaagtacttttaagtattaactaaaagaatagcccgcacattgttgtgggactttcttagaaata

SEQ ID NO: 363667 - DNA, 306 bp, Zea mays
tcggctgctccacgcgtccggatagaacatgaaccaaggagagggaacattaagcagaagtcttctccttcccagctttctcattctcacttgcgccacttgtaacatatttcgggctactagcccttgagagcaatacaagattagcactacactagacgtagggcatttgcctaaaccagtataagtcctcacgagtcactcgattcacaattcggagtacgtccacgctagccctcccgctgaaccataaattctattgtgtccccggttttcgaatccacaacataactactttgtagaaac

SEQ ID NO: 363668 - DNA, 221 bp, Zea mays
accgcccgactgcccgggtcacccacgcgccgtccaacttcatcctacaagaaaccataggccaaccaggactctccagtacaaccctgagtcccggcacaataatgagagctctggaaggcctgaagcctggaagcgccgacggagagcagaccctgataatcaagccgacacccagcctctgggtcaacccccaaccaagacaactggcacccggcccc

SEQ ID NO: 363669 - DNA, 180 bp, Zea mays
tgactcatacaaatactcagctcgcatgcatgcatcatgtggttgctttgctgatcagaccagctaacttgcaagcaggggtctgattcttccaagttaaagatggatcataacctgagcgacatgacgatcctgagcgagcacgcatggggcgacgaggccggcgccttcttgctgtct

SEQ ID NO: 363670 - DNA, 116 bp, Zea mays
tgcgatgtctctgcgaacggggaacaggtggaacccgatcttccagagcctcgcccacgaaggccaggaaccacgcgcgcatctcgcgccacagggccttggcgagctcagctgtc

SEQ ID NO: 363671 - DNA, 290 bp, Zea mays
tgcgtggcacaccattgtactcgtccccgtcgtgatggcggccttcaggtagatgatgaaggcgatgaccacggacctgggcctgtcggagttctagcttgtgttcgtctcctcccttgtcggggcatcggtgaaccagtgcatgttctaccaaggtgtgtatcttgttccttctcttatttttattttttttctctttatgtctcttctcttttcttattccttttcttctatttttttttccattttttcatttttatttttttctactttatttttttttatatctt

SEQ ID NO: 363672 - DNA, 156 bp, Zea mays
ccgtccactcgtccgcccacgcgtccgggcgctgaaccgttgcatggaggtgccctaccagctggcggccgagctcaacgccgcgctcacaaacgtctccaaccgcgacttcccgccgtaggtcccgccgtcgctcaactacaaccagtcgggccc

SEQ ID NO: 363673 - DNA, 100 bp, Zea mays
ccgggcggacccacgcacgcgtccacgcgcccgaggcaggcacggcgcccggcagacagacagaccggacggagcgccacgccccaggagtacaaaccag

SEQ ID NO: 363674 - DNA, 121 bp, Zea mays
tgctccgtatttacaaattaggttgttgatgtaggctgtacgcacctgctggtttgctactcgatcctatatatcgtccaatcctatctgacctctcgacatctggcccttgattactcgc

SEQ ID NO: 363675 - DNA, 119 bp, Zea mays
tcgtcggcgaaggaggaactgaacgtctgaatctgaaccctttcgtccctctcctattcgaactcctcgcagccaaatccgatggcggcctcattatcagcgggaccctcggcggtaga

SEQ ID NO: 363676 - DNA, 135 bp, Zea mays
tctctttttatgcatggctgaacaagagatggatgatagaccagatttagtttcagcagggtcttgtgttctggttcttcttcttcatggaacagatctgcgcattttaaatttggaggacagcagagctttgca

SEQ ID NO: 363677 - DNA, 263 bp, Zea mays
tttatatcagcaagtcgtggagttagatcgttccacactactaatttatgtcctatcagatctctacaccaagacaaattcaaaggcgaagtgttgaagatgtcagccacactcacatgtttatgtctagctatatggtacaaacatgggtattggcctcgtaggcttgttgttcccaaccagatgtgcttccagaacctaaactgagaatcatttcttattgtgtaagctcccaaccttaaaaagtaatttttctcctttca

SEQ ID NO: 363678 - DNA, 203 bp, Zea mays
ctcactgcgtccgagtcagccaatgaagttgctctgcatgattcaggtgcaaaggatcatgatacttatactctagggcattcttgtactggtaatgaaaacagtgccgttgatgaaggtagcaccagaactgacatgtcacatatggacagtattgtcccatcatgtgtgcttgaggattcattaaatatcccagaaactgg

SEQ ID NO: 363679 - DNA, 224 bp, Zea mays
ttattatccttcggactgtgctaaggcccccgcaaaccgccgccacggcgaggtcgtgccgccgtcatgtacgcctcgcgctcccgccactttctcctcagcgttcgaaccgccaaccatggtattctcctccgcagcccgacctcctacgtgtcccctaccgggtgcggcgttagcgcgcagcggctctacaaccaccagcagcgggaggacgagtggcagga

SEQ ID NO: 363680 - DNA, 223 bp, Zea mays
tcgattgttggacgcgttcccctcctgcacgcaacctcatctcgtcctccagatccaggatggccgtcctccttgagaccttgcctccccgagtgctctcggtgagctactttgtttcgatttatcaggtaatccgcttgtttcatgttgcgcaggctcattcttgatcgctggcttttggtaataacccatgttggaacctgatatcggtcttgtccttgct

SEQ ID NO: 363681 - DNA, 187 bp, Zea mays
gaaggctggtctcgcccgcacggcaccggacccggaacggcccgggccggacccgaagcgaaccgtttagtttagaccgaggtacctcatacctcagctcagctaagcctgtaccgtaccagcgcagccagaccgatacgagaacgacgatgatgagtagcaccggcggcagagcaagctgagagcc

SEQ ID NO: 363682 - DNA, 99 bp, Zea mays
tttggaatctgatccggaataactcgattgtgtacggtggcggctcagtcgagatatcttgctcaatcggtgctgacactgctgcagacgggcccggga

SEQ ID NO: 363683 - DNA, 104 bp, Zea mays
tcgttctatgattcatggagtaaggcgacaattcagacgaatgatgcacagaatgattcttgggacaatgtggcaaaaaatgccccggattctgtcgcagaaga

SEQ ID NO: 363684 - DNA, 124 bp, Zea mays
gtttttgtcggcgtcggcgggtaagctggcggcggcgctgcaccggaggacgcgcagggtcacgtccgcgctggcgtgcgcggtcctggagtgggtcctcatcgcgctgctcctcgttaacggc

SEQ ID NO: 363685 - DNA, 153 bp, Zea mays
cttcattcgtccgcggacgcgtgggcgcactagccggagctcacgcggattcatgtccgaactgcgacgaaagataggtacaccacctggtgcggatgtagagtgctcggaggccaccacgacaggagccctaactacaagctcggaggcact

SEQ ID NO: 363686 - DNA, 261 bp, Zea mays
ccacgcgttcttttccattatcctactccgttgcagatgcggcatccatccagtagtgcgcccaatccatggctctagcgttggggaccgcctccacttgcggcattaaacatgcacgtggcggtgttgaggttgctgcgctcatgatgcaccttttccctcgtcttgccctagctggtttcgctttcgcgcatgatgaggtcgcgaaggacgttcaacttttgggtcaacgctgtaaaggagctgtattctatcacggat

SEQ ID NO: 363687 - DNA, 200 bp, Zea mays
tcgctaatctcaactcagcgagctctccaccagttgtacagccaagaaagaaccaaccatgatcagcaccaagaggatcgctcagctggccaagaagtggcagaggatggaagcgctcggtaggaagcgccgtcttgtctgggggacggccgtggtggttaagaaagccgacaggtgctgtgccttcgtggcgagcaagg

SEQ ID NO: 363688 - DNA, 150 bp, Zea mays
tggtcgcgtgggctggaattcggaggctcaggaatcatgatgcagcagcctcaggcgcatgcgtgggaacttgcggcgggcgacccgcacgacccgagcgagggagtggtatggttgctccgaagctcgcgactttggcgctggccgtgc

SEQ ID NO: 363689 - DNA, 253 bp, Zea mays
ttggtcgcgtgggctgctttgcttgctctagcttgtcacgcattggatccagctgaagctgagccacttagatgatcggctcctccttctgccacggatgagcatgctgaatggataaccgctagtccgagggggccccccgtaatgtggccagactgagctagtaacacaaaggctctcaaaggaactgaaagagcttgaggaatacgaatacacagcacacagcagcttggtgcacagcttctatgttcct

SEQ ID NO: 363690 - DNA, 123 bp, Zea mays
agccctagcctgggttcactgttatatgagtggggatccttgagtctgctggcttaccctgcctggtccgcagccattagttgacagtgaacaaaatttgtgtgcaaacttattgggaatgcc

SEQ ID NO: 363691 - DNA, 210 bp, Zea mays
ccgggtggacccacgcacgcgcgtactcgggggcagacgcgggggccgtggctccactcgcgcagtgcgacccggagcacacctggcgactacctcaggcggccgcgtcctatcgacatgcctccgtccgccgacggcaccggccgcggctaactttacccggccgacgggattcgctgccgcgtgatccctcaacggaggacgaggagc

SEQ ID NO: 363692 - DNA, 115 bp, Zea mays
gggaggaaggacgcctgcaggcaccggcccggacggaacgggcggacccacccaccctgtttttccaacccgaccacagaagcggagacaaggcgcgaacaagtagaaggcacag

SEQ ID NO: 363693 - DNA, 263 bp, Zea mays
acacgtcgtcgcctcctctccactcgcacactcgcaccctgcgtccgcctgccgcctaccccaggcggccccctcccatcgccatgcctccgtccgccgccgccaccgccgccgtcttcctcttcccggccgtcgcgatcccctgccgcgtgttccctcaacggcgggcgaggagcctcgtcgtccgtctcgaagccttctcctccagcctactcggttctatggtcttacctgtctaccttcttatgtccttctctatcgtc

SEQ ID NO: 363694 - DNA, 110 bp, Zea mays
cgtgacaatactggcaaggctatactcaccggccttcgtcactttgggcgcttccatgaagttcgcattgggcaccatcgaggctgtattcctgtaaagcaggcatgaag

SEQ ID NO: 363695 - DNA, 227 bp, Zea mays
ctgggattctcttgatttcttatagacaactcactgagatgattaatgtggattagatagtacgtgcttggcatgccgtaagatgaaggttcatttctctttgatttttttttttttgatttagttagcttttctgtatgaccattctgtgtccaatttcgtgtcattcattttgttttaggaattccattttcagctttagttcatgtactctcattgtgaatttt

SEQ ID NO: 363696 - DNA, 226 bp, Zea mays
gtcacgctggtgtgatcgtcttggggccagccccaattgaccctgctttcctgcctatccgccttacaacggaagccggtcgagacacctgctcgctgtgccacagctgctggaccccattcttatttcccacgctgaggctggtatgtaacccatgcccatgtgcgtgccgaagtatgagcccattgcctccatgatgctgcgcatccagcggttcatggtctct

SEQ ID NO: 363697 - DNA, 238 bp, Zea mays
cggctgatcccactcccatcagtggaggatggctgacactggcgatgagatcgttggtgagctgctctagctctagccctagctagtagctagccactcggtcgggtagtcatcagccttctgatcgtcacccatggccactgccgaggtccagaccccgaccgtcgtggcgaccgaggaagcgccggccgtggagaccccggctacgaccgccgtcgtgtccgaggaggctgtcccc

SEQ ID NO: 363698 - DNA, 268 bp, Zea mays
tcgtagcatcagctcttgttctggagctcgcataagaaatctagaccttgtaagactcaaaacaccgaatatatctcaactcaaattgattcttttactagctggcagtaggagctaaccagtataaggtgctattatcaaactgtaatatggtcgcatattcagctaggcctaattaagttgtattttttccttttacaactgttgtgcaatttgactaactgctgcaccttgattttgcaggtagttagcaaaagctccctgaggt

SEQ ID NO: 363699 - DNA, 173 bp, Zea mays
  unsure (1)..(173): unsure at all n locations
cccgcagagaccggcccggaaaacccggggtgacccacccgcccgtgctccccaagaagagaaccgccaagcgggggagcggggaaacgggacaggccgagcaaacccagcngcaaacagcaacggcaccgacagccagaacccacagacagggccaaacccaaacaccggca

SEQ ID NO: 363700 - DNA, 227 bp, Zea mays
caggcaccgccccggaacccccgggacgacccacgcggtcgttacacccacatccccaactgcaccatgcagaggaccgagaggaggaacgcgccggcggcaccgaaaaggggagaacccagacgacgaccagcacgagccggagggaggacgaaacgcagcgaggggacacccaccaagcggaacaagagccggccgtgcagcacggcccaagagagaaccccgac

SEQ ID NO: 363701 - DNA, 217 bp, Zea mays
actgccacgcgtccgcccacgcgtccgcttctcttctcgtagacggcagatctccaggggtgtcgccgtctccggccacggcggccggcgctcggagcatcggtggggttcggagcggaggtggccggccatgatcatgaaccagctgcatggagctggtgcagtggagctgtaactacactgccgtatacacgtgcctgcagtaggggtccaacca

SEQ ID NO: 363702 - DNA, 426 bp, Zea mays
tcgttgacgcgtggggcagagcgatcaaaagtgaagctaacaagcgagaaaaggaaacacctacttctctcgtctagccacttccatccgtctctagattctagtcgcccttcaacactagctagcctgaaatcaagtgcaggctcgccagctgtggccactgagaagtgacggaaggaagacaagcagctcgccggccggccgggcgccccgtgtgcccccgttctacgagggttgaagtgaagcttcgtagtacgtagtactccatatagcagctgagctcccacttcggagctccatccatcgttagctcccgctgctgctagctggttcgaggcctcctcaagcagcttcttcgtttctgctgtctgcaatggaggagcagctcagcccgctggtcgtgacgcacctgttccagcacacgct

SEQ ID NO: 363703 - DNA, 199 bp, Zea mays
ctcacgcgtccgcgaactcactctcagttggtgggtcacttttgcagatccacccttcactcagacttaggctctaaggtctaggctcgagctagccgcgccactgcttggcgtaggcatcagtcttttcatcgccaccaatggccactgtcgaggtccagaccccgaccgacgtggctgtcgaggaagcgctcttggc

SEQ ID NO: 363704 - DNA, 106 bp, Zea mays
actgatccacgcgaggctaggcgagggtaaacatgtgagtcttatagagagtgcgaggactttctttactggtctaccctgacacaccgcgttgcaatatttactg

SEQ ID NO: 363705 - DNA, 303 bp, Zea mays
aggcctttcttgcgttcgctgacgtactgttgttaagggaggagttcgatcgagccagtcgcaattacacagcgcagacgaggccgaccatcatgggcggggaggacctggaatgcagccggtgccgcgccaagatccagagggggctcaacaggatccaagagaagggcgagagctgcattgatgacatggacttcgacgagaagaacatcacggtgaaggttacggggcccttcgccccggacaagatagccgacatgctgcgctgcaaggggtgctagaacatcaagcagatcgagaatc

SEQ ID NO: 363706 - DNA, 250 bp, Zea mays
gcatgcttcggcctcacctccagcggcaggtggtgctgcggagcttctcctcgccctagatcccgcgcacccaacgccagatcagagatcagggcgcgccggccgtctccattgcccggcggatcctgcgatgcgagctggaccgagagggaggagcgagggagcgcgcgggtagagaaggcggtgcggggggaggaaggaaggtaggagtaattattttaatttaatttcttttgttatattttttttt

SEQ ID NO: 363707 - DNA, 215 bp, Zea mays
gggctgccacgcggacgagcttactgatacatctgggggccggaaccttctacgcgattgccgacgcagaggcaaacggggcttacgatgggggggaggataagagcttaagaatcttgctactgatattgttaaccatttgaaggatttacctatggtgaagtgttgaagaaatcttcaggagattgtcattgagattgtaaagaaatgtaggg

SEQ ID NO: 363708 - DNA, 239 bp, Zea mays
cgcggtgcacacgcgtccgcccacgcggacggtccatatgagcttcaggatcttgcaacttagtaccgacacacaaatttaagggaacgtcagtatcagcatgcccatgagagcttcagaatcttgctactgatattgtaaaccattgtaaggatttacctctggtgaagtgtccatcagaactttaggagattgctattgacattgtaaagaaatgtaggggtttgccgctggctatt

SEQ ID NO: 363709 - DNA, 340 bp, Zea mays
cccacgcgtccgcccacgcgtccgttcgggggtcgtcgagggttctcgaccctcccttcccctctctcgcccgctcgctccctcaccgccggcgttctcgccgccagctacggacggggcacactgcgcagggtcccagccccgcctctcacccgaacgtcttcgctcccctcaccgggtaggcgtcgcgctctactggcaccaccccggccctcgcgctctactggcaccggaccggcgcggggtggcgcggagacctgtcccggccaggagaccgttccgtgctataccggagaagatgctctttgcatagctcaagctccaaactgatggattctga

SEQ ID NO: 363710 - DNA, 244 bp, Zea mays
ttgctcaagcagcggctcaactctttacgacgacctttcccatctgcccggcgtcttcatggacaactgatacaccgtaccgaagtacctgttcgcgcttccggcaagggtgcttgggataatactgcaacttgtgtttcctgaccggcagtgaactgcgctcggttgcccaacaagtaaatgtcgctttgatgttgatgcgacttaacacccgtctcgagtggtaataaacctattataagca

SEQ ID NO: 363711 - DNA, 317 bp, Zea mays
cagtgtttactcaagccggtcattatggctgcatctgcagagctgctgcctagcgtgcgaacggcaccgatgcatagtcgtcaggggggtgccatgcacagaacattgactgtgcaggatccagccatgctttcaaaagtgtggaatacggaaaaccaaggtcctgatggagatgcatccggggaggatgtggctgatgctcagaatacaggacagcagattaggggtcaaactatagatgctcattcgtcagactatggtaacaaggtgagtgttcaagagtgctcaatacaacctactgctgacaacgattgaga

SEQ ID NO: 363712 - DNA, 359 bp, Zea mays
tttttggcctcctatagtcggcttcttctgggaggggtttgtctcattacgatggggtgagctagggctttgtgtttgacatatcttgaggcgtgtgcctggatgcttgaccatgcttggccctatgaatattgaagtcaatgtaccggcaagtcgtagctgttggtcggaaacggtctgaacggcacaacacaaaatacctgggctgaagagcttgctgagtgtttcagaggatgttaagacagacactggcaggagtgttttagttttgtttcgtatccttaggcgaaagaggagcggacaattggaacatcttcgtgtagaaataggcttttatttgcccaatcagttgagaatgt

SEQ ID NO: 363713 - DNA, 239 bp, Zea mays
aagcaggccgtagaccagaacgtttgtgtcggcgtgcgcctcttcgctgaggagaggcagcggctagtcctccgcggggccaacgccctgggctcgggcggcggcagactacgactcctacgtgatcgggctcaattactacatgaacgcgcaggactttggggagatcggcgttaggacgccgacgaaaaagtttaccgggattttggacaccggcaggtcctacctatgggagccgt

SEQ ID NO: 363714 - DNA, 112 bp, Zea mays
agaacaggattgggtgcgacgcttctttacaggttggttctgtggccgtctgttagtgaggggcacgtgactaggcctttaatgcatctcattgggtggcgtgtcattcaga

SEQ ID NO: 363715 - DNA, 319 bp, Zea mays
ttcggcccgtggccgggcaacggttcttgcatcaccatgtcgaccatggacgtcaccaggcagcagccttgggttaggcgtgccctgggggccttatgccacagccggctgatcgaccagaccttcagggagggccttgttgaggcgagcatgtgccatacctgtctggcaccatgagaccctactaccgtcagttcatatgaagtactgagctggactggatcatctttgaggtacgatctgtccgggacaaggtggtaatctacttggacgtgaagcactgctattatgaggactctcaccgtgaaggtacaggagg

SEQ ID NO: 363716 - DNA, 133 bp, Zea mays
ctttgttagaatgcgcaattatgaggttgctgccgatactataccgggttcaaaaatttgagcataagtgctctgcagggacgtaaagagtgacccaggaaaacctaccctgttcatgttaatgactgttgaa

SEQ ID NO: 363717 - DNA, 365 bp, Zea mays
gtagttaactgtgccatttcctctgttcaaattgtaccccaagtgttcatgccttttttgtggcttccgtactgtgcaggggctggtgctcaccttttcctatgcaattgatagaaatttgctgatcatttcatccaatgacaaatagagcctttgatattaatgtctaaaagataaatattctaactgaattgatattgtgacaggctgatacctaaaacaagtagagtgacatgctcgtgtttttgaaagtcctcatatatttgatagaatattgctttagcctgttaggatttatttattgcattctttttgtatgacatgatttggctagtaaaataataccatgttcaattgctttactt

SEQ ID NO: 363718 - DNA, 294 bp, Zea mays
gtgactgctcactaaggccgctttatcagccttcttccgctgtcgttcagccccgagccagtacatggctactctctgggaggggagtaactgatgccagcacaggcggaggagcttctggggggccagtacaggactagtgcggctaaccggggacggccgtagtcatgagctggagactacgcccaagctcatgccatgggagggtgtccacgacgtgggcgccactgctgtggagccaggaggttctggctgagaccgatctacatcaacagcgttgtgcacgctgcctgc

SEQ ID NO: 363719 - DNA, 206 bp, Zea mays
gctgctgccggtggtggagcgcgatggccagaccgcgtcccgccgagagcagactcacaccgccgcgcggcggacgaacacgcttagcggaggcggaagacgaaggggaaggggacagtggagggggaggcgcgcccacgaggcggaggaggggatcaccctgaccatggagcgcgtgttcgacgagaacaaattcatcgagaacc

SEQ ID NO: 363720 - DNA, 261 bp, Zea mays
gggtctgatggtgggcgcggcggaggatgcgtatgcgacgactgcggaagacgaagcgcgcctgctgcgcctggaggagcatgcgcgagcacggcggcggtggtgcactgggaatacctctgtctcgcccggcggctccgcgcccgacgtctcgatcacgtgctccgtgttggtcttgcccgtgctagcagcgtctacgcgcgctacggtcttggctcacaacagcggacggtctacgagcaggcggacgcggtggtcctg

SEQ ID NO: 363721 - DNA, 336 bp, Zea mays
acattggaaagcgccagaaccttttttgatcgcgatgcagacatttgcagcgaacagacgaagaagaagcatagctcaggcctgattatgagatgaggaggccgaggtacatagtactacagactagtacgccgaagatggcagactaccacttgaccgagaggattcgaggcagagcaagagcttacgtttgggcctagaccaagagggaggtggagggtagccgaccctaggagggaaggggaggagctcttccttacccatcagtgagaggggattgtcccagaccatagaactgaagctgaacatggagccagtggtcttcattgaggcgga

SEQ ID NO: 363722 - DNA, 164 bp, Zea mays
caaagggccggccatgcgtcttttttatcagagccggctagcgccgtgcattgccatttcagagtccggcggcggtcatcctgcgcattcccgaacccgggcagtaagacaggctgcacgtcaccggcatcgatggccatgaagcgcgcgcgcacatccaaggt

SEQ ID NO: 363723 - DNA, 388 bp, Zea mays
tctgcgagatcctcgatgcgtcttgttgacatcgttactaccctagccacagaccccattgggtatacatttgctcccttgctggagctggaatgtgcagctcgatcgggtagcgctacgagtgctcgctgaatccacacaaaagatgcccggttgagctagccatgttagagcacgctccgaatataatgctggcctttcgtcagaacgtaacagcttgctgagagaagcacatgacagatttggtaagatagagttctgactctagactcaaagatggataatgcaagcccccgggactgatgatccttggacagatctagattctgacgagaagaatcaacatgtggtagctagggcagcttgtgcatgttacagcgttttgatt

SEQ ID NO: 363724 - DNA, 108 bp, Zea mays
cgcgaccgaacaccaggagggactttttcgagcttctgaccgctactttcccgcgacaaggcaccagcaggctaggccttagcgtgaccagggaacaccttcggggag

SEQ ID NO: 363725 - DNA, 169 bp, Zea mays
ccgccacagttggtctagggcgttttgagccttgcgagaggatcgtgccatgcagaagagcgacagccggtggactatgccgggcccaactaagaacggcccgtagccagtcatgctcatgacgcccaaaactcgatcggcgaggggttggactgtgcgatcgatggca

SEQ ID NO: 363726 - DNA, 230 bp, Zea mays
acgagacgatccagtggcgccgtcgtgcgcaggcaatggatggagaagcacaggacagacaactgggagagaccggatgaagaggacgatgcgggagagccgagacggcctgcacactcaagatgttcggtcgggactccctggggcgggctgattgagatcttcaacgtcgacttggagacggacgacaaccggagacaggatctggaccggttggcgttgatgctgta

SEQ ID NO: 363727 - DNA, 329 bp, Zea mays
cggacgcgtgggtgacaccacgccgaatacgcactcaattacttttactcagtgatgcattattcatgacaagatttagcgagtcttgacaggtaagaatactgatgactgacgcatgctggcagtgcacacaagacaaatatgaatagcccagcaatagatgatggcgattaggaaaccgcacaggttgatacaataccccctgacagaggaaacggaccagcagatacagtagaattgccacctaataggctcagacaagggacgaaacgcatagaaggagaaatggacatcagatcctccgagaactaaagttgcactcagatctt

SEQ ID NO: 363728 - DNA, 326 bp, Zea mays
tttggcttgggagggttaacatgtggctacgaagtgtgtgccggttgttgaacagagagtgatacgaatttgtgcacacgcctatcatcctaatgttgataaaatgcaatggtcaatatcagagagtgacagcatagaaaatgtatatgcgtgtatgcatctctttctgacagggaccagaatggggaaaatgtgcagttgccatgtacaatactagcgacgagatgtcactatgtgtgttatgattgagatgggacatatagatccacgcgcgtatgtgtggcactggatcgattgaatgaagatgaaaaatgggaaggcgcttc

SEQ ID NO: 363729 - DNA, 277 bp, Zea mays
gcgtgggcgggcgcagtgggccagtctctgtggcgctgcaggcattcttcaaaggcttgaatgctgagaacctgcaatcagctgtcagctccgtcttggtgctgatgattaaggagatgaactaccggcccactagggtgtacctgcttgccctgcggtgaggtctaatgcggtctcaggagatgatcaagagtgcggccagtgtccattcgttagctacgaagcacaaactatcgcacatagtgacatggcgcttcatgagatggtatgccgaggg

SEQ ID NO: 363730 - DNA, 264 bp, Zea mays
ggtctctgactctgggggggttactttttactcaacctacggctccaagcgctaggatatagttagccgcgccacttccttgtgtacagcatacacttctgattgctaccaatggacacatgaccgagtgcataccccgaccctccgtggaccgccaggaagcccccgctgcggagacctcgtcgccggtcgtcatgtccgaggagattgcccccatcgaggccgaggacctcgcctagaatagaggagctgtttccgttgatc

SEQ ID NO: 363731 - DNA, 296 bp, Zea mays
tcggtggaaacctatcggggctttttggaccgtgacgagggggttgctccccgcgctacgcatgaccttagctgcagccggtgggcgcggcctttgcaccgagaaggctgtaggctcaaccgtcgtggtgggccgtcacaccggtaattggatgctggtcacgagcaagaagccgtcaatgggactgattaacgagggacctccaatgaaggttgatgggggaattgccgttggtaaagggtctttctgaacgtgtgttgagatgtcggtcacccaatcctagtacatgtgccgtt

SEQ ID NO: 363732 - DNA, 237 bp, Zea mays
aagctcgacgtgtagaaaggagggcttgcacatgccaggaggcagcacacatggtgtctgtgcctcgagcgctcggctgcggctgctcaacgcgtgctgccggtgcaatgatagtctggacagggactagtgttgcattgacggacatcactgaccggaaaggaggagtcgttgcctgagttagaccataaaggggagtgcgaccgccatcatgctgaacctggtcggacgatggag

SEQ ID NO: 363733 - DNA, 370 bp, Zea mays
gcaccattagatagccagatagattgttaaccaagcggcggcgtcatgaccaggctagaggcaacttgactggtacaggtaaaatgtgcgacttcaacgaaacgttcgagggcgtgagcgacaccgatgggcgactggagctgcaggcggccggcaaccgcgtgatcggccaatatactttgcgtgagttccttacataattgaacggtttgatacttacgctgtattgctttggaatagagcattcttgtaagtgggccccacattttgagggaactgaaaccgcagtgatcaacgcgtattgatttgctactctaaggaagacacaatgggcttgtattacaattgagcaacattgggccctagtccc

SEQ ID NO: 363734 - DNA, 347 bp, Zea mays
agccagcagcctggaccaaggcaagtagcgcactaacatttttctgttcttggcctgtgtccctgatcaactcagattggccggacgcttgggacgctgccgcctttttttttgggtaacggcgctaagagtgtgatggtgtattttaaaatgcatttctggttagtccttgtgctctgcagtttacgagcatcaaaatccctacctctggatagagatatacttttgggcatcagaggctatctgaaagatccacagaattacctacacaactgggatgaattccactcaccgtgccaattctacggtgttacatgttaccacaattttggcgatgtgatcgggat

SEQ ID NO: 363735 - DNA, 314 bp, Zea mays
ctcactccttgcaaatcctgttttcaccaccgctcgtgtttctttccggggcacgagaaaaggggagagagaggcgaggcgcggacttcggccgatctgctctgccccgacgcagatgttacgacctgatccgtatcagtcaggagcaagacgggtgccggcggcaggatgacccaaaaggagcgggagaagtatgagcagctcgcccgagctacctgtggcgccttgatgcagtggttcgactgtggagaagccttccgtcactttgggtcagatcaagtaaggtcaattccgtcacacttgtttgagcgctc

SEQ ID NO: 363736 - DNA, 214 bp, Zea mays
cattgacattgacataataccaccagcgaaacaaaaatgcactattgaatcttcaaaaacgccaggaaaaggccctgcccttctaaaaaaatttcttattaaggaaacacggcatcctgcttgattcgtatcttagctggcgaaggatcatttgtcgcgagccagatttcgcagaggacgtctatgaggaacgatgaccattcctatcgaggag

SEQ ID NO: 363737 - DNA, 361 bp, Zea mays
ccgccgttaccgctacccgccttgctgatgcggctcgcctccctcctccccagtccccacgccccgccggcggcgccggcacctactgttgctccctccttttaccccgagcttaagctcgcgcgtacctgcctacctattcgtaggagaggaagaggggacaaggtccggtcggtcggtcggtcggtaggggggctttcggatctaagcgctgcctccccgttatgatcgttcagtcgtcgggatctcgcaccatggactgcgtggggccttcccccggccaagtgcctgcacaggatccgtctcctgttcctggcaccgttcttgtcgaggatcaaaccacggatctcctgcagaagct

SEQ ID NO: 363738 - DNA, 359 bp, Zea mays
agggtggcccctaaccaatactgttgagccactgccaactgttcgattcggacattggaccatttggcatctggtctaagatggctacgcctgtactgaccgcctaggcggggtagggtgcccacaacaaccgatgtagtacgtattgacttgacgcgtacgagagagacgaccggtcgcgcccatgtgccgtgcggccagaggagaacgacggtcaaacgcgtgatgaagcacttgctgaagaccggcacagcgaagagcgggctaaggaagggagtgacggccagcattgaagcggtcgggctcaagctctggagacctcggactacattgatctagatggaaccatacatgaacat

SEQ ID NO: 363739 - DNA, 308 bp, Zea mays
tccgatgacgcgggggcgcttttgctcgacggttctttctttccaagcgacacacgccgtcgccggcggcgaggtcgttcgcttactgcaccgctcagttcgcgatcggtgcgggctgtctgcgcgacgcagcgaggcactgcaacgcggcaacacacttggggcggcgatcgacaccacaccaccctatgctgctctgtccgtcgccgaaggggaagcacgcacatgaataagggagctggaagcggtcattcgagacatggaaaaagtgagctgccggcgctatatgcttcaatgcaagcgactct

SEQ ID NO: 363740 - DNA, 390 bp, Zea mays
gcttcttagcccggcagccgcgaagtcctcctccaaatcttcctcttgtcctcttcacgcacccgaaatcgagtcctcgcctgcatcgatcggccaatagaactagaaccccacgaaatctcgattctcgaaccgaggcttcagaaaacgcgttgatctttcagacaactagccccacccccaccctccagatcccaaccaggcggcgcccccccgccctcgtcggtggtcctggatctgtcgtcaagccgccggggcgccacggccgctgcgattagctgccctgccgcgctgccagatccggcgacgtatcgactgtcacggtaactagtctccagccggggtcccagccgatgggcgccagcgggctcaccgcggtcgtcgtgctac

SEQ ID NO: 363741 - DNA, 392 bp, Zea mays
attttctgctctgtgcgcgcggtatttctccagcatgccgcgcccagtccctgctccttgtttttctctgcgatgtggagtctcatcgccacgcggatctctctccttcctaccctgctcggattgtgccgcgcttgctgtcgcgttcggcctgcttcggatccgaagttggtcgcctcggtgtgaaatcgccgtcgcgtccggggttttgacatgtctccttgctcgccgtcgaacttgagttccctgctcagcctttagcgctggcgcgtcgcagtgatgttaccgtctcgccgtgattccctgatggtccgtgtttccgcatgttcaaatcgtcaaccccgtgtaccacctgctcgctaaataggaaaccaacagtcttctccctgctc

SEQ ID NO: 363742 - DNA, 397 bp, Zea mays
gttttacgaacgcagttaattttttccctgtgccgttcgctgtgttacgcacaaggatctttactcctggatttcaatttatttatttttcccccgcatttaagtattgcggcttgccttgcgttgccttgccttctggatgtcgcgttgcgccgctggctgatgatggcctatgtcctggcatgtgcagcagagcagagcagatcagagagcggggaggaagaaaaaccgatcgatggcgtccaactacgtggacacaacgggcgaggagggacggttccacggccctcacagccacagcaccagcacgaccccgacgggcggtgcggcggcggcggcatcgccgcgcaacttccggcgcagcttctcctccgcgtcctccgcgggccacagccac

SEQ ID NO: 363743 - DNA, 379 bp, Zea mays
cctacgcgtccggcctcgcgcggtcgcgcctcacctggcccctccctccctcctttctgccggccactcccggctcccgagccacagcaattacccagctcagcggctgccgaaccccctccgcttcccggctctccaggtcgagaagggcgctgctcgccacctgcctttctttctacagttcgacgcactttggtggcggtgccgctactctccttcccgagttcctaacttcctaactaggagggcgggcgttgtctgcctgtgtgcttttggcgattcgggggcttgggctcggatctgcgcgtgccttcctccggacccgagcgaggctcgggcgcgaatttggggcggatcagcgcagatctggaggcacatg

SEQ ID NO: 363744 - DNA, 406 bp, Zea mays
ccctcttgtccgcggacggcaacgccttttatggccgccgttgtctcctccttctcgcggttctccttccgctgcgccgtctgcccctccccgctccgcgtccgcttttcgcagccccatccgcccgcgcggctccgcgtctcctccaccgtcgttgctctccacaagcgcaaccccaagcggctcaagtacgccgccgagcgccagttcacgtctctttggtggctgggttttgcgcgaacgaagagaggggatgccgggttgctgcgggtggaggtggagccctccggcggggacttctggaagcttgaccccattatcgacctcatcaatcgcggcgccgtcggggtgatccctactgacaccgtctactccgtcgtctgtgacctgagtaacaatgaatcga

SEQ ID NO: 363745 - DNA, 323 bp, Zea mays
gccttgttacagaaactcgcacgccgctccccgccgtccggcccgagtcgccgacgccgccgaatccaatccatggctgcgcccggcgcacccaccgcgctgcaccaccgcacgcccgtcctgctcccccgtcgcaccgtcgacttgggtgccaccgtcaccgcgcgtgccgccagggccgtttctctcgccggcagggcccacccggacaccaccgtcaggagacggtgcacctccgcgcctgagccgacgcccgagttcaagccttcgccggggttcaaggcgcccgcgcccaagaggctcgaggacaagtccggccagct

SEQ ID NO: 363746 - DNA, 304 bp, Zea mays
ctgtggtctgctatttggcagaggtgctgactgaggtcctatgtgtacagtctgactggaaccctactcttccaaaagaggcagggggctaggcatgagcgtggcatgcacatactcagaagaagggcgttggtgatcagactgctcgaccggtacctgaagggaaagatagttccacactgctgcacgaagtatggtgagacagctcacaaagtgagaagctgatcatagtattgaccgccctacgatgggcgatgtacacgggaacaaccagtatgcacttgatacgccagacagcacggaa

SEQ ID NO: 363747 - DNA, 418 bp, Zea mays
ggtgcatcctctcgtacgcgcagctcctgtacggggtgtcggtgcttctggacctcacctttgtgctccggcggaacctggcgctgggcatccctgacgcggcgttcgtgaccctggaggagtgcgtctcccgcgtggtggcccgcgtccggctgatgccgatgatggtgctgaacaccaagctgtgccgccgggcatggagggcaccttcttcgcgctgctcatgtgcatcgacagcctcggcatgctggcggccaaggccggcggcgcggcggtgctgagcgcgctgcgcgtcaccagggccgacttcggccacctctggctcgccgtgctgctcaggaacgtgctcaggctcgtcacgctgggggccatcggtctcgtgcccaccgcgggccagactgacgtgctggtgccgcgc

SEQ ID NO: 363748 - DNA, 279 bp, Zea mays
acccgcggtcgacaggggaggcgtcccgggaggaggcaagggcggaggcaccaccaccggcgccggcgccggaccaccaggagtaccgggacgaacggggggggacagcacggcccacaggcgccataggagaggacatgacgacagcagaaggaacgcaccaccgaggggaggacatggcggggggggtggacaccatggccgtgacagccgcctgacggggacaaaagaagaacaggcgcgcccgaggaactacgtgaacgaggagaacggtgacac

SEQ ID NO: 363749 - DNA, 468 bp, Zea mays
cggttagcgacgtcacgttcggaggaggaggagctgcggcgcggcaggaggtgacggcagtggcgccggcgcccaagaggcggaagcgcgccgagcagcagcagacgccgccggtgttccaggtctgcgcggccgacgatgtggcggcgcagtttcagcagcatatcgtcgacgtcaaccgcctcgtgttccaacagaccgccaacatgtgggcggcgctcacggagctgcggcggcggcaggcccgccaggtcgtggccgccgtggaggccgcggcggcgacgcggctgcgcgccagggaggaggaggtccagcggacggcgcgcatcaacggcacgctcgaggagcgggccaggagcctttacgtggaggcgcaactgttgcgtgacctgacgcgggccaacgaggccacggccaacgagctccgcgccgagctgcagcaagcgctcgacgaccagcggacgcgcg

SEQ ID NO: 363750 - DNA, 207 bp, Zea mays
agctggactcctggggtgccccacgcgtatcgccttgtggactccacgcgtgcgactttacgttcgcgaccctcgagacgagagccagcgctcccagcacacgagcacatggcatgcaccatccttctcgctattgttatggctcgggtaggcacacagccggctatggtgctagatcatattcatcatgatccagatcctggtggt

SEQ ID NO: 363751 - DNA, 459 bp, Zea mays
ccctcgcgttcgcccacgcgtccttccacgcgtgcgcccacgcgttcgcccacgcgtccgttcacgcgtccgcccacgcgttcgcaatcctagaaaagcttgctgcgcctttggctcctttaattgatgggcgcaccggtgctcaactcttcctcactgatggtgatcctagcaagccaccttatcctgttacagatggcatccgactgtgatgacaaaaactacatatcagccttggcaagctttttaagaacgcgagtccctgtatgccaacgttttcgtacgaccacatggtcggctggcgaacgtcttcactaaggagagagaagaatcttataaagcccttacatcgttcactggatggctataagcacattgtgaatgtggaatactgttcgcccgtgtcatcggagggcccacatttccctttcaggctgccagagctaatgaagctgcaca

SEQ ID NO: 363752 - DNA, 417 bp, Zea mays
ccctctcgtccgagcaatttcaggccgtgtttacttgtctactgacttttcttgtttctacatgctgatctcaaggttcccgtttctttgtaactctgcagtggcgacccattgtgctgccagacaggtacattgagcatgcatcgctcgcagagcaacttgacctggctggcctaactgctcatcacatagctgcaactgcattgaccctcctagggcgtcatcgtgatgcccttctgttgatgaagtaggggaaggaaccaccaagaagaatggaattggatagataaaaggcaatatgtgcaaaagttgattcggaggacgctcatcatgctgttttacgattgtgtcgcctggatagaactgaagcgtgccgtgggaggtggccaaatgcacacatcccaaagagggacgaca

SEQ ID NO: 363753 - DNA, 460 bp, Zea mays
ccttgcttgttctgaattatggttttgctgatgaagcaaactcgctgcgagcagagccccaattgaggcatcccacaacatacgatagacagccccggttccactaaaagataatgggtgcttacaggatctggaacctcaccctccaaaagtatactatctatgtccgttacgcgaaaaagaggaatccgaaaccgctatggtaatgcgaaaggtgtcagccatcacatctgctgcgccaaatcgaggaatcagcgccccaaatggaggaatgcgcctccactatccaaggagaacggacggtcactatcatcacctgcgtgcgctgtgcccatgctatgggtccttctcccatgcattgccacgaagagatagcatagcctagggtctagtctacctcccacagctgctgatacgctttggctgcatcactcgctgctgttaagagcctccctttcac

SEQ ID NO: 363754 - DNA, 188 bp, Zea mays
ccttttcttgcgctctacctgctccaccccgtgatatatgaccaacaacttgttgggggcactccaagaatgaatggtcgtgataagcctgcgctgcaagcccttatagttccatgaacaaacaaactgtccatggttccaagacacacgacggtgacatcgccgacgccgaggacacccctgcctgt

SEQ ID NO: 363755 - DNA, 255 bp, Zea mays
ccaagccggaactccccgggggcgccccacgcgttcggcttctgaattcacacatgcgcattgtcacccagggagagtttctaccactgctgggggtgtttatgccactattcaaatgttctctaagaacaccatgcaggcctacaccgccgaacggggcaccaccagccaaggtggtgcccgatcctatggaagcggacgtggggtcgccgaatccggcgcggccggagccagccggatcggagcccgacgaca

SEQ ID NO: 363756 - DNA, 163 bp, Zea mays
tcggccacccgttcggacatcgaaccattgtgggcgctgcaacagttactagagttgatcacgctgggtgggaggccgacaagggtttaccggcaagcgcgcgcgccagagacagtgagggccgaggaaaggggagatggcacacgctgaggaagaatgaacc

SEQ ID NO: 363757 - DNA, 278 bp, Zea mays
ccctcgcgtccgcccacgcgtccgctcacatgattgatgtgattttgaattcatttagcacattgctttctgagaagccatttgcagtgcaaggatgaaacttggtcagagtgtttaccatatggattggcagtgaaaccaaaaaagaaggcgcgctactgttcttccgtattcacgtcaatgcaacaacaggtcgcttaaattgaaattgatgtctacaaagtgcttcccatttcattattagattactgatatagctatgcctggtgagtggagat

SEQ ID NO: 363758 - DNA, 386 bp, Zea mays
  unsure (1)..(386): unsure at all n locations
caatatccccacttcacttcgcttcgcctcctccctcctcctctcaaactgtaaacacttcttcaccagttcgctgcttctcctcgtcctcacaggcgcgtcgtcgatccggaaggcgcccgccaccgggagcggaggcctgagcgggagcaggagcggggccggcgaatctggagcccgggggacctgcattgcctcgggaccgccgcgcgtagccagatctcccccgtcccctgccgcggcaccggcacggcatggtggctgccgcggcggcggccaccgcgccagatccggaccaatcctcgcgcccgccgctcacgccggcgctcgacatgcccaactncgccgccgcgcggagggacctcgcgctccaacaagcccgtctc

SEQ ID NO: 363759 - DNA, 198 bp, Zea mays
accttgcgtccgcccacgcgcccgtgtaaccaagggacacttcgctcggcccacacagggtggtcggccacaaccatgagcgtttagtggggaaggaggagatgatagctgctgtgggggaggcgggcgccaagaggatataagaagagcaaccgcaacagcaaacggagccagaatcaccactgtttaaaattttag

SEQ ID NO: 363760 - DNA, 443 bp, Zea mays
ccagctgggactcccggggtccccttacgcactcgccttccgacccacgcgtccgcagtttgttcgcgggctggggcgcctgcgatggcgggggccatggttgacgccgaagccctgcccccggccgacagggcgcgccgccacactgcgccccctgatctccaacaagggatgcgcggggcccatgctccgtctcgcatggcatgatgctggtactttgacctggacacaaaaacaggaggtgcaaatggatcgattagtaattaagtacatggcaccctcgcctcagaggcttggccacactggagtttttgtcaccttcttgccaaaagactgtaaacatactggtctgttcacaaaaattggtgatattgagttggcagtggttctatccaaattgcttacaccacaagatcagaggaaagatggcaaattatatttct

SEQ ID NO: 363761 - DNA, 224 bp, Zea mays
aagctcggactcccgcgggcaccttcacccgaatcgccgttcctacccacacatgcggccttatcaccagggagagcaatttacacgtcacggcgggtgttatacatactcgtgacggacttggcaactcatgccccaacaaaatttctgaaagagtttatcaagcccaaaccaaaagccagaaacttaaatttaaccactggacctatttcccatgctgggcc

SEQ ID NO: 363762 - DNA, 356 bp, Zea mays
gcaggcagcacggggggggcggctggccaaccgcgaggaggcgaccgccggaccaccggaggcaagagggcacccgggcagcaaagtgcgagcagggaggcgtccaggacgacagacaaacgagcggcacaacttcgcacgcagaacgaacaacaagacaccgaaatgagcagggaaggaaccagaagaagcacctggcgcaacaagcggcagagcggggacaggagctggggaacactagaacgaacgctgacacgggcagtaacctaacaagccctggagcggaaaggaccaggacatacacaggctaaaagaaaggccacccaaacacgtgtgcccaggcggcaaaagaccaa

SEQ ID NO: 363763 - DNA, 299 bp, Zea mays
cccacgcgtccgggaagggcaactttcatgttactggaggactgatacatacttgtgatggacttgaagcccatttccctttagaaatttctgcaagagtttatgaagcttcaaaccaaatgcctgaaattttaaatctagaggctgtacctatttcccatctgtggccaaaaaaattcaagatggtacctcccgacattgaggatattggactatggattctgagcagacgccaaaggccacactggagttttgatcaccttctagaaaagtttgttcacatactggtctgctcacaa

SEQ ID NO: 363764 - DNA, 229 bp, Zea mays
gtcgagtcaccaaagataaggctctatcggactcggagtctcggacagcacagcaaaacaagagccgctactcaagtatagtctgacaccggccgaccctgccccaacccaagccatggcggacaacaacaaccggcggaaccacgggcagaccttgctcgccggcgcgggcctgggcctgctcgccgtgaactcgggcctcgccatctaccgcgcgaggggcgacacg

SEQ ID NO: 363765 - DNA, 277 bp, Zea mays
gaatgttcgccactcgagatggttatgccgagtaactggatttaataccaaggcgcgcttcattcaaagacggattgttgcaacctggaatatcggactcacctatagactgggtgacaaatggtgttcttggctcaccagcattagcagctcatgatcaaggatatcatggcttacttggcaatcttcgagcctcggtccaagggcagcatatcgataaaaacctatactcctacaaatactgtaaatattctgacaatgagcatggtactaaaga

SEQ ID NO: 363766 - DNA, 351 bp, Zea mays
gctttacctacgttgggggaaggataagcactagagcttgctggctaaaaagagcctgatgcttctgacactgatgcttgctcccactataaagatccgttctcaagaactgtctacatgaagaaaactgatatttgcctaaaggactcaaaaaactactatgtgctagccccgggaaaacatggcatagcataggaatgcgttccccataaaaagcacagacgttatctctggagatagtcctgatgatattgctgaaaccaccagctgaagataaacctctgaagacttgcaaactgaagggggtcatataccggatcgctgagccagcacctggtgtagagccattga

SEQ ID NO: 363767 - DNA, 184 bp, Zea mays
ccttcgcgtccgcccacgcgaccgtgcactcaggggactcgttggttacaagacaccatatggtaggacacatatgactgggtcaaaaaaagaaggtcaatagaaataaatatttacaagacgtgtgctttcatatgacatatgggcatataaggaacggactacctaccaaagggactaagct

SEQ ID NO: 363768 - DNA, 496 bp, Zea mays
cctttgcgttcgttgcgcccaacttgaacacatgttattacttactggaatcattcatttgtatgactgacgaaaacgaaatgggacacttcacatctttgtagcatagattctgaaccgatttatatttaggtctacccagattctttgcacatttacattattgttctcaggatgttccattgatcacattgtgttgcttctgttaataggaagcactatcagctgcaaaaaaagaaagcatgagtgaggatgaagatgacagtcgtgaggaaagctcggatgacgagccaacaaaaggtgaagaaaagaaggctcgaaaagtatcacaaaacatgggatctgaggatgaatcttctgaagaccagagtgataaagacagtggagagcctcatctcgcgagctgaacaggctcgctctggctcgctatcttattgagacagaagaaaactacgatcgagcttgttctagcacagtttctggatcggaggagcat

SEQ ID NO: 363769 - DNA, 318 bp, Zea mays
ctgcacgcctgccgggacgactcacgacagtccgggatggactcacgcgaccggtacgcccaccctagcgtacacgacacaagggagggcgacggaaagcaacacaacacaagcgaggagggcccaagcgaacagaggaagcacctgcccaggacctttgtccgccaggaccggcacctgtgaactgcgcgaggctgtcaggatgcactatgtgaaccagcacaatacgtacttgctggacaatgttggggaatccaagaacaacccaggcctcccagacagccgtgaacagcactaggtctctaagcccggccagcc

SEQ ID NO: 363770 - DNA, 191 bp, Zea mays
gcgtcggctgcggcaccagcgcttgcgctcgcacgtactcacgttgtccggaggtctcgttagaataagcaccagtgcctgatcgctggcggtccagcatcttctttgccgccggcagctgctgtgccaccgcgtgcagaccgccgactctagattgactgagaggaaggctcccttagatggcagggcca

SEQ ID NO: 363771 - DNA, 329 bp, Zea mays
gtcttcactgccaacaagcctttttagaggacggtggctcactttgcacccttgacgctgaatgttaacccctgcattcttgagctgggacacttgccggaggacaagaagatcccccccattgtctccatcaacatgaggatggaagtaaatcagatctatgaacccaatgctcttggcatgttggacgagcttccgaacaagaacctcattaccctacttaactatacacagacgcatggctgtgagatatgtacacagactaccatgactactcggtgactaaacatgatctgctgagagatattgatcttcacatgatgggaaaa

SEQ ID NO: 363772 - DNA, 227 bp, Zea mays
tttcgcgccagctacatggagggcggtgaaaatggccactattacgaacgaagtgtggaggcacgagctggagatccacatgcgaactgccttggatgccttcgctgaggtcattgctggggtctttggtgcattagccgggcaaagggactacatggacttgagcatgcagaccggtagtggtccgacgagcctgaccaccctgcacggattgaagaaggagcaca

SEQ ID NO: 363773 - DNA, 496 bp, Zea mays
caaatttgtagaggactttataagctttccagaaagtcctactttatcattttagggtgaatattttgtgagttatgagctaaacaaatagctgatattttgctgtccaaaatcagcaagtattaaaatgattacttggagtttctttcgtatggacacctagatttagttagttcttgtcttgataaatgaagttgggcggctaattttcagatctacacctattatggctgtagtggattgagctaattgtattggctaatgtattgttacaaaaatcatcaatgtgttataagtgtttggatgcgttgactgccttgggcatgttctcaattaggtttattgtcttctttgctgtagaatagaatggtgactgtagttgactggctttgcttttataggtatgatcatgtaactcaattattgataacccattggtcatgatactcacaacatagattagctctaccagtgctctggggtccttataattata

SEQ ID NO: 363774 - DNA, 474 bp, Zea mays
aatttcattttttattcattgacccaatattgagattattgttatatcattggcttcatgttcatctcaagttaaagtgggttgtaggaataaagttgaaagggaaatgtgcccttgggccctttctataatgttttagtgattaaatgtccaacacgattgattaagttcttatgtgataaataaagagagaaatacaaatcatattacaaggtatgtttctagacttagtacattgttttgaatactaatgtgtttgtctaagtgctagaaacagtgacaaaagaaggagaaaagaagcgggaaagagttggttgtgtgtagccaactctagctcagcctggcacactggactgtccggtggtgcaccggacattgtctggtgccccaggctagccgacggtgaatcagctgctctcgggaatcgacggagtttgtaacatcccaaaatttaaccccaaggagaagagggat

SEQ ID NO: 363775 - DNA, 541 bp, Zea mays
cccacgcgtccgcggacgcgtgggcccacgcgtccggaaacaccccctcctcgcatcgcgtcacgcccccaccaccactgccgtaggcttctctccggcgctcccactcggccgcacgctcagcctcagcatgccaccgccatcgccgtctcgcccgctattgcccgcttcccgctgtcccctgcaccgctgccgcttgtaggctcctccacctccgccgcctccttgagctctgtcgcgcgaggccattttttagtggggaatgcgatgtccactttctcatctcctgtggcctgcaccatttgcgtacatcactagggcctcaatcattgaacacaggggtcatcggctaccagcgctaggatcatgtgtgaccaatcgctgcttgcgatttgcgaaccgccggatcaaggcgtgggagcaaagctttagctgccaaaggggcggaagcggaagagggcagcacattctgtagtctctatccattttttggcaccataaacgagccaatcgtatcaaaaaatttatccaaggcaatcta

SEQ ID NO: 363776 - DNA, 445 bp, Zea mays
cggtgattcctggcagccgtggaggaatgttcagggccggacctgaacatgggcttcttcatcagctgcgaccctgcggacgtgctgcggcaggccgaggactccacccgcagataccagcaaggggcgccgctgtccgccatggacggagtgctggtcgccgtcaaggacgagctcgactgcctgccgtacccaaccagcggcggcacgcggtggctggggtcggcgcggcggtgcgcggcggacgcggcgtgcgtggcgcagctgcgcgcgtgcggcgccgtgatggccggcaaggccaacatgcacgagctgggcgcgggcaccagcggcatcaacccgcaccacggtgccacgcgcaacccctacaacgtgggcagggtgtcgggcggctcctcgggcgggtccgcccgccgccgtctgcgccgggctctgccccgtcgcc

SEQ ID NO: 363777 - DNA, 453 bp, Zea mays
  unsure (1)..(453): unsure at all n locations
cccacgcgtccggtgggcggcatgccattagctctcatggttgcctcgctgccggcgacggtaagacatcccatgttagtgctgcatgtgacggcagcccccaattgcccatggcagcgcgtcagtgaactaacaccggcgacaacatttcttcctctctccatggcagcccaaaaccttctcgtctgggtcgaccatgtgcggcacgcaggcaagatggccggtggtttccgtgcggaccgataatgtgggagatncggtgtgggttccatcttctcctaaccggctcgacttccgcccccttttggccatctggggaggagcgtgagggctgcagtggcgcggagcgcaggagggctgtggtggtgcggctcgcggtgtgggacagcgagaagcctcatnttgcaacgtgaatggatgatggaatttttttccctaagcaataggatgatg

SEQ ID NO: 363778 - DNA, 350 bp, Zea mays
gctgtacgcatagtatgaatcaggatctgatgtctccatggatggcctacgggatggtcctgttggagatgtttactggaagaaggccaactggcagcttcatcgacggtgtggcaaatcttatcagctttgtgaagatggcttattcttttttttgagaaattcggggggagaggtaccccaccttttcattgccattagtaagggcctatacatggtcaaggtacatgtacgctaacatggttacataggaggacaagaggagaacaccatcactcaggcaagggacacatgacgatccgagtgaggtaatctacaagaccacaactccgcgtcctcacggaagccag

SEQ ID NO: 363779 - DNA, 291 bp, Zea mays
ctgttttacgcattcgaactgaaaatgctaggatctaaatattgtttgggttagccctgcccctgctgcagcctgcattataaactctgctgacgctgacaactgggcccggggtcactgtaacggtacacgtgtaacagggagagtccctggtatatgggctccactccatctagtggcttctatagctagtgaaagtactacgccggtgagctcatgcgcagtagcgaccgtgccgaccagccgacgtggaacatgacgtctagggcgatgactagcgccatggacagc

SEQ ID NO: 363780 - DNA, 477 bp, Zea mays
  unsure (1)..(477): unsure at all n locations
ctgctcctcctggtgctgccgcggacagaattgggtgggatcccactcgtccgccgggtttccagttgtcaaaagagtacggaccacagtttactaaccccagttcatgaagaagtcaaggggtgagatacttcggtattttgtagttctagcagtgagcatctactagatacaactcctggatcttctcagggcagccctcaaatggagatgcccattcagttgacttgccgtaaatatttggctacctttggggggctaaataatatagggaatgcttacattagtttgcatggtacatccgctggaaggactctggaaaaccttgctactggactgatcacgctcttgatcaggatatcatctttcttccacctttccgtctaccggnaagaaagatatctagaaaccgtccaaccctgtgccgcagcacaggaaccagaaccataaagggaagaggacatgagtgcttgttta

SEQ ID NO: 363781 - DNA, 486 bp, Zea mays
ctttttctgttcgcttggctcagcccaatctcaaaggatcgccatggccgtcgggccgttgcaacggccagccatacccgatgcttgcagatccttcggacttggagccatataaatccaagacgcacgacctcctctccttctgccatccatggcgctcggcacccagtgcccctgctccactttcttggcggccgagcggagctccctgcatggacgagcctccttccctatcaaggctccttccccgctgctcgttgtgccaactctcgtgcctctcctccatatccgcctctgccacgcgtcgatcgcgtcctgggcaaccgcgtcatgggctgcgtcgagcgggtgtgcctcgtcgctcgctgcgacacagcaacgggctcgcgggcgtggttctggggacgtccagccgacggcattcaagcgcccttgaaaggactaggtggagttcgcccagttgtgttgagcgttttcgcggatcac

SEQ ID NO: 363782 - DNA, 326 bp, Zea mays
ccggtctcctctaatagcatatgatgagacatgggccttccattgcagtccacatcatccagtgagggttagtgtggagttgggcagcgttctcggggcacgggtaatctctgaatcattctgttgctgattatctgggtaggacacattccctgctgcctgtctgggtatctacaggaggtactatgtgtaactaattgacatcgttcaggccagtaagaaccttgttcgtgggctgcctcgcgttgctgactgctagcttgatactagtttgcatcgtgtttctaggcctggaccaatggtgactatgcatacgttggccagat

SEQ ID NO: 363783 - DNA, 400 bp, Zea mays
  unsure (1)..(400): unsure at all n locations
ccgttgagtcatttaccaaacacattgcgacaagctctaatttgcaaatccagaaattcactacaaaccaagtcaataaaagtggagcagcctttgatccagtctgccaccagaagttgcttttatgctgaatttcgggccatcgaggatcgatcgggcggcggcgccgtcgggcagaagcggtcgtcaccggacaagatgcacaggtccaccatggacgtngtntaccaccaccaccaccaccaagagtcgctgttgacgggcaacgtcgccgccaccgccagcgccggtaagaagctgggcgtggagcggttcgagttgccgctgatctacatctcgctgtcgcggaaggagaaggacgacaatttccttgcgatgaagggcaccaagctaccccagt

SEQ ID NO: 363784 - DNA, 253 bp, Zea mays
tcccacgcgtccgcccacgcgtacgtactagggtgggatcaagccacgacggccgtgatttaagatcctgagaggagaagaacgtgaaatcattattgcaattcggaagggttgtgcatgagacctcctaaactaaagagggaggatgtacgaagaattggctggagacgaggattttacttcagcgggtgtttattaaatttagggaggcatctaactgatcatagagttagaagtatctagaaccacttgt

SEQ ID NO: 363785 - DNA, 383 bp, Zea mays
atgatttttaataaattagaaaacatgtagaagatgaatgtatgttaaacacaacttacagaagcacattaaactagctatacatatttacatagttgatacaatagcatataagcatcgttttatttcataaaagtgtttaaatatgaacgtaaattctcaagagggtcccgtctgttagggagacacgagtgtggacgtggttatgggctagctccagcactgtactatctttttaaattttccagatttgaatttaattttcaaattcaaataaaatgaactccaaatcatttgaaacgaatattttggtggagtttgggctaaattcctggtcaggatttttatataaaaataggtttcccttttctctttttaggatg

SEQ ID NO: 363786 - DNA, 293 bp, Zea mays
catttccatgaaagaaaagaaactaaaatggagtcgaaaaaaagggcaaaatattgaactgattatgggggggcggacgagattctacaagctttcttccgcccgcctcctacggaactaatgtcgagtgtgatctgccaaccagcactgattttaggggtcatacccagcctttggtcagatacaccaaaagttacaccgtatatatttaatctggcacatagctctttgtcactaccttggcacttgggagcatagaatggaatgtaaccgtcttccttataagacttttt

SEQ ID NO: 363787 - DNA, 423 bp, Zea mays
cccacgtatccgcccacgcgtccgattgacggcgctaaaaagccaaatccattagaacgacaaagtgttggacaagttatcggttgtgctgaatctgaaaagacggagagtgcaccccaaggtgctcgtaaaattgggtttgatttgaattctgacatctttgcaaatagtagtatccataatgagtctgatgtagcagcagttgatgccccaataccagctaaaactttacctgatacttcccatgatacgagcatgcctgctgttcctgaagtagacaaatttgtgaagcatgaagaatccacaagtgccaccctcagtcctgttgtggaaacaggaaatggtcatactacactgttggtggaagcaaaatcacagcgttcgcaaggtaatgttgctagccttgctgttgggttatttgaa

SEQ ID NO: 363788 - DNA, 365 bp, Zea mays
ttgctaccgctcggcctgcgtccaatcctgggcgcgccttcaggatccagtccgcccactgctcacgacgcgctgcctgtatcttctccctccatctgtctactgcgcactgcgcggccatcttccatggaaactacgcgcccaggcagcgtccgtgcacgccttgcgctcctggtcttccacctctgctcctccagcgcttatctctaggagcggagctactggtcggtacacaacttctagctagaaaagctggaccgcatggcgccctagctgggatctgcctccctggcactccgtctggccctctgctcgcccatggaacgaggccagcaactgcacccaggcgagagacagctacaaca

SEQ ID NO: 363789 - DNA, 252 bp, Zea mays
tgtttttttaggtaaagctcagatagtgcatactctgatgtaataaaaaactagaaagcacaatctgcatttacattaaagaagagactgggctatctgttatataagttaaatttcaggaattgtgttgcttattgggcacttgtattagtggacacggaaagcggtatcagccagatgctgtgtactggtctgttttaaactgacctcgcaatttttgtgttcaaaagtatggacatgaaacggcccacc

SEQ ID NO: 363790 - DNA, 257 bp, Zea mays
ctctcgttaccgtggacgcgtgggcggacgcggggggggacacacaaacgaaggctggttttgtcaggaccgcgaagctgctaccactgttggtccacccacgagaaactggaaggcttggaagaaggagctctcaccggacacgtaactgtggtgggtacgtgatcgatcttgccgcgcgccttctcaaatgctatggaaatgctcgatgcataggagatggacccgggctgggaatttctttcgttggtaaggaa

SEQ ID NO: 363791 - DNA, 387 bp, Zea mays
ttggttttcctcctgcggcgggagcgtgagatactccaagatcccaacctacccggggggctggtgggcgtatcctaaccgcagccgtctcccgacgagagtatccaccgacgctccggtcgaggaccccactgtgctgccctcgccgttggacaaggcgggcgagctggtgacgtggctccgcgagcaggggcaggtgctcatcgcgtcgcgccggccgtgaggcaaggacttccgcgcgtcggccttgtacaagtcgacgacgatcggggaggcgatcggccggatgctccgaaacaccgcctacttacgcgccaactactcgctggccgtgctcgtcgccgtggtggactcgctggtatggcaccccggtacgctctgcgtgct

SEQ ID NO: 363792 - DNA, 379 bp, Zea mays
tacttgtttaggtgttgcgtatcctagccatgctctgggtatggtttccataagaacacttaattgaaatttgctgcataaatcagatgagttgatccattgaaaagggcaaaaaactgcattgatgctacttagccttcagtgcacattgggttaaagatttctcctatggcgggaggtgcttcaaccccgacaccgggcacgaccacgcgtgctacgcttttaacagttacccgccttaaccagctgcgacttacgcggtacggccaccatcaccaattgttggagggattaggcttacgcggacgcatcgacgcttgtagtaaatcttggagcaaaaggaatttgcaatcctaaatattacaaatttggggtccat

SEQ ID NO: 363793 - DNA, 519 bp, Zea mays
ttttattgtttgagccatgcatgccgcgccgacatggtgagcaagagcgacggccagtagaaaccgctctcgaacgcgacgctgcagcaggcacaggcgaggtcccgctcatccagatcacaccggctcatcgacgacagcaatgccttctcgggcgccaccgccgcgacgcagtcctcgcacatgtctccggcgtccatgagccagcggtgggtcccgaagaggctgccgatgccgaggcgggagcagagcgcgcatggcggcgcgaggctgaagaagccggcgaagcgagctatgaggattaggattttggttttaagggcaatttttcccaatcactatatgctcatatactcttctcaaatattgatgtggtatgcgagtaacaaaacaaaattaaaggtacctacaagatattgaccatggatctctattgtttgtagcatgatatataattcgaatgtgtggtaatcatgggcaggtcgcacaatgtgtcatgttatataagaaatatcaaat

SEQ ID NO: 363794 - DNA, 395 bp, Zea mays
gcttatactagttgggtgtcatggattgtcttatgttggttttggcacttacatctagcatgatgcttttggtagctttcaaagtgaaacttaaccagctgtaactgaaaagtcgtaactttggataagttaactcctttgtggtgcgatacattgattgtaccaatatgaattggaacggaggtatgggatctattggaatgtctttctcaatgctgacaacctggcagcctgctataacatttactcttctgttacttgattcattcacttgcttacatcattcacccagtgaattctttcaatttgctgggatttcatgttcttgaggtttaacttgcaaaaaattattgttcggtctgtgaaaaagtgtttgggttttgcctatacttatc

SEQ ID NO: 363795 - DNA, 321 bp, Zea mays
atttaaacaacacaatggggacagcgcgggatagcgcacaggagggcataataggcgcgggtcagaagggctggggcatttcccatctcggcgacagcggcggcttgtgccgtacttgtccatcacgccgaccgcactgagatctatcttgccgttgtgtacatcaactgctagttacagtatctcttctacaagggccaattgtcccaggccgcgtgcgaggactcaataaagcggataaggagcttctgcaacgagcaggatcttaaggacgcggaacttgagatccatgccgcagtggacaaccactatctcaagact

SEQ ID NO: 363796 - DNA, 321 bp, Zea mays
cttttcgtttgccttactgaagcctgtcacagtggggcgagtttatatactaggcggtaatctactttgcggggccttgagcccgtaacggagcacacacgcaccaggaataacagcgagctacggcgggttgtgtacatgcaccatgataaatttcatgcctgaacagtccccaacgcaaggataggctgaccaagtcctatgctacggacacccaaaacgagacgaccaaagggattctcgagctcactggactcagtatttcacgagggctcaaactctagaactttggccagtggaggcgttacaaggttgtatacc

SEQ ID NO: 363797 - DNA, 232 bp, Zea mays
acgcgtccgctcacgctagactaggcggggctaggctagggtgcggacccgcttgcggccatgggggccttcaggttccaataaaaccaggtgggggagccctgcgttgacgactctcgacgacgagcaccccaagatctaccgcatgaagctattgtccactaaccaggtccatacatggagcaagaggtggtacttactgaggaagatgaagaaggtttagaagagtaac

SEQ ID NO: 363798 - DNA, 306 bp, Zea mays
acgcgtccgctcacgcgttcgaccacgcgtccgtccactcgtacggcgacgcgtgcgaccacgcgtctgaccatgagtacggaaattgtggagtggaaacccttactcggaaaactttcgcagacgtcgacgtacaattccctcatccaattcccactctccgcttgacagatctatacatgatgggagaggtcatggagaacgacgtttatgaggaggagctgctgtactatgaggaggacgaccacaagacggacgatggcttcggtgaatagcccatcggagaggtatgaaagaagggctacg

SEQ ID NO: 363799 - DNA, 276 bp, Zea mays
tctttcgctgtcgcttagccgcttcagatccaaacccgcgtattaaaaagcgctccaagcgaccaaaaccctaaccctaatcaccgaaattccccaatcatcgggccccgcgcagaaccctagcccagcgccacctacccgtgcctctcgccgccgccgacgacgacatggcaggctcatacggcggcgcagcctcctcttcctcccgtggcgtgcccgagaacaggttctataatcctacacacgtacgacgccagcagcagcagcaggggcaac

SEQ ID NO: 363800 - DNA, 262 bp, Zea mays
cccactcgtacgcccacgcgtccgcccaagcgtccgagggccttcttgccgacccttggcctcttggctactcttgagagcgaaaactaagaagccgagaagccctactcagcggctggtgcaggcttcgccatttcgaagacgaatacttgtatgagcaacttgctcaagtgaccgatgcatcagagagatgattgagcaaatcgcaagtgaggctgtggccaaccacattgctgaacaggttcacaaatgcgctgacggg

SEQ ID NO: 363801 - DNA, 111 bp, Zea mays
tttttcgcgtggactgacgcacgtacagccgcgtgggtgggttcttacatgaatagacaaaggaggcccttaaaacgatgatacatgagacggagacactgaacattacga

SEQ ID NO: 363802 - DNA, 186 bp, Zea mays
cgctagttttcgcgcccggacgcacggccctgaacgcggggggacgtgtgcaggttcggggtggtgcctccggagctgataacagggactacggccatcgacgacagccgcgtgggccaaggccaggagacccgggacctgcgttactcggctaaccagactcggagggattcggtgcaggtgcat

SEQ ID NO: 363803 - DNA, 325 bp, Zea mays
tgcacccatgctgcagcagcagcctcagcaaagcaactctgcaacagtgttcaagaatgtatggacaaacatatcagcacagcgcctaactggtatgcaacctaacaagattacacccaacatcattcagtctatgatgtttccaaataatgctgcagcttccaacttatggagctctcagaaggcagatgatcaagggcagagggcatcaactccatcagatattgcaacaagttcagcgaactcacagaatcaatctccaaaacaagctgctgatagtgatgcaaagttagcatcttcccagaagggaaacctagagttgaca

SEQ ID NO: 363804 - DNA, 312 bp, Zea mays
tgttgttaagaatcaagatctattcctatccgtggaagaacctcaccgcggccttcgtccccatctcctccgtcgttcgtccaatctttgacacgcacagatccgctgccgtggagctcttcaacttctccgccgacggatccttcgacgatggttgatctagtagttaagaatcaagatctattcctatccgtggaagaacctcaggttttcaataagcaagaagcttgcagatgacgatatgatgctgagctccatggatgctagtctagtgatacccccggtcatcttccggtggatggatgtccatgt

SEQ ID NO: 363805 - DNA, 293 bp, Zea mays
ctctcgtctctccctcacctcacgtctctctctccctcacgtctccctctctcctctctgttttctctctcccttgctttttctctctcacgcacaagcaggacaggcagcaggcggccgagcgcccgccccaccgcgacgccgcacaggccccgccctgcgcgagcagcgcgctgccgcgccagcccaccgcgatgccgagcgcgcccgacgaccaaacgccgcgaaccgtcgtccgtttcttgcttcatggcgatttatttcatctgtttcttattcctataatctctcca

SEQ ID NO: 363806 - DNA, 270 bp, Zea mays
gtgtctctcaagggtgagtggaggagaagattggaatgacacaatgcgttgggagaggaggacgcggaccttctaggttccctgtgccggcgctgtgcccagccaggatgacccaagatgatcccgccctaaggaggatctttatttcttggatcctaatacaaactacagcctgcgcctttatagaggcaggcgacttacaactcaagaaaacaagcagatatcttaaggaactaatctgctattatttggcaactaactagctaagga

SEQ ID NO: 363807 - DNA, 269 bp, Zea mays
tgtttcttggcgggcgttgctgctcctcctccgcttgaggattgctgctgcatccggcaggagggatggtcggaggcggaaggagcgtcggcacccgcagcgtggaatcgacgacgggcgcctccagtcggttcagaaatgcgcaaatgcgcgtctgaatgaagcctggttggaggtggtagagccgatggtggtgggaacggcactgctgcgcggggtttcctccgcgtggatcctcctgttcctctcctacctgctcctctcgccgt

SEQ ID NO: 363808 - DNA, 243 bp, Zea mays
tttttctcgggaaaccctagccgtcgggcgccctgggcaagcccaccggaggacgccggagccgaaggggagtcgcaaagcagagatccggctacaacgtggctttcccgaccggttgtggcggcgatttcgcatcacatagatccgctcgtggccttcccttctgcgcggtcggtggatcctctggagctccgctggcgccccgagcagggctctctcggcgtggagggcggaggcaaggga

SEQ ID NO: 363809 - DNA, 389 bp, Zea mays
gattgtttaaaatcaacaaaatctatctagcatatattcaaatgttttttccatcaaaatctgaaatgtcagtgttacctagatttagcttagcaattggtttagcactctaattatatacctttttctgtcgtagatatatatcttcttcaacgatgttattcactacgggtccacttctagaagttatcatcttgtctcatgacatcaatataattatcaagttgcaactcaagattcagcaaatcagtgcccctgatgtcattagggcagaattcagcaagtctaattgtctttcacctggatcatgtggaagacgattgatatcatagaccggcggtgctggtgattgcgatggtggtgaagaaggcattaggatatgaattttt

SEQ ID NO: 363810 - DNA, 335 bp, Zea mays
cggactgtttgggcggacgcgtgggctgttacagaacaaagtgaaacacaagaagaaaaaataacagcacctgaagaacaatcagttgcagcaaacacaagacatgtagagtcctcaatgttgaaccaacaaacagaacagttggaaaagctgacaaggcgtattgaggagcttgaatctgaaaaagataaactagtaaaggacttgacagaagcagaaaacaaacagagcatgcactacagttctctacaagaagctcaaagctctctttctatgaaagataaggagctggctgaagcaacagagtcgctgaaggagctgggttctgagcttga

SEQ ID NO: 363811 - DNA, 341 bp, Zea mays
gcggcatttttcaacgcaactgtggccaaattacgctgcttgatgtcgagcctgtggagtggcccggaaagcggggtttcaccggccgtctgagaggagcggtagattggtggcagcctcgagctagggttccggcgagtgcatccatggactccgaggcggcgcgacagcagcaggatgtggcggaggaggggcagccgcacctggaggagaccatcgaactcgagttccagatccttgtatccatgaacgacgagctctggagcgccggtctctgcccctcctcttccgtatcggcagcagcagctactgccgctctcgctggctcccagcaccaccaa

SEQ ID NO: 363812 - DNA, 366 bp, Zea mays
cccactcgtccgcccacgcgtccgatttattatagtactactacatctgctctatctgtccgttatccgatctgccacgcccgcgctaatcaatcaatcacgctcgcctcgccgccatcatatcatagcggcgacgccaacctcatctccatttaacaacccccctgtttcctcataggagagggaggggggcgcgcgagcgagcgagttcgttcccgtggtgaagaaacgatcgaccggcagtcgggacgcggtgccgtcggccggctgtcccacccatcgatcgaggattcaaggatgctgatcctggatctgggcatctgggtgctacccttgacgctgctgctgggcgccggcgcgccggat

SEQ ID NO: 363813 - DNA, 371 bp, Zea mays
gggaaagctggacacgcctgcgggccccggcggaattttcgggtgtcgacaccacgcgtgcgcacttttcgtgcgcccacgcgtccgcccacgcgttcgcgaagatacaaggcgccgtcccaggtatgggtagggtcgccaccatgctggaggagctgctcatctgcacccggggcggtctgatactgcggtcgacctgccaggcgctgggtgccgcagcccataaggggtcccccataaacgccctgaatgcttgctgtctcttcgaggagcgatcctggctcgccagcttgtcccaggacagttacgccctcaagtggaccttccacaactgacctcgggcttgcgtacgtcgccggataccagaagat

SEQ ID NO: 363814 - DNA, 204 bp, Zea mays
ctcttgtgtccgtggacgcgtgggccagctcgctggtcccagttgatcaggtcgagcacctagtagcgacctgcatcgatcatcagagtagagtgtcggcaggtgcctgcctctctaggaggctggttgcaacgggcacggcgacgtcctgtcgttggctgccgttgctgctgctgtgccagggcgtgctgatgtcctgcttct

SEQ ID NO: 363815 - DNA, 372 bp, Zea mays
cccatttttacggtaatgtgcgagatgcgaggaattttatattggtgaggccaggcaagtcgacaacaagtgccagatgttccatgaaatgattgaatcggggagcgtcactgtttgttttgattatctagttaggcaaataacgtaggtatgctagtgaaccacgtgatgctgaggaccaaagatgagtctaccacaatatgttgttaaaggtgggctactccacacggtgactctgatgatgaacttgaaggtggatgatctgatcaagtgccaagatggaagatgctcgccaagtggtcgacatataacaacactaacttagtgttatcccaggagttggtgatgaaacacatagccattctgaaaggg

SEQ ID NO: 363816 - DNA, 278 bp, Zea mays
tcgctcatttttgcagctacggatcctgaaggttccaagaatgactagaaaccgctgatggtgctaacaaggccgtgactgagagctccactcccaacacgtaataagaaaggggctatggcgcaactgccgctctgggcaccaagcgccgacccaagataacactggccgccggctgcggtggaggtccgaagctctgacccgtccaggcacggtgcgcaccaccactgcacaagtgactctgccgggttcattgaggtcggacccattgacgacca

SEQ ID NO: 363817 - DNA, 103 bp, Zea mays
gggtgcacccacacgtccgcgctttttgtccgcaatgacgcgagatgccaggaatctcgtaccagttaggcacgtcgagcacctaaagcgacctgatggatca

SEQ ID NO: 363818 - DNA, 114 bp, Zea mays
tttgtttctacctttgctaccaatttcagctcaggtgtgttctgctgccgcatcagcagtacagaacaccccataggtagcaagtcctgttgcgtgtccggcggaaggccatgg

SEQ ID NO: 363819 - DNA, 209 bp, Zea mays
tctttttccctagtcgggcagcacgcgccgacagggcgtatcttgtctccctgctcgaagcacctactctccctgggtccacaacgcggaggcctgctcgctatctgggcgggctactaattctgcagatggagtcgactgctacttctccgatgccgcgcgcgcggaccgagcggtacgctgcgcctccgtcggatgctcaagcagga

SEQ ID NO: 363820 - DNA, 127 bp, Zea mays
ctctctcgtccggccatgggtcatagcaggcgccgggcggcagtcactcatcaatcctcgagataagacgagagagctagccacatgcccatggataagatcatgaacagccgggggggcggtggga

SEQ ID NO: 363821 - DNA, 323 bp, Zea mays
tttactcgtccgcccacgcgtccggccagatttcaggaatgcagcagctgagcccccagacgctaccagggcacaaaagttgccgtgttcagcaataacatcatcgatgtcatcaatctcaccttcgatgtgttcgaaggcttctggtagatcttcagccgaaggaataaatttttcactactggccccgactgaataaaacaccttcttcagtcgttgaacacattgattgctgaatttcaaacatttgttctgaaggtctatcaataatttcttcaaaactaaacccaatggaataaaaaagctaaaaaaagacataaaaa

SEQ ID NO: 363822 - DNA, 344 bp, Zea mays
gaccctgcgatccctctacccgggctttttttaatacccctgggggatcaaaagaaaggaatcgcaaatagggccctctcatccgaggtaaggaagccatggagcacaaggaggctggctgccagaaccccgagggacccatcctctgcatcaataactgaggcttattcggcagcccggcgaccatgaacatgtgctccaagtgccacaaggagatgataacgaagcatgatcaggccaagctggctgcctcctctatcgacagcatcgcgaacggcagcgacgccaacatggagccggttgtagctggcaacaacactgtagtagctgttgcccaagttgag

SEQ ID NO: 363823 - DNA, 314 bp, Zea mays
tatagttaatgctggctcccctgccgggacggctccggactgaattgccggttccacgcatgcgtccactccaccgaatacgctgccatggacgcgtggggggctcacgccaacaccggggggttccgcatctggccgatcttctccgccgcctcgctaccgaggaaggtgctagatgtactcacgtgcggctgcggtggcggtcgcggagacagacgcggttcctgccgaggactgacggtctaccggtcgccacagcggattccgaggccgagacacgggtcggacaggctcgcggagctgctcagggccga

SEQ ID NO: 363824 - DNA, 422 bp, Zea mays
  unsure (1)..(422): unsure at all n locations
tttttacgcgtccgcagcaaatggatctcggtgctggttctaagattcattctcttcaactgcggaaagagtatccttcattttcctcgtcgtctttgttttttctctcttcantttttggagtaaaatttcttgtgcaaagttccacatgtttcctgagctgttggtagttatgaagaagcgaaagcaaagggaacagaaaattttgatagagaactcgaggatatgatagaaaggctcattgtggagtgtgacaggaaaattcagagggccctaaaacggcttgcagatgatgatgccaatgctgctattgcgatatcggtctctgaggttactctgaccgatgacatactgcagctgtcaaaacagattaaggagaaaatggcagaagttgatgcctttgattttgaagggagaactga

SEQ ID NO: 363825 - DNA, 327 bp, Zea mays
ctccggttatttcccgatcccctcgtacgtccacaactggggaaattgttactgaacctgtggagatacacccctaggacattgcacattggttatggggacatatgccgacgcttgtcgcacgactctcttctctggataaccacaccaccagtcatgagggaatcacctccaacacagggggggccatctacatcttctgcggaagatgatagctactcagctgacggcggtgaagattcacaactgtacctcttcgtgccagctttaaaccaagctgcatcgtatcttgcccagacagctttattcctcacccaatgccttcct

SEQ ID NO: 363826 - DNA, 288 bp, Zea mays
cccgggggacttatcacagatggatcgggtacctgaacgaactcaccggtggatgatcgatctaattggatgcgaagcaaggcactgtatatgcatgagaactaggcacgtcctcgatccgcagaacaattgtaccaaggctatgagtgactggactacaagcggcattactgtgaagccatgatggatatatcacctatgaacactggagaaaaagcactcaaaaagcagaggaagatctacatctacagcagacaccagccaccttgtatgacaggctgaatcgct

SEQ ID NO: 363827 - DNA, 429 bp, Zea mays
tttatctgctagctctttgctagagtgaaccagacaaggtggatatttgtgttgagtttgtgagctggcctagtgcttgtgcttgttggacacgtgtgctcacccatgtggtgctggcacccttgggagtgggacccttcttcatcaagttatggctgagttcgatgcctctgtcctcttatcctgtgtgctgcagagcttggttcagtggagctttcccttgtcctagagttctagccagtgtttctcacgagatcgaggtagttcctgtgttcaaaccagtgttagctcctcttcttagtcaccaggttgatctgccttggtgctgcgcacgccaaccctattgtctggtgaccacacccactgaaacccccacctggccggggcaaagcgttccaaagagttgcatgttcctatggtcttcgttct

SEQ ID NO: 363828 - DNA, 481 bp, Zea mays
  unsure (1)..(481): unsure at all n locations
gttttatgagggcttcacagacgaagagctggacaaattctaaagcgtcttcggatggggttctacattcttgagtgatcctcaagttctttgtatggactcgagagatccacaaaacccccctcgtattggccggcaaaattatgagccgctcaccgcacaggagtttttttcactgcgccacaattggcaacagctgctcgatggcaagaagacatacctccgcccaccaaagaacaaccgtgttgccaagcacagttatgctaaccgcacctttgtaaccccagaacctcttgagaaggcactacaatgtcaggagccgctatctgattttggtcggaaatatgcagaaaattctatagttcagcaaaagtttaagattcttagtgaacattatgcgcacgtcagacaaatgcgaatggatggatcatctntttacagagctttccttttctcttacttggaaaacctttggaaaatg

SEQ ID NO: 363829 - DNA, 425 bp, Zea mays
cacacttgttattgtgcagccaaatccagaaagagggattaatcacaaagcagctactgcaagatcttaatatcaacagtcatgtacataggatgctcctgaatgtggtggaattgataactcaaggttttcaattaaggaagctaagacaagactcacatttgtgaatagtgagagtagaaaagaaagcaatttgcgacctgtacaagaccttcaaggatacccacgaaagttcaaagattcttttgttgcaatcaataaagattttagacatttcccagaagggagcttggcaaacaagtctggatcagacatgaagaatgcaatcaaaccttacatcagcagtaagcaaaagcagcgaaatgggagcataagcggaatcagtggtcatatagtagcaccaaaaggtgcatctatattctatg

SEQ ID NO: 363830 - DNA, 291 bp, Zea mays
gttattaggaccaggggccaatgatattgaactgagatctggagcggagcaggcggggagccattgacggcgttctaattgttgttggacgtggaaggatggttggggtgctgtagaatcgcagtggatagatactagctcaaggccagcgatcacatatacactaggcggggcggctacatctacgcgcaccagggaaaatatgctagagaaggcatggttatccattttacaagagcagcttgacatgagattggaacaagaacattcttggactggatactttatagc

SEQ ID NO: 363831 - DNA, 173 bp, Zea mays
tcgtcactcgtgaggcaggcgtccgaacacagcagacatagggtgagtataaaagtccacatacacaagtgaactctgggttttagggtagattaatgttgcggcctggtgggagatgctatgaatgaagatctaggcatctgaaccagctattctcggtcaatgtcttgggg

SEQ ID NO: 363832 - DNA, 449 bp, Zea mays
tcgctccacgcgtccgcccacgcgtccggggctcgccgcctacagctaaccaataatggcggatcaccccatgaagccaccagcttccggctccatgtgcgcactcgcctgcctgttcctcctctccgccggcatcctcctcgccgccgccgtctaccggccgttccagtcgcgcgcggcggcgtcgtgggacccattctccagggtgcagcagaaggaggaggccccggcgccgccaccgctcgcccgccgcggctcgtaccgtgctgcgccaccggcgccagacgccgtctcaccatcagccggcggccctgctgactggagcccggacgacgacgacgacgccgacgctggaccgacttcaccggccccggcgccgttcgaggaaggatggggggaccgcgacgaggacgcccagtgcgacctattccacggagagtgggtggagg

SEQ ID NO: 363833 - DNA, 384 bp, Zea mays
attattaccttgcttccaaaaacaccctactcgttaggcccagtataactcggttttcctacgcagcctctttaggtccacatgcccagcccagttaggccccataaacgccccatgggccatcaggcaagtaaaaccccaagcaacactccagttcgtttccccaccagttcgggaccgttggacacaggcacgacacgacacgagctcatccggcggatgcagagcgggaggagggtgaacgcttcggtcccggtcccccccaatccaacctgctacgcttaccgacaaggctacgcgaagcgagatgccgatgcacgactgcatgcctgtgctgaagacgacggttaccagggaggtcctagcggaactggtgacgcgggt

SEQ ID NO: 363834 - DNA, 372 bp, Zea mays
cccactcgtgcgggctgcagcagatgctatgatttctccagcttcggcgactgttttggctgctgatgacagtgaggatggtagaaatatggagcaaattgccatgaagatctcttcagggacagatcacgttggtcaggacccagtcattatgggggatgtggcagatgctatggtgtcgtcagccacggcaataacttttacacatcctgatcctaatttgggtttggttgagcctactgcggttgtggcagacattctgatgtcttcagctgtggtggtcaccaatattctttcttgccattctggcgagcaggaggcttcccagactatgcatagagaagagttccttaaatatgttactcgacaacc

SEQ ID NO: 363835 - DNA, 208 bp, Zea mays
tcacgcgaccgagtcattaagctagtctagcccggagcacgcctagacacgccagcggcaatggcggctgatgtggccgtttcgttactacgcttgttgacactgctatgtcttataagacatgcatggacagacactcaacgtcatgttcaggttcgattagtccatttataacacctgcaacctgcgcgtgaacagacccacattc

SEQ ID NO: 363836 - DNA, 313 bp, Zea mays
cccacttgcgcatccaaatccgaatgcccatgcgtgcgcgcatgtacttcttcagttccgctgtctatgccgatggcaaggaggctggtcaggagccccagcaagaggccgaggcccaggcgccctcccaagagtgcatcttcgggtggctgatcgataccctgatcgatgcgctcaaggaggagatcgaggtgcacgagtaagtcaacgagtccgccgacgcggcacgaggcggcgatggatgcccatagagaggccgtccgcgaggcctgccccagctgcggatggatgttcaagacgctgatcaagacga

SEQ ID NO: 363837 - DNA, 475 bp, Zea mays
cccactcgtccgtccacgcgtccgcccacgcgtccggcagattagaaccaaagcacaataaagatacaagggacaataaggcggatgatcgtgacacaaaagctgatgctctggatgtctatagtgatcccagtattgagtttcagtttaataaaattgacagtgatgtaaaaatagacaatagagctgatggaaatgaaataagggctgacaggaggggtcaccacgattacaaaggtgatactaaatttgacaaggataatcatcctattgttgcatcgagcttaggctggaaagacaacaaagaacataggggcaaaaggtactttgagcagccatctgataatgcggattggcgtttcccccgtcccggtttgcaaggtactgatgaaactctcaaaggtctaacttccatggaagaccgtaattcaagagatgcacatgattctgctgttgacaacaaagctgaatcaaa

SEQ ID NO: 363838 - DNA, 454 bp, Zea mays
tgttgctatagtgccgcgattctttgacttgccactctggttgctcaccggcaatgcgatggtcgatggcctcgatcccatgacgttccgcttacctgcacatttctttggtgtctatgacggacacggtggtgcacaggtatgctgcttaccgttcattaatgacttcctattagcagacccatttttggtgctctagtcaagactatatgtactcctaaatcgaacagtttcttgtcggcacagctacattgagtggcatttgctcaattcgttgtaggtagcaaattactgtcgggaacgcctccatgtggccctactggagcagctgagcaggatagaggagactgcgtgtgcagctaacttgggagacatggagttcaagaaacagtgggacaaggtctctgtggattcttatgctagagtggatgacgaggctgggggaaacaccatg

SEQ ID NO: 363839 - DNA, 443 bp, Zea mays
gcctctccagactccaaccagcgctcgtccctgccggttctttcttcctcccttcagccatcgcagccgcagcgcaggttcttggctggctgctggtgtcgacagcagagtccgcaactccaatcctgcctgcgctcctgccgtcctcactcagcacccgcgcacgccggctgcctgtcgattgagatctctttcacgccccttggtggcatcgcacaactgaggtacggttctttgcttattgcagagtatgagtatggacgcccgcagtgagtcgtagtgtcgtgccttcagtaggaggtacggaacttgtgctgtaggagcagctcataagtcgccacactgttttcaggaaatgacagtcctcgcgtgtgtattgcatagatctagagcattcactgtcttgtccctttgcagccgagctacgatactattaacatcaa

SEQ ID NO: 363840 - DNA, 233 bp, Zea mays
cctcacttcgtccgcccactcgtccgcccacacgtgcggggtcactttgcttgcgaatgccttgcgtaagactcatgaggacaatggtcggctattaacttattaccatgaaagcacttcgtctgctgccctaagaggcttagtcccatttgcattataaccaattcaatccttgtggatgatttgcgtgattccatcgcgaatctcatggtaaaatattgtcattgttgtga

SEQ ID NO: 363841 - DNA, 493 bp, Zea mays
ctgtcacggccgcaccgccgccgacctcgccgccggcaatggcgtggctcgcgcgctccatcgccaactccctcatcgctactgaggaagaacccgaagcaaccgaccggggcccctcggcctccccgggctcgtcctctcccccgcgcggcgtccgcgaggacctctccgagctaaccggcgcgctcgcgaaccgcttccagggcatcgcctccttcctcgcgcccgcggcgcctgggggcggaggcgccctgcgccggccggacccggccgagatcgcgggccggttccgcgccggcctcgcgcggctcccgggccgccaggccgtagcggatctcgccaggatcgcgtcctcgctcctgccccctgagggcgatgcatactgggccgaggaggcagcggtggtcaccgaagaggtggtcgcgttcgcgcgggacgcggcatcgcggcccgagctatggctagactttccccttcttcccgacgacgcgga

SEQ ID NO: 363842 - DNA, 434 bp, Zea mays
ctcactctctgtgaaagctggctcgcccgcctgcacgtggccggtcctgaccgggtggtcccacgcgtgcgttctctcgtgcgtattttgtactctagctccgtttgggctacccctgacaagttcaagagcttcatcgtttctgtccgtgctggcttggtgagcaaagctggtggcaacagcagctggatccccgcgctggtcgacgaagacgacccgctcgcgctcgagtcatttctaaacataactctggggaacaaggcagggcgctccgtaagctgctaaattgatttatccagagcctacttcgtgggttacgtaacacggcagcgctcgtgcctgctaaagagatcaagccgtacgttctggtcggagatctgttgctacggtggaccgtgttgaacaagttttgatactgtcacgctacctggtgc

SEQ ID NO: 363843 - DNA, 188 bp, Zea mays
ttcttttttacgtccgtagctgtgtctcctggggatgcagcctgaacatgccaaacgtggaggggccctctctctgtatctgcgtgtgatcgtacgaaacatttgagctgatatgtgtctgggttgcgtcagatgggttgtgcaactgggtgcgagagatgcaaccactggctggagccctactactg

SEQ ID NO: 363844 - DNA, 191 bp, Zea mays
ctttttcccatggcctcgcgtgccgagccaggccgggcagccacctatgcttggtcgagatggtccccgcgctaaggtcctcgggctgggtcaatgtctgtagccccgactgcgacttcaaggtgcgccaagcgtccagagtctcggaggtcgagttcccgcagcaatcctagagccaagtcacccccgtg

SEQ ID NO: 363845 - DNA, 178 bp, Zea mays
ttttcgtatgaagcctcgcatacgcaaacggggggccacaacgtacaggcgtgggggaaatactacggcaccgaaaccgacccaggcgaagcacaccgcttatgcaagacgtgggcgtcaaagacgacaggggcgacgtacactgcaagacctagggctcagtacacactcgacgccc

SEQ ID NO: 363846 - DNA, 359 bp, Zea mays
tctttctttttcgctgctgcgcgacgccaacgcggccgcgcgagtgctgggcagacgcgcagtgacgactgtcgagccaagctcactacttcaaattcgtgttgtagtcgtaggaatgtgggagagactagaggggagaagccgagagccgaacgaagaaaccgtgcccctgccgcccgcggagtatgttcctttcgtgccgcttcgtggtggcgccgtggtgcccaccaccacgtcagctgttaccacctattgtaataccacgagtccacgatccatggaagagactagactacaccgctcggccggtgacgacgacggagacagccgacagtctattctaactacgctctgcacca

SEQ ID NO: 363847 - DNA, 280 bp, Zea mays
actgcacactggcatcgatctcgccccttcgctgccgatctatctcggccggagccatggacggcggtgagcgcggcactactgctggtgatgtgagcggtcatggcgaccgcggtcgtatacgatgagggcggcaccatagggtggaccgctatggacaacctagactacaccacctgggccagctgcaaggagatcgtgtgcggcgacactgtggggttcacgtataacaagcagctacacaacgtgctggcggtgagcaagtcggactacaagaact

SEQ ID NO: 363848 - DNA, 403 bp, Zea mays
attttgggttaggaaggctgctgcctgccgagagagccctagaggaatacctggaggtggggtcgtccatgacgggataggccaagccgaagaagcacacgacgaatgagatcgtcgtgaagatcgacgcggtgactacaacacctggcggtggcaaggtcatccaggctgaccggctggagcaggacaagggcagtcatgctaagcttacatgcccgctctgcctgaccccggcgtccgacatgattttcatgcacatccaccactaggtgcgccaccccaagctccccttcgagccggaaaagctactgaacctgcactcctccttccccggtgatgccatcatcgccgtcgcttccgtactcattgccgaggtcaccaccttcaatcccaatccctgtgt

SEQ ID NO: 363849 - DNA, 364 bp, Zea mays
ctcaagccacgctttttagttaccaatctgccatgggcagacctctaactagctcaaaaggttcatgattactatcgataatggcttgttgagcacacattgtggtgacatgagtctgattctcccaagagaaggaagagacgatccactaattccacaaaaaaatacttagaaaaaatgtggtaggcagactggccgataatcaggaatctaaattattcacatagctactcatattgcatgatttgtcacacgttaaggtcctatgcttacaatccagaacaggcccatgcagctacctgcaccggagggctactggagcatcggtatgcacgacattttatacaaacaagctcggatgagc

SEQ ID NO: 363850 - DNA, 117 bp, Zea mays
cccatctcaagttctgtagctgacaggcttgcgtgggtttaccgacaacaaggtgagtgttacggtggtcacaatcgatgatgtcttatatataaaacttgctgatgggataagact

SEQ ID NO: 363851 - DNA, 506 bp, Zea mays
cccactcgtccggcttgcactaacaagtttgtgggtgaggaagaactacgcagacagttttttggttcgctttatcgattcacttgcagaaatatatcctgttgctaacaaatgggtggaagatgttgtcctggatgaagggaatgccacaattttgactgtctttgcttgccttgtaactgtcctctacttgcgagagcgtcaaaggcgttaagtggcagcaggcaacccccaacaacctgatgatgtggtcatgtaaatgtctgttttcatgacatgtgcattcctgttgcttgagggaattggagatgcaaaacggtagctccttcacatgactcatgtacactaaattgagtaggggacatgaaaccctgtggaaactcagacaatgtttcctgactggtgaatattcacctttccaagacttgcgagctatgcttgttaaggacgacatgtcttggaaactgactgcttagaaatattgctacaaatgtcacagatgttta

SEQ ID NO: 363852 - DNA, 268 bp, Zea mays
cttacttcgtccggccatacctgcttggtcaggaggaggttcctggcagacgaaaaagaggttaggactacactgaggatatgcgttaacttccattctactatcccggacagatatgttacggtcaggttacgactgttcaccactaccagggagactctgagaacattggatgtgtacattaagggcgactaccaatgaaaagaaatgactggctctagatccgggataacataaagcctgggatgaaagtatacgtgaagatttt

SEQ ID NO: 363853 - DNA, 109 bp, Zea mays
gaaattccggggtgttccacccacgcgtttgcttatccgtgcggaaccgcgaaggctacgggggggcctttatcagcgggtgtggcggatctacccctgcctctagaac

SEQ ID NO: 363854 - DNA, 280 bp, Zea mays
cttaggcgttgcatggtttattggctgggctctgatccttgaatactcaattggaggatcagccgttgcccgtgggatgtctcctaatatagtcttatttattggaggacaggatagtctgccatggatctcagcactacatgagatcccatggctagatgtcattgtagatccttgtgcttatttcgctatgtgtaagtcgtgactggccttctctgtgtggagataaaagagaggccatttgcgcatgagtcgtgacggcctcaaagcgctaagtgat

SEQ ID NO: 363855 - DNA, 300 bp, Zea mays
tctcacgcggccgattggctggaggctacgaacagggccttgagcacttacttgtgactacagccctcgcccgccagatggcgccgattacagtcggtactaagctggcgctggttacgaaggcattatgcgctgcatccgacatggccacggggcagcatcaccccggctttcgcgcgacctacaactctatagaaagcgctgcagaaccacagtgaccttaaggccgagagcgcgctctgtgagacctgtgacgccctcaggccattgtctgagggcacgaaggacggcttgccagcc

SEQ ID NO: 363856 - DNA, 441 bp, Zea mays
tttcccacgcgtccgatcagcggcctgcctgcgcgagataccgagggacacggagatccatggccgcgtcagaccaaccgccgaggccagagaagcccccgctgccgtggcgcgcgaggctgcttgtgggcgccgtctccgcgctgcacgccgcctcgctccgccgcgacggcaccgtcaaccgcttcctgctctccctcttcgaccgcgccgcgccgcccaccccaacggcccccctcggcggcgtggcatccacggactacgccgtctccgaccacctgcgcgcccgcctcttcgtcccggagacccccggggccggcaacgaactcccggtggtcgtgtacttccacggcggcggcttcgtcttccactccgcggcgtcggcgctgtgccgccgcctggcgtcggccatcccggccgtcatcggcttcgtcgactacc

SEQ ID NO: 363857 - DNA, 231 bp, Zea mays
  unsure (1)..(231): unsure at all n locations
cggactgggtcggaccgaccgatcgcgttcggctacagcagtccgctcacgcatgcgtcacagctggcttcgacgcctgaaggatgtgttggcgtttacccagatggatttacctctggactntgcggaagtagatgctactgccactggaaaggaggaggaggacaacactcacgagtctgccatagacacgtaccgccgagaacggatctgcttgattgccttagctgc

SEQ ID NO: 363858 - DNA, 275 bp, Zea mays
tctacttttgcggagagaggagtgcaatcaggagcggggttattaaaaagggcggtgtggtaattaaactcccacacctccacggtctacctactcacgtggctccagccccagggccccgttccatcaactcctgatccaccgcgccggtcctggccagccgtcggaggctataatgaaggtggtgttcggcggtcaagtcaccgaggatgatgccgacagtcttaccaagaggaagccttgctccgcgcccaatttgaatgagattacttgtt

SEQ ID NO: 363859 - DNA, 344 bp, Zea mays
ctttcgcgtgcggccacgcgtacgtccacgcgggcgcgcgagcagggggcagcgagcacctagcagcgcgcgggcggcgacttcaccgagacaccttagccggccgcgcggtggcggttgcctacggctggctcctcgcctacctggtggggatgttccagcaccaactccgcgaggagccgttcgacaccctacgcggaggacactgcggtgagctaccactcgttgccggtggccgggcctcctcctactcaccctctgctgttcatgacccgctgtctgcagaggtacatggccgaggacagacgcatgcagcgggtccaggcgcttgccgacagaagaag

SEQ ID NO: 363860 - DNA, 390 bp, Zea mays
  unsure (1)..(390): unsure at all n locations
atttctggcttgtcccatgccgagcgtctggaatgcccaaacctccattgccgacggggacctgctcgggtccaaccagctcccctttctgttgttgggtccaggcgatgccccgtcctgcatgtttgctctctgcagcaaccctaccatggctgtgcccctgatgtcttggtgagctcgccccagccccaacgtcagacatgccggatgcctcacgtcgaggctgctccatccccctggttccctccgtgctccgaccaggtttgccaggtccgaccgttctgctcgccgngccctccccatgccagcacgcgagcgcccccttccgtgcctcctcctttccatcgacgcccaagtcgatgccgagctcccagcccctatcgatggcgt

SEQ ID NO: 363861 - DNA, 414 bp, Zea mays
  unsure (1)..(414): unsure at all n locations
cgtttggaagaataactttctgcagggccaagcgccgccaaaaggcatcagcagagaagaaggcgaccgtggccgcaagggataagcagacgaggggaagcaagctacataaggaacatatccggccttcaagtatttatttcaacctcaatcaggccttgaaatttgaatgtgtaaggatctgctgctaaactattttactgctagcaagaccacaaattgtgaatttcattcagaacaggtatgtttttccaagtaaacaaaattgttacctatttatttccatagtcatgagataataactnttgatatcgttaatcaagacgatattggttatattcgcataaacatcatgcacattatcttccatgtatagctcgacatgatgtcccttcatacttatgtatcaatgca

SEQ ID NO: 363862 - DNA, 139 bp, Zea mays
tcgtcttcgcgttcgccgactcatgcgcaccgacgggtgtctttttatggcggagacgtccgtaaccccttgcgaccgtccaagtccagaagtgtgatcaaaggtggtgacaagccctttattgcctccaccagagcga

SEQ ID NO: 363863 - DNA, 191 bp, Zea mays
cctactcgtccggtttcccgaccaggcctcgcggggtcaccgcccccgccgggcgcgccatggacttctcggaacaggacgtcaacgtgttcggcgaggactacgacgtccacgacggtggtgcccaagccgaggccgaggcctaggccgacggcggcggggactcgtcgggcttcttctgcccatcatcg

SEQ ID NO: 363864 - DNA, 268 bp, Zea mays
gtttgctctttctagtttctggaaaagaactctttatgctgtcctttattatgaaataagtgtaggtggaaactaatatatttagttttaccactaagattaactgtgtgggaagttatttttggtctatttaaattcatggaaaattaaaataaataaagaaaacttatttactcactaggaaaatcatttttagggtgttacatcagtagatccatacagaacaatccggtaaggagaagcagcaatactgggtgcagttgtatta

SEQ ID NO: 363865 - DNA, 537 bp, Zea mays
cctgctttacattgtagcctccccatccacccacccacccacccaccaagagtgaaaaaatctaattccgtcatttttataaaaaatgttatacttttagtgcttcctttgttaagcacctgaagtgacatctttatttcttccaaaaaaattgttgtgttatactcgcaggcccctgttcctctatccatgttttgaacatacttcatttcccggttatacaaaaaaatctttcaatgcattttttggtgaacacgaacatatttacagaaatttgttttaatgagtgttgtcttatgttatttccatgtggcaatacttcagtttttctctttgtcaccaccttaacgtgtactactacagtgtttacaactatagattcgtcaagtattgccctaattaagttacattttaagatattataatcccattaaactgtctaggtttctcttaccaatttaatagttaaagaaattttatgatgcattgtatttgtagaagtaatgttcgtatgctattcttttatagccaataaat

SEQ ID NO: 363866 - DNA, 294 bp, Zea mays
cccacgcgtccgcacgcctttccaggactcgcggacgacccacacagacccggactaccttactcttccaccactccaacgcccacagctccaccagggagctccacctttccacccatggaaaacaaggccgagcggggctaatactgtaacctgccgaggaaccgagccggtgaccctgcctacggttacctacgcggtcgtggcgaccaacaccccggtgatacccaattccacctggactaccccctacataaccacgctctgcgactagtgcctgcaaaacctcccgtg

SEQ ID NO: 363867 - DNA, 395 bp, Zea mays
gtctccgcggttctcgctgccagcgacggtgggggcacaccgcgcaggggctcaggcccctcacccaacttaactcacacctgtggagagttcatgcccggcccggcccaagacaggcctaggcctttactggaactggacttgggcgttaacctgtacctgccacaagatcgttccgtcctatgaaggtgaagatgctctttgcatagctcaagctgcaatctgatggactctgatgacaaaaagtttggaaatggaccagggcagctcactggtagctgttgatttgatcagccactacaaactgctggcacaccatgattttttttgcaagaaacctttgcctgtggcaagatcagatacacattatcttcacaatgtcgttggagacactg

SEQ ID NO: 363868 - DNA, 290 bp, Zea mays
tcgcctacgcgtccgcccacgcgtgcgcccacgcgtgcgcccacgcgtccgcccacgcgtccgcccacgcgtccgcccacgcgtccggcgatgaacggaaaggtattgggtaaatgtggaaggaacatgaatagtctcaagagaaagcgggagaaccccgctgcatatgatgctgacatattccacaactctgaattgcatcagcaccctgtcaatgattctgctgttaggtttcatgttgataaagaccgcaaggcaaagatcgtgtgccacttcaacaagcaggtttt

SEQ ID NO: 363869 - DNA, 426 bp, Zea mays
acccggtctgtcgttttgcaggattcagctcccgcacgggggcacgcttcgaggcgaacgggcgagagttttctatcggcgggcctgcactctacaggcgacgacgaaaccagcagcctcagcgccgaccactccgggagcggggcctcacaacctcaggatccacgggagatgccggtcgccgccgactcaccctcgcactcgtgaactggcttcctctgcgacgagccggggcgggctcggattcggcggatcttgtggggccctggcgtcgggctggtccggtgctagattgatcccgcattcgagctgcggtaagcgtctggtgagttgcttctcccgagggaaaggaaaacaaagttgctttggcgactttgggatcaaggttcggcgaaaagaaagagaaaggagggatctttttgggag

SEQ ID NO: 363870 - DNA, 300 bp, Zea mays
gtccggatttgccgttccggtttcgacccacgcgttcttcttttcgttcgaccacgtgtacccgcgggggcggctagcatttccacgggtcggggggactcggacacggaactgttcacggcacgccttaaaaccctagctcttgcgccccctactctccaccgcgccagctagccgtggaggcgcgactctaatgatgccgtggaccaccgtggtggagagccccagctggccgccgatccgagccctcaccaccgacatccttggccttgataaagtctgctaggcccactcgagggc

SEQ ID NO: 363871 - DNA, 459 bp, Zea mays
ccctttcgttcgctcgccgatcctcccccgatgtggacgatttctggacgcccaggacgccttccaccgccgtccggcgagggtttttgggagcccggccccgcggtggacacggcccctcggcggaggtgtcgcagcctccgggagcccctacgggtcgccgaacgggttgcgggcgcgcggcctgttccggcggcagctgtcgcgcgcgatgacgcgtcatcgcagcgggccgtcgtcgttcaaggaccccgccgaggagttcaccttcgcacagctggaggtggccaccaaagggttcgcgctggaggcgaagatcggggagggcagcttctgcaccgtgtaccgaggcaagctccccgactggcgcgaggtggacatcaagcgcggggagtcatgcccccgcgcgcgcccgttccaggagaaggagagcgcgttcccggcggagctggtgtttct

SEQ ID NO: 363872 - DNA, 434 bp, Zea mays
gtttttgtttttgctctgtcggcccataacacgcacgcctgggttgatttatagaccggctgcgtatcgaaaagctcacgatctgagaccaagaaactttggtcttgatatgaacatcagatggaattcaacctaccatatgcttaagagtttagacggttatgaacaattaattactgtctttgtgaatgccaatggaggtaaagtttctaaaatactttgaacaaatatcacatgtatactgttttgcaactatttttgatccacgcaagaaactggatggtttgcaaattgcattggagggaattggtgatgcatttgacatggatttttcacatgcttttaattatgccaaagaagacttggttcgcgtctttggtactattaccaaaaatatggtgaaagtgagatagactcacctgctgttgagtttg

SEQ ID NO: 363873 - DNA, 251 bp, Zea mays
cgacttacgcgtccgcccatgtgttctcccacgcgtccggatggctactgggcccggtttaaccaagtcctggttgggttaaggttccttaggggtctgtggaagggccacagccggcagctgatgtggaataccgttgtttcatgggcggcttgcctggggcaccagaaactagtttctggagaatgcccttcgcttctacggggagaacctcgactccaaagggatcaccgacccgtagacagggaggt

SEQ ID NO: 363874 - DNA, 282 bp, Zea mays
tgtcttcgcgtccggcgaatgattcaccgtgggctggccggtatggctctcatgacgggttcatccatcattttcttggaatggatccattccgcagaatcgtctagctgttggctcgcgggagcactgtgctgctgtgcataatgccatgagtccagctcgtgctgtataccaaacagctaagggaggttcatttactggatccgaggatcccatatagtcatcacgtgaaccaaatgcgctataaaggaacccatagaacaactgctgatacggttttac

SEQ ID NO: 363875 - DNA, 436 bp, Zea mays
  unsure (1)..(436): unsure at all n locations
gctgtttttgatgtccttgaaacctgaggcagcgagtgggtttttttgattgcttgagcgagcgagcgaatttgacccaccagttctggcaaggtatgcttttttgggctggctcgggaactaaactcgcccttaggctatctacaacagctctcctatcattctgtgtatttcaaactccactgtccaaacagtgacatctacagtgaaaacagtgttttggacgaccttatacataatatgttggatacagtcttagatataagttgtgcctaataggcaaaagtccgcttactgtcacacttttgttaaactgtctggcaatcgcgatgcacagaggcataataatacataaataccacacccatgttaacgaatctccagtttgnaccaatatagacgtgtcaaaaccttactacctgccaatgctatacat

SEQ ID NO: 363876 - DNA, 250 bp, Zea mays
aattataatatcgaacaaaaaaacaaaaacaaagaggaagagttaattaaaaaaggggtcgggaaaaccaaaacttactaaatactgggggcgccactttaggggttccaagctttcacctgcccatatctaccctgctgattttttaaaacggccccccaaactaaacccattggttcgctttctacaaacctttgcctgcaaaacccctgccactccccaacttaagagcttgcaggacctcacccat

SEQ ID NO: 363877 - DNA, 455 bp, Zea mays
tccttcgcgtccgcaaaattgatgactgaggtaattgtaccattatctgcaaccttggcaacagaggaagtttttgaatccttcgaaagtgactctaagtttatggcgctcttacatgaccattcatacactgtttatggtatgggctatactgcaacactaaacgctatggattgatatcaggatcctattcaaaccttgatgccgaccacatgaaactcaaggagggtgcagggccacaccacacttatggactacttcagtttgtgtgtcaaatctgttttccacaaagaaattatttaaacaaaaggatcgcatagagaaggatgggacagtgatgagactttcaggtggtgggcataactgctttcaagatagtgatgaggcaagattaacattcaaacggaagttctggaagaaggctattgagatagatgatctatgtggaaatgatg

SEQ ID NO: 363878 - DNA, 375 bp, Zea mays
ttcctattcgtgcgtgtgcacctacttcagacgtgggtgaagatcatcaactgcggcggcaagacagagtgcaagttatttcccaggcacaagatgaagccaacccacctaattttgaacaaatacctaataaccagccccctaaaaatgtggtccctaaaaggtgcaagaatttcacagttagcgaagatgaatgcctagtctcagcatacctaaacataagcaaggaccccatcatagggaccaaccagccaataaaaggttactggcaaaggataactgagtactttcacgagcataagagcactccttatgatagatcacagtcttttttgcaacaaagatggggagacattcagaaagaaacttttaggt

SEQ ID NO: 363879 - DNA, 407 bp, Zea mays
tctaatcgccgagtcagaaatttgcacacatttttgagttatatgtatttattttaggtcatttggactttggttgtgaacttaatgctccaagttattttgaccgcagtgggtcctttctccaaagtacttaaaattttcattccctatcacgcctagaggccctatgggtctgcaaatgtgattttctccataaacatcaataaggttgtagctttaagtaatggatgggtggttcttgcatgtactcttccatctgctttgtcggaatgaagcttcagttgaatttgttatagtcgttcactggtgcaaactgttattgctttgttatgtgtcatttgtttgtaggtctggaagatgagtaggcggaacgtggttgcaatagatcctattcaagtgtactatgt

SEQ ID NO: 363880 - DNA, 458 bp, Zea mays
  unsure (1)..(458): unsure at all n locations
cgttctcttgggcccaccgggcccgtccctgacggggtgtcttcgacaagcagcgcgcccttttgcccgtgccaccagtcggtccccggggatccgcccgcctgagccaaggctatgacaggggaggacaggcgccgccgtgaagcggatctgcaggccggggacgacgaggacgacgacggtgagcccgtggtgccgccgcacgagatggccgtgcggctcgctgcggcggcggtgtcggtcatggaaggcgccggacgcacactcaagggacgcgaccttcggcgcgtgcgcaacgccgtgtggtgcaccaccggcttcctcgacctgtgaaaaggacgttccttgcctttggaggttttgtttcgttcgttcgctggccacgtcgctccattccacttgagctggctgnctcgtacggggaccttggtcgctgggcagtttcttcttgcgtagtg

SEQ ID NO: 363881 - DNA, 385 bp, Zea mays
tccttcttgtacgaactcccgtgctccatgcacagggatggtgtagtccatcgagcggaccaaccagtacggctacatcgggctggcggtggtggactatgtcttacttaacctttgggtgggcttgcacggcgagacggcccgtagaaactacatggcgttataccccaccatgtccaccatacatttggagaacaaggacgctaagctgttcatctgagtgcagagggggaaccagaactctatagagcgtatgtgcgatctctgacgaatactgctgctgggaggggtgcagcacctgaccatggccggcgggctgggaggaatatacatacttgagagggtcttgtacttcaagggatacgcctcgggggttccgtacaac

SEQ ID NO: 363882 - DNA, 377 bp, Zea mays
cgctccctgctgctctgctcctgccgcgtggctgtcgtgccgccgctgatccctctctcccccctcaaagccccaattgccgggtgctcctcttccacccccattgccgactgcttcccgccagagagtggggaagggaaggggggggaagggagatggcttcttggatagggagtgggtgagaatcacacgatgcagttacctccacctggctctcttatactcttgcgggcatatacttcacctacgcctgccttgatgcttctttcttcggcccggcttagcttgcagtctctccaacagaactggcctatgagcatctatcaatccggccactctctggtaaggcaaccagccacgccacggtaccccttttt

SEQ ID NO: 363883 - DNA, 244 bp, Zea mays
tcctttattcacgaactcccggtctccgtccacacccatggcggagtctatcgagctgaccaaggagtacggctacaacctgctggcgctgggggcctatgtctatctcaacctttggatgggcttacatgccggtacggaccgaataaactacaaggcgttgtacccgaccatgtacaccatacagtcggagaacaaggacgccaagctcttcaactgcgtgcacagggggcaccagaactct

SEQ ID NO: 363884 - DNA, 366 bp, Zea mays
ccttcgtgtaccttctggtgctgactaatttccggagtggactaaaatacgtacagagcgtagtacaaccgttcctgaagactctgcagcagcttgctaaacaaatatgacaactcttcaactacatcacgttaaaactctcaattgactggttgaaaatgctaacccacctctcgatcatactatgagaacaatctttgaccaaaaaactcaacctccatgcctgtaatgaccttacatttatgacccgctacatacaaatcctaactgctctcaggaatcataaatcagcggcaaccctaacttgcttacactttgcagggaatgagtgagggaggaacgacaccttgcaagacaatatttaac

SEQ ID NO: 363885 - DNA, 394 bp, Zea mays
ggctttcctttttttttttttttttttttttttgggttcgtttttttttttatttgggttttttgtttttttttcggggggggacatgttattttaagaaatcacactgccaaactaccccgggggcgtatgggggattataatttaaaccaaaccccggtcgaaaaacataccggggacccagaggccatggccattcattggcactttacacaccaacgaccttttttaccacagctccgatctataaataaaaacacttccctaccaactgcagcttattctaggtggacacggtagctccggtcgttcaccgtcagttcgctgaagattaattggcccacgaagggcaccgcacctctttattttggggaggctgcttttcttgatgcgg

SEQ ID NO: 363886 - DNA, 332 bp, Zea mays
ttttctcatggacggacccgtgggcggacgcgggggtgctgaaaccctagtcgcggtcgatgaccgaccctttctacccgtactaccgcagagccttcccgggaggcgacggtgcgcagtcgtcgccacgatactgggattttgaggtcgatctcatcgaggtccgatacgacggcaccctattgccttatacatgctgtgacgacataggagccttcgacttgtatgacggagcgagacgatccgcggaagatctatatcaccaatcttttatgggaaaggataatacttgtggacacaatgagggtttatattcatagaatactatggct

SEQ ID NO: 363887 - DNA, 108 bp, Zea mays
aatctaaatgcagtgtcctgtgacgggttggggcgggtgtatagaccatctacgcggcatataccgcctaactctaagcgtgttgcattcgatcctacacctgggatg

SEQ ID NO: 363888 - DNA, 313 bp, Zea mays
gggacgaaccacgccgcccatttgtccggtatctgatggtttcatcctgacgcgtggctattgtgccaccatggggccgtttttgcataataaaaagagaattgaatacgatgctagtcctaggatggatccacatgtgtataaaccagaagataagtatgttaagttgacaatagacaagtatattcctcacgcaaagaaaatgagggttgccgcaaaagaagcctcgacaattccatggaagatgtcggaggcagacggtcaaatgattactagatatgctaactgatgctatgaagcaacttcaagaccc

SEQ ID NO: 363889 - DNA, 231 bp, Zea mays
tcctttcgtgcgtcgatcgggttctgatagacacagggctattgctgatccacgaggatgctgctgcatactagcacgagcgtcgaatatgatgttactcctcggaccgttctacatgcgtgtcaaccagaccgtatcgatgacatggggacaggagacaaactgcttgctcaagcacagaaagcgctggttgccgtacatgaagcctacacaatggcatctaattacggc

SEQ ID NO: 363890 - DNA, 293 bp, Zea mays
ttgttttcgtacggaggctcgcggccagaccctagggggactttattcctcccatggctggaccgattcacgatctggccactgactgggggaacggccatcgatcgagagctaatgggacgctagatctcctcaatgcacacagagctagacacatccccttaaccgttgactttgtcaacgcgacctcgatatgaaaaccggtgctggtcctatcggagtccggccttgcccgtgcgaagctcaaagcgaacactttgctcgcctacctaaggcagtaggcccacgggggt

SEQ ID NO: 363891 - DNA, 298 bp, Zea mays
gtttctttgaatctaaaagcagatacaccggcgggggggttttacaaaaccatgacgatattggtataacagtcaatgcattcaacacaacgggcaggcgctttagatgatctaaggtagcaaaccactgcatgctacgtaatatcacagttatagtgcaacataatgaaagtgaactggcggcagatttacagcggctagactggcataaccctgaattaacgcatcttaaacgcgttgttggaaatatcatttttgacagtgggcgaaatatcgaagaggaccaaaccacatacgc

SEQ ID NO: 363892 - DNA, 140 bp, Zea mays
acgcgtcctttttcgtttccgcccaacgagaagatttagcagtcactgagagtccgtgaaagagagaggatggttgccacccacagggctgccctcctggtggccctggccgtactgtccctttgcctagcccgggaaat

SEQ ID NO: 363893 - DNA, 367 bp, Zea mays
gaaacgactccttcagttccgtcccgttcgtgacgacccccggtcccgggagggggagggggagggtgagggataggcgaggacatggtctactttactgattgctgccagacagacacctgagattctgatggttactttttatgcccatgacaacaatatattttatgagtacctacttgcttacctgatgtgacgggaggactatcgtctagaactccgtcgagctactgtgtcccccaaaagatgggcttttcaccacacattgcagactatcgttcgttcggaatatggtcttatcgagacttgaaatagacaaggccctaccaagagtggatgatgcttgactcattactatagctaccct

SEQ ID NO: 363894 - DNA, 298 bp, Zea mays
cccgccgggcccccgccgcaaattccgggggtccccccacgcctccgttttctggaaaaaatggggggcgcaaatggaatgcctaaaagcccctacagagcctggtatcctttaacctggaacgcagggttaactcaaaacgacaatttcaagctgccgtttcagcaggcgctggtataaggggtcttccatgacaaccgcatgagcaggaaacgttggagcccatttgaactgcctcaaaagcgaatgaaaagctgacgaagatcgccatgaggatgcagcacgtattacacagaga

SEQ ID NO: 363895 - DNA, 112 bp, Zea mays
gttagttctaacatacaccagagcatactgattgggcggatgtgacgcctgcagttgtaacgctatgcaacagacctgacgtcttggttgactgagatgcaacagatgcaga

SEQ ID NO: 363896 - DNA, 165 bp, Zea mays
ggccggtaccggtatttcctggtcgacccaagacacccgttttttttttaaacaaacctgggcgtatacggagtggggtttctacctccataacgctggttgttttcacaacttagaccccggttttaggttaacctctagctctattgttaacaagattccagc

SEQ ID NO: 363897 - DNA, 233 bp, Zea mays
gttactttttacaaaacggtggccatcacgcaagcgctaatacgtcccaagagctagtgccgtctcaccactagatcccatgtcttcctcgaacccgcaggacccatgttcagccagtaacagcgcggagtagctggagcttttatcccaagcctttgcctatgcccaatacccggacatctggatatcttaacccgattatggtatttatatgacggcaccagcagggactt

SEQ ID NO: 363898 - DNA, 144 bp, Zea mays
gtttctttttctggcgcggtagacgccacggacgcgctcttatgtgacagatggaggcggtgtgtggagacggccaacggggccccttggagtgctcataccctatcgctgaggagcttgtgtgcgtgactacatggggggacc

SEQ ID NO: 363899 - DNA, 321 bp, Zea mays
cttgctcgtagcgttgttcggcccatccagggaacagttcgagggggtctatggagacggctcaaaaagctagcctcccctgctcgcctgacacaacatggagagagctcacgaacacgagctggtgagtgagtgtgtgtgacactgtacctgtatgtccaagagctgcgtgaggtcggcttaattgttatgaatgtgtgggttgcacgagggacaactactacagggggatggagatggtgtccctgatcgaggcgtggtacctgttggagctggcgcggtggtaggagctcacacccaagggatgaaaccaggagagga

SEQ ID NO: 363900 - DNA, 214 bp, Zea mays
  unsure (1)..(214): unsure at all n locations
cttacttttgacaaaaaccagactattcggattgtgcgtatgggatgcttgctgttgcagggtacaaaccgagaatcaactagctaggtgcatgcattgctggctcactcgctcagttatatgcaccgctatcggatgctgntaagatgaccacgtgccctgctttctggactctgataccaggtgacagcagcaacagcagctagctataagt

SEQ ID NO: 363901 - DNA, 461 bp, Zea mays
actccttttgcccgtctcgtcgtctcctctcctcacctgccctccacccccacttgctattgtgaccctcctcccgttcctttctttaatccatcatccgcctcgctatccctccctccctccctccctgcccgccgtggagggtttgggattttgcggacctcagcagctccatatctcagtcacacactcacgcgcgcgcgggggccgggggccgatggacccgccgttctccttctcctccccccctcgttcctctcgtctcaccactactaccctacacgcgccgtggctaggattccgccgaggagacgctgcgcgcgtggatctccggtgctgtcctgctagcgtgcgacgaggccaggcaggcgcgcggccggcgccatgagcttcgggagcctattcgacggcgggtcctgcggtggcggaggaggaggagggatgcaattcccgttacgacc

SEQ ID NO: 363902 - DNA, 440 bp, Zea mays
ccgaatggatgcgattttgctgataagctacaatcttggtgtaaatcacaagttgcagtaaaggtttgctttctttactcattgttatcgtaatgagctatcaatgctactgaagttttacatcttgttggcagcaaaaatctcattttttatcataataacacaactgcagagcgtgcacactaaatagaggtatttgcactttgcagtattgcacataatctgcttagcacaaattttattagccataaaaaacattaaactttcttgacttgtgagtgcttggatatttgcactgggtgttcagtttacatttgttgtagtttgcttcaaattgttatcactgtcattggtcaattgttgcatggcctcattatgaaatgtttcaagttgtacataatgatattccaccagaaagcatggatgccatgcgctgggag

SEQ ID NO: 363903 - DNA, 408 bp, Zea mays
cgtgatgttgaatctaaggttaggttcccgtgtgttgactgactttggagcacatgttctatgtacttcaaatgataatggtagttgtagcacttcttggcttaggaatctatccgccacttctgattcatggcgttgcagctcaaagaacaccagagaaatacatatcaatgacttcgacagtttccattatcatgcacaatccaatgcagtacctgcatcaatattgcatttagctggctcggcatatttgctgagagctacctgttgggagcactatgggagtgctccaatggcacgaatctgttctggattatgcaacctgctctgcggatgctgcacgctcatcagagctatcactagcgtatgttaagctaattaaacactgggggcgtctaaaggatattc

SEQ ID NO: 363904 - DNA, 295 bp, Zea mays
ttgtgtcaacccccaaggacgagcgcgcaatgatgggatgtcattcaatgagcatcaggctaataactgcgcctacaacaagggtcaaggtagtaatgatgtgtctaccatcaaagttgtttgtcactaacgccaatatgtgtgtctctgtgaccatagcttatcaacagatatatgtggtgctgctcatgaattagaatctataggatggctaaacaggttgctcatagaggatagagaaacgaaccacatggcttattgtatcttgtgagggggtgaactgtaactcaaatgg

SEQ ID NO: 363905 - DNA, 428 bp, Zea mays
caattgttgacgaacagtgggatatccccttaccaatggccttccaccccgccacgctgttcctcctccttgtcctcgccgccgtcgcgccgatcccctccaacgcgcgccacatcattactttcgccccctcacgcgcggtcaatcccgcgtccctcgcttgggaccctacggcgcagcactttgtcgtcgccggcggcggcgatgccgtcctttccgtctcagacgctggggtaaccgaatcgatcgtctcctctggcgcctcttgcgtcgccgtcgacgaccggcgacgccgcctcctcgtcgcttccccgggatccgtctccgcgttcgatctccgctccccgcgcccgcaccgtctcatcctctcgacgcctggtgcggaccccgcccctccgggcggcatcgctgtggacccgcacaccggg

SEQ ID NO: 363906 - DNA, 380 bp, Zea mays
  unsure (1)..(380): unsure at all n locations
cgcccccggttttttgcgctctccacaggaccctgctcacangcgggccgctttttatagccggtggggcggcattactcttgcatatgctaagagctcaccctgagaagacaccgatctgctcctccgggacctacagtaaccatggagtacacccatccaagggcacactagcggtagcgatgtctttgtttctcatggaaggagtgaaagaacccgcatacatgcatttgaggattccacagatgggagtagagttattgtcacagccattgattgtacaggctcagaacctgattaagacaatgcctatgcggccatattatacagggtagattaatgcaggctctgtcttcttaaattatgtggggcatttatat

SEQ ID NO: 363907 - DNA, 245 bp, Zea mays
ggaggtcatttgtaatgaatctaccagggcttttcggggcctttttataaaaaaaccgggcgggttccaacccctacgctaagcatagccctaagatgcactggcacctgaacaaacagggtatacttctgttcacacccaccaaggagggaaccgtggacgctgcaccttgcccggagaaccggctcaaaaagcggaagttccaacaaagagaggctaaaacctggcaatgctaacaaccgacg

SEQ ID NO: 363908 - DNA, 371 bp, Zea mays
  unsure (1)..(371): unsure at all n locations
tcttctcgtccgggcgacgtccccactccccacgccaaccgccctggcccagatcgacgctgctcctccagtgccccacgccacctcccccgctcccgcgtaccgtcgcctgcgctgaaccctcttcattccgtgccgcggngtatccgccccactgtaccagtgtacctctagtgttaatgctggtggtgtggcgcacgcgcgcgcaagagggtgtgtgtaaatagtctaggggcagagcatgagggcgggttcgaagaggcgggccaccggggctcaaaaccctagcctcgagtccgacgaggaggaggcgcggcaggtcaagggggagcttgctgacgaccttaacggataccctgcggaggaggatg

SEQ ID NO: 363909 - DNA, 434 bp, Zea mays
cccacgtgatcgcccacgcgtccgcccacgcgtccgggaggaatgagcggaagtgaactttacgcgaactgttgttcttgggcccaagaatctatcgactgactgaaacttgagaggttccctgagcagagcaaccatgggccatgcatgacgacgagatcgagatgtggcctcggtcctgccgacgatggatggaccggtaggcggtagccgaagctgaccctgtgagattctcatctcactcggagggtcagcagctttgcagccgcatctgcatggattacacatgagcagcgagcaggccggcgccggtggaacggctttgttcaggggtcgccgtcggcagatcggtcacatgcttttggtgcaccaaaagcagccgcttatgccagccggcccggccagaagcatatccttgcctgggatgatctatt

SEQ ID NO: 363910 - DNA, 409 bp, Zea mays
tccattgcgtccgcgccagcttcatggtgaacgacggggccattatggacttccgcagccggtagagcaagggggtggcgttccccaagagccagtcgatgcggctctactctagcctgaggaacgcggactactgggatacccaaggccggccgcgtaaagactgactggtccaacgccctcttctgcgactactaccgcgggttcaaggacgacgcttgcgtcgtcgacacgggcggacgcacccgctgcggcgccaccgtgggcaccgagggcaccggagccaccgactccgtcgtcgtgctggggactgggacaaccaggagcatgaccttaccgtgaagcagcggatgcgctgagtgcagcgcaagtacatgatctacatctactggaactgaccccaagcgct

SEQ ID NO: 363911 - DNA, 446 bp, Zea mays
atgtttatcgcttcactgagccctgtgctgtatggctttggcttggacactactgacgctttcagcactgatgaccatactactcaaaaaatcgaagggatgctccagctccaccacgaggcgcttgggatgcctcctagctctgccctgagcagacctccattcgaagctgtcgcggacagtacgcacgccaccgcctcctccccccggtcctacgagctccacggcgatggcggcggcggcagcatctctttcccgcaggaggacggcggcggctacatggcgcaaacagtaggtgggccaaggccagagctgttcaaccaagcggtgttcagtaaccacatgtgctctttccagtagggcgagggtgatgagaagacgacaggtaatgcagcaaacaaacttgcaggacggaggagatgatgctggctgggaggatatatgat

SEQ ID NO: 363912 - DNA, 270 bp, Zea mays
gcggttgtttagtgacgacgacgactcttctgtctctgggttgattaatggacagtaacagatgcatggcgacgagcggggtggctccattcgtggccaagacgtaccgtatggtggacgacccggcgaccgaccgcgtggtctggtgggggatgggacaacaacagcttcgttgtggccgacccctacgacttatcgcagacgctcctgcccgagcacttcaagcactacaacttcttcagctttgtgcgccagatcaacacctacggt

SEQ ID NO: 363913 - DNA, 336 bp, Zea mays
cccatttgtccgtccttgaacctgtcgccagggatgttgctagggagcttccatacgaggggggctacaacgagaggtagccgcaatagcggccgttatcatgcctgtccgtacccaagcgcgaacccaagtcccagactagatgcggaccacggaggggatcactgatcagagcgtcgctaggtggctcgctaaggagccggctttggagaggcccgggaccttgtcttggaccggctttatcagtcaggtcaacgagcaagcgccggagtgggtgccgagacgggcgccgacacctgtacctgcggctgtgctgccggctacaccgaaggtgat

SEQ ID NO: 363914 - DNA, 392 bp, Zea mays
accggcgcggaatctcgccgggtcgcatctacgcgccgattatgtatgccggtgaccacatatacggacacattgggcgctgcatgaaagacctcgggtggatgactatgttggggactacactgctagaacaagagctagagctagtcttagaattaaagcctacaggaaaggaggcttccacaggttacaaggcatcgtgaattagttgacgacaaaatccatcatcttggatggactcttaagctggatgatatgtaagaagaccacaaggagaaactgttcgctgaacatgacaatctacttaaacagagagggcatcttagtggtcatcatcaagaagctcagagggaacatcatcagaagcgtcataaggtgtggggacaggtcat

SEQ ID NO: 363915 - DNA, 343 bp, Zea mays
atctcttggccttccatgcttactctaacccgtctgggcggtttattgcatgaagcgctggaacaggcgagtgttcgttctcaaggacgaggagtaggtggctgccgtgcgtctagccgacgaggactgaccgtctctgcacatgacgctatcggtgatccatcaccggatcaggtagcacgggttcgtgcaggattccatggagacgaacggcagaactttgctacggacatcagattctatgaaccgcaaatggagagtgaaggacctgcttagcactttgggggacaggctgatggtagtggccatgctgagggaacttctggaatgcaaggtcacatgc

SEQ ID NO: 363916 - DNA, 303 bp, Zea mays
ctattctcataagagaggacgcggacgcatatgacttctgtgccttcatggaaccctgagtggcactgggccgttcacccaccaggctgctcacccacgatcgcatgcgcaaccatggccagcaaatggcatcgtctactattggaggaggacacaggcagaagcaacagcagcagcagctcgccagcgcggggtggtcttgggccggcgccaacgaatataggtgcgcgacgactgcgagaccgagccaacatcatgaccatcaacaacaacagcagcaacagcaggagttgaggctgcaca

SEQ ID NO: 363917 - DNA, 441 bp, Zea mays
ttcactcgtgcgatcgaagatgcgtaccaagaagctggtgcattgaaacggctagaggagcttattcatgaggaggagcaggaggctcatcttcttgaacatcagatgaaggggaagcctggtggaggtgtcaatgaaaaggacaagcgtcccacgaaacagcagaccaagcaaaagaagaaccacaaggctagagacaaggaaagagatgagaaatgccaggataaaattcttgaaaggccttccgatgaaactgccattgataatccagatgactcaccatgtgatgtggaagtgatagcacagattgatgccttggcagaaggctcttgaaatgggacagacatgtcaaatcgaggtaacaaggactgtagcaagggcttcagcgccattagctgtgccggtgacggttacagacttacctccacctctaatgtcact

SEQ ID NO: 363918 - DNA, 289 bp, Zea mays
tttcacgcgttcgaccacgcgtccggccgaccgtcgtggcggccgaggaagcgcccgtggtggagaccccgccgacggccgtagtgcccgaggagtctgcccccgccgaggccgaggctgatgctgaagctgaggctgctgctcctgctgctcccgaggagcttccggcggccgagcagcaggcagcctgcgagccggaggccgctgctcctgctggtgcctaggagcccgccgcggccgaaccggccgacgaggcggaggctgctgctgctgctggtcccgaggagac

SEQ ID NO: 363919 - DNA, 281 bp, Zea mays
gcgtccgccttttgtttacccggacgcagagggcggacgcgaggggggggaatttaaaaacggtatgggttgattttcccccataaaggagataccaggggagcaaaacaagacacaggggggatcgaggagaatgtatatgttgagtaaaatacaaggacgaaagaagaactgactgaccacattgacatgatggctgtccaacagaaaagtgaagtgagggatgaggagactaaacaaaaaagcgccacgggcaatgaaaaggtactagaagaaaatga

SEQ ID NO: 363920 - DNA, 429 bp, Zea mays
ccgtagtcagctcgagcccaaaggagagaacccaggttggcggcgccgcgctcgtcggcgcctccttcgccgccgcctccgcctactacatgcatggcaagaccctcgaccagcttctccgtttcgcccgcgaccagcagcgcctgcgcaaccgcctgctccccgaaggcgacgaactggaggacggcgaagaggaccctccgccgcactgggatcatgatcgccgcaccctgcccatgccgccgggcctgccgccgtgcacaccggccgagagggtaggccagttgtttctccaggttcgactaaaagagttggacctattgttagaccgactacacccaaatcctctgtccccactatcagtgcatttgatagaattgaagattcagatgacgaggaggatcttgtcccagatgccaagaatgatac

SEQ ID NO: 363921 - DNA, 146 bp, Zea mays
ttctctcgttactaaacacgtggacggaccccaggggggtgtttggacttgcaatgctgtcatggttcgagactctagctaaataggggcggggaggcacccccaactcgtataccaggcagcactacgctggcagaaaaccccag

SEQ ID NO: 363922 - DNA, 261 bp, Zea mays
gcttcttgatcagtccagaagctgtgccctgaacagagattctggatggctctttgagccagctaggaacaatgtaaaatggatgtaagcgactgtgcgcactccctatccatgtgcaactaattaaaaattttaaactgttatagattgctgcatggatagctctcagatatttaaaggaacacaacgtgtcagtagacaatttatttgtttttccagagctggcagtgtctgactggagctacgccatagagcctgggg

SEQ ID NO: 363923 - DNA, 369 bp, Zea mays
gaggatactctggaaaccatctgtcgctatacagaccaagaacaataaactagcaaatgttgcgagcttgtttcagaagctccatacaacttaacgagaacaaggatgaggatgcacctccggttgaccatattgatttcttgtgtgagacagagagcccagaccaccgttacgtgtttgagatactgctggcctcccgtctcctgatgaaagacctaggttgaggacagacaggtgtacagctacactcctctgagtacccaaacaaccctgactagttccaccagatggatgcaaagaaggctggatgggtcagtacacctgatggcatccatgagagcagatgcggtacacaatctgagcccagga

SEQ ID NO: 363924 - DNA, 150 bp, Zea mays
ccgttattttcggatccagctcataaaacacatgggatgtgcagtacattggagactgacggactttttcttcctaaggcaccatgacattgagcgaacttaacaccggatgcacttgctgtgagggcaattggtgcaacaagtacacac

SEQ ID NO: 363925 - DNA, 194 bp, Zea mays
gcccgggcggtgccaacgtcactccagtgagccgagggcgcagacggtcacggtgggctgagtgtcacggcagacgcctttccgcctcgctccggtccagattgcgcgcacccacccatggcgctcgtcgattaccaccacggactgctgcccttcgagccaggtgtcacgcctaccccgtcacgggggcacct

SEQ ID NO: 363926 - DNA, 138 bp, Zea mays
cccttttcactctgcggcccggtcggtccccattccgatccatcgtacgggcagcgcccagtccggttcactcatggagtctctagtggctgcgctccccgcgggcggcgctgcggcggaggcggccttcggtgggct

SEQ ID NO: 363927 - DNA, 349 bp, Zea mays
ggatcctaccgaactgctttataagctgtgagaatggcgtccatggaagacaggaatggggtccaggtaaccacctgcccatcatcgcaaaagatgtgctaactagctcataatatggatggggtgttcggttggaatgatatcgacatgctccactcaggatggttgccatcaaatgaatgctccgcaaagtcagaccacttacgtggagctacagagagagggccggggatctcaaaaggaggtatttgcttaggctttactggtaccttgctgaccattaagactattaccagaatagcccccctcgtaggcgttagagggggaaattatgtggctgaccaaaatg

SEQ ID NO: 363928 - DNA, 335 bp, Zea mays
cgcgccgcggacggaactggccggaccgacccacgcggccttattatgttcgggcacctgtgcgaatagcagggcgctagaggtttaaatgctaggacggctggaactgcaccctcatttgatgcaagatcatctgcggaagctaagacaacctcaagctctacagacggagcaaccacgctagagtgcgccccaccagctaagaaacacagtacatcaaccctcaagagtgcaggctggaacattgccgggagcgggcagatgatcatcatagagctcctagcatgactaggtctctccaagtaccagaggagacggtgaaatatgaccataca

SEQ ID NO: 363929 - DNA, 168 bp, Zea mays
ttcattttgttttgccttcaaagaaccatgctgacgcgatcattggtggagggggtgattaccgccgagaccacgatctgattcgcaaacacatcacatacaaaacttgcctagcacgacttgtgcatcacttatctgaaatggaaatgtgcccttgcgccatatgta

SEQ ID NO: 363930 - DNA, 316 bp, Zea mays
atctcgtacgcgtgggcggacgcgtgggaaaaaaaaaaaagaaaaagaaaaagaaaaaaaaaaaaaatatgaaagagaaaaaaactatagtacaattaagaaggtgtttagtcattggtttactttagatttgaaaaacgcatcggggggggcggttttgggggatccaattttcctgtcgctgtgttgccaagttttcgtttttttttgggggcccctaatttaaattaattggccgtttttttccaacgtgtggacgggtaaacctttggggttccccattttaatggttttgcgccaaatcccctttttgcct

SEQ ID NO: 363931 - DNA, 166 bp, Zea mays
  unsure (1)..(166): unsure at all n locations
aacagcaggaaanacaaaanaacagacagagggacaagacacnaancagcagacggcnnaggaacagagcagcaacagccaacagngcccgaacacaggcgggagacacagacagaacagaaccagaacagaaccacagagacgggggagagggagcagggggaac

SEQ ID NO: 363932 - DNA, 260 bp, Zea mays
  unsure (1)..(260): unsure at all n locations
caccaggaaacaaaggaaccgaaggccaccgcgccaaccgcccaaacaccgaaccaaacccgaccggccgcggcaccaccaaagnccaaagaacacaacgcgcgccaaaacccgagccaaaccccacgccgccggcgaccgccgccacgagccgcaacaacggccgcgcagcggacgcgggcacccaccgcgaccgacgcaacgagggggcaaacggaggcggaacgagggcgaacacggagccaagcaaggcggacgct

SEQ ID NO: 363933 - DNA, 298 bp, Zea mays
gatccggcgcccgctggatgcgtacctgctctgccaggaggcgatcctgccgcagatggccgaggagcgcctgactgctgaccctgggccactacccccatcaacaagaggctggtggacaagttcggggaccgtgcacgtaaggtcctagacttgtgcaacgcggcacgcgactgagtataccaaacacgccgataggagctcacttcgggcatagcggcgagcgatctgctggagaccgacgactgccagatccacgaggggcagctccttagagcgcggaaggcgctctcggacc

SEQ ID NO: 363934 - DNA, 419 bp, Zea mays
  unsure (1)..(419): unsure at all n locations
nttgattttgatcgaattctcattggctcatctttcagataccaaagtagccttggtcacaacaataagagggtcgggctttttgatatgggtgatggaagtagtgagcctgctgctgaggacaacaatcaaatgcatcaggttcttctacatgccaccattcaatggcagatgttcaatgtactatccactagagcattggtgagatgaccatcgagggtgacgatgtacatgaattcttcatttttctctttacatattattgaattatatacttgagtcttgacactgagaatgcatcagttacatgtttgctgtaggaatccacaaactgagtcttttcttcggcttctggaactcccatatttgtcggacttatctaaatctgaggatatgtttcttgtgattggaaacacact

SEQ ID NO: 363935 - DNA, 491 bp, Zea mays
tttattcatcttggtcgcttgccaaagggccaacaagctaccaccttacttgatttaatgattataaatatattgctgacaaaagagtatttccatcacttgccattcctcaaatataaatatattgcatctattatatggctcttctgacaaaagaagtttgaaaacagagaggaaggataaggacgcaaagaaaagaagtaaaaagagaaggcacaaaagttcatcagagtcaagttccagctcatcttcagaatcttcaagcagcgacgatgagagttcaaggaagtccagatcacggtcgagatcaaagagaacaaggaaggaaaagaagagccggtcaaagtccaagcgcagaggcagtgaaagcgaggaggaaggcccggtacgcctctctaaattcttcgggatgtaaggagtagacgctactctagttggaaatcgcttgattagcagcctcgttaccgcatagagcacccattgatctcttt

SEQ ID NO: 363936 - DNA, 232 bp, Zea mays
ttcacgcgtacgcggacacatgtgcgggcgcgcggttataagcagaaacgtctgcatgcctgtctgcgctctattgcaaacaggcaaattcgtagtcttgcggacagggacatgtactaatgcataatggtacgagtcacgtgcctgccggagtcatagcgacgggattacccaaaggtatacgatgatgcatgtgcacaggatgctgcaaatgccatcgggacagaaacct

SEQ ID NO: 363937 - DNA, 362 bp, Zea mays
ttcttttgcgcgcattcgcaccaccgtgccccgtccctcccgatagcgtcgctgcctgcctgtctgcctgcctacgctcgcaactgcaaccacaggaaggcgcgcggggcgggagagggacaaaccgagaaaggcacggcacacgatgactgcctaggccctgggcacgcgctcgcgccctggtgactggtgaacactgaggactggaggcggtgggcgcggtgggttcagccaccgcgcggatcactgcagggcgcggcgcgggcgaatgccggccgattcaacggtgggcggatcggtctgttaccctggcgctgctggcgccccccctaggcggtgactgcgaggcccgatcctgaggc

SEQ ID NO: 363938 - DNA, 435 bp, Zea mays
actctcaccgttctgggatctggtgctaaccccgaccaccacagcgtcctctactgacgtgccacacgtctgtattgctccagttcgcaggtttcttcctcgcccagttcatgccgtcgttactgctcctcggcgttcctgctcggcctccggtggctgttcctcgccacatggcgcagctcttgcctccctccccaacaccagccatgccgtctgctcttcctcgccatgcagcaagcccagctttcaaccctagcgccggtagctacccctccttgttccagtcctcagttcatctctcgccatcttttagtcgcggagtcattgtcggtcgacccctccttaccaagccgtgtgccatcatccctgcttagcctctggtccttcccaccacgcccaggaacgctttcttgatgctcgtcgtcttcgttcgac

SEQ ID NO: 363939 - DNA, 384 bp, Zea mays
gtggttttaacacatatgctgccgtcctgtaacgaattcgtaagttatagaactttcgagcttcggtaagaataaaaaaaaaaaagaggaaagaaaaaaaaaaacacacaaaaaagagacagacaaaagcaaataaaagaaaacaaggacaaaaaagaagaaaaagaaaatggggggccggcccttgaaaaggctccaaactaccttccacggggcggagactaaatacccgttttaaggcgcccctaaactgaaatacaagcgcagactaacaagacggtaccaaaggaaaaaaccacgggtacaccaaagttaacgactggaaaagaaaacccctttgcgcgggagggcaaaaaaataaaggggcccaaaccgtgcgcccct

SEQ ID NO: 363940 - DNA, 430 bp, Zea mays
gtgactttgtgggtccgacggggctaagcattagcgcatactgctagactgccactgtcgtatgcactatgcatgcttttgagctcgagggagcgtgttgatggggctgtaataaaacggactacaccgaaggcgctcggatccactatggctacaactgcaaaaggcgagcctaatggggcgcccgctggtgagggtccagcctttgcaatccaccagcaggcgaccggatacaagttcctggcggcactccaaacgtactttagtggctgcgttcggacgacctggcaactggcaaaatcctggcgaccccccagtcaatatcgtcgtatgaaagcggcctttcttaagttgggcgaactttgaagaggcccacaacttggtgccgaaggaaaacataaaaggtttgaatgggcaaggggacccgccc

SEQ ID NO: 363941 - DNA, 494 bp, Zea mays
ttactttgacgcgtggggccttggtggcgttcggcgctgccgtcgttctcgtgaatgtcctcgatgtcaccaagacccactcaccacaccggcgacgatgccacgttttgatctcggggtggtgtcagccaccgagcagcatggtgcggtcaacgaatacacaaggaccaggagggaacatgaagcacgacaaggtttgtccttgagtgacaccatctcgtaacctaactacgtattagaggcttatatttccaatgcttgtgatgttttattttttatttgtattgtttgtagctaatggttacgagattgtgccatatggtttatagcttaagttaggaggtcgtgctatatagattacccaattcttcctttggagagttgtcacacatgtttatgcacttgcttgcataattgacaggtttatctcttgcttactgttccgtgctttattgagtgccgcccaaatatcacgttactgatagaaatgttat

SEQ ID NO: 363942 - DNA, 245 bp, Zea mays
tttcttttctggcacacaaacacagggggccggagcacggtctcgtacgacggtcgcggatgctccaagccgacttcgtggggtccttcggggagcgccatgaacgacgactacatccacatgttaaaccagtgcctcaaccgcaccgtcaacgggttcctcaagatcggagccattggcccttgcaaagtggctgacgaggagaccttccagagcctgcacaggagggaggtttaccaacacaa

SEQ ID NO: 363943 - DNA, 380 bp, Zea mays
gcttccacgcgttcggccgagtggtgcacggggctgccgttcctgtctcggtcgtggatccccgccctcctgcccaccgacggcgcgaccgagcacgctcatcggatacagcccgacgcgcttgtgtacatcctctagcttacatacccactcaccgcccctcggctctacgtcgatggaagggcgccattgacgcctcgcgagcctcgctaccatccccacgaggccataccctccccgcacacacagatctgggaagaggccgacaccccgaccctggacttgggcgcatcacacgacccacgcgatgctcgtgtaccccacacgaggcacccctttcgggccttggcggcaagcttgataacatcgtggcagatgca

SEQ ID NO: 363944 - DNA, 429 bp, Zea mays
  unsure (1)..(429): unsure at all n locations
tgagcggccgctcgtggaagagagccagctgtcaaggactacacggaccctgccccggcgccggtgattgacccggcggaactggggctctcggtcgtgcactcgggacgagatgcgccgagttcagtcggccacgggtggtgcttgccataggacggggcacgcgaatacgacacaggcacgagacagacgcggagatggctggtcccgacgtcctcgtccgcgtcgtcggccccggtaccactcgcgtgggcccccgcgggcgtgaccgaggagctggggtactccatcgcgctggtctgggcgagcgacatcaccgccgacgcggcggtggccacngtgcaggcggcagccgaggtggtggcgctcacgcgcccctgcagncacgccgcacgccccagcttcgtgcgccgggaccaccacgccgac

SEQ ID NO: 363945 - DNA, 402 bp, Zea mays
gttagcggttactatggtggcggcagcggtggatatggtggcaactacctcaacagggctggtggcggctatcgcggcggcacacctcttcccttcccttcccttctccctcccatcacacaactccatctccaccccctgaccgacccacccatccatggcggcggcgcccaagtccatcgagcggctgccggcgcgccgggtggtcccggccgagcccacgccagccggcccgctccgcctctcctggctggaccggtaccccacgcagatggcgctgatcgagtcgctccacgtcttcaaggcggcccccgaccggcccgccgccgccggaggcgccagcgccagcccggcccggaccattgagcgcgccctctgccgcgcattggtccactactaccc

SEQ ID NO: 363946 - DNA, 474 bp, Zea mays
  unsure (1)..(474): unsure at all n locations
ctttcgcgttcgtgcttcttttgtaataaaaaaagagagactaagacctgatatgctttcataagcacaagtgtcaaattagtaaacagcttcattggcaatcaatgcaatagcaattgtgggatggtgaattttctacgtcaatactggttatattgtggttgctagttcttggctagcatgtcatgagcaattgataccattcttgtttgcagttaggtggaacagatcgatgttttcaagtcgtctgattaatcgtccaattcggtttggaccaatcaccattaatcgcccaaagtcgtccgactactcgtgattaatcgcgattaatcgccctagtcggtcagccagaacgaccagcaaggcgtccgagtgtccgacttgaaaacattgaaacagataatgcacaacattgcttaacactattcgagttgcctaactgcctgaaannatactgattntgattgtctacta

SEQ ID NO: 363947 - DNA, 455 bp, Zea mays
ttttccgttaaatcaaaccaagcaaagcgcaccgcaggcggcgccagctgcagtagcttgcttacctggtccccgcccccacacctcttcccttcccttcccttctccctcccatcacacaactccatctccaccccgtgaccgacccacccatccatggcggcggcgcccaagtccatcatgccggctgccaattgataccattcttgcttgcagttaggtggaacagatcgatgttttcaagtcgctgtgattaatcgtccaattcggtttggaccaatcacaattaatcgcccaagtccgccgactactcgggattaatcgtgattaatcgccctagcaggtcagccagaacgaccagcaaggcgtccgagtgtccgactcgaaaacatactactcacctttggccgacactgtgtaacactatttgagttgcctaactgcctgaaaattac

SEQ ID NO: 363948 - DNA, 498 bp, Zea mays
gtttcccgttttccgcgcgcgcgtgcagtcacccatcccggcgtccgttcgtccgtcgtccagtggcccaccgccagcgcgcgctcgccaccgcacccagctagcagtacaagaaaagtctggtggcgtcagcggccgctgcggcggccggcttgccacagtccaatccttggaccggccaaataccagatgaaggtccgagacagcaagctagcctgcctctcgcctacaccccactcacccgagcattgatgacctcacgttatgttgcggcgaggagaggtagtcacctagcaggggatccttgtcgagagcgacgcacgagccaccagggaacatgaatgggggggctgtattttcagctggcgtcaggacggtcctaggcacaaggaaaaagatgaacagagtgtcttgtccatccatgtcagggaagagattttgcaacttataagggaggcgaacataaatttgactttcacccaagaaaatgatggcata

SEQ ID NO: 363949 - DNA, 506 bp, Zea mays
tttttccgcgtattcgccgagcgggccttggtggcgtccggcgctgccgtcgttctcgtcaatgtcctcgatgtcaccaaggtacgcctgtgaccccgtcgttgcctctttcgcttcggcggcctagaggatcttgtcggttgaatgccaaattattaatcttggcccacacgattcgtcactaccaccgccggatccgagaccccgcccttgtccttcctctctttctcagacccactcaccacaccggcgacgatgccacgttttgatctcggggtggtgtcagccaccgagcagcatggtgcggtcaacgaagacacaaggaccaggagggaacatgaagcacgacaagcaattataagctttggtaaggttggtcctaggcacaaggaaaaagttgaacagagtgtcttgtccatctgctcatgggaagagtttctgcaactaataagggaggtgaacataaatttgaacttcccacccaggaaaatgatggcatatgcatg

SEQ ID NO: 363950 - DNA, 380 bp, Zea mays
taccggtttaccgcgggcggggacatggaggccagagtgtccagccgtgttgtgctcttcgcagggagaccgactcccaaattcccacgccgtgacaggagatatatctttcatttacaagggaagatgtctatgtcttgcaattgctatggttttgtcaggaggtgcgccaggcaaaggtcagcgtgtgctcgatcgaccagtataggaaactactcctggtgcacagtctgaatgagatgtgaagaaataccgtaaaatgtcgactcataccgtgtcatcctgcacaatgacaactactgcaggcgcgagttcttttgtaaggctgtgatgaaagtgagcccttggatgaccgtgcgcaacactatgaacattatgca

SEQ ID NO: 363951 - DNA, 277 bp, Zea mays
tttccgggtgccgccgcccctgctccgtcctggcaatcactttgggatggtggtcagtggaataacttcgctcaaaaagctcgaagccgttggtagtgaaactagaaatcctccctatcaagtgaaaactgtagaacgcggcgaagcctccaacacaaatgctcaggacccgctaaagggagataaagtaagctcaaagacacgattatgacacctcacacagcgaaaagggtggccatcgcaccaagccttccttgccgaaaggtctcaaagaaat

SEQ ID NO: 363952 - DNA, 183 bp, Zea mays
ccgcaacaaccatggccgactcatgagaggaaagccagcatcaaagaattctatgctgcgatacttccttctctgctgcaacagcataggacgagaactgaccgaaggacacgacacccggagaggcataaggccggggatcacccacaagaaagaagaggaaggacgggacaccctatctga

SEQ ID NO: 363953 - DNA, 306 bp, Zea mays
cgtacgcgtgggcggccccgtgggtccacatcgaattggatcactgagtgatgaatcgcatgcataactcgggtttatgatcggaatgctggggcaagtaatcacgattagctatgagcacccaaaggcaacgacggctcatgatccagaaggctacacaatgatgtacagataaaatgagaaaaggctcatattaagaactctagttattaggtgactgaagaaagtttgacttgaaaccgatcaagaacgaggacaaggctcagtgggtgcctacacagagagaaaggacacagtaaggagtga

SEQ ID NO: 363954 - DNA, 505 bp, Zea mays
  unsure (1)..(505): unsure at all n locations
gtttgtcaccaaagcttcatcttggcatcaggaagctgcagctccctttgttctgttctggcacgacctcggcattgctccagtgtggtgaagatgatgaaacctggtgagagaagcagggagagggatgctgatttccactattcgggtcacgacgatgagaaggacaggtacttcttcaaggttctggttggcgatttccgtgaacgactggccgtccctgacaaattcatgcagcacttcaccagagggctagtcacaagcagtgttacgctagaatcacgctgcggacgcagtttccatgtccaagtggctgagaatctgggcaaggtggtccttcaagcggngtggaaggagttcgtcgctgcgcatggcttgagcatgggggacgtcctggttttcaagcacgacgggactcctcggctgaaggttttcatgttcgaccatagctgctgcgagatagtgccgccgccatgccctgtcaagatcaagcgagagcatcatg

SEQ ID NO: 363955 - DNA, 386 bp, Zea mays
cttgacgcctttggtttgggccggccgagacagcttccaatggcgaaggtttcggaaagggatgcttagggtttcgtgaccaccgacggcgctcttctcatcgacctacggtgacatttgcgaccgcatcagcaccgaatagcgccaccgcgaaggtgtatacaggcatacagcggatgatggcggcatggggaggcgtctcagatctagcccgtgcagatgccggggatcatgggagagccagcgtggatcggcccacggtgacaccgggaacgctcgagagggtgcggataccacaatctcatggactgcatcagaagttctgccagcagtgcagcaggttccttgaccacttgatcatctccatggtttgttggcattggaag

SEQ ID NO: 363956 - DNA, 345 bp, Zea mays
  unsure (1)..(345): unsure at all n locations
ccaggccattacaccaccagcaccacctcgtcccccgtacctgcctcgccgccgccgccgcctcctgccggcctccgatggcgaagacccgcaagcctccggcccctccttctccgccgccgccccccgcagaaacgccatccccgcagcggcggcgcaagaagaagggccgcccgtccctcctcgacctccagcgccgcagcctccgcctgcaggcccaaaaccctagccccgccgnctcgcccacccgccgggaccccaatccctccgacgacgatgaggacgggaccggnnagcggcggcggcngcagaagcgcctcaagagcgtnnctctcggcgtcgtca

SEQ ID NO: 363957 - DNA, 288 bp, Zea mays
cttcgtcgcccacgcgttcgtccactctttttgtaaaagagggggctttaaggtgcgcactgggcaaaagatctgaggatttatgcgaacaatttccatttctaaccccatgaatgtgcgatggactcatatgataactttggacaggggtggaatgtcacatcttattgatgcagaacccattctattcgtaggagtccaatccctcaaaatggaggggaacaaacgggacctgacgcttatgggcacgcagatcaactccagaatgaggggaactgcaactgatac

SEQ ID NO: 363958 - DNA, 333 bp, Zea mays
gccccagatgttccttttgggggtggctaggcttgcctggatacaagtgactcaaatcgacataagactgtcacggacaactcaccacacgagagctccggaatcggaggttgacgacgaccaccacggggataacaaccaaacctcccaaataccatacacgaacgaaagggaagggaaggtcgattaggcggcgcgccgaggccgtggctatggaccccaacggcgtgagcgacaccatcctaggcgatccccttcttaccctctcgcagtccagcaagcatcagcaagatcctctcatcggcgtctccgactaccttaggcggttcgtgc

SEQ ID NO: 363959 - DNA, 247 bp, Zea mays
gccacgcgttcgacgttgatggatgctagcattttttcagtgtgtgcagctattcatgacttctatctgagctccaaattagattaattagacagcgatgctagcgatgggaactgtacagaagctgatgcatgtaactagcgacggggaagcaactttgtgttcctgaatgaactgaaccatacgaatgaatgctgttttcaactgacaaataaatgtctatgacagctgatcaactacgatgaga

SEQ ID NO: 363960 - DNA, 454 bp, Zea mays
aagctagacccctgcggaccggtccgaattcctgtcgcccagtttccgcttgacgacccgctcgcgctcgagtcgtttctaaacatcactctggtgaacaaggcagggcgctccgtaagcttgaagatggatgtctccagagcctacttcgtggcttacgtagcagggcagcgctcgtgcctcctcaagagatcaggccgcacgttctcgtcggcgatctgttactacggtggcccgtggggaacaagttcggctcctgtcacgcgacctgctgctgctgccggcgacggcgaggatcctggggtcgcggcatggcgagcgagagatctcgacgaggccatctcgtcactgttcctgttccccactggcaacgctaccgaagaggagctgagacggggcgtcgccgcctgcgacatgatggtcgcgagcgcggcgacgttcccgtacgtcgagc

SEQ ID NO: 363961 - DNA, 132 bp, Zea mays
  unsure (1)..(132): unsure at all n locations
gaccggccggatcccgggtgccacgcgccgttttcnttttgggcgcgcccgcgcggggcggcatgtggacgccgcgcttaccgcgctcttggacggacctggggcaagcgcgaagctatgggcctacacccg

SEQ ID NO: 363962 - DNA, 329 bp, Zea mays
ggcccggccttactggcttgaccgacccacgcgttcactcgtccgctccacccacaggagctcgtgcatggccggtatgtgcaccactggcggatgtgccaaaggctggggctgcatatccaccactgacagatcatactacgttccaacctcctccacctggaacatctttagctgggtggatcggcaaatgcagccgcctaatgatctgttcagtctgctgttgtagcaacagcagtaagacctgttccacccaatcaagagtctgagcaactaatgaaccgctggaagcctggaggacatggcattgatgatgccacatattctgc

SEQ ID NO: 363963 - DNA, 483 bp, Zea mays
tcggtcatccactgggccactgccggtgcgcacgtcggctgtggtctagactggtctaatagagtagagacaaggccgcggaaacgaacgagataaagacgaagtctcgggtgcccagcctcccccttctcctccatctccatggaggaggaggagggcttcctccacgtgctgcgagcgctgcgggacgccgcgcggagggtggaggccggggagacacgcggggcggcgctacaggcgcttctcgcgctcgaggctggcgccgacgacctcctcgccggcgaccccgacctcagcgccctgcgccggctcctgtgccggctcagagccctctcgtgctccctcgacctgtgcgcctccggctccctgcgcgcgcggtgcggcgcgcggagggcggtcgcgcgcgtggccagcgccgacgccggcgagaaccaggcgtgggtcgaccgcgaggccatcgcgcggttcgtggccgcgctgagc

SEQ ID NO: 363964 - DNA, 309 bp, Zea mays
tcgttttaagccggtgggccgacgcctgctttgcccgtgtcgatgagcttttctgcaccggcattccctagcactgtgcacgggcgagatcttgcgtgtacggagtacctcgtttacctcggcgggaggatcagggacgggttggacgacatggacgatgtggacgatgacatcatctgtggaaccgatgcggagagacagccgtcgcgatggggtctgagagacgcccgcaatgactatcttaaggcgccacggtgaggaagagcatatgatgggcaatgtggacaactcatgtgagagcgaggcgat

SEQ ID NO: 363965 - DNA, 471 bp, Zea mays
tcgtatgggtggcgcaggagacgctgggcgatcgagcagggcgggcacctggccaccgccatacacctccatgcatggtcgcctacgcgtccaagtccgtcgtcgaggtgctgtcgcgcctggtgcccgagcccgtctccggcgctgccttcacggaccgggtgaaccagctgctaactttcgttacggtgcttctctgcaatgaaaattatgaagacgatactacgtaatcgcattggtaatcagtttatgaatgactgcatcatttgctttgttgagcctacaatgatagctacaatttccgatgctattataattgaccgctttcaaaagatgaagaatcgcaaccgcagaatgcttctatgagagattgctacagcttcctgtttggtcattggcgaagtgagccagtcgcccttgatgtgaagggaggagaggaggcaggagggtgagcttggagccttgaggagc

SEQ ID NO: 363966 - DNA, 557 bp, Zea mays
  unsure (1)..(557): unsure at all n locations
tttagtattcaacggcatcatgtaggcatctgggtggacctaattctcattggggcctagttacgcctggccacctaggcgatgaggcgtacccaacccaactcgccttcggtaatgttgtcatctttgataccatgatgtcatgaaagtatgtaaaaatggttaattttttttgtatttttaggtatattcttatcattagctgatgtatagttttcatcatgatgcatatcactcgcaatgtataaagtactacatcgaattttagtatccatgtttttctagttgcttcccagttcccacatggttataaatgttatgaataggcaggtgcctgtgttactgccaaacttcgtaggacttaggagttccatgctacttgaatatgggattggactttatgcacctgaattaatatatgaggacaggaagtcatttataatgcaactgttaccgaaggcctgtgtcacctatcaatcctgaatcatgttntttactttttacgttctggctttatgctgttcttgcttctgggagcaataggaagcttacatgca

SEQ ID NO: 363967 - DNA, 294 bp, Zea mays
ttcctcgtccgcggacgcgtgggcggatcgccactggcttccccccacccgactccgccccacctccgggcctcagagccatcccggaccggcaaccctagcgccgggttcctcctgctgggatccgcccgccgacgagcggactacattgccagaggtgagcgagggggagagatagagcttgggtggtcggattagggagagagggaggggaggaattacgaaccgtctcagtagccgagcctgaggtaggacgtcgggggtcagcctacaggcgtgggtcggtgctaccca

SEQ ID NO: 363968 - DNA, 483 bp, Zea mays
tcggtaatctgtgatacgaagttattaagcttcggcatcaagccaccgaaaaagacaaaatttttctttctttaattgagaagcttaagaaaagccaagttgatttagtaggattctccgaggcggagcaaaaaattttgaagctttaaaggaaaagaaagatgatgcaaggcatatagctgacttggaatatgctttatctgcgcaagtggagctccataagtctgaagttttaagactagaaaagaagcttgacgaagctaacaagaattttgaaatcgaaaaagcgaaatgtgaaatatccgaggctgagcggaacaaagttcaaaagaatgttgaagagcttcgttaatcgaaggaagaatgttttctgtttgtatgcaatgttgtaataagctaaagagcacatttgctaaagttggtgcattcttgactaagtaaaattttatctgcggtgatcccgaaggagtagctagatggatt

SEQ ID NO: 363969 - DNA, 447 bp, Zea mays
tttactcgtccgcgccaagtcaccagacacgtacaccgacgaaggcgacgacgacctggtcatcaagcgggaggacaatggaagccgaggcgttcccgatccggttcacgaagggcatcaggtcctactggcgtcggcgcgcagacggcagcggcgcggcgggccgcggcaggcgccggcacgggctggtgcgcctcggggatggcagcgggcccaagccgtgggccgcgaggatcggcggcatgttccgggcgcgccgcgtcatggctacggcgccggcggccccgtcccgggcggcgaccgtggccaaggtgcccatgcgcgtgctcgggcggatacgggacgcctacgtcgacgtgatgctgggcgcggccaagacgcggccggccgcggcgcgggcgctgtccagcgcgcccgaggcgctgtggcagaagcgggtgcccgtgc

SEQ ID NO: 363970 - DNA, 418 bp, Zea mays
ttcattcgtccggcttgaagttcttccgccgccacgtgctcgctgccgtcgccgcgccgcattcgcatcaccgcatcgcgccgacgaggctgattactagacggacgaggagtggactggagtcacttgcagcaaccctatcccggcaggacccatcgcgaaaccctagacttcgccgccggcggacgccggagatggcctcctcgccgtcgcgcgccccgcagctattccctttcgaccttaacgtcgcgcaagaggaggtagatgaggagccgattgaggctcttgaggaggatgtcgatgaggagggagcccccgttgcgcagcccgaggaggttgtcgtcgaggaagtccgtgagaaattggtcgagcacgcggtgcctaccacggaggatgaaccttgcggagacgtgatcat

SEQ ID NO: 363971 - DNA, 401 bp, Zea mays
gcgttcactcgtccgcagtaaatgcttagaagtagtgcatccttaaccttggtttccatccgatcaaaaacggcggcgagatccataagctggagtgtaggaaccattcattggccaaaaaaaatatcatcattgagggttaacttaaatttgcctctacggaacaaatgttagttacaaggatcttatttatgatgtataaccaaaactcttgatgcgttagatgctttcgcgagtgtaagatagcttaagcaaacgtgcccgacgagtgtagtatgcaaataaacgggagataatgtggacatgaccttttcgtgaggataagataggccatcggagtcttaggcctatgcgcctaacaactattttttttaactgcgaatacttggtttatgatgcgc

SEQ ID NO: 363972 - DNA, 227 bp, Zea mays
ttactcgtgggatgggaagctgatgcgcgcgcgtgggagaggatttcttcaagccggatgcgcaccatactgatggggcaaagttccggcttgagctggctatcgcggagacatagacactgctagacctatgcgggaaggcaggcatgtgagctctctaggaagcagaggaggtggtcttgcgagctatgagcaaataccaaacacttctgtacgcaatggggatg

SEQ ID NO: 363973 - DNA, 361 bp, Zea mays
  unsure (1)..(361): unsure at all n locations
cggaacacccggcacgacccacgcgcacgttcgatagcaccccccagccaacagaagagggcagcgggagctgagcagacgcaccgcgccccaagcccgcaaccangcgggaacaccaggaagaggcacaaccgccacaaccgcggccccgcccacngcaaagcgagcaccccacagaagggcccgagagcagcaccggccccaaaccccgcaaaaccagaccgcgccngcgaaacacgcagcacgaaacagaacagagcagcacacccaaggacaancaacaagaagaaagaggcagngccncgccaaaccggcgaaagcaaccacgacgccacaccagccagagcaacggcgcccacca

SEQ ID NO: 363974 - DNA, 477 bp, Zea mays
tcgcccaccgttgctgttgcctccgctgcgcgtcgccggacgagaggagagacagacagacagacagagaggggaaagggatccctccgaccaggcccaccgccgtccatccgcccccggatctcctccgtccccaccgccgtcgccgacacacgactccagtgttgatggataatctctctccaagcactctgctcaacagtatcacctgtcttggcgccttaacatctgatgtctctactgtgagacccaagcctgttcagaagtattgcaaaaatgtatatgatatctcaagcatcgtgaatccccttcttgaagatctttgcacgtctcccgaagagcaacttaatgaggtcctaagagatcttgacaccgctgtcaatgaagcttcaggtcttattggaaactggcaccagacaaccggcaaaatatgttttggttggcaaattgagtcagtaatatcagatattcagggat

SEQ ID NO: 363975 - DNA, 434 bp, Zea mays
tttcttcttgttctgcccagcttgcgtcctgctggcgcgcgtagcgttccgttgttcctgcgcgtgctgccgcgaaggtccctgttcagttcttctccgtcgcgttgtcgtgcgcgtgaaactgctcgcagtcgatatcgagtccgtgacgcgcgaaactgctcatagtcgacatcgagtccgtgacgcgcgcgctggacacggtaaaacattgcgtgtgtttgtgtccgagcccgcccgaccgtgacctcgctctgcttctcgcgtcgctacttgccaagtctttccctagtgcgcgccataaaattcgctcggccacagccttgacgaactgcgatactccctcgccgtgcgctctggcatcggctaccgccgattccaccattgatgttacacgcactcctagttctgttcgtcctacccggggcgatttc

SEQ ID NO: 363976 - DNA, 257 bp, Zea mays
ttttgctggttggcgctgccatagcagcggagaaaggcggcggttactggtaagccgccacagacaaggatggcataaaaaaaaatgtgcccaactgggtccagatgatcccgctacttaccctgcacatagatatctatcgccctgtgaatattctcagctggtgggatgcagggctgacgctagggggtggataaagccaccatatctgtcgattactgggcaccttcgatgcgctcgtctcctcatgcatgggg

SEQ ID NO: 363977 - DNA, 396 bp, Zea mays
tttaatggtagggccgccctttttttgtttatttcaaacacggcctgggtgatctgggagtgaggagtcttcatctctcggtcatcccctcctggtgggtgctcaacaagcggtgtggatacagctttaactgcaagtggatcttcacccatttgcacatacctgaattagaagctacggaaaaacactgaaaagtcaattcctgtgcctgaaggatgcctgaatttttgaccaacaccctctttgaagctaacagaaacggcctgcattacggatcttatcactgttgacagattgcacctgagctcttcccttgcaaacaagaaaacagtcatgctgccagcgaccgtggcgataaaggtgaacgcaacgaggaagtggccagggcactcttca

SEQ ID NO: 363978 - DNA, 210 bp, Zea mays
ttgtttacgcgcgcgccaaaaccaggaccaccgcaggaaaaaggtagacagggccacgccaaaggcgcggcggcgtacacgcggggagggcaacgactaccacaagcgcctcaaggacaacccacgccggagcacactctagcacgcgcagcaacagaacggcgaggcagggctcaaggaccccacctgggggctccggaggaacccgga

SEQ ID NO: 363979 - DNA, 236 bp, Zea mays
ttgttttttgtggggcctcataccgggctgcttggctctctatgtttgcctctgaacctctgcctagcatccgcggcctcttcgcaggctccacccgagttaagaggaggggcataattatagtgctccgactgtgcctagagcatgagtgaagcatgccatgcgacactacaagacctgccgccctgctggatggctaccacatccttcgtcgatctctggcaactgggggtgcg

SEQ ID NO: 363980 - DNA, 251 bp, Zea mays
gcacgacaaccacaagagccgcaaggaaaaccgaaaccagagcacactcctgaacgagcagaacctgcacggcgaggccgagcgaaaggaccacacccaggagccacagcagaaccaggcgcagggcagaccagacgcggcagccgcaacccaggaggagcgcgaggcccgcgcggaggaccaagaccggacgaggccaaagagggagcagagcaccaagcagcgcccgccgggcaaggagggcaccaacg

SEQ ID NO: 363981 - DNA, 135 bp, Zea mays
tcttttcacaggggcggacgcacgggcgtacgcgtgggggatgctccacatcgagcactgcgacaactccagagctgtcactatcttcattcgtggtggagacggagtgctgattgaggagaccaagcccagtcc

SEQ ID NO: 363982 - DNA, 126 bp, Zea mays
ttttcttgctgggggccgcttctcgcgcgccgcggctgtctatgcggtcggctcttactctgcctacctgccgatacatactgagaaggcttccctcaagcagactagggtcatacttagattagc

SEQ ID NO: 363983 - DNA, 154 bp, Zea mays
gtgcgttatgagagaacccgcagagagacgcgcggggggccatgggggcagctagtgcgcagacagccagccgaggcggaggcgaccggccccccacaccaggaaggggggaacaacaacacggccgggcagaaagcaaagccaggacacagga

SEQ ID NO: 363984 - DNA, 203 bp, Zea mays
atactagccggcacacggggagcccgccgcccgggacaaagaggggaaggcacccgccgcacccagcagaagaggagagagggacccaccagacgggaccaggcaggggacccagaacgacagccacgaagggacggagaaacggacgcaacaacgacaaaagccaccacaagccgaccccggcaggaccagcaagccgacca

SEQ ID NO: 363985 - DNA, 182 bp, Zea mays
ggaccggccggaaccccgggcgacccacgcgccgtttactgcggcaaccacgcgaggggcgccccggcacgccaagaagacagccgccacccggcccagcagaagaggaaggggcacccggccagccggaaaacgggggggggcacacgaacagggccacgaagccgcccagaccaggacac

SEQ ID NO: 363986 - DNA, 164 bp, Zea mays
gtttcccgacacggaggccaacaccgcgggcgcccgctatacccagctcgaccgccagacgcgcaaggcggaagggcacgcgagcccgaagggggccgaaacgcaggcaggcggcacacaaacggacaccgcgggacctggccaagcggaggggcgccgaggcg

SEQ ID NO: 363987 - DNA, 168 bp, Zea mays
tttttctttttagcgtactcgtctggcgcggcgtggctctctgatcggtctgctgatactctgactagcataccgataccacctgatccggtccccctgaagcagagaaggggcacacgaatacgacgcgcacgttggctaatacatgtgtcacgcataccatgatct

SEQ ID NO: 363988 - DNA, 271 bp, Zea mays
tttactcgtgggggcccacgaagcaggcgcgcccagcggaggcaggtgaacagcaccacccgaacaagcagcaggacaagggggacccaggccgcagcgaaccgaaggaggaaagaaaaaaggtgccaggacggacccaagacaaacggaagccgcgaggcagagccccaccagggcagacacgggaggaggcgcgcaagagacgggagcgccgccaaaacgaggagcgcgaggaccagaggcacacgacccggcgagcccgtggaggaac

SEQ ID NO: 363989 - DNA, 194 bp, Zea mays
agccgttacctatcactgccccacagacgtactacatcctgtggaacctgcagcacgatggagcactgacgaagaccgcaccccggggcgggaccacaagaaccgcgaggcgcgcggggcggcagccccgacgatgcaagccatgatgctgggcgccagcctgtggaacgccaaccacatggccacgcagggcg

SEQ ID NO: 363990 - DNA, 287 bp, Zea mays
tttcggtccctccgccgcgcctctgatgcacctcgtgagcaccggcatggaggcccccacgcatcgagcttgagcaaaaggatggcgccgtgggcggggcactggagcggtgcggccggcggtcgccggtgcgacgcgtgcgccgggcagccggtgcggctgcactgacgtgcggacagcgcgctcctgtgcctcggctgggacgcccgggcgcacggcgccgggtcgcggcacgcgcgcgcgtggctgtgcgaggtctgcgagcaggcccccgccgtcgagacctg

SEQ ID NO: 363991 - DNA, 458 bp, Zea mays
  unsure (1)..(458): unsure at all n locations
tcgtttacgcgcccgctgctatacctgaggtcctgccgcaggtactgcttctggaagagcatcaccaacgtattcttggtggcccgctctgctcaatgctccaagcacttggatgtacacctagaaatatggtcatgaatagggcctgaactaatacttcaactgagctacatagcgacctacattgaaacgcatcctgtaactatctatgaaactgatgaaaacactgatggtgactgttgagccgacggtagcatctaccgtcggctatatgatgtgattgagcatgatcctgtgcatgaacctctgacacagtgttcgacacactgcactctacacagacctccagaggaactcttgtgtgggcgtggctgtgggcagggctcgagcgtggtaccacgcatgcttctacattcatataagctttngcagaggacactgatatgaacactaatgtg

SEQ ID NO: 363992 - DNA, 220 bp, Zea mays
gtttcttttgagcggccgcccaggcagaggcgtggggctctatgcggccagctgatactcggactagacaacgctgccgcttcaacggtccagccggataaagagggggggcacaacgagaggaccctgtctttgcctaaacaatggtacgcgcttgactagatataccacaagctatacaacgctgctaacatgactgctcaatatgcgtcgacttatg

SEQ ID NO: 363993 - DNA, 262 bp, Zea mays
gtagatgaccaccgggcagaggcaacgggcaacggaccctgacagccaggagcccccgaaagcgcaagagcagaagaaaggccgcacggcgagaaacaaaaaaagcagcgaggacaagcagcggcgagccacccacgaccagggacccccagaaacgaccaaaagagaggcaaagaggaccgcgaggggcacaaaaagacagaggcaacgcgccaaagcccacccgaggaggaggcagccccaaaggaccagcaaaagagac

SEQ ID NO: 363994 - DNA, 567 bp, Zea mays
ttctttcagaggctgaaggaggaggaggaggagaggaagagggaggaagaggggaagatggccgcggacaggaaggagatggtgcatgagaaggacacgcagcaggagcagcagccaatgctagcagagacgatggcgttggcgaacctgaagcccaggcaggcctccgcgaggcaaggcatgctggtgagcgtggcggtcgcggtggttgtgctgcttgggttcaccgtctacgtgtggcacagcctgaggaacgccacgggaggcgccggcggcgagcacggccacggacaccagctgtggaccggtagctacggcgacgagatgtgagcaagctagctcgaggtgtggcgtgagtacacagtacatctaagtggaaaggaagcaatgcaagtgtgcgtgtgtatatatagttatacacgcacacgtacatacacatatactacatacatgggaggctcagtacacgcactacatactctactcgtgttgattcgttatcagctggcaatggcatgacggcttaatgagcttttaagagatgtttcgctctgtcggttgattgtc

SEQ ID NO: 363995 - DNA, 388 bp, Zea mays
gtcatgcgtgcgggggcctgcaaaccccaccgacgggatcctggaccactgcttccggcagcgccagctccacgagggcgactgcgacgacgtggccgcgctcctgcccgacgacctccttgacaccaactacctgttatacacgcccgaggtctctcaccaccaaccagcgacagggctggtgtcctggtacgatgtcctcgacgtgctcgcggctctgagcctcagctgccgcagggccatccaccagcctcgataggagaagcctgctcatggcgcctgtgggagcaccacctacaccacggatgctgagcctagtgtaacggcaagcaaggatcgtctcggtctgtagatacaacacgactgaaaaactaggagaggggggatt

SEQ ID NO: 363996 - DNA, 163 bp, Zea mays
tgtgtcgcctggggcatcggctgcccgcctcttgggggcttctttaaaactcgcgtggtcacagccccggtctactcaatctggtagtatagccaacatcctacgagagtacgttgctgggctttcgacgatgtagtgttcggcggcggccattggctgcccc

SEQ ID NO: 363997 - DNA, 345 bp, Zea mays
tggtgacaccccgctcaggcggcggccgccactgggggacgggtctaaaacactgggggtaaccgccacgcacgctgcgctcccgcaggcgacccaaatgcctccgagaggcccatgcgcgagcacggaaagatgtagagttcggcggcggcaatcgcctgcgccacagagcggaccacgggagctcgccgcatggagtacgggatcaaggagagggaaccgatgccaggggatgtgacagcagcgccagccgagacgtgagcgcgccactggcacgagaacacggacgatcgcctggacaaggactaggaggacgaggacacggaaccacaggaggaacgcctc

SEQ ID NO: 363998 - DNA, 263 bp, Zea mays
tgctccttgttcgctcggcttggccacaactgaagggggccgctcgggcaggcagggactgggcttgcctagctgaagccaatggacgagctgtctgcgtggcggtcgcagaggaatgctaagcaccatgcgctgctgcagcggctaaaaggaccgagacaccatggaggacgaaatcctgagaggcgccgatgaggcatgggtagtaagagatatgacatggctaccaggagatctgggacccactcaagaccaaccagggc

SEQ ID NO: 363999 - DNA, 371 bp, Zea mays
tgtgacgcgtggggcatctggtgggcgcatcctgggggctttgctaaaaccctcttggccaccgccgcggcctactcgatccggctgtatacgcaaaagcctacgagggcgcgcgcgcgtgctcgcgacgatgtcgtgttcggcggagggcatctgctgccccacggtgcgggcgaggggacctacgtgagctgaataccgcatcaacggagggacgccatgccgggggaggcgtcacgcagcggcaaccgggatctggtcgcgccggcggcacgagatcacggtcgatcgccttgacaaggactaggatgacgaggataatgaagcacaggacgaactcctcaaaccggatgagcacactctggttgaac

SEQ ID NO: 364000 - DNA, 349 bp, Zea mays
cgcgtgtgcaatcagctggagggcagtctcgtcattccggcagctcctactgcacctgccttgccttgaccttccttccccgcacaagcacagagccttatctgatgtctctatgtctatctgtctttgtctctctctctctgtctactgaggccccaccccacgccacgactacagttacaatctgccaggtcaatcgaagagtgcaaagaccccagctttcccatcccatggcgggcggagacctcacgccttctacttcttcttccgaagagacgcccgcggcagcggctgccgaggaccttgacgagatcgtggaggaagggtcgaggcggctggacatccctcg

SEQ ID NO: 364001 - DNA, 298 bp, Zea mays
cctcctcaggtccagagcggaagaggttcccacggccgctctctggaacgtgtggatcctcctgggcctgcaagccggtagcgaagaaaggagggacccatgctctaagaatgactggcctgctagctaggccctatctgtgcctagcttgctgaacatctgtaagactatcgcttgcataatacaaggtacctgcatcgcctctgatgctgtgagcacaagacattaattggaacttcagcaccgcttcggggacccccgacaagtgcatgagcttcatagcttctgctcgcgcttg

SEQ ID NO: 364002 - DNA, 561 bp, Zea mays
tcttcgcgtccgcccacgcgtccgccgttatgaagtccagaacttatcaagattatctcctgggcagtttatgttgaagcaacataacgctggcatggctgaagcagggaaatctgactcctctgatggtcctacaaccaacgtatggtggtatatcattttatttcagttttagtccaagtacttgaagggcctggtgcaatgcaggtcgcgggttcgaagcagtctcctcatttgcggagaaggcttgtcttggttgattcgttccccaaaccccactcatatgggagcctccgtctgtccgccactgggtctgcccttttaatatgagtatttgaggtctaatggttgatatttcaacagatttaaaatgcttaaatgcgaattcgctataagtagcagcctgatgtgcctactatgacatacagatacagtctgttgtgtgacttcagtacagatacattttaggctgatatagtcctattctgtgcattctggccatgattcattttgaaattattccaaggcttaaaacatgcacatgaaacaatcacacgaagg

SEQ ID NO: 364003 - DNA, 510 bp, Zea mays
tctacgcgtccggaagaggtggaagccaacaagctagttttgcaattggctttaattcagattctcctcatttcaactcttatttgggagtttgaagaagctcatcagcgctggcttccacttgttgagctaggctcacctgaggatacaggagataaagcgtgtgctgtagcatgggctcctaacattggcaggttcttttggcaccaccactgcgctgccacgtgcaccaggcactccggtcacaccctgtggcccagcggcagcagcgctgcaaggcccggctgattcagcaccgaccttagccccactctgttcacctctatggccaagctgggccgaccgctgcgccttctatcgcacgagccgcgccatctgggccggctgctgcaccctccctcagcaggcccattgtgtcggacagttcactggctgctactcttctgtcgtgggccttctccaccaggagcagcccccgctcctgcgccgggtggctctggcttgtcatct

SEQ ID NO: 364004 - DNA, 205 bp, Zea mays
tgttagacgctgctttggctcaagcaatcttgcctatcaaagttatagcgaaaatggctccagtatcccacgaaaaggtaattgtccacttggttcgtggtttggacaaactcaaggaacctgcagcacgatccttgatcattcggatgttcggagatgctagcttcatgggggatctcactacaacgaaagctcctactgtatc

SEQ ID NO: 364005 - DNA, 393 bp, Zea mays
cggcaggacacgcggctcgcgagaatctccgggggcgcgcaccacaccgcgccgcgttttgtcgcgacggggagcacggccgacgcgctgggcaaacacccacagaggaggcgcgcccgaacggggcagcaggccgccagctgcacaaggcaggggccccaccgcgaggccgcagagcgacctggacgcaccaggacacggagccgacgagggagcgtataccgagcacagaccgtatcgaggcagtgcaggcgcacaagaccactgacaagggtactatgcagactgacagcggctcgaggggcgccaccagggccccgacccccgcgaagagaacgggcgacgcaacaggtcgcgagaggagagctactggaactgcagacaccgcaggac

SEQ ID NO: 364006 - DNA, 368 bp, Zea mays
catcgagagcggaccgccgagtggatggctctccctagcagcacgctcggatcgcctgctagcacgaaaaaaaatgattgcccatcgtcgcagatgaagaaccgctctgtgtataatccgctggcagcaacttattattatagggcctccggcacgcccttaggacgtatagatacagtctgtcccggcttgtctggtaccacacttcctacctctccccgtgagagctaccgatgtcgagagaatgagaacatacacggattgagtcaacaatctcacccatttgggaaatgtgtctgcgtccgactccgaccgctagctggttcaggacaagtaggggaagaagtcggggggccctctacaggacc

SEQ ID NO: 364007 - DNA, 383 bp, Zea mays
cacgcgctcctctcgcgtgggggtggctacgccggccactgtgacgatgctcgggaaggtgcaccggccatggcgcacgtgaactggtaccacagctatggctagactggcaagccaccaattcgtcctcatgctaaggtgcgcctcgatgctcaagtgaatgtagaatgcctgcatctgctacggcgcgagcctgagctccaagaggatcaccatgcactagacagggaggcgtagggtgttaggctcttgaccaccctcgacgagaactacatgctcgacacttttgagaacatgaacggcatggagctcaagaaccgctacatcaccgttgacgagggccagaccctgggcgatggcggtgtcggcctcagctacgggaa

SEQ ID NO: 364008 - DNA, 490 bp, Zea mays
tcgacgcgtgggtcggaatattgcatgcaggagaagcctgtttgccacaccaaccggtcactacgaaagatccatcctctatacaaactgttatagctatggctggactaactttgcccttgggtaatttattccaatcctgaagctatcaattattcggataaataacattggtaagtgcttgagcaattcttttgaattcatcaggtccactcgatttggtatatcttgggacatctgtactttagttttccattaaccgaagctcgggtgagaatagtataccttttagatagcacaccaaatctttgccatgtattggaaaactcacggtgtgacagattttgtagcagttacgtctcccagaaatgtctatccagtataagagctacatgcatgacatgggatctggcagagtcaggaatgcattttatcagtacaggcatcaatggatctgatttggttcccacattttctgttctattgacag

SEQ ID NO: 364009 - DNA, 142 bp, Zea mays
ctggccctagaggagctacccgtgtacgttgccttaactaccctggccgccaacttattcattcccgggttcgccaacacgcctccagcgacgcctatcagcagtacccctcagacttgataggccaccaagcactgactcc

SEQ ID NO: 364010 - DNA, 339 bp, Zea mays
gcggtctatctacgcaccactcttcgtgaacgacaatgtccaaacgtggaaccgggacgctatcgtgttcaactcctggcagaactatggaacttctagctaccggatgcagacgataggccgtgagtccaacctctccatgatccatacgaaacatatcagatctgcgggctcgggctcgttgtccgcctctgacatcacctggcaagacgcactgaatagcctgctgagagtgaacgagctgaactttgagtaggacaccgacaacctaacggcctacaggagcctgactaggggacaaagctaacacgctaggatcaagagtcaccgtccatacat

SEQ ID NO: 364011 - DNA, 274 bp, Zea mays
ggcgccaccgtccgagcctctagggctaggccctgatctctgcctaccaaacaatggatgccacatcagcctccttgtcccgctcctgctgcctctccgccggccgctcccaccgctcccgcaccgtctggatcccgccaccacccccacacctaacggcgctctcgtgtgtcgtgtacccgggcggactcgcgctccgtcaagcctggtacgacacctaagccgcctacttatcgagatccgccgtcctcatacgtcacgctccgatccccac

SEQ ID NO: 364012 - DNA, 132 bp, Zea mays
ggcccggaatctcttggtcgccccacgcacttgtcgaccaccggggacccggcgcgggagcacaccgtgatttagtcaggaccgaccgcgccgctggacgtccctgatgagatggggtgggtgccactggtg

SEQ ID NO: 364013 - DNA, 214 bp, Zea mays
gtcgtatcggcccaggagggactcatagctgggagacgggctccaatgtgccacactcctgcgccagctccagaccggactacacagcgtcgcgtggccgggagcttgctcgtgctagtttgctctcatctcgtccaggtgcaggaaccgatcacactggcccgagggtctgttggcgtccaggatccacggcagagtcctggggtactagccg

SEQ ID NO: 364014 - DNA, 229 bp, Zea mays
agggagcaaagaaggggaaccaccagggacagacaggcagccggcgagcggcctacaaagaaggggaaggacaagcaagacacggagccggaccagaccaaccggcaaccaccggagccgggacaagcgccacaaagacgaaacgaaggggcacggcaaaagatcccgaaaaagcggccgggagaacgccagcacagcagggaaggcactcacggagcggaaagacaca

SEQ ID NO: 364015 - DNA, 403 bp, Zea mays
ggaccggccggaattccttgtttcccacgcgtcgttacgcgcccgacaccctcttatacccaagggtcaaatttgaaaattgaagcacagtacgctatgctatgcgcttggcaacgagaggcatatgcacagatgatgccccaacaacagcgaacattataagtagcagcgcatgccagctgacagaatggctcaccgatgcaacagcagagccaaggatctgcaacttgcgtaatcccagctacacagacacaacataagcagaaatatcctgcacaaaacgcacaaggtaactcaatgcttccccatgagcctttagccaccactacacataaacagaagaagcaactgggccagcaacagcctacacaaaatgaacagcaacggaactaaggcagtcaac

SEQ ID NO: 364016 - DNA, 382 bp, Zea mays
gaccgggccggaaatcccgttgcgagcccagccgcccgtttccccgccggccacacaccctgcaagcacgagggcaggccaagcgcgccgagcaccagcaacgcagccagagccggaacaacgccgaccagccagccacccgcgccgcgctgaaccgcctctgcaacaccctaagcagcaacagctggcacgaggagccataccgggagcccaagggccgagaacgccgcggcgaccgcatcaggaacctcgccgacgcgccggactgaaagagcaacaacgcacgcgtggcacaaccgcgcaccgctaagcgccggcccgagcgcaacccctgactggactgcagacaccagcacccggcgcagcatggacgcctagcacg

SEQ ID NO: 364017 - DNA, 383 bp, Zea mays
tttaaacatggttacatataaaaatatagcagcgcccgcgctctttagaggctggatcctcctgaacctccaagcagcaagcgatgaaaggagggacgcatgcaattagcctgatggtccaccatgctgtgccatggaacttccttgctgcttaggcagctctgctaccagcgctagcatctggaaatgtgggtgcagcagctccgatactgagagcagggtccatagatttatactttatgaccgtgctggctagccgagcaaagcgcagggcaacagcagctggatccccgtgctggtcgacgaagacaacccgctcgcgctcgagtcgtttctaaacatcactctggtgaacaaggcagggcgctccgtaagcttgaaga

SEQ ID NO: 364018 - DNA, 426 bp, Zea mays
tggcaattggaagaaattatcaaaagaaaatggttaaattagaccactcatcaagacagaaaggctctgaaggttcagataatagtacaagtgcaggggcagttggtaaagagctatcctctaacttcaacgagagaattgcatctgttgatgataaatacatggtcaatttgatgcaaagtaaaaataggaatgctcaatctaccttcgtcacaggtagtcatccacttgctctacaaaatatgaatgaagtgaaaccaaaagaggggagtcaagttaatttcaccagcaaggaaaaaccacatgacaccagcaacagagtaaaagcccaactaaacggtgtaatagtactcctgatatgagaaagatatttgcaaaagtaccagccatgtttcaggaagctaatggagataatagataagaggt

SEQ ID NO: 364019 - DNA, 175 bp, Zea mays
gagggacgcgcacgttgcacgtgcacttccacgaatccgtccacgagtccgggtaggtgttcgaacacgctttctttacatccgtcacgaggaaggggagaggagggctagatgactgaggaaaaggtggacgctggggtttccgactaataagcccacttcgaacgcctgttcg

SEQ ID NO: 364020 - DNA, 261 bp, Zea mays
ttgactctcgttcccgacggcactacggacgccgcgattcggggtctagagggcgtccgtgtagacgatggggacggagaagactgcactcaaggtggagcgcaaccaaagggagtcccgactatccaagctcgagggacgccagtgtcccaaatggaggcgcgagaagagcaagcacctccagtacctactaagccaaggagacacgctacctgttgcaagggaaggtgaatgtgcaccccggaggccaccatgaggagt

SEQ ID NO: 364021 - DNA, 110 bp, Zea mays
ggtacctgtccgtattcctgggattcccacgtttgggtctactcgttcagccgatccatccaggcgtggtgctcctggaggagggcactgttgacgcacatacacgaaga

SEQ ID NO: 364022 - DNA, 245 bp, Zea mays
cacccaaggaaggggacaaccacaaggggcaaataaaaagacccgcgcgcaaagaacaccgccgaggcggagaccgccgagggaccgccacggcgcagagggcgaaccccgagacgcaaggcaccgcggcagcgccgcagccgccctacgcgcggaggaggaaggcccgaggggaggaggaggacaaggcgacccaccaaaacagggccaaaacagaaaaaaaaccccacaccccgccacagaga

SEQ ID NO: 364023 - DNA, 443 bp, Zea mays
gcctgacacctttttctgggtgactttgtatttgaacctgatgcgcatccagccctggcacttaccatccgcccgaatccatggatccatgcgggcttttcataaccaagccccacatatcgccaggtagcaggctttccccggccctcctccggacgcctcatctgttggttctgtagaaatcttgaaactgtacggtcaacccacgacaggacacacgaggttataggagatccgctaggaggcgcctcccccatggttgacaaggagggcaaactcgtggccgttctcaaggaggccgtcgacctgaagaacatgctctcctcttggaacagttcgagaatctgttatgcaccagtgagggtttcttcacctggcaagcgcagcagggtctcaagaactttgggccaaacaagttctaggagaacgaggagagccaattc

SEQ ID NO: 364024 - DNA, 387 bp, Zea mays
ccacgcctccatcgtgagcgagccatttacctgcgtgatgcattcattagctgagctggaggcgtatgaactattgttcttaataccatttgattgtgtgcaccttgaactgaactgcttcaattattgaattcgagatttacgtgatctacattgactttaggaacaacgatgggccactgtagctttgaattggagcccaattggctctttaaatggtaccctcctctcaagtatctcatgtaacacaccctcgttttcattatcttcaccacactcagttcaggacaaactactacctgtacatgcacattctatgactacattatttaacacccatggcatgttatcgtacacggtgtatgagaagtcactgaagggaaaaga

SEQ ID NO: 364025 - DNA, 306 bp, Zea mays
ccgcattaattggcgtccttggggggctttttttgatgtttggggaaggttattgaggagaacgttctgactggagtactgatggtgtggaatgcagtccttcagacgagattccgcgtgtttactcttgagaacggaatcacacttagggctatagcttgctttcagtcgggtggaagctggcacttcgagttctctcgtcatcttttcaagcccgtgacgtagctccccttcgctctccagctgctgatgaataaacttacagccttaggatttttctccataacaactgaagtgggagaacat

SEQ ID NO: 364026 - DNA, 403 bp, Zea mays
gccaccacaagaacaccaaaggggcattctatacatcttcacggagaggcttgagcgatccgagcaagaaaaaatcatccgagacgcagcgacgcaggtttgctctatgatctctgtggttgttgtgttagcagcagggactcacaacacacgaaaaggtccggttcacgaggctgcttctgttgggctcttttagaatcctcaagagaagcgtgttgttgggttaggattttgttctcacctcataacacctattctactaggagcagagatccatagaaccttttctatcttctggatccttgccgcctttcggcgttcgacggggggtgggttgcaatacccgctctctgttttagtttgatatcttggaacaaacgcacctcatttctgtacttttatc

SEQ ID NO: 364027 - DNA, 315 bp, Zea mays
ccgctcactcgtacacgcaggggggggtttcatacaacgtgggggcgggctcacactgcccggtcatgataacggtgatcgagaagttctgggagaacgttgcggacatgcttgcatggggcgcacgcgttcctgctatacgacacccgtgaccggacctacgtggcggttcgcgacggcattggggtccacccgctctacatcggctgaggctgtgacggagctggctggatacgcgtccggtgtgaagggcctgccctaggagtgcgtgctgctcagagaaggcatgcctgacgaggctcatgactgaccgcc

SEQ ID NO: 364028 - DNA, 186 bp, Zea mays
ccacgcgtccgctcactcttggctggccctttgctcctctggagagggcggcggtgacttcctcttccacctacctcgccatcggccgcaaaaccctaaaccccgccccctccgtaggcacagccgccacctccggctccttccgcgccacgcagcacccatgcctcgtcgccgcctccgcggacc

SEQ ID NO: 364029 - DNA, 371 bp, Zea mays
cgaagaaagggttatcgaggggggtttatttgacaggcagggaggagagatgagcggtggtgcgatcctcgccgagcttcatgccgaccacgctggcgcgccttggcggtccggagtggcccgccggcaagtgcaagcggatggaaggcgaacgacttcgaggtcgggtgtcgggagttcgacgaggacttcgaggaggaggaggaggaccacgagggggtggtggagagcaagcccgctttcttcgccgcgcctcgtccgtggggacgcatcccatggcgcgccaggagcagcggagccggcgccggctgccagaccagtagtacaagggcgttcggagccgcccgtggggcaagtgggccgccgagatc

SEQ ID NO: 364030 - DNA, 362 bp, Zea mays
cggttatgaccgctgtctccgtggcgtttatgtactgatcgtgcggagacatctaccgggctaagagcagctgccgagctaatgccggccaggccgtaccacatatcgtccatcggagtgaggaccgccgggggcattggcatgatgaccgggatctcgccgaataagagcgacaacatccaaggactaccatgatcctgggggtgcccaagtcccgagactcaggacgaactcaagaaggcgctatcgctaaggttgttatcaagaacgaccgtgacaagggtggagaccccgagatgttaaagggagctcgcacaagattatgaggttgtgagagatccagaaaaacggcagatttatga

SEQ ID NO: 364031 - DNA, 448 bp, Zea mays
gacgcgtgggggatcagctgcaggggtgtgtttggcgtccaatgggatctcaacacagcgatcgagttgatggatcatcagtaggcctgctcttggagcagcaccagcttgtgcccaccaccaccagcagcagcagcatcaagagcaccagctcaaatcacaagcaaggccactcgtccccttctcctcgccaccgacaagaacgacgtcgtctacgtccagaagggcgccagctccgccgccgattccttcggccgcttttcttcttcttcttgccgtgcaccggcgccgacggtgtcgctgacgaccgcctgcccgttcctgcagcggtgcttcttctgtcacggtgagctcgccgaccgcagggacatatacatgtacagaggcgagagggcgttctgcaacgaggagtgccgttgccgtcatatccttgcagaggaggacgatg

SEQ ID NO: 364032 - DNA, 369 bp, Zea mays
gggtacccggcgtcaccgggggggtttatggaggatccatcggggaggtactcaccagagttggcaggaagatgcacctcctgctccaccctctggacatgtaggacaatgatgcacccttacgcctacagcagcaaatgccaatcgcgcctccatagaacgacagcgcacgctcaccccagcgatgcttaatagccacggcgagaaacggctctaattactctggtggtggagccgacctccaccatgccctggtgctgtcttggcttttcgtagagcacatccacctgcgacagagctgtcgagggctactgatggattctcccttgctaatagttttggacaaggcgggttgcgctatgttcacag

SEQ ID NO: 364033 - DNA, 325 bp, Zea mays
ggtcaccgtgaccgccgacggcgacgatttctacgtagcgactggggtgctgatcggggtcttactggcggaaccgaccggtcggcccgttgtcgtgaccacccttgcgcatgctcaggatctcatctacgccgctagggacgacgacttgatggacgtactcatcctgtactgcggtggtgtcatcgatggactccacaaactcgaacgatcgggaacctcttcagaaggctaaggccgataggcacgttgttgtgacggaatcctagagtcaaaacggagcgaacgaggatgtcaccaacatcgcgaagaacacaccactcga

SEQ ID NO: 364034 - DNA, 275 bp, Zea mays
cactcacgggggcagccgtgggcgttgttttctatttggtgtgcgtaatttgcagagcatcaatacttgttggacatagtgttctggccttggtcggagcaacactctgtggatagagttgactgcagcatctccatttgtgccgccgcctaattacacatgctggttcagcgtttctttcaggtctcgctggactgacacaactcgaactatctggaggttgtataactggatctggcagaaggtgctgcagatttggtaagattcttcagtcc

SEQ ID NO: 364035 - DNA, 224 bp, Zea mays
agtggtcaagtcccaggccacctggcctggcttagaccttccccgtcacaacgcgagccgcatcgccttgtcttctacacgccatacacgcccgccttcccttacccggtgaccaggaccccttgcccgtggcgccagctagctcccccgggcagtcgtaggcctcccggagctcaacacgcacgcatgtgggttcagtgaggcctggttgtgcgcgttcctgc

SEQ ID NO: 364036 - DNA, 220 bp, Zea mays
ccccccttttcgttctcctacgagggggggttttttgagccccacgggcatttttttaccagacggtttggtggtgtggccactggcgacgaatcgctcaaaatcagaacaggagggcgagaaacatagggagaatggaggagaggaacggaaagctggaaaaggcaggaaagacccggtttttgaccccaagtaccctgttgagggcaatggcggccac

SEQ ID NO: 364037 - DNA, 329 bp, Zea mays
ggacggcagtcacagtcagggggggggcttttacatccatggagggctactacgcctaccagcacagcaacagcaacagcagcggcggattgagctcaaaggagaagaggccgtcgctgaagcgggggcagctcaagcggcagatcgtgaggaccatcagcatcctcgtggtgccgaggcacgccgccgtcgctgggtcgagggagaaggcagatcgcgcgagcggattccgcggatgacggagctacaactgaagatggatcttctggcgacggcgtgatcagagatacgatttgcaacgccaggtttgtgtgcacatactactggcc

SEQ ID NO: 364038 - DNA, 167 bp, Zea mays
ccctccctgtccgcccacgcgtccgcaccacttggcgcccacatcattttatagtctgaccgcccagccccgctgatcggaggagacgacggaccccttaccttcctccacgcgaagactaacaaggtggcgcggtgccccaactgcatactgcacgtgcctgacgt

SEQ ID NO: 364039 - DNA, 370 bp, Zea mays
gtcctatgttcgccgatgcacgcctagcatctgagtccagctaaatgctcagctcacacagcacacacacgctgtagggatccagaagaagctgctgaagatgatgcaaccgaaagtgtacacacttggggaggaggccatgctgaaccccgctgtcgactgacgtctggtaagcggtggggaggctaccaccgttccctaaagcatggaggaccccccttcaggggacaatggactgctacttaccagtccccatgatcatagaaaataattctagccttaggggatcagtaacacccatcgtccaatgatggcctagttcctagattgaggcacatatgcctgctgaacaccattcactatattgtcc

SEQ ID NO: 364040 - DNA, 183 bp, Zea mays
ccttctcgtccgcccacgcgtccgggccagttggggccgcctccagtttctagtgtgaccgcccagtcccgctgattggacgagacgacggcccccttgccttcctccacgctatgagtaacaaggtggcccggggcccgttcttcatactgcacgtgcctgacgtcggtctccacctctagg

SEQ ID NO: 364041 - DNA, 249 bp, Zea mays
ccctctcgtccgcccacgcgtccgaggcagccagcccctgcactagttgcccctgctagggtccatggccgctgatggccccagacatctgctcggtggccttcctcgaccctaagacaaccacagattcccgttggcccctcctgatacaagcactgactgtctgctatgtcacactgtgctagtagagcccgttactactggagtttgcgccacctccctggtgctcgacgaaatgaccatgacgag

SEQ ID NO: 364042 - DNA, 149 bp, Zea mays
ttttctcgggcggcctgggtgcattgccgccttgaggactcagtcatgaaaccgcctgtaggggctggctacaagatgagggatgttggatcagatgatggcctactacagcacctgttggggcctgcggtctcgtgctgtgcacctgg

SEQ ID NO: 364043 - DNA, 142 bp, Zea mays
tccttgctgaggccgaccaagcaaacggcccgtgaggtctctcaagaagaaagacccgttcaggagggggacatcatttggtatcgaccgtctcaaccagcttttcgtcatgcaccgcaccgcttctgatacacgggctttg

SEQ ID NO: 364044 - DNA, 178 bp, Zea mays
gccgtgcgtccgaccaggactgctacacctgcgccgggggcgatcttgatttgcatgaggagctgacgggcgaggccggcttggcatctaccggcgcaacctgctgcaccacatagaggacgatcacgaccgttgcccccgtccgccatgttcggatgactcagctccacaccgggcc

SEQ ID NO: 364045 - DNA, 304 bp, Zea mays
ttatatgcgcgcctagactggcaccccgaaccctagctagcacgttagcggccagagagcaggcatgggacgaagcctggcgctcgtctccttgcttgtcctctgccttgtcttcggcgtctcctctgccgattcgccctttgttgcgccgcacatgaaggttaagatgtacggacccatgtcgggcgtcaagcgcgtcgtcgtgtgcctcgacctctacatccagggatacaagactgtctacgatgtggcacttaatgactactttagggccacacatgggtctgagctagccactggagag

SEQ ID NO: 364046 - DNA, 128 bp, Zea mays
ctcacacgaacgggagaaagggagccgggcaaaggggcgcttcaaggaggacgacgcggcgacgcacgggaccgcccaggcgaccaaccgcgaaacccgaccgcacgagacaggggccaccagggacc

SEQ ID NO: 364047 - DNA, 153 bp, Zea mays
acgcacgagtccagggggcgggggccccactcccgggcggctcaagcagcgctggccagatcaccatggcttgtgactcaattaccttcaccagatgcaccatagacacggtagtggtgatactaaccactctcactttgtccaggagacctg

SEQ ID NO: 364048 - DNA, 220 bp, Zea mays
gccctcccaagccggagaaaggcccaccacggaagaggggcgctcaaagaacgagcggccgaaggcgcacccagacccacagacgcccgaacaaaacacgccaccagccaaaccggggcctcaaagaaaaagacagcgaagacaaccaagggcaaaaaaaggcacaccagaagcaccgcaaaacgagcagacagggaggcacccacgacgaagagcgcca

SEQ ID NO: 364049 - DNA, 301 bp, Zea mays
tctatgcgcgcgtggactggcggcccgaacgctagctagcaggttagatgcgagagagcaggcaagacaacctgcctggcgctcgacttcttccttatcctcgtccttgtcttcgtcgtctcctatgacgatgcccctttcggcgccacgctcatgaaggcctccatctacgccaccatgtcctgcgccaagcacgtcgtcgactgcgtcgacctctacatcgagcgatacaagaatgcctccgctgcgtcacttaatgacgacgttaggccaacacatgtatccgaacatgccactggag

SEQ ID NO: 364050 - DNA, 387 bp, Zea mays
gttgtctctatcgctaaaccagacatggtcaccgccgtgggtgctcgatctgggcatgagcctgggggggggcatacagtgaagatgggtgaggtgaccctcttcttcaacatcgccatccacgggcggccgttctgttatttcgagatcaactcccagttgctccaagaaccaatgcttacctactgcggcacatgctcctaagtcacttggcgtattgggacctacacttgaacaggatatgcatgcttgtgacaatacacatcacccaatggagattcccaagctggcctgagaaaggacagctactggacacgactacatgagcaccaatcaactggattatttggagacatgcatatggagcgactccatgttgcctttcac

SEQ ID NO: 364051 - DNA, 242 bp, Zea mays
ttctacgcgtccgacgccatctgcacctccctcctatcggtcgccctctcgccgacgccacccatggaggccgccgtgatcgccaccacctcccggtctctgccgctccccttctcatctacccagctgcagctccagcgccggtgccgtgccgccttcctacacatcgtcgactgcaaggcgtacgaagacgacaaggagaccgctaaaggttccggctcggaaccccggcgcgagcccac

SEQ ID NO: 364052 - DNA, 182 bp, Zea mays
gcttgtgcgtgcctacaaacagaacgggcaaggcggagctgctcatcaagcaggtggctcaaagggatctgctggcattatactccctcgccgtgtaccaagaccaatggatcagcgacctatccgtcgtcaacacaccgggcgggtacccgtgcaagcacccctaggacgtgaccgacagg

SEQ ID NO: 364053 - DNA, 185 bp, Zea mays
cgccgaggaagcagcatgcaccaaggccgacatgtcatctacagcgccggtggagctgatcggcttattcagcagcccggacgcggacagggcggcggcggctctgcacctgaaaggggtgccgtacgagctgatcctggaggacctgctcggcgaccagagcgaagtcctgatgcaccacaacc

SEQ ID NO: 364054 - DNA, 250 bp, Zea mays
ctttctctcacacagacaagtggttcccaaagccaagtgtgtgtactagcaaccagttagctcgggcggcagcatgcagccatcatgtcggaggtgatgcaccaccactgattcaaccaccacaagatggacgaggagcagcccgacggcgagtacgggtactccgagaccgaggtggtcatccgcaccggcgagggcgagtactagaggcacatgaaggaggatgaggagcacaagcacatgcagcacc

SEQ ID NO: 364055 - DNA, 189 bp, Zea mays
ataataccgccgaggaagcagcaagcagcaaggccgacaggtcatctacagcgccgggggagctgatcggctacttcagcagcccgtacgcgcacagtgcgacgtgcggtctgcagccagaaaggactgccagacgagctgatcctggaggacctcagctgcatcaagagcgagctcctactccaccac

SEQ ID NO: 364056 - DNA, 146 bp, Zea mays
ccttctttgccaccatttgatgcaaggcctgtgtatcattcgacattaagcctgtcggcgctccgaaacatgggcggggagacccatcggagcgctctggagcggagttttccaaggcacacggccctcccggagcttaacgacac

SEQ ID NO: 364057 - DNA, 306 bp, Zea mays
gcgtgtaatggctaccgagccaggagcccaaagccagagctgcccccagccagaggccggagccgaatcgacccagctggaaaccatccaaactgctcctgaatgacggaaccgggctcccgaatctgctcgggacatcgcttggaggacctgagactgagctgtgctctgagtgcgagagatattccgtgattctccagcgcgaatgcacgcactataggcccggtgcctgcggtggacggaccggtggatctggatccggaagcctaacagcgacagatggagctattggagcagaacaacact

SEQ ID NO: 364058 - DNA, 280 bp, Zea mays
agagaggccgtggaaaggaatggtgtattttataccgcccttccctactcccccctccacctctctactgtactgctcgcaggtcccctcgatcgatcgctagtcgacttcaacctcacacaattatttgtgctcccgctccttccgtcccgtccttactcccccctaccatcttcctcttacaaccgccgctgctgctgacttgcctctcaccccaggacacggcgagggacgccaaggtctctgccgggatggcgtaggctgtgcctctcgcgcatta

SEQ ID NO: 364059 - DNA, 173 bp, Zea mays
cccacacggaggcgcacgcacgggggggttttttatcggctttccgctgtagccacaccccgccagtaagaggatgaggtgtattatgcccgcggggacgatgattcacacccttggggaggaggtcaaacacaacaccaaggtccactgctgcagcgtgctatgccgcaggg

SEQ ID NO: 364060 - DNA, 230 bp, Zea mays
aatatatccttcctcgcggggggctctgtatggagctgccgccattgacccacacgacgaaccgagcaagcacaagcttagctagcgtggaggcgatcaaggcgaccactgccgccgcgccaggctagccaaccagctgctcatcgttcctagctgtagagccgatggctggcgctgacatctacgtcgggacggagctccgtctcggcctgccgggaggaggcgccgat

SEQ ID NO: 364061 - DNA, 218 bp, Zea mays
cgcgcacacaggcgccccaagggggggcttataggggccgtggccccgatcttccccgccctgacgaaagggagggttagtcttattccgacgggtaccaacaagaacaatgagactatcttccagatggagatccgaccagggggcgaaacctgcaggccggtaaaaacatggaagtttagaacctcatcctgaggaaggagcagctgttactccat

SEQ ID NO: 364062 - DNA, 145 bp, Zea mays
cagagcgtctgtcgaagggggggtagtaataagggtctctgctctttttcccctcaaacacgggggagctggaacacattcttatcttcgagtggggtatatatactcgtgcggagatgctagtgcctccagattcaaactgtcg

SEQ ID NO: 364063 - DNA, 246 bp, Zea mays
tagaagctgaacatagcgcgggggggctattatagaaccttgccctgtttttccctggacatcatgtgaaggccgtccctatccttgttggagcactaagggtccctaacggagcctgagatgggcagaagctattcaaaaatgtggatgagccagaagacttgattcatcggagctgttagagtttatgcccttgaggaaccgggcctagctgcacagactcctaaaagaagcgcggcgccatac

SEQ ID NO: 364064 - DNA, 213 bp, Zea mays
cacggacgccctctcccgggggggtatattaacggggtcccgctggttctcccgcctgccacaaagggacacacctgtgtactcccaacgggggccgtcccttcacgaaacatgtggaaaaccgggcgctcgcccttgcccgcctgcagcctgctcctgtctttggagctcagcaccagccagagccaaaggtcctctttttgtgaaggaact

SEQ ID NO: 364065 - DNA, 175 bp, Zea mays
ctggcacggttcacgagggggggtcctaatatgaggacccctttttgttcccgccaccacccgggacaacatccagcttttccagaaggaaggctgcaagcccgtccgggataaacaggatgcccttggtgcactgcctgaagctgcgctcaagctgtccaagatgcaatgaggc

SEQ ID NO: 364066 - DNA, 184 bp, Zea mays
tggtcagaggccgccactgggggggtgagtggtaaatcatctgtcctttttttcccctctgcgcaagatgcagactttgttcatgttactaaaaatattgccgaagcttcaacaaatgagagaccaagcggtgctgtcggcactgtgatgcccacgggtagagcaatatcatagctacacactt

SEQ ID NO: 364067 - DNA, 186 bp, Zea mays
tactgggtcgatgcgagtagcttttcgtgcctagcagcgtcttctccagggcagtgagcgaaaaggttacttagagtatcgctaacgatccagctaggtagacaatatcaggcctgctcaagccaggctggaaagggagcaccactggtgggtacacaatacaatgtgctgacagtgctaaaaact

SEQ ID NO: 364068 - DNA, 112 bp, Zea mays
ggagcggatcatggacgggacaccttgccgtcgagggcgagttggccccgctgcacgtgctgccggactactcaagaaggccgcgctcgcgacaagctcgcctagctcgcgc

SEQ ID NO: 364069 - DNA, 176 bp, Zea mays
gggggggtagataaggagacatccctttgtttctcccccggcccctagagaggatcctgtcaagaagggcgaagccaagacccaggctctgcaggttgccatggttgagaagcctggggcagcgaagaagaagaccaaggctatccgcacgtctgtgacattagacctccccacga

SEQ ID NO: 364070 - DNA, 369 bp, Zea mays
ggtcgcaacgcggcgtggaaaaccctattcggcgccggtgcggtgcctgcaccgcgccgtagggtttccgcctcgcctcgcctcgcctcgcaaccggcgatcgccggtgcgcaaagtgtaaaggaagggattttgttgacgccgagtgccagatgccaattgtttagccatggggaaaccacaaaccgatggtgaccagtcacctgtaaactcagatactgatgtgatggattgcctgaacttcgatggccatggagatgttgaagttgaagatccccacaaggaggttgcaaaaggggagcagcagccttctggcgaagttgatgaacagcagtctgttatggatgttgatttgacatgtataacatc

SEQ ID NO: 364071 - DNA, 165 bp, Zea mays
tgctggcgtagccccacagatgggggtttttatcacctctgccgctttgttcccagccccgccgagagcgggagtaactcgctgtgcgtccatctacgggatcgtttgacagaatatcgtcaagagggacgcctgtgttacacggactgccctcaggacactgtt

SEQ ID NO: 364072 - DNA, 318 bp, Zea mays
accacggtacctatgccggcccggggcggtgcgccgccggcaaatccacgctcgtttgtctccatcccggccggttctttctgcgtgttctcctcgtcattttgcgccttgtattttggtgctgggcagtgctgctggcgctggataaggaagtggcaactggcaagcggaagccatggcggagatattttataaggatgaagaggaggaggaccgaccggaggaggacgtagtgcggccctgtagtggagcgggattggcgtcgccgcagtcgccgcgcgtgtgcgtaaccggtggcggcgggtacgtcgcctcatg

SEQ ID NO: 364073 - DNA, 219 bp, Zea mays
caaggtgggaccaagcgtgtgtggatttttttagcctatgtgctggttctgcccagcccacgaagcgacattcaattgtctggcgctatgggggcacagcaaccatcgttcactggagcatgaactgagtgtcttgcgatgttaggtccctagaacggagttgcgccacagcaaaccggtgccgtggacagactttgcggtgaccgtacaattcacgtt

SEQ ID NO: 364074 - DNA, 266 bp, Zea mays
cacgcgcacacccactcgttcgcttttttcccttagagcccgcagtggatccagccatcgagcgaaagagactgacttcacatgcgcacaagcgggagtggagcccgcccacgctgctgtaggtcccctcctcacggcgcgggcactacactgcagggtgctattcaccatctagctcggcaggatcttgggtcgctggcgctgcccttgcccggcacccagtagaggaggcggcagtgccaccccttgggtagggaccccagaga

SEQ ID NO: 364075 - DNA, 190 bp, Zea mays
ggacgcgtgggatccattcgtgcgttttttatattcaggcgggtgtctggctccaactggcgctagactgaatgccaaggaaatgatttctgctggccttgctactcattttgttagttttgaaaaattggaagaacttgaaaaacgcctactggcttcggccacaggtgctgagtctgcagtccgagct

SEQ ID NO: 364076 - DNA, 196 bp, Zea mays
cgcccactcttggggggatttttttacggatttccactttattcacactcccaagccaagagagccagatattatgctcctgacaggtggagcattacatcacggtacgctgtagctgcacgtcacagataactggacatccaacagacagctatccccaaggctgctaaacagcctctggcgtggacggacctga

SEQ ID NO: 364077 - DNA, 232 bp, Zea mays
ccaagcgagcgccccctctttgggggctttttttccgcacatccacgttaggctcacacgccgggcaagagactcagatattatgcgcatgagaggctgagcatccatcactggctgcgggaggtcaacgtgacggacaactgcaccaccgacagacagcattgcccactgctgctcacacaggctccaggcgtggacggagcttcgctggcctggcacccggaggagttcg

SEQ ID NO: 364078 - DNA, 500 bp, Zea mays
  unsure (1)..(500): unsure at all n locations
ttctcgcgtccggattgatccgataaatctgaagaagtttgaacgttcgctggtgaacccagggtctatgcggagagagattctaatatcaagtggacaccctacctgggttttaaacttctataccaccttgcgccaaaagtactcatatgatacactgtggggtgattctccaattgctgtctcttgcagacagcttatagtgcagttatgctccttggcaggctctgtgtttcctaatgataatggggatgcacagattaaacaccttatgctgatattatctgctgttgttcaatggattgaacctactgatgtaatcacagcatcaatccgaaatgggggaagtgaaagtgagttcatagatggttgccatgccttgctttcaatcgcatctgtaactactggctcactttttgacaacctnctaaaatctataaggccctatggtacagataatctgctttctgctttgacgtcagatgctgtcaagtcggttc

SEQ ID NO: 364079 - DNA, 333 bp, Zea mays
tataacgcacgcgctgccccaccggcgatggggcgggatacttttggccaacaccttgttgagcaccggcggcagcaggggctgccgcggcggctagcgcaagaccctgctgaagacgctgctcccgctgttaaagccgctgatgaacctgctgcagctccagctggagctgaagctgcgccacatgcgccaggtcatagaggacctcctagaggccactcaccaggtcactgtccggcacatggtgcagcacgagatcctggaggccaaccaggagatcctgcaggtgatcctcgagctcatctgggagctcctggccattatcctggccca

SEQ ID NO: 364080 - DNA, 475 bp, Zea mays
tggaggagttgaatgctgtaagcttgagtccctatatggttatcagctgttggatgaagctgctcgtagcaccgatgacgtgacggcatccgcacatgttgaggagaagctatcaccatcatccctagaatctctaacaatattggactgtgacaggttgtcagaggttgtcaatcttccttcgtctctcagggtaatagatattcagggttgcttcaaactacggctcatgtcagggcagctggatgcactcaataccttagcaatcaccaactgcccggagttgcgatcactggaaacatgcatcgtagatctcacgtcactggaaatcctcgctctgtgtggttgcaaaagcttggcgtccttgcctagttcgtgggcaggacgacaagaatattcatctctccgtcagcttacgattagggagtgcccaggtataaaaatcgtgccttcaactctgcagcagcgactggac

SEQ ID NO: 364081 - DNA, 330 bp, Zea mays
  unsure (1)..(330): unsure at all n locations
cccatgcgaccgcccacgcgtccgcacacgcgnggggggacgcttgagcggagacgcgcgcagacaccagaacaagagggagaggaaacaagggcggaaccaacctgagcaaaagaggggaaaaccacggaaaggcgacggacaagccgggaaaacaagaagaaggaatgcgaacaacgacaagccagtcgaaaaaagagctggacgaacccaaaaacgacaaaaagaaggacaggacaaccaaacaacaacaacgcaaaagtaagaggagagcaaaaagaaagacacccatgaggccgaaaggaaggcgcagaccaggcagagagaggc

SEQ ID NO: 364082 - DNA, 178 bp, Zea mays
ttgttacgcccagcaccgcccgtggaatgagcgaggagcattttctggagcggtagcctgacaacccaccgggcaggctggagacaaaggaggcacgggcggagggcttacaccgttagtacgcccaaaccgtgcccgcgacaggcgagacccaaccacggcacataaaggcgcacct

SEQ ID NO: 364083 - DNA, 278 bp, Zea mays
ttatacaagggagcatgtaaagctagcgaaccgaccgggcaatgtagaggcggggtcctcacaaagccacaagaacaaaggctggaaaggaggcacgtacggaatcacccagaaggggcacctcgccgagccatggatcactctggctactagaagagccctgcatgccagggctaacacgtggaactaagacctcacaaactatggcactgagatccacttacatgactacgagctccagaaccgactctgggacgccatacaagtacaacaccttc

SEQ ID NO: 364084 - DNA, 338 bp, Zea mays
ttattcttgccaagcgagtgcaggagagggggagactcatcactggagagcatccgcagccgcccagtgctggcacaaccgatctggattgccaacccctccgtccgctcaaggggcgccgtaccatctgcagcctccatgcctggatccgtaccggaccccgtggccctgctgtgttatctggctagagatccggccggagtgacattcctgctctcggtgaataagtattctggcatgctactcctagctcaaatagagaactattagagctggatatcaatatactggctgggatatgctccaaccaaagtaagctgatgtgcctgcactgttta

SEQ ID NO: 364085 - DNA, 416 bp, Zea mays
  unsure (1)..(416): unsure at all n locations
ggctaataaagacccgaccgaaagcaaacgcggggacggagcccaggagaggccggaaccaaccaaaccaacaaggagcaaacgaagaaaggagggacgcacgcccccagcgcggaaggcccaccacagccgcgccacggcaccaggacaacgagggcgggcccagccgggaccaccgccagcaaccaggaaaagcgggcgcagcaaagccgaaacagagagcagggggcaagaacaagaaccccagcaacgnactagagacccacgacaaggaccagagcaacacggcggacgaccgcgcgggcgggcgcaagaaagacgacaggaagcagcgccggagcccccggccgggcgacgaagacgacccgaagacgcccgagacggacccaaacaccacccgggggaacaaggcaagg

SEQ ID NO: 364086 - DNA, 323 bp, Zea mays
cttgtatgggggctggccatcagagtatggtgccggagaaactacacaggctcttgcgacgactgacgcatatcgtgtgcatgacatgcaccttggggcccttagcgcccgcctcgatgctgtcgcctgggctggtgaacagacagctctgcccgctactggtagtgctgaccttgatggcgctctccacgataagaacccatgcctgtacccagcaactgagacactgactgataggaatgctgcagtcagctacactgtgccaaaccgggctctcaggcaggcataacacgatgctacatctgggctgatgacataatact

SEQ ID NO: 364087 - DNA, 262 bp, Zea mays
acgccccacgctgtgccggcaccagctgtcctggcacagaaaccagctagctcaggtggacgagacggaagacaggacgacagagctggagggcctacgcaaccacagaatctccagagacgtaccaaggcgctggcgctgtcaagggcaaaccggctgaagcggacgaggatgcctcctctggagggagcgatacccggcccaagatcgaagagggccagttaaggtgtcagcaggagctggatcttcctggggtagtacg

SEQ ID NO: 364088 - DNA, 344 bp, Zea mays
tcgttgtgggagaaacttcccggccttggagggcgaagagctcgaagttctaaagagcacgcccaccgggtgcttggcggaactgctcaaccgggggtggctgccgatctctgggattcgaggcgatctagttgcggtacgctgattaatcacgcgctgtgtagggcaagagttggatcattctcaagagaaaatgatgaatgaacctgaagcttggatgatctgatcaagtgccagtagcggatgagagttgctctgtaagcggacgtgatgtaacaacactgacttagagttatcccaggtacgctaattcatcacgtgctgaggagggcaagagttggatc

SEQ ID NO: 364089 - DNA, 397 bp, Zea mays
ttatgtgggctctccttcccagccgtggacgtcgacctgtgttcctcttcctcaagcccgcaaccgagctgctcttctgtcttgttcctggtggccggcgccctctcccatggtcgctttctgcggctgaggacgtcgtcaggatcatccaacccctcttttccctctagcctcatgctctagccgccatggagctcgccctggcccctgcgtattttttatttgttttcctgcagctagcccttttcagtgctcctgcacgccggcgagcagcccatgtggctgcccaagccgggctcgaccagcctcatgcttgctctgcttcagcagcaaccttagtgtctcaaggtattccaggtcgtgtgcagcaacaatcggtatagctcgtgccgaccat

SEQ ID NO: 364090 - DNA, 371 bp, Zea mays
gttacatgccgacaaagccaaacatgcccggatagccaacacacttggtcctcagccaggagatcaacgaactcaattctcgtgaaccagatgagctgaacatattcaaaggcacgacacggaaccatgtggacattggcatgataactctaccagttgtactccagtcccttatagctgtagccctcgtcaagctcgccttaaccgcaaggctaagttgagatctgtggctgggatctatacggtattgctctcctggactggccgatgcaatccatggggaagctcatgcctggctctaaccgcccatcggtagaactgttcgaatgctgatgtaactgcatggagagcaaacaagccgctagcgacac

SEQ ID NO: 364091 - DNA, 336 bp, Zea mays
cccttgcgtccgcccacgcgtccgcccacgcgggcgctttgctcataggctccctctactctcgttctcccgcgccatggtggcccgacgtctccaactccaatgggagccagtcagaaccgccgctctcctactcttcctcctactcgccgtcacgggagcggctgctgactcggcagcgccagcggggcgcacggaggcggtgacgttgccgaacggcgccgcggcggcggacgacttgcggtgctcgaggatcggccgggacgcgctcctcgagggcggcagcgccctggacccggctgtggccttcggcttctgcctcggcgtcggtagccc

SEQ ID NO: 364092 - DNA, 363 bp, Zea mays
tttttaagaaaagcgagtagcccgtgagctgctgcggtgcgagggagcccagggtttcgtctcgtctggccctcttctcttggcgcggccatggacgcctacgaggccaccaaggtggtgttctcccggatccaagccctagacccggaccacgccgccaagatcatgggcctcctcctcatccaggaccatggcgagaaggagatgatccgcctcgccttcggccccgagtctctgctgcacgctgtcatggccaaggcgcgcaaggacctcggcctgctcctcccggcctagccgacctccgtcgcagcccgcgggcacgcgccgttcctgcagttcccacgccagaactccgggcgcgcg

SEQ ID NO: 364093 - DNA, 375 bp, Zea mays
tttgttcgtgggctctcctcgtgccgccgcagcccccttaacaaccctactacgcctacccggccgcctcctacgtgcagcccgccccaccggcgccgccggccccgacgctcgtcttcgtgccgtccccctgctccccgatgctcgtgcgcctccgccgcctgcgcccgcgccgcgcgtcctgcctccgccgattctgcgcgcgcgcgctcccgctcctcctcttcctcgcgctcctcggggggctcgccttcctcctctacccgtgcgccccggccgcccgcgtcgccgaccttcgtgtcgacagcttccgcgcgcagccgcccgtcctcgggcttgggcttgcgctgcggttccccgtaggaacccccgttt

SEQ ID NO: 364094 - DNA, 323 bp, Zea mays
gttcgacccacgcttttgttcatgcgtccgtggacccgtggtctatgagcggtaggtgaagcagcacgactggaagcggcagcggaagcggggttttggctaaagtacgttaaggtcttttttatcagcaatcccagtaatgtgccttgccttttagacgggactatacaaggacaatgaatggaacctattcctgggcctccatgtccggaggtccatgctctaaccttgggttatgccagggacatgaatggctatggtccaataagcacctcaaattcttctgggccaagcattggagttagctcattggtgactgaccc

SEQ ID NO: 364095 - DNA, 396 bp, Zea mays
tcttttcacgccggccccacaagacccaaggggcaaaactatccagccaccgttcacccctccgcactccgcctgcgccgcctccctgccctcaactccacgcccggcagggtggccgctcgccggcagccaaaccctaggcgatcgcggaggccaaccacgcttcgggcgcgatcagccgccgacatgcagggcttacccggcggcgcccccgatccgcagcagctacaggccaccatgctcgccatcgagcaggcctgctccctcatccagctgcacatgaatccatctgaagcggaaaaagtgataacttcgctgcattcgtctctcatgccttatcaagtatgcaaattcatttttgagacatcccaaaaaccaaatgcaagattccaagct

SEQ ID NO: 364096 - DNA, 403 bp, Zea mays
tttttcgtccgcggaaggggagcagttctcgccttctcggggaggtcgccagcggtaacggaaaaaaccctcgtcccctccccccctcctctcacccgctccctgctggtccaaatctagggttttggcggggtttggatcgcctgtcctttgagcggaggttgttcgtgccgcgctgacttaaggagggtttctgcgggttgggcagaggctttgcagcttttgggtcagacgcagtgttctccaaggctcactaaatggagtctcacaatggcgaggctgatgatttgcctccaccaccccctttggctgctggtgttgaaccacttaaagcccgatgaaacaaagatgccattgaaacctaagagtctgggtccaaaggaatggcttttggcagaaaggg

SEQ ID NO: 364097 - DNA, 107 bp, Zea mays
tggtcggctcacatcgacgcggttcggttccagggtgactcttactgccgactcgggaacctaccctgttccacgcttcgtgctcgcttgccaggcggacatggccg

SEQ ID NO: 364098 - DNA, 325 bp, Zea mays
tctttagaccccccttccgatcagcaggtgatagatcactcttgcatctcggtcattctcaaactgctctagctttagccataggtagcacctagccattcggtcccagtagtaatcagcctcaacatcgatacccatggtcagtgccgaagtccagaccccgaccgctaaggcgaccgaggaagcgcctggggtggagaccccgtatgcggccggcggacagcccgaggaggctggccccgccctctaggccaaggtggacgagccagttgcccatgcggagaccgagccagatgtcagcgctgagaccgaagcggcccccgtg

SEQ ID NO: 364099 - DNA, 440 bp, Zea mays
tttttgcgtccggctttacttactaggagctgaccggccttggagcatgtggcaagcaacatctggagaatggggggcgccatgaagcacaagctgctgaaggatgtttccaaaatgttgttcgtgcctaatgggatttcgactgagagatctactagatcaaattgtaacaaggatcatgctatcaaatcaaaagcaacacttaagggtgctttgtctttaattgcactaaacattgtcagttacaacaggaagatggaaaataggttttaaacactaagagagctgggatccaaaggaaaaagaagcaacccacaggtgcttgaagagttcatgtgggaaaatgaatgggttgaagaaaatgaagatgatggtgacaacaacatatagcatgctgtggatggggcattaggagcaactcaggctttttgaggcagaaa

SEQ ID NO: 364100 - DNA, 257 bp, Zea mays
ttaattttccccagccagatcgagcttgcaaagcacacgttgagcaaaaggccacgtgagataaaggaccgttagctgacttcaaccgtcaccacgccactaagcagcagcaaataatggcgtgagcatgagtggagcccgacagcagcggccgggcggtgcagcccgcgcccgccgtggtggggcgcgcctgcggcagcacggagccagggctcgggaagcgcctaaagaccatgctccatgccggctaccacatg

SEQ ID NO: 364101 - DNA, 243 bp, Zea mays
ctgattcgtgggggcctgcgacaacccgaggggggtgtgtgagacgagcctccccgccgacaccggggaggcagcgcccagagaactgccacgccaacttctgccgctacttcacggcagcaggtagggcagacccggggctgggggcccccgtctttgccgggcgccgacggccgtcgtgcaactgaaacaccggggtcaggggcagagacctccgccggtggagcgccagtaattaccgcc

SEQ ID NO: 364102 - DNA, 284 bp, Zea mays
ttgtttgctctactctagttctgtactgaacgggggactagataacaacaagcgtgaaccatggcggacaagtacggtcgtagcggttacggcaggtccggggccggcgacgactacgacagtggcttacaacagcaagcccggcactgctgactactgccgtggcgaatgtggttacaacaagttgggcggagatgactactactgtcgaagaggcagtgatgggtacagaaggtccggcggccacgactacggtcgcggcaccggcggcgggggttacaaca

SEQ ID NO: 364103 - DNA, 321 bp, Zea mays
tcgttcacgcgtccgaggacgcgtgggcgcgcacccacagagggaaccgagcctagccgaaccttcgagaagtctccggaaagccgtgtcgtcgatggcggccgagggcggcggcggccaagagacgttcgaggcgcgggtgaagcgcctgttcgggtcccgcctgttcgacgccgtcccggactcctccttcccgacggcctcctggtccgtggccgggggcgacgttcagcgccaacgctgggcgaagccgtcagaggcccgcgacgcggaggaagaggccaggggtgaggcccgcccgggggacaccccctgcgcctt

SEQ ID NO: 364104 - DNA, 299 bp, Zea mays
atttcctccggcgattcgctcccttccgggggccctttacacgcactggcgggccctccaaccccgcaacctctcaccgtcgggccccgccctccgaccctccacgcgcaaatagcccgcctccatccactaggaggatcccccatgagctaggagaagtgttgatttggatattcgtggagtgtgcaatggtggactttgttcgacgggtccgctctgccctgctcaaagtgctgcgaccttgacatacccaaacgggcaaagggccttgaggacccccaacgcctggctagagaaac

SEQ ID NO: 364105 - DNA, 369 bp, Zea mays
aatgctcccacctcctgacggcagctcctggggggggtttaagctgcacaggggggtttacaccctgttgctgctcaggcgacatggtctgtgcctgctaaagaaggacaacattgtccagcaaatgcaccagcggtttatgctctgctacaatgacatggactgctcccctgtgtctgacaccgatgaggagatgctccaatggcccggtctggtatggcctaacccacatgacccttgaggaggacctgttggatgccccactcagcaccactacgattacagaccttgtcactgttctcacaaggatcaactatgggcaaagcacacacacaagtggcctcgtctgcgccttgatcttagctggat

SEQ ID NO: 364106 - DNA, 409 bp, Zea mays
tctcagcagcccagggctccaccatcgggggggtttgtctgacggagggcgggctctagctctctgctcgcaccacatgccttttacaccctccctatcccaccgactgagtattcaactagagagcttccttacacaccactcctaccactacctcgatatcttactaccacaactccacacgcctaacatacgattactatcgatgcggggaacagggctaccctcccagacacctgcaccggtgaacaagatctttctggaccactataccataacgactttcttgttgcatcagagtggactcatccccaagtctcggttacgaacgtcactacagacaaccactgacctctggaggttgatcccggggggcggaccatacgacacctttccactaaagacctgc

SEQ ID NO: 364107 - DNA, 505 bp, Zea mays
tcgttcacgcgtccgatcccgtagatttaggggggcattgagccatgcgagggcgggtttgagtccagatctacgtggtactcatttacaggctcttctagggggtggtcatgggcatagatcaaacaccgcagtgaccacaaacattcccagggatcctcttgttctatggttaggcctgagctactcagcatctgctgcaccagaaccatcaaaattagcatcttgtattccagaccgtaccgtaatacgaaaggagacaccagttcagccttgggaatcacggcatatatatactcctgatataagtttggtagattctttatggaccacatttacgatagttctccataaatttgaagctattctactaattacttgcatatatgctgaaaacgatctttatgaacctattgcacgttacgttctcctttagtcctttatattatacaaatacacttacaattggtgcctctagatacggtattgcctgaggtttggagtt

SEQ ID NO: 364108 - DNA, 276 bp, Zea mays
tcacggccggccgaactgagagctgctgccaccgctgatggcggggccgagcgccagaccgagaccgagagggacgctctgtgggcgctgctggtcgcgcggctgggcgccagcggctgcgcccgcgtttgcgccaacggtggcgacaaggtcgccaactggatgggcgggctgagccccacggggttcccgaaggggaccgtgaccgggacggacacggccgaggaccacgtctagggcaacgggtgcaccaactgcagggggcactcaatctgg

SEQ ID NO: 364109 - DNA, 349 bp, Zea mays
atcgttcgcacgcctccagcagcacctatggggggggttttaatagcggtgggggggtttagctaatgaactgtagaacatctactcatttcctgtggattaccagttcaacagatcggcatacttgtcggatgtctggaaactgaaataacatgctggccaattcatggaaggcaagggcaattaacttaaccttcaaggaggcaaatgcaggtataggaaaacttacaccttgaaagcacccatattatggtgacggatgagttcctatggactttccatgaaagagtacttctctacacaattgattgaggtgttctccattcgatctctttgtgagcttttcgtg

SEQ ID NO: 364110 - DNA, 270 bp, Zea mays
atcgttttccctgcgattgctctcccctcgcctgcttcgtttctcctaagggatcgtctggaaggaatcgtaaagagggccgtttaatccgacataaggaagccatggggcacaatgaggctgggggccaggtccccgagggacccatcctctgcatcaataactgtggcttctttgtgagcgctgtgaccatgaacatgtgctccaagtgccacaaggagatgattacctctctggatcaggacaagctggctgacttctttatcgaca

SEQ ID NO: 364111 - DNA, 234 bp, Zea mays
tttcgttttacgcctccgagttgatggcgcccatgcgtgtgtttgtgaagatctcgggtcagcacttatcagcagttgaggctgctgcttacaaacggctgctacatagtattgatactgtaatgactgacgtcgaaagatagttggcttcggaacataaggctacagatcatccaacaccacatgatggccctgcaccacatcatgactcaactaatgcttgtattacaactg

SEQ ID NO: 364112 - DNA, 100 bp, Zea mays
ggcccggccggaactgcattgccgtcccaacccacgcgttcttttacgcgagcgcccacccatgcggcgtggctgaatactgtgaaagaggcggccggta

SEQ ID NO: 364113 - DNA, 334 bp, Zea mays
tgtttacgcgcggggcttccccgaatctctgtcgggtatccggagcctggcagaatgcgaggccgccaccttctaaaacccatgcccgtcctccttaacactacccctacccggatccccgccgtccactttcgcgttcgtgacgcaatccgcccgcccgcgccgctggcagagcccgacgtcggcatctctcgcttcgactcctccatcccgggctttcgcggcgcgctgaagcagcgctactccgacttcatcgttcacggaggacgcctgcgacggcgccctcgtccgcctcacttacttcgatctccccgacatcgaggagagaggagat

SEQ ID NO: 364114 - DNA, 344 bp, Zea mays
  unsure (1)..(344): unsure at all n locations
tttgtttacccacgctttcgtttttttcgtcggnattagctttacttccattcgaaatctgcgcctgtggaccggcgtcttgcatgaatttattggtgggggaagtgaatgattttgtggtggtctacggtcttgattggacagtgtattgaacttctgttctttggtgatgaggacccgattcggtaccaactagattgtttgtttcttgtgagcctttttatgttttgattaattccttgggcacttgtgttagacaagacattactccgtttttttaagatttggatctttattatgttttttatatggactttccatgaatgatcatatgatcttttttt

SEQ ID NO: 364115 - DNA, 185 bp, Zea mays
agagaagagaatgagaccggttctcccgaagctagcatcatggtgccaaggcgctccttgggagcgttctgctcgccatcaccttactcgactacttcgctacgagcaagccaaggcggccaagaggagaataatgctgaggtccaagactggcactgcggcggcggcggttacccgggcggcgg

SEQ ID NO: 364116 - DNA, 383 bp, Zea mays
tcccacgctttcgttgaagtagggatgtgccatagcttcccgtgctgtcagagctgtggagaacagtatgtctagagcacaataattatggtctgcactcttgaaatggagtagttgctagttcgtgaaaatcataggcttaaatccatgttcagtattcacattgctccaggaatttgggccatgactccatggcaatgaattcaaaatagtacgagccgcatcatgtggacaaccttggcagatctttttatctatgtctctattgctgggagcatctgtagctttaaaacctacatgtagtgtttgtatgagatgagattcattttatctcttgtggtggaatgtgaaattgtttgtgaccctttagaccaattaaatat

SEQ ID NO: 364117 - DNA, 320 bp, Zea mays
gggaccggcccggaacggaccgggtctgacccacgcgcgcggtcactatacccggaccaagagccacggacccgggggctgctccaatgacaagccggagccgaccaccagagcgacgaacgcctgagtgccaaggaaccagcgaggagcgcaaccgcacaagagcgcagggcaagacagagagagggagagagagaggcggggacgcaaaacaacggacgcaaaagaggacgacgagctgaagggccacaacaagaatccggaggaccacaccatcaagccagaagcacaaggcagacaaagaccaacaacgacaacaa

SEQ ID NO: 364118 - DNA, 275 bp, Zea mays
tattgttacctgcagatacgccgtcgcccggctcggttttgtataagtactgtcgatgcctccacctccacatgattatgactcttcacggaacgaaagggtattcagaccttgtctcgccttcaagacctcgacgacacccagtacccgctgagctccgggatcgcggaccatgtcaagaagaacattgtagatttcatggtctaaaagctgggtatagacaagagcaagatctagaacctgggaaatctgctgtacaagaaccacggcaccac

SEQ ID NO: 364119 - DNA, 140 bp, Zea mays
tttagggcgacgaaaggcgcagcgccagggaccgcaacggcgcagagcgcctcccgcccaccaacccgggcgagaagcaccagcaccggaacaaggacaagcgccacaagcacaccgcaaaggacaaggaagggtacccg

SEQ ID NO: 364120 - DNA, 334 bp, Zea mays
ttttgttatccaaaaacttactggagatgttatctcaagaactgcttttggtagcaactatcatgagggcaggaacatctttcagctacaaggagagcaggctgaacgccttatacaatctttacaaacaatatttatcccaggctactggtttgttcttttccttataaatagtagcaatttgttcatgagactcgttgcgtaagaatatttacgtatccatgttttaataatgacttgatatcatttttagtaaaggcgaaagggtctctaacgtaatggttaaggctatcgaataacacctccagcaccttagttcgaatctacaaagggg

SEQ ID NO: 364121 - DNA, 273 bp, Zea mays
gaggacgcgcgggatcgggctgtctaaggggcccggccacagaccgggcagcagcacggcagacatggtgttaagctcgaccctggatatggccatgggccccggtgccctcctaccccggagcagcggtcccagacgcctccttcgctccaaggaaggggaaggagcgcgagcggaacgaggagcaggaatctggcgctcttcgatccctcctacaacagtgcagtagagccatccctgacaacagagcctgagaagaagggcccagtgata

SEQ ID NO: 364122 - DNA, 440 bp, Zea mays
ctgattccttcgcgtgtgcttccgcgggtccgacgctccggactttgctcccctctcccaagctaacacagtcgagggcactgcacgcctacaatcattactcaaccgtcttgtcggatcatggggagtagcggaggatggagattgaccaggcggcgcgcgggtgcagcgaccgccgcatgcgcaccaaggacagcaactctcgttacgttgtccagcgggccttcgcgctctacccatttgaggaagttgccttcagctacaatggtgggaaggattcaactggtgcttccttgccattttgaatttggagcctgggttacctacccttatacgaagaacggaacttctgggtgatggaagccccaaccagatgctgttaaaaacctggtccatctgccgatcctattgtatcttttgaaaagcccttagtggctttc

SEQ ID NO: 364123 - DNA, 371 bp, Zea mays
actcaccgattgtaacaacatctgtattgcttcctttggaacaggatgatcgtctattcggaaaccctgctttagctcttcaagtgacaaactaccgtccttgttctcgttcaatgtatggaacatctctttgaattagccaaactcttccatcggtaaattcatggcgacgacctgcattaatcattggcaaaaaaaaaaagagagagatcagtcagcctgtctcttgaaggaattaagggaagtaacagccagttatctgcaacatacttcaagtgcctttttcttaagcttgttcatagactacaacttgtttcaatcttgaacgaaccaacctttccgagggacaccattgaagccttatcagcatt

SEQ ID NO: 364124 - DNA, 302 bp, Zea mays
ttttcacgcgtccgttggtttggggtaaacctgttcgattaactgggtggcagcacattaaaagacggtgatctttcaaataacccctaaatgtcattgtctgcaactcagtgtttgagaatggagtattgacgaatcgcgtttccgtaatagcatttgagcgaatcctaagttatataatggcagaattccaattttttatttctagtggagccttcccttctgcttattgatttctccctgaaacggctgaaccctaagcgagcaagtaacgatggtcggcagtggcacgggggcacctg

SEQ ID NO: 364125 - DNA, 293 bp, Zea mays
tgttctgttcaagatcccaatggcttagaaggcatgcaaatggtgtttgagagcaagaaggatccattacaaaggcgacatgaactgttgataaaaagtgagctagccgaggtgatgcccgtttctattttataaaagtggcccatatcactcttttaagagcgtgctaattcttgcaacatgggtagatatagtttaatcacagaaactctagttgcaggctgctgatctcaatgcacaatgttttgtgtgaacagtcatggatatcgaaaggaagcaaattaagtgggaga

SEQ ID NO: 364126 - DNA, 214 bp, Zea mays
ttctttacgcgtgcgtcaagacgccagcgggcggggctgtccttgagggaggcagcagccattgtatctgagagccgaagacaggtccaccaactgtcgtagctctccaccggtatcctacagctatgggctcaaccacgggagtggaatgcatgaaagataagcatacactaaggcacacgtgaacggtaattaagactgtaaagaatttcag

SEQ ID NO: 364127 - DNA, 217 bp, Zea mays
ggaccggcccgaacggccgggtttgcccacgcgaccgtccgatgtatacggacgcgtgggcatagcaagggaggagtgatatgcggttgaccaagggcggtggatgatgccacacgaggcagatgccagatgtattagctggcgaggacacgagattcatgcagaccacccgacgtgtgcaagctccggacaggatggaggactcagagatggtacg

SEQ ID NO: 364128 - DNA, 200 bp, Zea mays
gtcatttgttgacgctacaggagctaatatcggggtcgtattaatcgagtacgatccaagagcacttgcaagtaatggttttttacctacaccatcaggcaggaaggaacactctgctgcttccatattctcaagagaacttaagtcactgcattgtcaattgttcaacactagaaaattcatatctaggtaatgctgga

SEQ ID NO: 364129 - DNA, 218 bp, Zea mays
tcgttcacccctgcgacaaggggacaggggccgggtcggctctatcgggtggagggtcgcaatgacactgacacaggtgaaggcgaccggaagctgatttggtggtcgagtcgtcactgagcgcggaagcaggctgactcagactccactcgctgtactttacggatatcctgtggcctttcttcatgtagtggaacatcttcacctgtgtctgctac

SEQ ID NO: 364130 - DNA, 246 bp, Zea mays
tgtcgacattgacatggacatggcgcagctggagtggctgttggggctcttcgacgactcatccatcccccacgagccggcgttccccggcgcggtgcccatgatcaagagcttctcgctggcggccggcgcgctgctgccgccggacaagatgggggacgcgctgctgttccgcagctacagccccatctcggtgctggagcacggcaggttcaacaacgccaaccgcggaggcggtggctgctc

SEQ ID NO: 364131 - DNA, 137 bp, Zea mays
tcgttgtccacgaactgacgggcataggacataagcgagtaattacagttgcactggctccacttactgaagatgagcgtggcgctccctgctggatgaaatggaatccactagagttttcggcaccccgccgcact

SEQ ID NO: 364132 - DNA, 311 bp, Zea mays
cccacacattcgtgaccaccgacgagccggcacgggagggagcaggacatatgaagaaccggggttgctggacgccgaccaagaggggtgcgcgcccacgcaacaggcggaaacatggccctgtggagccatcgagcctgtgtggaggagtccgcgaccaaagaggaagctatggcccggctccgatcgaaaagggaacaactgaaccgcgaggctaccctgtcagggacacaagaagcacctggactctaaatgagagaacagaaagagaagctagatgaccctaggcccaagccaggcactcgccagaa

SEQ ID NO: 364133 - DNA, 223 bp, Zea mays
tcgttgacaactgagccgagagctccggcgaggactgctcctttgcgtgtggggggacttcacgacaccaataaaggtgggtgcaaggacaaggagcctgctttcggcagtgtccctggagctggcggtcgagccggtagcactttgacaggcaacaggacccgcgtcggcggcgtcgcccaacaagggcccgcactacgatactgcgtatctggagaagggc

SEQ ID NO: 364134 - DNA, 357 bp, Zea mays
tcttgtttccggagcctgctgccgcaattttttttgaaggctggtctgattcgagacgtcccgccagaagagaacccccgtggcccctggtcgcgactgagcggtcagaagctggtgccgtcgacgcggtttccgtttcctgccagaccaaccagttcccatccctctcctgatttgtgttgcctggaggccccgtcgctgtccccgcgctctctgtgtccttacgttaggatgttcggcgcggcgccaccgtcctgggcagttgctaatcgcgcgtccagtggccgcaatgcagccgccgagcgtctttttgttgtgcagtgctgcagcggattgtaaaggcctgcccgcggtgag

SEQ ID NO: 364135 - DNA, 315 bp, Zea mays
ttgtgtttcgcacacggttgcgaaaattcactactacggctcgcctaggcgcgcctagtcgctaggacgtgaactcccgtctggactaggcgggacggcgcgctgataagcattgggagccgctacgctgtcccaatgctggatggcacgagaattccgatcgctcagcagacaagggtggcgtgtaggcgccctaggtgcccgtgggaaaaaaggctgctcgcaaaaggctggcgcgcgcaaaacaaaagcgcgcagaagaataaaaatcccccaaacaaattggcgcctcgcaacgatagaccgtctcttgtt

SEQ ID NO: 364136 - DNA, 387 bp, Zea mays
ggtggatatgcaaatcctatcacaatgttttagctctctacactgcaaaaagtttatggaaaatctgaagaaagggaaaaaggcaaaatttggatgacaagtacggacttgcgtcatatgcaaaaattcaatataattagcacacggtgggaaatttaacttcaacgttcaaccatcaatcaccaatgtgtcaagtttgccttgaacagtaattttacattataccaacaactgtcgtgttttctacacgcatcttcttgtaccagttgcactattttgtgactttatgtgccatttttcttttgtaaaaaagttttcccccgggcagaacttatataaataataccttatattatattaatacaatattgttaaaaagcttaatct

SEQ ID NO: 364137 - DNA, 383 bp, Zea mays
ttaatgtgagcgccgcccttcttgttttgacgggtgggttttgcttgttattgcctcagctctgctcggctattctattcacaggaaataagacacatgcacacgcttccaggccgagatacatcgaaacgctagaagatttaatgtgaggggaaggtcaaaaaaaaaaacagtggaattttatagccaaagcagtaagcactggtttgctaataaggtcttattggatggcgtttagggcctccctcctacggatgctgttgtggatctcctgctacagattctaaatccctcccacctcgtttagcttcttgggccccaagaacaggccgtagggcacgccctggaacttggccatgaaaagtatctgatgggcggcggcg

SEQ ID NO: 364138 - DNA, 488 bp, Zea mays
  unsure (1)..(488): unsure at all n locations
ccctcgtttccggtcgggcaccgcggcgcgccacgtggcctcgctccagtcgcggggccgcctcctcgcctcgcgcctgctggccgccgaggaccagctgcggcagctgcgcgcgcgccgccgcgaggacgcccgcgccaacgcccgcgccgtcgagatcttcgcgggccaccgcgccgcctggatggaggccgagcgccgtctgcaggcccgcgccgccgccgccgcggacgaggccgcctccctccgcgcgcacctcgccgacgccgaggccgacgccgctgcgctgcgcgcccgcgccgagcgactcgagcgcgaggccgccgagcgggatgagctgctcaccgcgctcctcgcggccacctcgcgcgccgggtactccggcggcgggcccctgccccgcgtccactacggtgaggagcangaggaggaagagcgggcgccccacgactcgcgtgggaagcggaagccgagcacgagcaggaccc

SEQ ID NO: 364139 - DNA, 276 bp, Zea mays
  unsure (1)..(276): unsure at all n locations
ttccttctcgtccgcccacgcgtncgggncgacaatggctacgacgatcggtagcccatagtagcagcgggcgcaacttcgacccggctttcttgccacatattccgcaaaagccacctccgcgtgccctccatcggcagcaatttccgccatagataccggcgatcgagggccctggacaacccaattgactgagcagcgcggccgcaggagagggcaaacccctccgagggacagcatgctccttgacaggagctggatcctcttcgtaggaag

SEQ ID NO: 364140 - DNA, 416 bp, Zea mays
ggtcgcttttgttgataagccccttgaagctgctacagctgaaaacgctccatacaaaacaattgatgttgtaagtacaactcttgtaggaagagatactctattcatgattaatgtcttcgaataactacatcaggacaatctttataactttgtgtagtaaaggtaatgctcactcctcatttctagatggattgcaattcagtagcgcttctctttaatttctaccctgaagatttgattttaggttttgctcttacacttggattaatatcagtgtattaatttgcaacaggtaattgatacctataactcggttatatgcttgacatcgttagttgctctttctatgctgtcaattggtcatgcggtgttgggtagaagttggcaatcgtgtgaattcggtagggtatcag

SEQ ID NO: 364141 - DNA, 187 bp, Zea mays
tttttgtctgtgccctaggctcgcccggcacctccgggggggggtcatctaaccaccaccgggggcctatcaccagcaagttcagcatgttagctctatcaggcacggcccgtggaaccatgcgcagcgaccgctcactgtggcactacgataactgagattttcccccacgcaatgaggtaactcc

SEQ ID NO: 364142 - DNA, 311 bp, Zea mays
tcgctctcgcgtccgcccacgcgtccggcatggtgctgatggtaatctcattctacttatcaatagtgtcatcctcttgcaactgtgtcatttccagggattgccgagccgttcggctaaccgggctagccgatcattggtggtggtcggctccaccttatcactgttttggattttgaatttggtaaagtttgtaaattttgaaaacttttgatgacattttttgtataaatactatatattatttgaagattttctgctgaaaccaaaggtgctacactctcacattgcccaatcaaccttctatataa

SEQ ID NO: 364143 - DNA, 361 bp, Zea mays
tcgatggcgctgctccggaggctcctcgaccgggggctcgtggccgccgtgttcgtggcgctcgagctcgccgacatcgtcgccgcgggcgccgtcgccaacctcctggccgcgctcgccgcgggcgtccccgtcatcgtcctccacgcgttcttccgcgtccgcgacgatctcgaggcgccctcgccggacgcggcggcggcggccgagaacggcaaggaggacgaggcgtcggcggtcgtcgagaagaaggaggacggcgacgtcgaggcggggcccacgcggcggcccatggcggcggcaccaagatcacccaaatgaggaatttactagcaatacgagctagtgaaaaccatacgtt

SEQ ID NO: 364144 - DNA, 250 bp, Zea mays
  unsure (1)..(250): unsure at all n locations
tcatttacaaagggcgccaagtaagttcnggatcggagaagctgtggagtgagggagtgccccggcctggtgtgaacagggctgtgtctgggtttgacaggaggaagaggaagatcgatgatgactcgtgggatgatgatggtggcaaggatgtttcatctttcaaatcaaagtttaccagaaagtgtttttccacaataagccgtccaaaggtttttcctggaaaaggtgacagattgaagtcttaaaa

SEQ ID NO: 364145 - DNA, 363 bp, Zea mays
caattcccgggcacgacccacgccgacttttattttttgcagcccgcgtcccaccgacgggggcggcggacgcccttcatgggctcgccgatgcctctcgtttctcttttcaataatcaagatgagccccggcggcagcgccggcggcggtcaaagttctctgggctatccctccggaagcggagagccccccaaaccagcagcggcaccagctgcaagtgctccacccgttgagaaaccatctgctgtaaagactgaagcggccaagcaggttgctgctggggttaccagccaaaccaataactaccacaaggctgatggtcagaacactggcaactttcttacggaccgatcttcaaccaa

SEQ ID NO: 364146 - DNA, 163 bp, Zea mays
gtttgatcgttgctacgggcacttcaagccctggggcgcctgatgcaaagcggcccacgcccaagccgaagcggtcaatggacgccctacagctgagcaccttagccgcgagccggacacggaggtcggcccctcctggtccaaagtggatgaagcggaagcc

SEQ ID NO: 364147 - DNA, 358 bp, Zea mays
tttactcatgccaccaccgtgttctttcgtcttactgaattgttgagttgtgggaactgatctttcaaagagaagtttctcggccatttgtcctcccaaaatctcacatgattaccatcattaagctgaaaggttccaaagctgaaaaatatcttattttactttcattagtcccccccccctaaatgtgaatcggttggccgccctctgtacctgaggtaaaatttggttttgtaagtatttctgcctaagcagtgtctgcccatccctctttattcagcagatttaacaaccacttacttaataaacatctattttgtatattcaagattcttaatgcctaaaccccccaatacct

SEQ ID NO: 364148 - DNA, 255 bp, Zea mays
tctgtattgccctcaccgcccccaccaagcggcggtgcaggaagaagaagggggggggaagccagccacccccccacctagctacgccaccggagcccggctccaaccgcgacggagaaccggagccaagccaccttgaccagatccgctacaactgacaagccggcaacctgaggctcggacaacaccacaggcgcccagagcgccccgctgccccaaaacggcaagccaccgcgaagacaaaagccctagccc

SEQ ID NO: 364149 - DNA, 238 bp, Zea mays
aagggccaccacaccacaaggcccagagaggacagaggacgacgcggacaagggcgaccgaggagaagagggagcagggggcggcgaaggaagagcaaggcgggcaggcggcgcacggatgggcggccagggacgacaccggcgaacacaacccctacagaataacacagaagggatcctaaagacgaagacggcacgaacaaggagctatacagcgggaactgccacaccgaccagc

SEQ ID NO: 364150 - DNA, 340 bp, Zea mays
acgtactttttcccggctgcctgctctctggggggggtctgaagtcctccggtgggctgaacagcatccaggcacgcgctgcgcggcggcgcacggtcgtcgcacgcgtggggccggagccgctccggccgcgctcaccacaccgtcttgctcaagtcctccacgctgggcttgctcagcctcgaacgggacgaggagatgatgaagtggcgcgacgacggcggtgccggcgccgctgaagacaccgccgtcgaagacgcagctgatgtggcggcagaaacaggtgccaggctcgccggcccgcgagcccgaggtgatcaaccgcgcgggagctcatgga

SEQ ID NO: 364151 - DNA, 311 bp, Zea mays
ccggataaccgggttttcccacgcgctcgttttagtattaaaacccccacgcgtcgaagctcagcgtggaaggtcgtggcatgatcaagtacctgcagatcacccgctatggcatccgcagtcagcagtgcccagcacattatacaggacctgcatgggcccagggattgctggattactaagaagcatcctattaccatttcatggcaaacagcccggcatcaataattccttggatctttttttcaaaaatttttcttgcctggtagggtgcaacatctgcgcttcaaaaacccgttgatttgagcact

SEQ ID NO: 364152 - DNA, 262 bp, Zea mays
gttatatctgtgcacgctattaaggtatacacagcgggttattcacatattaatgatgttgacttttcaaatcaaaatgcaggtcaatcaataaaactctgatgatcactttattttaacgtcaagttgaccgtgctacttaaacgcagattattgaggaaaatttgccccagcaaccctatctgaatcaataaggcactgggggccgaaaacaaagtgatctggaaagtacttaccatcacttggtaccaaactatgatga

SEQ ID NO: 364153 - DNA, 146 bp, Zea mays
cgagctcagatcgagcgcgcgccaggcaagttttcctgccggccgcgatcagagcaatcaagcaagacaagatggtgaagtctcgcctttcggaagctgttggcttacttcctttaagcctcacccttcaatcaaggctctacgtt

SEQ ID NO: 364154 - DNA, 350 bp, Zea mays
cacccagtgccctggaagcctgggtgggcaaattgaggactaatagcttctcttatggtgatcgatttgtcttggtgctaactgcaacccaccttccaaaagcattcaactgcttgaggttgcaacaaaagctccacgtgatgaaggttggtgctactcagcagtctttccacaggctcaattaaacagttcccggctactattgcagaagggttctgccatgagactcagcctctttgcagcttgcacaaagctgacaatgaccctgaactcatccaattgcttccgcatgggcaaaagcatatattggaattaacacaacaaagcagactgtcaggacctcacaccat

SEQ ID NO: 364155 - DNA, 256 bp, Zea mays
acggtttatttagctcagaccggacaagttagccaaaggcgcgcttgcttccaggaaaacgagctcgacaaaagccgggctagaggtgcacgaagggcgagactaccagagccagacttgcaaagtaaactaggctgtacaaaactaacatacctccctaggaccaagaacctgcagctatgggggagcacacgcactcagggcaaccagacaccgcaacatgaagggatgggcaatctgtacccacccgcatccc

SEQ ID NO: 364156 - DNA, 222 bp, Zea mays
accggccggaattacctttcgacccacgcgtttaatatgcccgcccaccctcgtttctcacggggctgtgtccactgatgttgcgcggactagcacccgtctgagtgtgcgtgcctgtgttctttgagtttcaagaatgggttctgatgcgtccctggggagactaacggacctaaggcgtcacgagcggacaacaaccagcatggatccgtgcgcggtcag

SEQ ID NO: 364157 - DNA, 280 bp, Zea mays
gctctgctggtagattcgagaatctagaaagcttaaagtttgtgtgtcatgaaatggtcaatttgcttgaaagaccggaatcgaatgctacccaacagttaacacggcttactatcgtgtttcatgcttcacgaacagaacgcagccgaaacaaagatttcaggtttggttttggacaaactgctgtccctacagcacgtttgtgtttgaaataaactgctccaatgcgacgcacaggacggtgaaaaatgctaaagctgctattggggaagaaatttca

SEQ ID NO: 364158 - DNA, 291 bp, Zea mays
ttgtttagcatacggaccgaggagcagaacgcggaccaccttaaaccacacctcggagggctaagacctgttcccgcacttggaccagggccgtggtggccgaagaacggaggaccagcgcgggcggcataccgcctcgagacgcgcgaggccgccagcagcgaggactcccgactggagacgcaggtcaccggccgcggagccaacatgcgcgtgacaaagagcggctcgcggggcactcgataggaggccgtgtcgcgcgggtgctcagagggcgcggatggcagaggc

SEQ ID NO: 364159 - DNA, 282 bp, Zea mays
ttttattcacacgagaggcgctgccctcccctcgggggaacttgaatggccacgaggggccaaagccccaagtgtaactctctctatcctggatcccgacatgcgtgtccctccagacatagacctcagcacaagctgcaggcatgatactactcaactgcttatggctggatcgaataatcatgcaccacagtcatgcaacccaaaaaatatcgctggcaccagaagcactctgaaacaactactcgcacagaaaatgactgaacaccgcaccactcctgt

SEQ ID NO: 364160 - DNA, 423 bp, Zea mays
taccgctcaagagcgaaccaaaccagaagccaccagagagagagtgagagagagagaaacgggagggggaaaagccccagagagcgccaaaagggaaaacgcctaagcacggaccgagcacgcggagagggccctgccaagcactgctacccaaacacaacaccatcgggacaacacaaacctgcaagacccacccgagagccccccaccaaggcaaggaaggccgcccactacctctcctcacaatcatggcccacctaaagaagcctctggggggctccggcggacacgcccaaacaacctcaaacggagacgaacaagcccaccctacaactcctagcccgaacgcaaatgtcatcgggtcacacctgctccaaacccgagagaccacatagccaacgcaacagacgccaccatgcgcca

SEQ ID NO: 364161 - DNA, 133 bp, Zea mays
tttcgcttttactgcgaccccagggccaccactttgcaccgtcatacgttgggcggctgtcgatcacagagatcctgatggcggtgggacatctcgaccagtaacttttccacccacgtttctgacgagagcg

SEQ ID NO: 364162 - DNA, 229 bp, Zea mays
ttttcgttctcgcgtccgcccacgcgtccgcccacgcgtccgtccacgcgttcgaccacgcgttcgtccacgcgttcggatgacctcggctaccacgacgaccggctagggttatgactactttcccgctgccaccgtctcagcgagcgagactgagttgctggggaagttgcttccgatgtttctgacttttagcaaaggaggcaaccctcctggtggtggtttgaac

SEQ ID NO: 364163 - DNA, 295 bp, Zea mays
agcgtacgttttacgtcatcgcccacgcgtacgaggaccatgttaaagatttcttaaataggctccaacccacggaccagggccggagaaagaactagtggcgctgctggaccctcaatggataggatcgagaagaccccaggagaagcgtccggtagaaggaaccctagtggtcctgtgaatcatagcgacagttacgcgcaacgggcacgcgagaccgtatccatgtgggtaaaggagattatgcatagcactgaccggactggggaaaggactgtggagagaccacgcacgt

SEQ ID NO: 364164 - DNA, 119 bp, Zea mays
tctctttacaccaactgccgcgcggccacagatggacgtttttgacgaaggctcggtgctggcgacggatgacggtctcaagctcaccaagcgacatattgttcacaggggggcggttg

SEQ ID NO: 364165 - DNA, 279 bp, Zea mays
tgccggtcccgaatcccaatttcctcccatacccacgtttctattgagtccctaggagcgaccaggagaccgaccggctttcacttggttggtgctcgactgattaagccttcactgagccagcctgtacatggccatgccattctacaggcgctagagcgtagtttgtcacactgatagtaagcgccacgagtaaacaaggggttgaccatggtacgcttgaacacctatctaagcattccttggacaaggaggtcatgatttaggacaaaaaggtta

SEQ ID NO: 364166 - DNA, 395 bp, Zea mays
ctgcaagaccggtccggtttccttgtttcccagctttcatcgtccgggaccacaagcgaccccgtggttcctttgtgttcatccctggcgacgcctacatcctgtgagcatcatagggccatcccatctctagatggcttacagggcgttcacttgtcacacgaatagtaagacagcccggataaggcatggcaagaccttgataccctagcacattcaatctagcacattcgaggatttaggggcctatgtcttggaacaaaaagctgagttcatataatgagcttttgagggcgtggataccacccaaccctgtctgtttgccgaaccgaccattggctaaggaactgatttctgatttatgaaaacaatgacttttcaggtcctgatatatg

SEQ ID NO: 364167 - DNA, 443 bp, Zea mays
gtccggcccgcgtccccacaggccaaccacagcgagcacctggggcgttcagccatgtgcggcggcgccatcctgtcggacatcatccggccgtcgccgcctaggtgggtcacggagggccacctgtggcccgagagcaagaagcccaggagggcgtgtgccaggacgaggagagcccgcgcggtgcatgagcacagaggaggatttagaggccgacttctaggagcacgagagtggagttcggctagtcagatctcgagtgcgaggactagcccaagccctagctcttcgccgaccccagcaattgggctcggaaattgtgactaaacactggtgcagctggctgtctaggccctgctgcaagacagttaaaaggaacaggaagaaccatttcagggggatctcgcggaccccgtggggcaaatgggctgctgagatcagag

SEQ ID NO: 364168 - DNA, 398 bp, Zea mays
cgtccgctcgtgtgtggggtggggagaggataggcgagccgtgtgaggcttccccaccttcgcccatcccccgacgcgacgtgagagcggcgcggcgtctgtgtctccggcgccggcccgcgctatccgtccggtgcatggtgccgcctcgctctcgcgtgacatgaccagccgccttccgcgatcgtaggcgtcgcccgtgctccatcgcagcccggccggatggatgtttttcccccacttttctcgcgttaccaccccggaccgtccggttcggacggccgagtgcgtcagttgtattgtacgtagctttggcgaaagccgaaagctacttaattgttaccttgttgcgttggtatttgtctactctataatgatccttcgtcatgcatgcgttg

SEQ ID NO: 364169 - DNA, 303 bp, Zea mays
aagccagtacccctgcaggtcccggtccggagtttcgacccacgcccacgccttttctttggactagagccagctgtcccaggacacgagcacatggcgttcaccaccctcctcgctgatttgctgctcgcggctgagtccgcagcgccggcgcggtcttgctcacctcgctacctgcatgcgctggtgcccatgaagcaggcgctagggaacccgccaacgcctgaagctgggaccccagcgtcgcccgactgctgctcgtgggaccacctccatagctacgactccggacgcgtgaacaac

SEQ ID NO: 364170 - DNA, 210 bp, Zea mays
tacaaacaaaccaagcatagcttaggaaaggcaaaaccccaccttcaccacacctcgtcgtttgcttttccttggtgcgggcggcgctggtcatgcctccagaccggttgcctccatcactgagctgtgcgagcgtggtggctgtctgccttgcggcggcgccggacatggtgatggtggagatggacggcggcgtgggaggaggaggag

SEQ ID NO: 364171 - DNA, 199 bp, Zea mays
ggctcgccatcgccaccatcatttagtgtcgagtccccgtttcaccctccccaaattcccctcaaatcgatctcccccgcaccacgaatacacgcgcccgctcatttgaatctcggcgccccccgacctgatccgtccgatccgtgccgtattgccgttgctaggggcggaaccactattccgatctccacctgtttcc

SEQ ID NO: 364172 - DNA, 390 bp, Zea mays
cggatttcccttaacgacccacgctttcggctacacgaacgagcgaacggcaacacacagatttttttggttgaggaaggaggagggcaacacgaggaggtcacaggtagcccaatagatctactgctgttgagggagatgatgcaaagcatgaccttgctgcacgaaggctttcttttagagatggcttcagctggagttgccccttttgggtacaagaacagcattatcaccagaataggcgccgaaaagtagaatgatcacatgaacgagctaaaaattaaagacgatatagaaggcgaagccactcattatcaataagaaagggtccaagacaaggcccataattgccaccactactgtagacaagaatggataaccaaaacaaac

SEQ ID NO: 364173 - DNA, 346 bp, Zea mays
accccttgccagggccggaggactattccaagtgaggccggcctggagccttttcttttgtgaacgcacatatgcgaaggcattagcggctatgtgcgtaccgcgaaacacgggtggaccactacggatgccaggcgagagggtaccactatctaatgaggaccattagcgctgttggctgaccctggagagttagggtccgatcatctgaaacatacttggtgctgatgaggacctgctattatatggaggagatcatgactacagatgaactgcttgcacggctgatgtcgctgggggaacaacataacacactatgtgccctatcggactcgaaagcagaact

SEQ ID NO: 364174 - DNA, 505 bp, Zea mays
ttccacgcgtccgcccacgcgtccgcccacgcgtacgcccacgcgtccgcggacgcgtgggctagggttcggtgcccagtcgctgctcgcgtctccgccctccggccaggtcactggcgctaggaggcgctaaatcgagttggcgacgcctccctcacccgtccccgatcgacgtcgggaggcattcctggcggcgtcagcgtcggcgtcggcgtacccgcacgcgcgcactactgactcatctgtgcagatcgagccgtcagtgagcatgacagatcttactttataagaagagttgacaatgtgtgagcatgactgcatgagaccttttactgcgtcatatattttcattgtaatttatatacgcgtcacacttatttttcaacttgacatattaggacatgcctgcatatcagttcatgttaacatagaaacgtcctgcatattatgagtcaatgatccactctgttttttatgcaacttcaaaaagcaatggacattccta

SEQ ID NO: 364175 - DNA, 578 bp, Zea mays
  unsure (1)..(578): unsure at all n locations
tttggtatcatcatgtctgactaacccttttttactttcattgaatgaagttcgtacatgtatttgaggtattttttattttcttcctactataagccttgcttagatactgatctaagatcatctccaagggacagacaaaaaatcctagaggttctcacataagtacggtttagagaagggataaaccgaggaaagcctcccccacaaatacagaaaggctgcctcgaacctatgatttggtgactcagtgaaacaaacaactctcactactgcactaggcctgccattgtttacgagcatccccaagggccttacttaaattcactctctaaattttaatttggtgagccattttaataaaaatatgtttgataggttttttatcttctaacaatttttatgtatcttgtacgcactctagagaaccaacccactcactgctctntatttactgcatgctatttaggtctgctaagcaaaaaatgatattctttctcaatctttcgtcatggttagataaaattggtggtttaggataaagtttgtgaagggcttcacttttttttctataatag

SEQ ID NO: 364176 - DNA, 373 bp, Zea mays
actaaatggaaggaaggcacgcccgccggcaccggcccggacttaccggctggaccgacccacgcttatttatacccttggagccatctacaccgctgacttgatccacgcagaccgcacaaccactgaaagatgcgcaccatccagcgcgttcagctggccgctctgcactcacatggcggtcgatttggccaacacgggagcttcatctgagatgcctgatgaaagtcaagccccggaagtctccggacttcatggcacggcggtagaggaccacgtacgtgaccaacgcgcatgctcggcaagctctacccggctgccctggggcagcaggaggacgcacaaacgctgctgcctgcaggcccaccgagct

SEQ ID NO: 364177 - DNA, 578 bp, Zea mays
  unsure (1)..(578): unsure at all n locations
tcttaccaattcagcctaattgcagctagatccaccttgcttaatccttctaagtcccatttcctaatcgtagcagtctcccttaaattgtctcccaatttgaacacatttggtatatgtgagctatagacaaagatgcaataaagagtggatccaaaagctgtgaaccgcatatgaggcggactaggatgccacgcctaagtttgggtgtttcaactatcaactttcaagatcacttgtgcctcttatttacactgtcatttcacaggctatgagttgtctccttgaatttgtacaaggtgaatttactttatgcagtttcacattaagggtttgcttctggagtaaatgtggaaatctactgaattacttgtaagatcagcgagttgaagttttgatgaaccataacanggaaaaacacttattactttctgcatgcaagtgacagatgaggatgtcttccacgatatccatggagtgttcattgtgttttgtagcatataattgttctgtctgtaagctcttgctgggtattaaatcagttcgatatatactttaatcttacaatgattaattca

SEQ ID NO: 364178 - DNA, 296 bp, Zea mays
tcgtccacgcgtccgccttctgttgcatctccaaaaagttccgcaacaacagcaggtggttcggatcagccattgccgtctcctagagaacaaggcaaggaagcagaggccgatggaggcttttagagtaaagttgcaaatattgtatcaagagatactagaatccgtgtaagtaagaactgctaatagtgcttttagttgtaactggtgtaagcttctactcagaatcaaaagcgacgtgctgagattacagctccagatattaaaaaaaactagatttataaaatacaaaataa

SEQ ID NO: 364179 - DNA, 150 bp, Zea mays
  unsure (1)..(150): unsure at all n locations
tctttccacgcgtccgctcctgctatgtacccaagggcgcatttcccatgctgtcagtcaatccgtanacttcatttgtgcagttccatcagtagcgtcataccttgtgaatacagttggacaaaataagagcaagcctgaactgaagtt

SEQ ID NO: 364180 - DNA, 185 bp, Zea mays
ctaactggaaggaaagcacgcccgcctgcacgaacccggacggaatagccgggacgacccacgcttttcttacagaacaccgaatggggaaggaagggagagggtcagagaataagggatgactcggatgaaggaaagaaccgcgggtaaaaaaactgaaaagaaggcaggtgggcactggggaa

SEQ ID NO: 364181 - DNA, 514 bp, Zea mays
tcttccacgcgtccgcccacgcgtccgctccgctactgctcctccccaccccactcccccgcaggagcggcggcggcggcggcgaggtcgtaccccacatcggcgagcggcggcggcaccgccggaggcaaaggcaagatgttcgggcgcgcgccgaagaagagcgacaacaccaagtactacgagatcctcggggtgcccaagtcggcgtcccaggacgatctcaagaaggcctaccgcaaggctgctatcaagaaccaccccgacaagggcggtgaccccgagaagttcaaggagctcgcacaagcctatgaggttttgagtgatccagagaaacgtgagatttatgatcagtatggtgaagatgcccttaaggaaggaatgggcggtggaggatcccatgttgatccatttgacatcttctcatcattttttggaccctcttttggaggaggtggtggaagcagcaggggacgaaggcaaaggaagggagaagatgtagttcacccactta

SEQ ID NO: 364182 - DNA, 345 bp, Zea mays
gatgttcatcacactgaattcccgattcaggatcagaaatggatttttacaggcacttgttctttcacttctttgtgtttttgacaacaacaatagcaagcgattacataagctcaacaagattcagttggatctatttattaaaaaaagcggagaggaggtctactgttcatgggaggaaaaaaatgaggatctctgagctgttggtctggtcaccagagatgaaatagcatctacacgtgtatcctcaaggcaagcaaaggatcacaacgtatgatccgaattcacactgttctgaatcatacgcttgacaaaagtcaccaacctttggaaaatccattggta

SEQ ID NO: 364183 - DNA, 320 bp, Zea mays
gacacaaatgaaggccttgtttaattccaaatgaacacaaacaaattttcacaaagtagatggggagagccacaattataaaacagaagaaagaaagaaaaaaaaagctaaaatacaagggaaaacggaaaggagcaaaccaaagaagcttttagacgcttcctaaaatgccacgtccaagcttccagcttgttaacatactacttgtacttaataataccatctactggccacctttagccgcagagaaactgagaactctctcgcttgatgttcttggactatcataactcctactcaaacaaatacttgagcgttct

SEQ ID NO: 364184 - DNA, 176 bp, Zea mays
tggtccgctcctgcttcccgccgccatcgcccatgacgcctgtggcaccggcatgcgccgcggacgcgcttgcgcagatcctgcaggacctcctgccttcggttctgctggccgcggcggcggtcagggcgctccactcgcggtggtgcgcctccaggaaggcctcctggcgttgc

SEQ ID NO: 364185 - DNA, 352 bp, Zea mays
ttgtttcatcatgattaaagactgaatttcccatggctattgtcgaaccgggattcgtatctgactctcatgggcataaccttgaggatcatcggacatcagcatttgtgggcgaagattctagctaaataattccagatcgaacctctggccgaacttctgcttttagtcaatctgctggaccttcacagaggcctgccagccaggaaggccgtccaggaagtaaatcatattctgaggatgaattgagagaaaaatctgttttggccttcgggatattacagtgcaaaagatgaaaaggaggttggtttgtgtattgaggagctggatgcttccagtttaaatccttatt

SEQ ID NO: 364186 - DNA, 268 bp, Zea mays
  unsure (1)..(268): unsure at all n locations
gctctcacgcgtccgcccacgcgtccgaccggaaggggttaaagcctcgccccgcgccgctgtcccatcacgcttccagcgcacgtcagagcaggggcgcccggcccccctcgcctaaggtgcacattaccatccagcgcacacgaccggggacgggctccaccgagngcccggtcaagggcgcgtgcagctaccacctgtgccgccggaacaacatgctgcagaggaacggactcacggaccaccgattgaggaagaccgggacagc

SEQ ID NO: 364187 - DNA, 319 bp, Zea mays
  unsure (1)..(319): unsure at all n locations
tataattattttctcttttttcnccnagatacaaacataatgggggaacttttattgcacatccagaggtctcctacgcaaatacataacagactcactgctcactgtctagtttacactgcacatgagaaagttctggaaactattttttatagaccaaacgaatagggaatatgacttctgcgccagtggatcactatacatattcaggggcttgtaaatggtgtcttattctgtctttatgccgtacgaataaactaatctggtttgctgtaatcgatgtgtctcctgactctcgcgcgtgtgtttgtgtgttttt

SEQ ID NO: 364188 - DNA, 394 bp, Zea mays
tttttcggacgcgtgggcggacgcgtggggccggaccatcaacggcgcaacagccgcatccagtccctcccgcatcaacagcgtcgcagccagtccctcccgattcgcgctgaatccccgcatccagtccctcccgcatccagtccctcccgcggtgcaatccagacgcaaacaactccattgaccccgattcgcgtacatgctctctcacagcaatccctgctctctcctcgccaacgcctctcgataaactccatggaaggttcacactgatgcgctctgattccttgctccacgctctctcctgctctcgcgctctacatggaaggtgaggccgacgcccaaatcgacggaatccctgctctgcgctctcccctgctcccgcgctctacat

SEQ ID NO: 364189 - DNA, 357 bp, Zea mays
ttttgcccacgcgtccgcccacgcgtccgcccacgcgtccgtccacgcgtccgcccacgcgtccgcccacgcgtccgctagaggcgcaggagtcgtcggccgtgtgcaggcgcagctcgtccacttcgccgccggcgcctactaccatgtgggagtatcaccaggcggcgcatgcggcggccttgcagacgacctcgtcgccggcgtcttctttcccttcctggagcccttacgccgggactacggcggcgctactcggcgccagctcggcctttatttccaccgacgccggcggcgccgactcgtcgtcgcccggcatgcgccttctgccagcgggggagcacggcggcgggcatg

SEQ ID NO: 364190 - DNA, 182 bp, Zea mays
gggggggggaaaacaggggcaaggataccattaaccttcattttcagagggaaaacggtccttatggcaaaggctggaacccaacagagttattacctaacctgatttgcagttggggaaaataaacctatgtaccatatcctaattggaagggccctccaataaaaaaaagggtccccaaa

SEQ ID NO: 364191 - DNA, 165 bp, Zea mays
tggacgcgtgggtttgaaacgagcacagttcacaagacagtgaggctgcggtgggtgtttcctcgtcggagatggagggaaatttgccgccgcaaaccatggtcccaggcggaggccccttcgatctggggcagccgttccacttcgccgtccaaccccaggcgc

SEQ ID NO: 364192 - DNA, 356 bp, Zea mays
cttcagcttatatctctctctcgtttatatatggttatacttattaaaactcaatttaataaaagaagaagaagaagaagaaaaaaagaactagctgttttccccccaaagtaagcaagaaagagagaaaaaaaggagagggcgagaagcaaaacgaagaagaaatgggataccactgctactattgtttagacctcgtttgcaatgcaggcaacgagcatctctgaccgctactcccaaagcagcggctcctcgaggcgcagctccgcattgaccacctcctccacgtcagtgagcggggcccacatcggcgggaagcgcccgaacccgtcccggatgtcgaggagcaggtccgg

SEQ ID NO: 364193 - DNA, 55 bp, Zea mays
gaaataacatcgtttgtcttgcgatcacattactagtcaggaacattgtccagac

SEQ ID NO: 364194 - DNA, 367 bp, Zea mays
tgttcgtcctcgaataaaaatccagacgaaacccggaatccccaccgaacgcagcctaaaatctccccatccctcctcgatccagccccgcggagaagagccatggccgattccgcaaccaacgacgcccccctggtcgccagcaaccagcccacggaggaggaggtgacggtggagagggccgcggcgactgaggagcaggaggaggagaggctgccgtacctcgagttcgtgcagcaggcgccggcccgctccgacccggggtcgatcaggtcgagggcaccgtgaaggccgtcgtcggccccgtgtacgaccggttacactcccgcccgctcgaccttcttaagttcatcgaccgcaaggttgg

SEQ ID NO: 364195 - DNA, 254 bp, Zea mays
gccgacctccgtgctttcatcgcctcctcctgggccagcgcgcggcggtagagcttgccctcggcgtccctgaggaactggaactttggcggcggcgacaccgtcggggcatgggtagggaccgggctggccgccggggattcgaagagcggattgtaggagttgtccatcgaggccgtcggcacgggcgatggcgaggccctggacgtgaagaacggctgtgcctgggggcaatgcatcagttcaccgaggct

SEQ ID NO: 364196 - DNA, 236 bp, Zea mays
ctatcgacactaaggaggaggccgtggaggcctttcaccttgccgaccctgaagacccccgcgtgaatgctgcaaccaacttcgaataagatgctacctggaccacccgatggtcctggcacagcgtccaacaggagccacaggacgaggcggaactgaaccaagaacctgaacctgatcagagcgaaaccggaactgcagagcatgagccggactcaagcgaagccaagacaccg

SEQ ID NO: 364197 - DNA, 285 bp, Zea mays
gtttgcccatacgggttatgccataccccatcgcggcggttcgtgtatgcctcgccgaggcaacgagcacgcatcctgcgacgccggccccatctcgtgaagctggcgggtataacaggcatcgatacctacgacgacctacccccctgtgcgtgctctgtccttacagctcttgttgctgcaacgccagggcgcaaccatggggcagcagcagcaagggccggcggtcaggcggatggacacactcgcctcccacctgcgccagacctccagttgtcagcctca

SEQ ID NO: 364198 - DNA, 234 bp, Zea mays
aggactcgttctccgacggcggggctggttgtgacggtctgctctcgacgacgccatagcgtcagcgcctaccgggtacaactcttcagcctgaggcttacctatgcagtgtatcaagcgtaaatgctggaacatggaagggacatagcctgcactatggggatgggcccatgcacgaggcccgggggctgagcttggtcacaaggacaacgtcgtaattcttcaagcccacag

SEQ ID NO: 364199 - DNA, 259 bp, Zea mays
ttcttttttttttttttttttttttgggggcttttttttctaaacgatgaagattgatatattattagaataacaaataatgattcaatatccaaaatcaacagggctaaaatctttactatctccacaatactaaaagacagttaaatttatgaggaaacccgtttaatacacgcaggtcaatctatgaagagctatgcacttttccattatgccttgcacaaagatgacaacaatgagcaataacttcagtaatatt

SEQ ID NO: 364200 - DNA, 348 bp, Zea mays
gaatcaaccaaaactttgcttccataatccatatacagaagcatatgctcaggctctagtttctaaggttcaatccatggaatgaatcaaggctacaacaaaacaaagagtctagaagtaatccagatgaaagggttgaaattgtaaagcttgcatagtctcagggtggatatcaaaacatcttctcaatttactctctggtatattcctgtgttgccggtattggtgcttggctatctttggtggtatgtgcagaaacaaaactgttggggatattcagtaaatcatttgcaggcgccgttctggcaaactggacacttcacttgtctcaggggaagcaaaaatatc

SEQ ID NO: 364201 - DNA, 235 bp, Zea mays
ccctgcgggggcccctccccaatatccgggtctacccacacgttcttcctctgcacggcctcttctcactcccggcgggcacccgttccattccaccggccaagaacacgcattgccagccgccttccgagggcagcttcgcactgtctggttgctgcacgcctctagaccggggggccaagaggaggaaaagggcaggatggaagtccgcgagcggcctaagaagaggcagcgg

SEQ ID NO: 364202 - DNA, 279 bp, Zea mays
cctgcgggggcccgggcccaggtttccgggtctccccacacgcgtgtacaggcgcagagaagggggcacaacaccggtgactggtacactgtctgtggcgactcatcctgggctgtaggaactatgaatatgcaatctacatgttgctggcgatcctgagactaaaccaaaccttcaggtatatgcaagccttttttgaggttgctgctgctgcacctgagaactgtggttaggatatgagcctgttgtccaaaactgtcacatgcatgacatgctacc

SEQ ID NO: 364203 - DNA, 449 bp, Zea mays
gacgaaaatataatactaaaaaatatttcaatgtaacatgatctcagcaactggggagaccggaatcctgatcagcacgttacagcaagtattttagcatgtggaacattttgctcgcaggttattgaatacataaggttcttgcaagagaaggtccaaaagtacgagtcagcccaaccagaaaagaatcacgaggactcctccatgccatgggtactaacatagccacgttatcacgttcatcgcagtactggcaaacatccaccatggttgagcatgtcaacctctgatgcagacaacaaaacactgagcaagaacgagaaacaaactctccaagaggatactcaaagtctttctgatgcttactctcaagggtttgttccgaaactactgttgtttatgatggtaattttgctatatctgcaactaacaagagaaaacattattta

SEQ ID NO: 364204 - DNA, 303 bp, Zea mays
tgccacccctcatcggctcctccgtttcccaccacaacaccccatgtccgtcgcctcccttcccccacacggcgccaggccctgagcagccagcagcggacccaccaccctctccgcctccgatccgccgctcgccggggaggcctctggtctcgggtccgtctccagaccatggccaccactgccaccatctgcctcctacagcacgtacgacctccggcttcgggcggtagtcttctcccccttcccctccagcgcctccgccctattcactgccgacgctcggcgccagcctgccatcac

SEQ ID NO: 364205 - DNA, 259 bp, Zea mays
tctctctagcgccgcagcattgacgtggacgcggggccctacttcggcagcacggggcagcgcgtcccttccccgctcccgcggcatggactgcgcaaagaggagggcggtggcggacctccacaacgagctgatggtggagatcttctcgcgcgtgcccgtcaaagacctacggcgatgcacgtgcgtgtgcaaatcttggtgcaacatcatcaccgacccccacaacggcaagaagctgccccagaccctggaaggc

SEQ ID NO: 364206 - DNA, 332 bp, Zea mays
tacctcttcggcatctggcaccacggcggcttcttcgctggccccgccgccggcggcgccacctcctcctcctcggtctccatcgccaccgccgtgtcctgcgcctgccccgccctgacgaccgccccctcgtcaccccccgcggggccgctcgacttcgccgtgcaccacacggtggaggggatggagttcgaggccgcgctccggcagcgcagctacgaggcgtgccccgccaagtactgcgagtacacgccctgcgaggacgtggagcgctccctgcggttcccgcgggaccgccttgtctaccgcaagcgccactgacccgcggacgg

SEQ ID NO: 364207 - DNA, 295 bp, Zea mays
aaccaacatgggcaatagcatagcagggtcattgaacaaagggggatcttgggcttttggacatccaactggtggacaaaaatttttgcccgcccccacgaaacaataagaataatccggtcaagcaagagaccgccgggatctgaccagggccagacatgggccgatcagtttaaaaaaagaaaagaaaccgcctggcggattaaccagtctaggcgacggatcagttcgcagttcacagcctgggcgtaagatcgggctccttccgggcgggcacggggacccccccggccga

SEQ ID NO: 364208 - DNA, 287 bp, Zea mays
ataaaacaaccctgacatgttttaagcgaggtttttagggaccatccaggttcataacactatctcgcataaaaaaaacagcagccaacattacatgaagctcaaacatttgtttcatcagaaaaattgggtacatgttccgacaaactaccacccgtaaactgactgaatgccctatgaaaccaaataaagaatgttgcaggttacaacaccattgatgagcaatgtgaaagaatcgcttccaaccaatgcatgtaaagaatgtaccatgaaattattatacaggg

SEQ ID NO: 364209 - DNA, 253 bp, Zea mays
ggcctaaatgctttttcccatttttttcatgtcaagggaaaatgaaaagggagagaaagaaaagaaggataaaacccccgaaatgtaatggtcgtgtaagactttgggggtgaaaatggactgaacaagtgggagaacggtgagagagaagtttatgtttacaggggtcagtcacagtgacagggagacgatgaattcaccggaagcggtcaccatcggcgagctttcaggagcggcaatggtggagcgaggc

SEQ ID NO: 364210 - DNA, 281 bp, Zea mays
aaccaatgtaaaaggaggctaaaaacaaatataggacagtatatgtccagaccaagccggtaggtacccattagagtccaacaagagtaaccgcacaaacacatatatcaccagtccaaacatttaaccagcaataaaaaaacaacaaagtactaatcaacagcacggaaagagcgattcatggggtcaaaacaacaggcagaaagatataacctgtagatgtggagcctaaactagatgtgtaatattaagcaacagctaattgggaacaaactttttac

SEQ ID NO: 364211 - DNA, 197 bp, Zea mays
agcacccccttacccaattttattctttctgggcaaaaaagaaagagaaaaaaccgggtttttcacccttattttagaaaatatttttccctaacaaaatgaagtttttgggtgtttttcccacaggcacgacctggaataaccccatttgggggatgaatatccctatttttccttaatcctagggggggttgggg

SEQ ID NO: 364212 - DNA, 413 bp, Zea mays
tttttttttttttttttttttttttttttttttttttttcttcaaaaatgttatataagattgcagcatccaaacctaaaatgtcctgtaaatgtccaacaatttgacaggtacacatttacctaaagagtgcagtacaatgcaatttccaaaccttaatttcagcggaagaaacaaaaaaaaaaaggactggggcccaacaggcaggaccgaaaaccaaaccgagatcttttttggagttttttggtaccagaactggcaacctaatatagtttcaggaatagaaagaagatgagatttgactacaatagattattttatcagatccagcttttcctcgcccgcctttataccacattaccactgatgggcaaccacaacggtgaacaccctaaggccctacttatgtttcc

SEQ ID NO: 364213 - DNA, 407 bp, Zea mays
atgaaagtgttatacaacttttgcctggatttctactatgcaccatagacgatggtcatgaatttataggtcatctgagctgactcacaagcaatggaaaaattatctacattcaagatgtaaatgtacttctttgcaacctctcacatccaccacctaaagacccacaaaaacagatcaaaaaatttacaacttaacctttggtaatttgtttttcttctattcatgtggacctccaggtgatagacgtgagggactgcaaaagaaggtgtttacatgtggaatgcaaagattttctcaaatccaaatggtcagccaacaggctaaccttggacgtggccatatctgttagacctcttttggttaaaagtactttctctcttaaaatatagttttttatagcttag

SEQ ID NO: 364214 - DNA, 380 bp, Zea mays
ggatatggaatctagtactatatactatagccgggcggtgacaatggaatacggcaatggccaggtgaacaaatcctggcacgcccaagaataggattgacagacagggacatggggagaagaagaagaaaaggatgcggttattttcgcagcatgcagtcacgcttggcttggattcgattggatgtccgcaaatggccccgcgctcggctccacatgcgcaggatccaatgccgatcacgggtcgtgctcgggcttgtccacgccgcagccgtcgctgttggccatcgtccggctcgacccgcgcccgatcttggagaaggaaccggccacggcggacgacagccccttgaagctgctgctgccgccgtcgctgaggt

SEQ ID NO: 364215 - DNA, 425 bp, Zea mays
ggggaaaatatagtatttaaatcttgaaccctgtgttcacaatgtaacaatttcggtctaattaattattcttcagatgctaccaacagagattattgtgctaacaattctacatgagctttccagcgcctttttatcttgttcctcagaagcttaactgttactcttcctaacccacaatatacaggtaaagtcaatgtgtaacccaataagaattagaatgtgttcctttcatatgacacaatataatacatgtacaagcactatatctacttcaatcctctgaatggcatgtcataatttcaccaggcccccacaatctcaactgcaagataccttccgtttgtttactcttgccaagttctttgaaaccgccctagtcaaattttgatcctcaaaactaggatcaagattgaacttgggat

SEQ ID NO: 364216 - DNA, 128 bp, Zea mays
gcagtcgccgtttttttttggacccgctgcagagcaagtgccagggggactttggtaagctgacggactgcatggacgagtgcctctgctacatcatccagcagacgcacacggggcgcaaccaggtg

SEQ ID NO: 364217 - DNA, 325 bp, Zea mays
ttcctacgcgtccgatgattgggagcatgggggagggatatttgatatggataggctaatattggatctaatcgactttatgatgttgagtcacatcatcttaaccctcaggataggggtgtgctcgccaaaatcctagatccgacttgtcttcctcatttgtgtgcatatgtagttagactcgagcatgtgacttgtggggtcttgcttagttacatgaatgccaggattgataccagagcaatacttgaattggataccagggagcttatattttccaggtttggtgaaaaggcctatttgcctttttgaattgcagggtgaa

SEQ ID NO: 364218 - DNA, 447 bp, Zea mays
gggtcaccaaagaaacatcatcaatataagagcatatgcttacggattgcaaagtacgtacctataaggattcaggtatatagttgtcatcctgaagtcacatgaagaaacagatctatctaccattcagagttgtcgcgaagtgtgttatacatgaaacagccaaaaaaatatataagatacacaacataccgtgctacggtgctacgacactagtttcaagctattttacaaagtcataatcaattcctaatatgggcttccacaattgtcctagtcaaaaagtagtatcgtgcagactgcattacaatgaatcccgtgtcccgtcactgcatcaccagacgtgactcagatagccgctgttggaggaactgtttaccataaaccaatgcaatcgggaaacatattacaaaatagagactttgttcaagttaactgacgtattat

SEQ ID NO: 364219 - DNA, 504 bp, Zea mays
tcttctgaattgccatgcagatagctgctgcgtattctcgaacttggagaggtcatcttcagaatctacttggatatgctttatcagtctattgtgtttataagatgctcaaggtattactccaaattgcattagtaatttagtatacatcttgcatatattgtttatttgcacattatcaaatcatctcatttcatgtaccataagttatgagtcatgcaggaaacactgaacttgatgggcataaatatgtttaatcactccattttgcaacagttttatctagctttacatgttgctgcaaagattatttttatggaactttgttttcagtcttcgaatcacagtatcacacttcacatttgtgatttaaccttaaatgtattatatttttttttcagtccttgcagagtgtagtctttaaggagtcaggctctgttgatcctgtaacaatgtcaataacgattttcctgagacattttgacattggcattgatgttgcac

SEQ ID NO: 364220 - DNA, 225 bp, Zea mays
tgtttggcaccggggaggggaaggagacagggggcttatttaaaaacagcgcgggggcgagcattgaagccgagctgaggggcccggagcggagaccggaggagggagacgtcccttgcgatgtcaccggcagcatccgccggcgaaaccgccgttgtcgaggtcggcgcaagcggcccgagccagcagcagagcagccaccgtgccgaggcgccgtacgagccg

SEQ ID NO: 364221 - DNA, 293 bp, Zea mays
tcgtggaaaaaaaagggaggagaggagggagaaagggaagtatttaggtcggaggcgacgagagagagagagatcctgggtgagcgctctgttctgagccagaacctaatgcatgatcactgtgctgggcgggggactcggcgctcgccctcctgaacgagaacgcgtccgacttcaaggagctcatcgccaagcacatgaagatcttgttaggtcttgtccgtcttcctgagaatagagaatgtgcccactgctctttcttgggtcctctttgggccagtgtcccatcttgg

SEQ ID NO: 364222 - DNA, 255 bp, Zea mays
ctctggtctaaacccgagcgccgaccaaaaaaggggggggaaaaataaaaaaaaagggcgggcacaaaaacaggaacgcccaccagaaccgggaaaacccaacagaacaccacacaggccccaaagaaaaggcccagaacacagcacgggccacacggcggacacccacaaaacggacgcgaaaacacgcggcaccccccccacaaaaaacacccaaacaccagaccacaaaaaaggaaccccccagaaaacaaa

SEQ ID NO: 364223 - DNA, 515 bp, Zea mays
ttggttaggaacggttttttctattgtcggtgggcgggtcctaagtaggcctaggattttttcttctatctttaattagcaattgcctttttgagcaaccgttctgatgaatttcttttattgacaacatgaattagtctattgtagctcatctgtttcttgtcacaaatttaaatgaatataattgattctgtgaagcccaaaggttccaagtcaccatgaaaaaattgaaatgacgagatctattaatctaattgttgcaccttggaaagtctgaaccatcagagtttaattgtatcacccatttacacaagttcctaccatcagagttgaactgtatcacccatccataagcaattccttttgttgaaatgtatgagaagacatatgcctctgtttaggtaaaccttattcttcagttacaaatacttattgttaatgtgatgggtctaattttatggtcgctaccatggcttgcagtctcaggaacttttttgctgggaagcaattcctta

SEQ ID NO: 364224 - DNA, 507 bp, Zea mays
ttctgcccacgcgtccgatttggttgttaaggatgggactgctgcattggattctttaataagcaatctaagatcaactgtcaagtatgttatggtgattgctactattcttgatccaaggtataaaatgagatttattgagtggtgcttcaataagatatttgatgaacatcaagttgtgtttgaattagaagatgttcgtagtgagttagaaaaactttatggggattttgaggtgcagcatagagagagaaaagagtctcaaagcaaatctaatgcttcctcatctttgagtgttgaaagatcatgtagtttgccatccgcttcatgtcaatttcagtctttcttgtcatcaactcagtctaacccatcaaagagcgagttgcttatctatttggaggagactaatgtgtgtttatcagacaaagagtttgatttgctgaattggtggaggttaatccacatagatttccagtggtgttcagaatggcaaagaaattctaactt

SEQ ID NO: 364225 - DNA, 389 bp, Zea mays
ttggtggccgccccgagcaggggaacgcgccggctgcggtgcggctcctgctccgaagtcctctcctactcctacagggaccccggcgccaggaagaggctgcagtcaccgttcgggggcgacgagtacagcactgacgagtacgagcaggcttccggcggccacaacgccgccgccgccggcggcttcttcggggaggcggacccggtgtcctactccgaggagtacgggctctcgttcggcatcggccactcgaccagcaccgaggacgggcagcagccgctgtacgtgtcgaggaactcgtccttcaacaccgtcgacgaaaggacgggtactagagacggcaagcttcaccggctgatggggtactcgtcggcgagcgaggtgct

SEQ ID NO: 364226 - DNA, 214 bp, Zea mays
tcgactgcccacgcgtccgcggacgcgtgggcgaggagattgttgggcatggcggcgctgaaccatccgacctatccaaggaggtcaaagatatgaacttgccagtagctctcgatgaaggcctggcctcatcagtctagtaggacccaccgatgtacactgagcaagatcataccccgaccactgtaattaccgaaggagcaccaaggcccgg

SEQ ID NO: 364227 - DNA, 235 bp, Zea mays
cctgaatatttcaccttttgtccagcgtagtatatacttctgtatttactagccagatgaccgtgttttgctacgatttttatatatcatataaatagatatggagatatttattcaaatatagttattgtttatttctaaacactaaggtatgtataatctgatggttattcttaaatttttggagtaggagggtgtaggttttagtatttatatatttttaattttttttatt

SEQ ID NO: 364228 - DNA, 502 bp, Zea mays
ttttctgcaaccagatgacactgtggctgatgaagatatgcgatatgaatctgatgagaatcgtgaactgaaaccaaaagagaaaccagtcggtccaccactagacctggtggttccatttaagcaaccaccagctcgacctgacaaaatgaatgtgatcaaggtatcaaatattatggggattgaccctaaaccctttgatccaaaaacatatgtagaagaagatgtttttgttacagatgaatctgggactaagaaaaggatacggctagaggacaacattgtgcggtggagaaccattaggaatgcagatggcactacatctgtaagtggaatgctgtccatgtattgtgtgaaagcaatgcacgctttgtaaaatggaaggatggaagtatgcagcttctgattggcaatgaggttcttgatatatctgtacatgaggcgcatcatgaccaatcccatctgttttttgaggcatgggaagggaattcttcaattacaa

SEQ ID NO: 364229 - DNA, 361 bp, Zea mays
ttgctgcgatgtcgaagcaactaaaggcttatgaaagtgacatggagaggctgatcatggagaaagatgcggttgttggtgagcttgctacactggaagagcagctaacgacttcaaaagctcagattacttctctgtctgaaaccttggaaaaacagaaggacaaggttacatccataaagcaagattatgatcaagctgaaagtgagctcaacgttgggcgttctaaactgaaggaatgtgactcacagataaaccgtatggccaaggaacagcagaaactttaacagaagttaagtgattcaaatgttgagaggaagaaaatggaaaatgaggttaagaggatggagatagagcagaa

SEQ ID NO: 364230 - DNA, 357 bp, Zea mays
gtgcccacgcgtgcgcgcgttcctctcttccggtcgccgtcgccgccgcatccgtcaccttcacactgcgctccctccatccctccctgtctgcggcgactgggtggtctaccgctgccctcgctttcgcgggcgaagagcgcccaccagatgccgaggtggacagagaattctgcttccaccaaatcagctgaattggtgaaacaacaagaccgtttggagtttgacgatcctgatgaggtagacgaagaggaagaagttgagtatgaggaagttgaggaggaggccgagtatgaggagccagaggacgagtatggacagactgaagctgtgcgccaagatcctgcttggcacgac

SEQ ID NO: 364231 - DNA, 336 bp, Zea mays
ttctttttttttttcctctgacaaacagaatacttcctccgtttttcttagttaatggctagtttgggagcagggacattagaggagatctagatgactaaaatcccttactcaagtggattttcccattcaatcatgctcccaaacacgctctgttaagtttacaaacaggtacattaacctgcaaaacatgcggttcttaccacaggtggtgcccccaagcacaggtcgagcggttgacacgcacgcagcaccactgcaccagcctgtactggacaaccgaagctccggctcacaggatcacgcatttctggccacgcttgccggcgtcggacg

SEQ ID NO: 364232 - DNA, 314 bp, Zea mays
tttcttgttatgtcgtatctgagaaacctgaggggggcaatgcagagcaaaggagcgagaagtccggctggagccccttcgggaccaagcgccgaccaccatctgcgccgccggagcccctgttggacagcaacccggacgccgcggtgctagccgaggccctgcgtggcgccatcggagcgaagccccggcgtgcgcccaacgacaagcattactagagggaattattaagagcgatttcagggatggacgtttgtccaatgcatgaatgaacgaatcaatctaaaggcagaggggggaaaagagttcttgca

SEQ ID NO: 364233 - DNA, 240 bp, Zea mays
ctcaaacaaatggaacaaatctgaattggatggggccattttggacataacactggtaaggcatctattgtacataaccgaccaacttgatataaatacaacagtatccgactaggggtccaaaactaagtggcacatacaccatttttgaagctggcgaggttcctgactttgcaggaaatagaatgggctcaccatgggaatgatcgacaagatgcattttcctggacgacaaatggg

SEQ ID NO: 364234 - DNA, 302 bp, Zea mays
gcgctccacgcgtccgggaggaggggagggagagggttacttgtaggtgtactccgagtcccaaggccgatccggaggaggagaacgttggctcgccggcaccgacccctgcggccccagccgagggcgcctcagactcgcccctgcagcctgtagctgacggcgcctcaacggagaaggtggctgccccggcgccggaggtaaggtcccggggattcaggctacttggagaggacactttcttgcacaaatcccttgggggcggtaaaactgctgacttactgttattgaaagacatgtaa

SEQ ID NO: 364235 - DNA, 60 bp, Zea mays
aagcttaaaccctggggaactttttattgcatttacaggccagccatggcagctttgtac

SEQ ID NO: 364236 - DNA, 284 bp, Zea mays
caggggaatcgttcaggaatttcacatgaaaatgggcccaattccccgggcaaaactttagcataaaaaatccacgttccttttggggtccacaaagggttcccctgatcctcctaatttaacatcagagggcgttgtaaacaagcagagccctttcacttctcattgggctcccctccctaccctaacatagatcatcttggccccaaattagctttgataataaattaaaatctttgggaaaattagctgcccaagccctgtttgataatcagggcaccccc

SEQ ID NO: 364237 - DNA, 286 bp, Zea mays
agccattctttcgtcgttgtgacttattaaggggggccaacaaaccaatgcttaagagggcaaacgaacacccacaaccgagaattgggggcggggggccaaccacacaaagattggaaggtgggaaaacagaaaccggcttacaataggttaaaaagaaacattacgcccacatcaactatgcaccttccaggggtaataccaggctcgctctggttcggcatcaaccgccgaatagaggaaagagcagcaggtcctggacgaacgggggtctgacgcgggcttg

SEQ ID NO: 364238 - DNA, 429 bp, Zea mays
  unsure (1)..(429): unsure at all n locations
aaagaaataacaaatctttattgaatcagccactggttttatatacttaactatttaaaaaatagtagtaattaatatgtatttatatgttgggacaaaccttagagccccttgtctacgccactgccaggaatccacacgttattgattaatgcgtcttttttcctacgtcgccaattgtcgtctttcttggcttgttgaggtttgttgttaggaaaaagccagtctgcattggcatctgttgtctttgcaaacatccattgacacgctgcatggattacggggggaaaattatataagatccgtcataaatataactagaacagngggggggcccattcgggcgccctatcgagaggttgtaagccaacaaaatcatatataatatgacatagtaaagatttttgttgttgtggcattaaatagaac

SEQ ID NO: 364239 - DNA, 273 bp, Zea mays
ccccccgaaacttcgatttaaattatccccccctaaaattaacaaccggagttaagggggatatttaagcagggcctttacaatttgggccctgggcttatttggcaactaaaaaaagggcaaaggaaatttaggccttttttttaaaaaggcatcccccggccctggaggacatttttacaggactggtttgggtcggggccaaaaataaaatccggggggggggcggggcctccaaaaacctttctttggcctaaaaaaaatccttttggg

SEQ ID NO: 364240 - DNA, 342 bp, Zea mays
ggacttgaaatccactagggttattaactggtggaccttcacccggggctgatcctgaactgatccaaaatctccttgggccttctgaagaaacttttttaactggcttttttgcagctgcagctccgaaacctttttttttgcttgcacaagctgttgttcgtttgccctgaaagcaaaaaatacttgggaaaacaacaccttgaattcctcctgaagtcgttctgcgggagtggcattattccattttatcttcctcaaaaaatcctcagccttaatggcccgttgcttttgttccacctttgcactcattatttctgctatggcggcctcaaacttttt

SEQ ID NO: 364241 - DNA, 63 bp, Zea mays
ggggagcttaaaccctggggaactttttattgcatttacaggccagccttggcagttttgtac

SEQ ID NO: 364242 - DNA, 193 bp, Zea mays
gcgcgaaaagcacgttcggtgcacattctatacataccatgatataaaaggcactgcgctcttcttagcgacccgtttgatcatatgatgccgcgctacaaagcatatgttgccagttcctagatgcctacaaaattttcttcagttgcctattaaccgattatttcaccccccttaatctttacacaccgcc

SEQ ID NO: 364243 - DNA, 233 bp, Zea mays
tccttttttttttttttttttttttttggaggtgggaccaggacttatttttccttgatgcaaaaagaaaaaccaggcctgaattggcacacaaaaattctcggtttattactacgtacttgacaacaactacaacagcaactggtcacattcttcaaaaactcttgtccccttccctgggtcgcacactctcatcgcatcggaagggatgaagagaggccatcaccatgtta

SEQ ID NO: 364244 - DNA, 432 bp, Zea mays
ctcatgcgtgttaaactgtaggataaaacttagaatatcacttagaatatcttagcactcatgttaggactcacgtgagctaaagcatgctcaagaggtaacgctaaacgttaggattatggaatgaaacatgcccttagagaggccataagagggaccgtacattgagccgtacactgcgtctaacaccgaccttatcaactactatattttaaactatactctgaactcagctttgtccatagtataaatcatagatttattatttaacatgatctagtgcacgtactaggaaccgtatattgagccgtagatatcgccaacaactatttcaacaaatactatatgtcaaactatacgctgcaatcagctttgtctatagtataaatttttgaataaacatgatatgttgcgggcaatgttgacatcgat

SEQ ID NO: 364245 - DNA, 346 bp, Zea mays
  unsure (1)..(346): unsure at all n locations
gcctgcccttttttttttttttttttttttttntttccggaggaaggtgctttataacatttggttggctagcaagctaccgagggccaggacgatatattaagatccgacaacataatgaaccaggatttataatggccatttaacagccgttagcaccccatgatgaacaaggatttacaggggcctctcgttaggaaccatttaagccagggaccgatttttccgagttgtatttacatacccaaaacgcttattctgtttggttctttttttctctgccccgagaagggatcaccagaccccagcctggtttgctttgattaccactggttctttcctttct

SEQ ID NO: 364246 - DNA, 310 bp, Zea mays
tttcctttttttttttttttttttttttaacatcatttgggtgggtaaatggaacaggcggaacgctgacatttttttcctttaaaaaaaattccccttttttatgccgaaatatatcaaggggagctcgcgcttaagaaacggagaacaaagccggggtagaaaccacgcttgttgtacgggtttacccccccaccaggctcccaccaacaaggaaagacacggtcatgagcaacctttttccccctacgttttccttcttttggtacaaaagggccaagaaaaaggttccacctttttgaccccatta

SEQ ID NO: 364247 - DNA, 501 bp, Zea mays
  unsure (1)..(501): unsure at all n locations
cggttcgcgtttgcgggatattctacctctcggcgaaagggaagcggcacacggtgtttctgagggagatgtatgatcgtggaaagcttctcgagtcgaatgatgtctctgaggcaagagccaaactcgttgagctcatgctccttcgtcggcgtggtctcgggaatgccaattcaagtgccaacatggcttcaggtgccactgctgatgccagagagagtggtgatgattttgttgatcatgaggattgtttgttggatgtatcagagaagtgatggtagaaggatgttgtcaacttcatgggaactcatgtcagtaagccatgttgaacggtgcttagcgcacttctgatggagaatggattaatggtaccacggacaggaggtttgtgtgctggagataaccaaatgagaaggtgcatggatttccagagtggtatgacttggtcgacaaagctagaggccatggatatgctnggaactcaaaagtcatgtttcaact

SEQ ID NO: 364248 - DNA, 290 bp, Zea mays
aataaacagctaaatataggatatatgtgttggttatatactaacaaaaaggtgattatcgcttcttgtgcatctaatatacactggctggtttatctctcagcctctccagctacatgaactcaagcttgcacttgcaccatgcgactgcaaggcttttgctgctataaatccccaggcaaccggggggactgttaaccgaaatacagaaatgaacatcagagggtcatgatgtcaatctttgtggctgttggtggactcgtcctgctcgccaatcttttggaactcgg

SEQ ID NO: 364249 - DNA, 530 bp, Zea mays
ggattgttaatatgccgaatgaagatcgcactgaagaggttaaagtgttaacttatattgattgtcaaacttccacggaatgatgtcctactaactgcaacatgggttattaaggtctgtagtttcaaagtatgatatggcgtcataattacttgaactgtgataactgcagttgactggacattgtttggttattatggtctgtaggatcataggtatgttttcacttggcatctgtgataactgcagttgacctgtcaatattttgttagaaagaactgtagggtcttatgtgataatttctcacctttaagctttgggttcgccttgatatttctcacctgtgggcaacatcagatagtcattagcttcccatttatatactacagtagtatagtctgtgtgtgttcctcgagactcttaatttttcttttcaaaaaatattagcaaaccttctagcacaattgttaagttgcatgttgtagttatagcaattttcttctttctttgttccaatattttttttcttt

SEQ ID NO: 364250 - DNA, 121 bp, Zea mays
ggccgaatactaataccagttcccaggggatttttcaatttttgtgggtcaaaaaatgcaaggcaagttaagcccggtgctgaaaactggagcaggatggaaagaacattttgggctccat

SEQ ID NO: 364251 - DNA, 273 bp, Zea mays
cagggtattgtgtaattggagaggatagtacaaaccaggttgggcgtcggtgtcgctacaaaacttgacatatgaatcatcatggcgaagacacgattacctctgcaatttacaaatcaagttactctataggtaggtagcctatccattgtccaatcgaacttttcttcactgcctgcgatcctacatgagcatcgatcgtggcagctggacttgtcacaccccgatggcagaatgcttttgtgggcttgtgtagcctaacaataaaacgat

SEQ ID NO: 364252 - DNA, 473 bp, Zea mays
ttcgctctctcgtccggagagaaagaggaggtggcaggttgggttctgagcgcgccgacgtgagatttcgggccctcgtgccagcaggttcaaataatggattaaaaacttaagctgacacttatggcggatgctcaattcaacccagtgaatccgaagctgacccatgaagaactaaaataagctttatgcttcattgtcttgtgaaatgattctgaggtattgataactcagcaacctagagcagaaaatgtcagctccggaattcaggacttcttaccagcaagtatcatcatcacagccccctgagaatgtcggtcaactcaaggtctgccgatgtgggtcgggagactctaactttcagatcactaataaatttgatgctggtgaaaatttaccgacaacttgtacaagctgtcacgttttaagagtgcaatttattgctcttatctaagggattggatggacagttt

SEQ ID NO: 364253 - DNA, 506 bp, Zea mays
gtgaatcatggtgaggcttctccgggtttcctctctttctctatctcttcctacatcgccactcgccagtgcggcggtgacctctagaatccaaagcaagctgtagtgagcagccccttacatactctctgcggactgcggtccgcaccgcacgccatctcagcaagacgagagctccaccgcgctgttcacttcttctgacgaaggatggcgggaaaagaggatgagaatgagaagccatcgttggtggcagccggcggcaagcaagatcggacagcggcgaccacggaatcccttccgcaaaggacgaatcttgagtggggaaaggcagcgtgtagcgaggatgacatccagaagtgtgtagctgccggtgccttcatcccggtgagctggtcgaatggcgagctcccgtcaaggatgagactccgacgctatccaccatggaggatcagtttgttatcctgtctctgacgcacattaattgcggtctgagggtcgatgcgagc

SEQ ID NO: 364254 - DNA, 353 bp, Zea mays
atcccaaaaatgggggcgcagtagttctttcaagaaaacaccaaatacccttgctacagactattgcagacttcaaaaaaaaaggacaccaaacacctaaaagaaaaagaatgtttatttcctaaccaaactagataacaaacccccatccatttttggcgcgacaaaaaagggccttttttttaatccaagcctgctacatactacttgcaggatcctcggaaacaacctatcttcatgggggcggcagggctagaaaatatgactggctttttctcaggagctacaagggtcgaaccattttggatggggcagctgcgcctggcttttgagctgcaggtgctgggagagga

SEQ ID NO: 364255 - DNA, 385 bp, Zea mays
ttgccttttcgtgcgcgatcactgattacgcgatcatctgctctccggatacttggcatatcaacagaacattttggttgggcgggccagatcatttgtacactgatatatactaacagccagcgattaatcaatcgatcgcttctgatgcatgcagatactggcactgaagggcatggaggcagcaggggggttgtcggagctgaccatcctgaacatggagacggaggcgtcctgcatcaaccgaatcgaggacagctccgagatcaaactttacatcacgcgcacgctgctggcgaacgagggcctcatggaccattctccggcgtcggcgccgaaccactccatcggcggagggttgatccctttatacccttccgtcggc

SEQ ID NO: 364256 - DNA, 414 bp, Zea mays
tcgccgttcgctgcacgccatgaaccagacgggggcggggggggcactgggccagctgctggcgctgcagcactaccagcagcagccagtggtggagaaggagaaggagaaggagaagcctctggatctggcggtggtggtgacgactaccacgacgtccacgggactgtcggaccgcgagcgggggtcggaggctctgacgcgcacggggcacgcgctgcgtctggtgtcccctcccctgctgcggctggtggtggaggcggtccggaaggctggtcccacggaacagctgttgaggcgcacgggggtggtgtaccgacacctgacctacgcggagaactccacatctgatgcctgggaggaggagcggctccaccagaggaaccatgggctagcgtacatcgagcggtaccg

SEQ ID NO: 364257 - DNA, 265 bp, Zea mays
tcggtttttcgtggccggacgcaccggaagacgcgcgggctccgtcttaaatgccgcatgaaacagccaggtacagggcgcgcaggccatgcgcatgacgctctacagagacacgccgaacgggcccaccgtcattcgactgaaggcactcggggagaccccagaacaggtggtgcacatcacggaaaacttggtacccaagttgaccacaaccaggcggccagtgatgatttgatcgttcttaaataaatatccggggcactct

SEQ ID NO: 364258 - DNA, 370 bp, Zea mays
tcccagtgttacgttagagcaggtccgaggctaccagatggtagtgtgagctagggcttgcagacgtccaaggggctgtattagtagccctgccaccggggtagacgccacctgaccgatcggttcaggaatctgccgcaactccggagcatccgaacatgaccggatgtccatatatggacattctgtcgcccgagctcaatgatatcatggggagaaagtgcatgtcggtgccattcaaggaggccaggatcgatgttacacacacctaaatgtaatacactgcagtacgggacgggcggctcactcgcatggctaaggaaaagaatagtgggcacgattatcctaatctttttctccacgggggcgc

SEQ ID NO: 364259 - DNA, 253 bp, Zea mays
ggagaatcacaacaaattggtaccatagaattgcattattcacgttcatcaacatgactatacagaaataggaagctgtccagttaagattccagttgggcaatgagtaagctagaaataactggaaagctctgcactacgtccaatagataaacactacaccacccccacacttgtatgctctgttcgttgcttaatacttctctgcaggatttttggctttgcatgtcccttccatcatttgatcgcacgc

SEQ ID NO: 364260 - DNA, 500 bp, Zea mays
cttacgcgttcgacgtcctctgcaacgagcgcgccctacgcgacggcgttccctcggctacctctacctcctggacatgccaccctcctcccggcctccttcgccttaaccctaaccccgcaccttcgaacccattgctgctcccctctctccccggctctaatccgctcctaacttccgccttgtttgctgcaaggaggcgtgcgcgacctccagttccaatctgagcgactttggtggcatggacttcctgttcaccatcgccggcttcctcaccatcatcagctttggtggcggacatgagaggagagaagaatccttcgagaacaccaggcgatccatgcacaaattatcaggaagggtggtgggaagtgttccacttgccaccaattctcatctctcacctctctatcacatgaaccaacatatttctacaatgtggacattcctctcgagtcatcaaaggatctgaagaaaaggagaaagaactccatgctctg

SEQ ID NO: 364261 - DNA, 446 bp, Zea mays
cccacgcgtccgatcgcgacagccgtcatcctagctagcaacgctccgtgtggcggcgctcacagcgcctgacggcattgacccttgctcctagcgtaggtggcaatcgcatcgcccttccgtgggctcgcagtagtggcattatctagcatcggttctctgcagcgccccaagccgacggtctcctagctgtgacgaccatccccatcagcgacaaccctctcgatgctctgtatgttttggaggcaatgcaagtggtattttggagcatgtttttttgataatatgttttttattaaaaacaatcagagtacaagcaggggaaaacttgagttggtgtgcacctacttgcgaaattgagtttgttgtattatgactactaaggtagttgctgctgcctgattgtttgtatccagattcacaatccaccctcatttagttgtgct

SEQ ID NO: 364262 - DNA, 286 bp, Zea mays
gggccccccaaatcaacctttttaaatttggcaataagttacaaaagggaaaacacaaattatctgcccgccgaagccagtcatacttggacattttaacaaacgttttttctacagttagtaaccgatttcaccactggtttgccttgccccaaaacaaggaagcttaaattttttacccgtcttttgttgatgggccccacatgaacccgaatccaccacacccaccacttttttgggcaacaatgatgggggccataaaacacaatccataccctaccaaaaa

SEQ ID NO: 364263 - DNA, 274 bp, Zea mays
ggggctcgaaagctgggatcgcaaacattttacacgctcaacacaagcgaaaccagaatacagaactggggatgtcaacttcaagaattcgggagccactagctactggatctgatgccgggataataattaagcgggggggctaggactaggacccgcccatgatcaaagagcagatcgagttgacatcctcctcccccactcgtggccggccgtggccaccggcgggcgaaggatcaccggatcactttttgtccctgagcagtactttgac

SEQ ID NO: 364264 - DNA, 261 bp, Zea mays
aaaaacgatgctttgttcaccgtataattcgtcaaagaatctcagcagccagagtacaaaaaaatgttcagtctatcaacatagcttcccaagtacttccatcaagagaggaaaaaaactctctatatcccaatcaacacacggcaaaaaaaaaaagaatcatgtttccctaaaaaaatacgctacaaaagaaccaactagttcaatagacagcaaaagaatggtggtcagtctagctgtgatcctgtcagtaaccacgct

SEQ ID NO: 364265 - DNA, 409 bp, Zea mays
tcgcccttctgtacgaacggatgttgtcagagaccataggatgaatttgcatctatcctcagcctggagttacatgctcttccaccttctacgaggctgatcccaattttgcgacgagactttggccaggcgggacggcttgaaggggctgctggtggattacacgttatgtcgggagatttatcctaatctctgacgctcagggaaaaatgctatgtgtcgatcgcgtctatctccaattatcaaggttacttgtgaaggtttcaccgatttctgatctcattcaatctcagaaggccgactttggagcccgataaatactaaattctccacgcgaatgcaaacttggaaaccaatccttgattgtgaaaccttgtctaaagctcattgaataaagcgctcgacatgt

SEQ ID NO: 364266 - DNA, 350 bp, Zea mays
atctattcccatgcctccagtttgctgctgcttgttaatgccgccggccggtccctgttcttgccagtccagtgccatacgtgcgtgaaagtctctcgctttctgtgtcatatcatatccggtgtgagctactatagcgtagagcatgagacgacaagcgtatttgtgtacatacgtgcatgccaacttgtatagtttgtgaggcttcgccatcacacaccccacggtgcctgctggagctcatgtcagtatgtgtgtgtgtgtgcctgccactgccagtgacctatataactctgcgtgtgatttgtaattaactcccacgtttcaatttttgcctataaaatatacaa

SEQ ID NO: 364267 - DNA, 484 bp, Zea mays
cacttttggctgcattagagaagattgagtcttggatattttctcgcattgttgagacagtatggtggcaggtaaatgtctgtcttagacaaattctgactgacacttcaatgaagctgggaacaccctgtcctagcctggtgtttttctttttttaaaagaaagtcaatgtctcttatggcctacttagaagggcagacctgatgtagtggtgagagctgtctcactgagtcacaaggtcatgcgtttcaaagcagcctcttcacatttgcgggggaggcttgcctcagtttgatccctttctcagactctgggagtcttcggcacaggatctgtcttgcggtcttatggctacttgttgtctgaatatgttctgattcttcatgttgtcagttttcttatggatgtttctcttacaggcactaactcctcacatgcaaaaacgggcagaatgatcatcaactccaaaggctggtagagtgct

SEQ ID NO: 364268 - DNA, 338 bp, Zea mays
ggaaccgcaaacacacagttacgatcagcccattaagttgcatacataagagtatcaagtagcaaacaaaaatttattaaaaacaactgtgaaattaaaaaaaaagcagcaggtttgaacggcaagcattaattaaggaagcacaacagatttggttttccagctttattaaatcaacggtgtgatgccttcatgctgcctcaactcaccaaagctaactatcattatcagttctcaccttcagtgtctcccctccatcaggagtcttctgggccatcactttcctgcaagaaattttgttgtttccatcggcctcccgtgcgttgccgatgatgact

SEQ ID NO: 364269 - DNA, 308 bp, Zea mays
tttccggtttaaaatacgagcacgacttagagagtgttccgggatggtctgatgctggttgctgctgccatagttcgaataatgaagacgccctaggtcctgaggcacacccttctaatcaccgacctttaccagctacattaagtgccatgtcaagccagctgatatcaaaaaaagaatacaaagctctatagaccgggagtacctgcagcgggacaggaggcacccccacatctacaactatctggcttgacagagctttggaggatcattaaaaagacctatcactttattatcataaaaaacac

SEQ ID NO: 364270 - DNA, 238 bp, Zea mays
ggtgcctaaggagcaacctcatcttcgaagacattcccaagtctgcatagatgccttttacattttttttacagactccctttttctttcttttcgtttatgtgattctatgacaagtccttttcattcaaataaaattattatccgcacggggtacccctccagtccattcagaaaaaaaaacattatctaatacgacttgagattcttgaaaacaggatatataaatatctatata

SEQ ID NO: 364271 - DNA, 439 bp, Zea mays
ctgtttttgcaaagcttgtgaggggagtaaagcaaccatggcctccacctatggagtttgcatgcttggatttgtgcatggcgtccttctgctgctaccatgcaagaagtccaaagtggctgctactccagtttctagcagaccaaggtgcaaaacatttctttgtcatgatttgggatcccggtggtgatgcgaacaacagcttgagggcaagctgtatctcaagaagaggggaatgtcaggtaccgagatgtcacaaccgataaccagggtaacaatcaggaggagagctcggatgcagtggacgagtgtgggctgtgtggagtacattgtaacattctgggccatgtgtgggccgtgtgtgaccgtggtgtgtggtttaaaagctgtaagcatctggtgatttggggggaaaacattcagagagaattatgtttat

SEQ ID NO: 364272 - DNA, 385 bp, Zea mays
attaaatactgtcacccaccaccgcgccgccgcgccatggcttccccatccccttcctagcccctccacccggaccagcacccacctcctccgaatgttcaccaccaattccaatccctaccgccatcgatgccgacaccgccgccgttaacggtgctgccaaaggcgctcggccttcaggttaccgccgcctgcgggaagcacctgaagaatgttaactggcgccgaggggacctccgtgcctacacggtggtgtcccttgacccctcccgccgcgccgctacccggccccacgacggcggctggtgcaaaccaacctggaacgagcgcctcgtgctcccgattacgagccaccttttcgccgacgacccctacatgctcctgt

SEQ ID NO: 364273 - DNA, 247 bp, Zea mays
ccttggcaagtaaccatggacaactttggtctttttatccatccatatagtcgatagtgaccttagctttatagaggattcagctcacctgttcttaaacaagttgtgccctgggaagactaaaaaaaggcacacatattatagggttatgaaattccttcaccatttgaaccctccaattccaatcacataaaaatatcaattgcagttttgaaaaactttggtgctacatcaatttggttcaact

SEQ ID NO: 364274 - DNA, 391 bp, Zea mays
ccttcgcctactgtggggtcaatggtccttcagcggcacggctgacatctgcagtgcgtcgacgaagaccacctcttctggccgagtttaccgatatagatacactacattcactcaccgagacagccacggtacgtgcgtgcgcccaattgcctgaattcaacctgacaccctcttcaccagctggagatcggagaggacctgaacgcctgctgtctccttgtgacaacatcataacggccaacggtgtactgtgtgacaaacctgtacagggagtcaagccacgcaactcacgaggcatggaactacaggcgcctcctcccgatgacaaaaatccatatcaacggcgcgtgcctgtgtgcatggatgtaccacagcctgactggcatga

SEQ ID NO: 364275 - DNA, 522 bp, Zea mays
caactctggttcgatagtgatttcatcttcctctaccaggcggctccgtggtccgtgctgatcaactgcatcaaggatcgtcgccggcggcgcgctggcagcagttcgcacggcgagatcggattgatcgagatcttctaggcctggacctgcgctagacctcgaagcctcgatcgcaccgcatcttctatctctgctgctggtccgctccgtcgccgccgaccccgccgccagcttccccttccacctaaaaggacgacctctggccgcccttgtcccgccccgacgcctcggtttccactgcataggcgtggtgcggcgatccgtccgggcctagggttgcgagagacactatagggtacgaccctaggagcatccgcctccacgtgggtgaggcggaagagggaggatgacatcgctcagccgtgagctggtgctcctcatcctgcagttcctcgatgaggaaaaattcaaagagacagtgcacatgctcgagcaggagtccggattctatttcaacat

SEQ ID NO: 364276 - DNA, 246 bp, Zea mays
cggtctcgtgggcggacgcgtggggaggtgggttggcttctcctccccctccggtccgggttcgggttcgtgaggatctccggggttcgggttcgtgggtgagctgatccagatggatgcgtctgatgttgagtaccgctgcttggtcgtaggcctgacctgggccacggacgaccactccctccacaacgccttcagcacctacggcgaggtcctcgagtccaagatcatcctcgatcggtagac

SEQ ID NO: 364277 - DNA, 129 bp, Zea mays
gccatggcggcgggcgtggacggctacggctgcgacgagttccgcatgtacgagttcaaggtccggcggtgcgcgcgcgcgcgcagccacgactggaccgagtgccccttcgcgcacccgggggagaag

SEQ ID NO: 364278 - DNA, 413 bp, Zea mays
tgtcgtccggttctagatcgcgagcgccgcccttttttttttttttttttttttttttttttttttttttttttttttttttttttttttttttttttttttttttttggggggaaaaaaatcggtttattaaaaaaaccctttacatgagcaaaaaattacctgggaaaatcacccccaaaagggggggaattttgattgaaaattcggccacccctaaaatgttggggcccaaaaaattctttagggaaagcttattttttaacaaattacataacaaaatgggggaggaatccacaaggcgggtgcaatgggcaacttgtccccttacttaaaaaaaaacaaccttaaacttccctgttccggaaatacaaaaaaaccaaaccgggggggaaatcccgcccccctttttt

SEQ ID NO: 364279 - DNA, 278 bp, Zea mays
ggagcaaagtcatcgttctgctaaattcaaaaaccaacaacgtttgcattatgtctggaacagagtaatatctaacagagatcttctcaaagaacagagtttttgtaaaaatatggaagggacagcaaggctactaccccagggctcataatccgtacagcaattttttagcttgagctctgcctttttgaacgtttaaagggcaaaatccgattcactctgattttgccggagaacaagatcggggcaaacttttgctcctggcaggactcctgctt

SEQ ID NO: 364280 - DNA, 502 bp, Zea mays
gcggaaaacccccagccccctagcctcctagcaccttctcctgtccttctaaccctagccgccaagcccaccagccgccgctagctgctgccgttctccactctccacggaccatggctccacggccagccgccaaccaccaggccacggccgagcagggcgccaagcacctaggccggccgagcggtggctgccagcaagacgaagatctacatggtgcttgagctcgtcaacggcggcgagctgctggacaggattgtaagccgccccggccgttcgttcttcctcccttgtgatcacaggcggccagtgagggaaagctcccggagcaggaggcaaggaggctcttccagcacctggtcctttcctctactctactctactcactcactcatcactcccaggcggccaaacagctccccaggtgctaattccttatgccgaatgcctgcaggttctgcagaacagaggattgtactttacttgggagcttatgcaagct

SEQ ID NO: 364281 - DNA, 136 bp, Zea mays
cagagaaaggaaccatctcgacatatctgtgcccaagcccgacaaaagatgggcacgcacaatctcttaccccatatggtgcagcctataaacctataggtgactcgaggtcacaacgcacaaactgggaagaact

SEQ ID NO: 364282 - DNA, 421 bp, Zea mays
aggattgcgaatgaataaaccactatacacgatgagctacactctggctactggtggcgctgagggtcttctctgcgctggaatctatgctcttgttggcccctcttgaccctgagaacatgcatatgctagtgcctgccgtccaccatctcccaaaccttacaggaactgtcatgggcctttcaggtggatctgtacgggttcagaagacctaccatcgccatggagtggatggtgaagcacgccctgatgatatacgtgctggtggcgtgcaacatgcttcccatgctcatccgtagcttatattgaagggaccccaacaacagccttgtcagtcttaacatgacaagctctcttagctgcagagattcgagtgggtcctacaagtgcagtcgtaacaatgaaccttttttcatatgaa

SEQ ID NO: 364283 - DNA, 250 bp, Zea mays
tttccttttttttttttttttttacatagaatttctatggctagaaaatcaaactcatcccaccagttcttcaaagaacaaataaaatttctctatgcgtacaagagcgggatcaataaataggcactaacctggcaccaggcccataaaggtagagctagcataccatattcccattgactaacatgatattgggatctctggcgtgtgaacaataacctgagtttccggtggctttcaggctcaagcc

SEQ ID NO: 364284 - DNA, 434 bp, Zea mays
tgtcgtccgcctacgcgtccggttctagatcgcgagcggccgccctttttttttttttttttttctgacaaagacaaaatggtatatatatgccacacatgactcttgatcatgcttcagtatatgcatatacatcaggtctggtgcccactaagtagtaggaccccggttcctagtgcatgtttagataaccaaaggtttcatggtctctgcattagctgaaaaccggtgcatctaagagatagagatcagttgtttcttctttgcttgcaccaaataggttagtttctggaagaacactaagcataatgtttcagaccgaggcacggcagcagcagcagtgccatcagtcccaccccatcagcatgttggtgactgcatccacaatctttttccgcagcgcagacgagagctcgtgctcctcaccgaagtgc

SEQ ID NO: 364285 - DNA, 294 bp, Zea mays
tgtcgtccgcttgtcgcgtggcggacgcgtggggggattttgcctgtagaatttctggaaattcatctctttttttaatgtagaatagccggaaattcaattcgatcgcagtccacgaaactgccagctacgtttgtcgatacctgtattgggacctggattattgtatagagccaagaacttgcattgaaaaaaaaaaaaaaaaaaaaaaaaaaaaaaaaaaaaaaaaaaaaaaaaaaaaaaaaaaaaaaaaaaaaaaaaaaaaaaaataaaaaaaaaaagactttttatagg

SEQ ID NO: 364286 - DNA, 212 bp, Zea mays
cagaaaaagtaaacatctcgacatagctgtgcccaagcccgacaaaggaggggcacgcacaagctctaaccccatatggtgcagcctataaacctataggtgactagatgtgacaacgaacaaactgggaagaactatagagagactacaacacatagcgcactggatgacaacaaaggttgggtcagtgaacatcaaaatctaatcttaca

SEQ ID NO: 364287 - DNA, 252 bp, Zea mays
tttatttttttttttttttttttttttatttttatcggaaaaaaaagggacttattgatctccacggtgagataccaccaaggcttttttttattacagggggccgttgacagatttctcaaagctacttatacaggaacccaagtgcccaacaggagttttttcctcgcagcttctcaccaaaaaagcctacacagcacagtaccttttcgcgcggtcactggtacagactggcaagctggccttccttga

SEQ ID NO: 364288 - DNA, 473 bp, Zea mays
ccctcgcgtccgttcctttgttcaatttgcaaatgggagtaataagtcaattaaaagagaatatgtaagatgtaaagaagaaaactcatttaaaaagcacagttcctttgttcaatttccatgtacatgaactaaaaaatctttagtaaactgcagctgaatcagcaccatgccattgctcttaagtctgaactgacaataaggtaaacaaatgcaacatgaccttagatcaaggttttggagatagtactctatgcacacaatctagaaagaatcaagagagcatgacctaagaaccaaatgacagggtggtaaagtatgatatattatacatcctcactaattagatggcagctcatcacccttcccttgcaatgataaaaacttaaactttgaatatggattggaacaaacagaagcaacgaatcgaaacaaggtacgatatcagtaaaactgcaattttctttcaaatt

SEQ ID NO: 364289 - DNA, 204 bp, Zea mays
aaaaaaaagtcaaactgccttataattttaatttaaaacagatgggtcaatatctaacattgaatgccaaatggacaccatccaggcatgtacgtactgaaggacctggaagtgcatcactgaaataacaaaacaccgtgtaattgtcaacaacaaatacttgaccactctaggtgataatatacacatgggcatgtaccctta

SEQ ID NO: 364290 - DNA, 285 bp, Zea mays
ttcgtccgttttgagttcctcgccacacacacaatgtccacgcgcctgcatgcgtccgcggccgagcgggggaaccgggagctcatcacgacccacgcaggccccgtgagctacggcggtcgccagtggaaccgggggaactacacgacggacctagacgtccccgaaagcgtggactggttgaccaagggcgcgttgacgacggtcaaggaccaaacagcttgtggaggttgttggtccttatggacaccgtcggtgatctaaagcctgcacacgatgaggacg

SEQ ID NO: 364291 - DNA, 202 bp, Zea mays
gggccatggagagtttcttccggcccgcgtcagaagaatatatatataaataacgaagctactagcctactagtacaagtgtttaagtgttggcagaaagcaacgacgacgaggcatgtgatccggttgaaacaacggccatggcaacgacgacgacgcatgcagctaattcatgtacaggggagggagaggggtttcgggg

SEQ ID NO: 364292 - DNA, 426 bp, Zea mays
gttctagatcgcgagcggccgcccttttttttttttttttttttttttttttttttgaggtgcctgccaaagtggaatgaccaagaataaacagaccagagcccaactggcagtgttgtacattttctagatcgccatcacaaaacttaaaccaactacaattacgcacaagcaatctgaaagaatgactttccttttcatgatctgtacaataattatcctgtacacacttttgatgctacaaggagtccagctggtcgtcaatgtcctctgcaagcttgtctatcaactgctccattgtcttgatgtacttgggcatgtaatgttctcctatcatggacctcgccaggcgaatcttactgtacaaatgtcggggtgtctaatatagggcgatgacctcctcctgggctccttgctgactcgtgg

SEQ ID NO: 364293 - DNA, 143 bp, Zea mays
tgtcgtccgccctcgcgtccgctggaacatggtgggacatcaagggacgtattatatgctctttccacgcgctcgccagaatacctaggtgcttaattaaatatacgatacgggtgttgcgggccgaaaatctgtcatactcc

SEQ ID NO: 364294 - DNA, 127 bp, Zea mays
ggcgccatgcatttatctgattattacttcctccgttgaaaatacaaagccccgtagcgcacaatggggggtcatacaaactaccgggggggggccgatcccaaaaaattccaaaggggaacatacc

SEQ ID NO: 364295 - DNA, 208 bp, Zea mays
ggttcttagaaacccaaataaacacatgttttcatctatcacagattttcaacgggcaacccacaacaaaaagggcgctccccgcacgggcctgtcctcccccctttgaaacagaaataaaaacatgatttcatttatcacaaattttcaatctgggtcctgccctgggctgcgctgcctgcattaatgccaaaccaaaatgcatgct

SEQ ID NO: 364296 - DNA, 247 bp, Zea mays
agctaaatggatgaattgaactgccaataaataaattggcgaactgtttgtcccgtaccggcaaaaagccgttagttttagtaaacctgggcgggacgttttcaaacaggcaacagggcaaagtaaccaattaggccgtccaacgggggcaaaatcagttccatcagccttacctttttaaccaatgggttccacacatttccacacagccacgatccaagcccaccataacggatcagttccccat

SEQ ID NO: 364297 - DNA, 220 bp, Zea mays
cctatttcatttatacgtatgtacacaaatggctagaggctttttatacgggcctgaataacgccacaccaatttgatgaattaactgacaaatcgttatggaagcccatggggaagccagaaagatttttgctccaaaattggacccatgcattctggaacatattagccagaaaagaaaagcaaacatgaccactaggagttccagccctccgatgca

SEQ ID NO: 364298 - DNA, 284 bp, Zea mays
caaaaccattttttcaacctttccgaagggacatatttccatgggagtattcaatacagagactacctaggaatgggtcacctccccaagctagggggggacctactcatctataccagtatccaacaccatgaagacatacatccactggcggatgacacaggaatcacttgcttataccagtatccaacaacatcaagacctatgctcaaacacaggaatcacttgcgcggatgacatggccagccaacaacccatccatccataacgatgcttgccatgat

SEQ ID NO: 364299 - DNA, 443 bp, Zea mays
ggtttttccctcatctcttcgccggcttccatttcttgcctgccagtcactctcgtccgccgcagatcgagaagccgccaccaaaccccccctccaccaccgtatgaccatgacagcccagcagcaccggcaccccaagcgccgctgcgtcgccctctccctttctccgtccctcgcgcgcatccccggcgcccccacgccgccgctcgactcgctggccgacgagcttctcttccttgtcctggaccgcgtggcccaggccgacccgcgggcgctcaagtccttcgcgctggcctcccgcgcctgccacgccgcggagtccagccaccgccggacgctccgcccgctccgcgcggacctcctgcccgccgcgctggcgcggtacccgaccgcgacccgccttgacctcaccctttgcgcgcgcgtccccgacgccgacctcg

SEQ ID NO: 364300 - DNA, 375 bp, Zea mays
tcgatcttagtgaaagatgtacagtggaaacgtcctagttaacctttttgggaaggggaaggaggctgaatactgtggccattctatatctgttggtgggctggcttactatgtaactgccccatcaaggagaaaagatagactctttattggagactgaggaggccttgtcgccatgatcatttatgatgatgctgatattcaataattaggtattattttgactaacaataggacattggaaaccacgctgttggactgatgtccttgcaaattcattgcatgcactggtgaatgtggtcttgatacggtcagactgggctctgatgctcaaagacgtggattgaaactcacggttgatgaagcaaaggatgt

SEQ ID NO: 364301 - DNA, 452 bp, Zea mays
cggtacgcgtgtgtacagctcgatctcaagattcgccgaacacgatacgagcgacagtatctttactagatcaatcaatggaggatttaaaatttttgggcggcaccgagtgctgataaaccctagagtgtgctcgacgttttgtcctttccggttggcgcagggcggaggcgctctctctatatatagcgccccggtctcgccgcatagcttcgtcactcaagctcgagcgatcccactcccgatcagcagctgatcgctcactcttgcagttcgatcattctttagctgctctagctctagccctagactagagctagccactcggtcgtgtagtcataagccttctgatcgtgacccatggccactgccgaggttcagaccccgaccgtcgtggcaaccgaggaagcgccggcggtagagaccccggtttctcccggcgttgagcccga

SEQ ID NO: 364302 - DNA, 359 bp, Zea mays
ccgcctcgcgggcccggattccgggttcgagttacgactcaggcgttcgtgttttctaggcgtctaaactggcccggtgtggttggggtggaaaaaccctgattggggctggacccataagggacaacatggaacagtataaatgcgatgatccggggtcacactagaagtgcgatgtccacagacatgacgcataatgtaggtgacagatacacgttaaggtgcgtgattcattactccagagctcctttactgagtttactgcactagtaccactactgctggtgacgaagttagaaagaaacgttgttttggtaccggttggtgggtctgtaccgcgtgcagtggggacattgttt

SEQ ID NO: 364303 - DNA, 393 bp, Zea mays
gttgtcgtgttcttcgccctcaacgtgtgcaagacggtcgcgatcgtcgaggagacggcgtacaccgtcgtgccgacgggcgtcagcacggtcgtcgtcggagatgacgcgctggtgttgtcgttccccgtcacgatcaacctggcagtgtagactacttgtctgcaggactaggcgttaattgattatttttttttactcaaggtaataactttaaaccattaaatgtagcgggcgagaaagtggaagcaagtgtaattactttacacagagctatacaaaagcagaagcagatcgatccggggaagttaaaacttataactagtctgccaaaaaaccaattgaacctggggacgtgtaataaaggcgtcggactagtgagagccaatggcg

SEQ ID NO: 364304 - DNA, 185 bp, Zea mays
atcttcttttttttcccccacaattctggactactagcagggtcttctgatctactaaccataggcatcaagcccactaaccgtcgtttagctgctgacgttctccattttacactgaccatgttatccacggccattcgtcaatcaccaagccacggccgagcaaggcgccaagcacttatgtc

SEQ ID NO: 364305 - DNA, 275 bp, Zea mays
tcggtgtcttgtgagcgcgggaatctctcgctccctgagggtccggcacacagttttgtcggacgtgacccgcacgaggtttctgcggcgcactaacaccgtgctccaaagataggccgtggtagggtgtaagatactagaagccatgacgaagatgttcaccgccggagagctcccctctatgatggtcaaaaagaacaacattggtaacgtggatgtgattgctcatgtggaccatggcaagcctacgcttacagattcccttgtggaagctg

SEQ ID NO: 364306 - DNA, 371 bp, Zea mays
ggcaaaggaaagcttgacttgcaagcatcactcactcttttgataaaaaaaattgaatcacacaggctttctttccttaccttatatgccacagctcagttctgtacaatcatacacacgcgcaaacccaaacaggcactactcactcaggtagtagtcatatgggagaaaaatggaagaccagtcgacgaagaaaaaaacaaaaccctggtctcagagcaatatgtcacgcactatgcacatcaccgcaacacacacaaaaaaggcgtgcatattgtcactcctcaatgtcccattttggagccgccgccgctgctctcctgaatgagcgggggcaaatccatgtccgctacgtcgacgtgcactatcag

SEQ ID NO: 364307 - DNA, 521 bp, Zea mays
tcggtttttctgacgtctattcctcctttgctctgtagagcagttgcacctgaaaacgacattgcatttgatagtgtcagttgttcagttattattaatgtgagcatgccaatgccattcataactgggagctgtttgcactttcatctgtctctggaactgtgtcattgttaatcaaccttaagttttagagaataagcttcaggctaaccaaaagaattccccctatcactctgtttttttgttgggtgcaggaaattacatgtttaaccttatatctgatttttaacgtgatacttagctgactgtctagtctaaggcagcaaggtattaagttcctccctgataggctttaatcgtgaactctattggaagtatggaattgttaccatgacttcaaacaccatcccatttctatattttagagttttgctttgagatccttttttgactcaccagcatcatttcttcgaaaactggccattttaaatagttttaggaaaaatatgttgtaccacatg

SEQ ID NO: 364308 - DNA, 168 bp, Zea mays
gagaatgaagcctacaccttcaatagctccctccagaatcgaatgtcagaccgactcactgacacaggtaacacacaaaacaccactctcaggagaggagcttgccaacttccctgttcaggcacaagctgcgcagcctgggttcatgggagagaaagacctccctgg

SEQ ID NO: 364309 - DNA, 460 bp, Zea mays
tcgcggtcgcgtggggtgaaccccggtgagtccgaggggaccggggtatcgtcgcccctccacagtgccgctgcgatttcttctgatccctgtggatcaacgcggagggataaatggcaaatacagcaagagggatgatgaagaactaaaagggcattgttgatatacttgatgagaacaagactgtacattattgcacccaaaacggctggagaacggaggggtggacgaaaatcgttagggatttgaatgtaaggtacccagctgcatagtttagtaaaatgcaagatccaataacatgagactaaattgaagaaagatgatgagtggataaaatctatgcttcaactgagaaggtgtctcatgggaccagagagcatgcatggttagaacaacagaggaaatttcggatgatataataaccgatatgcccaaggcattacagtaccaatgtaagagc

SEQ ID NO: 364310 - DNA, 167 bp, Zea mays
accctgaacactgcgaagcaacaacaatcacacaacatgcgtgtggctgaacacagcatcaggtcataacatatttacagacttacagtagttcgtaacaattacacccattgttaagatctcccttataccgatctatcgtgttgtattgccaacaaaggaacttt

SEQ ID NO: 364311 - DNA, 483 bp, Zea mays
  unsure (1)..(483): unsure at all n locations
gcgccgaggtcaggaggaggccgagattgttcgactcccccacttgatctcttccttcccctctccctttgcctcgccagccatgacgggagcccccgctccagcagctgctcccggcgccgaagcaaccgcggcggcgtcaccggcgggcgagcgcgatgagcagcagctcgcgtgcgacgacgggttcgccggccgcgcctggacgtccggaggcgccgagcgtcgctgggaccgggagagacggtggcggagggcccgcggggggcgacgagcgtgcgctgctggtcgtgacgacgatgccgccggcgggcgccacggcggtgggggtggccgcgcccggcgtgcctgtggccgagacggagacgacaacgtgggcgcggtggacgtcgatgtcgtccgtgccgtgggcgaggctcgtgtttggattgctgctcctagttctgctcggcttcgcgttcttcaagtggngcctcccgtttc

SEQ ID NO: 364312 - DNA, 275 bp, Zea mays
gggggtgccacctacgaacatatttattatcttcagaaggctccaaatttactacacggtggagcttgtcaagccattctaaacgaacacttgaaaagacacacacacgcaatatgtgttggactcccttatgaataatgtgctactgggagagggggacgtcgttggctgattccgaattattagcttagctgggtggactcttggcccaacttgtggaggtccttgacgaacctgccccattgccagaggcgggcgaagacgctagccatgga

SEQ ID NO: 364313 - DNA, 258 bp, Zea mays
aaagacagacctggaagagacaaaggaaacaggcacccaccagtagatggaaagatttcaatccatatcatcatggtgtggctggatagagcacctgactgcacacgagtaatgaaagcagtgtgtggacacagtgtttcgtgattatccatgggaaacagcatgcttacaattatcgacagaacggtgatcaaaagctgtggtaacgtattggctaccctctagttctaaaggcagcatacgtgcagaggcaaacat

SEQ ID NO: 364314 - DNA, 264 bp, Zea mays
caaccgaaacaacctgatgcctggctcgggcgtttactttgggcagggcaaacatggtccccgggcgtttttgtttaaccattacgggtggccttgccaaccctttaagaaaagaatcaaaagagggcctggggccatgagagagagagcctggtttgaatgaagccgcaaatctgggggggtcctgggggaatttttcggggaattcaggggggcttgagaattgaaaaccaaaaaaaaggggattcgatcggatttttttta

SEQ ID NO: 364315 - DNA, 181 bp, Zea mays
aagcaccgggtggagtttcaggaattagaacaggatgatcttgttcacgttacagacatatatctttgtaattcaccaagcggagaaaacatacaaatttaactgctgaaagcggcatttgcacaattgcatccggccccagaaggcacagctatttattaaaaggagggaggccatgatt

SEQ ID NO: 364316 - DNA, 506 bp, Zea mays
cccattcgtccgcccacgcgtccggcctcctagcaccttctcctgtccttctaaccctagccgccaagcccaccagccgccgctagctgctgccgttctccactctccacggaccatggctccacggccagccgccaaccaccaggccacggccgagcagggcgccaagcacctaggccggccgagcggtgcgccgagcgcccgagcacccaggccaccgcccgccgcaccagagcggccaacggggcgccgagccgagcagagtttcaacagtgttcctgaccgtgtgttcttgatccaggtggctgccagcaagacgaagatctacatggtgcttgagctcgtcaacggcggcgagctgctggacaggattcaggcggccagtgagggaaagctcccggagcaggaggcaaggaggctcttccagcacctgggccttttctctactctactctactcactcactcatcactcccaggcggccaaacagctccccaggtgctaat

SEQ ID NO: 364317 - DNA, 295 bp, Zea mays
actatattttttccaaacccccggcgcacaacccaagggggggggatacttctaatatgcacgactttccctgagaatcacaaaataaatcttcctacgaccattatggcaacctaagactcaacaaaatcccaagccgtcatgactggcaacatgacaccaaagccatatatgcacactcataacatgccatttcttcctatgatgaaaaattccatcgccatggacctgaaccgacccaagggagagcacaacctcggggaatgggctcgccccctcctaagcaagaggcaac

SEQ ID NO: 364318 - DNA, 377 bp, Zea mays
gccttttgggccgttggctcagctggacggtgacctcagcggcggaatcttcacgttcgctccggtcctctttagaagacactggtgatcgactacatgcgcctacttgccgcagtgccagtcgacgcctccgacgtgccctgcggccaccgggcgcctccggtggagccggctcccaaccccgctcggcgcgctctgggcatcactcctgacagcgtgcgcggtcctactgatcacgctgatcgttcactgcctggtcccgcggcggcggccggcgcaaggcgcgccgttggccaaccactccgagacgggagggggacaggttctggctggcgcggtagcgcagcaagccggcgaggggaaagacaaggaggccg

SEQ ID NO: 364319 - DNA, 384 bp, Zea mays
acgcggttcttgtttaaccgcttacttaccacagtcctagagcgttggcttacatctatatctacctagctgtgggtagcatggacattaagcggcaaaaatggctggctcatgcctcacaccacagaggctaaagtgggagacttggtgatgctgatacttctgtcgataggcgaagcagacaacatgtacatcgggtcttactgctagagcactgaagaggaggtatggggggcttccgcatacagaatagccattgacggtcggacctacaactccgtgctcgatgaggagcttctagaacaggctttgttggacaacgaaagctgcattgacccgcacaacgacgtcatcaacgctggggtcaactccttacgtgaagaa

SEQ ID NO: 364320 - DNA, 449 bp, Zea mays
gggtatttgttccaacagaggcgcgggggcatgtgcttaataactcggagagtggctcggctgaccctggaagggattactcgggaggagatctggccgtgtctgccttcgctgacctttgttttgatctgcccctcaagatattcaggagacgctggactacatggccacgcatttcttactgatggaaaccttgcaagactgctcgagggagagtacatgaactgatcggatcctgtatgtttgtgaatacaacagcgctatggtggcgcggcgatgattatggctaccaaactcttccatgtagaggagaactattgccccatgctaaaacaagctgagcacgataatgcgaaaactgggattcaggttagatactgctctcccctgtaggaacttggcatggctcacgcaacaggtgaactttcctgtgtagacttgcattgctt

SEQ ID NO: 364321 - DNA, 304 bp, Zea mays
ggtttgagcttcgacgccgccaccacctttgcgtttgcggtgacgacacgacaccaataatggcggcggcaaggacaaggagcctgctcgcggcggcgttcctggcgctggctggaggtgccggcggcgctttgccaggcgccaggccccgcggcggaggatccgcccaataagggtcccccgatcgatacagagatcgtcgcaaagggtcggcagtacccgacgtttatgctggtggtgaaggataccgagaaagacacgcagaagtacagggaggacaacaaatcttttgatcgtggttaca

SEQ ID NO: 364322 - DNA, 513 bp, Zea mays
cccattcgtcttaaaacaatggcatgggagcacatagggcaccggtatgctggtcctatcgaagaccttgccctaacgatcaagatgctgtatgatcggatcacacatgagatcataccttttctatgagagaagccctggaggaagaaagttacgacctggaaaaaaccaaagcgaaagtcatctgttatgctggtaacacatgtaagccgcatgcaacaggggctgaaaaagaggctatgcaggaccagctcaaaatcattgggcagggcattgttgaaacaaagaaagaaagacacgctgttagacctaacattaaggtcctggacgatgagctaaaacttgtcgatgccaagattgcctgggtggagaagatttacatgcacgaactgccacaaaggacaaggtacatgaatttgttgcaacgattgacagcacgtctccatgcgaaaaacgcacgctctatgcatcatcgtacagtcttagccaaaggtagggattattttttgagga

SEQ ID NO: 364323 - DNA, 125 bp, Zea mays
ggggagctgacagatgtcatcggtactgtgatatataatggtatgtttggaacgctgtagatgacatacatgtgtataattctgcccggcggccatgaaaaaaccgcattaaacaaaatggtaaa

SEQ ID NO: 364324 - DNA, 353 bp, Zea mays
gaacaaaccaaagcgtacataaaactaaaacgctgtgtatcacttgacgtctggaaatgcaggaaaattgcgcgataaacaagagccctgagtaccaatcagccttctttcttccagcaagcttgcaacaattagcagttttggacatcagcacgccagatacatgcaccgaaacagaaatcaacatctcacaagctgcatgttgtactgcactagctagcagtctctactccctaatttgcttacggttacttgctttaaccgtctagttcttgcctctactgcctaattgcttaggctaccgctttaaccgtctagtccttttcctcgtgggtacatgacctatctcagat

SEQ ID NO: 364325 - DNA, 510 bp, Zea mays
ggggttagttgttactgaaaatgagagtaaccagcatcaacaatagattgctttcaaaattcaggaggatagatccttgttttgtacaacatttttttaagtataagagttttaaaatagaacatagcagcatgaaaggcttattttttccagaacatagtttaatagacttaataagtttaaacgacccataattctggtgctctattctgtaagtataagagttttaaagtagaacatagcagcatgaaaggcttatttttttccagaacatagtttaatagacttaataagttcaaatgacccataattctggtgttctattctgtcttttatctgttgggtcattaaaatctatagactttagcgtcctatcttgtcatgtgttagtgacgtatgaaatcatttggagtcgatgggaagattaatagccaaaaatgttagaagatcatgctttgttagacctctatgttgtacggaccagcaggtttgaaatgatgttgtcactga

SEQ ID NO: 364326 - DNA, 524 bp, Zea mays
aagattacatttttcacgccaacgcgggagcataccgacagctccagggatacgattgaaggagtcggacaaagagaaagaacatgtgtgggatacagacaacgtgaagaccgatgagcccgtgatactgtcactgtcacccggttccaaagtcctagcttgtgctacaaaggaataaaccaaggtcggcccatgtcttcatctagctgctgtcaccgcaggcgagcagtcctaccagtcactgcctccatcgttccctatctgctcctactcgttgacttttcgtgccaggccgacattgtggtcttcgcgacgcacacgcactgttacggtggtaaaaagcatgccggtgccgcgcggacggactttcgtgccggtgactagcaggaggcgtactctatgatcatggctcgcatggccagtatggacaaggtcttcaacatgacgatacatagcccctacggagacgtcattcactgagtgccggcgcacttgtaccctgtgtttgatcaccccaagctgat

SEQ ID NO: 364327 - DNA, 477 bp, Zea mays
aaaaaaaataataaaaaaaaataaataaaaaaaaaataaaaaataaataaaaaatataaaatataaaaataaataaaaataaaaaataataaaagaaaaaaaaaaaaagatataaaagaaaataaaaaagattaaaaagaaataaaaaaaagaaatgaataaaaatataagaaaaataaaaataaaaaaaaaaataaaataaaaggaaaaaaaataataaaaaaaaaaagaaaataatgaaaaaaaaaataaaaaaaaaaaaaaaaaaaaagaaataaagataaaataaagttaaataaaaaaaaagaaagtaagaaaaaaaattaaaatatggaaaaaaagaaaagaataattaaaaaataaaaaagaaaaaaaaaataaaagaataaaaaaaaaataaaaaaatttaaaaaaaaaaaaaaaataaaaatataaaataaaataataaaatagaaaataagaaagaaaataataaaa

SEQ ID NO: 364328 - DNA, 495 bp, Zea mays
cccacgcgtccgggccgccatgagagccctcctctccctctcccgtctcgcccgacggcttccagcttctctcagccctgtgagggcgccgacaacattactcctccggcacatccatgcggacgcccctccgccaccgccatctcatgactcgacgcccttcgtctcccgcatccgatccgaccctcgacgagttcctcgcgcgcttcgtggctgccttccgcccgcgactggcggctgccttccccaaccatgaccgtgacgtgctcgacgagatgctccgcctcgtcgcggacgccgtgctgtgccgcctcaccgggaccgaccgggggggcgatgctattgagctcaatgacgacctctgggcggccgtatgggaggtcagcgcctccgtgcgcgaggctatgcgccgggatcaggtccgcgccgaccttcgccaataccttcactgcgacgaggtgaaggagatgacgcggttcgctgtcgatgtcggca

SEQ ID NO: 364329 - DNA, 169 bp, Zea mays
tttccgccctttcgttttttgacaggagccttgaagccattgaccatgaagtatactataccaaagctttcatcaatggtatctgtgactgaggaagggaaggaggtggtgctgaactactccttgatggccaatattccgatggtttatgggtatgttgccggggcac

SEQ ID NO: 364330 - DNA, 136 bp, Zea mays
ttcgacatacggacgccggcgtcggaagcctcgctcctaccgccaccggactcccctatcgcgtccgcttctctagctgtatgctgtgctctcctgttaccgggacccggaggaaggcatgaaggaaggaaggaag

SEQ ID NO: 364331 - DNA, 152 bp, Zea mays
gtggcaaaccaattcctttaaggatcggagctggtacttacaaaaccgtgaatgacgatggtttggtacagaaacgaaaagctacaagcatgcttgcatccatgggaagcaattttttcgacgcaagacggggcctttcttcttttattttt

SEQ ID NO: 364332 - DNA, 250 bp, Zea mays
ccacgcattggatttgtggaaacaaagagaggactgctggccatcctgattcgtgtcgctgacttcaatgacagacgtaacgaaatggcatctcctataactgatcaattccttccattggggttaagagctaggctggagctgatgaagcaatggatgccaggcacaatgacagaggatgttgggggcatttaagctattgatctacaggtgatgctgaaagacttgcattatcaagaatctggtagtt

SEQ ID NO: 364333 - DNA, 535 bp, Zea mays
tcgcgcgttgcacagtccattattgccgtctcccttttgcgtgagcaaagaaagagagcgagaagagcagtcgccatgtctggcatcatccacaagatcgaggagaagctccacatggggggcgaccacaagaataaggaggaggagcaccacaagaaggccgaggagcaccacaagaaggaggagggggagcaccacaagaaggacggcggggagcacaaggaaggcatcgtggagaagatcaaggacaagatcaccggcgagcacggcgacaagtccggcgaccacaaggaaaagaaggacaagaaaaagaagaagcacggcgagggccacgaccacgacggcggccacagtagcagcagcagcgacagcgactgagatctggtgtcgcagcacaggtgcaacacatgtatgcttgctggatggaggattcataccagctgatgctgatgtagtggttcactggtgtcatgcatgtttcgtgctttttaatcaaaaagaaaaagaaataacagtcagggatggtttgtttgcc

SEQ ID NO: 364334 - DNA, 528 bp, Zea mays
gcgttcgccccgtccccgcatctcgccgccgcgccccggtcagtgtgcgcttgagacatcgcccacacgagacatcgtgtgtgatgcccgcccccaacccttccccggtgtgatgcccgccgttgacgtctcttttttcgcccccatcctcctcaacctcggcgccgtccctgcccctgtcctcgatggcaaggaaacttcccccgggcataaatctcactgctcacgcgccattagcgccatacccgctacctcctctggcatgccacacgccgccatccccctagcccatcgtgtgtcacgcgcccagatctcctatttttacgcccccacgcaacataggccatcccaccatggagcaagaaaccctagcgtagccaccaaccactgctgccccacatggcatcctgactgtggctgcatacatctcggcgcctcgcccaccacgttgcaccaccaccgccgttccttctccccaccgcgctgtcgccctgagtaccaccgccaccgtcaccgtgcatgtcgcta

SEQ ID NO: 364335 - DNA, 163 bp, Zea mays
aaaggaccctccccccgaccagtatccatttccaaaacaacaggggggggcccaaattggatttttaattacatgggtcaccaacaaactttccaaatcctttttaccaggaactttgccgcaaacataaaccaaagtttttggggcttggcatttcaaattt

SEQ ID NO: 364336 - DNA, 344 bp, Zea mays
taaggttgaaggcctgccgcctccgggtcccgattccgggttccagttcacgcttcacgctgttttctttgccagaccatacaaaccgaaagtcaacagagatcctgttttctgggggtctgctggaaccagaaactagctccacaggtactggcccgaatccccagtatatccagagctcctgctgatgagctctgcaggtgtgacctatcatacacactcatgaactgcatctagatctctccaggacacttgcgttgttttagcacgtttttctagggagagatgtatatggtgcttgggaacaataccttggcttgtgggacactgatgcaacataggat

SEQ ID NO: 364337 - DNA, 225 bp, Zea mays
aaagggtgggaaatatttaccatcacatatactagcaccatgatccaatgattcatttacacctgaactatttggagaacgcccaccagtttacctacgaatttattattctgtttgcagcccagctcaaaaccgaagcaacattggcctaacataatccctgagccctgagcttgagctggttccaatcctccacccacagggtgtagcttgactggggggcga

SEQ ID NO: 364338 - DNA, 512 bp, Zea mays
ctccttaagacagagccaggccgccaaattaaacttgaccatttcctctctctctttctctctaactccgggtccctctctcttactctctctattctctccatccttgcttctgggaagctcatcagccatggacgatgccgttgcagaggaagaagcttccatgttcgagaccagccatgtcctcggcgccctgctggcctcctcgccgttgctggcgcgcgcctgggaccgctgcacagccgcctccgctgcagcgccgtggttcgttcacggcgaagacggcggcaaggtgtacgtggggttctctggggtgcaggctgcgcttacggcggcaggcgcggtggtggccggcggcggcgccaacatcttcgcgccggtgagtctcggcggggacgcggcggggcggatgttcgcgccgctggtcgccgacgagcccgacccggccgttaccggggagccggttgccgtgcatgcgctggcgctgcagtgcttcctgaaactctgctgca

SEQ ID NO: 364339 - DNA, 509 bp, Zea mays
cccattcgtcctattggtttcttgcggcgagagtttctagtattttcttttcctccagacatgattcttcactgaaggtgtatgtgatatgttatgaaggaaataactccattttttctagacagaagcgaaagggttccaacgcattaaataccatatagttgttttttttggaggaaatggtactaaaaagaaaaaaagatggctaatatggatactgatttgatggttaactgtaaaaccagtttttttcttcttgtttggtgcttgactccacatttattcccagtcagatgctctgatgtattgtattgcaaagttatctaaattcctatctaatttaaccgaggcccaatagttcatacatttaattgccacactagttaggaaagcagtgacataaagtaagattttctggtttggtcggttgttcctgttgctgctctaaaaaaagggggaagaccagggatctggggaagggataaaccaaagttgctctaaagcagatt

SEQ ID NO: 364340 - DNA, 312 bp, Zea mays
gtgatggtgagctggtcagggagcttggggcgccggttgggaaggtggtgtccgtggaagatggggaggaggtggagcatatcatgtctgtttcatgtgtaccagagcctgatcccccattacaaaaaccttggggattttaggcctctgggggcagcggtacgagggtaatggaggaggctggaagatcctatggtgtcatgctaccattgaggacatttgctggatacgggctctctgtgcaaggaatttgcattaggcgacttgttcagaacccgcactggagtgacggtgcaagctgttcatgctttt

SEQ ID NO: 364341 - DNA, 127 bp, Zea mays
gtcaccgactggatgcattccacgcacctcctgtttgaggagccaatacggatggccttcaccctcgagcccttcaagcccagctacttcccggtgatgaccaagatcgttggtactctcggtccca

SEQ ID NO: 364342 - DNA, 315 bp, Zea mays
accaaacaacaataacattatcaaatgggcaagagcgacataaaacttgtgcgtttacttgaacaataatgtgcctttccactaaaacactcataactttttatatcccttaaaactcctcttatttgtatctacaaatgagaggtttttttgggtgtttaatgccgttttaagggatatattggagaaaagattaaaatttatcccactaattttttagatgccccttaaaactgcaacatcgcccatttatcagcgcagcaaacctggttcccacgtttttgtactccaccagcggattcagcgaaagctttt

SEQ ID NO: 364343 - DNA, 370 bp, Zea mays
gttcgcccacgcgttcggggaccatggtagcaaccctgattgtttccattgccttggtggtcatattcaatgggccaggcctatttttccaagatgcgattagtgggggagacattgattgtgagctgatgctgttgtggtgtacattcccattgctgtatcggaccgaatcatttttcatgctggggctgagcgctgtctaagtatccagaaacaaaatctttcgatggagcctctgggggagtacagggacctgggaaccaagtttgatgtgctgttaaagggccgatgttgcagagtaaggcgcatctaataaattagtgggataaactttcatgtcttctccaatagatctcttaacacggcatta

SEQ ID NO: 364344 - DNA, 561 bp, Zea mays
ggcctacgggttggagcagcgctcgggagccgcggcacggaggcatcgacgccgttgagctcgaggcgaccggcggctcgcggccccgccacagcggtgctgtggcagtgtggcttcttttggtttctgcgggctcagcgcggaggatatgcccaatgcacggaagtaccaaagcaagagctttccattgcttgactcactagaactgttatttgatggtcctattcctgaaggggcacaaaaatcaccttccagcatacctcagaatgttggtggaaacgttggtgatggaggcaacaatatcagcacagccccagacttgtctgaaagacctagtggaacaattaacacaagcgttaatgaggcatggaataatatcagcctacttaagcaaacagcattgggaccccaaggtatagacaatctcgacacgctgcaaaatcgtgatgaagaggtgctggaacggctacagcatggctcggaccggaggccgcagagagctgatgaacaggcacagtcaagttcttgcgtagaactgcaaagagacaggcgcaagaagcg

SEQ ID NO: 364345 - DNA, 210 bp, Zea mays
aagggggaaaccaatcgtttaatgtttttcggggggcaatgttataactggcagctggagataagcaacaacctttacaaaaagaaaaagggcaaatggtccccaaaaaacttaaaggaacggttacattaatggccaagggtagtcccccgccccccagggttcactagaaaaacacttttgagggccccccaaaaaagggccctttcc

SEQ ID NO: 364346 - DNA, 103 bp, Zea mays
attcaccctccagacacaggggattgcaggtctgatcttcacggacggcctattatgccctgtgtctggagggcccgctgctggaaccctttttgaaggaaaa

SEQ ID NO: 364347 - DNA, 442 bp, Zea mays
gcgtccgctcacccacgcgcttttctatttcaccatgtaggccacgccgccgctgcaccaccgcttttcggatcatcggatgttcccctcctgcttcttctcgtccacttaccggtcatccctgctgcggtgccgcgcgttcaagcaggaggtcgactacggcgactgtgacccgactgaggccgacgcgcggaagcgcatgaagggcccgatgtacaagctcaaggcggtgatccagggcctcgcgggatctcgctccgccgccgtggaggtgtatgggggagagtaccagtttcagctcgccgtttagaatatgtgcgagccaaggttccccaatccattcacgcgcgcgcattgttgtgggttcctgaggtgctttccaccctcgcgcgctctttttcttatggagccatggccagaagcggtaccaggagatttggcc

SEQ ID NO: 364348 - DNA, 167 bp, Zea mays
aaggttggaaacacccaatgcagttggttgggaaagttgaaaacaattgagttccacaattttttaagtttaacagggggtttgttatgagggtggggaaaactggggccaaagtttttcaaaaagataaagtgggactgttttggggcactggggtccacgggggt

SEQ ID NO: 364349 - DNA, 338 bp, Zea mays
gctagtctcatgacaatcttttgtcaaggtgtggaaatatcagtaacaactatcatgaggcatctaggtggttttttttccaggggaagtgaaatttcttctgctttggcttataataaggtaaagtagtaaattagattggttgtcggtcgtggtttcagttgttcaagatcagtgagtttgatgatgggtggtattgtatttatgctgattggctgtttgcgtagctcagtaacaaaaaagaattcattgtttgaaaaggtgtccgcctgttttattttatgcttctgccgtatcatatgttaccatttaacgatccctgttatcaattggaactt

SEQ ID NO: 364350 - DNA, 526 bp, Zea mays
cccacgcgtccggcctgatggtgcgatcccgttccctgtcgccatcgagttcgttttttcgttgcttgacagccttaaagcggcgcacgaatgccacgagccactgaggcggcttcccagttcactccaggcccagggcgcccggtcgccatgaactcccgctcctcctccggcggcgtgcggtccgagagctcgctgtcgttgggggagcgcctctgcgcggtcttcttccccgtcatcgccatcgccgaggccgttttcttcgccttcaccgactgcctcgcggacctctgcaccgactccggctcctcgcactcgcgccgcttcggcgcgggcgcgtcctcctccgccgccaggaacagtcggagcaaccattgccagccccaccacagacctttcctacgccgcgccactgcgggtggatggaccttccccaacctccgccagctcgcacgcctcgccgacgagtcccgatgcttctcggtgaacgaggtggaggcgctctttgagctctacaagaagatca

SEQ ID NO: 364351 - DNA, 185 bp, Zea mays
ggggacccttaaaacgcaaaaaacaaaataaaaccctaggttcctttccaagtttgaaggaaattccccgaaatagttccagcaaagtgaaatcccccacaatgctttgggttaaggaagggctttagtgaacaaacaaactttatcccgctttgggttattggaagactgggctatttttttgc

SEQ ID NO: 364352 - DNA, 281 bp, Zea mays
ggcctcagcagcaaggctcgctggctaaaggggaaagtgctggggttgtcatcaatggagggagttgacgaatttgatgctatgaaaagcgtaggagctgcggctgcccctgggggaaacctcagacgttcaagacagtacacgctgctgaacgcgtgctgccgagagttgatcacatcatgctcggtaaggaaaataaggaggttactagtgccttagcttcgatgcatccacgaaatgtaactgaaggggtttttttcagagcacagatgattccagtg

SEQ ID NO: 364353 - DNA, 285 bp, Zea mays
aaaagaaacagctttttttctgaaaaaggaaaaacaaggtcaacgaccagctaaaagtcagaggcacagttccaaaaaacacacccacggcccagtcctccaaaatccagtctgggaaaaccacagttttgatccagggaaatttagatcccagccttcaacgaagggagtttcacatgacatgggccaaaataataaatggggacaaattggccatgtccagggggtcaccccccaaggggaccggagatttaaacagccccaaaaaccccaggtcggggcaaa

SEQ ID NO: 364354 - DNA, 147 bp, Zea mays
agataaatgacctctttattactgttcgacaacaagcacaaataatgtcagcaaaagatgaagggtttcacacaaaaaaaacgatatgccatttcctactatttacttccagagactcgtcatctctacctctacattcctcttagg

SEQ ID NO: 364355 - DNA, 441 bp, Zea mays
ttgcataaatagtcaccgaatcgaccgcgcaattcttttctttggatcgaatcgaacgccgacccgagtaaggcgatcgcgcggcggatgaccttccccgccgcccaccgttgaagacatggacaccgagtaccgcgccttgcagcaggggagcccctcgccgtggcgcacggcggacggcgtgtcgtcgtggggacccgctcattaccagaagcgacagcgatgccagggtttttaaagcgatcaagctggttccagctcaagtagttctctgcaaatttcagaacctgtaccacaacaaaaccaagaagaagattacttatgtggaggatgattgtgatgcctatgatgaagatgattatgacctttgatgaaggtgaatttaacctgcaccttgctgataaatttgatgacttggatcttccttcaggcgtggaggct

SEQ ID NO: 364356 - DNA, 234 bp, Zea mays
ggctgccacagaggcaccactgttactttgtaattcatatgaaaataaaccttccgcacaaaaaaaattttgcgtaaaggatatactacaatgcgttgtatccctagctcgcctattaaataatggccatcatgtaatggacagttacgggcgcaattatagttgacatcttgttaacagaagggggcagccttacaatctgtttgatgccacaagatacttggggggacgggc

SEQ ID NO: 364357 - DNA, 273 bp, Zea mays
tatacgtagtgcaatatgttatttcgacattactcacttggactcctcggcgcatcaactgcctggtgattcaggtcaacagatcacattctgtgtaaccctgccttttcggaagtttgagaggacgtgctcatggttgagacagtcggtacaggcatatgaccagaagttgaaaaataaaatgttctccagtcgttcagtagagggtgttattggcggagctgggccatcggatgctgtatataaagttttttttatatgaacctgttgact

SEQ ID NO: 364358 - DNA, 317 bp, Zea mays
aaattaatatcataaatataaatatgtttagttcataatcgatcaaatctaagccatgcaagaatcccatccattttgttgatggagggacgtcatcaagcggtgctacctgcacccgaagcacagattgaaaacttgacaccgtcgttggatggacgacgtacccaggcaggccgggatggctccggtagctcctccgtcccgtcatcgccactgctaagcatggcgatgacctgccccatagttggccgccttgaccgatccgactgcacacagagaagcgcgacgtgcacgcacccgaacgcctgccatggccc

SEQ ID NO: 364359 - DNA, 366 bp, Zea mays
aatctagctaattcaccactgcgttgcaaccatcagtaccatgcaaacttctatatatgatagtataatgtctgtgtgttgctacggtttctatatattacgagaggtgcaagttagatctagggtatccataatcaattctacaagaggtgcatgttagatttcaatatgagatacaacaaaatctttttcccttgtaaaacacttaaatttattgtccattttagccaatatatgatgtcattatagccgagaaaataattcagcatgccacgtgctttgatacacaggggtctcaaggacccatcccccgttcaaatgcagggacccaatcatcttgatgcattgtgatgttcaatgtggagc

SEQ ID NO: 364360 - DNA, 460 bp, Zea mays
gtgggtgaattttcaaaacgtcacttgtttgacatattcaggatcattttgtcatttgctttattggtttatttgaatgtatgtagtattatattgcagcattacataactaggcacatgacaaaattctgcttatgaaatagttggtacagtagtgtgcttaacgatctcaactattaaatttctatcgtgatgcatttggattttccatgtctatatcacccttgtatatccttcctgcattactaatgtcatgaattggggcgctctatgaagtagtaggtgctgatgtaggtttcctctggggaatgctttttaatgatttgtgcagttcatgctacaatacttaacagaaacattgcaatagtcttttagatgcattgaatcccaaattgtagctgaattcgaatttcatatctattgttctgtatttaaaagcttcaaatactctataaacaac

SEQ ID NO: 364361 - DNA, 131 bp, Zea mays
ggggggagcaagaagcacatacatttttttaaacatgaatagattcaggccatttgccaaatcacaataaccaaatgagtttccaaactgagttcactacaaggggtcacttgcgcgctgactcgaggaaa

SEQ ID NO: 364362 - DNA, 491 bp, Zea mays
tcgcggatcgcacacacacacaaccagatctcccccaaatccacccgtcggcacctccgcttcaagatgcagatctttgtgaaaaccctgactggcaagactatcaccctcgaggtggagtcgtctgacaccattgacaacgttaaggccaagatccaggacaaggagggcatccccccagaccagcagcggctcatctttgctggcaaacagcttgaggacgggcgcacgcttgctgactacaacatccagaaggagagcaccctccaccttgtgctccgtctcaggggaggcatgcagatctttgtgaaaaccctgaccggcaagactatcaccctcgaggtggagtcctctgacaccattgacaacgtcaaggccaagatccaggacaaggagggcatcccttcagaccagcagcggctcatctttgctgggaagcagcttgaggacgggcgcacgcttgccgactacaacattcagaaggagagcac

SEQ ID NO: 364363 - DNA, 283 bp, Zea mays
ttttccattcgtccgcggacgcgtgggcgcaaatcacagacgcgcctttcttagtttgctgcactgccctgccataatataaatatcatatcggacgtgagcccggcctatagcgaaggataggcatgatttgttccaatctcgagacgctttttgcttggtcgtgctcctggtggcgaccgtggtggcttccccggccgaggtgcgcgcggtgatgtcttgcttcaccgtgttcagtacgctgatgccgtgcctgccgtctcgccagatgggtggggccatg

SEQ ID NO: 364364 - DNA, 445 bp, Zea mays
tcgtgggcggagcgcaagtagatagctgctgcgtcttcctggcctgagggtttcggattcatcagccgggccgccggggtcgccatcgccgccgttgggacggcggcggcggagttcggcgtcgagttctttagagggttaggttaggtgcacgcgtctctcgcgttcctccttcccaacttgaattcctttctttccatacccgtccccatgacggtcgttcttccatgattcccttccatatttgctccagccaggccatccgcggctgcgtggctgctctcctgctattttaatgcctgccttctttccctctcacgcctcataaaaaaaactaataattccttgggatctgaggggatccgcgtggggttggtaggaacgcgggcagagattttagccaggactggaggaaaaccagtccgttctctcttcatgagctttt

SEQ ID NO: 364365 - DNA, 401 bp, Zea mays
gtgcggtccgtgcatctggatccgcagcaagttccaacggacgactcaccagcttacttgccagatagcctgcgtttaagtcgcggcgatccttgcggggatccttctggggtctgcctgcctgctggtgcgccttcttcttctggcggggccgaatccagagcgtgttcgccagaatctcttactcatcatgcaggctgcagcctacggtggacgctactactgggattcttccctacttgctcaagagctgggactgcatgcggctccgagggcaattacttaagatgaggtcttttacccacctgctgctgatcctggcgctcctcttggtcctggagaaggtccgggcgcaacccaagccacttctcatgaactgctgcatggactcaagcgccgac

SEQ ID NO: 364366 - DNA, 365 bp, Zea mays
tctacgcgtccggcttcatacacaccagggcgggggcggtttcggcaggggcccgccatcaccaacccacctcccttcaattataaacctataaaatatcatcattgacccaagctgaggcgactagtgggtattgatttttggtggggcagatcaaggagggggggagggggttaactttcaaggaaccagttcattgctggttctgctagcaggaggttggattttagaggctgaagctttcagtcaggctggtctaagaggcgggtgcatacacggctggcaaggaaatccttcacaaggtgaatgacacggtgaaagatgcatatagttcattagggccagaaacagggaaaggcaagaca

SEQ ID NO: 364367 - DNA, 433 bp, Zea mays
tttttacatcgatgcacagcacagatacaaataggtatattgattctgcacttgtggcaaactgcaaacaatagattcatttcaggcgcctacttgtgtcgagtatttgatcatacttattgtcaatgatacagttgtgttaattaatggctaatcccatatcatctttcctttgtactttcatgtaaccatctatataaacctgcacctacaaagtaacacaacagttattctgactgtataatttgagcttttcatcttctcaagtgctaacttcattttcagaaaagtaacttgtatccatagacttagttattatgggatagcttctcggggcaatctgattggcgaaatatctttttctaggcatatgctgttggaagggcacttactcaaaagctcaaggaacttatacctcggcaaatgtttagag

SEQ ID NO: 364368 - DNA, 360 bp, Zea mays
atctttacacagagccagatgaggaagaagaaaaggcaaaggaggaaaagaaaaaggatgaggattatgataaggtgggatcatggtctagcaacccaggaactggtgttgctggttcaacaagtactggtggtggggttggcaagtatttaaaagctcgggctgttggcatctattgatgggactggaagtgctggggtacctgatgattcgagcaagaagagaaaagcgactgcatatagtgatgagttcacagatgtttctggatggtagatgttatgtgtgtgtacgtatgatgatttctgttttttaggaataaaatggcggttgcatactatgggtgtattggggttctggaca

SEQ ID NO: 364369 - DNA, 361 bp, Zea mays
ttttgatgtcaagttcttcacagagacagaggaaaacaaccagatgcgaggtccaaggactgcactcccatatttcctctgacttcaattgtacattttagaagtcaacatttaaatctgtaagggctaaagatcagtcagatgtgtttattattgtaggttcagatcatagtgcaatcttatgcatttgatttctctttttcttttaaccacatgtacaatagaccatccggagtctcatgctcctgtattcgttcagtgacactgtcaaagttttgttgccgatttagttcgcgtgctatccattttgtaccgcgcttttgttatgcaaaagacatgctttaactattgttgaatgcag

SEQ ID NO: 364370 - DNA, 145 bp, Zea mays
gaagcaacaatggaaaacattattattgctgaacctcgaatggaagagagactcacatatatatatatgggccattaggcatggacctcattaatcacattatatgcctagttagcatgaacagataaccatgcattattattga

SEQ ID NO: 364371 - DNA, 471 bp, Zea mays
gcgtttttctccatttctcagcgtgcgcgctctcttctctctcttttgtggtaactggcggcggccgacgccgacgccctagctcacgtcttcgtcggtcccttcccagccttcgtcgcgtccttcgccgtcgacgagaacacacgaggtatgagcaccttttctcttgcgttcctgtggggaaccggacacccgaaccctaacttaagctctttggctatttgtaatcggatctaatctcatttcaagtgtatgcatgcctgctaatttcgattttgtttgcaaaaaatattgggtatacatgtgtaagtccatgtcctttaccgtgaccgtcgctgctgccgttccaattgatccatcaatcggtcgattaggttcgtcatctactcatcttcgtctttagcgcgctaggtgtagaatactatttaggccttgtttgatgagattaaaaaaattagtagagattttgac

SEQ ID NO: 364372 - DNA, 419 bp, Zea mays
tttttgtcgctccggcggcggcggcgcgttgagagggctgacactgacagcgcggagaccgagaaagagaagatggtagcggatgatgggggcaagcccgcagagctctcgaagagcgcgaggaagaagctgcagaagcaggagcggcaggcggaacgtaaagcggcccgaaaagcggcggagaaggagcgacggcgcgccgacatagagcggcggaggcgtgagtgggaggacgctcttgccgccgcgccgtcggatgaggcccgggccgagatggtggcggcgcggcgggagacgcggcgcgagcgggtgggcccggggccggaggagcccggggcgcgagctgaccggctcaagcgcgcggttgagggcgcgggccagaaggtggtgctggacctcgagtttgcggacctttatga

SEQ ID NO: 364373 - DNA, 528 bp, Zea mays
ttcacataaataattttcagtggggccagttggaagaaaggaaggatggccatttcaggtttttctcagagatgatcaagtttcggcataaccatcctatattgagacgagacaggtttctcaacaaagtagttcagagttagtgtgtccgtaagtgttattcttacaattgccatcttttgccatgtgaccagtactaagtattagccatattttactgtatgaaattcttggtttattttttttccgcttaaacgattatattactgagatctttgttgttggtagaatgatgtcacttggcatgaaaatcgttgggagaaccaggacagcaaatttttggcatttacgatacatgatcacagttctggtggagacatctatttggcattcaatgctcatgagtattttgtggatgctgtaattcccccaccaccacaccataaatcttggagtcgggtggtatggatactgtctgattctgctaacatgttaataccgagtaattcgttgttagtcctaggatgt

SEQ ID NO: 364374 - DNA, 102 bp, Zea mays
gaaatctgttttacttgtttttaatatttcaatttatgcacgcgattcagtttagtatcaagtactgttccagggtttattagtacaacccattgcttaatt

SEQ ID NO: 364375 - DNA, 220 bp, Zea mays
aattaaacaatccaattacgacctgcggttggaatttaaaaaaaaacattgcctgttgagcacaactagtacagacagaagtttgatcactgatgcaaatataaggaaatacatcctgaaaattacatgatttttgacaaccgtaccaggtccacaatttataatgaaactgtgcaaaataggaagaaggaacttaacggagaaaacatatcaaaataac

SEQ ID NO: 364376 - DNA, 476 bp, Zea mays
ttcacgcgtccgatggttatgaaggctctgaagaacactgagagatatgaacttgatggtcagctgctggattgttcacctgcgaaacctcctgctgataagaaggatgatactggatcatctcctactgcaaaaggacgtccattacccccaagttatgccccacttggatatggactagcgggagcttataatccacttggaaaaggactggcaggtgcttacaattcccctggaaacggactggcagggggagaaacatttacaataggtgatgtccttctaactgttgtgcatttttggcatcaattgcacatgtgcagccaatgttgtatgctccaggtgcttctccaggttcaacaatgatcccaatggtcctaccagacggccgtcttgtatacgtaccacagactgcagggcagcagcctctgcatgtgacttcgcctctgcctcagcaaggcggtcgtcgattcggc

SEQ ID NO: 364377 - DNA, 232 bp, Zea mays
aaaaccaggggttgggggggcccggcctccaaggtcccgcccaaaaatcacctgccaagaataaacgccggggttcaaacaaaagggaggccctatatctagggggaaagggaaaacaacatgctttaaacaaaacagaggtcctataccggggggaaaaagggaaaacaacgggctttaaccaaaaaagggggccacccctaaccggaggggcgggtagaaccacaaattt

SEQ ID NO: 364378 - DNA, 374 bp, Zea mays
tgtacgcgtgggttaggttatttcctcccgtggccgtgccagtgacacgcaagtcggattgagttatgctgtgaacttctgatgagtcgctgcaagctgcctttctgacttgagctttttgctgcttctgttgctgcgttctatgatgtagtaacagtagctgatggtttacaccaaagcggagatggatgccctctatgatgtagtccttgctatataacttgaacactgatgtgattttctgtagtgtcaactgccatgctttatcggttttagtgtccttgtcggcagaagcgttgcaccattttaaaaaaaaaaaaaataaaaatatataaaataaaaaaaaataaaaaataaaaaattttaaaataaaa

SEQ ID NO: 364379 - DNA, 330 bp, Zea mays
tcatgcgtccgcccccgtctacaaaggcttgacaggcactctcagccccaggcagagagactccttccctgcgaaggcttctcctctcccctatccccccccgacatcatggatcgtcgtgaacgactacagggaccgcccactactggaaatacaggaacaacagcactcactacagaggtatcttggcatctcttgataagctatatgaacatcgcaatgaaacatacccatgagtccatgaatggccagttgaagaacaagtatggcgaccccttcataaggggcaactaccttctgtaacattagcacgactaatcggacccttgc

SEQ ID NO: 364380 - DNA, 314 bp, Zea mays
tttttttttttttttttttttttttttttttttttttttttttttttttttttttttttttttttttttttttttttttttttttttttgggcgggggaacctttttttaaaaaaaaaacggttttgaacagggtttcccgcctaacagggggggccaaaacccctgttttgaacggggatttcggcctaacgggggggggcaaaggcccaagaccccttcaaattgggggggggccaaagttttaaacggaaaaatttgggggcccgcccatgggggcccaaaaaaagcctagggggggggttgtggggaatt

SEQ ID NO: 364381 - DNA, 426 bp, Zea mays
tttcacgcgtccgatctgaatccacagctgcttgcccccgccgacggccaccggagcacggtgtcgtcgccggcagcacgcggtaaacgtgctgctcgtctccggcgattgcatcgtcgccggtctcaagaagccagaggcattgaacataattaccatacatcctgacgccactggttccaactagcagcgaccacggtccacaggaatgaattttgcatctccccacaggctgctggtcacaacacaaaaaatcaagaatcttggtgaggaatctgtaaaggcatgggaggaagcagcgttcgatggcctggagtcatggacaatcttcgtgctgcagttttatgatgccattgatttggatgatggaatttggatatactatcggtctctactgcgactcatcaaattggggtctatgcttgc

SEQ ID NO: 364382 - DNA, 174 bp, Zea mays
aacaggaaggctggctcgcaacactggccctgggaattaaattccattcaaccggatttggacaaccaaagggtttgggtcgctgccccactgaaaccccaaaattcaaaaaaaaattgctaaaaccagacaaccaccggaaccgattctcattaacggggaaacccaaaaacc

SEQ ID NO: 364383 - DNA, 475 bp, Zea mays
cggtttcgtggtctgacgcgtgggcggacgcgtgggcaaagccaagtgtgtgtactagcaaccagctagctcgggcggcagcaggcagccatcatgtcggaggagaagcaccaccacttcttcaaccaccacaagaaggacgaggagcagcccgccggcgagtacgggtactccgagaccgaggtggtcaccgccaccggcgagggcgagtacgagaggtacaagaaggaggagaaggagcacaagcacaagcagcacctcggcgaggccggcgccatcgccgccggcgccttcgcactctacgagaagcacgaggcgaagaaggaccccgagcacgcgcacaggcacaagatcacggaggaggtcgctgccgcggcggccgtcggcgccggcggctacgtattccacgagcaccacgagaagaagaaggactcacaggacgccgaggaggccagcggcgagaagagcaccacca

SEQ ID NO: 364384 - DNA, 356 bp, Zea mays
gcgggcccaaaataaaaaaacctgactttgaaacgcatgcataatacacacaggacggacagatgtttggaacacagccccactactggggacccccagaaagaaatacccgggacccttttccattggtttaaattatttaccatcaagggggacatgactatggatgccaaacagctattcctgcttcagcttatattctgattggtgacatgggtgcaggaacacaaggacgcacaaaagccagcagggaagatgtacaagaaataggtaaagatacgtcgcgctgctcctttcccacaggaactccatccatacccagaaatctccaacatttattgtcccggacgcgtggg

SEQ ID NO: 364385 - DNA, 526 bp, Zea mays
gtcgtggaaaatctgggggggggggtggcgctggtggctcgctgcgtaggggcggtgggatgaggccaccgccgagggctatttgctagagggtggcagcggcgttggtccaaacgggcgcgtccgcgctagtcgtggagaagccgggtagattggcgggggaggtgtcggcggccacagccacccaaaagctcatcatggtaggaaacgacgggagcaggggggcggcagcatgcgggggagaagagccagggccggcagctgatggtgggaggtgagagatgtaaacctagttagatactatgatagaagtggaaaccctaaccagggttgggagtggtattaatagtggagttagatgtaccaaggcccaatacaacaggggcctaaatagaacccctacacagcacacacgcagtgcatttcaacagtttgtgatcgtgagtagtttatggcttcatgtaacatgtatgtgcttcctgcattgcagcatcacttctgctttgaaaagagggattggatgact

SEQ ID NO: 364386 - DNA, 449 bp, Zea mays
cctctcccacttccaccaccgcgctataccattccacaggtgagaggcaaaaggcaagagccgaagaagcgagccgaggcgccaccgctctcccgcctgcttcctccgccggcccggccgtcccggccggcgagcgagagccaacgaactgcgggccgaagcgaactgccggggccaccgtggggcggagatccgcaccggacctcccaccggttcctggttgtggaatacctggccaacccctttttctatgtgtcgctgctggtcataaaacccaatagttacttggagatcacatgcaacaaatatgcacactaaaggggcttcttcagatgccatcagagttagcacctctagtgcccccagcacatcgagccatggttctgcacaagatgactatgattcctctggggatgtgtacgtgtggcgtgaagtcatttgtgacaaca

SEQ ID NO: 364387 - DNA, 426 bp, Zea mays
acgtttcgtgggttgacgcgtggatcctaaggtccggcctatggctgtccccaccggacatatctcaggccaagcgcttcctggaccacatggttcacgactaagttccattagtggtgtcacgtcaattgctccagacttatgcagcgggacctatggaagctggagtcggacgcgcacaatgaggttgcccattacgcgctcaccagatccagccgagtgaggtttgctacaggagcaggcggtgatgttatagagaatcttgcacaggtatatgagtatgagcaacattggtaaaacgctgtacaaaggcttagagggattgacttggattcaggaatcaggatgcttgatgacacctacaaattatataagtgaggtgcaattgctcgactatatttataggctgatgatgcagcgtatgct

SEQ ID NO: 364388 - DNA, 559 bp, Zea mays
cgcatggggaggttagagaagaagacccgtgtgcccgacgcgcgcaatgacccaagagggttcgacgatctggccgagctgtacccttgcctctccgcggaggtggaggcgattggtgcgaggtgcggctacggggcgctgaagagggcattcgggcgcatcggtgacgacacggcggcgcggctggaggcgaagctgaagaggcagtggatggcggagaccagggcgagcggaaagcttgaccggctgaggtcgagagtcgccaaggcgcttcagggatttaacaagtgaaatggtatagggacattctgttggctgtcatcgtttcatgctacttcaagttgtttcttttcacaatgatggtttgggagtttccatcatctgttatattcatcgttgaaatgtttgttttctagtcagtgggatgcatatatacattagtaacagtcttgttgttccgcagtttccaaaagcccattgtttcgtggtctgcttactagcgcatgcagcaaaatacttgacccagcgatggatccttggaacgacatgagcctactcg

SEQ ID NO: 364389 - DNA, 522 bp, Zea mays
gttgttctcctccgagaaccctcgccgccgccacccaccggagctccggtttgcagttcttcgctgaaggccatggatcacgacaggcccttacatggtgattggtgatggtggtgattgaaccttgttacttgttagcaactggcaagagtgattgcgattgaatttgccgagcacgtcggctatttcgctggaggtgatgggccaccagctacatatttcacaggatccaaactccaagcaccatgggaccacggtctgggatgcatcaatggtgtttgtcaagtttttggaaaagaatagcagaaaaggtcgcttttgtccgtccaaactaaaaggaaagagagtgattgaattgggagctggctgcggtctagctgggttcggaatggccttgttgggtggtgatgttacaacaactgaccaagccgaggtgctcccactgcttatgagaaatgttgaacggaacagatcttggatctcacaatcgaaccccgactcagatatattggcaaacacaaa

SEQ ID NO: 364390 - DNA, 323 bp, Zea mays
ccctttcaatggcgctacggaggtcaccgcagtcagtgtccgctgtctagtcccgcacgtccgccacggcctccgtaacgaccaccggatccactacatcctcgactacgtccgggtccacggacggatgcaccggcactatctcgcggggccctaggagggccccaaggagatcttacgggacatctttggggtcgtaataggcctcctctgtggagcgctcagcggtgctctcagccacgttgtctggtacatggtcaggtgcgtggttgccgtatctgatgacgactagctgtacgacgacgtgtacgacgattacgaca

SEQ ID NO: 364391 - DNA, 323 bp, Zea mays
agctgagggggtggatcgggtggtgggagcggtgggggtggatgtgatggaagaagatctggtggaggcagcagaattggtagaagcaccagcagcctttgttgaagaggctgaggatctaaagcatggaacgtgcccacctctctcttcagcgaggcctcgcttgacgatacacaatgaaactgccaatgcaaagcaccatggtgagctgcatcagaaagtggtacagtgcccacacgcgtgatctacctggtcctcgatgccgatgcaccccctagctaccttacaggcgagtttccgggcgactaccgatgatacaccca

SEQ ID NO: 364392 - DNA, 139 bp, Zea mays
tcgacccacgcttccgccctctactcctgcaacctgtggaccggccattgggttttgtgatctgaaattattcaggtgaagcggtctgtgctccacatgggatccgtctaaggtccgttattacaaacaagtcaattgc

SEQ ID NO: 364393 - DNA, 507 bp, Zea mays
tttccgccctttcattcgatctggacatcatcgggagcttgggcgttagtggggggggcgtcgaccgttcgcgcgccatggactgaacaacaacagcgcctctgctgcaaccgtccggcgtctcaagaaaggaggggccggcgtcgatggcgtgtaataacggtgagggcaaacaaaagctagaggctatcctggccgacgcgctcaagtcgtgtgctaggcgggcctgagaaggtgcccgcctggagctaccgctgctgctgcttgaggcgctgccggggtaggatctttacatgatcaacttcctcatgtccatgtgcacgcagatacttactgcggacagctcggcaacctgcagctagccatctcctagctcggctacaccgggattcagcccttggcctacacacacatgctgcccatggacagcaccgtggagacgctgtgctgctggtttacagggcgcacacacaccgcatgctgggggtgtacctgcacgcgctcgac

SEQ ID NO: 364394 - DNA, 473 bp, Zea mays
gggttgcgtgggccgactcgtgggtgggcgcactacgccctgttgacttctttcgccttggagagcactaccacatgggataacgctcgcacggcatagaccgcacattctacaccactctctacggggtagcgttctacattataccatcggttactccaaacctgtggggccttctcattgtcaacttgtacgtcagcgacaggaaacaacaaaccaaaccatttctgtggatagaggcgatgcgctcttctctcgctcctctgatgttatttgtgttaacctagcactatctggattgctgcgtaaagatgaagatcaggaagctcaagctctatgagcagaagctcattaagaggcacaaccatttggagtacatgaggcagggcgtccaccgcgaggcgctcgtgacacaccgcgaccggaatgtggagagggacgactacaagacgtacaacgggatatgcttaatg

SEQ ID NO: 364395 - DNA, 314 bp, Zea mays
gcggttaagcacgcatagttttaccagttacgtaccagcaacttacacttcgctacacaaagcaacaaacagaaaactgttgacggtaataggcaccaccgaaggaacaagatctaataacgaccactagtagaattcacttcatcctcatcgcttgagttgagacactgggtatcaatcagttcaggcgcagcaccacattatcctgaagcgagctaggtaggatccggatcagtacctgaccggcatgccaagtcggtccaatctgccggagcccggatacgcctttatggcgtgcaacgaggccaccgacc

SEQ ID NO: 364396 - DNA, 466 bp, Zea mays
cggttgcgtgggcaaatctggtgaaacttggccacatagtaaaacttttaaagtgctaaatgaagaaagtgttgctacagagggtaagaagacgtcaaagtatcgtacaatcaaactttgcagtattgttgaagatctgaaaatcgatatgttcaccccgagtggctggccaacagtcagcggggatgcattgagaagtttggctggtaaaatacctacagaatatatttacacaatagatgatattcaagatgatgatgaatataccagtggttcagaaaacccagatgggaattcctcttatggaacagcatatgaagcatttggtggaggaaagaatggaaaagaagcatgccatgcaattgcagctttatgtgaaatatgttctattgattctttgatatccaatttcattcttccgttgcagggagatcacatatcatgtgcagaggggcgcatttcactg

SEQ ID NO: 364397 - DNA, 518 bp, Zea mays
cggtttcgtgggcggacgcgtgggtccggatccgcgggggaggacggcgatttcgtccccagcctcatgaggtcgggaaggggttcccgcacccacatttgtgaacctcgccggcgcccatcccctgccttcacgaacccgccgccgcccgtcccctactcttcctcgtgcacccaccgtcgctcgtcccctcgtcttccttgcgcactcgccgtcgcctcctcctcaccctcacgcacttgaggccagctgcagaacgaggtcggacggcggagacgaggtcgaggtctacgacctcctcaacttgcgcaagactgccgagactgcagggacaagctctttgctgcctcgtcagctgctagctgacttctcgtttgtagtatgtgaatatcttatttgacaaagtgatacacaagggtttttcatcaacaagtggtcgccagaagaactgaaacatcaagatggcgtttgttttaggtcatgccattcaggagatgatgctaagctaaataatcaca

SEQ ID NO: 364398 - DNA, 158 bp, Zea mays
aaaagaaaattttgaaccgattccacttggttgaaaaatccagctggtagttataaacccacgttgccacctgatctctgcctttttttgccacgggcccacaacagaaacggggacgggaacccttgcaacaaacccgttgggagaaaaaaaaacca

SEQ ID NO: 364399 - DNA, 197 bp, Zea mays
ggcagggacaaaccgattttttttttctgaccaaagttggcccaaggggtcacccgcaccaaacggggttatttttttccaaaaaattaaaaaccccccctcaatttacatgaaaccggaaaaccaaaaaaagaaaaagaaaaccggggggggcaaaacctcctccaaaggcaactttcccaagcaggcccctactt

SEQ ID NO: 364400 - DNA, 471 bp, Zea mays
cccattcgtcctttgacgcgtgggcgggcggccaccgcacatcagcacttttacgagccctcctatctctcgatttctcgcgcagcggccctccccttctctcgccgccgtcgccgcgtgttccgtcgtctcctctcaccgatggctcttgctaaggtcggtgctgcgacgcaattggagaacagaggcgcgctgtcgaaaaggttacgcaacgacggtgagatcccggcctttcccattctgatatgtttatcacccgcttgttaagccggaattagggtttagtcgagttgcaacatggagatgttctcgggcagtattttggacgtttttgtttgggaattagggatggatcaatcgcaaggtcaacagagccgtaattgagacacgggcggctcaaatagatgcaattaggagaatgtgcgcttgaattgacctaggttcaccatagactttcgcaaggagtctttt

SEQ ID NO: 364401 - DNA, 339 bp, Zea mays
tcgctttttcagcttttacagagacaacagagagcggttctccttgtgagtttgatctgaaaaggaggacgaggaggcggaaaagcagcatcgcatacggaggaaggtgagcgaacatactccgacgtcagctgatgttcgactccaccgagtgcgctctggaggccccggctgccgaggtcgtcactgacggctttataccgaacggcaacttcgaggatggcccgtccaagtcggctctcgagaacggcacggtggtgtaggccacccacgccattccgcggtgggagacgaaccgcttcgaggagtaacattagtaggcgcacaagcacggggaca

SEQ ID NO: 364402 - DNA, 381 bp, Zea mays
tcgctcatagcggtttaatccctcgcctacctcttgttacaatttcagattctagcaaccttttgcgagatgttcctgtttgtcaggtaaccgttagagtaatttatttttttatttacttgctctctttttgttctctaaacaattagttgattttgcaactccagccattccatctagagctgaatttcttcaacaaggaaacccgtgttgttcagtatccagttagagctttctatttggatggatttaacctgatggcccataacttatcatctggggctgacaatctctataagaagctttactcaacgattccttcgaatgtggaatgccatcccacgaatatgtcatacagcccaaaacagcatttatttcttg

SEQ ID NO: 364403 - DNA, 137 bp, Zea mays
agggcgctccacaatcatgttggttatcaaccaaagttccatatggccccccgaccggtttccacgctattacaaggggacaagagaacatacacaagaacaacttgagattggcctttcaatttacaacacaaatg

SEQ ID NO: 364404 - DNA, 530 bp, Zea mays
aacgctccctgcccccgctcgctcgcactcgcaggtcgcaccacactccgtccccctccataactcccacccgcgcgcatgggcgatccgcgggcccgcacgtccgccgtggccgccggcgagctgcggccaccggagccggcgctcgacccgctcgagttcctctcccgctcctggagcgcctccgggcgcgcgctcgcgcccacgccgccgccgccgccggccgcattcgcggccagccccatcgcggaggacgccgcgtgcgagctggacgacgggggcgtcgtcgccgccgcgtccgggagctccttctccttcgcgtccgcggccacgtcgcagctcatcatggaacggatcctcgcgcagtcccaggaagtggcgccgctcaccttcggccggctctcgcacagcagcgggcccctcaacggcgggggctccctttccgacaggccgccggtctcgccggagatcgatgacgccaagtactgcagagcggccagcacgccgaatgcgcatgcataccgggcggg

SEQ ID NO: 364405 - DNA, 431 bp, Zea mays
cggactcgttggtttttcgaaaagctttgaataaggcaaaccaatcaaatttgggtaaaaaagtcaaacgaattataaattaggacggagggagtaactattaacacctccacttgctaatggttagctggtctattaatatgcctgtttagatccccacttgctaattttagctgcaagctatcggcgctaaccgatggaaacaggctacgtatcctcatgggtctccaaatccaatacatgtccatgcaggtccgtgggctcccatgcgcgcacaatttccatgtggagtgcatcgaccagtggcttcggctgaatgtcaagtgcccaccgtgccggtgctccgtcttccccaacctggacctgagtgcgttgaacaatctttggtcgaccagcgagccggaccattcatcctgcagcgccagcaatgt

SEQ ID NO: 364406 - DNA, 299 bp, Zea mays
tctcacgctttcggatttttactaccgcgcttgggtgaacgctagcttgtgacaggatagctcattcgtcaccgggcgcaacaccgggacggtgccattggagggcacagcccttgccacgaggtaaactcatcgttgctcctgtctcacaaagggacatggaagttgacacaaacttgcacaaggaaaaatttattattgaaacctatgaaaaaaaaacatcctggagtatgcctcttttcttaaaaaaaataaaaaaaaactggggctcgctccataggagccaagcttatttacaa

SEQ ID NO: 364407 - DNA, 494 bp, Zea mays
tcgatttttcttcctcctcctcacctactagcaggcacagcaggcagcagcatcgatcggatcggagcagcacagcgcgcgtcaccgcaagctcaagtgtcttcttccttgcttgcttgcctgctgcttacctctcagttccccactcacgtcccttgccgtacgtacgtgcgtccaacacaccaggtgaaaagtaagtacaccgccgtcgacttccgatacatcatctcagttctgcatgcatggtttatttcaccgtatggacgactgtgacgaagagcaacgtcgttgcgcagtgggctcggagacggagacggtcaacgtggaaggcatcccgttcccggcggagatcaccgtcggcaaccctctctccctcctaggcacaggtacgtccgcccgttcgtcttcatcgtttcagccgtgcattcaataatacccttggttcgtttgctgctactcactgtacctgtacgtctcacttgtaatgtacgtct

SEQ ID NO: 364408 - DNA, 389 bp, Zea mays
cccttctcgaaggatgcaccagagttagtgccatttcatttcattaaataagaagagtacaaagtcaaagatgtacgcaccccccaccagtgacaaacgttaaatgaaaagtaatatggccaaggaagccatgcatagtcggccagtcactcaattaaaagtgaaacgtcatacagtgcacactgctaacattcagtgtaatcttgtggaaccgttatatgaaagttgctgaataaggaatgcatatagacattgaatcctttcagtaatctcacagttaacatgccgatctatttcatctcctctgcaactacactttcgatctggaggagcagcttcatgaatttgcttatcgatttgagctaggtatatctggaacaagcttgact

SEQ ID NO: 364409 - DNA, 415 bp, Zea mays
tctcacgctttcgactatttctagatcgcgagcccgtgagttcatggtgctcgagtgcgcgcccatactgctgctgagtgcctatgacgaggtacgcaccgttcaagcgggcgcaggagcgggctctgggcgcggtagcaggcatggtatgagaggatgatgggtgaaccactgtgggggcggctcttgggtttcttctaccgaccttctgggagatcgaggttacgtgcgccgacgtgaagaatctctgcgggcgctttacgttggctacgagatgctcaagccgacgatatggcaagcggtggcggtgggcgacgactaacagcttcttgagcgggggctggacggcgctcccagtttaaggggggtgagagcagcccctttgtctatgcatggaagatagaaaagaggcctg

SEQ ID NO: 364410 - DNA, 309 bp, Zea mays
agctgaacgcctgatgcaccggttccgaattcccgttcgattcagcgttcgcgtttatctgacctccatccatcaacgttgcttcatggcttatatttttgcctttaaggaggacgatgccccttattaaccgttggcggtcgtacctatgctataatgattcctagccggcattcctagactggactgtcggcgcactcccatatattcaggcggccattgatgccacccaccccatgtctggtcctgtactcgcacccttcggtggtgagtcaaggttaccgctatggtggctgccattacggttca

SEQ ID NO: 364411 - DNA, 284 bp, Zea mays
tttgtttgcaccaaatcgatcgcgcctcagctcaaaatccgaaacggttcgaacgatcagaacgattcagcttcagctcctgaatccagcagcaatggatcgctcccgctccaagcgcggctaccactacgaccaggactccccgccgccccgctccaagcagcgcttcgaccgccgcagcggtggcggccagaatgctaactcgagctatcaccgccgcggccccctcggcggcggcggctccgaccgccgcgggttcctgccccactgcccccgctccgatc

SEQ ID NO: 364412 - DNA, 133 bp, Zea mays
tcgcaaatatctaagcgagaagacggcggttccgaacctgtcggtgggtgggtactaggcgatcgacgctatcatggtgcatgtggagaaggcgtgctccggggtggtgttattctctgtcattgtggctctt

SEQ ID NO: 364413 - DNA, 248 bp, Zea mays
ccaaagggggggcattccaattttccaattccccacccaaaattggggccctatctttttcccaggggttgagaccccctcgagttcaacggttttttcgggcccagttaaaaaaacctcccctgggttttaaatcccggccccttaaaaacaaaaatcctgaaacggggtttgggccccctgcccaaccggggggccccaaattgcttaaaaatgttttttataaaacggcaaaacgattttttttt

SEQ ID NO: 364414 - DNA, 277 bp, Zea mays
tttacgcgttcgcgtatattcaaaccaccaaaagcaatgccgccggcgttcgcaaatggtgccaccgtcgccgccgtcgccgtgagggacgacatgttcccggcggaggccaggctggcgatgattgagttggcgaacattggtgtctgtgccgatggcgctggaggtcgtgatccggctgggcgtgccgttcgcggtgtgggcgggcggagccaacgcgcctatgttagtggccgaccttttcccgtcgggccacccggacttcgtcgttctggag

SEQ ID NO: 364415 - DNA, 420 bp, Zea mays
ttcatttgtccgcccacgcgtccggctaatgaagcacctggtttagtattattaagtttagatgagtgacccatattttgaaactattcttggaaaactgcaccaatagccagtctcgttaggagaaacatagaccgagtcttcataatctttgtttttcctctgccttatgtcaattttcacccaatatctaaaagcaaatgttttatcttgttactgagatcctacttatgtttgttcaggggtcctccccttggcttcttcatttcaaccttgttgagcacatggccagatgtggcttgcagatcaaccaccttagtgttcttcattgaaatcctatcgtccccagggtcttcatccaccttgcaatcattactctccatcacaacgccattgtttttcggcaggagctttaaaaca

SEQ ID NO: 364416 - DNA, 536 bp, Zea mays
atcctttgcctccgaatcggatcgccgcccccgctgccgctgccgctgccgccgagcggaagcagccatcaccccaaaccctagccagccatccaactatggagccgcccgccgccgccgccgccgactcctcgcccgatccgacgccgcaggaccagtttcctgccccgtccccttctccctccgcctccccggccaagcgctccgcctggaagcacccctcccccaacggccccgccgtcatggatgccaaccactggcccgcgctctccgacgccgccaagggcatcaagctcccagactcctcgtcttcctcgcctgcgcccgtcgccgccccatcggccgttgccaattcctccagttcgcaaaagcacggcgcccatcacgtccgccacaagtcccgcaggcgtggcggcggcggggagcactctccacgagaccatcctgaccggaccacagccacgggttgtgaccactccggcggcggtggggggtagggggcccataggaaccataataacggaaggcgcaggaga

SEQ ID NO: 364417 - DNA, 366 bp, Zea mays
ttcttttgcaagatcatcctagcgcgggagacgctgaggttcccggtgtcgggcttcggaaccttctataccgcggaggcgatgcgggacgccatactggggatgaacgcgacggagctggacgcgactaatatcacggtcaacgagggccagaccagttgtctgcctcgtggcgttgtgccgccggcaccgaggagaacgtgtaggcgtgggataccgcgttcgctaacgccctgatcgtggtggatgcctaccgctgtggcggaggttaccgtggccgcagaggcttcagggtcggaggctgctgatactgctgtggtgaccccggcggcggctactgtaactccgacagtaactggaggaact

SEQ ID NO: 364418 - DNA, 168 bp, Zea mays
ggggctcttggctttattttatttccagcatatatagagagggactgatgatgcacacaacgtacattattccaaccgaattacctatatagtacccagggagggacatgtcgcacctgcatgccaatagacataaataggggttatcatatgggggcataaacccct

SEQ ID NO: 364419 - DNA, 342 bp, Zea mays
gtaaaccgggtaatatatattgtaaaacagggctttctacgtttatatacacgcctttgctgaagatagcctcagtactttttcccatccacctttagagttatatattgatgatctagatggagcccctcagcagccatcctcactgcagtaactgtcgccatggcacccgcatcatgctgctcaaactcaagtaccaaatgcttgaggctcgacagatgctttaagccagacacgccaatcgtgtcatcagcacggcctttctcgaatctcaggacaagtgcttggacctttggcagtacacggggctcaaatgtcaccgatggtgatgtgcaccggatg

SEQ ID NO: 364420 - DNA, 301 bp, Zea mays
atctgacatcccttctccgccgtcatccggtggagggggcaggtccccgccgtcgacgccgtcgtccggaggtgagcgatccacgccggagtgccacttgacggccaagttacactagcccggaggcgagggcagaggacactccggaccgttcacttgagtcgacatgggcgtggttatatgtggcataaggctattgatattaacaagatggatttgggtatgctggcttaataagaaacaactgattgatgactctggtcctaagcacttccagatatccgccgaatacgccaacgac

SEQ ID NO: 364421 - DNA, 388 bp, Zea mays
cccattctttttccgacgcgtgggcggacgcttgggtgagaaactttttttcgacataccattggatggaggccctgatacgtttgtaatgggatagagttctgcataaatcacaacttttatttatagatagttcttactggttgtgaactaaagccaattccaaaaaacaaagttcttgattgtgatatagtgcaataacctaatgttatcaccagagatgattttggttactgagctaacatatatatggaaaaagccagaacaattgatttttcattacagagtgaaacaactcataagatcaccactttaagacaacattgattcttaaaatgcctgcactataaaacggtgtaatagaagacacgctagggttaacttagga

SEQ ID NO: 364422 - DNA, 319 bp, Zea mays
ttactaaggtcctgaaacttttatttccgatctttacacaagaacaaaaaactccctatgccttttcagtcacataaataagaatagttaaaatggcaagcgttatattctcgagcaagcaagcggcgaaaagccgtgatatcgctcgtgggcttcagtaaattcttggagagagtttccccgacgacgtcctgcctgcactggtggaacacctgcaggatgttgcggtaggggctgctcctggacgacggttaggcggtgccggagcggtggcgcttgctgctcgacggccgcgattccgggctgagcgcttcgtccg

SEQ ID NO: 364423 - DNA, 546 bp, Zea mays
cctttgctttcggcggccgttgcgctctcccccatttcaaactcgaaccccctctccccgcctcgagcatcgaccggagggggaaggcaaggcgccgatacgttctcggaatccgaggcgaagcggggtggggatcggatggtggaggctagcgcgagcttcatggataaggtcgaggcggctgcaggcgaccccgtcgtctactggggcagcgtctgcgtcgcggacgcaaggatggaagatgagatggcgcccgtggaacccctgccggagcctcccgacgaaggcgggcccgttgcgtggcccatgccggagttctgccctcttacggacgatggggcgctgaaggagtcgttcctggagactctgtggaaggactcttcgccggagattgagcggcctgcgcgagaggcggacgaagcgctcagaccggaatcgcggtcgtcgagcagcaagcgccaccgttccggcaccgcctcgccgttgtccaggagcagcccctaccgaacattctgcaggtgtttcaacagtgcaggcaggacgtcg

SEQ ID NO: 364424 - DNA, 351 bp, Zea mays
gtgtgagagatgggtgcaaggcaacactgcagagggcagaaacggagcggcgcgaccgcaagagagagagaggggagttcacatcatatatcccatcactcacacgccaccgcattattcgacggcttcttactcctaccgctcgtcggcgttccttcttcgaggacctaaagcgtcatgaccatcgttatcctttagctcaccagccgcctctttgtccgagcagcaacagaacatgagtatgtgagagggagcacggattttgagagcaaatagcggtggaagactggagagctaaggaaaacaaagggaaccaaaggactaggaggatgaacctaatgaagatgggct

SEQ ID NO: 364425 - DNA, 276 bp, Zea mays
ttctttttttttttttttttttttttttatttttttttttttttttttttccggcatccaataaaaacagagcccgatgctaaatagatgaataaccggcccttttgctgtttacaatgggcaaaagagtaaactttcggataaaatatttaccaggcaaaaactagcaccaacacaccgggtggggatgaaaacactatgtcaacaattttttccaagaactagaaagaagcaccggcctcaggattaacgcaggagggcctttttgcattgtag

SEQ ID NO: 364426 - DNA, 512 bp, Zea mays
cccagttcgttactcgcgcccattctcgccgcgcacgatgctccgtctccccaccctcaccgcccttaaaccctcaacccccgccatcagcttgaaccgtgtcggctgcagccatggccgccgccgccgcaagctcatctttgtctcatccgctcctccgccgtcttcttcgtcttcacggcctccgaagccgacgtcgaacccggaaccaccaaagcccacacatgaggcccgcaaccggaacccggatggatccaccgaggcagggttccccacaaccaagccccggaagccacgccgtgggcgccgcagcgagtcggcggccgtggaggacttcgtccgcaaccgccttgagcaggtctttgcctccatccaggagcgcaaccccgacgtcctcgagggcaaaggcgacatcctgaagccgaaggccgatgtggagcgattaccagacgacgagggagagggagaaggaggagaacagaagcccgtggtggaagaggaggacccgagct

SEQ ID NO: 364427 - DNA, 345 bp, Zea mays
cgtcaggctgggatcctctttagtggccgcccttctttttttttttttttttttttttttttttttttttttttttttttttttttttttttttttttttttttggggcaagaaaaaaccttgccaaaaggtggattaaaattggactttgggcttgccaaaaggggtaagagcgaaaatgacgggggagggattacaatccagcctgaacaaaacgggcctacgggtaatatatttaagggggcgggacacagcccaaacaaaattccattccggcccttgatatttacccgaaattggaatataaattatcccggaataaggggtttttttcaccctttaagg

SEQ ID NO: 364428 - DNA, 401 bp, Zea mays
gttttactttacggagagggcccaaggcctatgtgagtcgagccagctgtacggagaagtgacacaggctgaggcagattcttagcttcgctggattactacaatttccctacagaagtctatatgaacatcctattcaaacatgccttaaaatgcggtccactctaaggaaactacaatgaccaaacgtgaactccaaacgctatagagtaacactgatgtgaacactattgaagttatacatcatgtgttcggactaaccaacactggggaagctacactttcagtgatagaaacaattgtaaatgctccagctaagagtggttcagactacagtgaatccaatggaaagactgaaaagaatagctgactaagagacaagtatcctaacaagcaaaacg

SEQ ID NO: 364429 - DNA, 341 bp, Zea mays
caaaacaaccaaacaatcacatttacaatgaaccacatagccatccaaaacttaaggtacagctggtgatgatatgatcaagtttacaacatttatgcgttcaagtagtacaatctgaatgaatcagaatcacaaagagcgactaacagaggaagagtataacggctcctagtttaggaaaaaaaactgagttccgcctgccctgttgaactttgagtcgcagagctaactaacagagcacaaattacagctgggtgctcagcgcaactaaacaaacattttagcaggctgccattcagcagaacttccagtgattgttgcagttcacacatgtgacgaat

SEQ ID NO: 364430 - DNA, 348 bp, Zea mays
cccgaggaatgagatttgtatctgatcacagggtggtgctgccagatgatagttgattaagccaacctcaagaacattgtatggatttaactcccctcagtcttcagatgaacttttatactttgtctcggattcctccttcactttcctggattttctctgccgtgcattggagtctgccttcattctcttgaacatttttcgttttttcaaggttttgctcttcctttccttgaaccttctcttctttgtcagcgtttggctccagtgcctctaacaatttacctgttttgcctaatatttttttgtaaccttcttgaaccccacctgcattatcttggattttct

SEQ ID NO: 364431 - DNA, 437 bp, Zea mays
tttcgctcttctccaacccacccggccgctaaccaaacactagtggtaccaccaaatggggtacctctcctgccgcgcggactcgtctgtggcgacgtgccgctccatcacggccatcccgccgatcccaacctcgcgccgctcggggccgggggccggctcgtccaggcccgcgctgcctccggcgccggcggccatcgaacgcttcgactacgcggaggtggaggcggccacgtcccacttcgccgacgcggcgctgctgggccggggcagccacggggccgtgtacaaggccgtgctcccgtcgggccgtgccgtcgccgtcaagcggccctccccgcgccgccccgaggtggacaacgagatccgcatcctctcctccgtcagcggcccgcggttcgtcaacctccttcggttatccgacccgggcccccgcc

SEQ ID NO: 364432 - DNA, 224 bp, Zea mays
ccacaaaatagccaacatggaaataattttaaaactgaccagatgcggagggaggaattttcggggggggctacacaggggggccccgggcactggaatgcccaacaacaagattggagcgagcaaacatggaagaaaaaggggcggggggcaaggcaaaatttccgcatgaagagttaccggggctaacaaccttcctggtacccaaccggggggaacccccc

SEQ ID NO: 364433 - DNA, 360 bp, Zea mays
ttgtcttttcgtccccccactccgggccctacgaccgggtaggttttgataacgatcctcgaaagccaccagcgggccccctccctataagggcacgaaagaggacgaaccctggtcaccgcctgggagggtttggggttcgctcccgaccggttgtaactctggagggagccgaccttgcaaccatattgggcccgcacggtggaagcgttaggcgctcgacctttgtatttagcccgatccgctacgggcccaacggttgtggcgagtggtgctaacgctaacttgattattggagccatgacggccgagaactgcaaccgcgagaagaccgactgcattctcgacggattctgcgac

SEQ ID NO: 364434 - DNA, 551 bp, Zea mays
ccttcgcgtccgatgagattcatgctatggtcagtgagccttaataatgctgttagaagcttttgcaactaattgaaacacgtcatttgaatataatgcataaagctatatccgtggctttattgttacctgcccttcaagtatcatctttgaacaatttttttggcagtcatatggataacatctgaccaagtgaaaaaatttatttgctgctattggagttttggcagattatgccatgatgattggaaatgatagctaattaattttggtgattccatccaaattttcttcagatgattggtattacaagtactggatctattctaagtggtgaatcatgacgtgtaatcatgtattggcatatactctttcattagttgtattggctcgtctgtgtttatggtctatggtgtattggtgttattggggaccctctaattcttgtagctaattgaataaccatttggctcaaggttatggtaagcttaatgggtttctgtgttgcctcgtatctgtgcagctcaatctaactttgttctttgatggca

SEQ ID NO: 364435 - DNA, 373 bp, Zea mays
aatggaacgcgttcagatagctcttggtaaacttaaaaaataatgacaatagcacggcattctagaccagcccttgtagacgtctagtgtcaaccatattcttatgttgcaacagatgctatttcatacagatatagaaactccaaacgtttaatgattaatcaacccagacgagaacaggaaaaaaatacatgattatcacgtgtaaaatcaaacccagagaatcccattcgcctttgtaatttcttgcatcatcgaccgcttgttaggataggtgaagtatacaacaaaaagacttcagaagtattagcaccggcaacgttctgaaatacaacagcaatcgagttaagctgattggaatacatgtacaaaa

SEQ ID NO: 364436 - DNA, 270 bp, Zea mays
agaacttacatgagtagcttaacttttatcatgatggtaattgggacaccaaagtatgtaataccaaatgacgaattaagtcaaaactgtcatctcgatctcaggagcttaccaatgctcagttgcaatttccaggggggaaagaactaaaaaagttagccaaaaaaatgcacaaccagaatgatacagaagtgctaaactagctccatctcctcttatcctcttcttcatcgacagggctgtaccactctggtcgtctttttgagttac

SEQ ID NO: 364437 - DNA, 521 bp, Zea mays
  unsure (1)..(521): unsure at all n locations
cgggaccgtagtcttggttcagattctcccatatctggattgattgctttgctcactgctgttgatgctctttctcacattcatggtctaagcaagcttaagaaacaggtatgatatgactactgaaattttgtttgttagtcgcttccataatattatgctggatattcttttctatcttacttagagcaggtatgcagcagatcatatccaccattttatctttacctcttttatacttgttgtaaggttcaagctactggtatctttgttaatgttctcattatcttataccctagcttacacatggagtggtacatttaatatggttcttcatatcactctcactgaatttacgtgtgattggtttctgaagaaacatcttcctgacattttcccttaattcttatacagcttgtgttcgctgtttttaatggtgaggcctgnggttatcttggtagtcggaaattcttacaggaattagatgaaagcgcttgttctgtgatggaattagtagctta

SEQ ID NO: 364438 - DNA, 248 bp, Zea mays
acgctacagtaaaagctacggcatggatcatcacatagaacagcagattgatctgcgtacaaaacaaaaagggattggcagcagatgataccttttgtacaacaacctatcccagagccctaaactaggagagcccccacccccaaaaaaaactaagaaacagagtacctcctgcccctaaaagggggaagaggggagggcttcacttctgcaggctttgctgacaacggggggctttgcgagctacc

SEQ ID NO: 364439 - DNA, 81 bp, Zea mays
ggaacccaaacataaccaaaaattatcttaaaacccttgttccaaataacctttgggttcaaagttaaacggacacatggg

SEQ ID NO: 364440 - DNA, 302 bp, Zea mays
gccctttccttttttttttttttttttttttggcccaaatagaatcaacatggtaactcagggcatgagttgccatcagttaatactgcaggcatgaacatagggcagcatgctcagcatcaacgatcctgggaaaaagcgcaaaacaacctccgcagcaggaaaattgaaagatgacttacatgacaaaacttgcatatgcattatgctcacaaccaaaccttaagcccagggaaaaaaacaacagacctcacacgtaactgaactgcttccaacataaaatgctcgtattttccctgata

SEQ ID NO: 364441 - DNA, 434 bp, Zea mays
gcagccaatcaatcaaaacgattttttttgcacagtgactacaatacagatagcgaaaacagaaaaaaaaaacaagaaaaaattcagctgcgaacaggctaatccgtggcgcccctaggaaaacaaagacatctctctagtcctgaactccagcacgtacagcatactacagcagccacaggtctgtctgtcactccactctgtctactctctactctgaagtctgaactcaatctcacacggatgatacacgaactagggttgctgctgcaccgcgtttccttcccaggtccaggtcgccggcatctgcagagagagaaagagagagtccatgaaactcaacaggaaacctccatccatccatccgcctggccggctcactgacgacctgtgctatcgcttcttggacttgcacacgaaagcagcggcagcaa

SEQ ID NO: 364442 - DNA, 363 bp, Zea mays
gagtgtaagtatagatttattacccttgggacgcactttactttggaagttgaaactttaggtacatgattatagtacactcttcactgtactactacacgtacgcacagcacactacaatgggcagcacccataacgagacgtacagatgacgtgtttatttagccagcaagcacatagagatactgagacagagatacaataggtccctcagctcgcggctggcatgacgatgtacgttggctagctaggcggggaccgggacgaacggggttgcgcaaagcattagtggcgtgcggcggcagacgccgagtccaggcacctcccccatgttgacctccttgacgccatcgggcagcgacg

SEQ ID NO: 364443 - DNA, 304 bp, Zea mays
ccctataaagttggtcgaacttaagatagttcgacttagaatcattctaggaactgatttatttttgaacagaaggaatatttgcgtcctcgatcatgattgagaccagatctccgcagatggtcctgccgcattacctccaatgaatttgtgtagtacagtatacacagtttgaagctacacgatcaatctgtagatcatctgatagctccaagaagatttgcacctccgagcttagcaccagtcaattgagtgtcacgcatttcaacttttcgcatgtaaagctctctgaagatttgcgcct

SEQ ID NO: 364444 - DNA, 167 bp, Zea mays
ggcgagggcaaaataattttttgctacaatgattgagtcaataaatagcataggcctatataggggaaccgaatgtaaacatcgcctggtccacgtcaaagtcgttgttcgcggttgggagaagtttcttgttagcaaaaattgattgggccccaccaaggaagcaa

SEQ ID NO: 364445 - DNA, 116 bp, Zea mays
gggcaaagattcacctgattcaaacagcaaacattgaacaaaatatctcaatctgacgcatcactagctcagaggtttcagaagggtctacaccgcagacaaattacaacttaagg

SEQ ID NO: 364446 - DNA, 270 bp, Zea mays
gaaacaaaaccagagaggttttttgtatatatccgtttcgtttccatccctatgtcgcacaaccaaaaactttgagatctaagttgttaaaaagaatagagtaacttatataatttaaaaaagttgaagcaaagttcactttgctgatgtccccgaacgaacaacaaattcagggtgcgtctggcgggggggccccggctcatcctttcggggtaaacggccgcccgcctgccggagcactggtgcccctgagcgcccgccacctcgccc

SEQ ID NO: 364447 - DNA, 93 bp, Zea mays
ggggcgccaacaatgcctgactttcacgtggccctgggcccactaacagtgacatacagcttgtcctttactccctaccttgctcagattttc

SEQ ID NO: 364448 - DNA, 188 bp, Zea mays
ggccatgacgccatcctcagctctcgccctcgcgcaccacgccgcggtatccccgctcccgtcctccacgccgtggtcctcccccaggtccagctctctgagcctgggcccgggctccgccgggctcgggccgcgccggctcgtcgcggtggcgcccccacgggcgttcttctcctcgaccccctacc

SEQ ID NO: 364449 - DNA, 414 bp, Zea mays
tgtttcactcgcacggaaacacgcacggaccatgggaaggactgagagcacaagctgcggcatggatgacggtcttgatcacggcccttttctccacgctctgctacatgcccagcaagatggccagacagatctgcaagcagtataacaagcacgacgactaccgtgacgagtatgctgaacaggaggaggagcacaaggaggagtttcgggctccgtcttccaccccgaactacacggtgaaggacatgctctcaccgatgctgaaactggtcggcgagctgcagggcatggagcaggagctcgacacgaatgccgccgagatggcggatgtgatggaggagctgctcaacgcagtcgtccgcctcgtagacgcgctggtagccacgctgatctccacgaacaatgcccttt

SEQ ID NO: 364450 - DNA, 212 bp, Zea mays
aatcagagccggaggaatctaatcaatggcagcatctcggcaaaacgcggggaatcatctagtcgatagatagataatagattgattgacgtccagtgactcatttggcagctaacaatcgctaaagctagattagcaaccctctaatcatatgaaaactacaaaagggcagctatgtgttgaaatactatctacccccaattcattaactg

SEQ ID NO: 364451 - DNA, 355 bp, Zea mays
ttttacgcgtccggcaagcagagcgagcgagctgttcggtcaaaccctgagcggccgcctccacaatgccgcgccatgtcgcgctgctcctgaccctgacactgctggcctcgccggcggtcacacgcctggcgtccgccgcctgcgcaggcgagaagttcccgagagggcgtgcgtacgcaccgtgcgaggacctgccgaagactgggctgcgccgctgcactggacgtacgacgcgtccaagagctccctgtcaatggcgttcgtgacaggcaccacgaacaggaatattcatggagtaccagtgaagatctagaggagccacaacggcataaaaagctggaaactcgtggcc

SEQ ID NO: 364452 - DNA, 285 bp, Zea mays
ccctcttcccatcgttgaccatcataatttctttcaaccttttacaactctaagtttttccccttcccatcgttgatcatcataatttcttcaaccttacataattctaaggagtaaaaggaaaacaaactctcccttgccattatgatctgtacccactaactactctaactacatgccggtgcattgaaatgtgaaatgcgagcgaacacgatggagtagggcgccacagcgatgggttgtgccgcatccatcttcaccgcctccagtgcggggatgttcccc

SEQ ID NO: 364453 - DNA, 169 bp, Zea mays
ggaaaaccaaataaatcccggttcctattaggggccccccaatttacgattaacaagggcggcccggggccctcggtttacaaactaaaacctaggtcacccccttgtgaaacagggccgggaacctccccaggacccgctaaaccttcccctgttaaaaaaccgcttc

SEQ ID NO: 364454 - DNA, 461 bp, Zea mays
ggctgcaaaagtctatttatataaaaatctcctacatcacatttgcttatggtttacatgttcggtcaattgcatgaccgttcgctagaagcaagttataataaaatcagagttaaataactgcggtccctgacatgatgcatcattatcaagcaaagtaaattgataatgacaagtgcatttaccccaaaacaaaatctagcctggctctgacctgcaccactttcaatagcctgatgaaactcacttattgaagccattacatgatggcacctctgaggggaccgtgatgaaggtaaggcccaacatattctacttttggcttgtccctgaacctgatgacccctagcagtcccattgcagaatcctgaatcaatatcagactggaacatgtccacaaaaatcactgcagctccttaaagcatttctgcctctgcaggtctttgcgatgggggatcacg

SEQ ID NO: 364455 - DNA, 340 bp, Zea mays
atataaacatgggttatattgttaagataaaaatgtttcgtaatccatttatgatcctagctatatataaattttattatcttaatctagctattgcacccctacctagtacagtgttagttggcggctctcttttcttgaaaagctattctattcttagtgccttagccaatcttggtcccaaagtcttgctgctcgtccggcaagtcaggggcatgcttaacgtgcaaccttatatggttaacagacacaaactcatcacatccttcattgacatcacgaggcctgatgtttgcttgatgattttcagggcgagaacacgtatgaaaaagtttaccat

SEQ ID NO: 364456 - DNA, 180 bp, Zea mays
cgggggccaaagcatttattatgggagggcatgcttgctttttaaaacccaaatgccaaatggtgcatttaatccactccaaaacactcacacggcacacaaaaaatccaccagcgcgcgctacactgggggatctactaaattcttcctttaaccttggactaggaggggctgtttttt

SEQ ID NO: 364457 - DNA, 427 bp, Zea mays
ttctacgcgtccgcggacgcgtgggcgcatgcggggctgttgcagcagcggcggggccggcagcggcaccggttcaccagcgataccaggaagaatggggatgacagtccctcgtcagccccccgatgagaggacatggcgtgctgggaaggagcccacctcccaggagaggatatggtggtggccgcggtgaccatggctctgtcagtctcctggtccgcaacattgcattgagatgcaggcctgaggaactacatgtacctttcaaacggttgggccctgctcgggatgtttacctgccaagagattatgacactgggtaagtggtaattaggctaataaatgggttctttggtggacatgccttcccttgtcgctacatgtgcatgccatggttggatatataaacatgtccagccattatggc

SEQ ID NO: 364458 - DNA, 167 bp, Zea mays
tctttttttttttgggtttttttttttttgggggttccgccacggcatagagatccacttaattaaccctatgaattatggcgaacaatgatgcagttactggctctcttcttcataatcttcctcggcagactgctcaccgtcacttgcagccgctgcccccgggt

SEQ ID NO: 364459 - DNA, 398 bp, Zea mays
acccgaaaaaacaatcatagcaacaatagcgacaaaatatacaatatcttagcagtaacctatccaaaacgctatagcgacactgggatgaaaacagccagtaaacactaaaaccatttccattttcatatttttaaatgaaattgaaatggtaatcatggaaacaaaacgatatcggtattttgaaaatatcggaaatgaaagttcgatacgaaaaatataccagtaacgatcgaaatctaatatacgatcagtaaacatatcaatataaaaatatcttaatataaaagttcacaatacaacaaagatcacatttacaattcataatataacaagttcataaagatcacatgttcataatataagttcacaatataacaaatttataaagatcacaa

SEQ ID NO: 364460 - DNA, 130 bp, Zea mays
ggggccttgaaaaaaactcaaacattcggcccacgaagatcaatttcccaagggggggcccctaacttgggggtttacttaccgaaatacttgggtcaaattttttttcaggggcaacaaacgaaagccc

SEQ ID NO: 364461 - DNA, 336 bp, Zea mays
tccacgcgtccgtaaaaaaataataacggagtaggaggagttaaaagaacggacccggctattccccccgatcgaagctcgatctgtccttccgttctacgcccacgctatccctgcctccgccgaatgcggatcactcgcctttggtgaccgactgacctaccctgcttctgccgggttagtggagtgtccgcgcctaccggtccccgcgccgcgtccggatctcgaatgcgccgccgccgactcctcgcgatctagcggctgcgcgctgcccccccggcgggttgagctacatgggcccggtgcggtcaggctgcggatatggcaactgaggcg

SEQ ID NO: 364462 - DNA, 301 bp, Zea mays
aaacagaactgggcatgagtagctcttgacatcatcaaaccagactgggtaccggcgcactaacacagtaacactaccatacaaaatctgattccttcgaagcaaacaagctgcactgcagtcacatgtaaattttacaaagattgaggcctttaggctgttctgtattacaagatcattttcttcttcaaaaaaaagtatagctcaggtgcgcctatgcaaccgagcacccacgccctacctacattacactggaagtcactttggtccagctttaccgaatgaatcacggagggtgaca

SEQ ID NO: 364463 - DNA, 321 bp, Zea mays
gaaaccccaaaaggggggggttaaccagaaacctaaaagggccgtttaaaagggaacccgttacagggacaatcccttgcattaaaccaccccggtgcccgaaaggtttcaagacccgaatttcggggtgggtttaaaaacccccacgcttggggtcgaccataaaaatgacaaaccccaggggcttttaattttttcacccccttttggggggtttcacggaaaatcccccttcggggggcgggttttatgaaaaaacgggggcacctgggggtttaaggggaaaccccttgggtttggggtaaaaatttggggggggcc

SEQ ID NO: 364464 - DNA, 203 bp, Zea mays
aaaacaaacggcacctaactctttgatttgctgtggtcgttgcaagacagccacacataaccagactatcacttttttttataagatagcaagcctccaagcaccacaaaggagtggaatacaaattccatgatccagggacggtgaagtcaagcaaccacactccaaagccttcttgttactcggagccatcccctgaatgc

SEQ ID NO: 364465 - DNA, 190 bp, Zea mays
caagaagatggttttaaccgggttcaaaaaaaaggtggtttttcaacaagcagcgggggggccaaacgggaaccaaacctgtttttaacaaacgggaaaaacccattttttccggttggggaaaaaaaacttgcccttttttcaaccccaaaacccccacgggggggatgacaatttaaccccccccgcc

SEQ ID NO: 364466 - DNA, 341 bp, Zea mays
agccgactaccgaaaacagaacttattaccattacatatatatattatatatggtcagaaaaggaaccacgacatatgcacactgattttactgagattgacaactttgctcttccatcagaccaccttatatgaagctagcacaatggaagaagacgcaagcgaaccacccacccacccgttatagggtggtatggatatgaaaaaggcccccaccatatcctgctttaaggaacctattcataattactaaaccagacttcgcagtcagggaactccctttttttgtgaacggagggcaacactaagcgattagaaaaaggtgaaacggaaggaggaaa

SEQ ID NO: 364467 - DNA, 237 bp, Zea mays
gggggggggctcaagacaacccgggctaacttttttttaccggaatcagggctcagggggactggatcttattactacagtttccactcgcatgacaggctcactttactgccacaggggccccttcctttaggaaccctcacagtccatgggcacgggggggttttccacccggttccggtacctgtgccccgccttgagggccaaaagggtgatggaaattatccaagggaagct

SEQ ID NO: 364468 - DNA, 355 bp, Zea mays
ttttggccgccctttttttttttttttttttttttttttttttttttttttttttttttttgacaaaaaaatggaaggggaattgatactataaaacgtaaaaaaaatatgcattttattgaatgtatagcctacaaagggagatccttgaaaggaagagtaataccaaggaatggattccgtatctggacaagagggagttagactttttttaaagagaaaatgatcatcaagcgacgttgaaaagataatgctattatacctcgggaggacggcttaaccctattccctaaagcaagacttagtacagttaatgaattagtaacgaataaaaggttgagtgggtgttgggggt

SEQ ID NO: 364469 - DNA, 226 bp, Zea mays
gaaagggcccccgccgagccttggaatatcaaaagaccttaaaattgcccgtacaaaagggtcacacaggaccgggccggaccggaatactttcattatgggagcacaggggacgactccctaccttaaccgttatttaaacaacaaggaattgggccattcaaacgaacaaagttcaaaccctcctttaaaacgggataaaaacacttggggcatgcatgcaaaa

SEQ ID NO: 364470 - DNA, 212 bp, Zea mays
ccaaaaaaacccctgtttttaggcccaaaaaaaatccctttccctagaggggttttgtgaaaaacgctcaaagctaagggccccccccagaattgggggaaattgaccccccgggaaaggggggccttggaaatcccatttagccccaacccccctttttaactggggcgggggtttttatgcccccaattccacaaaacatttttcatttg

SEQ ID NO: 364471 - DNA, 171 bp, Zea mays
ggggggccccaggagaactttttttacaaaaagccctttaaaaaaggggctcccgcagaggttcaaaagtcagaaccaaagtagggcaaagatccaacccaccatttttttttggggtatcccttgtacgggcctacagaatgcttgcccaggtacctccgggggcttttc

SEQ ID NO: 364472 - DNA, 301 bp, Zea mays
caattgaggtcattaatcccacactgcgcgaggggttaaatagcgctctcaaatgtaagggggcttccagcatctttgggggggtttccaaaaaatttgtccattgatagaacaaaaaatttcatcagcccgttttatgctaattttcgttttttttttttagcagaccaccgaattttttcagcagagactttttcttatactggtggggttgttaagtgggggatgccctgccactgttctcctaagtagagtgcaacccgttgctataaaaacctgaatcccccttgttggattccaa

SEQ ID NO: 364473 - DNA, 378 bp, Zea mays
gctcctgctcggccaggtccgcctgccgccgcgcctgcgcccgggcgtcgtcggccgccgccttctccgccatcgccagccgcagctgctcccgggcctcctccttcagcctcgccgccgcatgccggcgccgacgtctcgccgtcgccgccggcgaacccgatcgacagctgcagccgcatcgggtcggcgcccggctgcggaacatgtacagcaggcgaataatgcggcgaggcgcagcacctgacggcagctgcaggagctgcacctgcagccccctcgtagtagctggcggcgctgccgcgcggcggcatgagctggagctccaggttgtggatgcctccaggacgctcgtgcggcgtcagaggcgacagagcc

SEQ ID NO: 364474 - DNA, 134 bp, Zea mays
ggggaaacgaaaaaaaaaccctcctcatgataatgtttctgggttttagttcctcaaacccaaagggtttaggtcttggcatttgacaaactaaaactcaaaaccccttctcatgataatgtttccggccccgg

SEQ ID NO: 364475 - DNA, 351 bp, Zea mays
aaccccacttataggggccccattaccaaaaaactggaaatgtccaacccatccggcaataaatcccaccgtttcccttgcccctttgtgggagcacatttcaaaccatttttcggatccaagacagacaatatcccctttttcaaaaccatggggggggaccgcctccagttggttgaagcaaacaatgctttcacaaaggcccccacccgaaaaagatcccccataaagaattgggtgataaaacctccagaaaaatacccaaccccccccttgcagggacagaaaaaacaactttttcgacaagatggactgtaccaatagctgttggtggggttgcaagttggaaaa

SEQ ID NO: 364476 - DNA, 335 bp, Zea mays
ggaggaaaattttgggcaaaaaattaaaaagatttttccccggattggggggaccgttgtgggaggggacctccccccgggggctttgacctggaaggtggaaagggttttggccccccccaaaagaaaaaaaggttttggtaggaaaccccagttttaatctgggacccaaggttggcccccacctttttttgttccttaagcccaaaaaaattttggccagggtttaataaggttggcaccgttaaaaccctgtggggggggaaaaaaaggcaaagggggggggcctttttttttaaaccccgaaagggccggcttttttaaaggccttaaaa

SEQ ID NO: 364477 - DNA, 328 bp, Zea mays
gacggcccaaaagcatgcagaggcgagattcgccctcaatttttacaggactacctatcccgatgcgtggatatcatcatccatcacggaggcttcgccaataaggaccaaagtcgcatatcgggtctctcctcaaagacgacatggttatacacagaccaacgccgccggacacgctgaatgggcaggtaagtgcctaagacactctactgaccatgggcgagcgaacagctgaaaccgaagctttcgtaatcacctgcttgagcgaggaggggaaggtgatcttggcggactccgccggaggacccacaacggaaactggggcctt

SEQ ID NO: 364478 - DNA, 392 bp, Zea mays
caagaactgcctgggttcgacaaaattattagtgtcaataacaatttacatttacaagttttaagcatacacaggttatgaactgaggaagccaacaatcttccattattgatctgaactctgagtaatatcacaaaatttccaaaaaaaagttcggagatctacagaaattggcaactggtgctattccatttacagcagctgcagttctttcacgactgtgaactgcatctctacgggatgtttactaaatgctgctgcaccaatcattcttgtatgtcatgatgcttcagtaaacactgttattataaatttggaacggtgacactatttgaatggccttcttgacaataaagactgacagaagagtgacgacgacatctgaacaacct

SEQ ID NO: 364479 - DNA, 326 bp, Zea mays
gggggggttattaatgtctttttttttttttgttttttttttttttttttttttttttttttattttttaaagagaaacgagaaaactttttaaaatatttttacaaattcgaaatgttatggaatgtgggtaaacaaaaggggttttcttggttaagagacaatcctcaatggggaaccaaaaacttcgatatacttatataagaaggccgagcccaccggcacttagcaccatccacaacagaacaaacttataaccacaactaaatcgtcttgaacccgagagatcgacaacatcctccggttgagacgttccaccaagcacc

SEQ ID NO: 364480 - DNA, 378 bp, Zea mays
gcaggggaaataaattctttattacaaaatgattacatgttacaataattttacattattcaattatcagagtgattacaagagaaaattattcaaaagaattacaaatttgaaatgttataaaatatttgtaaatatgaagatacatgctagcttaagtgacaatcctcaataaagaagctaaagatgggatatacttatataagaaggccgagcccaccggcacttagcaccatccacaacagaacaaacttataaccacaactaaatcgcctcgaacccgagagatcgacaacaacctccggttgagacgttccaccaagcacccggcgggcgttacctttagaacttcgagctcttcgccctccaacaccggaa

SEQ ID NO: 364481 - DNA, 303 bp, Zea mays
gggggggggccaaagacaacccgggctaacttttttttacagaaataaagggtcagggggactggattttattactacaggttccactcgcatgacaggctcacttcactggcacaggggcccctccgtctaggaaccggcgcagtccatgggcacgggggggttttccacccggttccgggacctgggcgccgccttgatggccatcagggggtcgcaaatgatccacgggaagctccaaaaccgcttttccccgcggaggtccgggtggtaggtcacggggtaccacgccgacgccaccct

SEQ ID NO: 364482 - DNA, 393 bp, Zea mays
tagacatgtcgggtgagctgggtggtctttatgataataaagctgatggttttgtgtgctgggtgggagatcgcacggggaattgtgagtaggagagcgagtgttaccacgcttagaagccggactgcgtgccggggatggactggttctcgttctaggctacatgaccggagctggtgcaaactgaacggacattatcgtatggaggcgtgctgcacactacaccgtgctacggtggcggcggaggctacgttccaacgccgtcgtatggtgggacgctgtctttcccgtaccacggcggctacggctccggctcctctacgacgtcgccctccaccggcggtggtgcgtacggtgggtctccgttcacccccggcggtggcgcgtacggtg

SEQ ID NO: 364483 - DNA, 455 bp, Zea mays
tgttctcgtgggctcggcgcttcgggccttcggcgcctccctttcctcttggctttcctccctcccccacacagagtgacagcgcgcaccaaaccaaatcccatcgggagataacaaaaccaggccaacggattcttttggctgcggtggcgttgccggtgccggtgctgcagcagctgctgttggtgccctgtcgctgtgccgccgccgaggtcggctcgcgtgtccggcggcctaaaccctagccggcgctggagccgctgaggcgggcgccctgcagcacccctcgtctgtctcggccaggtgcgcgcccggccgcgccgctcgaatcgccggattcgagcttcggcgcgacgtggaacgggccggcgccgcggaggtgagtgtgttagcagtggagcagctgctgcggcgctctgacgcgtggtgggggacgccgggactgcgtgtgagtc

SEQ ID NO: 364484 - DNA, 502 bp, Zea mays
  unsure (1)..(502): unsure at all n locations
cccattcgtccgatcctctgctaccttccctctccttctctgtcgccgcttccgcggttgcgtctggccccggcgccgtctgcttcccttgctcgccccgtcgccgctcctcgctctctctttactccaactgctcccactcgctccccaaccacctcccacctctgtctccactccatctccacacgtggccgcgctgaaagcggcggtgcgtgcccgggcagccaagcaccagcgccgcgccatggctccgtgaattcgctcgcccgccgcgatcaagccagggttgatagttactcagttgcgggtttggcgcgagctcggtgccaccgcttagacttggccatgacgaggcactgtgctgaggcggcggcggcgacggcgccgagcctcctccgagtcctccttgccttgcactgcggngtgctgttcctgcaatgctcggcagcatctgccatgggcggcgacgtgtcngcgctcatggcattcaagcgcgccatca

SEQ ID NO: 364485 - DNA, 498 bp, Zea mays
agattttaaagcacttaaccaaattgttcaggatgatgtatttttagaatttgagtttagacaatacatatttgcttgccaggctaagttattgtttaaattgtctcgcccaattgaggttgctgccagaggatatgcttttgttgttggcttttccaagacactagccttgcacgaaaatgctctaccattttgcttccgtgaagtatgggtgataactgcatgcttgggtttgataaagtctacaagtttgcattatgatgatggatctgttgctattgactcagagaaagagttctatcgccttcagggtgatctttattccctctgtcgtgttaagtttatgaggcttgcttacttgattggttatggggctgagatagaaaagagtccagtcaacagtgcatctctaagcatgctaccatggccaaagccagctacatggcctttaatccctcctgattcgtcagcagaaataatggaaaaagagcagatggt

SEQ ID NO: 364486 - DNA, 371 bp, Zea mays
ggtttacccacgcccgatcctgctcccggacaatgatcgccgtcgccgtcgcggcaggcgcggccaccgccttcccgttcgtctccaccgcctaccgccgcccgcgcctccagcagccctgtccgcgccgcgccgtggccgtcctcccggcccgcgccaccggcggtgcctcgtcctgggaggagcgcgaggaggcgcggtggctccgcgaggagcagcgctggctgcgggaggagcagcggtggctccgcgaggagtcgcgctggcgcgccgagcgcgaggccctcctcgccgaggtggccgcgctgcggctccgtctccgcgcgctcgagggcgctcgccctgaccaccttgcggtcgccgtcgacgcc

SEQ ID NO: 364487 - DNA, 415 bp, Zea mays
ctttcgcgtccggatatatctaaggaataactttggtaatgtgagcttggtctgttgctgtgtaaaagttggagaaaaggttggctaaagttggactgtcaggctggacacaactgaattttttttattcagttctgtgaactgaattgcagcagtatgcctagtttggaattcatttgtgactgattcatggagttttggattaagggttccatagcaaagttgtagaccatagtaaagtgaacaagtttactaaagtgagatggacctggttccacataaatttgggagtaaaagtggccaaaagtttgactgtcatgtggttggtgacttagtctattcagaactgaaagtctgaaatcagtaattttagtgcagttctggagctgtgtagtgcctgttctaggtggttttg

SEQ ID NO: 364488 - DNA, 539 bp, Zea mays
gcgccacatctactcgggcgcgcgcgcggcccaccgctccgtcgctgtccgcccgccgccatgcgagggatcctctcctcttcctccgctctcctccggcgagccggcgcccagctctcgcgcacggactgcagtagcccctcagcgtccgcgacctctcctctccgccgctcccctcttcaggtatgatgaccgcgtatctcgctgccgctccctcggatcgcgggctcgtggcttgttgccgtgtgctagggactgtaacttccttttgcaatagaggattttcagtcggactggtaagtcctctttgctagttaatgttgctaaactgcccttgacctttgttgggttagattggctgaaacagctgatatctgcaacggtttgaccatgagcgtacaagttctgctttgctggctcctgctcatgtgcacaagctactaaaacatagaagagtgagattcggagaaatatgcattatgggctgtaatgctgtacaatagtgctattcccacgtcagccttttcccactaggggag

SEQ ID NO: 364489 - DNA, 334 bp, Zea mays
actgttcatccactatacaactcgaagttactaccgggagcttgttttaccagtacaagagagtgtgcggatggcgccaccagagccctcggacgtggctctggttctcctgggagacgccggcgcgctggcactgacgcacacggacctgactgcacgacaactgccagatgaacatcagggtgaccgtgcagaacctgagaccgcatgacacgacggtcacgctggagcacatgggcaacatgccgcccgtggtgtgggtgacctacacgctggaccggggctaccacgccgaggtgctcgtgggctggaggaccaagcgcctgcgcgcgcc

SEQ ID NO: 364490 - DNA, 538 bp, Zea mays
gcgggattttgaatacggggtcacttacataggattgataacgatgttatacatgaataaatatatgcatagagatcctacaatataaatgcacatgtatacacatatgttattgagtactcggatggtatttgatcttttcaaaaacaaaaacgggtgaaggttgttgtgctttaatagtctagatgtgcttttaaccctctttttatacaattgtggcattgctgatctaagtttgttacttcatccttatggcttagattctaattatccaacaatatcaatttatatgatctgaattccatactgatgtttgccataaataaactacttacattccaaaatataggttgtttttagttttttttagaaatgtatatcgtgtataataaaggattaacatgtatcaagatgcatatagcagccaacagacttctacatctgatactgaagaacatagatccaaatgtaatgctaaagaagaaatcacaaaggaccaaacaactagcactaggcaactcaaagcaaaagataatat

SEQ ID NO: 364491 - DNA, 388 bp, Zea mays
gccatgtcgtccgccaacgcgtccgcgaagccaatctacgtctcagttgggcatcgcatctcacttgattcagccacggcgatagtgaaatcttgctgtagataccgtgttcctgagcctacaaggcaggcggatataagatcaaaggtcttcctgcagaagctccaaaagccacggcagtgacaggacttcctttttgttttttttcctcaagtatgttacaaactgggatcctgaccgtcttgcttgctgtagtcgagttttcagaaacaaatatgtaacatgatagaattgtcacttgcgaggttgccgcaccgtagtttgtaaaacagaccgatgatttctctgaatttgtaaaacatcaccaggcaaatagccgacagcagtt

SEQ ID NO: 364492 - DNA, 426 bp, Zea mays
aggccggcgtttgtgggtatttctattgaagactatgagaaggaagtttagcaatatactggtgacgaatcatggtcatccaagggtgtgaactttgtggaagataacgagaatgtggatccagaagatgtgatcaacttacaaggtgttattaatgatgacaggtgtgtggaggcacaataggagggcatggaggttgatgtattaggtgtcaatgccatgcatgctggagatgaggggaatgttggggatcaatgcaccagggttcagctgagagctatcatgcaggataatgtttttgaattacaagagttggaggactcggatagtgccattatggaaaagtgtgtgaactttgctgacactgctgttgaagatcacagagaggtatggtgctttctgcaagtgacgaatcaagagaaaccg

SEQ ID NO: 364493 - DNA, 169 bp, Zea mays
cgcgtcctcgccggcggatggctcgcacgtaactaggaggagcaggtacttcaccaagttggccaccggggccgctcgacgtcgaataagtgggcagaggacagccatggcgctcacaaaggaccaggtgtctcggcgcctgcagaggactacgatggatgggacgacc

SEQ ID NO: 364494 - DNA, 458 bp, Zea mays
gtccgcctttcgtccgcaccaggtggcttcgagccccgagagcccatcggcggtgacgtcgttgttgtcaagtgaggctagcactagcactgctgcttcagagcactctgagttggtcgattctatcaagtcagcgtttgggaagcttgaaggtcaaaatcattgttggttcaacatcatgaatgacacttggatgaacttgaaccatgaaggaatatatcttcttcttttgtatcaatcttgtggaacattgaacaacgacggcaaacatctaattgcttttgagagcttgaaacatctgcaacagaggtatccacgcctgaatgtttttgctttgcaacatgggagtgatgttagttctttagcttctcaaagccaagctttccgcacaatagtgaaggagtacatcacatttcctatcttgatctcagacaaaaacttctccaatatgacaaatg

SEQ ID NO: 364495 - DNA, 322 bp, Zea mays
ccacgcgttctatcttgcgtccactaagcctcactcaagaatacgggcttttttgtgcgggtcatgatggtgactgtcgcaactgacgtcttgcgctgcaagtgcacactttctgtatgggcacgcaagttgagaaccccatgccctgccatggcttgtgctgtctgtcccggatagagataattacgactggcatctacctcggagttcagtgatgtaaatatgggtgacaccctactattgcatgagatgtccgaatccacacgtgcatgcaggataggatctcccagcaaggaggatgacgcagcactgacattgacca

SEQ ID NO: 364496 - DNA, 313 bp, Zea mays
gtttcttgcaccagactgctcgttccataggcccgggccgcgttggatgctcggccaaaatcgttcgaatatggcacggtgcgctgatacagatacctggtgcagcggagccgtgctcagatgggcgagttcttgcacgcatgttgtgctcagcccacccggttgaggctgttggtgcatcctttgaaggatcaggggtataccgatactgtctggcgaccgatccaacttcgttgctgcgagaggtctagctctggtcggacgccatcctatcgtgaaggtgaataggccgacctgagatcgaataccgact

SEQ ID NO: 364497 - DNA, 355 bp, Zea mays
tccgggttacaccccacgcgtccggtgttcttgaccgacagcacggactagaacgggcgtccctgatttctgtgcttggaggacgcaggacaagacacacgatgagggctgcgaggcaccgcgttctgttggccagtgctaaggtcgacggattaatagacgctgacagcgcgcctggactccattttatcgtcggcgtgcacgaggtggaggctgacatcgacaccgtctacatttgtcggaaggtccagcacatgtggctgatgagaaatgacacgactcgaaaagcatgcgatctaagagctatgcaggatgacctgaaagtgctaccggacagggagggcaccgcatacgg

SEQ ID NO: 364498 - DNA, 350 bp, Zea mays
tcggttattttttgccccactattggaaggggatggtgaagcttttgattcccgggaataaagctgttccggacccgggggaggaggtagctgcgctatcgtcaaggctggctaggaggctactacatggatcatggcgccctcctcggtgccaggggatatgcttggatcagagcaggggtaggtgagggtgatggattgtccatgcatcgtctacagtttattcaagaccattgatatttgcgtcatctaagaggagctattctatatattagtccgcaacttgagctattttctggtcccaaaaatgatgaccacgtatagacaccttatggtgtcttggtctgttg

SEQ ID NO: 364499 - DNA, 204 bp, Zea mays
aaaaaaaaactttctctttttttttggaaaaaaaacggggcttgggctctactccccatataatggcgttccccctaggttactactactcggccagaccccccccatacgacgatcgccgcccggcgccggccttgcatgggaccttgtcggggacggggacccccgggcctggtgccattttgccaccccgaccgggcccaa

SEQ ID NO: 364500 - DNA, 376 bp, Zea mays
gcttttgcgagttgttcgttgttgtttagatccaccgcccgcagtggttgctgttcactccatgatcatcaacatatctgctcgtcgtaccgtgccgtgattcgggttgtttatcgatcttgccggctggcagacgcggcgccgtgcaagcagtggaggactggaccaagtgtacttgggacctgtcgtggtggcaaaatggcagcaggaccgggggtcaccgtctccgacaaggtcacatgcaaggccggcgacgggcggcgatcgtcgtatcgggtgggtctgtacgagtagtagtaaactagtggtaacgccatgatatggggagtagagctcgagctccgtttttttaacatgaaaagagagaaagttttta

SEQ ID NO: 364501 - DNA, 406 bp, Zea mays
ttgttgcgtgggcggtcgcatgggcggacgcgggggttccgatttagattaccccggacctccgtgtcgggaatccaattcggggccatccaacgcctgagatcggatgccaacccccatgtcggaccgatcgatgtccgcagaccgatcggctttggtggattttatttaccgagcgatttttctggaggctcagatcggctccgtctgagtttagttgatcgcggagcgatgctaatcgaggagcttccgagcgatccgggtggaggacgaggtgagggcggggaggatgagctgctactgctcccgtacgaggatggcgactccgccgacggccagagtggagtggtgacgctgatggacgatgactcgtagcgcgcagcggcgggtgctagcactctgttgc

SEQ ID NO: 364502 - DNA, 459 bp, Zea mays
  unsure (1)..(459): unsure at all n locations
tccgcttctttaggggttcccggtccgttccccttgggccgcatcagatcttcgcggcggagtttcgtaccgtatttgtctttgcaacattcgagttgattattttggaggagtcgctctctaaggttgattgagcgctgttgttttttttgtgcgacgacngtggtgtgttgattggatgttgaaagaattgtagctgtttgaggcggcaaccaagggccgcggaagcatctgtgtcgagccatggataggggatcttcaccaacgatggctccttcatggagaggttcaagcagatgcagcaggaggcgcatgagaagaaggccgctgctgcctctgcctcatcggctcccaagcatgcgaaccccaacaggggtttgctgttgcggcaaacaagaggccattcgagctgaagaacgctgctccggtagcctcagctggtaagctggcctttagtct

SEQ ID NO: 364503 - DNA, 321 bp, Zea mays
gaagttctccatggcccccccgggatcctcgttaccatccccattaggccataccctccccgtacacacagatcttggaagaggccgccaccccgaccccgttcttggccccatcaccctgcccacgcgatgctcgcctaccccacacaatgcacaccttccttgcctcggtggcaagcttgccgacttccaggcagatgcgggagatggacttggcggccctctccaccttgccggcgcgccggtgctcgaggaggcgcttggtctgcgcggagggctcctgaagcagcaccatcttggagcggtgctccccctccgccc

SEQ ID NO: 364504 - DNA, 128 bp, Zea mays
gtattgtgtgagctacctcttcgcttcgaaggcatggtcaggatttttaaggacgctgtccatgaatatcgatatgggcacggggaggctgctggaagttgtggatttcatgctaatggtggacagaa

SEQ ID NO: 364505 - DNA, 187 bp, Zea mays
gccatgcgtcaggtacctcttcgctacgaaggcatggtcaggattgttaaggccgctgtccatgaataccgatatgggcgcggggaggcagctggaagtcgtcgctggcaggctcatgatggacagaagcagagttctacatgtcacgatagggactgtgcttggctcggtgtacctcaagctgact

SEQ ID NO: 364506 - DNA, 184 bp, Zea mays
gggaacaaagtcttcccatcggtccattataagctgatcaaataagctacatcgaagttatgccccatccgatcatttgcccacaagacccaaatggggcattgaagcattctcatgggcataaactgctactcggttcatgggggtaacatcataaaaacagttttggggacaattccgtttt

SEQ ID NO: 364507 - DNA, 517 bp, Zea mays
tccgccactctttccgattgcttgctgtttccttggattgtaagagatgcttataacgaagctgtcccaattagacggcacactgagcttgcacagtcaggtacatgatcccttgtcactgtaccagtttctgtgcttctctctcatgaaaacaactgttgggattatttgtttctgaagatcagtgcatttattagttctctcatgaaacacaacactatgatttaaatgctcacattttgattactgtgtaaacaatgggacatacaagatttttttaggtttttgtagctcattattatagtatgtgttattaatatgatgtagcaggcaacatagtatcctgcgattcctaattagttgatgcctaagggtttttgtagcttatgcaactaagaaaacttcttcaggctagaaaaaaactttgaagtgtgggacatggtgcttagaaaggtggcaggcatcgaatctacattgatgtagtccatggtgtaggatttttagatggcaaacacat

SEQ ID NO: 364508 - DNA, 108 bp, Zea mays
ccctctctttcgtcagctcgtgggaacaccggttagcacactattgttctgtccgttctacatggattccactattctctggggctggaagcccagcctcatgatctc

SEQ ID NO: 364509 - DNA, 127 bp, Zea mays
gttattcgtgagctaccacgtcgctacgcaggcaaggtcaatatttttaaggacgcagtccaagaataccgatatgggcgcggggaggcagctcgaagtcggcgatggcaggctaatgatggacaga

SEQ ID NO: 364510 - DNA, 127 bp, Zea mays
gtcatgcgtgaggtacctcgtggctccgctggcctggtcaggattgttcaggccgctgtccatgaactcccatatgggctcggggaggccgatcgaagttgtggctttcaagctcatgatggacaga

SEQ ID NO: 364511 - DNA, 216 bp, Zea mays
gttattcgtgcggtaccgcttggctccgctggtaaggtcacgattttttaagccgctgtccaggacctcccatatgggcacgggtaggccgatcgaagttgtggatggcaggcaaatgatggacagaagaagatttctatatctgtggatagggaccgtgctatgatcggacaaactggagctgactggctcagtggggcgagccacgtcactgat

SEQ ID NO: 364512 - DNA, 347 bp, Zea mays
aggagggcaacaatcggaacaatatcctgggggttactccaaaaacaatgggatttttactacaattatttcgaacctaccggagcaatcacaaaacttccagaacaaaatttcaatgctcggggggaaaaagaattaaatgggtgggtgtaaagcatataaacttgccacctcataatatccgcctcctttttttggcttgatcaaccaagcattcaattttttagccttttgagggtggtctgcgaccaaggatcagcccagtcccagagcccctttttgggcagcttccgtttaggaaagaatgatgccccaatttgatacagatgggaagaattgggttcccc

SEQ ID NO: 364513 - DNA, 296 bp, Zea mays
cccactctttcgacagctcgcagggacagcggatcgcaagagattcttataacaatgttgaatgaattccacggtccattgggcatggacgagcgaggccatgacctcttgacactgtagcacgacgctgacgtcgtctctcctgataacaagcggggcactcatcccggtggaacagatagcgcatgtagatcttctgatcatgaaacacaaacccggacgcgctggggtggcccgacgaccgctgcgcgagcgctgggacatacatgatctgcgaccgcaccgggcgcgtatac

SEQ ID NO: 364514 - DNA, 107 bp, Zea mays
cccactctttcgacacctcgtgggtacaccggtaagcacacgattgttctctccgatctccatggattacactattcgttaggggaggacgatcgggctcatgatct

SEQ ID NO: 364515 - DNA, 252 bp, Zea mays
gctatgtgtgagctaccgcctggctccgctggcaaggtcacgatttttaaggccgctgtccaggacttccgatatgggcgcggggaggccgatcgaagtcgtcgattgcaggcacatgatggacagaagaagagctctaccagctcacgattgggactgtgctcggaacggagagcctgaagctgactggctccgtgaggcgggccacgtcagtgatgtagaccgtggtggagctgccgatccaggccaccg

SEQ ID NO: 364516 - DNA, 128 bp, Zea mays
gtcttgtgtaagctaccacgtggctacgcacgcctggtcactattgttcacgccgctgtgcaagacttccattatgggctcggggaggccgctcgatgttggggcttgcaggcttatgatggatggaa

SEQ ID NO: 364517 - DNA, 195 bp, Zea mays
tccgggacttgtgggtgccccacagaacaaagggcctaagccaccccagtttcaaagggcggccaataacaacctccggccggaccacctggaccaccacaaaggcggaaggaaggggctccgcgctgacgacctgaattcagactggagacgccgtagaccgcgatacagctactactacggaggaggcgaggg

SEQ ID NO: 364518 - DNA, 135 bp, Zea mays
cccggtccgggctatctttcgagcctccttgcgtacgcgggcaaaaacaggattgttagctccgatcaggagggactcctaaacgattaaggagaagccgaccgcactgatcgctcggaggcagaggagaggggg

SEQ ID NO: 364519 - DNA, 130 bp, Zea mays
tcgggcaattgttagggaccgccttggttcgaagggtaagataaggatttttagggcggatctccaggacttccataatgggttagggaaggccgccggacctcatcgatgggaggcacatgggggacgg

SEQ ID NO: 364520 - DNA, 254 bp, Zea mays
gttatgtgtgcggtaccgcttggcttcgctggcaaggtcacgattgtttaggccgctgtccatgacctcccttatgggctcggggaggccgatcgaagttgtcgattgcaggctcatgatggacagaagaagagttctaccagctcaggatagggactgtgctaggatcggacaaactgaagctgactggctccgtggggcgggacacgtcagtgatgtagatcgtggtggtgctgtcgacccagctcactggg

SEQ ID NO: 364521 - DNA, 128 bp, Zea mays
gttatgtgtaagggactacctggcttcgcaggcctggtcaggattgttcaggccgctctgcatgacttccatcatgggctcggggaggcggatcgatgttggagcttgcacgctcatgatggatgcaa

SEQ ID NO: 364522 - DNA, 289 bp, Zea mays
ggggcaataacctttaccttttttcagctcctgaaacgggattttaatacaaacaaacgcagggtaaaagcttaccacagtgggaataatttactatagaacgggacaatgcaatggcacatactaaattccgattcctggataaaaacccaacttgttttcaacagttaaaggttggtcagggacaaagtccacccttaaaacagggccggcagtttttaccccttgattcgcaggtgatgaagacttataaacaattttccaaatttacggttttgcagtccatact

SEQ ID NO: 364523 - DNA, 369 bp, Zea mays
aagaagcaatcaaattacatttgattaaattagataattaaactacatatgcaacaatatgaatgggttcatattacagtggcagctgttgccgagagcaacaggcacatcgcatatagcaagatcaaaagcagccgtgggggtagacgggcagatcaacccaatcgaacacagcaatgcacaactttgacaccaccaatcaatcgcctgatccaccccatcgttcgcggacgattcacgagcagatcgggcagcggacgaggccgttctcgttgcactcgccgcacttgaccgtctccttgcggtcggcgtcgagcaccttgcggctgccgttgcagtcgcggcacatgacgaagcgcaccccggggc

SEQ ID NO: 364524 - DNA, 376 bp, Zea mays
tttttccggccttccaaaaggttttccccgggcagggcgcggatcgtccgcaagcccagcgccgccgccgtcgtgaccaccggcggcggcggtggcggcatgtcgtcgtcgcggcgcagcctgagcccgctgttcgacccggagctgctggcgtccatcgagcgcgagctctcggaggaaggcgcccacgtcaagcggatggtagggtcggagaagcccaagcacccgaaggcggcgccgtcggcgatcgtggcagaggggaagtgtccgtctgggggcgctgacgccgtcgttctgtacaccaccacacttcgtggcatgcgcaggaccttcgaggagtgcaacgccgtgcgcgcggccacgagcgcgcacaatc

SEQ ID NO: 364525 - DNA, 394 bp, Zea mays
gtcctttcaccacaaggctcccgctgggcctatgccgtggcagttaatcccagccctgatgggatcgggccgcctgcaacaatcgactgagctgagagcccagccacatacccatgccgcactgtgaacccgtcatgggactggccggccaaacgagaagccagcggatcctcgcatggcaatcaacagggcagcgcgctgcatcaggtgcacgggttatggacacaacatggcagcctgcacagctcctatcaccagggccagcacagtgggatcaactcatcaaatcaggggcccagcgtgcatcaaggtggagagatgaacgggtgatcctctgcaatgctagggacgatggctctgctgatagtctgtgatacatgctagggatgatctt

SEQ ID NO: 364526 - DNA, 215 bp, Zea mays
ggggaggataaaacatcaatacatggcgacaaatgtcacaatgatgtataaatccatagcccaatgagattcaaatattctatgtgacacggactaaactttagtctctggaactaaacatcccttatctatgattaataccacatctcttcacgattgaaacgaatagctagatcaagggttgggctgctaccaacagactggccatacagaac

SEQ ID NO: 364527 - DNA, 460 bp, Zea mays
tccggtctggaagtgggtctctctctggattggttgttgctatgtcactctgaaacgttgagaggatctccccgctacttgctcctgtttatgggataataagttgtggttcaactgagaaaactatactgtgtggtggcaccagtcaccaggcacagttagatcccatggattatactatacctgatggagctattgttgctataagggatcttaatcaacatatgtatgtatcagtcaaaaacactggaagtacataccaagtgattggtgcataccattattgccttgctggtgaatacgcattgtttcaggtgaaacaccataagagctggagatccaacacacaatgtatttctcttttgtctctatgtgcaaagaacaatgaaggcaaatagttggcccttagtttttctcaaggatcagatttcggtgaaatctctactgatgttgacacgct

SEQ ID NO: 364528 - DNA, 501 bp, Zea mays
cacctgtctacctgtactgacctctcactctttcaggactctggttgcctaacgcttgctccccccaccttcgactcccagatcgcgccgcggatcctcctcgcgatcgcgtcctgaactcctgatggctaccaggtcggattcctgatccctcgatcctcaatcagtttcacggcttctcacttattgatggatgtcgtggagctcgatgcggcgaggcatggatgcaaggtctgcggaaaaagcttcctgtccggccggtcgctcggaggacatatgagatcgcacatctcgctcggcgaggcagcgctggaggttcacgccgacggcgagctgacgcctgtttcgtcgaatggtggccggggctgtgacggactggtcgcgtacgggctgtgggagaatcccaggaagactcggcgcctatccgactttgctgacgagaaggatgtcagtcatggcgtagagtgcgggaagtcccggcagtctttgttgggccacata

SEQ ID NO: 364529 - DNA, 508 bp, Zea mays
aaattttgttagattatataatctaaatagattgtgatttttttcaaacaccgccttagataattatataatctagcttatagattatataagcaaatgttgatctgcttatggattattataatctaggtatctagattatataatccaactaataatcaatattgtttttttatctctttaacttattttaagctagattacataatctagagagtaaacaaacatgaccttaattctttggactgaaactttgtaactacctctctttgagttactgcagctcgccccgacaactgaggaatatttcaccatgtatgatgtgacactcaggtgtgccatttggttcacgaattgtaacgtaaatgacaacgataataattcacaatcaagtgacagcggaagtttaaatagattagcatagtttttagtatgatatctgattacagttagacttaaacaaacatgatttaacgttatatgttgtctatcccattacaattatgtg

SEQ ID NO: 364530 - DNA, 309 bp, Zea mays
ggggcaacgattttaattacccactttttaccctaccatgcatgcatacacttttttctttaaaaacgggataaccattggtggaaattcaccatttcagggttacaggagcgttgcgaaaaaaaaaaacacgggacgatttttttttttttttggtgacacaggatttaaaaacgggcgatcgatcggggggggaaaaacaaacgtttagttccaaatccaccagctgatttgggcggggttcttgtccttttccgggtggggggggggggcgtttccggaaaaaaaccggggggggggggggggggt

SEQ ID NO: 364531 - DNA, 433 bp, Zea mays
ctattacttagatattggaaaagagtttatttgggtgttgtttgtacatatttgtgggaaaagaactgagcgaaaacaacatcagcagccaactgatccatcacaggttttgaggcagctagtcagtaccgtgattaataagccgagtaaaattaaaaattatactagacaacaagagcatgagacgcctgccttttctatctacagcttccttttcaccgttccaccccgaccccctcctaacgaacacaagggtgtccatgaccacgagcacaacaaaatttgccggccgaagcagcagccgttaggtaaggtacgtcgtaattgttcttcacttagagcccgtaaccgcccctccatccccaggagctcacaccttcattccattaattagctccgagaaccaaaagaaccagcgaaagaaaaggaggac

SEQ ID NO: 364532 - DNA, 520 bp, Zea mays
tctcacgcgtccgcggacgcgtgggctgctgagatgactgatgtgaacccatgtgtatctcttactgtacgtcttctatcacttcagtcgaagacatccgtgcacattgaggaaatctacatatttgctgatcctgttgagcccaccgatgatgtttcagtaagaggtcctgtaaacatgggaggtagttctttgctggcaatgcttgttcctggccttatgcaaatgtctaaatcaaggaatttgaaaatcgatgacagttatttttctgacggatcaaggaatcaagaaagcagcaaatgtgaaagctttacacaggaagcagggccatgtagcacaaatgattcaaaacatacgtctgcaggaatagaaaatggaatgaactctacagtcggtgtttcagcatctgatgataaaagcagccaaggtgaattccatttcaaggacccagattctcttccactccctgtacaaacattagaaagtacacaagcgccttcagtgaagaaccagcatgaat

SEQ ID NO: 364533 - DNA, 380 bp, Zea mays
gatatcaaatctttaacatttaaactcttccgattgtcaggctaagcaacagtttatcgatatggggaggatgccatcgaagctaacaggaaacggtccagcagcacaaacatcatccgggaaaacatctttagggccatcaaaagctcgtctaactaaaaactctcttcccaattcgcaacacaaacaaatgttatttgaagtaaatttcgatcaactgattccactagacaatcgcatttgccgcgctggcaatcctaggccacagatcagcacactcctttccgatgggtccagtgatggcagagcctgcatcatggtcatgggaatgcgtatcaatacatcattttcaactgtagtgttagattataataaaagct

SEQ ID NO: 364534 - DNA, 370 bp, Zea mays
ttttttttttttttttttttttttttttttttttttttttttttttttgttttttttttttttttttttttttttttttttttttttttttttttttgaagaaaacaacccccacgaaagggggaaacctttgaaaagactcccaaaaagttgcccccccaaatattagcctggggccaaaaaaagaaacccccaaaatggccccccccaacccaacggggggggaccattatttgccccaacccaaaacccaaactttggggttttgggggatttccgttacacaggccaaaagtttttttaaaaatttggttgggggggaaccaaaaccaacggcactggggttggttatttggggggaagggggggg

SEQ ID NO: 364535 - DNA, 261 bp, Zea mays
tctttaccccacatggccacatccgcgatgcccacgcttttagcccgggaggcgcgccttttgagccgccgcaaacgatactatgacctcggcggcccccaccttctgggtgtccggcctcttgggctccttcttcaccatggccggcagtgtaacctaatgctaccgccatcatgtacgactgcggacccgttttcgaaattattgcaccaacccattattcaacctgtggggaattgctccagaagaggcaaacaaaaa

SEQ ID NO: 364536 - DNA, 434 bp, Zea mays
gacttgaactggaattagatgtatttgccaaataaatggtcactgttctttagtataatcatctttttgcatacaagaaacaactccctgtttgcacagattagctgaggcatgagggaagccattacaaatacttactatgccattcacacttatcataccggcacggtaaaaaaagatgccgaccctgtgtgacacatgttaaggaaacacgagctgaagtactttaggagctgaactaggacatcaagacaacagaaagagcctaaccggttgtgtagtttgcaataaggaacttgcttttgctggtttggtcctcgtgcaaatctaccacgtctttcaccttctcaactagctcctccagaccggtgactcctaagctctcatagtcaatgatcttcttataccgttgctcatataaactctcaaaatta

SEQ ID NO: 364537 - DNA, 502 bp, Zea mays
ctgttcttcatctggagtactgtggtgatggcagcgatttttgtcaaacaggagaatatgaaccagctgcagcccatggagctcctactgaatctgaaacacttgttgaagattccacaaagcagacagcagctgcaaccacgtttgaacatggaacggaatgctacggttatcatgagaatgggagtttagttaatgaaatttctgcaccaacccatttttcacctgttggtgatttgcagcatataggcaaacaaatgaaaggaagtgttagtggcaaaatggatatattgaagcaagatgctaattccagccaagatgttcctatgatccatgagattatgatcactcctaacaaacgagcaattgagaaagactctcgggttggtcaggcttcaaaaacaatttcgaagactgtcaaggtgacttctagtaatgtttctgatcacacatacgtttccaagggaccctgttcaggcgagcctagtgtgataaaccagat

SEQ ID NO: 364538 - DNA, 104 bp, Zea mays
tttatttcattctatattatatttcattctggactaatgttgagatctccatatgtatctacgtctaagcatttaaatttgtgtagctgcgacctaaatttttg

SEQ ID NO: 364539 - DNA, 486 bp, Zea mays
tgtttgcctgttctccactccagttcccagctccgcagttttaggacggaacggagggagatagggccaggggaagggacggagagccccgtctccaattcacaacactgccacggccggagccggaggaggaaggcgccagccgtagtccacaggcaacgcaagggaatgccactgttctagtctcgctctcgcagatctgctccgccgcgccctgttcaccgggaattctggagctgagggcgcaggttcgagcagaagctcggagcatggccatggccgagggggagaagcaccatgcccggtgccggtggtaggtagggctctctgatatcgcaggcctttcacgcggcccggcccaaaggcttcccgtccgtaccgtcggctagccgaggacggaaaccgagatcgggtgattgcttgactcgggagctgagccgaggtcgcaatggcgtcgtgggacaacctcggagagctctccacatc

SEQ ID NO: 364540 - DNA, 186 bp, Zea mays
caagaggagttttgggagcttgcttatacggttatacctttgactgtgtacagttgctgccatctatcaaaccggtgccaaattggctggcgaacagaaacaattactcactctgtcactcatgacatttgcacttcagagaatgcataacataggtgactttgcagaccagacgcattttattcc

SEQ ID NO: 364541 - DNA, 496 bp, Zea mays
  unsure (1)..(496): unsure at all n locations
cctactcgtccgattaaatagacataatatgtaatggtctactagttatatgtccgtgcattgcttcgtttatatatatatatatagtttatctattaagagccctgggctctatataactgtagagagccccagcccacgtccgatcactttttacgcaagcgaacagatttagcgtaaacggaaacccattttagcgtaaacagagtaacaaccgcgagccctacatgtttacgttattccattcttccgtttatacataatagtgatttagcataactacttcagccgacccacgttccagaaataaaggaatgggcccactaccccacttcccacgcggtcaaacacttctataccctaacccccgcgcggtcaaccatcctggccgactcgccgcgtttcttcagcggtcgcctgggcgattcttgttcatccgccgccgccagcccgtttcgtcgtccttcaccgncgnacgccctcaacattaatcgtc

SEQ ID NO: 364542 - DNA, 474 bp, Zea mays
gaagaagaagcgcgagaaatcggagccccaagagggtggcaagcgtaggaagcagcaggtgttagccgacgcggcgacgccatcgaagaagaggaagaagggcggcgaaggcccggaacccaaggaagccacgcccgcgaagaagcacaagccagccgggacgcccccgaagaagcagaaggcgcccagcaaacccgcgacgcctgctaagaagcagcagtcacccggcaaagcggagaagctcacgccgaagaagaagcagcagtcacccggcaaagcggagaagcccacgccgaagaagaagcagcagtcacccggcaaagcggagaagcccacgccgaagaagaagcagcagtcacccggcaaagcggagaaagccgcgccgaagaagcagcagcagcagccagccggcaaagcgcggaagcccgcggcggcggcgacctcgcccacgaagaagaagcaagccaagcgcga

SEQ ID NO: 364543 - DNA, 401 bp, Zea mays
actgttaatagacatttttgtaaaacaggtgctgttctcaacatcatggcctatcctacctacattccagctttgaactcccaaatggggggaggaagaagcacaagccacaccaacaggagctggctagccttaaaggcctatcagggagccaaacctggcacggctgctcttacccatacacaaaaaaggattcctgcaggtgaaaatactcagctctagccaccaaaaacacacacttgccaatgtgactccgggcatccttttttttaactgacctgtctacctttgactgaatcctacaggaggctcctcaggctccccgtcgtcggaagcatcccctttggaagggatggacatgaggaaaattgcattcgcctcatgagggccagagagagagc

SEQ ID NO: 364544 - DNA, 490 bp, Zea mays
ttttcgcgtccgcccacgcgtccgctcatctccggccagccgagcgaagcagctccaccacggaaccaccagccgccggtctgggatgtaaatcgcgcgcaccacttagttctcgagaaagaaaatatcctgccgcccctggatccgatttttgccgccgctcagcttcgaacaaatccatcgccgctcaactctgagcataaaaatcccacgcgcgctgccggagctcgctcttgcgcatccatggcgcgcacccctctccttcctccgtgctccactgcgccgagccctccccagccgcgccttccctgctcgaccgcgttcccccgcgcagcgtcgctctcggctcccagctcctgcacgtgtctctctgctcggatttagacaagtcgcgtcgctccctcagcttgccgcgtcgtcgcgttgctgctcgccctgcgcgctctgctcgcccatggagttgcccagcctctctgctcgccggttgaat

SEQ ID NO: 364545 - DNA, 379 bp, Zea mays
ttttttttttttttttttttttttttttttttttttttttttttttttttttttttttttttttttttttggggacccaaaaaaaaagagctttgcttccaacctttgcttttcaagcccagcaaagcttttgttttcgaaattttttttgcataaagggacagcattccacagggggggccaagctaaaaaccacatacctttatgtttgccctgggaaattttataattgaaaagggaaaccgttttttttcctgcaagggacagtatagctaaatccttatgccttttttcgacacaaaaggtcgggttttcggttgtataacctgaaccaaaagttttccaaaaaaaatttgtttacccatttccaagccggggg

SEQ ID NO: 364546 - DNA, 505 bp, Zea mays
tctcacgcgtccgactgctcttagctctgtttgatgtgtttacttcccttgccttcatcaagtgtcaaaatggtcaattgatgtgcttgtgttgacatctgctcctaacgaataagatcatactcttaggtctgccagtaagaactgcagactaactagctgatatcaaacagttactcttcttttcctaattaaaatatctgtagtttagacaggtttataccacacgatcattcttagctgtttttgcatcattcgcgctactaggttacatggtaacatactgcttcctgagaaaataaggttactgtctgagcacattacctgaccttcctatgccatgacatgcagtgtcacaccactttctggtttccacggttgccttgctggctttcttgtggccctgaagcaactcttaccaaaccttgagcttcctatgtgctttttctggaaaataaaggcaaagtggatgccattctttgttgtatgtttctcaagtatcatg

SEQ ID NO: 364547 - DNA, 436 bp, Zea mays
cctattcgtccgcgctctccttgatccgcaatggtctcccttatctgtcttctgcccacttgcctccatcttggcctccccctccactgcccacccccgaacatccggcgccgtccacacccttgcaccccgactccactcgtccttcgtggccacgatgggggcgtccatggcatacgcttaagggcgatcgatctgagagacagtgctggagcacgtggcgtcgcaccaccagcagcaactgacgcagaagctactcaagagcctcacctacaccggcagtgagatctcgttcactgtccggcgtacgggggacgaccccgtctacacgtacgttggggcacagaacgaggacatgccttttgagcacgtcttttaaatcattaggtaacttccagatctggctagccccttgacgtttaacttgatgcccagt

SEQ ID NO: 364548 - DNA, 281 bp, Zea mays
gatcaaaactgctgattttttaattgagggggtcctgactcggaaagggggatgaaaagtaagataccgggcgagaccaaactattaaaaaagatcaaagaccagcgtttcaatcctggatgctgccggaccaaattataccaatcactaacccggccactggcgccgacatggcttgttgggggaattgccatttggcaaagccttcttcaccatgtcatctcttcattcatcttctatggagcagagcaggcagtctctgatcaaacacacatgcaggg

SEQ ID NO: 364549 - DNA, 550 bp, Zea mays
  unsure (1)..(550): unsure at all n locations
caataaaccgtggtatcatcggagtattggaaactcaactttagcctaaagttttcatggtatgactatctttggcctaaatactgtatccaaacaatagcttatattcttggagttggccaaaactatggtattggtattgacaattacaaagtatagtaaaaccatggttttgagagaaacattgttactaaacaagccctgagagaagttcctcgcatccatgtgatgatctcttatgataaggttttatttcgctaatcttctcattttgaacaacttatgcatctgatattgaggaaatgtgattcccatgaacatttcttggaattattttcttcattctaaattgattaagtcattccgtatatttatctctttacttgctgatttctacttatcctacttgaccattgtgcagcgcaattgccgttattttttcctatttnngtgctcttcaagtctcctctgcatatatctgtttggtatatcggcccttgacatcaaagttctcatggatggagactatcctacangttggaaggcattg

SEQ ID NO: 364550 - DNA, 489 bp, Zea mays
  unsure (1)..(489): unsure at all n locations
agtcttcccttccttcccctaatcccctcctcgggcaaaccgcctcactctcctactcttctctccctagnccctacccggctctctccctcccccctctctctaaaaaaagtagcgcccggagaaccgagaggctggagaaataaaggcggaaagagggagggaaatctcactttgttggggattctttcctccgtttccgactcctttgttctcttaagtgttcttggttagtggaatggaagctcagcagccccatttatgcccccgagagcctcgtcgttcccctcgtgtgtaggtgtagcctttcactcggttggtggaagggcgaggcacagaagaacatcgataaagggtgtgtctattttttagctcttcgcgttcttgtaggaggaattcccgttcacatgatccgtgcctgcatcctcaagagcttgtccggagcctaggggttgtgttcagaccacaagtgaggtagacattcttgat

SEQ ID NO: 364551 - DNA, 228 bp, Zea mays
cggaccgcacggcccgacccaccccacccggtagatgccggcacgaggcccgcgcccgcgggcgggccggcgaagggcgacccagcacaggacacgccggggcacggccgcgagacaaagagcgagggcggcgccagcccaaggacgacccccaagagacgtcagacagcactataacccaggaaggacgcgcggggaaacggcaagggaacgggccacgaccggaag

SEQ ID NO: 364552 - DNA, 180 bp, Zea mays
gggggtaaaaaagcgaccgcccgaatttgcattaacaaggacattacatacacgattcctcctttggttttcaaaggtttccatgggatacatacacctttccaagatccatgacggggggcggacacctagcagttagacacttgaatcacttgagctgagcgtaccaaaccccctgga

SEQ ID NO: 364553 - DNA, 283 bp, Zea mays
ccccgcaggcacccgttccggaacaccctggacgttccacgcgcccggttttttccccgggccacacccacgaccaacgggcacaatggggccacaggcccgccgtttacacccgccgcgcgggaagacaggcaacggaccagcccgtgaggccgaccataaaaacaggcccgccggcggtgcaaccaagaccgggaggaggggccagaccgacgcaggaggggcggcggcgtggcctccgagtgcggcaaggccgcaaaccagcggcccgcactgggtacga

SEQ ID NO: 364554 - DNA, 358 bp, Zea mays
  unsure (1)..(358): unsure at all n locations
gtgatcacgcgcncgccngcgaccggccctcccactcggatacaaccacccaccagagccgaacccacgcggacggagccaccgccgaatgcgccgaccgccggcgagccccaccagcgccacgacacgcgcgaacgcggcaatcacggagtcacagacaccagcagagaagccagcacacgagacggacccgagcagaacctgcggggacagacgcaaacaaggggcgagtacatggcgcagaacatagaggcaaagagagacgaaatgggaaccaagaacgaggagcgcgagcagagcaacaacgatcagaaaactgagacgggcaccgagacgccggtcaagaaacccgatgagc

SEQ ID NO: 364555 - DNA, 249 bp, Zea mays
cgggccggaaccgccgggtcgtaccacgccgaataaacccgcccgccccagaggagcacccagcggagctcaacgcgggagggcacaccgcacaagccaacagggggcaaaatgcccgaaacaaacaaggacacggccgacgggccgaggccgaagacgccagtgcaggcggggcccccaccgcaggcaagggggcgcacgacggcgagagcaacaaggacaccaaacagggccagagagagagccccc

SEQ ID NO: 364556 - DNA, 202 bp, Zea mays
gtaaagccttttaattggactgctgcaactgtaatttataaacattggataaacagtagaaaccggttcgaattaaatctaagcgaacatagactaatagactcctttgttcatagtcagttatttattccgggaaattattagcatcttttttttttgaacgagcaccgaattccattccagcattgggaatgaccaaccg

SEQ ID NO: 364557 - DNA, 266 bp, Zea mays
  unsure (1)..(266): unsure at all n locations
accccgcggcaccgttccgaanacccgggccgtcccacacgcccgattataaccccccccccgaagcgaaccacccaggggggaactaacaggagggcgggagacccaacgcgcggaggngagcgaagcccgccccgcaccacgcgctggggccaagaaagcgagagaacggcgcccgaaccagaggacggggggggaaaagcccacccccgcgaggaagaacccgaagcgggaccacaagcgcccgcagcaagacccgacccccc

SEQ ID NO: 364558 - DNA, 445 bp, Zea mays
  unsure (1)..(445): unsure at all n locations
tcagagacgagctcgttatcgntagtctggcttgctgattgtagttacccacgtttggctattccttatgctcaccgttcttggtcacagaaggaggaaaccaatccaagatcaggcaaagacaggcctaactccaccgataagcttcttgtgctccattgcatagcagtgtcgttccacacggtgtctctcctctcatcgagaaatcgtctccaacgacgacaatggctacgccgagccacctcctgctcgtcgtcttcacggcgcttcttgcgttgctcccggggacgacgcagctccagccttcgcaggtgtggactctgatcaagatccagcagctcctgaacgcccccccgatgctcagccactggcgccgcagcaccgacttctgcggcggcggcggcggcgccatgggccccgcgggcttcgccgncgtcctgtgcta

SEQ ID NO: 364559 - DNA, 451 bp, Zea mays
ccccaagccccaggcgcgctttttgaacgagacgccacagcttttcggcgcagctcctcttcttggacgccgaaaccgggcaccgtcgtagcccctgtctccgctcgtctccgggaccctgcttggccctctccggcgaacctctgtgcccctgctccgccgccagttggacgccgcctgctccagatcgacgttgtccgactccgtcctttgtccgcctgctacagatcgacgacgcctgctccagatcaaatccggcctccgtcctatgtgcccctgccctgccgctcccagatcgacgccctaccgttccaggtcgagctgctgcttcagatcgacgcccaactgctccagaacgagctgcttgtcccagatcgacgcttagggaattagttcagagctttcttttgtggtaaatctgacattgtgactggaaatttttttgtcaaag

SEQ ID NO: 364560 - DNA, 278 bp, Zea mays
ggtagcgccaccccggccgtccttagcgcacggaccgccgcgccggcgcagggcgggttgttgtccggcagcacgggcaagtccaccacggcggcggcctcggccgacgcggccaccgacgcttctccgacgccgctgccccagagcgcggagggcgcgtacgcagtgtacagccacgcggcgagcgccgggcagcatcttaggcgcggcgggagcgtcacgccactcccgccggcattggcgctgcacgatgctaggacagcgggaaggagcggagg

SEQ ID NO: 364561 - DNA, 472 bp, Zea mays
  unsure (1)..(472): unsure at all n locations
tattcgnccngcaccngnccatgcaaaggggaaacttctgaaggagatcgctgttgtacatgaagctgactgggatccatcagagacagagatagaattgctcaaacctgatgaagatctattggtaaatatatatacggatttgtgactaacatggttagttcaatgattcaaatcttacttgatactatgttttcccttcttagaatggcccgacctacttcaacggctccacactacctcttcccaaggagaaacacgaggaaacagtagcggcaagtgctgccgagcggcctgacaaagactgcgagtcagataccggtcttgactcactggattttcctgaagtcccaaaagcagcaatacgtgcaccttctaacacaccattgaccccagatattggtccccatgctccgggctctcagccgctgcctcgtgagttttcagaccgtactaactgggaggagaatcc

SEQ ID NO: 364562 - DNA, 146 bp, Zea mays
gtcaggggaaaccaagctgaacgctttttctagtccggtaacatggacattaaccagactggccagaagaacgaacatcacctttggagcatggcgcatagagcaacagggaggagaaaacagagggcgcccaaacacaagcatgt

SEQ ID NO: 364563 - DNA, 206 bp, Zea mays
ggggaaaaagggggtttccccttaacttggataggctggggggaaaccccaggtttttttttcggggggtttataattaccaaaaacccccttcctgggttttggcacaacgggaaaactggcccagggggggtttgttacaaaaaccccctccctggattttgcaaccgggggaaaaccggcccaaggttgggggccccattttt

SEQ ID NO: 364564 - DNA, 522 bp, Zea mays
  unsure (1)..(522): unsure at all n locations
tcagccactctctccctctccactcttggtgtccgagtcccttggccgtacgctctgtctcactcctccgtttcttgcttctcctgccgccggcgtcggagagcgagcttctcggcgggcggcggcggcgcgcggcgccgggtgcggatcggccgcgggtgcatggtggaagccgccgccgggcgccggtcaggcaccagccgtcggcggcctagcggcagcggaggggagcaccagcgcctggttgcgctcgccgtcgccgcgcgcgtcgccatggtcagcacccggtctgcgggtccagcagtggcgggaggagatggagcgggagctgctggaacaggcgccggccccgctgccggtagaggacgatgcatggaggacttcttcgactgcctcctcggcttgctcggcgcgttaggcatgacatgggctacggcgcggccccagcggcagccgctcccgncgntgcctcgcggngttggggcggggcctgagccaaccgacgcccggcgtttcgcagcg

SEQ ID NO: 364565 - DNA, 378 bp, Zea mays
gtcccacccaacgtcccctttcttctccaggtcctcctcgaaggcgctggcgagattcctggccgacgccgcggaccgcgcgtcgacgtcggcgtcgaagtcggcgtggcggtggtggcgccggttattccaggacggctcccacgtcatcctcctgctgctcgatcacggcgacgcgattcgacgccgaccctccggccgatcaggcgcgcgctccgcttcgcccacctcctccgacggcggccacggcgcggcgcggcgcttgcggatcctggcggcggtggagactcccctggccagcccaccgcccagcggcggactcactcagcatgcggtcctggctgcaacatggatccggccaaccacgaactatgctct

SEQ ID NO: 364566 - DNA, 253 bp, Zea mays
gtcattctgacgccgacgaactcggccacgagacaggtgaaattataattacaagtaccagtcaagaaatagaacagccatggggagtatatgatggacttgatgcaacgtatggcatggaaacgttagagcaagaactaggggtggggagagatgctctggcggcgacaggcgctgcatgatcggacagcacacggggagggaggtcagtcatatgctaccacaggaagctgacccacacagcgagggagga

SEQ ID NO: 364567 - DNA, 261 bp, Zea mays
  unsure (1)..(261): unsure at all n locations
tggatagagcgcacgananccanagangactcgggcaagggattaganggaaagaacccggtcatgtcctcgcaaaattcaagtggttttgtttcagctgccagaactgttagcaagagtatcctggagctggaagctcgaacgcaactggttgtatctatatccgtgaatgccgaataaaggaggggcactgaacaaaaaaaaagaacaaccgaaaaagaaaaaaagacacaaacacgctaaagacaaaaaaacaaaatg

SEQ ID NO: 364568 - DNA, 347 bp, Zea mays
  unsure (1)..(347): unsure at all n locations
gacgtagacagcccccgngcncagcgcccggcgggggagccacttggagcggagcggcactcaagccgccggcgggccaggcaccgggaggcgaccaggcgaccgggcggaatgggggggcccaaacacaaccaagggcagacaggcagatgcaacatcaggcacgacggacaagacagagaacgacagcgccgagtcaccggaagagccagcagagccggagggacaagaagagagacggggaagaaaagatgcggaccggcacaagcagcaagcaaaaacaagaggcaaaagagaccgagcagagggcaccgagaggcgacaaggaagccaaccgagacaggacc

SEQ ID NO: 364569 - DNA, 219 bp, Zea mays
tcgtaaactttgttgaggcaatcctcttagtgcaagactcatgatcctttctactcaatcagatcagcagcgggagaaggaagaggttgggcaaatggtgcggaaagcggagcaacatgccgatggtgcatatccacggcgagggcaacttacggaggctgaagagcaacagctagaacaaagtgaaggacaagacggaggatgaccgcaggttgaagg

SEQ ID NO: 364570 - DNA, 254 bp, Zea mays
gtttgctcccaactatttcagaacctgaattttctatccaaggggaagatgtacatgattgctcagctgcaaaaggggaattagatctgctagaaggaactagaggaacctcattagaaactagtgagcctgaacatcccttggaagcatggagcccaccagaagatgaagatgtcatgcgtacgcctgtgcatgtgtcacggacatttgaaagttctctggagaagttcttaatgcatgacactcaggcatca

SEQ ID NO: 364571 - DNA, 143 bp, Zea mays
ggcccggaacgcctgggcttccacgcacgcgtttcgtttttagccgcaccgcgcagacaacgaacaacggctgcatggcgagcgcctgccccacctccatccccataggaaaggcgccctcagcacgcccgaccaagaagacc

SEQ ID NO: 364572 - DNA, 271 bp, Zea mays
  unsure (1)..(271): unsure at all n locations
tcagttactaccgcgagaacccggaggacanacgggcggttggttgggaccggtggtgtctgttgttaggggtgcattgcgtgtcgacacaagactcgagatatgatgccgcaagctgactgtattaaccagaattacaaggacagcgttcactgggaaaaaaaggcaaaaaagccaaaggacgcttaataacaggaaaatacgggccgccgctctaagggatgcaaagtaacctacccgtgcatgcgaactcatagccggattaaagggt

SEQ ID NO: 364573 - DNA, 508 bp, Zea mays
  unsure (1)..(508): unsure at all n locations
gcgccaccagtctgtcgtccttggcgggggacgctttcacgacgacggagaacctgggcagcggcaggctgcttggcggcggcgccagcacgtgcagcaggtcctcgacgaagttcctggccacctcctgctcgaggtcgtccagtgcctccgtcaccactggcgcgggcggcagaggcgtcgcccgctccagcggcttcttcttcttctgcgctgtagacctctccatcgccgccggcggcggccttgccgacctcctcctcctgtccctctgtcgcggcgcaggagcagctggtgctgctgccggaacggaaactgtagcggttgccgctgctgccctggccgcgcgtggcgccggcgggggtgggggttgagcagctgctggtagaccgggaaaagtgacgtactccantggcgtgggtgggagcggcaagagcggcggttggttggacggtaggagaggaacggatggcctcgcgtatggaataagcgcgggagcggacgccca

SEQ ID NO: 364574 - DNA, 438 bp, Zea mays
gtcgtgacgcgtgcgcggacgcgtgggcggacgcgtgggtgctgtttttgttcccaaggatgctaggatcgatcatgggagagggagatcgatcctagcatccgtgctgtttctcttcccaaggattgtgttagccttcctatcgcagatgtcttcacttctaactaatacgacttctcccaacgactttagctacgagttctcccttttagcgctttcctcacattcagcaatcaatatcgatcgaaaacctccttcttgaacaaaatagataagaggtctttgtcctacagatcaacgaaaacaagatggaaaacgttctcctggatcgatcatctagaagcctcgagtacccgagaagggcgccccttggtcgcagccggcgggggccagctggtggcgctaggccggcggtgccgggcggctcgcatagtagct

SEQ ID NO: 364575 - DNA, 320 bp, Zea mays
  unsure (1)..(320): unsure at all n locations
aaattnaggccaacaaaacaattattggctttgaccccgacgaaatattttttagtacaagcatgattctgttacagttcactgttctgccgtctgtatgagtgtatgactgtcatgctagtacggaaagcctagacaattcttagctgccgcttgcacttacagactccgcagactttgaaagcagagggcgataattagaatccctgtttttacgtgagccagtcagtagattagtgagattggctcccgccgactccagattcccagaagttctgatagatccattgcgctgctcgacctgctggagtatgttaacg

SEQ ID NO: 364576 - DNA, 237 bp, Zea mays
aagaattaaggaaaaccccccaaaatatttttggccccggcccccaaaaattttttgggggggatgaaaaggaacttaatatacaactgggggggaagggggggaaaactactgggggggggggaaagccccaaaaaattggacaatccaaactttccatttgaaaaaaaattggtttaaaacccaccttctaggtggaacttgggcagatacttggggggaaccactaggggggaa

SEQ ID NO: 364577 - DNA, 155 bp, Zea mays
cccgggaaacgctgtacttgtaattctgattaatacagggaacaaacggaaaaatatttcaaatcttgggtcgccaaacattacaaacctaaaaaaggagaaaagggttaccgcttccacctgaaagttatcagggttattgcaaaatcaggggc

SEQ ID NO: 364578 - DNA, 276 bp, Zea mays
tcgttactaagagaggacgcggttgacttacaagcggatgcggtgaccgctgccgccgctgctacgggtgcattgcgtgtcgacacaggactcgagatatgatgccgccacgcgactggataaagcagaatcaccagtgcatggtacactggctagtcatgctcaagacgccgaaggcatgctcatcaacggcaacttcgagacggcgccgcggaggatgaacaagaccctcatcgtggggcgccactcgctgccggggtggacggtgcacgggca

SEQ ID NO: 364579 - DNA, 379 bp, Zea mays
ttgctcgcacccaaggcagaacagaagggaagacagggacgcgacggcagaagcggcggcagagaggggggcggagcggcgggcggacgcgcggggggggcccagcgacaaccccagcgacggggacgggggcagggccatggccgacgccatcgccgacggacacgtcagcgctcagctccagccgatgaccgagccgcagacgcacccggatccggaccacgaccgcgatgtcacacaacctgtgagccaactggagagccgagggcaaagtgaaggagatcagggaggcgtgcggatgcggaaagctatccgcaacgattgcgacaacaatagcgtccaaaaaaacaccagaaaaaaagccgtaaaatacacccca

SEQ ID NO: 364580 - DNA, 214 bp, Zea mays
ggcagggaccgggccggtattcctttttcttcccacgcgttcgtgactaccgggcggacgcgagggctgagagtgtgtgagttagagaggatgacgggtggtacccgcagggctgctgcggggctggccccgggggccgcgcccctggccgcgcagatacaggcccacgcccggggcccttacacacagacgcgcccgctggtacactccgacc

SEQ ID NO: 364581 - DNA, 335 bp, Zea mays
aacacctcaggtaagtttttgtgaattcaacgagatttcaaccatcaaaacataacaaaaagaaactgcttcaaaacagaacgatttagatcatagctggtgctatacagcaaatcttattcaaatcaaccagtgttgccttagtaagcagtgacgccagaatttgtaagatcaacggtgcccattcctggattttcctcctcttcactggccacgtcaccatcgacctttgggttttgttccattagggaatcaatctggtcgaggaatagcttgtcttcccgctcgctaacagctcttggggggtccttcactactaactttcctttggattt

SEQ ID NO: 364582 - DNA, 328 bp, Zea mays
gtccaatgaaacgtaaaaatgtttgacccgtgagcaacatcccaacacagtatgtacaagccaaatgagctgggttttgctcacaaaactcggttttccctaagcattttatatggttcaccacgatggttaacagagccgttttacagagagggcggcagaccgctaataaactgaatacgggcgcccactgagatgtaccattcacttaaagcgagggtgggtggcctctattgaaaactctgcaaatgacgttcgggttacatccaaatacagaatccgagctgttaacacgcccaaggaaaaggggccaccttgggatcatgat

SEQ ID NO: 364583 - DNA, 227 bp, Zea mays
  unsure (1)..(227): unsure at all n locations
gaccggccggattccggttcgcccacgcgtcgtagccacggagacgacagagnaccgacgcgaagaggagaacagacgccagcaaacacagaacgatgaagctgaggggctcagcgaaccggcagtcaggtggtcgaaaccaacagttgaagagaggccaagccgaggaagagctgagggagctgcaaacctggtgcgcaccggaagacgggccgaagaagaggccc

SEQ ID NO: 364584 - DNA, 389 bp, Zea mays
  unsure (1)..(389): unsure at all n locations
ttcctaacaccccgccgngcgcgcgcgcccccgcggcgacaaccgggcgaccgccgccgacctacgccaggagccaagccgttcctcagacccatcacgaggccggcaacgaaccctgcgccggcgacgagaaagagctggaactgacggagatcagggatgagccgcgctgcattttgcacaccatatacagccagagaacccgcagcctggggcgccccaaagatgaagactgcgattccctcgatattacgcacgtacaacgtggtctaccggaactagaaaaggaaggtgacgaaaaggaagaccaggtcagtgcatgggtggagaaacacccaaacccgagaagccagaactgtcgctcccgtttcgacgagaaacacagacac

SEQ ID NO: 364585 - DNA, 369 bp, Zea mays
tgcagggaccggaccggtattcctttttcttcccacgcgttcgatgatcttcctccctttcctgccgcaccacgcaatcaccgttgcggaggcggctgccggccttcacttgggcgtgctcgggcacctggtgactcggtcgggttccctggcgactctcgagatttggtacccgctggcgctgcccaacacagttgactaggagtagccccactccttggtggccgttgtagtctcactgatcatcgggcggaacaatgccggcagggttaccccctggttgctgacgctcatcatgtaagggaagatcactgtgacctacaacctgctgacgatgcccagccggggaccccatgggccgtgcaagtt

SEQ ID NO: 364586 - DNA, 299 bp, Zea mays
agaagcaagcatattgcaagttatttgcgtaccgacacaggacctaaaaccagcaaatatagctttggcacatgcatgggcagcaggccagcctaatgaatagtgttattggcaacacagtaaggctaccatatcaacactaaccaactgatcctttttttgtacacatgggatggtgacccgtacaagcaaacgcaatgttcccgactctgtcttgtccacaagaaatattaattcctttggtgctccaacatcacctttttttttccccccacgaacacagccaacattatttgctt

SEQ ID NO: 364587 - DNA, 471 bp, Zea mays
  unsure (1)..(471): unsure at all n locations
cggcaccggcccggaatgccctggtcgtatctacgcgcccgctgattcttgggcagacgcgngggagcgaggagccggcgttgcttcctagctgcacctgcgcccgggcgggcgaagaagaccccgacgatgaaggtgtcggggctggcgctgcggacggcggcgggggcgctgttgctggtggcgcaggcgccgtcagcggcggaggcctcccaccacggcggcgcgggcctcaagctggggtactacaagaagacctgcccgggcgtccagaaccggggcaagtaccacggagccaaggccatcaagggcaacacgggggccagcgccgcgctcgtacgcctcatcttgcacgactgcttcgaagggggggcgacgcggccgagctgatggacccgacgccggcgaacccggagacggagaagacggcgccgatcaacatcgggctggcggagttcgaggtgatcgacg

SEQ ID NO: 364588 - DNA, 469 bp, Zea mays
  unsure (1)..(469): unsure at all n locations
gggggcagaaacacaatattctagtgtggagaactgtagatacacaataaggttcggcgatgataggtgatggagcctataccagacaacaaactcagtgaaaggtaacatggtcaaacttccatgatctgcacgatgcaaaatcaaatactcaagtcgaaaactcaaaatgccatggaaagccaaacactatcttacacaacaatattttgtattattcccaaacctaaaggggaaatggatctatagtatagggaaaataatggttgtatcagttataaaaaaataatgaccatggttgatcaatgttttacttgtctgcgtgccgacgcttatgtcttggatgaccatggttggcattactgctcccaggngttttcttcttctgcttcttggtactagccaattgtgctgcatccgctccatgatgtggcacatggacattgatgccattggagcggagcaagga

SEQ ID NO: 364589 - DNA, 351 bp, Zea mays
  unsure (1)..(351): unsure at all n locations
ccctcgcgtccggtcttcgcaatccatcaccgcgaatcgcgttcgcccgcttcctccatctctctctagccgngagaaaccgcgtccgcttcctcctgctctctccatctgcgaatcgcgtcctgcaatcccagccgcgagaaactgtgtccgcttcctccgctcattccctgctctctccatccacgaatcgtgtccgcttcctcgaatcacgtatgcttccctactccccaaggttttcttcgccctccgtcgggatccacagattccccatccaccctccgctcggatcgacagacgcaatccctgctctctcctcgccctccgcccggatcaccaggtcatacttat

SEQ ID NO: 364590 - DNA, 235 bp, Zea mays
ttggtttcagcacgccgcccgcagagaagggagcttagaggagggccggcgaggcgcgtaggccgggcggccagagccaacggcacgggccctcggggcgcgaacgccctaacgaggatcggcgcggacggcgagcagaggcgccggttgcgagcatgaattctgacgtagaggcgcacagacagaagccggcacacggaaggcttcaagccactgccgaaacaaccaaacgcga

SEQ ID NO: 364591 - DNA, 258 bp, Zea mays
gggaacccaaagcaggccacgtttttaaataacttaataggggggggggaggacaggaaatttagttttttttagggggccacgggccctaacaaaagatcaagccgcccgcttttggaattggaatttggggggttacggggactggactttggaggaattactggcctccaatccgatccccgccatgccgacgtggggggacctcacgacggggacgacgtgtttgattggggggggaaccccaggctttttttt

SEQ ID NO: 364592 - DNA, 471 bp, Zea mays
cgggaaagggggtgtatgcttggaggcgtttacattatttataagggcagatttaaatcgaggccagcaaaattgggaacaggcatttatgaaagaaagaaaaaaacaaaatcaagaacgatgatagacccatcaaaatctcattataacgctacacagtaaaacataagaagggtttcttttgtttctatctacggaacaagctatatgaaaaagaaaccatttccccagggtccatcatacactgtacagttgttacctcataccgaactataggcttcctgtcttttatgtaggaagctttagctattacaggcctttcttgtttgtcgagctggcaaaaacttggatctatgtgtctgcaatctccaagaataaacaggagaaaaataaaccatgtagcatcttctgtccttaaaataacttatcaccaaaccattttgaaataaaagaaaaaactataatgaacta

SEQ ID NO: 364593 - DNA, 240 bp, Zea mays
gcaacccaagaaaacgagcccaatggagccgaccgaatggccaatagccgggcatgtccccggcggggtcggcaacagccatcacttccacgactgggccaccggtgtccccgacggcgcgggctacaacttggaagcccgcgcagggcgcaccggcgtgcggaacttcatcacctgcgaccgctgcaacgtgcgccacatgggcacgtccaacttcgccaacgaccctaaaggcgaaga

SEQ ID NO: 364594 - DNA, 388 bp, Zea mays
cacctgcaatccgacttctcgctgaagaccggggattccttggttttcctttgttcttcagggaggattcaggaaatgctcggagttgcattcggtggctgaaacttctagaagggtttgagagagtaagaagaacttgaacctcagcggtaaagaagaatatggcagacacggtcacgggcagttcaaggaggtcacaagatgacactgcaacattaatcccacacagtggcaatttgggaggatcaagccggaagggcgtgaaggccgccaggttcaaagatgatgatgaggttgtggagatcaccatcgtacagcgcgattccatggcaatcgaagatgtcagggtagtcgatgatggcggctcagggcatggtggtgggtttga

SEQ ID NO: 364595 - DNA, 388 bp, Zea mays
acttcgctactccgctaggttcagcagcggcaccagtcggctgagcggatctccggtgaggttgagggatcagggatggcgaacggcggcggctacgtgtgggcccttgcggcgggcttcaacgccgcgctcgccgccatatacgccaaattcatcgccactctgccgctcaaatatggcacggtgatacttttcaacgtgacaatgtgggggtgctacgtcaacagcctcaaagctttgtcgtcccttcaggcaacagtcacaaacttcgacgccaacttcctctcgtctgggcttgcagggtatttcctgttcgaggagccgctgccttataaatggtttgcaggtgccagcctcatcattcttggcgtcttcatcctcagcaagt

SEQ ID NO: 364596 - DNA, 351 bp, Zea mays
acgctataaagaagagaatcttctttatatttaatttacataaatatactgcctcaaacatttgttctccgctagtttcattttttactaaaatatgataaataaaaaaaagatggagtacatgctaaaccgctagcctctacaagattatcgcggcttcgctaacaatataggccaagcccactagcattctctaacaatattatccatgatcaaacgtgtattttcacaacaatatcgtcgttgccagtcaggactcaagactcaggacacgagcgcgcactggtgtctggtgctggcgtgctgccgctgtcctgatccgccggcgaccgccacacgtgcctgcctggt

SEQ ID NO: 364597 - DNA, 204 bp, Zea mays
  unsure (1)..(204): unsure at all n locations
ggtgtcaccaancacgaccagaggcccgggcgaacatcacggggtncagcgatgtgcagcaccaccgaacgatggtttacgactgggccaacgcagtgcacgccgccggcgacccccgacgcctaggcacggtgcgctacctgggccccatagagggccacggaggagtctgcgtcggagtcgactggcatgatggcgctggcg

SEQ ID NO: 364598 - DNA, 322 bp, Zea mays
ttggttgccggggaagcgagccaaggcatgggtctttttttcacgcatggcgagctgcccttggcaacaatgcacgccggcgggtctgcgtacctggggctgtaccacgggcacccacagaagcacaaccatggcgcgaaccgccggcacatgttgacttcggatgtggtgccggaggaagccacaaaccgaaagctggcggtggagcccgtgggcacaggaggcggaggcgcagcaagggtgaggtaccctgagtgcctgaagaaccacgcagctgtcatcggccggagcgcgacagacgggtgcagccagttcatgcccg

SEQ ID NO: 364599 - DNA, 100 bp, Zea mays
acgaaactgcagacccttaacttaatgatgggttcgcgtttacaaagatatgtatgggaacactactaatactgacgatattcacgaaaccgatgatttt

SEQ ID NO: 364600 - DNA, 362 bp, Zea mays
cactgaacccccatccattctgagtcccaatcacaaactcaacagctcatggatttcgtccaaactaattatatcgtggttagtgttagtgcatgaatctaattctttgcttatctgagggtttacagatgaatgggtctaagttctaacagtatgatctctccaagttttttgtaccttcctgtcgtagtcgtcctcctcctccttcaccgaggaaccaagcagaaagcgatgctttcagcttcctatacatttcccttttgcctcaaaatgtttttttttttgtgattgtatggagctaacctggcagaaattagttaccgatcaagctatagcaatctattgagattgaaagaaatgag

SEQ ID NO: 364601 - DNA, 211 bp, Zea mays
gggggaacagcagcgacaattttgcattcgaaaccattccagcggtgcacaacataaataaataagctaaaagcctgctcactggtcaggttagggaacctgaaacctttactaaactggttaggagaaattactctgaaaacttatttcttaactgaagtacaacagtttttccaacaaaggggaccaggggggaaaagctaacctcaaa

SEQ ID NO: 364602 - DNA, 257 bp, Zea mays
ctctcgcgtccgaaaaaaaaaaaaaaaaaagaaaaaaattattaaaaaaaaacgggtataaatttccaaacgatctaaaatatggggggtcgcggtcggggttccagggtggcctacttttgcctactgaattatacgtcttttttggtgttacctaaggccaattctgtggacgtcgttggacaacttacctcgcgggaattcctggaaattcccctttttaaccttcttgaaggtgcctacccctttcgcccgtt

SEQ ID NO: 364603 - DNA, 473 bp, Zea mays
tgacgcgtgggctatgcccagggttttgtgtgattattgacactaatattagttccaaagcatttcattgagtaaaaagaaataatcattctcaatatgtccaggtgcatatttctgaattttcttgctcactagttgtctgtatccatcctctaggttttattgtttactgacctttaccagattgtcccacagactcgcagaactataggatatcacagaacagttcttgaggtacttattgcagcctaatagtacatggagcgatattcagatatgagaccaaaggcagaagtttcatatctcggaaggggttccagattctcttctagaaatcaaagttcagaagagaggactaaccatagcagcgataaaccgggaagcagcacaagattcaatcctacgaaagcgagaattggcggtaatcaagggaggccaagatatgtatgcgattcatttaaatctccaagctc

SEQ ID NO: 364604 - DNA, 125 bp, Zea mays
tcataagccgttaccctgaccggcgcacgctgggcccactctcttgctgaggtggcgcacacgccgcacacgcgtgctcagctttcctggaaccaaatcggccgacctcccgggtctgcgaacag

SEQ ID NO: 364605 - DNA, 150 bp, Zea mays
cttgtaggtgatactatgactgtaacaaaaggcgccgagtccctcgttgaggtggcgcaatagccgcacgcaacttcttagcttttagggaatcaaattgacccacctattaattctggaaacaggggcaggacggtcttctataatcaa

SEQ ID NO: 364606 - DNA, 251 bp, Zea mays
attgttgctgatactatgactggaacagaaggcgaggtgtccagcacagaggtcgcgccatatccgcagctaacttgttagcttgcagggattgaaattgatccacctgttaatcctagaaacagctgctgaccaggcatctaagagcaagccgagtgcatagagacggcacttcaggtgttcacggcaaatgaagcttactacatcgacgctgatacttcaactgcagactactcccgcttcatgaacaa

SEQ ID NO: 364607 - DNA, 343 bp, Zea mays
gggcccaatttggcaaaagagccttcagtttaatcaattaagcagtctagttaacactcctcagatcttaaattctgacttccttgaaaacaaaatttaggttgaaataaaaaaaaactttttttcagtcccacatcaaaacacaactttaagacccttttttcgagaaagggttatcttggtaaaatacaggagggcggataacacttgaatgtgaagaaacgaaggaacacactgtcaacacgcaccgcacctgattgatattttgcagctcctcccgcagctacagtagaatgcagttatccataataatctggaatgggggcccagaaaaccgggattt

SEQ ID NO: 364608 - DNA, 474 bp, Zea mays
ttcttacgcgtccgacaaagttcacagtcaacaaaacatagccaggatgaacacaggaacaaacaagcatcaaatatttcgggtaaacgaactcatgaattgcatggttcgagttcttctaacaagcgagagagggtagatgttaacggtggtggtggtgcactttttgatctcaacgtgccagctgaagtggtggacaagatctgaaacttcattatctgatgggtgatggcacattcctttgaactgtacagctgacttaagcttcgtcaccaacataaaggaaaaaatactgttcttttttgctgccttaccaccatagagtacctgcatgtcaaatttttaccctggtgcttgtatcccaaggtatagagtagcttttaagttatatgttgtatttcatggcatgatctgaagccaatgttcatagttctgatgaagttgtacccctcaagcaagatgaggatattttgg

SEQ ID NO: 364609 - DNA, 488 bp, Zea mays
atcttgccatacccataccagagtgctcgcaatcacaagagaaaaaaagaaacttataaggagagagaggagcttagcgctgtctctctctcgctcgtgcgtgcgtgcccaattgcaggaaagccacaaagtctcgtgttcctgggggcagggatctcctctcctctcctctggctctttaaccggagaggcgaggagtagtacggagcagcatgaggctgctgtcacctccattgccgtccctgcgctcttccgtcccggccgtcctcctccacctcctcctcctgctgctgctgctgtcctcatgcccctccccggcaaacggaagggccgcgccgtcgtctccgggcgctacggcgcctgtcaccaggcacgttcgcgccgccggcgccaatggcaccgcccccgtcgctccggcggtgccggcgccgcctcctgtcgtgatcatcgtggagcgccaccgtcatttccaccgtgagctagtcatc

SEQ ID NO: 364610 - DNA, 237 bp, Zea mays
aggccccccttaaaaaaggggttttggggagaggtccccacccccaagtcccggttttaaaccggtgggcaccaaaactctgggcttttttttcaggcccaaaacaaaactttgggcccacacttggcaggaaaaacccccttgggggtgcaacggaataaaaattgaaaaccaaaaccggggatccccggttcaatttttttaaaccttttttgcccaaaacccctttttttgggg

SEQ ID NO: 364611 - DNA, 224 bp, Zea mays
gaaagggagcagagaacattccatttcgatatacaggcatagagtacatccacggctgcactgctgcaggcgagcatgcaaaatggactaaactccgaggcaaacccgaatttttatttgtaccgtccacaacgaatgcaacaatttaccaccaagtcctgttccatgcggaccaagaatatttaaaagactaaaaacttttcagacaaaccaacaaatgagca

SEQ ID NO: 364612 - DNA, 208 bp, Zea mays
ttgctccctcatcagcatactcttctgtcttggcgggctagctttaattgattatggcggtaatcgaacgaggatcagggttgagtggccacaggcaggactggctgttgtcctgataaccaccagaacgagggccccaacccattgaacacctaccaaaaccttgcttgtgatcaactctcgcccgatcaacacacagagagacacg

SEQ ID NO: 364613 - DNA, 520 bp, Zea mays
  unsure (1)..(520): unsure at all n locations
gtttcatggaacatacaagaagagatacctgttgcagtgaacatagaagaagagatgcttgatgcaatggataataatttggaggaagcagatggaggatttgcatgggcagaaatacctgaatatggggaaacaactgcagggccaccaatggctaaagaggaagaaaaggagcactttatcactgttgggtgcgatcctaatggagataagccagctggaataaatgaagaatggaggtactttaaaagtgttgatcatgtagctattgatccactgcaaaatcttaaagttgagggacagaaaagaaagagggcaagacctgttttagaaataagagactntgatactgaagctgttcctgaggatgagactactctgcttgatgtttttattgtgcctcacacattacatgacagtgagaattcagtcattaacggagggtgacacctttgtagacaagattgcttttgtccacactattaagcaatatgccatcaaaaatgagtttgagactagg

SEQ ID NO: 364614 - DNA, 443 bp, Zea mays
  unsure (1)..(443): unsure at all n locations
tgcttttatgcattcaaacaccctcttaatcagcatacctagtacctgctttactctttatcctttgaactccacttgaaatattcgattcatcatccatgtaatttggtatttggggtgttggctatgtgtagttgtaacttaaaatcatggccgaactgatgcacatgtttgcccttttgttatgtacaactctacaccaacccaacttcatttcaggaatcctgccattggctaccatcttcatcctcattgtttgtgatgggccatcaaatgaatttatttctctgttttgctgtctgcaggatcagatcttatcctacatagacaataacaactttggggattctgcatctcggaggaacagactcgataggctgatgttcaggacaaatgagcggcttnctggtgctgtactgcaagcacacgcacgtgtcctggag

SEQ ID NO: 364615 - DNA, 106 bp, Zea mays
caggaaatggtctaattaaattgggctatcagtcacatgaacaattgaccagactgcaagatatctctacagttctgcactcttgttcctaagaatatatgcttat

SEQ ID NO: 364616 - DNA, 407 bp, Zea mays
ctactcgtccgcccacgcgttcggaggtgtttggttaaaactagggcaatgcgcttttgtgggcctgggacaaaatacccaaatcgttctgtggcataagcttgtggttttaaaacatttctacctgcaaaacctgatggtccaaagctcactgagtggaaaacacctgacctggaaaacatacttacaacaaacatgagctagttcagatgcagtaatgtgatccttgaggacgcatattcattcaaagtgaagtttaaagaacaatgtgaccgcaactatgatggcctctgggggcagttctacgagacacgtgctgaatgcacctacatcaaacaatgctctggacatgcacattggccatgtggtccatgttaatgtgacagcggatattataggatcgattg

SEQ ID NO: 364617 - DNA, 304 bp, Zea mays
ggggagcaatctaatttattactcggggggggggttttgaatacaccaaaacagggcaaatttgcgcgggtttgagagtacttaagggtaacgcaaaacaaaactcaggaaataaagggggcccacctcctgaataaaaagagggggggggcaccccctaggggcggccaaccctagggcgtccattatgggccgcaattgggctggtcgtttatttttccgggcctttgttttttaacaacatgagggtgtttaatttttttgcacgggccccaattatttgcccagggggaaggggtggccc

SEQ ID NO: 364618 - DNA, 404 bp, Zea mays
aaatccaaaatgtagtgatttaaacataaatccaatcaaccccagacaggtaagcactgggtacatgctacctagttcatacacaaaggaagcaaggaacagcatacagaaaccaagcacacaaaattataaaacatccacgatgtggaaagtatgactggacttaaacttacagccactgtagcatgctacatttccacttcttaggaagatctgaaggattcatttcataaggtaggagacgccatttctggcatatgttacagcacacccaatgttcctctattacgactggggctgcatgtataaaagctgcattcgcagttgaagcagtggcaggtgaaagtatatgcatctttgctccctcagtagccaggtgtttgtcaagctttacataagaacta

SEQ ID NO: 364619 - DNA, 164 bp, Zea mays
gttatttgtacggggaagcgtcgggggactagcgagctttcttgtggagggctacctagcttatgtccaggagacaagcaatggtgcggacaaccggctaaaagaaaatgggcttgcgcctttgactatgtggcgcatatggctagtgtaaccgacaggcatat

SEQ ID NO: 364620 - DNA, 247 bp, Zea mays
tcctcgcctgcgcccccggctcgggctacgagcgcgcttgagcctgtacggctgcatatcatagatgcaccaaaggcgatatcgcgcgtacaactgactatactcataacgacctactagcactgactatctttggagtactacccgaccacagaaaatgccatcgacaactctaacctctactcgaagactacactgaaccgatttacaaatccaaaagggactcctgaataactgcttctaacca

SEQ ID NO: 364621 - DNA, 361 bp, Zea mays
cttattcttagtctgccgcgtccatggtctcgcgggcttacatgtacagagataactcggctatatgaccctaaccagtaaatactgtggcataggggtgccaactagcacattaccacacatcaagatgtggcgacaaattcacacgagaagctaaggtggaccttacactacagacgggggggggctatttcacagcggataaacgctgcaaagcactcgagggaagaactaatgctgaagatgtgcatgataggatcaaagtattacatcagctgccggttgatgacgatgggaaaacgatattcacgcaagtggctgatgcggacacgatcaggaccacccccaccgaatgattcca

SEQ ID NO: 364622 - DNA, 274 bp, Zea mays
tccacgcgtgcgcccacgcgtccggggacgcgcgggttttattgtgtacgggtacattacaatgatgacccaaacaagtaaatttgcaggcaattggcttgaacatagcgtcttcagaccaaaaaaagcgtgtggcagtattgaacgaacacacgagaggcgtccgactactcgaggttctctggaagactgacttcagcgaccacaacactgagcacgtctgaaagaataactgcagctacaccagagccagcgatatcacgactaaggacac

SEQ ID NO: 364623 - DNA, 133 bp, Zea mays
tcgatcccgtctgatgaagcttctggaagcgcggatgttttattcactacgactggatggaccgcacaagcgatgggagaatacggctggacaatggattttagtatggtgccttcgcacctggaatactcat

SEQ ID NO: 364624 - DNA, 267 bp, Zea mays
tcgttacgcgtgcgcgcacgggtcgggccacgagcatgtttgagcgttcaggagtgcatggtattgatgaaccagacgcgctatcatgtgggcaattggggtgatcatagtgcctcccctgccttgggggtgtggggcctattgaacgctgacagaataagagtattgcacctctaactacggtcacaggtacacttacctgttttatacaccgagcggggatgaatgaataactgcgcgtgcacatgggccagttatatgacgagt

SEQ ID NO: 364625 - DNA, 456 bp, Zea mays
atcgaacaatagtcatgctattgctatgcacacacccaacaccctccatcattccagaagcccaaagcacattacatacagctagaggatttacaggaaaagaatttaggagggaaaaaagaaatatataaaaaaactagtgaagcccactctatccgtatccggcagcaaagctggcatcggcatgttttcaggataaatgaattcttttaaaagcttgcacagggccatgattgccgccacaacccacaagcacacccccatggacccgggcagctcactaaccctggaccttggaatgcagacagacttgctccgcgatctgccttccggatggcgtttccgaacagactgtgactgttccaggaggagctcctttctcctctccgggaaccaacaacgaaacctctccaatgacaatgctagttattagtcgacaatccttttttcccctta

SEQ ID NO: 364626 - DNA, 448 bp, Zea mays
cttacgcgtccgcttctactcgccaccgttcttgctcaccgcgtcggcgccccgtggctcagattgtgggcacaaggaagaggaagaggcagccaggccaaatggagacgtggtcttcgtctccgaggaaggtcctgtgatcgagcttttcgacgagaagccatttgtggagggtgactcaatcggcgtcttggcttgtggtgccgaagttgttgccaatgttgagcggctggtgcctcttgaatcaattgactcgttgcccgtcgccatggccaccatgttatctcaatccggtgttgaaggaaaggaagcacttgatcatgatgatgtaaggcagaataacgtggatatggagcacacagttagtaccgatgaggagacaattgtcatgacatctgatgatgacaaggttgatgatgcgggtgatccgctgattgatgaacatatt

SEQ ID NO: 364627 - DNA, 176 bp, Zea mays
cttattcttacgttgacaggtgcatattctatgcaggtgtcatgtgctcagatatatcgtctttccgatcttaatgggcatatacctgggcaaaggtgtgccacataagatcaccacacacacttccaccaggtgtcaaaattaaaatttcactttattgggatcgcacacccgag

SEQ ID NO: 364628 - DNA, 345 bp, Zea mays
tcctacgcgttcgcacacatctccaggcacgggggcttttaactgtttagggggacctttccttactcaatctaacaagtaatcacctatacaattgactctgaacatagtgactttgcaccagacacaatcagtttcatacaaattgttcacagagaattttttccacacctatagctccttttgcagacactattagctgtctaatacatcgaaaacagctgccagtatgactgctgctgcacctgatccaacgatatcatgcctaatggctcacaagcctctgaataaggacgtcactataataatgaacgttgagaatgtgctaaccgacgaatttcctac

SEQ ID NO: 364629 - DNA, 278 bp, Zea mays
tgctcacacgttcgcgcccagctcgggcgacgagcaggtttaactgtggacgaagctataaaagctctggggcacactataagatgctaagacaatggtgattaacaaagctccttcgaagcgtttgctgtgtgcgtcacattcaacgagcacagctgtgctggagcgcagcgatatccaccttcccaggtaagctaaggcgtaaaagactactggggcggactaagtgcataactgcccctgaagatgggcctgcaacagctgtcataatctgcgag

SEQ ID NO: 364630 - DNA, 281 bp, Zea mays
tgctcacacgttcgcacacacgtccgaactctaggaagtttgagcgtgcgacactacatatcccatacgttggaggaaagcaaacctgacggcaaccggccatcaaataagagaaaggcggcgctagccgagtggtaaagatagacagtctgccgcacattagggatgacccccgagctccggaagaagagccaatgcggctgctgaccaatccaaaacagccccctgtctacttgctcgtgcaaacggtgctggaacagcacctggagtggaaaagaaag

SEQ ID NO: 364631 - DNA, 241 bp, Zea mays
ttgtttacacgaacggccacgggtccctccacgctggcggggacgcgtgcgaaggtacaaagagccctggcatgatggctgcgagccttgcactagagggggccaactcagaaggccgagcaactcttgaggcagtgccggacactgatggacccggtgggagggctgcaaaactgggacctcacgctcgtcaacgcctactcgtgggaacacaacaagaggaaccgggacaactcaatac

SEQ ID NO: 364632 - DNA, 446 bp, Zea mays
ggccaagaacagctgctgccttttttttcaccagttgcgacagatattaacattttcttaacaaatcttacttcagtttctatgatgatggacaatggctgctttgcctttaatccagcgtaatatacttgtcctgtgggcaaatgttgagcccaaaagtgtagagtataatcaaattgatgaaatgagaaaaggtaacgaaaagtcacacattacaaaggttaagagtacacacgaagctttacactacactcttgacgttcctccatgctccttctcaacatgctgcacaagcaacacaggatcccggaacgccttgctgcattttgggcaaacatcaatcgtcactcggccatgacttggttgtgagttgatctggtgggatttctcaacatgtgcaattaacgcccccacggtggaaaatcttgctgggcagtgaacacatt

SEQ ID NO: 364633 - DNA, 247 bp, Zea mays
gttcttgatcgcgagcggctgccctttttttttgtttttttttctaaggaaggaagcacccccgccccgacgccgacagccgcctgagtagacagatgggggtggactaggtgaactcggtctaacggcggggactttcctactaagacaacgatgagatgcttttcgacttcttcagggactacgagaccatcgtcttcttcacggtgactaatgatcatgcggtcaaaggcaagttttatacacc

SEQ ID NO: 364634 - DNA, 458 bp, Zea mays
tttcttcattgacggaactctcgttggattatgtgagcttgctcttattattgtgatgtcattatcaaagagagtgtatcgtgtcgaagatgaaggattaccagttggagaatctgtaccacaaataatcaggggtcgcctcataactatgaacagcatccacacctatgcaggtgacttcgtgaaggcaatagaagcagtctacaaccatcagaacatctttgtgaagaccagattctgcacctactacagggctgtaatgcctaatggctcaacatactgtggaaaaaaacttaattctagtgacaagattttccaaattgggagccagaagaagttttctcatgaaattgaggctctagggaaactgaccaattcgaatgtcatggatccattggcctacatatagactgaagactgtgcctacctatctatgagcatgcatacaatggcactgt

SEQ ID NO: 364635 - DNA, 270 bp, Zea mays
tttattttttggcacacgcgtgcgggcactagcgggggtgaatgtatacgtagtcgtggcattcatcaccgagaaccgctcgagggtagaggactgtttttaacatgaggcctcgggagcgataatcacttgtttcatatggattgaacagagcagaggactgacgcagctacaacattggatgcaagtagactgaacggtcttatacatccagtggaccatgatgattgactgcccgtgcccatggtccatctagatgatccctaatgg

SEQ ID NO: 364636 - DNA, 467 bp, Zea mays
ttggtttaacctattatccaaggacggactactagcatgtttgcttcttttctaatgaattctactcatctattagaggctaattgatgagtagaattcattagaaaaaaaagaaatatttaattagtccatgtttaacctattatccaaggacggactactagcatgtttgcttcttttccagagttagctacacccaggttttggcggcacccaaagtgtggccctctttcttgacgccagaattttggcaagaaacagcatcaaatgaactaaaggaacagctgaacaagtttggcacaccgaaaatctggctggaaagcaaacggctgcctaagtaactcgggcgtgctgaacttgcggcatggccacctgtggacaacatccaaacaggccctaaactttagtctggggatccaaaccagggcgttatgattggcggacttgcttcaagttcacagcagtgt

SEQ ID NO: 364637 - DNA, 412 bp, Zea mays
gaagccgcagcaaacattttgatggcatataatgatatacatattgtttttgaatggcgcatagcgaattctcaataatgatggcatattgttttaggtcaaagcgattgcaagttcgcacgtgccaaccgatcaatgatgtcttctgccttctcaataatgcagtcaatggtgcattgaagaggtcatggaggtaactcgcaatttcctgtcccaagcactacctcgagaggctgtttatacattcttttaagattccctaccccaaagaacgccggaccaagggatgattgatgtctggattctgaagataaagaacctttccaaacaatcaaatgaatgagattatactccatcaaatcagaaaaaaaatgcaattatagtatagttaggggtggtaataaatcaaatg

SEQ ID NO: 364638 - DNA, 246 bp, Zea mays
ggttcaactcgactgtaagatacttaagcgggataacacttgaaagccagaatgatcaggttcatgggctggggcaaaagacaccagtgggaggagctaaaagcacacttttgaacaacggaccagaggagcgcgcacactcaaccgaagtatatgagatattgacatgcggactacttacgcagcagccacattatgtacattggggacagtcatgaagatagtttacatccgtacaacccacac

SEQ ID NO: 364639 - DNA, 368 bp, Zea mays
ttggtctactaaacatcaacgcagccaatgggctgggatttcctctctttcaactggccttttttagacaggatctaggctgcgcctggagctgcctatgagcactgagctcttatttcatgttcaactgtattgcgtgtgattaccactgactataatggattgggagttacttaataagcttgtacataatgtcattatggggatataatatgatcaaacatgcatttgtggcaattccagggacccatctgttacgatgactgataccttcattcaaaccactagacttctcgaatgcagtgtattggaaatcagctctgatttagatgaaacacttgaagctgtgccttttttacaggctgaac

SEQ ID NO: 364640 - DNA, 357 bp, Zea mays
acacaataaacatactatattatgtacgcgcgggagcatcactgacagcgatcggcacaaggcgccctagctagaaccttcttccgtatcattaccaaccaccaccttcatccacgtccaaaaatctgcttctcacatcacgtttgataccatattttgtataccaccaccaccaccatttacaagcaaagcaattggtgttgatatgaaatgaaacgaccgatcgaggttgcaatcgcatgcactgacagcgaccacccactcacctccagccaccatttttcagctgcccgcggcgggtcagcgccgccgtcgtttcctccgagtggtggcggcaggcgagccgggctggcgcgc

SEQ ID NO: 364641 - DNA, 223 bp, Zea mays
cggaattccctttcacgtttcaccccccccggctcttttcccgcgcgggcgggcgctatcgcggggagggttttctttcccgatgggaacgcctccttccgcaagcttctcgccaaatcggacaacaagatgttcttttattgcaacgcccaataacccgtcgtgggcgtgcgtcacctactgcgtcatactctgtatttactgctctgcggtgcaccccaat

SEQ ID NO: 364642 - DNA, 325 bp, Zea mays
tttcgaccacgcgttcgcccacgcgatcgaacctagtttcttatttggaggacacatgggtgcgaaaccaggccatctactctgatggatgggatggacttggtgcatctgctgtccctaactcgatcgctgaacgccctccgccatttctgaggaacaaatttgatgatattattctacacattgactgctcaaggtggaaatgcctgagagcactgcataggacaattgcacagaaactagggctttctcaacatgtcatggctgtctttggtagacaagacgaagaggacgacctagttggagttcatgaaggcttctgaac

SEQ ID NO: 364643 - DNA, 256 bp, Zea mays
ccttcgtgtccggaagcctctgaccccccgataccttccccttcctcccgtgctgctgctgcaggacagcgcggcgttcgtcacacgcggcggcgaagcttcgcgagatccgtgcgcgatgtcgtcgcggccgtcgtcgtcgtcctcgcggcggagtagctcgccgctctccgcggggcaccggcgaccgcccaccgtgttctcttccttctcgagctcgactacagttccggccgtctcatttccgcgcttcgtc

SEQ ID NO: 364644 - DNA, 317 bp, Zea mays
  unsure (1)..(317): unsure at all n locations
acaatagggaaagangcaacccccgcaggcaccggaccggaaaaccagggacgacccacgcgcgtttgtaacggaaccaaaaaaaaagaggaagcacgagacgcaggaaaacaccgaagagagcggaacaacgggagaaaaaagggaaaccgacaccggcagagaaacaagagaagcagaagaaaaaggaagccgcacaggcagacaacaaagagaagaagcacaggcacaagaaaccaaacaggagcccccggaccaccacaaggaacaaaaccaggacaagacgcaaaaacagcggacaacgaaaccccaaaaag

SEQ ID NO: 364645 - DNA, 240 bp, Zea mays
gccagcaggcaccggcacggaacaaccgaaacgacaccacgcgatttaccacgcgaccgggaagaccgacgaccgagccgagcgggggcacgggacggcaacgggacaggaccccaaaagcacagaccccaccagcccggccgcccgcgccacgcaacgcgaagcaaaagccggacgagccacaacaccgccaacaaacacaccagggggaacggacacgccacaggcagcgcgaaggag

SEQ ID NO: 364646 - DNA, 190 bp, Zea mays
cctgcttttcgtccggcgccatggcgctacagctgcgggccgccgttctttgtccgcccctgtcactcaccgccttccatggccgcctcgttgcaccttggcctccgcctcccttggtcagcatagctgtcgccgccgccttcagtctgggtccctccgcgcccctctcctgccgcggtccggtgcctcg

SEQ ID NO: 364647 - DNA, 248 bp, Zea mays
ctgcaggcaccgtcaccgatattcccgttccgatccacgcgtccgtgttattttcgaacatggtgaaatcgaaggaagagttcgattacaagagtttatgtaggagacttgatattgagctggataaattaattgcagaaaatgaaaggcaaaggaagtatcttgacgatgaagttgtgagaataagagatgaagcccattgccgcattgctgtggccgtaagggtatgcaaaatcacattagagaat

SEQ ID NO: 364648 - DNA, 297 bp, Zea mays
acactatcgggaaagctgacacgcctgcaggaaccggcacgcaataaccggctcgacccacgcgcctttattaaacgggcagaaacagcaaaagcacaatccgggaaggactgacaaccccataaagaaacatcggaacagtacccagaaaaagaagctagaagcctacagaaacagcagtgcccctcccagcaccaaagccgccccgcacatgaagacacaaaggacaaacagaagccccgaggccaccgacggccaccacagacccggcaccaaaagccaagccaccggccccaa

SEQ ID NO: 364649 - DNA, 249 bp, Zea mays
ggatacagcacaatttgcaaagtgaaggatacaaagacttcagtcgggtcaatatctgaagctcgagagtcgtgataggcatgacaattaagtggatgaaactaaacatggctacaaactactcctacaaatgtctgcagattggcacatagacatacaagcaataaatcaggcctaactgcagcactacaacctacaaagtggcaaacatagcaagcctttttcattacctgatcgttacaaacttat

SEQ ID NO: 364650 - DNA, 112 bp, Zea mays
atggttttatccgctggcctaccgaacccagcccccttctaccccttcgacgacggctgggattgcggtggcgcccttgacttcgacggcgacgagcatagtcaggatcgac

SEQ ID NO: 364651 - DNA, 420 bp, Zea mays
atctgctgtgctgactatcacacttgctacatgcagctatttgtcgcttagtgaatggcctagctatgacatcgaactcacaaggtcctgtcgttcggaaggcaattctactgacgcaccttgtttttatagccagaggaaacgtgaatgcatagctgagtaagaaagaaagagctatcgatgcttagaatctacactagtccatatataacattgtttcaatgagagcaaaaatgcacattcatcactctgatgttgaacacttgacccagattttcttgcgcggttcattctccacaaattcattagtggctggccaaaatccataacttgctatttaaaatgcaggcaactgttggcgggcctatctttgcaggtgcatgattgtcacccaccctccctcaaaaggtgcttataccc

SEQ ID NO: 364652 - DNA, 186 bp, Zea mays
atcttgtttgccaaaccccaaaacgccccacagcgcaagcgagcagaaccacccccctatctgctacctggcaaacactctgcctccccgcgccgaactcgagcaccaggggagaccgcgagacgcgcgcccgacatcactcaacgcagcagcccccaaggcccccacctctagaacctagcagca

SEQ ID NO: 364653 - DNA, 261 bp, Zea mays
tgttctcgatttttctgggttgacccatgcgtccgatttattctaacccggagcatctcaccttagggtagaagtggtagttcagtgggggcaaacatgagcagcccatcccaaagttcttcacctggaaagcagagcaggccaccatttgctaagcgtctccattctgctgatgatggtaatgattcagaaggtagagttgttcagcaagagggcctgttattgacattatatctgtcttgttcttctttcgatttaatt

SEQ ID NO: 364654 - DNA, 176 bp, Zea mays
ccatcctgtattcgcggcgcgggcgccttggaaccctagtcatccgtgccccccactccacagtccattcatcccacgacccctcgcttggcgggggcggcctccgtagcaaccaggatgtcgtgcggtttattccgggggacgcccgctgtccaggacacgcgcttatcgtttaa

SEQ ID NO: 364655 - DNA, 261 bp, Zea mays
cacacaggaacgacccacgcgaccgatttcgttagagggagatacaacgacagaaagaaacgaacgagtaactgggaacaagaagcagattgaagcagcaaaggatccgaacaagcaagctatgaaacagacattctcaaagcatacaaaccagactggcggacacggaccacaaaggaaaccgaccccacggacaaggagccgacacacacgaggagccacgcccccagaaacacggcaatggaaacccacctagaggaa

SEQ ID NO: 364656 - DNA, 235 bp, Zea mays
cacaactgcacacccccgaatcccggcaaaacccaacggccgaagctaagctcgagccgccgccgcgatgatcctccgtatccgcagccgcgacggcacggaccgcatcacggtcccagactcggcctcagtcaccgtcgccgacctgcagcgcctcatcgagtcgcacctcaccgtgcccgtcccgctccagcgcctctccctcgacccggccctcctgcttcctaaccccttc

SEQ ID NO: 364657 - DNA, 292 bp, Zea mays
gggaaagaagccacccccgcaggaacaggaccggaaaacacggatcgacccacgcgacttggtggccgaacaagaccccaatagcggggcgccacacgcagccggggcggacggcgcaagggcacgaggagaacgacacgggcggcccccagcccgggggcacgaaccacgcggagccgcacggagagcacgcgcagcgccacggcagccgcgcgacggcgaagcagaacgggacggcgcggccgggggcgcagaacgcgcccacgaacgcggcgacgcggacgagcgcaca

SEQ ID NO: 364658 - DNA, 316 bp, Zea mays
tgctttaaccaaagcaaaaatagtttatgaagcataatagtttttccaatactaaatccttgagtggcatatgcgaaagtactatagctaagacgcgatgaagcatggatcagtgtttatttaatcatttacgatgagatgttattcgtagcgttagttattcatcttcaggttgattctgtacctaactgatatatgtctgtgtgttctcagaaacctctcatatgcaaaagcttaatactgccaaggctgctacagtggccataggtcagaataaatccatgggaaacttgaacccctacaaacttaagaaaat

SEQ ID NO: 364659 - DNA, 166 bp, Zea mays
cccacgtttacgaaccgaggaccgccgccgagccgaggctgcgaaggtctcgacgccgacggacatcggcaccgccatgccgacgctcgacaacgagacctccgaccaaaagaaggaaaaggagaccctggccggccaagaggagaaaaacgagaggggagggagg

SEQ ID NO: 364660 - DNA, 298 bp, Zea mays
aaaaccaaaccccggcgtcctagctcctccagaccccgcagaccccgacccacccttgacagcgactggcatagcagatcccttaccagaacagaaggggagaccgcggaagaccaaggccgagccggagccagcccccgccttaccgaacggcaacagcaaggcggagaaccgagggagcggactgcggcgcgagacgacagagcaggggccgacaaactccggacccaggggcgccaaggacgacgactctgacactggggaacagaagggccgctccgaaaggcgtcggcgaggg

SEQ ID NO: 364661 - DNA, 233 bp, Zea mays
gggaaagaaggcacgcccgcaggcacccgaacggaacggccggaacgacccacgcgagttgataagcggccgcagcaacaagcgcgcaacccgagaacgccagcggcccgcaaagccaaagcacggacgagccgcccccgaagccgcccggaacccggggccggccggcgcagggcaacccgccgcaggacggcgcccaagccgcaccacaccacgagagccaaggcgcggga

SEQ ID NO: 364662 - DNA, 376 bp, Zea mays
cctttttatgcgaccgcacacgcgtccgcgaataacctcttctacaccccactaacaccagctagcaacccttcctctcccgcaaaaatggccgatcgctcctcctactcccagccagagctggacgcggcggcggcggacctggaagcggcgctgctgctgctggcggcgggggccgggacggcgtcggcggcggcgagctgcggcgaggcgacgccgacggcggcgccgtgcctcgggcacgcgacgggcagcgcggcgccgccctccgcggtgtgctgcagcggggcgcgcttgatcaacagccgcgcgtcgttgacggcggaccggcaggccacccgcaaccgccacaagagcatgacgggccggctcggca

SEQ ID NO: 364663 - DNA, 153 bp, Zea mays
aacgtctacgcgcacgagaaggagacaccacccggtgcacagagacaccgagaaccgccagcccagccgcacaggacagcacacacaccacgcacaccgcaccagaccagcacagcacaccaagacaccgaaccatggccggcccgagcagag

SEQ ID NO: 364664 - DNA, 222 bp, Zea mays
gtaagggaaggacttttattcatcaagaacagaacatcgagatgatacaattccttgaaagtcacttgcggcctctgcccataggagcacacagcccaacagaatctaaaaacacacactagaggctatcaatccgaagactagaccggcaactatgctcccggaaaaaaaactgagtcctgcatgagtcctgcctctgtagcatagcccatgcgcgaagcc

SEQ ID NO: 364665 - DNA, 400 bp, Zea mays
ggaaagcagcaacgccagcaggaaccggcacgaaatcccagggacgacccacgcagcctttttacgcgagagctaccgggccgacggcgaagggcgaacgacgccacgccggcggatccacgcagggctccacaaaagctggatccgcggagggacggaacacctaagaagggctggacccacggagggagcgcacggagctcgccgcccagcacgaggagcgagggcaagaataccaacccgaggacctacgagcacacacaagcggacacggtgttcacccagaacaggaacagggagaagacccacacggctgacaagacgaaaaggaccaccccaagaggacatgaccaagaacagcagcaggacagccaaaactaagccggactaggaaaacaaa

SEQ ID NO: 364666 - DNA, 147 bp, Zea mays
tgtttgttcaggcgggcgagctggcaagacgacaagagctgatcttggctcggatgcttaacagattgactggaaagctggtcagtggtgtggtcatgttgacattcaccaaaccaaatcagttgccagactaacgcggcagccctg

SEQ ID NO: 364667 - DNA, 192 bp, Zea mays
ggaaagcgggaacgcactgcagagaccggaccggaaaaacagggaagaaccacgcgccacgactttgattatacaacccagcacccagaaccaaagcgggagggcacccaacactgccgccatggcgcaaaaatgaggagaagaccacgaatggacgggagaacaaggacaaggaaccctcgcaggcggacg

SEQ ID NO: 364668 - DNA, 169 bp, Zea mays
agaggaacagacagacatgccagtggccacgcacatacaggaagaaccgctagcaggagagaagacaaggagacacttgcctacacactagcaacccatcaccggagcaggctgccaatggcagggaaaccagggcgataataaatcaataccggtgggcaagagaaag

SEQ ID NO: 364669 - DNA, 185 bp, Zea mays
aaggacctgaaccacccaaccggtaacctactcgtcgttcccgagtccaatgccaccgtcaccgacggcgacgacgacgctgccgtcagtgtagggtccccgcggcgacgggcaacacctgcgtcggccccagagccggtggccgcaacggcttcctgggcaaccgcaccctggggcgggcccgc

SEQ ID NO: 364670 - DNA, 176 bp, Zea mays
actttccacgcgtccgaggacgcgtgggcagaagagggacctcaagccagatcccagcgagaacgaagacctccacgtgcttgccgaggcagatacacaggaggcactggacgcagctgccggaatggaggagaagccgaccaccccggaggacgaggcgccaaatgagcacaagc

SEQ ID NO: 364671 - DNA, 397 bp, Zea mays
agtatgtagcaaatgctacgatttaatcatcgacttcaatgataataattcagttagttattatacaaatttgccaaacatatgcgaacataagtttttgcgggagtggtgatttggacacctgctgtctatcatatttcactactatcttcttttttacgagtaatttcctactctcattttgccgatttatgcgacaaccttgttcattcttcattcttaactacagtaaatcaattaatttggatcattcaacaattgtacttacagactgttgatacttggttacagatacatgatccgccggagacttcctttaacaggcacttcttattcaaatcagcctgcaaggggttctgggctttgcttaaccttaatcctgcccaatattttaaat

SEQ ID NO: 364672 - DNA, 203 bp, Zea mays
ctaccagacctaactgccccacgactcacgaatcccaaagcctccatggcgacgcaccgtcactgcctcccactcctactgcccgtggccgtcgacctaaccgccaatcctgctcgcgcggcgctgggcggcggacgcggcccgttgatgggcgggtggaacccgaaccatgacctgagggactgccacattcaggagctagg

SEQ ID NO: 364673 - DNA, 281 bp, Zea mays
ggggggattcaagaagaatatatgcgagggtcgagactcaggattcgcaatttccattaaccagggggtgcatacgacgtgccagccgaaggcgaatatttattcgaccgaggcaaacccaaaaattttactggggtaaaacaacgccatccattctaagcactttattaaggagaaccaatcgtgcatttgacgggcatctggcccaccctttcagacccaatacgaggtgacacgaaaactgttttgctgtgcatggaccgacgtaactaactcctgct

SEQ ID NO: 364674 - DNA, 285 bp, Zea mays
ggaccgaccgaataattaccgttcttcagcagcatgatttcggccgcccttctttttttttatggggggggtttttttacaactcggggtggataaccaaattaaagcattacatttcgatgcgaactcttaaaaaggaaccaaacgcgaccagccacgctctttaaacgtttttgggaaggcatcccaaaacccttcccgataaaaataaaactagccataccaaacggtttcaagcagcacattctgaccacttatgccttggaaaccgtcatggcaccaaag

SEQ ID NO: 364675 - DNA, 195 bp, Zea mays
atatcaacaaggtggggctgattcaattaaagcatcacagttagctggagacgcctgtaaacgaccaaaaccaactgaatatgttcatgaatcgcctttgtgtaggaatttatataaccatccaactaagaattaaacctagtcttccagaattagctctaaccttaacattttaagaatttagcctgaggcctt

SEQ ID NO: 364676 - DNA, 395 bp, Zea mays
aaaacaccggggacatgcatataaatattaattccggcacgagacagacatgacggggagcacgttgcacagatgaacatgaaccctacgcgcgaccacggatcgtgattggcgggtgcagcaaacaggatcttatcttagacgacgatataatatgaatacccctcggcgaacgagatcaatcgagtttggggagacataaacgggccgggcgggccggttcatttgcagctgacggaggaatagccgcagttggcgccgcttgtgcaggggtagcagtggcagcctccgccctaggtggccgcataggggccgggggtggtggccctggtggttggggcatcgaggaccggggtctaggagcttgtggccgctgagggctaccaaaaggggac

SEQ ID NO: 364677 - DNA, 265 bp, Zea mays
ctaaaccagccggtgagaaaaacttgggtgatacatggatatgcatcaactggtaaaaaagtagcctgaacgagcacagtcacacaccacatcattttacgggaatagtgaggaaacaatgttgttccgacgaaccagggtccctacacgcggtctggcagaagacacggattaacgactgtgtgacgaacttggtcgttgaccgaaaggggggcaaccccttccacggacttaaaacggggatagatactccgccacgcttcat

SEQ ID NO: 364678 - DNA, 139 bp, Zea mays
aataaagtacaggggggttaaaacaacctggtaccggaacattgtggttttcatcgcaaattggactagcgcaaaacgataaaccgtttttaccgatgcctgctttgtggccaaaaacattcaagggggtttgaccaca

SEQ ID NO: 364679 - DNA, 349 bp, Zea mays
ggcaggacacctgaaaaatggatgcagaaaatatacaagcgcccaacgaagatgcagcgtgcatgcgcgcgcaggaaacgtggtcgctgcctcttgcagtacacgaacaaccaataaaacggcggggcattaatacatccaagactgggaaaacccggaggtggctaaacctaagagcccaccaaaacaactcggcttccacagacggagcatccaagaaaacgccgccaccaaatgaaaaaatgaaccagtgtatgttccgggcaggggaaatgaaccagcactactggggaaacttaaacgctgatcgagcagaggaaccgcccaacaggaaggggaggttcgcaag

SEQ ID NO: 364680 - DNA, 359 bp, Zea mays
attgagtgcgccacatgttattcaggagtagcgtccgtacacctgctagagacatacatgtcactcctggagtagtactaactgagagcaacttttatttaggaggtaacacgattgcatactcgatcgatcgatagattgattatttgcgctcttccggctgcggatggaactggagttgtaggactgcgatgcaaacggctgctgcgtggccaccgatgctgacagttgacgcacagtttataggccttggcacgggtaagctatccttgagatgtcctaaactcgctttgacactacttcacacagatttgaagtggtttatactgccaattgcactgtaagttcgggtggctatg

SEQ ID NO: 364681 - DNA, 341 bp, Zea mays
aaaacaaaaacgcggtttttcatttgtttctttttttccactttttttaaaaggcacctttgttccttgtctaaaccggggctggacagatcctaactttcctcccgacaattttcaaatttattacaatccttatttgggggcccctcctttatatttaccacccccgttcccacagacggatcctaaccagccggtcctccccgctctagattaaaaagaattaatgagaaaccgccttccctagggcccttcccaaggccaagaccgcaggctgccaacaagattttgcacatggaaggcaccttacacggggtgcccttgataaggttaataggggg

SEQ ID NO: 364682 - DNA, 360 bp, Zea mays
ggggaggttccctagctataatttctgacatagtggatccaagaattattaccacatcaaactaacggggagaatggctatatagacctatgcaaatataaggacgaactagaaaagaatacaaaatgttagggactaaacggggggagtgcacgcgcataacatcactaacgggtaaaacctcgcgatgaagtcattgtcattggcaacagctgaacaagagatgaataggtgacgaatagaatgggtgtcgtacagcactgtgagaggttctgacgtttctactaggagaaggacgccacggacacgctactctagttacagctacagagggagagagggctgttttttacggtagtt

SEQ ID NO: 364683 - DNA, 353 bp, Zea mays
aattgttggttcggcgagcttacttttcggcggccgtccttttttttttggggggcttttaagagaaatatcggctaataacgagatacaaaatacgcatttgccttttttttgacagaagaaaactactagctagcacatatacgtatatcgataagtcctagcctatagtacaaaatcttttgaaccagccggcggaagaatacacggggaacatcactacaggttaacacccgtgcgtataaaattatcatccgaaacaggggaaatgatgttcaaaggaaaccaaaaaaaagctcttttttgcatggagagaggatttgacctctatactaaggggaaataggacagca

SEQ ID NO: 364684 - DNA, 418 bp, Zea mays
gtgaatataataccgggagaacagtttttccctttccgaccgagtttaacaatacacgagagatggactacaatgacattgcattctcgtttttctttgaccacactatatactagtttatgagaccacctgcaataattgacaacggcactgaattttgattacttattttctaataacatggaaaaatgcaacagcagaaacctgcgtgtatgtgaatggatagaccttctcccccatgtacacacttctgcatttctgattctatagtaaactggccatccaacaatacacaccgatgtagagatcccttatggagcaccattcctgtcattagagcctctgttgcagagaacctcagagtcaattgtgcttaaattgttattattaagcctttttcatgtcttgatggacttga

SEQ ID NO: 364685 - DNA, 295 bp, Zea mays
ccagccaaagggcccaaacaaacgtatgggagttgccttaacttcccggaacgggctaatcattactggaataaaaggcataaaggggggaaacggcgggaagaaccgcaaaagcaatagcagaaccataagggattgggcttctccggccgaagtttcggatccatcctaagagttatagattataaaaaggtttttaaggggccagatggttgccttaagggcgggacctggggattagaaacaggtccccgcttaggggaaaccaataaggaagggcattaaaaagaggaac

SEQ ID NO: 364686 - DNA, 354 bp, Zea mays
ggggtctccaatatttattattgagattactgatcatggacatggaattacacaacaaccaaagcccacacgagtacatcatgtactgtggcaccacagtagtgtatgcaaggactaggagctcgagctatttagcatgcacataacatacgtgcttgcattaacataattgggtagcaaagcatctagcaacaagcaagctagcacaacactgaacaccgcaagaggtaggacagagtaaatttacaccgagactgccaagtacaggcgtatgctgacagtcacgcgacaacagattacttggcctggaacttggtctaccactacgagaggacgcctagctccttgtctgtg

SEQ ID NO: 364687 - DNA, 369 bp, Zea mays
cgccctctattctttttttggggggcattcaagagcaattgcggctaataaagagaaacaaaaaacgcattcgcctttatctagaccgagaaaactactagctagccatatacgaatatcaatacgccctagcccatagtccaaaatttcttgaagcaaccggcggtcgcagacgcggtgaacatcactacaggtaaacgcgcgcgcgtatttcattatcattggaaacagcaaaaaagatattaaaaggaaacgaagaaaaagctctgtcctgcatggagagaggttcgacctctatactaaaaggaagaggccagaaacaggcaactctacttacaaccacagaaagagagagggttctctattacg

SEQ ID NO: 364688 - DNA, 343 bp, Zea mays
gggctacgcaggggttatcattactaacaggggggtacagcatacccatatgccttaattttggcagagaaaactactagctaggcacacacgggtatgtatacgatcttagcgatacagcatagtttattgaaaaggccggatggcgcataaacatatgaacatcactacaggcaacacgcgcgagcgtatctcattatgatcggaaacagacaaaaagacatttatggggaaccaagaaaaggcgtctgtcggcatgtggagaggttaagacctctatactaagtggaagaggcgcataatcaggctactgtacttacaaccacagactgggagagggata

SEQ ID NO: 364689 - DNA, 119 bp, Zea mays
agcgggatatagcttgcaccataaaagaggtacaagtagcctcaccccctcctcaaggcaccataagtgccaaaacaggattataagaatcccttgggacgggaaaaccaccccttaac

SEQ ID NO: 364690 - DNA, 332 bp, Zea mays
ctgtagcgtaaaacaattgagtgcagaccggaacatgcttcacaaataatacagttacaaaacatggcaccgaaaggtaaaaaaacaaaggactcacagcgctggtcaatccgacaacaggggcttttgatactccgcatgccctgacgtcttgggcttaccaaaaaaccttgggttttgaacgaaagttgggaaacgaccgggcccaaaagttggtcaaagagtaaaaagaactagagctggagctactgaaaccccagcatggaaaaggacctttaggagggacaggctgcacggtaacaagcaaaatattggacccccccagcaacccc

SEQ ID NO: 364691 - DNA, 263 bp, Zea mays
gtaggagttatagagactaataaggagatacaaaaaacgcatgagcctttgtcttaacagaggaaaactgcgggatgggcaaatacgtatatctatttgacctagcccataggacaaaatttattgaaggaaccgaagggagaagacgctggggaaagcactccaagcaaactctcgagcgtatgtcattaaaattagaaacagccaaaaaaatataaaacggaaacgaaaaaaaagttctgtcccgcatggaaagaggtttg

SEQ ID NO: 364692 - DNA, 158 bp, Zea mays
aacgcaaaaaaacacgcatataggtctagtattaaatccgggacgagcccgcccggaatcgacagaggccgattcttacgccaccaaccccgcaggacagctcagaccaaccccaggatcagtatacagcaggcaaccgaacgagtcgaccatgaata

SEQ ID NO: 364693 - DNA, 301 bp, Zea mays
cgggttcttatatcattatgggcggggggggccgacctctattcatcccacaataataaacccatgcagggggccgcttaatataaacaaaaaaaaacccccccccccacacaaatcaagacccgaccgccaaactagcccacccactttaatttgctcagcgcaaccctaccctagaggggagggctgcccgggtccccccccgcaacccaacactagtctaaggcccagcccaaatatgccatgcgggggatgccctcgcctaaagggttcgggccgccaaagaccacacccgagggga

SEQ ID NO: 364694 - DNA, 295 bp, Zea mays
ggggggaattaaaaaaaattttggggcaaaaacaccacagaaaatgacaaaaacaagcccaaaacaaccatggatgccatgttacccgagccacaggcccaacaaatacaaaaaccgcattaaaaaataccggggggctaacttaatcaaaccacccccacggtttcccaaaaaaaaaggggcccccagaggccacccatccaaataacgggaaaaaaaagggcaaaaatactataaacaaggcccccctgggaccaccatacgcccgggggcctgggggccccacccctccaaa

SEQ ID NO: 364695 - DNA, 300 bp, Zea mays
ggccaaaaagaaaaacgggaaacgtcataggtttggggggtttcgacaggaacatactgggggttaaaaaataaactcccgcctaactaatttggctgagtttgccaagttgggtttggggccactccaaagggggccccggtggcatggttgctacagggttaaaaactaagccgggggggctcacgacctttttttgaacggcacgtaggttttgggggggttaaccacgccctgtacgggggccctccaggggggggcggtgtccaggaagccaaccaagctgagggtttgaagggg

SEQ ID NO: 364696 - DNA, 312 bp, Zea mays
gagacaatggtagttgggccataatgattagtgggaagagccaaaagaccatacggtccaccagacatggacgcatatgcgtccacccgccatagacacgtgatggaataataacaggaactcaaaactgatagtggcaaaatatcaaatttctggaagtcgtgaccaagaattgtctggagccgtaatccaagtttacatgcgcgcgcatgccactgcataggtttactatagtgaaacataaatttaacttagtggtcgggggtttacaacgaccagactgggaaaaacctggggctacccaaattaatg

SEQ ID NO: 364697 - DNA, 239 bp, Zea mays
gggcgggtaccccccctcactaaatagaggcgaaaccacttattgcctccaggcaaaccccaccacattggacatagaagaaaatcccagtttcaagcactatcttcaactccagtcacctcggcgggaccagttttctaccacaccgaataatttaagccgtgggcggccaccttaaaacccgtctggatgaaacggcccgctttaaacctggacccaaaccttacaatgacattacc

SEQ ID NO: 364698 - DNA, 269 bp, Zea mays
gggtggggtcattcaggagttatttttgctaaaacagacacacaaaatccgcgtgtgcttttctctagacggaaaaaactgctcgttggccatatacgaattgttaaccgatctagggaatcatacaaaagcccttgaacaacccggagggtgttgacggggtgaacatgactacaggtcaacgcgcgagcggttctaataatcatacgaaacggtgaagcagatcttgaaaggaaactaaaaatacgttctaaaaggcatggagagag

SEQ ID NO: 364699 - DNA, 206 bp, Zea mays
acgtccttttttttcaggggcgggtttatttaaaacttgggaagggtactagatgatggacatggggtccctcaccaccgggtgatcgctcgggtactgctcgctcagcgtcgggttgttcagctgcaccacgtactccaggtagtggacctacatccccgccgacggctacgcgaactataaacgagccaggcattatagaacac

SEQ ID NO: 364700 - DNA, 285 bp, Zea mays
gcaaaggctatatattactaataggacgatttgtgaacctgactacaagtctgccttgtctccgagcaaagtctttgtcatctacagaatcattgccaaatctcttgctgctagactcaaacaccacctccctcctccccaacaccaccaaggtcaaccgatgattttcaatcatgatgatagaacaaaagcctgagttctctgcatggggtaatggtattctagcatgtcagaacaagtatgtttataccgactactgcatatattatatggccagtgcccaac

SEQ ID NO: 364701 - DNA, 110 bp, Zea mays
ccactggttataattgccattttttacaagacacaggtcctttaaatgggacaatgcaacaacattcaagagacagtcgggtgcttacagggcatgataaccagttaccg

SEQ ID NO: 364702 - DNA, 113 bp, Zea mays
cggaagcgtcttaccctgttaggggccgcgtgcgtgtttatataggcgcccggtgcgcaaggctatacaacagatatacttgagtaacaacctttatctattcctaagcaagc

SEQ ID NO: 364703 - DNA, 131 bp, Zea mays
tccacttgtgcgaacatcagatcacccactctagtactggattgttactacgaggcgctcgcttcaactgtcgaagagagcgagaggacggcgttaccgaagccctcgccggcggtcctgcttctcctggc

SEQ ID NO: 364704 - DNA, 170 bp, Zea mays
acctttcacttcggaacatgaaagtttatgccgtgagggcggagtttcattcttctacgtggggggtctgggctggtgtaagccagcctccctcccggcttaaggtctggacagacggtttccgaggagcactcaccatgctacttgaactctactacatttccttcata

SEQ ID NO: 364705 - DNA, 143 bp, Zea mays
tccacgcgttcgcccactcgtccgtgggggcggatttttcaacatggaggagccgatacgtatgaggaagccagaagatatcacaaaagaagaatatgctgtcttctataagagcctgtcaaatgactgtgaggagcatccgg

SEQ ID NO: 364706 - DNA, 212 bp, Zea mays
tccatgcgtacgggagaacgtccaccaaaataggggagttcactacaagggtgatggggtcttcacggacgcatggggtttcttgtaaaacaaatgctcgatacgtatgacctttgacgggctttgatgtgtatatttgactgctcatactcagttccattttttaattgcctcataaaatatagtcattatataatgggggccgctttata

SEQ ID NO: 364707 - DNA, 141 bp, Zea mays
agcgttcgtccacacctacgaccacacgcccacccaggcagactgttttacaagtaggagcccgtctttaccacgaagccatatgatatcacaaacgaagaatatgctgccttctataagagcttgacaaatttactgcca

SEQ ID NO: 364708 - DNA, 125 bp, Zea mays
tccacacgtacgtccactcgtcctccagggcaggtttatttacaagggggagcccatattgatcaggaagccagaagaattcacaaaagaagactatgctgcctgcttatatagatcttgacaaa

SEQ ID NO: 364709 - DNA, 168 bp, Zea mays
ttcactttaagacccggacagtccgacacccgggagcgacaaatttcagcctcggtgctacaggaacgctgagaaatggctgaccttggcggaaagtgcaacctgcgcagagagacgaactgccaccgtaagcacgcggcggacggattggatctttgcactacctac

SEQ ID NO: 364710 - DNA, 132 bp, Zea mays
ttcatctcgttcgtccacgcgtcctcccacgcagacgggttatctagcagaagcccatatggatgaggaagccagatgatatcacacaagatgcatatgctgccttctataagatcttgtcaaatgactggg

SEQ ID NO: 364711 - DNA, 219 bp, Zea mays
tcgtcggattctttgttctgattgctcagtggggtgcattggtaatgctggggaacggtgctgtagactatttaccaacacaaggatccggtccacaatggcagcaggtagtcatgtggtacccctgggtggttgactggttaatggagcctacccttcccagctgcatggggatcgtgcattggatagggttctagataatgagcaactaagcatgct

SEQ ID NO: 364712 - DNA, 156 bp, Zea mays
gtaccttccgtattcccggtcacccacgctgtccgtcacacgtccgcccacacgtccatcgaggcagtctgctttacaaggaggaggccatctttaccttgatctcatttgatatcacataagaagaatccgctgcctattattagagttctacaa

SEQ ID NO: 364713 - DNA, 108 bp, Zea mays
agcttccgtccacacgtccgtccactcgtccaccggagaaggcttttttacaaggaggagcccatactcacgctgaccccagaagataacacttatgattcttttgct

SEQ ID NO: 364714 - DNA, 148 bp, Zea mays
ttcactctttcttcaacgccgacgctcactcgggcagcttaacatgcacaaggccatgcggtcgatcacttcagcagactacacataagatgaccttgctgcctggtataagagcttgacaaatgacctgggaagcgcattctgtctg

SEQ ID NO: 364715 - DNA, 113 bp, Zea mays
ttgtccgttggacgcgttcccctcctgcacgcaaggtgattttttactccagatccaggatggccatccttcttgagaccttgcctccccgtagtgctctcagtgagctactt

SEQ ID NO: 364716 - DNA, 311 bp, Zea mays
ttgttctctcccccctactgagtctccgaggcgcggactatggcgacgaatcgaacgggcccgacgtctaggcacatttgctgggaattagggcactcgacttttaagtacatttggtgtacggctgtttgattattactgagattcagtcattcggttggatgagagttgttgctggagacttacgagtgtagcactgctgtcggcttgtgattaaatcgcattacttaacatacagcactggataatggatcgtatggatacttcatggtttgctagtagagggtgcacgaaagatgaagcctactgag

SEQ ID NO: 364717 - DNA, 302 bp, Zea mays
tcttgaggcagtcctgatgtgcactaatagggggagctaggatctccatgacgcgcatttgctgggaccggtttctcgggttgctagctggattggaacagcatacggattatatatccggctaaaagttactgaaatgcagaaaaagaagaacgactctattaatcgagtttaggattgccaatttgattgaaaattctctgttgtggattggttgaggaaagaaacgaaggtggtctgcccccttctcttgtcaaaaaagaggagctttgaaaacagaaggactaaactctgcaattgcc

SEQ ID NO: 364718 - DNA, 179 bp, Zea mays
tgtctcgcgtccgacctgatcctgacttccttttaagaactataccatttcttgtgcataacccgaagattgctctagtacagacacgttgggagtttggatgttcctgacctggcctttgccgggcaattttgcagtgaactacaatatatgcctactgacaaggatacagaagatgt

SEQ ID NO: 364719 - DNA, 333 bp, Zea mays
tttttcgcgtgggagctggtaaagattttgagatctgctgctagcgcaaaccgtgatttggtgtttggatatgttggaatcaagcaatgggatgagtttgtggagacttttgatgtttccaaaagctcacagctgccaaagctacttgtgtgggatagaaatgaggagtatgagctcgtaagtacagtatcctcagtaattaattctattttctaataccaccattcatataaagtgttactggcatgtttctgactaatgatgcaaaagtttttctatcaataaaggtattgcttttataggttcctggtatgttgaccctcataattccct

SEQ ID NO: 364720 - DNA, 491 bp, Zea mays
tgttctcccacgcgtccggacatgctgagagtggtcctggttggaggtggtctaagcgggctagtggcggctcatgagctggcgaggagcggcggcgcacgcgtcaccgtgtacgagaaggaggaccatctcggtggctccgagaccgttgccgacaatggtggatcaggccctgttctggtcgacctcgacttcatggtcttcaaccgggtgacgttctcaaacatgatggaatggtttgaacgtctgggggtggaaatggagaaatacgacatgtcattctcagcaagcttacggttaaacgaaggtaaaggctttgagtgcggtacccgcaatggtatatctagtgttatggtgcagaagagtaatttggttagccccagattgtggctcatgatcaatgagatgttcaagttcaagaaccatgccctcaagtaccaagaggactatgcgcgaaaccctgacaggaatgcgactttcggtcaatttat

SEQ ID NO: 364721 - DNA, 458 bp, Zea mays
tctctttttttttaataatttttctttttttttttccgaccaaataggcgtctgtttatgtcacttatcgggccgaacaaatatccaacaactatctgatatccgaccaaataacatccgtatgtcacttatccgcccgaataaatatcatgccactgtatctgtatccgtcctatttcaaactattcatattagatcatatatccaactaaaatacattagagtaagacataggatcaactaatatccatcctattttagccctagaaatggctttggttgtgtgccctcgttggagcagtgaaaatgttaaggttgatgaaattttggtttgtgctgaattaatgggttttaaaatggacaaccaaataaaagtccatggggttcacattgagaaggattggaatggtatgactagagtggtatgcacactcctagtacatgtagggcatgtcttt

SEQ ID NO: 364722 - DNA, 365 bp, Zea mays
tgttggcttctgcatatggcaaccgggggcgggaggacgatcaactccgggactccactttctcacgcggcgtgtcctctccccgcaggaggcggaggccgctcacggtctctgattggcggatggcgcgtggcatcggagcactcgcgcttatgcgatttcctgtccctctggaagggatgatacgcggagactacctggtgaactgggtggcgctctagtgccagccagtggtcctgctgacgcctgcctgatctagtacgcccttcgttcagctcttgtggcgagtaggtaatccaccgggttcgggatccgtgtggcctgagcttgcgtggagatggacgacgaggactactcgtgggtgc

SEQ ID NO: 364723 - DNA, 457 bp, Zea mays
tccacgcgtccggttaccgctaagtgtgtgtggcccaaacgaagcaaaccgataatgccaattgtcggtatggcagcagatggattgggattctatgcttctcaatatgcgaaaaatctggctaaaaaatctaagaaaaacatattaggtttggtaagggtgttggaggattatgtgtcggttgaggatctcgaaacggactttgggttccactttccttggggtcgggtgcggaacgccaccaaatgtcacatggggtaggttatgcaggacccctgtcttgatagactagaagaatcagtgaatactactgaggtccgaatgaagatttcgggggtgaagactgtagttgctccttggaactcccacgcgacagcgaacgcaaggctccacactgcttggattcgtgcggaaaatgctccagaagagattcagaaataccaagcgatatgtgaat

SEQ ID NO: 364724 - DNA, 270 bp, Zea mays
ttgctgtaggcgtctcttctgcgtgccatttgctggctcttgtcgggtggccatcatgaagctagtcctctctgggtggtgttgctgttttctgtgtttgtcaagacgagctttaattttgctctatgtggatgactgtttaccgttagtcgaacctgtatgatgttgcatggataatgttttttggctgaggaattggctcgtcatatttctatatgcattttcactcttttttttgccgaataaaaaaaagataacaaaaaagaaaaa

SEQ ID NO: 364725 - DNA, 485 bp, Zea mays
tctacctgtttgacatcctcaagtcattgcctaggaaggatcttcagatattggttggccatgggtgccctagcatggatgcaaaagtggtgttttctgcaaaactgataagaaaacatgtccatcttgatgagggcgatgtatgtagttcttgtaatttacgaaatgaatgcacgaggggctatatccttacacgtaaagaagatgaagttcggactcttgatgttatgcgcattttattgatctatggttttgatcacgtaaaggaaactgtagagaacaaacctctgctcaaattaaaatctttgaagaatgttgttcggaaattaatacatgagattgtcaagttgagtgctgttcctatcgatcctaatctcccaccacctgtaataaagaagcctcctattaaagtgaagcaaccacctaccccaccaaagaagctagtgggacgtgatgatgttgagatgaagaaaggaagattggct

SEQ ID NO: 364726 - DNA, 196 bp, Zea mays
  unsure (1)..(196): unsure at all n locations
tttttanttaacaaanaacaaaaaaataaagggggggtatttttaaaattgagggtctttaataaccccagagaagcgaatgctaatgctcataatcctcacaccataatacaatggaacggattgggaaaggaactagataaacgactactactcaagaactggtggagaaaagatatgcataggggaccaagaa

SEQ ID NO: 364727 - DNA, 490 bp, Zea mays
  unsure (1)..(490): unsure at all n locations
tttgctgtatcgcccccctgtctctctgcaacgactgttgggccgccgccgccctacgccagtcgccaggtgtcgacaccttcgtcggtatctttaccggcgacgagcacgcaccaggttctagtcataaatattggaagatctttattggtaattccagctatgtgccctgcctttattggagattcttcagggtgatgatagatgccaattcatcattctctggaggtgctcagttgcagccaagtacaagcatgaatacttattccttcatgcctgctccatcgtccccaatatcattttcatcaaataacatctctggctcttcagtcattgatggctccattgtgcagcaaagtccaccccaagaccaggcgcaaaagcagaggtcttcaagtctaacatcacatcctattattgaggctggtggtgcattgcatgctccaaagaaattaagaatngatgttaggcaagatgaactgcagcaaca

SEQ ID NO: 364728 - DNA, 531 bp, Zea mays
  unsure (1)..(531): unsure at all n locations
tttttaattgttggtctattggtaaagattctccccctgctccggtatccaatcaattgggttaaacagtctgctgtaagatttgttgctgcctgcagcgagagcttaggatctgtagatacttatgtgtatctttctcctcatctaaggcagttcctacacatggagccaccttcattggcctctgaaactgctcttctttcatgtcttaagcctccactaccaaaatcaatcttctatgaaggtttagagcatgctcaggacattggagacattttactgaagagcagtggcaagaaagaacagatagtacatggtggaagatatcctggtacagcacaaagtggatccttggccaaccttgaagatatcctgcgaccgaaaggccctaatatttccagcagcatgtccttgtatgtcaaaaactctgtttcttttgaaaaatcactatattctggttttgctctgcatgcatctgctgcanatagctccttttatgatggcttatctaaaggaataccatcatattct

SEQ ID NO: 364729 - DNA, 483 bp, Zea mays
ttacgcaggtcggaccactgccgcgcccttcctcttcctgccggccgccgcactcccgccagcgccgtactacttactacctgcatactgtattctgtagtagtatgaaaaggtaaaggcggcgtactgctatagtatctctgcagaatgttcggaggaggagtacaccaactgaaagaggtttaggaaagttgcaccgtggatctagaattctagatgcattagtgtagcctacagtagccctgtacacacataaaggcatttttcttataaaattgtctcgcaaaatgggatttttttgtgctaattatagggtgctttagcgccacctgggatttttttgtgctaattatatgcagcttccatagaccaccacaggcattcccgcatgcagatcgctctgaatgcctcctttcattctattactatccctgaacgacgacccatctagggaaatagccattaaatgatagcagccttttt

SEQ ID NO: 364730 - DNA, 433 bp, Zea mays
tcggcgactcccaccgccgcctggcgccgccacactcggtcgcactgctcgcctgcccgttcggttgcgccgctcacccgcccgctcagctgcgtcgtcgctgaccgccccgctcggacactccacgtccatcccccgtcggtccgtcgcggcgccgacacaactgctttgcgaatcggcgacctgttgccggcgacaggacgcgggaaggcagccagccatacagcctgttcctacgtatgaatctgagagacgttggctgagatccatctatcttgccgtttcctggcggtgagcaacgctagcgcgcatgtcgtcgcggctgtgcgtgaagaacctgcccaagggcgccgacgagaggcggctgtgggatgtgttctcgcggaagggcgaggacaccgacgccaggtcattcgacaaagatgcaagagtc

SEQ ID NO: 364731 - DNA, 522 bp, Zea mays
tttgttttatggatgattccaaaggatcattatcacctgagaaagagcaagctggagaaaaatatcctcaaacgaaaaaagaggttgggcaaagacaacatgtcctctcaggatatgatttctccagtgtttggcaagaggcttgtgcctgcaaacacacattttacctctcttaggaagttgcgaaaacacaagtttacgtctgataagatcaacgatgagatctgcaaacatatcttgaactacaatgaacgggagttgttaagtgtggggcagactaccatgactgggggtcagctggaaaagtacgtaaatgaaggtgacaatggtgataaaatactcagagcattcatcacatgcttcacttgtgatgaaaagttcaatcaagggaacatcacaaccgtcataccgccacatgaagtatccgaagagggtgaactctgcaaagatgatgctgcacaacttgtagaagaaatcaaagctgtactcaaggcaccaatgttgcacgtgtacgcaaagaca

SEQ ID NO: 364732 - DNA, 436 bp, Zea mays
tttggctccgctccctgaagccgtgatcgaagccgccatcaacgccctccaccccctccgctcaggtccccttccgcggcagcggcagccggcatttccagcccctaaaatcctatttccctctcccacaccacgcgccgcgcccgtctgattccgcccgccagccacgcccgcagatctcgcttcggcgccctgattccgtcgtatgcaaggtcacagccctgccttccatcgtcgcccccatgccacgctccccttccatcctcgctcacttccagccgcccccattcccagttgaaggagtcgtccaggaaccgggaaccccatcaccggatcaggagcagctgtgtcgcgagcatggtcagtgctgagctcccgatgaccgcccgatgggtgtcggaccccgcatcgcacgtcggcactgagcgtactcgct

SEQ ID NO: 364733 - DNA, 359 bp, Zea mays
tcgcgatctagaactatatttggcggctcagaacgcagagtcgtgtgggtatttgctgtcgaaacttgccggagacggtggcgtatcggacggagcatatcctactgcgtctgctcaggtatactatcaggaacttgtgatgggagaagatcagtcagagaacgccgctcctcaaatggacgctcaggaaaccatctcagccgaagaaacccaggataatatctatgaagcggatgtgtgtgttccattagagtacaaggtagtggagagccaacagcagcgtggcatacggagacgctgcctggtcttcgaggcagctggtgggttttcgaatagcgctgtgaaaagggggactattg

SEQ ID NO: 364734 - DNA, 404 bp, Zea mays
ttccacgcgtccgatgagttgaaagaggtcaaaatggccgcgaagcagctattgcaagagtatgacaacgagcagaagacgcgggaactcacggatgaggtgtgcaacaagctagtgagggagatagaggaacacaagtcagagatcgaagccttgaagcaggattctgtcaaactacgcggcgacctggatgaggataggaaattgctacagatggctgacgtgtggcgtgaggagcgagtgcagatgaaacttgtcgatgccaagctcactcttgaggccaaatatgaacagttgaacaaactggaagaggaggtggaggctttcattttggctttcagctctttcaaaggagacaggacaattggtgaagccgcacacaacattgtacaggccattgggtc

SEQ ID NO: 364735 - DNA, 138 bp, Zea mays
gccttgacattatcggtttattttttttttttttttttttttttttttttgtttttttttttttttttttggttttttttttttttttttttttttttttttttttttttcgaccccgggggcgcccccgggggcccc

SEQ ID NO: 364736 - DNA, 159 bp, Zea mays
gggagggaagccccttggtatatataggaaaagggggggccatactattttacataccaactgccaaggcccccagttcttaccctaaatttgacccaggccaaggaagaaacctagattgactgggcaatctttttccacaacaatcactacatcagc

SEQ ID NO: 364737 - DNA, 342 bp, Zea mays
  unsure (1)..(342): unsure at all n locations
ggagcattcaacagttcagataatcgctcattgatgtaaataagcgttttggtgacatacaaaatatgttaacatgtttggccatacatgagttcgggtctcgtggtagcatcatgtttgcaaaagcactgtcttgtctattttacatgggggggtttctaaatctaggggcaggagcttaaacactcccatatgtgaacaaaagtccgaacaccgttgcactgttgttgctgagtggtctactccgtgatgtgaagacgtctcctagtcctgactaggctgtcgtttgtgccactgagtcactgagaggcatgggtggattcctggagtcgncttcatcct

SEQ ID NO: 364738 - DNA, 270 bp, Zea mays
tcttttttttttttttttttttttagggaaccggaactcaaaatcgggtctgtgaccatgaccatgaacagtgggtgacgtttgatacgactaacgcggagcgaggaacttttacatgaccgacacgagacctacagatacttagccaacagttaccgggcagcctttgacactacttcaagtcgaaacaaattgtctggtaccgatgcaaagccttgcaaatctatgtacagagcaggtcgacttactaatccgtgggaggctggcaag

SEQ ID NO: 364739 - DNA, 373 bp, Zea mays
gagaagaagaaccttacgtacttttctttatgtttcctgagagattacacatagaaaaatatcactattacactagcagatgacggccaatgaaaaacattcatacattccaagaactactgcagcttagcccaaatgacggccaatgaagattattatatatatcacaaggagcatgcgtagatacactgggggaattaacccgtacgtacgtggaacgccggcacgatccgccgcgttacttaccgacgaataagcagctcgcctgcgcttgtcaagtcaagcacatagagatcacaataaggcccatgcgcacgccaacgccggcgcgagcgcagcgactaccgcgagcggcgcggcgcggcccggcgcg

SEQ ID NO: 364740 - DNA, 125 bp, Zea mays
aaaattcggaaagcaggagcaagctgttcggggattacgcgatgctccttaatttatttcagtacatagaacggcacaatacgcagaggctggcgcgagggcggaccctggggcggacgcgtggg

SEQ ID NO: 364741 - DNA, 378 bp, Zea mays
  unsure (1)..(378): unsure at all n locations
cttttactaatcatttgcttggcttctgctaattttttatatcttactgttgataggatacaatggaagcacttgcggccgagcctagaatagaagaaaaagaatctaagacccgtatagaagcagttgctcaagtattggcttcatcaaaatttattcaaattgttggtcttgtagctgcaaaaaagagaagcaataatgttggtgatgtgacacgtgtacaagcagcaatgttggtcttgtagcatcaagatttggttattgatgaatgatatctatgataaatatatgtgcatgatcattgattatagttttaaacaaaaaaaaaacaaanaaaaactccaacacatattnatcaaaaaatttaacaccttcttc

SEQ ID NO: 364742 - DNA, 221 bp, Zea mays
gataaacacccgagccctgcgggactgttgcaacaatttaagagctgggggattccgactttgaatctttgacggcaagacaagataattacatctgagtgagaaatgaatgctagagccgaaagtgcgtcgagatgaacatgtgtacaggtcaatagcatccttccttcattccttctaatctgtgctgccattttcggtgggcttcctcctagaaaggg

SEQ ID NO: 364743 - DNA, 363 bp, Zea mays
  unsure (1)..(363): unsure at all n locations
ttataagcaactggtcaagaaagagtggaagacaggaggatggtggtgatgatggcgttaagccaccccatgattcgccccatcattccgtcgactacagggcctgcgtgctgctaaaagggtctctccttccgtcgcggtggtggtgcgcgcgggcggagggagtcggccgtgacccgccacaatgccacagtaccaggagctgccctgcggcagaccggcgctctacatggacactgctctagnggatggcatcctcaggggctcgctgtagccccaggatgccgcggcggtggacgccgggaagcaccctgtggagctacgccagctgactgacgagcctgacgcaggcgctgaccgccg

SEQ ID NO: 364744 - DNA, 468 bp, Zea mays
tgtattcagggtcttcacatactttcctcaatgacagtcgtcgaccactattgtttggagtccaagaattgacaacactaattacagtttaggttgctaatggccaagttattacctgctcacaccaccttccagcagctcaatggaccatgtaagtttatcaattttcagcatctctcaagtttttgactctaccatcgtttgatttggtggttggatggaatggttgcagcggtatagcccgatgagagtggattggacaaacatgtggatggttatttcttaccaggaaaatactatctaccttcagggtatcaggtcttccttactagtgggatggtggtggaattatttgttactatctgaaacatcattatccacatctaactctagcatagcagctgttgcagtggattccagagtgcaagctgtactcgacagttatcctagcattttcatcgatccagt

SEQ ID NO: 364745 - DNA, 195 bp, Zea mays
ggccccgaaaaatggcttcttgatggaaaaggcaaatttaccttcaaaaaccggcccaatggaaacccaatcccgggggacccccaagggaacaaaaagatttgttcggcccccctggttaaaaaccaaccgggaggctttttttcctcgttttggccagggaagggggggcctcattgctttgggccctggggg

SEQ ID NO: 364746 - DNA, 236 bp, Zea mays
acattcaaattgggcctagatcatcaaggccgcttttagaatcaactcgtgccaacagtgtctccagctcgatttagcaaatgggcattgacttccacaatccagatatcttactgctagcacatcacgtgcagacataatttttttttcttggctgggggcaagcaaagataggcgcacagctacaattctacctaagattaacactagctgcacagcatacaatgggagattaa

SEQ ID NO: 364747 - DNA, 449 bp, Zea mays
tcttggacgcgtgggttctgatcggagcgccgcccttttttttttttttttttttgtttcaacgtaacagcagcagctcatcataagctcataacacaagtcgttcactgattaaaactgagaccacctaatttctaattcaaacctcgcccttccccccttatccatatccatatccctacacctacatcaccatccatacacaatagtaagattatattgctactgacacaaagttaacaatactagcatgaacagcagtcaacgcagagcgaggaaggatgcacacaaggttgacagagcagaactagagcaaccgggctacatggattgatcagtcctcttccattgcggcagaggaaggggagaccctggccttcttgtgctgctgctgctgctgctgcttacccaggaaggcctcgaggaagagctgttgggcgtcgagcatc

SEQ ID NO: 364748 - DNA, 328 bp, Zea mays
ttttctcgcggcctgtcccgtgaacggacgcctgggccgtctcgtggtgtacctagattgctcgcgtgcactgtcgctgctgaacacgtacaacaggcttcacaagcgtgcgcgaccagggcaccgtacgtcgatgccgtcgggatgggacgcacgcggacaggcaacggggatcgagagacgtccatgggtgagctaagcatcgaatccgtggatggatgccgacgcgatgtgaacttctaattaagttatctgcacatagttattccaacatgcatatgctggtggcaccccacattggtatgaactctcggcgcaacgttgtgca

SEQ ID NO: 364749 - DNA, 346 bp, Zea mays
ggctgacccaggaaagagggccggttttttaaccgccaacactttacactccagggtcaatgtccataaaacccaaggtttacaatttacagacattcgtgaccaggaaacagaaaagaattccccattttgggacctggggaaggacacccatattcaggggagaacccgggcatttatatcggctcagcgttgaaaagaagaagaaaaaaaccgcgcaaaacaaaggaaaacacctgaatcaatcgggaacagaacacaagttttcaatactcccggaacaaagttggggcagggacaactgaaacgggtgggtgacccaaaacaaaccagggtcgtgccaagg

SEQ ID NO: 364750 - DNA, 463 bp, Zea mays
  unsure (1)..(463): unsure at all n locations
ttcttgttcttcccctccgccccgccgcatcctttgcttgcaggagtatccactcccgttgagaagagtccatcgggaaagctcagttcggttctcgcacgaaccccagttcctcgcgaacaaggaaagtcaaactttgtggtcggagttgagaagggcaggattcatcttcggcggtcagctctgtggccatgacgacgtaggcgaggcaggtggttgtggttgacaagcaaagcagccagggcaggtagacgaagggaggagagagatcagagatggcggaggcgcacgcggaggccatggatgggagcacctgggaggacatgatgcggaggatccttcccccgggcactcccatccccgaggcgccgcccaacctcgactactccatcgccctcgagtacgacggcccgccggtgccctacgaactccncagggtagaccccggggagatccctgcaat

SEQ ID NO: 364751 - DNA, 278 bp, Zea mays
tgtcctttttttttttttttttttttttttttttttttgctaacccaagaaaggattgtatgcaaatccaagtgaagggctttcactgaacaacgtggaaagactttggggcctaaactcggtactctgtacggcacgctgtaaaattctgttccctagctagatagagacttgcaaattagacacttcaaaggaagaacgccccaagcattacattctaggttcagaacttatggcaccatgtcgggccaaactggtctgccatgccctttcaaaaa

SEQ ID NO: 364752 - DNA, 464 bp, Zea mays
  unsure (1)..(464): unsure at all n locations
ttccacgcgtccgaatttagttttcaaaattgaagctatttgctacttcaccttgaaagtataatccagatgggggccgcatacttgaattctcaaagtggggatgctttacattgattgtagagaactctctaattctgggttatgtaaattataatctttggtccttactccttagtttttttctgaataaggtaaaaaaaattctgaataaggtatttattatttgtaacatagacatacactccagatgtactgtcttcagtccttagtttttattcttctggatataatnatagttttttacaaagngatgttgacatataccttcctcaaatcattttggtatttgggattccaatagctgttctggagttccctagaaacagttaaaagacctgctcttgttgctagaattttgggcttttgagatactgaaattttctggcctttgtcgtgaatgc

SEQ ID NO: 364753 - DNA, 357 bp, Zea mays
tttgcgcgcgcagctggaccggcgggggaaacgcgagacccgggctgagattcgcgcggctcctcacctgcctggtgaccgtgatgtggactgggatctccacagagcgggcggaggagtgtgaggtgcagactgagatggcggccgtggaggcggccatgtcgcctgcgaggatgctcgtggaggggcacctgcgggtgggcacccccggggacgcgccgaccgacggcagaatcgtcgtgagacacctcccgaatcataacgacactgagaaagacaatgctggtgggaacactgatgaaggcgatcatgatggactatatgatgtgctatctaaagagtctgatgaacttagta

SEQ ID NO: 364754 - DNA, 271 bp, Zea mays
gagcaacaaatccccgcttgttacttaaaaaaacatattttttatccccggaagcatcaagactcccacatgttgccgcatgatgaaaaacacccaaacagggaccagaaagaacaggcccttttacaacggggaagggtttttgggcaaacataaagctacctttattacaaccactctggggtactttacggggacatgtcaaaaacagaaggcaaactggggagtcagcttcctgctttttttgaagcacaacttttataattttttt

SEQ ID NO: 364755 - DNA, 463 bp, Zea mays
tgacgccgcaccacatcaccgcctgctcccacggccgtcctcactcgacctcgatcggaacccccggatcggaggtaccttcgcgcgcggctccgctccgacctcgtcctccatcggttggcatcggaagcggcggcggcggcgggttcccagccagctttcgaaagggcaatcaatcgtcaggctttttgggagctgtgttggggggatccgggggaagagctgaagttactgcagaggctaacatttaggttgtcgagtgatggcgcaaggcgccaatttccctggtttcattggcgccgtgggtggccatgatggcggtgtgaactttggcgggaacttctgtgacatggccttctaccagaagctaggggagggctccaacatgtcggttgacagcctcatcagcatgcagaccagcatgcatggcggatccatcaccatgtctgtggacaacacagca

SEQ ID NO: 364756 - DNA, 469 bp, Zea mays
tgtgcagcggggtcctcgtgcccgtttcgatgcgtctgcgcgcaagaaatcgctgtcccgggtcgtcactcgccgcggccgtcgacgtcgatctcgggtgtatgtccgcgccggccgcttctgggatttctcgcggagacggctcccccgtgatccgctcacgggctgctttctttcgtggctcaaagctttttcccgattcctgtgcgtgtggcgtactggtgttacgatgtactcagctgagcttctgagctttttcgtagaatctgagtgaaaatttcccttattttttctgctgtccagatctgctgctgagggagatgcatataatctgagctgctcgtgaagtgtccagaagaggttcctttttttttcgtgcgtgtataatgaggaagtggaggaggcgaacgggaagccgtggagagctgccgcagggtgctagccttgctctcccatccgcatgaccccg

SEQ ID NO: 364757 - DNA, 420 bp, Zea mays
  unsure (1)..(420): unsure at all n locations
ttttttttttttttttttttttaatgnccactgataaacggcatccatgtcgtatatgtaagggttacattgcatgcaaatcccttgggcacacttctccaaacaaaagtattggtgatttctctggcaatggagttcttgtttcagtttccctggtgctcatgcttctgctacaccaagtaaaaaaaaaagagcaagcccaaggaagagggaaagcaggcttgatgtgctctgcttgcagctacatcccttttcactacagatttcgacctgggtttccatttggaagtacgtacaaagatgtatggtcatctgtgcaaaattgtggtgtctgaacttcatgtctctgaagtgagtgctgattctatcatgagagataatgtcactctgtccattgaatgttaaactgctttccatatc

SEQ ID NO: 364758 - DNA, 395 bp, Zea mays
ttttgtttggtggactacggttagtcggtttattttctaggtagagggacaattatgcgtgactaataaaaagggtttcattccatggctaaatatatcatttgcatgatgctagttggagctagcatccttgttcaaacaaagcatcgtataacattttggatctacatattaaattgatggctagggcctaggtgcatgcatatgtacttgaacagcagggcttttatgatcttctgatcagcagaatccagcatctgtttttctcaaactgttatgcttttagatcgcgggtacttgttagtatccatgcacagacacggtgtggctgtgtggtgaacatatctcttttcagatttgcgctcagctatcgtgtgtgggtgtacctaattaag

SEQ ID NO: 364759 - DNA, 405 bp, Zea mays
tttcacgcgtccgcccacgcgtccgtaaagaattccgtttcttcgccctaaccttttcactgctccagcgaaggccgccgccctcagcaacggcatcagcgtcttcccctccctcgtctcgtcaatcccctcgcgccctctcctccggtcctccgcacacggcacaccgtccggtgaccctgcgtgcgtgcctccctctctccttccgcctccggtaccggccccagcggctgcgctgcgcgccgcgcgcgggctgctggcagcgggagcgagcagctgctgctccacaggcggtcgcgccgctctgggagcgcctgtgctccaaagcgaagctatacccgtctgcttagcgctgatgcgtgcgcttagtgcccacttttctgaaccctgggtgagcatggagca

SEQ ID NO: 364760 - DNA, 118 bp, Zea mays
aacatggccgatcggcatcattttttaacactagtttaatgggggggcgccccacacgacgaaccccgtcacacacttaacagcaccggccagtccacaacactgaccctagccactt

SEQ ID NO: 364761 - DNA, 468 bp, Zea mays
tcttacaatcccatcgtcatgacgccaagatcgtgtccgagtgcgactgtgcgcgcgtctccgtctcgcttgttttaagcacggcaagggaagaggacgacgggtggacgcttggacaaacagccttgtcgtgtactctctctttctctcctcccacagttccgctcgattccaagagtccagcgccacacgacatcctccgcgcggccggccatgggggaagctgcggatccggcgacggggagggtggcaccgccgatgtcgtggcgtacgcggctctccgtgctcgccgcggggtacctcaccgacgccacgtgccgcgccgacggcacagtcaaccgccgcctgctcggcatgctcgacaggggcgtagccggcgttcgcggccccgcgcatcggcgatcgctcgggggacgtgaccatcgacccggccgtgcccctccgcgcgcgcctattttacccctgcgc

SEQ ID NO: 364762 - DNA, 231 bp, Zea mays
tcgtcttcgcgtacggtcgatgtttaaaccagaggggacttgtgttgtgaggagggaagctcacacgagtgatgatcacgagcagagtgggcatttgaaagtccagatgcatatatgctagcgaatattctgtcttgtttcagcttgaggcgtggatacttagcaacaaatagtgcaccactcgtgctacgcgttgggcatctactaggatgtggtctgccacctagcctg

SEQ ID NO: 364763 - DNA, 500 bp, Zea mays
tttcacgcgtccgatcctacgcccgcggccgtggcaccgaatccagaagcgtctagaagggggaggtggtcgcccatgaccgtctgaccggccgtcgccatgggatgcgctggatccactccaaagactgacggtctatcccccttcctattctactgtttcttctccgttgttttctgtatggttcagattgggatcttatattagatgaccgttgcatcttcggtaattcggttctggaaccgagtttaggatacggtgggtagctggtttatcagcgtccttggttcttgtatgagctgggtgggtagcgattggtaactcgaattagctccgcctgccatcgatggttaattgagctccaggaccatcgccatggtggttccaaggaagagccatgatcggcttatatgtagcacagcttcttgtgaatcgtgattgagtcacggccgaccgatggagggagaagatattggtattgccacaagcaattgagggat

SEQ ID NO: 364764 - DNA, 381 bp, Zea mays
gggttgctggcacgcccgccggtggcgtcacggcctgtgcgggttgccccacgcgctgggtttctaggggttcaccggctcgtgagttcgcggtgactaaggcagccgcggtgttgctgtacgcggtcggtgccagggtccggtgggtacttctgtggtgacgagggacttccagggcaactggtggtgtgtgggggagcgcatgcccagggaggcagtggtcgccacggtccaatatgtggcggctcccctcgtccgcgatatgaggctgacggtgacaaatgatgatactgggctatgtgaggctagcctcatagaggagcttgacgtcacgagggcttatattgttgttaggcgacatgctacagcgaggtgactggg

SEQ ID NO: 364765 - DNA, 232 bp, Zea mays
ccagcactgaagataaacctctatatatcggatgttcgaatgttacttatgactatcaattatgcggtaattacaaggccaaacacacagcttaatactctagcggattaagggacgccgcctccctttgcacatgggaaggaaggccgtggtaaacccacaatgcttgaacctcctggcctgacctggtgcctgactgttgcaatcccacgctgtttctaacccccaacct

SEQ ID NO: 364766 - DNA, 389 bp, Zea mays
tgtttgcgcacactagcgcatcgggcacaggagcaaaggggggcatcctctatggtgcgcgcgacatggccaccaagccgggccctacgactgaatggccatgagctgactggtcgcactcttgaagtactgcgcagaaggcatccggtggcattccatatcgcgcgcgcgctgggggcaccaggctggggccacatactgctgggctatgggctaagcttggcaactctaatgacgtggagggggctcaagcagatgtgcaccaggcgcgggcgctggcagaccgggggtaggaagaaacggatctgggaccggggcatatagtgccaccagtgctaccgggagcggtgctgagacagccatagcatactgaacggcgtgatcttata

SEQ ID NO: 364767 - DNA, 278 bp, Zea mays
tttcttcgcgtccgatgctcctgtgcagtcttgaaagacgaagctgctgtacatactagctaggtcacgaatggtgtatatacttgtattttttttggtgatctagaactcagtccaggagagggatcagtctatcagatgagagaaattacccatttcatcctacttactgttctgattactgctgttgatttccccttcactgttcaagtatgcttattgtcagttttgtactgtggtcaaaagaaaaaaaaaaacaattgcggggggaaatgcta

SEQ ID NO: 364768 - DNA, 401 bp, Zea mays
ttcactcttgcattggccgttggcgtcccgctcgctcgctctctcttccactcgctgcacccgtgcgtgacaatgcccacgcgtctcccactccgtctcctcctcctcgtcctcgccatcgccggcgccgcacatggccgccgcggcatctctttctccgacgatgaccgctctctcctcctcgccggcagcagtgatgaggttgccgccgcgacgtcggtcctacggctcccgtcggcggcgggggaggatccggcgcctgaggcctgcgagatgacgtacggctttctgccctgcaccgacaccgcgcccggcaacctcttcctcgtcctcgcctacggccttctcatgttcaaggacgtcacctacctcttcgtcggcagcgagctgctgctcgaggt

SEQ ID NO: 364769 - DNA, 351 bp, Zea mays
tctataaggctgccttaagaagttctgtgactgatgcctttgaggggcaggatgctccatcaactgttaatgcgatgatagctgaaacccatttgggtgaaaagatggcgttattttgtacgggtaaagcactattactggacctatgctgatccaaagaaccggtactgaagttgtcttatgcgatgaggaagactacttatacatgaattgacagctcttcataatacatacgtgtacggtgactagggagtgtatgttctaacaagagactctagtgcgcgttgaggtccagacgatgaacggaaacctgttccataaaccactgacccagatgcacccctagccagg

SEQ ID NO: 364770 - DNA, 180 bp, Zea mays
tttactcgtgcggctgttcgaggggtttaggatgtaggtggtggggcaatgtgggtacacgtagatgggagcggtagacacgtggtgtaacacggacaagggggacgatggtggtgcgccctccgtgacgctgaacatggactgaaggacacacctgacgctgtcgagggagaacacgct

SEQ ID NO: 364771 - DNA, 417 bp, Zea mays
ttcttgtaaagacggtcgtcccgtgcaccacgggtacacgtccgacacgctgggcactgccaccgcggacgccaagaacaagggcgtcgtcgtggtggaggaggaccccgtcccgaaccagtgggtcgcgttctccgctcgaggcgtctccactggaccgggtcagcgcgtgggtgaacagcctcggggacgcctcgttccacgccgtcgacgaggaggacgacgccacgctgcacggcgcgcgaccgcggccccgaccgagacgctctgagatcgtggagctgtggacagccggcggcaagaggcagccacaggcgaagcggcgcgccgcggacgaggccgcccccgtccaggcgagcggcgtcgtgcacacgcttaacgccttcttcttcgtcgcgcacattgtcggcatggggc

SEQ ID NO: 364772 - DNA, 360 bp, Zea mays
gttttgcttggcttaggaagttgcatgtttttatgtggtaattttagtatttgagggacactgatccaaggcgtgtcacttagagaaggccgtctactcatctttacctgtcaatgttctgtttggcaacttctatacttttctatatatataatatatatatctgtgtcgactttttaaacaggtggaactttataattttgttgcgtgttttcataatgaaattagggaatgcctatggtggaaaaaatgtaaaggtgatgataaggcatacttgtttgacttagcctgccttagctatttcttgaagctaagggaaataataattggtgttatggcatatagaaatatggtttgcac

SEQ ID NO: 364773 - DNA, 468 bp, Zea mays
cttatgagtacgggctcttgttcgacatctacgactcgaccagcaccgaggacagaattcttaccaccatgccaacctcgacatccacgctgctccactcgtcattgacatatgcacttccaggtgcttcccttccaaaccttgccttgctgagctcgatgtctctggagcatgccagcttgtgtgcacatcacgtgttggaggaattgtcaacacgcattgatgacctcttcagcaatagaatcggctccatgtccacactcatggcctacggtagtgagcttcgtgtagtccgagctgacaagtcaagacgaagccctgttggtaagataagagagctcaatgaagacatatattgttcccgaatactattacgctggtggagataaacttcaatcacttaatgctttgttttggtccaaaggggaatatttagagattagttgaactccaatcacttaatctaaa

SEQ ID NO: 364774 - DNA, 352 bp, Zea mays
tgtctagatcgcgagcggccgcccttttttttggggttttttttttttttttttgtgtttttttttttttttttttttttttttaaagggggggtgttactaactttctaccaaatttcctacacaactggtgtgaggcaaacacaagcaatacaagtttgggcacaaaattggtgattttttaaaccatttgacttttaacctccaagggacttaattttaacagacctttttgcataaaatttggggattcctccagttagctgagttgtaaactttttctgggggggaaaagcacaagcagtttgcatacaaagtttcttattttctaggcatgaaaaaagaagagctg

SEQ ID NO: 364775 - DNA, 251 bp, Zea mays
gtttttctctccggttccgctaactgcgcctacaggttccacttgtccgctcgggagaccgcactggaaggacagcacgtgaccctcggcggcgccaccggcggccgcagcgggctatgagaagccggaggcggcgcccgcaaggccctgcaagggcgtcaaccacctcgaccaggccagactgcgcgaggcacggggcagatgcgcatacacgtacttggctggaggccacaccacatcatgcaaagatg

SEQ ID NO: 364776 - DNA, 393 bp, Zea mays
ttgacgcgtgggcggacgcgtgggcgcggagcatcaagcagctgccattccaaagcccgttgaagcatcgaaggatttccagccgtgagcgtgtgcggtggcggcgcggccgggtcgccgggatgggcaagatgaactgcttctccggcctgctcagcggcaagagcaaggcattcaagggtggcaacaagggcgcttacgccaagaaggcggccagtggtggcaacgattgccccaaggtgaagccggtagagttcgtagacatggcgggcactgctgtcgacgacttcgtcggcagacgcggcggaggcagcgttcatgcgtccgcatgcagcagtagctttgtcgttcacgcagccaccgagctgccacgccatgccactgccgagaacg

SEQ ID NO: 364777 - DNA, 159 bp, Zea mays
ttcttcacgcgtgacacaccatctgctgtttcaggcgcattctgaggtccagcggaggctgagtctagttgcactgaggaacgaaatgtttactacaaccacttggtgataaaactaatggcgtttggctacgccgttacctaatcggacagggaagag

SEQ ID NO: 364778 - DNA, 321 bp, Zea mays
tttttacgcgtccgaggacgcgtggggacgaggcgcatgtctagggcgcgcggaggacccgcgtggcagcagcttgcagcgtcgtttgttctgcgggctgctgctcctgccgccgacgcggacttcatgacctcgtcacctaagagggttcaccggcacctaaagcgccttaacaagcccgtcgacaatagcatcgagagcccaaatggagacataatggtctgcgtgcatatatctcaccagtcaccacttgatcatcctgtactaagaaccaccaatacagcttacgacgtgcgtccacccttaacgtctatactatga

SEQ ID NO: 364779 - DNA, 333 bp, Zea mays
tgtattcagggtgcgtctggcggtggtgcgccggctcatcctctcggtgtagacggccgcgcgcctgccggagcactgctgcccctgcgcgcccgccacctcgcccgtgtcgcccgcgtcctcgctggtgggatcgctgctcgtgcactccgtgatggtcgtcccggtcacggtgctccctcacgcgcccgagccggctgatccggtccgtggtgccgccgcccgaccgctgcaccgggctctgccccgggaccacgccggcgttcaggtcctacaccgacagctcgccctccaggtacccgacgatctagccatttggagcgggaaatgagt

SEQ ID NO: 364780 - DNA, 370 bp, Zea mays
  unsure (1)..(370): unsure at all n locations
ttcacgcgtccggggaggcggagttggaggcggagcatttaccggcggcagcctctgcctagtacactggagtcgctgcgaaacggagagacggagactcttggactggaggcatgatggaggcaaagcaggcggcgcccgaccggctctcctccctcccagcggagctgcaggacgagatcctcatccgcctcgacctcagggacgccgtgcgcacctccgcgctctcccgcacctggcgggacctctggaagtcgctctcggtgatctccctctccttccccttcggcacgcacccttccgtcgtcgacagcgtncttctccgctacatcggcccccgcgtctctctcttccgcatctgtgtcgacga

SEQ ID NO: 364781 - DNA, 160 bp, Zea mays
ctcgtcaggtcttcaggctcaccgaaattacccgcgggcacaatggagtcaaggtcactactgaagatggcacaagctacttggccgacgcctgccttatccaaaggctcccttttcgacccctgcggacttgccatagaacatgcattgcggctgggca

SEQ ID NO: 364782 - DNA, 408 bp, Zea mays
gttgtttgaagcctgcctagttagcctcgttatgatggcactattattattaggccatctcgagcatgtaaaatatattgaccagagtttaaagtagagagttgaatatagagtttgaaataaagagtgagatatgagatgggtaaggattctgttgttggagataacttgctactctaggtttagcattccaacatgaaacatttcatcgcctgtccttcagtactagaccatgggtcgccgtgcaaaagtatcattacttaattcctggagacctgcagccgtttctctggcacagttgtcacgggcacagtctgactggcaagtcacgggagtactcggccagcattttttttcttctctttaatgcctgtggaataatgtatgttgactacactacacaccttt

SEQ ID NO: 364783 - DNA, 275 bp, Zea mays
agctgatacccccgctggtgctgccgctccgtaattgcctggtccgaccacgcctgtttttttatcagcgtctgttaatgcaccggaagaaggacaagaactcacacatgatgacgccgaacgggcagtaccaaacaaaccaacaacaaagatttgcccacaatccatctgtaccggagagtgatgctatcgacctcgaaggggttagcaccacatgctggccagtatccacctgaccatctcaaagaacatgatggcgcaatcatggactacag

SEQ ID NO: 364784 - DNA, 340 bp, Zea mays
tttctacagccacttcgctgctgctgctatgtcctgcgcgcagccgatgcggcgccgatctccatggttgtgcgaaacctaggcggcgggcgcgagcgaggccacaaggcggcatctgcctcctgagtggggagcgggctcccccgatccacatcgtgcgggctggtggctgcgtcgcgatgaacccgttatgctgcatcgcgccggtctcgctcgagcacgctgcggatcagctccacgagcacccgcagcgcatcctcgctggtgcaccgccggcgacgccggccccaaagcatgatgcggttgtgggggtgctgcacaagtgggtcaactatgggaa

SEQ ID NO: 364785 - DNA, 402 bp, Zea mays
ggtgtttcacatcctgatctgtgttcagtgttgtgctgctgctgggtttgtggccactggccaggcaggccaacaccaatggcgactgcatcattgcccacacaccgaaagctaagcaagggagaaataaagggagaacagctcccgtgcactacccccagcccagcagctatggcattggtatggtagctagctagggttctgtaaccaatctcacccatcttttctttccttcgccggagaaggggagaaaagcgtacctgaaacgattccctgcattccattccgctgcatacttgcattgcatctcatccctcctgcttctgcgtcctcctcctctatttctcttctgctgcttgctactacctcatcgatccattccatccatcgtcgaggggggag

SEQ ID NO: 364786 - DNA, 435 bp, Zea mays
ttgttcagcagcagcagcagccgccatggaagccagcatcaagaagctccaggcgttcatcctcacgctgatgctgatgctcttcaccgccgtgactaccatcctgactctgatagtgccagacgacgaggcagtctgcgagtgagataaacacaaggagcccaagacggcgcacccgcccaagaccaagccctagaacaagtcgtcgtagccgtagcccaagaatacgaagacaaccaaggggagaaccggggacccagcgccggggcaccaaccggccaagagaccctcctacaccccggtcgaccgccctgccaagggccctgtcacgcgcccggcagtgatgcgtccagcggtcgttggtcctgccaagggccctgtcacgggcccggcggtcacgcgttcggcggttgttggaccacctgtgacctaacc

SEQ ID NO: 364787 - DNA, 109 bp, Zea mays
ccatccgccaggacactctcatcccgggcattcacttacacatgttgctccgggtgggctgcccccagttggaccatggccgactacaaggccacctcatgggtcaccc

SEQ ID NO: 364788 - DNA, 157 bp, Zea mays
aactgtcgaaccctccagcgtgtacaacgagatgaagaacgttacagctactgccttctaatgagcctggacctccaaaccgcgtctgaccttgccggttatcttggacccagatgtggcttcctcccgacctccccgagcgggcgtcggctctcga

SEQ ID NO: 364789 - DNA, 254 bp, Zea mays
attcatgcccatccagacatgcaaatgaaagaaacaagggtgacaaaaaaaatcgagtcctcgaatccaacatgcccgtacttgacaacactacaatttttcaatccaacaacccaattttgaaaaatgaaaaccatatcagaacccatgaaaatatcttctaatggttcttttcaaaggagccccatcaatttcagttatcatcaacctgggagggaaagacaaagcttggaaatgtaggggggatgtccttg

SEQ ID NO: 364790 - DNA, 311 bp, Zea mays
gagatgattatgtagcattcactgattaaaaaagagtactgttatatccaaaacttgacaacaaagaacatgcagggcaaaacaaaacccaaagttttttttttgaaagttgacaacagttcttaactataacatagaaagtgcatttagacagcacaaaccatcctaagcctctactgtctcagttggggcctcaagcacaagacccttggtgggcttcgccagcaggtccgtgtactgctggaacggagtcatggagaacttggtctgactccagaattcaggagtaaggaagccgtaggtcttcatga

SEQ ID NO: 364791 - DNA, 254 bp, Zea mays
gcggcaacaggttaaccccattattcacgggggaaagcgacgttgcccaggggcgaaggcgggcacagtacgttttccatccacacacaaaccatacctgttgttccatatggtttccatgcacacacaaacgcacacccaccccggaattatatatctatttcctttcacgtactgacccgacgacacgggggaatatataggttggtaggctaaaataccggccatggagaaccatctggcggaggcggcgg

SEQ ID NO: 364792 - DNA, 285 bp, Zea mays
ggcggcaaattaaacatgaatatagactctctatatagatataaaaatagatatagatagatagagagagagagagagcgcgcttggccctctacctgtgacctgtgtgtgcatgcatcattagctagcttacatggcaattaattacttataattccatcatatgctcatgaccagtccgtatatatggcgggcgcatgctgcacgggcatgagatctagctagggcacatggacgggggggctgtggcggttgaccaagacggggaccacgtccctgctgggc

SEQ ID NO: 364793 - DNA, 313 bp, Zea mays
ccccagcccagaaacatggaacatggggaccccaggaatactgggatctgacataagttaaaacccccccatgaccccccggacggggaaatgatcctgcagcctgaaggggccggacctagccccccctggtccatgaaaaaaaactgggccctgcctttggggggggggaaacaaacccccccacccagggttttacagcctgcccgggcaacccaggggggccctgcagtgggcccaccccccgggggagagctccagtttccccggccactcctccccgggcttaagggggagggcccttttgaccggg

SEQ ID NO: 364794 - DNA, 259 bp, Zea mays
aaaaaatccaacatcaacttatcactcgggaaaaatccaaaagcgtggtcccttacaatggcctccaacaatggtttccaacgggggtgccaaacataatgggaagggtttaagggcccatccgtgttttattaacttacccccgagttcaaagctaattttgggaatcccaatgggggaaccccggggattttaataccccccctggaaaggggggggtccccatcccccaaggtaatttttggaatccccaaacttt

SEQ ID NO: 364795 - DNA, 187 bp, Zea mays
atcaaaagctattatctactgtaccttcggctgaatatgaataattcataaaaaaccggtcctaggaggggtaagcctataatgtcccaaaacaaacttgcttattcacaagtattaccccctgcctaccggggagttactcttccaaagatcatgccgttgttcgcataaaaactcccagaggcct

SEQ ID NO: 364796 - DNA, 205 bp, Zea mays
ttcctttttttttttttttttttttttttttttttttttttttttttttttttttggggggtttccatgccaataaatatttcccccatttttttacatacggaacgaacgggccccattgccattgcaactgagcttgctgggtcccaaatgaacgggtaccctgcctccaccaacctatacaacagggggctggctacttgct

SEQ ID NO: 364797 - DNA, 252 bp, Zea mays
agaaaaaaccttgagagcaggtagaaagaaaggtcacgacaacattcacgcctatatgctatttgcacgttcagctctaatgacatcagcatcatggggacgatgacagtattttacaacttgaggacatgaaactctgctgagtcactctcacccacacttttgatgatacatactcatgtcatcggaaaacaccgtgattatgtatacaacgacgattcaggccttcaaaatgtcataaaatgcagaggg

SEQ ID NO: 364798 - DNA, 176 bp, Zea mays
ggctaaaacatacatggccaaagggaaccacgtggccaggatgttgagaaacaaccaacgtccatccatcaatccctggattgggaaacattgccctggggaggtggatgagccaaaacccgtgccatatgtgatgcccccggggttcaactgagttaaacaacactaacagagcc

SEQ ID NO: 364799 - DNA, 220 bp, Zea mays
ccatgaaaaaattgcccttcccatcaaaacatattgggcagcactaaactacagggatggggcccctaggatagacctgctcaaactaaggaaagcttctgattttcagttgtctccagggaagctcttcaatattaaaaaactgccataagctatacagtagtctttcgaatgacccctcgggttgcaacatttttctgcaaaataggggatgccaccg

SEQ ID NO: 364800 - DNA, 386 bp, Zea mays
ggggtcatacaggacgtgataggaagaccctagggggcgattttccaccatacccggggatgtattgtaccatacacagtatgtcaatgtaaggagagtagaaaagccactttaggatcctccgtggatggctaactgtgcaaaccaaacacctacatttcttgtgtgcctagttagatatgttgtttgacatatagcctttgccttagaaaattattgatgtcgactgagattaagcctacatatactacccgctcacgtgatccgtgctgacagaatcaagaaggtttgactgtacctattggatgcaaatgcaaagggggaaaaatgatcaatggaagcttatgacaagcctgcaagcaacttgctggccactgaatgattga

SEQ ID NO: 364801 - DNA, 263 bp, Zea mays
ccggcccagaattccttcacacccacccccggtattccaaaatccagaccgctggtacgaggtgtttttacatgaacacgggtgataacagcgcctgaccacctacatcccctgctcggcccctatgatgcccgtacaagagaccaccgcctcaggatccggcgccgcacggtgacgtgcagggccagcaccggcggtggcttgtggccgaagccgcaaaaatgaacgcctccttttgctgccccggcgggtactgacgctta

SEQ ID NO: 364802 - DNA, 160 bp, Zea mays
cccctcgtccggtggacgacaaacatcatcatcgggaagttagaagtgtaaatgcttcaaggatttcccctgcaactctacggtcagatgacccttggcctgacggagagccacggtctgtgcctctacggccctttactcatgcagatacaggactgca

SEQ ID NO: 364803 - DNA, 186 bp, Zea mays
  unsure (1)..(186): unsure at all n locations
gtcatgacaaaagacaacagttgtggtggagcancgcntgctttaggttgggatgcgctgtnttaaccatagccattaaacacctcccaagactcctctccattaaacctggtcgcgcaacatgataattatctccctcacatgcatcaacatcctaagtcatgatcatacaacacctcacacttg

SEQ ID NO: 364804 - DNA, 257 bp, Zea mays
tttttcttgagatcaaggacatatttaacaacgggggtatacatacccaccagggcaccggattgactatcgtccaacaatacagcggctacactacacaggtcatgtatgggatctaccgcattaattgtacagttagactggatgtaccaacttggtcaaggtggaactgtcgctggacactgggtcgaacaccatgaaaggatttgatgccaaaatagctactgaagtggctgcggaaacaaacgtactctttg

SEQ ID NO: 364805 - DNA, 296 bp, Zea mays
cctacgcgtccgtctagtaatcttatgggggcgcggttttttacaaatatgcggcgcgtttcccaagccacaatttcctactccgagctttgaattcctcacagcattcaacggggtctttttcggaattcttgttcggcatccagcaaacctactttcactttcacgccatcgactcaccgatcgtcttcagcgtcgtgcttgaccttcctcgaattcgcggggcgcgtccttctttggatccctactcattctggccgtgaaatcgtgcagcacggcgcttcttcaggtggctg

SEQ ID NO: 364806 - DNA, 156 bp, Zea mays
acgttttcaactacaggctgcaattgcttggacgcggggctattaaaaggggcccaaggcatgtcaacagaacctgttgtggtcaggcatcatagattcctcagattcgacgtacgatgggtgacattatggacaatacacgcttctacatgtgac

SEQ ID NO: 364807 - DNA, 217 bp, Zea mays
tccttctgtccggccacacatgcgtccacgcgtgcgggtgcattagactcaccaaggggatggccttccctggctccatgcgacttctccaggccccgtccttagttgcggccaagagccaaccggcgggtggtcgggcatccgcccggagagcgccacggccactgatggacgtgcgcgtctaggctgttgacgccaacaacagggataacgtgat

SEQ ID NO: 364808 - DNA, 154 bp, Zea mays
ctgatgcttacggcataggcagtaccgtcccgtgcgccggattacatacaccatcgggggcttaacctcctcgcctccaccccttcccttccatctcttttcacctggccactgcagtccctctctcccgcgcctgatcgaatggcccacccat

SEQ ID NO: 364809 - DNA, 260 bp, Zea mays
cccatgtgtccgcccactccttcccaaacacacagcggcttttatataaaaaaggggcgatttacactgatctcgactcaaactataattatttgggtgttattactcacactagatcttctctacaccttctgatctgactacttttgagcattactggacagtaaaggtgctattaatacccatcgacttccttgccaccaaattaaatgacgcattgtgtctcccgtcttaccattcccattgtattctctgcgtgg

SEQ ID NO: 364810 - DNA, 265 bp, Zea mays
ccctggcgtccgcggagtagtggtgatccacacgcggagtgttctacgcgtaatgggccgtgcacatggttggggtgtcgatctaggatacacatggaggttattactaacactagtagttgtggcaaaccccctgatctgactacttttgagctgatctggttagggaaggagatattattaccgagcggcttaatggacaccaaattaatggtggttacgtgaattcagtttaacgattcccattttatactctgcgtattgg

SEQ ID NO: 364811 - DNA, 264 bp, Zea mays
cccatgcgtccgcggagtggcggggattcacacacggagtgttctacgcgtaacgggccgtgcacatggtggtggggttgatccgagtcaccatggaggtggtcctacccggatgcactctagttgcacttgtgcgtctgctccacaagcggcgagctggcgggggcgcgtccaacgaccaggacggttcggtggggacggaccccgatgcctcgcagctgggatctgctctgacgcggatctagcatgcagcttaagcacggt

SEQ ID NO: 364812 - DNA, 257 bp, Zea mays
aaaaggggaaaaaaaacccaacccaggggcccaattttttaagggtcaataaccgggaaattggcctaaagcaaaacccctttttaggaaactggctaaaaaaaaaccctttattaggactggtgggacacaaaccaacccggggggggggccaaaaattttcagggggaaataaagctcatcgtttttgggaaaccccaacgggttttccacccctaccaatagttttggggggctggccccgggcccgggggccc

SEQ ID NO: 364813 - DNA, 271 bp, Zea mays
aaaaaaaattggcgagccattttcttagccaaaaaacattttttctggccatatttaatagggttgaattaggggaaacaggcttccccatagggcaaaattaaagcttgttttggcaaacacaaaaaacagcccccccccccaaggggggcttgttttttgatggccccccgacaagggccagcaaatgggccccaaaaaaaacccctacaggcttctttcccttttaccggcctttttgggagggctttccggggggaccgggggaacc

SEQ ID NO: 364814 - DNA, 289 bp, Zea mays
gggagaaccaaatttcaactaaactggggtttaaaccatagtcaatttacattggtgggttcacatacaaaagcagtgggggataggggccacattgggccagccttcccttttctttagagggtaccccccgctctacaaaaattggccagctttttattaataccccaggataacccctcaacatttcaaaataggccagcaaatcgacaacgcattcaaaaactttaaatgccatgggaatgtacctgacaaggccttccaataaccccctagggtttggtgggat

SEQ ID NO: 364815 - DNA, 409 bp, Zea mays
ttttttttttttttttttttttttttttttttttttttttttgttttttttttttttttttttttttttttttttttttttttttttttaaaacacccccgaaacaaaatgaggggtgggggcagccccccggatgctacgggaaagaccaggggggggggtttgattcgggggggaaatgacccccacctgaattaaaacttggccaaatggggggtggggggcccacaacatgtttgctcgttgccctaaaaaaaaaaccgcttataagaggccccccctcaaaaaaaaaaggggtgggggccctgtttagggcccccagggccaagtttttcccccaggtaacccattttgggctaaaaaccgcccccatttggctaaaggccttattttgaacacccgggggggg

SEQ ID NO: 364816 - DNA, 319 bp, Zea mays
ggcctgaaaacataatcttattcaacatcctaatattttaaccatgttttttttttatccactctggtatgtttttttagacaggcaaacaaatcagcctttaaaatcagttttaccaagcccgtagccaaatcccgtaaaagaaaatcaaagcaaaatgtggcaaaataaataaagtaaagcttaacatggttttagagaacataataatttgatttttacctcaagctcattggctagattagtatgtttggtgctaagagcttccattatgttttttggaccatcgaatgcgcttgtcgcaaaagttacccaggac

SEQ ID NO: 364817 - DNA, 308 bp, Zea mays
ggggagaatatacgggcaaaattgcacatgaatcaaatttcaacggccgagtttttacctacccttttttaaaacaacaaatttcaattttggctacttgggttcaaaaagaaaatggaaatcccctcaaaggaacttgggcatttgagcaatcgtttaaaaccggtttacgcttaaacacttgttcaaaaccaaaactatttccctgcacttttttggttggattttcttgggggccccttttcacaccttgggagttgggactaggtgacccactggcctttttctggagcaacttcatttaaagg

SEQ ID NO: 364818 - DNA, 266 bp, Zea mays
gggggggacaaaatttttattttgccggaaaaacctccttttttcccgacctggaaaagaacagggggaaaaccccaaataaacagttttatgctcccacgttggaaacgaaacatccattttccaaaaaacaggggaaagcttttcaggttgacatactttaaaacccaaaatttttatttaaaacctttaccctttccatccttgccgggaatcctaaaaggaggaggggaaatcgccggaaagcccattattttaaagggggg

SEQ ID NO: 364819 - DNA, 214 bp, Zea mays
aacccaaaattagattcaagtatcaaaaaaggcagatgttctgttgcttctctgctacatgaacacacacacaaaaaaaaactgttccatggtttcaatttctttgcaccatagatgttaaccaggtaaacgttagattatcctgtggtatccatcatggttttcttgccctgtattgaccccctaaattcacactcatccttgatcactgatt

SEQ ID NO: 364820 - DNA, 205 bp, Zea mays
acgcgggcagtacaccggggcaggggcgtgggcagcagtcctgtcatatgtgcgactgcctaccgagccgtgcttggcggtgctgtccacccgaggcacccgacgacgcgggccgtgccgagccacagccggagatgagcttcaggaaccgttccgccgacgacttgtgcggtgccccggctctccggacaccgcgccgactgaa

SEQ ID NO: 364821 - DNA, 272 bp, Zea mays
tgtcctctgacgcgtgggctgacgcatgggccggggggcatattgaaagctcgggggagtcctactcccgtgcatggagcttgaaggacttagcccctatacgtagtatgacagctcctcgcatattggggcctggtgcagaatggaaattctgaccaacttggttcgagttcttctggcctttggacatttattggagtggctacatttattgggacagcatgcccaatataaagtcaaggcccttccaagttccttaaggatgggagatt

SEQ ID NO: 364822 - DNA, 118 bp, Zea mays
tgactgaccacgcgtccggccccgcagggcgctgggggcgttcaggcacagtccggagttgacgttcaggttgaggttacaaacatgtcgtagcaggaacaagaggtagaacaatacg

SEQ ID NO: 364823 - DNA, 282 bp, Zea mays
tgtcctcccacgcgtccgcccacgcgtccgctggggggtccctgtctacttccccggcgccccgctcttcctccttccgctccggcgatgggcactggccgtcgcggcggcggcggcggcggcgtgttccaccgcctgctcgccctatcgtcgctgctgctcctcgcttccggcgaggtcgtcttcgaggagcgcttcgaagatggttgggagactccgtgggcggacatcccctggccaaggcgtgtagcgcaagcaggaatgtttaaccccactgcgggg

SEQ ID NO: 364824 - DNA, 189 bp, Zea mays
tcctcgcgtccgcccacgcgtccggccgccggcggcttgcctacgagcaccctaagatcgcctcgttcggggacctgggggacgccgtgttcggcgcgcatgggcggatcgccgtggacatgatgctggagctaatcaatttaattatttgagtcaggtatcttaacttttatatacaacaccatggag

SEQ ID NO: 364825 - DNA, 408 bp, Zea mays
tgttgtgctcactctgctgggttgctttgccgtagggtcttgctctgcggtttgagttgcttcatctttttttttcttcaatcttgtcactcctaaggtttcccccctctggttttcttgattccccgcttgggaatttgtgaagtttaacaggattttttttggctgagttcgcatgtttctgttcttggccatgcccatgctatgcttgcttggataagctttggcttcagcctagctcgcattgcacgatgcgttgttcctagaatccgatcgcaactcctatgagctgaccactatttcgtggattgcccggggcgtgggctgttgatggtttccgctgtctgggttaatttttaggtacccgatcatttgatttttagaagcaaatgttgttggagctcatta

SEQ ID NO: 364826 - DNA, 179 bp, Zea mays
tcccacgcgttcggtgggacgacaccggggcgggctcgtgcccggacaccggtctcggtcgccttcgcaagcagcccgcgcgccccgccgtcgttaagaccagtgatccggccggtgattctgtctcgctcgtgccgcatctttctggcttcggttagagtggagacttctttaaggtg

SEQ ID NO: 364827 - DNA, 99 bp, Zea mays
tactgctcggttggtcagctcgagagagaagctgaccggttttgggcgtcgagattgttattgacttttgaggtacccggggtatagtctacaatacag

SEQ ID NO: 364828 - DNA, 174 bp, Zea mays
tgctggaacggagcgcgacgagggtagaaagaggggggtctgtcgcttccccttgttcattcccgtcccacacacgccgccgccgtcggtgcggttcgcttccgtcccccccggtccgcgcgggctgcctgcgggagcagggtggcagggcactccggccaccacgtgggtggg

SEQ ID NO: 364829 - DNA, 164 bp, Zea mays
ttcttcaagtttagagccgcagagggctgaggccgatgttcttaagctattggctgaccaggagagggaaaaggaagatgtacttgctagaatgctgtaactggaaaacgagctgcctgagaagcacccgctagagctcgaagcacaacgggtggatggtacac

SEQ ID NO: 364830 - DNA, 275 bp, Zea mays
ccagtgctttttttcatacatccgaagacatgatcactgggggccattatataagataggggggttcctaggcacctggaggaggatatgcagcttacatccgatacaggggccgctgctctagtagtgagatatctggtcatagctctctgcactatggaaagcatcatgggtattaggattaagattggttgctcaagcagccaaaacatcgaaatctggagtctgcgtattggaggccgttcccaaaccagatggccgacaaagtccaacct

SEQ ID NO: 364831 - DNA, 372 bp, Zea mays
tgccacgcgtccgcccacgcgtccggattgatgtaggatattggcggtctttcattcatcaattgtataagatgtgtacagaacagagtattgatccattaaatttatattgagtgatatgtcctgcttgagaacacctcgagatcgtatgtactagaccgtgtgctgatactaccaagatcaaaatgctgctcttttgcactatattcagactcatcaggataatgttaagcaaaatgttctacttcaactacttgctcttgttggcaagcaggcagcttttcatcaattgcgatcagtttgagcaacttggctacatagcgcttcttaggcaaagaaatgattcaggtgtccgtgggtttgaatttatta

SEQ ID NO: 364832 - DNA, 214 bp, Zea mays
tcctctcgtccgggttgccaaggataaatcgagtgcacatctttcataacttgggggtaaatcccagaaacaagaaattccacctacatggaaagagtcactaggagagccaattcgcatttcttatagttcaagatgatgcattcctcaccacctagaaactgcatggtttgtgtctaccatgacggagcctttgatcacagtctaccacctc

SEQ ID NO: 364833 - DNA, 310 bp, Zea mays
tgccacgcgtccggcgcgatatctggaaggctggtctttatcttctgtaaggattactaccactgatgtgactacgctatgtatatgggctgaaagagtcagagatattttttcataattgatatcattatggaatacttatattgtgcattcattgctaggctgaacctgattgccttatggatgaacatgcaacattttgattggggtaggaggtacaataagaaaaaagtataacaatgggaacactgttaagtaagtgaggactacatcacgtatatcaagcatgtctgttgaggactggcgaaag

SEQ ID NO: 364834 - DNA, 199 bp, Zea mays
gcctcacacctccccatcggttacatgcgcggtcgattttcttcgaaacatgaggggggagacaaatacgatctggtgcggacttacaaatggcggaggttacaacaacacactagcatgactactacaacaacgacgtggagtatcagccagagcacgatgacttcggtaggagcagcccgcttgagcatttagagca

SEQ ID NO: 364835 - DNA, 144 bp, Zea mays
tgctgacaagtcctcgtcggcagcgagcgcgtcgctcttctacgcatcgcgcgggggaagagagagagatcgacgatcctcttctcggcgcggggggtgcaggtcccctcccaagtggtgggggatccttctgggtagataact

SEQ ID NO: 364836 - DNA, 326 bp, Zea mays
ttctcgcgttctgcccgatggagtatcggcgtggggaccccacatagcgtgcgcctactggtgcttgtggtaagtaggccaacaatgatgacgtcgcgccaccgcgtcgacttgatcatatcccaggtaactaccacccatgccaggcttgaactagccttcatagcgacatgggcggaggagaggtttgcatgactactggaagaaccttcactggctcacctggagcgtcgtgaggatcactattgcgactggagggtactggatcacacttctaccaagcttagagtccgacatgccatgggtcacgagaggcaccaagtaga

SEQ ID NO: 364837 - DNA, 297 bp, Zea mays
tctttcaacaccctgcccacagggaacgtgggcgggcgtctgataaaccagaggcggacgatgcagacagtcccccacaccgactcacacggaggcgacagcttgacctgctaactgggggaggacctactaactgccacctccaacaacaggacgacgcaattcaatttctcactgacaacgggatgactagaccaggcacactagccctaataagtgacacgccaacatcttatttaggggtactcgagcagactacttattactagctgatgtggggaacggtgcagaagaaga

SEQ ID NO: 364838 - DNA, 348 bp, Zea mays
ttcgttggcgaagctgctgctcttctgctgcggcgcggcgggcgcgggcgtgacgggccacttcgccccggtctcccgcttctccaagacgtccgggcggagcttcctgccgcgccgctgcgcgggggacctgctgtacgtgtcggacccctgcgagcacgccgtggcgggcgccgacgacatccccgtctaccaaagcgtgttccgcggcttcatgcggtcccggacgcgggcgtggttggtggagtcccactccatggcattcattccaacaactggagctgaacctttatactggatgctggatattctcgcaaccatccttcatcctgtcacgtagttcattaa

SEQ ID NO: 364839 - DNA, 247 bp, Zea mays
ttcttcgcctccgggttggaagaactcaatatggcgcggcttttgaactcttagggggggcctgtattgctacagcttgaggaccagaaaagtaaactcttggctgtgtggtactgatgtgatttgcaagaataaaaataaatttctgttgatcaaaaaagtaagcaaaaaaattaacactagtgacttggtgtagcttttttgagtttctttcttttgaacacgaattggtaggtgacatcttttg

SEQ ID NO: 364840 - DNA, 185 bp, Zea mays
ttcttttcgtgcctcctcttcttactcctgtgggtggtcgcgttctagctcgccaccttgctaggcaactagcgtgaccacgagactcagcaggacatcaggtcgtctatattttgttaacggatcatagaattgaccataatactgacgaaagtgctgataacattgattatgataaaggagaa

SEQ ID NO: 364841 - DNA, 382 bp, Zea mays
ttctctcgtccgcttcccagtgtagttttgcggcggatctttacagcaacacaggtgtcaccgaaatgcttcggtgaccctagatatcaaccgatgcacgatccatctcgatcctgtgatcgaataccggcgtaggtactaccaataaagtcaggccccgtcaaatgctttacatggtgattgaagtctggagcttctcagcaccaccatatattgtgttcagttcctgtgtttattgccatagctaccctttttttctctgatctacgagctagacgtagctttgtgcttggagattccactactatgtttcctctgtcctgtgtatgctttaacggagatgcacgttgtacccgtggtaatatatataaatttgcgttgt

SEQ ID NO: 364842 - DNA, 231 bp, Zea mays
tcctactcgtccgcccacgcgtccgcccacgcctgcgaaatttaaaaaaaaagggggggtaaaaaaaaaacacgtcaaaaattctaaatggtccgcctttcttgacgttccaaacttacctactcctccctgctgcgggacccctcacctttcgtgcctcctcaattcaattcattgaccttactgttgcatctccttgctttgcaaaactcatttgtttcccaacttact

SEQ ID NO: 364843 - DNA, 215 bp, Zea mays
ttactgcgtcgcgctggtcagagagagagcgagagcgagatagagagagagccagagcgagatgccgggggcgggaggatggctttgctgcaaacaccgatcctgccaggcaacagctgctgcagcagcagcatcttcttggcacaagcgagggtgcagaagccaatggcagctgcgtcacactcacaggcacccctgctgcagtccaaaggcgg

SEQ ID NO: 364844 - DNA, 331 bp, Zea mays
taacaaacgggagtgcacacgacaggtgcacaatgtttttgaagagtcctgccccatttccgagtagagcttgagagctctactttcagggatctttgcacatgtcgatggacaggatgaaaaaccgaggtcatgatctcccatgcttgttgacctcatggaatttataatggtggataaataggacaccgaggagctattcaccacaaatgaacccctcaatatttttgtatcaagcttgaaatgactaagccaaatgctctaagatagcgaatggtgatgacgatgatgtctacacctagtagtgcacagaatacaattggcagacttg

SEQ ID NO: 364845 - DNA, 329 bp, Zea mays
tttggccgtgggttcgaagcaggctgtccacattggtggcggagaggcttacctcgttttctcccttcccgagaccccactgctgcgggagcctccgacaccggttgctgagccggaatggaatcgaatgcaatgatcttgaataattattcatcaaagaccaatcattgtgtaatgaaaatgtggacacgattgttgggtacgcagtaagttatcaccttaatcagaataaaattgaaacctctaaggatgccaaacttgtactcacaactgaaagccttaagcatgggctcaacatgctccaaagcatgcaaaatgatcacaagagc

SEQ ID NO: 364846 - DNA, 344 bp, Zea mays
ttggacgcgtgggcgggctcgcgctgtccggccgcatgccccgggacctcgaccgcctgccggcgctccagtacctctgcctcgcccgcaacaacatctacggcccgctcccgccgggcctctacctcctcgcctacctccgctccctcgacctctcctacaacgccttctgcggcccgctccccgacgacatcgcgcgcctcgccttcctgcgctccctggacctcaccggcaacgccttctccggaccgctcccgaccggcttccccgagacgatccgcttactagtgctgtacggcaaccagttctacggccccgtgccggaggggctggcgtctgggagc

SEQ ID NO: 364847 - DNA, 302 bp, Zea mays
tcggacgcgtgggtggtgaggggcacaactagaccatggacttggaacacaacctagtaacacaagatatatgtgcacggcttcagggagaacacggtgtcgagaataataaaaacactctaccattgccttgcttctccgtacattcttgttcccgttgctatctccagttctttgattatatctatccacgtgggtggccgaaaaattggtatcagattcatagatacttgggggctggcgcacggatactgcacacgtggcgccacgaagtagagggttcatgggacctaatctgcact

SEQ ID NO: 364848 - DNA, 245 bp, Zea mays
tcctgcgcgacggcgcgcacgaccgcgcacggaggcactgttgacgacaccgccgcccaactcgccgcccgacatggagcaccgagccaacgacccactgggcgggactggcggcgggataactgatcggatgacagctggggcaagaggaggggccacacagtcggcaccagcaccatgcatgtgacgaacgatggcaagcgcggacgcgaggccgccaagggggccggccaccagaaccggac

SEQ ID NO: 364849 - DNA, 335 bp, Zea mays
ttccaacgcgtacgcccacgcgtgcgtccacgggtacgcaagaggaaaaggcggtgctcggctgctgagtcacgcatggggaacgagcggcaggccggcgctgactagctacatgggtaggaccgggaggactgcatggagacgttacatagcgagtgctgcgagtactacatgcagacctactagatcgctgtaggtggccatagccagggcgacaacaagggcccacgtggacctcccgccggatggcgacagacaggaacgacgtggacctggacgcgctcagagcatgcatgaacgtgtgccgccgtcacgcgcgcgttgtgtacgactag

SEQ ID NO: 364850 - DNA, 501 bp, Zea mays
ttgtttcccctactacctcaaggccggtatccccaattccccattccttctcctccctttgctcgactggaggtggtctgcccccaccacctgtgcgcttcccgcttccctgtcccacctcacgctcccaggaggagacactccggaagatggtggggcagcggcttcgcgctccacagatgtcgtcgggtccaagaagcagagcctccgcgctccacggaggtcgccttccgcatggacaacagcgcgacgagatgctacaactacactcatgacagcttcaatagcatatctgcattttttcctcgtcctcagaatcttctctctcgcaagatctatgggaggaatacattgatctgatcatgtagtgcatgtgcaatgatacctgtgaaatagaagtcgttttctggggggagctccatcgtcggcaagaggggtcatggctcaccacggacaaaagcacttcttttgacccgatacatgaagccatgaaagtatggt

SEQ ID NO: 364851 - DNA, 396 bp, Zea mays
agctgtacgcctgcaggaccgccgggactgactggccggaccgacccacgctacctacagcagctggctatgagggtgcttatgagttccatcctagctcttaggccgtgagtgcggctccaaaatactccaagcaaacaggctgtgcgcattgggcgacagcgcggggaaaatccaccgctccaggaaatcccacagcggcgtctgatcgaggacttttacagcggcatccatggcacgaataacgaatcgctatgatctacgctgccgagcctgcagacaggaactggggtgaaagccaatgcgctagaaaaactgcacctacaagagctacaaggccaagggatgtcccaatcctagcgtttagaatgccctttgctctaggccctcacacct

SEQ ID NO: 364852 - DNA, 484 bp, Zea mays
  unsure (1)..(484): unsure at all n locations
tgcttctaggaatcatacagagggtttttttaacagaagcaaagaagagtattcttctgttccacatgaaagacaaagaatcgtaagtcagtcagcaccactttttcctgagaaaaagctcaatacagaagagagaataaaagatttgcggcgttctgcaacaaggaagttgaatacttatgttttgcctactccaaatgacgttggagctacttctcagagagcatcaggaaatcctacttctgaacctctcgagagtaaaggtgccttccattcatctccactccactcatctgcagacataagagatttgggagacagtaatctacctagtcctacaagattgtctaacgtacagtctgtgctgaaagatagcaataccaataaaacagaaacaaggaaagtactcccagtgngtgatctggctttacctagcctatcatgacctgagacttctgataacaacaagtgaaaagaggtcatt

SEQ ID NO: 364853 - DNA, 265 bp, Zea mays
tctaagacgacggcagatgatacatgggagaaagctatggtactaagggatcttgcagcacggggggctgacaatggcaagcatttgttcctgcaagcagatataaaaggacctgggttaagaacttgacaatactggcaaagctatccttaccattgaggagaatgataaatcacatgcctacgttgcgatagaactgaggcgacattggtttctgatcaaatctgacgtggaacttcttcttggggcagaacaattgactgac

SEQ ID NO: 364854 - DNA, 285 bp, Zea mays
gcacagtgaactcggcgcgggatcccgcaacccagcgccttactttccatcacgtctcgctgcacggcgtaacagacgacaccgacggaccttgcacggcaccgtcaaaggctacatgctgctcacccagcagcatggatcagatcatgccaggggaccacctgtcgcaggggcaacatatcctaaggcggactcttcacggacagcgccatggcagcatgcttcgcagacatatataccatcccgctcgacacgggcaaagacaggctccaggtgcagaagaac

SEQ ID NO: 364855 - DNA, 370 bp, Zea mays
ttcctcgcgtccgatttcctggtgggccgaatagggcgatgtaggcccggttaggttcttttccattttctgattttccttttctctacctcttatttagatttgtcaattctcaaattcaaccatgaattgggtttctaaattcaaattaaatgcataattcaagatctagtatgatatgcaatatatcttatttgtatttatttattatttaagccattgccttttaaatgtgtaaatcccacctatttaatataaggaacatagttttatattgtataatctctataaagaaatttctcttacacatatccttactgacacttatatacgtgataatttatttcatataagagctatcttgttaatc

SEQ ID NO: 364856 - DNA, 448 bp, Zea mays
taatgatgacgcgtgggctgaacgagagagcgaggctccatctggaccgggggacgggattacaggctgacgatgagcgaactggctccattggccagcgcctatccaggagcacagtcaggaccgtggcggagaaaccggctggcacgccgagagcggcagtactgctcacctggtgtcaacagcaacatggagctgaggaatcctcggcaagctcatctaatggctgatcccaaagctggaaatgcaccacaaatgatgattccgggactggcatcagctcaatgctaacggaaccctgcctctccaaagacggacacagcctcttcaaaatcctgggtcgactccagcaagcagacctaaaggtgcccccaaggttggctacaacagtcaggacttctcttttgggaccttcggttttggcacacctggggggtacacattagcc

SEQ ID NO: 364857 - DNA, 284 bp, Zea mays
tctttctcacgtccgctgtgatggctgctgcgctgtcttcttccgtaaagatggccggcaagatggctggctacactgttgtgggccctaagatggagctcaagagggcgctcaagtctgtactggattgtatgtgcactggtaagaatatggataaggatgtgtccaacgttactgccagcctctggaaccagatgtgtgatgctatgattaatgccatgatcaagaacattctctggtactctgactaggtctatgacaccactgttgtgatcagtgctatg

SEQ ID NO: 364858 - DNA, 372 bp, Zea mays
ttggacgcgtgggtttctgttcagatccttcgtaaccggctagtagccaccgcacggaagggcatgagccagaatgcaagcctgagccaactgtatggcagcatgcaggatgcttatcagcagatgcagacaccactggtttatcagcaacagtctgtcagaagagtacatgttctattacccaaaacttagtacttcaaaacactttattcagacaatttgtttacataacattttctatacttttttttaaaaaaaaacagggcttaaatgagctcaaggactcaacagtgcagctagcttcgagtatgggtaacattgatgcaccagttgatgagacagtctttgacatagagaaagaaattgatgatc

SEQ ID NO: 364859 - DNA, 150 bp, Zea mays
tccacgcgtgcgcatataaggtgaatgcctgccgctgccgattttctcttgcaaacagctggatgatggtcgaacctttgcctgatacaacattaaggaagagagcacacgcaacctagtactcctcctgagcgctagcatggagatctt

SEQ ID NO: 364860 - DNA, 300 bp, Zea mays
gggggcgaaatatcttccccacatgccattagccaaaattttaccgttatcagttacaggtgctaaaagggaacggaaaaaaaacaaaggaatttgcaacggaaggaaccgcgacaaattatttcccccctttgaaccacattgccgaacaaacttttccccacctgttttatttctcacttccggtgcggcattgccgcacaactgtcccccttaaccaatgaaactatacactgtccgggacttgggctcaaaaattgcctccaccggcttcttaggttggaatatcagaatctatgt

SEQ ID NO: 364861 - DNA, 476 bp, Zea mays
ggacccctgtccctcgtggcgacggccggtcgaccgccgctgccgaggacttcgccggcgacgaccacccccacgcccactacattatatgttgaagaatggcttggagctaacagtactgacaccaacttttggttatgatcagaagcgactggagtgcaaaaaaacacacaacagtaatgggtcacgaccatatgtctcgtataaagatgcatatggcagaaggttcttttggtgacaggatccggtgccagcaacctgtgtgcaatgaggttgtcgatagaagggtagtgtactgcaaaattcacagtggagagttgtcatgccaacagttcagttatcttcagagcggactggagagctcaggtttatctgtgcgccctgttaacgacagccaatataagggatctgtttccattgcagcagtgccatgccctgagcaagagttacatgtcaagcatgaaggtggtgatcga

SEQ ID NO: 364862 - DNA, 538 bp, Zea mays
cccacgtttccgctcggtctctccatagcctaggacgagcgggtacttctctccgtatcattggactcgtcaacccagacccagagacgattcagagtctgctccgcctatggcaacagtgaggtgagtagtactatcttaatctggttgctatgtaggcaagtggtggaaactacaaaaaacaaaacaaaaaacaaaacaaaaacttgcactgccaacgacatcaggctatatatatccaaccaaaggacgaaggggggatgaactctctttcttaacagcgacatttgttagggagcaaaacggaggagcgattactccattaacaaaacaaaaaacacccagccaaacaggggcgcgacgcagagcattaagatcatggatggattcagcacagtaggttgtagtagtactagtatacaagaacataaaagcaccaccactgtactagctagtacttcagcatgattcaagctggtctttctgtttcgggccacacagaaaaagcttttttaagtcgcgcagatttacaaatgac

SEQ ID NO: 364863 - DNA, 351 bp, Zea mays
ctttcgcgttcgggcacgcggaatttctcaccgtggctgaggcgcaaccccaatccgcgccggtacatggccaatatgttggcgccccaatacatgcgaggttacaagccacttgaggaccaagtcggtactctgggagactcgattatcaagtgatgaagacgatgccaaagctcatcaatttataatggaacccatgatgactcgatcgaatggcagtaaagctagaaaaggctacattggcttgcacaagctagagagggtgtttagaatgactgaatgattagaaccgaaccaagatgattatagcaagaagccgatccttaagcattatgtgatgtcgttagtgta

SEQ ID NO: 364864 - DNA, 405 bp, Zea mays
tcgggtaaagccagtattcaatatgtttggtggatccggggcaatatcagccgcacagtcaccagttgcgatcgcaggagcccagcaatctggtctggaccaacctgatgcttctgctcttggctataaggtcaaaaatcttgagaagaaagtgaaatccaggggtaaatctcggaaacacaggtaaaattttgtgcatctgtgccccagatgagcaatctgtacttccaccatcggaatgatggatacttgatttgtcctgatatgccccccaaaaatcagattttgtattaggaacctatcttttcgtcgtttttggctgattttgttttgatttttcaggggggggcgggggtgaaataagccacataaatgtttgacttattaccagagttgattatacac

SEQ ID NO: 364865 - DNA, 499 bp, Zea mays
tcggttacgcgtacgcccacgcgtccgtattggtagggggggatgatgccaaaacacgagttgggtttgtgtctatctggaactattctatttgccatttgaagcgcaagcctggtgcgtggtggaagctattttactgagtcacaggtcgctggtttaaagcagcctcttggatctgcctttctattctatttgcctttaatttcttgattcatgtgagggaatgaagctacttcttcggctcaggatggtagagaactatgcgtgctatgcttaagtcatgttacatgttaattatttccattgcctgctattgttagcagatgccaacttggcagtgctgattttatttggaccaacctcatgatgttattcatagagaacagctagacttcacaatggcgctacaagcagatagttcataaagagaataaaatcgcagcagaccatgttcctgctcggagaacatatttggaagcatgttgtcacaaagaacatg

SEQ ID NO: 364866 - DNA, 286 bp, Zea mays
tttcgctttatgctacagatttggattgtgaagagcttgaactgatggagcagaaacccatttcgaaggctcaatcaggaggagagtcaagcgggaacagatcgaatgatagctactttcccggccttaatgatgatctgtctcaagactgcctcgctcgggcaagcatatcagactacctttacctttcttcgctgaacaaaacattcaattggataattaacagtgcttatttgaacagactgcgaaggaaatatgacattgttgagcactggttctatctagc

SEQ ID NO: 364867 - DNA, 272 bp, Zea mays
ctttccgtttccgccgccgacaacagcgtattgtagtgtaattccagagagggttggggagagtactacccatccggattgtcggccgtggaagctgttctggatcaggtccctgtgaccgaggttccagcggaggtgctggcagtccaagtggtcgacgcgccgaacgcagtataatgctcccaaagagaacaacgcacctcaggctaacaagctttccgcggctaataaaccgtcgcaccaccctccctaccctaagatgattgttgatg

SEQ ID NO: 364868 - DNA, 399 bp, Zea mays
tcggttaattgctcagacctgctatggaaaagatggggttgatgtgctgaaaacgagctgtatatacaagtccaaagaacttgctggttacagaaaagttgttcttgacacgctcggtggctgcagtacggatcccacattatcacaaagtaagggatacattactgaactgccttctaaattgatcgataaagcaggagagtctgttaagcattcaaaggaatgctgtcgctacaacattgaggcgactgaattaaaggagttactttaagtcaagttcctatccacctcttgtaaatcatgagaggcatgttggtgtggctgctgttcagacaatatgagaaccttgtacgcagatgacgcataacactcttgatttggctggatggggagacatga

SEQ ID NO: 364869 - DNA, 109 bp, Zea mays
cccacgcgttcgttcatctcccctccccggggggatcctacgacaccggatccccattgctgccttcaccgcccccgctacttgccggttacccatagctgtctccact

SEQ ID NO: 364870 - DNA, 486 bp, Zea mays
ctttgtctttctccttcctcgccgctctctgctgcattcgcgaacacgcatcgaccctacgactacgagtagcgagagaggattgatggcggcgcagctgcggtacatgatgagccattattttggtaccccacctagcaaggaggtgatccaagatctgtactacgccttgaggacaaagggaggtttgacccccaaggaggaggagacgctcctggcttgcaatttacttcctggtgtttatttcatcgtgggttcagtactgggcactttcgcgatgttgttgggttcccacaaaggttgctcactccctcagctctcgatttaatatttgataatgttaaagcatgccattcctgagaaagcgataatattgtgtcaacaatctgcgagcaccaaattgtgttaaaaaacatgccaggagcatgactgcggccttgtatatcaaggttaaaacctaaaatagtattcaatagccatactcgt

SEQ ID NO: 364871 - DNA, 346 bp, Zea mays
ctgtcgcgttggcgccgccctctctgccgccgtccggcctcctctggccggacctcctcgcgggcgcggcgtcctccacctgccgactcgtcgacgcgcattcccgtcacttcctggccctatcctctttcctccttctcccgctcgccctactcctacttgcactaccctgaccgatgatctctgacttcgactcctccggcgactacactcccgtgcatatccgggtcccgcaggatccgacgaggtacccactacccatcccgctgccgctgctcgaccttgccgtggcgctcctttacctagacagcttcgccgtcgccgaggacagcgcgcacgcagggat

SEQ ID NO: 364872 - DNA, 522 bp, Zea mays
cctacgcgttcgcgcgctgcagccctctccgcggtgccttgggccctcccgtcgcggctacctgcagccgccggtcaacctgccgacgtggccacctccggccgcccagatccgctgcaccacctacagacgccagccgccgaccgcccagaccccctgcttcaccagggagagtcgccagccgctacctctagccggcggtcgcgtagatcccctgctccaccagggagtcgggcgcccagatcccctgctccaccagggagagccaccagccgctccaccactgtgtgccaaccctaggccgagggattgcgcgcctccctgacgtgagccgcgactgggtgaacacagatattgctccagcttgtgaagcagctgttcaacacaggttataagagattagagattggggtagttgacttgacatacctcttttcacacgaactgaagaactaattcatcagtaaaccttgatgttcttgatgttgagaggctgaaagagcattatgcatgttggacaga

SEQ ID NO: 364873 - DNA, 303 bp, Zea mays
tcgctatgtctagtcgcgagcgccgccctttgggtgatcgttgattttaatgaggatctgcgttttttacctggacaacgagttcaactggaacggtcattactcgcggtctgtggccgactccatgctctacggccggggaggagaccccaatggcgcaacagaatcttaccagtttaaccccaatgttccactcaataccaaccggcatattggaaaaacacaaaccacctgagcagcaggggctactccctacattcatcgggggagcaagaaagagaatccatcctgtggggagggggg

SEQ ID NO: 364874 - DNA, 247 bp, Zea mays
tcgactatggcgtccctacgcgctctaggaccggcatttctgtgctcgagctcgggtgatcgccgggaccgaccggcgggcatggggcagtgttactcgaggaacgtgcacggggtccactcggactgtggcggcgtggaggcgaccaccatcacggcattggtggcgggcgggccggaagatgctgcgtttgacgggggagggcgaggaggaggagggaggtggcaaggtctccttcgttacctct

SEQ ID NO: 364875 - DNA, 321 bp, Zea mays
tctcgcaaatgggatgggatcatcacatgcgccaccactgctcgtcacggctaagccgccgtcgccgcgcgtttatctgcttcacctgctgcaggcagcgcgggacgatgagctggagaagagccgccgcaagcccggcggcggcggcaaggcggcggcggtccggtgccacccggtcctggcggaggagcgcaaggcgtccatcaggggcgtgggtgggcgacctgctggccatggcgggcggcggccggaggagcctcatctcgctcggcgtcggcgacgcgtcctcccacgcatgcttccgccgcggcggggagttcg

SEQ ID NO: 364876 - DNA, 382 bp, Zea mays
cttcttccttatcctttcttcttccgttgcggagttgcacctccattgtcgtccatgactcccactcctccaagccccagcactcacggctggctcctcacgaccccatggccgagcctcgccccgacgaccattgccagtgccagcaccaacggccggcgatcccatgtgctcgcggcttgatctccccatcggggcccgtacagccggttctcgcaggtcatcttcttccctgagcactaaactggcctcccccacacaggcggcactcgcaggtcttcttcccccgctctttttcttctctgtatgcttggccgaatcagcccttgtcctaggtgggacggacaagtccataaaaaatttagggacaggcaaggtgcaa

SEQ ID NO: 364877 - DNA, 241 bp, Zea mays
tctgtgtttctccacttgccactggaatggagatgaagcacggtgctctattagttatgtttttcttttcttcgttccttgaggttatattaggattttccctctaaattattgacttgctagattaaaatcatctccttgataccaccaatatcatctgtgaaaaattgataaatatgaatgtgttaacttgactccattttatcttctccttatttgagcctatattcttctttttcta

SEQ ID NO: 364878 - DNA, 325 bp, Zea mays
  unsure (1)..(325): unsure at all n locations
tgctgatgtatgtatatcccatatgcaggtgccgccgctggaccgcgtgccgtgccgcatcgaggtggtgttcccgccgctggactcgccgttccaggcgccgggctaccgctccgtgcagcccgtctccatcagcctcccggcgtcgcccatcggcttcggcttcggcgtgcccgtcatccccgngccggccaacgccgccgccgccgactcggacgacgacggcctccggaggcaggccctccaggccaacgccgcggccggcgacccgcatcaggcgccggcgccgacgccgccgcccgcgcggaagaatggaggagggggg

SEQ ID NO: 364879 - DNA, 299 bp, Zea mays
  unsure (1)..(299): unsure at all n locations
tgnctgcacaatgtctcatacactttgacggaccacagcagccatgctggcatgccgtcgcgagccgctatccgcatgaagcccccttccttctcggtgtccttaaccacggcgtcccagctccacgacgccatcgaccgcctcctatcgctcctacgcgccgacgcctcccacgcccccgccgctcgcgcgatgtcgcgggccgtngcctcgctccggccggcctccactatcctgtccaaccgtatcctacatttcctgtcctcccacccggacactttccgggacgcgctcgccct

SEQ ID NO: 364880 - DNA, 256 bp, Zea mays
  unsure (1)..(256): unsure at all n locations
tttctcgagcggccgccctcantttttctggacttgatttggtgacgctgatcatgcttcaggatatgaaacgtgaaagatgctgcaggggtcttcaaaggtctattctgcaggtcacagccgtaacgaacattcaaacgcaaagatgtacatcagtatttgctacagaaggccttggcacagtcgcacacaggagaagccgctcttgttattttcccttggaaatatgtacaggacgccctaacactatgtgcaa

SEQ ID NO: 364881 - DNA, 103 bp, Zea mays
tcctcgcgtccgggggcgcaggggcacacacgagggatatggcgagaagaacggatgagctagcccagcaggggaaagacggcggaccgcagcacacgggagc

SEQ ID NO: 364882 - DNA, 290 bp, Zea mays
tcatcgcacacgccgccgctatacgcgacggcgccgagcgcatcgccgccggcccctccctccctgcgcctgtactcagcccgctgcttctcagtccacttcatccacagctcctcttctctcggtctagagatccgtccgggcacggtagtctcgccttcgttttggcacaccgaacatttactctagaagagttgtactcttgggtgtgccggactctctgtaacattctgaccaattaccattctggagaagaggtacatttgtccgtcagctatgtccatagaaga

SEQ ID NO: 364883 - DNA, 315 bp, Zea mays
ttcctctcgtccgcccacgcgtccggtggacgtttacaaaggtctctagcagaaacacttgcctctgcagcttcctgcatcaaagatcctgaagcatctgcacagtacctgagggatctcatgggaccagtggcagggtgcctggtagaaaatgctagcaggagtgatctaaaatctgtggcacagcaagcagatgttatttacatggtctgttgcctattggaacgactaagaggcgctgctagagctactcaaccccgaactcaaaaagttctatttgagatggctcatactgtgatgaacccacttttgact

SEQ ID NO: 364884 - DNA, 169 bp, Zea mays
gaacccagccttaaccccctttggaaagggcaacggttgggacaaaaaaaaacccgggaggaacaaagggttggggggtaaaaaaaccgggaaaaaaaagggggtttatggaaactgggcctgtaaagacgggggactttaataaaagggcggccctttaaaaaaggga

SEQ ID NO: 364885 - DNA, 231 bp, Zea mays
ggaacaaaggggagcaacaagcttattgagcatgttttgtttttaacacaacgcggaaatgtactgaccaagttttgctgctttggaaacctaggggcggtccaaattatacacaaacctttaaagaaaacaagcaacagggggggaaacactgaaactcagcaaaggtaaaaaggggactaaaaaactgtttgcaaaaaattaacttggtgggggaaaaacctcattttt

SEQ ID NO: 364886 - DNA, 124 bp, Zea mays
ggaccataaatttttttttccccctcgcaataaaaatagatgacagcaagaagaaagggaggggacattcaaagagggagaggaggagaggaagggggaacggactatagagggcgatgaggac

SEQ ID NO: 364887 - DNA, 212 bp, Zea mays
tccacgcgtgcgcccacccacacgccacgccaccggcatcctgagcgtgaggccttcaactgtagctcagccacatatgcggctcctatcttccggtctgcgacttctgtacgcgaaagattcctggctgggtctcgcatgttgtgctcggagatggcgtgcatggcgctggacgtctgggagatcgggatgggcctggctctggggcggga

SEQ ID NO: 364888 - DNA, 249 bp, Zea mays
atcacgcgtccgacgtattttaactaactattgtatgtttggttcgtctagtttggatgatttctcactttgctagctgcggtggacaggtggtaaagtgaaccagaactggtaaaatgctggcatgtgattgggaaaacaaacagctgacatggtggtttcttttctgctacactcttgtttattaactatactcattacattctgtgttggagttattccagtcagtgcagttcttgcagacaagga

SEQ ID NO: 364889 - DNA, 148 bp, Zea mays
ggggaccgggccggaattctttggatgtcccacgcgtccagtagcaccccccatggaatgaatactagcggtggctttattcatgcaactcacggtatgtgccgaaacacttactcaggggaggtgggattaatttaagaaatcaggg

SEQ ID NO: 364890 - DNA, 191 bp, Zea mays
aataccacccgtccggcgccggcagcgagactggtgctattacagctggagtgggccatggctgagctgatccggaaccccaaggcgatgcaccgggcgacggtcgaggtgcgcgaggccttcggcgcgcgcggcgcggtggcccagcacgagctgggctagctgcggcacctgcacctcgcgatccgggc

SEQ ID NO: 364891 - DNA, 235 bp, Zea mays
  unsure (1)..(235): unsure at all n locations
gcggngcccccgccggcggcaccggcggtccggacggggcccaaggggcaccggcgtcctcagcggaggagcccacgacgaaagaggaacggattgcgccgccgggcgagccaggagcacaaccgaaccgagaggtcagcccgacgggggcgaaggagcaccgaccaagaggactggcctagatgaacgaggcgcgcgacgacacgaggcctaagcgtacgacaacctaggccga

SEQ ID NO: 364892 - DNA, 243 bp, Zea mays
tctgctgctcccggcccctgctgccgctttgacgcgctgtttcgggcgtgcgccgggaatttcgtcgccgccgcgcgggccgtcgggtgggcgatcggagcgctgttcacctgcatattagacgttgtgggtttactggtacgaatattcatatgcgttttcatggggatgattatcaattgttgagggtattaattggttagtatgaaagaaattattttataggatttcttgataaaggtt

SEQ ID NO: 364893 - DNA, 277 bp, Zea mays
tcacgcgtccgcccacgcgtccggttaattgaactatgtccatcctcatgctattctctgaagaagcttagtatatacggaatatcctccatgggagggatggaagaaaatattcatagcttcagagatgaaccttgggctgtcgctggacttgtcattggtctgggaaactctgttgttgctctgtatagacttggagcttatgaagcagttactgaagtcaaggatgtattgatatcatgggtaccaaacgacgattcgaacactgcgtaatttg

SEQ ID NO: 364894 - DNA, 164 bp, Zea mays
tgacctctacttgctaggaggtggctacccggaaacttaccaccgccgcctgggcccttggcctcacgacacgatgtcttgcacggtgaccatcccgaactcgccagtattctcgccttcacgccgcccgctgacctgcaaggccgctcccgcgtcgccggagc

SEQ ID NO: 364895 - DNA, 378 bp, Zea mays
tttatagaggttagagcctcaatatacataataccctacgttctctttgagtatgatcaattgatgaacacaaagatgaataagattaaaaactcaaataacaactaggtgtcataatcttctagctctcctttatgtatgattatggtgagagtctaaattattgatctctagttcacctctatgtataccttttaatacatttgaacaaatcattgaactgtttgcgaacctctctctatgttggtctactcttacttcttataggctaagggaggagaagggttacatggctgctaggtggaaggcccatcgaacaaaggctcaccaacacctatctcattgtagtcgtggagttatacgcaacgatacaaattg

SEQ ID NO: 364896 - DNA, 340 bp, Zea mays
tcacgcgtccgcccacgcgtccggctggagctggagtagtatgcgacgggccctcacatcgcgtcgcggatgctctacatggcagagaatagtttcaatgacataactggcaaagtggtagctgacttcggctgtggctgtggcactctggctgtggcgagtgctttactggatgctgagtgagtatgtttaacttggtagttttaagttactatgttctttcctgtgacaatccctctattgcgtaatgtctacttcaatattttaaaacaaaaaaacttcctgtttagtgcttatgtttgttattttgcacagttagtttgttgattgatctaacaaa

SEQ ID NO: 364897 - DNA, 546 bp, Zea mays
tcatgtttttggagagaaagaaccaagagggcgtatttgtggtttaggcttaggaccaactccacaagatgtaggcactcctggaactcaaatgaaaatatcaacaaagcttcaaatggcattgcaagctcgcagtcagtctgagcaagaggttagagccttaagacaggatatgaatcaaatgaaagagaaaatggatcaaatttatcaaatgatggtagcagctcaaggggtgcaacatatagaaagcccatcacaacatgggtctaattctcgacagaactcaagggtgcatcggtcagatgaggtggcacatggttacaatggtaatgaccattcaccaaatatggttgaagatgacttgcaccttactaggcgagttgcaagcactatgggcctgccaaggaatcgtgaagatgttaatactattgaagagcaaagtcgcaggcgagacattgcaacaacggtacctcaaagaaatcatggatcgccttaaaatgcagatgatatcatgttggtaagaagtatattatattctatgatgag

SEQ ID NO: 364898 - DNA, 178 bp, Zea mays
tagcactacaaaagatggcggcttcgagatggaacgttttgacctgggcccagctgttgatgagatcatcggcagcatgaggtacagcgtcgaggaagacattatcaccgtcatcgagaagaaagccaaggggacagaagaagaagaacgtgtgtgggcgtgggagatggtggagtca

SEQ ID NO: 364899 - DNA, 470 bp, Zea mays
tgggatgatgttgtgctgaatcactttaatagtttcctatgaaacatccagatcacattctttggggcactgagatctttgtttgaagattaaatagaaagataatgacatgctactctctctgcccctaattatctctgtttgttaaaattatgttgtggtggcatgatttttattaaatattgagggagcagtggtttcaactagaaatatgttcacggatttgaccccagcttgcacaccacattatggtaaaaggtttcaactagaaatatgttcacggatatgatacttcaaatgctttaacacagagttcgtgccaatgctaccttagtgattatatcattaagaaaagaaagtgttcattatttgtaattcgctagtcatgtcaatgcctcatacatgtcagcaccatgtagaaattgaattatttaacatgaatgccttgctattttgcagggtcctgactt

SEQ ID NO: 364900 - DNA, 271 bp, Zea mays
tgctcgtcttcccggagtcccgcgactgcagcgctctggtggaggccgaggtgaggggcaaggtggtgctgtgcgagagccgctccatcagcgagcacgtcgagcaggggcagacggtggccgcgtacggcggcgccggcatggtcctgatgaacaaggcggcggaggggtacaccaccttcgccgacgcgcacgtgctggccgcgtcgcacgtgagccacgccgcggggtcgaggatcgcggcgtacgccaggtcggcgcccaggcccac

SEQ ID NO: 364901 - DNA, 343 bp, Zea mays
tgcagcctaaaaaaaccgtatcgtctgggctgggcagtttccttctcctgttcccgcagcccggtttgccgaccaggttccaccgttccagagtagccaagcgaatcccgtgtctggttcgcgcgatggcggaggagcagtccaacccccagcaccagcaagcggaggagagggaggttatggtggcgcagcagcagccgaggagggccccgaagctgaggtacctggactttgaccaggtggtggctgaagcttcccgttatcccctgatgggcttaacggaatcaaaaagggcctccccggcccgtttctttcatccaggccatcgttaagattttcttct

SEQ ID NO: 364902 - DNA, 415 bp, Zea mays
taattttcgagcctcgcacctcgcacggtcggtcgcactgaatagcagcgaccaaaccagttaaccagcccaacaaatccaggcgtgccccgtgcgcgcatccctccgcctcatggcggcatcagcgtctcggcccctcgcgctcctcgcgtgcacctcggcatctctcggcgctgggcggcgggcgtgggctcgcttggctgtctcttcctattcggcgaggtcggcgctccccaggctccgcgggcgccggtcgttcgccacctccgcacggggcgccgtgatggggaacccaggccccggcgccgttgacgccgacgtcgggatggacgccgtccaacggcggctcatgtcggacgcgtgagttgcctgcggtacctccgtcgcgtcaaatttggtagcagtgccctgcttg

SEQ ID NO: 364903 - DNA, 355 bp, Zea mays
tcggttgcgtgggctaaaccatggcgccgccggccgggtccgttggtccccgcctccgactccgccgcctcctctctacggctaccgaagcggcggcggagacacctgcgcccaccgcccccagctccgtcgtcgccgcgaagccggcgaaacaggacccgaggctgctctaccgtcgtttgtcggcgcttggaagcgccggggaggggagcgtgtcgcgggtttcgaacaagtgggtgcgggagggcggcgcgacccgaaacgacgacctcgtcaagcatgtcaaggagcttcgcatgtacaagccgtacgcccacgcccttcagttgatggactggatggccaatgcaagggg

SEQ ID NO: 364904 - DNA, 256 bp, Zea mays
tcttcctctgacgcgtgggcggacgcgtgggccggagggcgttcgttacagcctcacggcgcatgcgagaaggcgaggagagggagctcgccggcaaaggccaccaagagcgaaaaggaaccacagaggcagtctccatggccgccgaggcgcccgtgcgagcccccgccacggcgcggtcctcgcgccggacgggcgccgccggcgaatccgtcttgcgccttctccttggccaccgtccgttccttgcgccgcg

SEQ ID NO: 364905 - DNA, 123 bp, Zea mays
tttcctgtcacccgtatagacctcgtgatagcggtggggctcatttacgtgctagcgcggctcctggcgaattacgactccagaatcgacgacgcaaaccacgccgtgaacgacacggcgccg

SEQ ID NO: 364906 - DNA, 407 bp, Zea mays
tggccgctgccggagaaatgccgccgaggaggcgagatcgccggagactccgcgacccgtcgccgccgtcctccgatgcaagagcaccaccctccgccttaggcttgcgtctcaccctcctcgttcccctccttatcctggttctcgtcctcgccgcccttggcttctccggcctcctctcccattcccctccccactcccaaacgctacagacaaccgcccactccgtctacgagcgcggtctggtcaagcgcgacgtctccgcacgagagatcctctctgagcacacaagggtttccgagaaccggtcgcagcggaacttcgcgaaccccgttctcgcctatgtgaccccctggaactccaaggttatgacatggcaaagttgttcatcacaaagcttactcatg

SEQ ID NO: 364907 - DNA, 316 bp, Zea mays
ttccattcgtccggtttatgtatcacagtaggggatggctttttatcaacaacggagatctccagctgggcctgagtgaatgaagcaggaacttcagtgggtgggcagtggaccgttgaagacccagctatcagcaagagaaacagttagcacacctgcgcatgagctaccgtcaaaattaaccagtaagttctgactgagttcgccagcacgtgttctataaccttattacattgaaattgatttcccctcttcttctttcctgtttgtcggggttactgaaatgcaagtttataaacttataaaaaaaaaaata

SEQ ID NO: 364908 - DNA, 321 bp, Zea mays
ttccctcgcgtccgcttatgctcagcaaatgcggcaagatttggtcaggaagatgaagggctatctcttgttctaaagatattggaactgatcagagcggctcttgaggatacctctagtggccaagaacacaagactgtagttgggatactatgccttgtcttgcatcacactgggagcaactgtcttattgagcctgctaaagccataatattgaacagtgctttggactctttaacagatgctgtagagaacaacgcataggtttacggcccatgtttatctggacacaccgaggagacaacctttggagaattcctg

SEQ ID NO: 364909 - DNA, 457 bp, Zea mays
ttggattcgtgggcggacgcgtgggccgagctgtaagctggcgcgtacctgcctacctatccgtaggagaggaagaggggacaaggcccggtcggtcggtcggtcggtcggggggctctcggatctcgccgctgcctccccgttcgttcgttcgttcgttgggatcccgcgccggcaccggttccggctcctgctcctgccaccgtccctgtcgcggatcaaaccacggatctgctgcagaagctgtcgctcgactcgcagcccaaggcggcggacgcaacacagcctgctgctgccaccgccaaaaagggcgccgcggcgagccagccgctgagcgtggcgatcccgccggagccgtccatcacgccggtgatccaagactttacggatcccaacctgttttatctaccagcgtattactaccgaggctacgacagtttcatgagcgagtgggatg

SEQ ID NO: 364910 - DNA, 516 bp, Zea mays
  unsure (1)..(516): unsure at all n locations
ttgcccgcgcccgtgccgtaccgtccctatcacaccggatcgccactcgctcccccccaccccactccgccccacctccgcgcctcagatccatccccaaccggcaaccctagcgccgggttcctcctcctcggatccgcccgccgccgcgcggactccattgccagaggtgatcgagggggagagatagagcttgggtggtcggattagggagagagggagggagnngatgtccagacggtcgttgaacccgagccggcgggtggcggacgggggtctgccgacagtcggaggcctgttccaccccaagtcacgctcgcctcccgtgcttactattgccctagtcgtcctgggtgtcattcttctcgtcgcctacttcaacagcggctcaggtgtaactggtacaagcagagagtctgtgaccaggtctgaaggtacaactttnttttctccctattgtctcggtttgggttgcaaatcacccgctgatggtatttctttagtcatccaaaattc

SEQ ID NO: 364911 - DNA, 401 bp, Zea mays
  unsure (1)..(401): unsure at all n locations
ttcttcgtgggccagccggccaggcgaccgccgccaccgccgccctactcctggtcccagctctgctgcacccttcgccggcgacgagcgtccaccgcggcaggtacacccacccccctcacttttgcccctccaaccaaaagcgccggcatctcaaaccggacggcgctctcttctctatcctctgtgtcccctccaccaaaaccgacgacgacgtcgctctcctccaccggtgctcggcgctctccctccaccagcggcggtccaccgacgctcggcgagctccaccggcgggcgctggtcagatcctctcggcagtcatccacctggcacgtcggatagctcgcgcctccgttggcagtcccaccgcncgccggtccttccccagcgcccccggtgat

SEQ ID NO: 364912 - DNA, 510 bp, Zea mays
tggtggaatgggtgctatgctgttccattttgagggaagctatgagaacgtggtcagtgcttgtttgagtgttgacatgatttttggtgttcttggttggtctgtggggtgtagctggtgtccattgggtgctcttgagtgctaatgggtatcaagagacgtatactgcagtagttcaccactaatactatcttcctccaagatgatgataatgttggaagcaccaagacatcggtggctcaaaattttgttggtcagatccttaaaatctgggaacatagagcttgtccatattcctcattttggaaacgttcgtccgttccggagacgtgggaacaatctcgtcccccatctcatccttgtagtgttaaaatcctttttagcacgttcccgttcctcaacctcatcgatccagaaacttggttgctaaggtcagatcatgattggacaggtgagcgagtggaatcctttacttctctgtcaaatcagaaagtgagggtgagcaaagta

SEQ ID NO: 364913 - DNA, 414 bp, Zea mays
  unsure (1)..(414): unsure at all n locations
ctggctccggcgacgcggccggatgggtgccgaacgctctcggcgctggaagctcctgcccttccggtcgctgtccctgccaccgccggcagcatccaagcccaagaacaggccacaggacgtcactgtccctccgccccggacgacgaaggagaagggacaggaggaggtgccggcggacttcctgtgctgccccatccttggcacaccgttggcggacccggtcatcctgccgtcggggcggacgtacgagcgcgcgtgcgtcctggcctgcgcggagctcgggctgtccctcggtcctgacggagtggtggcgggcaacagggacccaccgggcggtggcgttgccgncgctatacccaacgacgcgctccgggcgggcgttcggacatggtgcgcgctcgctgatcgcgc

SEQ ID NO: 364914 - DNA, 504 bp, Zea mays
tcttccatcctccccctcgcgcatccaggaatcatcgcgtcgtgctcaagccaccccgccgtcatcgcctcacgcaccttccttcggcaaccttctataggcgcaatcacaggaatccccgcggcctcgccccagatccctaaaccccgcctcgtctctcatggaaagtgcgtcctctgcgctcggctctctccgcgtctgcgacagcccgctatccatggaacgtgggtcctctgccctggatcgtcacgtcggccctcgattcgcgtccgcgacagcctaatcccgcacgtggattgggtacccctctgccccgaatcgtcgctcccgcccggcatcagcgtccgcgtccgcgttgtggtgtccgcagtctccatggaaggcgatcccgcgtgtggattagcattagcagatgaagaggcggaatgttcttcttgggatagcgacgatgagtaccagaaattcatccaaaatatgaacccctcagggtcaccatcgacaaca

SEQ ID NO: 364915 - DNA, 385 bp, Zea mays
tggcggcagatgagaggccggttaagagtgtgaggatgttcctgcagtgcggcgcggcggtgacgccgcagtggaggtcggggccgatggggcagggcacgctctgcaacgcctgcggggtccggctgaaggtgggcggggcactgcgggggcaggtgcggcaccgccccgcgccgaggacggccgaccgaccgcccccggacagaccggcctcggagtcgtcgcctgacagcccgatctgggagcccgggtcagttcccgacgtttacctggtgaggaagatgcctctgaagcaggggagacctccgccaccgtcgacgatgcccgagccgtctgcgacagcgccagcggtgtacctcgtcaagaagaagaggaagaagacgcc

SEQ ID NO: 364916 - DNA, 443 bp, Zea mays
  unsure (1)..(443): unsure at all n locations
tattataggcggggtccaaaccgatcgagccatgattagctgaacagtccgatagcactggcccatccatcctcccactcaaccatcctaccgaaccgagtaactgttcttggcatcgtgtgatgaacttgtgattcgtaatatctcttaacgattctggttgcgtggctttgcattgcattgcagcggggagaaggcgttctgcagcgccaattgccgggaccaggagatccagctggaggaggaagccgagaacaacacgagcagcggctcccctgggtcctcctcctcctcgtcgtcgtcctccaacgacgacatcttcatggccggcatggtggtcgcgacgtgacctccacccaccggcccaccaccgcgccgtttcgccgccgaggcgttttttttccatccctcctncaagtacgacagtgggacaggcgatccta

SEQ ID NO: 364917 - DNA, 533 bp, Zea mays
tggtagagatccaagaggtcaatgctgaagcaaattcagagcagcagcaggatggagccgtcgagccagatgttattgtgacagctcagagtgaggttcaatttttaatgtgtgacagtacttactccgcacgtaatctttatgatattcagattctttctacagtcaaattctctcaagagtcagattctcagaaaaactcctcaactgaaccaaacagaccctacatctagcgtctcaccaccaatattatccagcctgtttgtttggctttaattcgtaccaatttttactatctttataatgttttgtctctatagattgcagctgcagcagtccaaattgttggtattaatacgaagtgaataggctgatcagcctcggacaacttgaagattacaacctcaagattctcctagagaatggtttcctggagatctgggacttggggcgacgcttgctagcaaaggtaccacgtgcagcgaatcgcttgtacatacttgaccgtcacattgggagcaagtgtgagaacg

SEQ ID NO: 364918 - DNA, 409 bp, Zea mays
tttcagaaaccgctcccctcgcacgccggccctagctggctagctcccaaatccgcccctccgcctcagatccctacggtgggatgcgagggaacgacaaccacgcggcctcccgtccttagagcctcaaatccgatgccccctccctaagccattccctcggccgcgacatcaacgaaaacgagcatggcccccctctacctcctccaccttgccgtttatggcctccgcactgccccaacgtcgacaccttcgtcctccccctctactcccagtgcaccgccgccgcgtatgcgctatcccacccgatggacgtgttgccgcctctgcagcacgccctgtcgctgtcgaccccacccagccatgcatttggagtttacaatgtggagacatgatttatccaccggac

SEQ ID NO: 364919 - DNA, 468 bp, Zea mays
tttatggtggaggtggcgcaggtggtttagggtcgatgggaggccaggtgcccagtggtttggctagtgctggggctggtgcatttgggcctggcggattgggtggtggttcatttggtgtatcatctcagttcggtgctgctgggatgggggcatatggtggccttggaattggtggaggctctatgtaccgcatacaacagggagcaggtgggctgcctgcaggcacatttggtgatggagggagctacccacctccaggttctggtttccggggccaggaccctcaaggtggaatgtctcctcctggtccaggtggcagggctcctcctatgtatcccaacgtgccaccttatttctaagatggaaacaatttggttgtagcaccaatttgcgctgcataatactactagaagggacgtgtcgactgttgatccacctaacccaggacattaatgctccatcgaa

SEQ ID NO: 364920 - DNA, 573 bp, Zea mays
  unsure (1)..(573): unsure at all n locations
tttttacgcgtncgagcgagatgggtactgaaattattttgctagagtgagcaacttgcagagaattggtacaagcagaagatatgccactacgtataaaacatgttcacgtcgataaatttgttgctgactcacttatgatagatgttacttttttatttgtcatcgtttagttcaaaaataaattagcaatagacaaacatttaaaaacagaagtagtatatagcaggctaccaaaacacacatgcatggtgactgcttaactctttgtcttattctatgtataacgtttgagcagttaatcttggtggtttttacattcttgtgctcacaagcgctgatatttatacgcacagctgactgatgcaggtaaatgcaaccaaataaaggaggtagcagtatatacttctattttaatatancttgtggcagggacagccaccagctggtttcctacttttaaaggtaatgcgctgcagcccccctatatgggtcactaatgtcacaagtttacttgtgaagattatgtncgtgcatgcagaaagtacaagcagggtcagcccatacatatgc

SEQ ID NO: 364921 - DNA, 153 bp, Zea mays
atcgccacgcgtccggtgattctgtttatttgtgcagttaataccagttttttgtgttactgacgatggaaaaatatctaggctctgcacagccgcatcgcagtgtttgacattattttcagaaattgtttgccatgctcttgttttttggtg

SEQ ID NO: 364922 - DNA, 418 bp, Zea mays
tcctacgcgtccgcccacgcgtccgcccacgcgtccgaccaggcaagcccaacccgacagcagtcagcaacctcgcaccaccacctccgtcgcagcatcaggccagcagccgccggcgccgggagccgtcgcgaagcaccccaggccttgccccctcctgcaaacgaagtgttccgtgagagcacgcttcggcgacatagcggccacagctgcagcatcctgtggagaccggcgagaacagcaccaggagctgctcccgatcactcctgcaacacacggcctcgcccgtgcctgcgcgcgcgcagaagtagcaaagtgattttccatgattggcagtgtagtatcggattcagagttcttcgtggtattctactttgcagttcagttgtagatatatggaattcttttcctgagaaat

SEQ ID NO: 364923 - DNA, 376 bp, Zea mays
ttgcacacacccgcgctcgcaccaccgttcgggacaggttacaaggcaagagagaggggaggcgcgaggtccggcccatctgctgtgcccccacgcatgtgttacgacctccgcaagatcagccgggagcaagatggggacccccagcgggaccaccgacaaggagcgcgagaaggaggagcagctgccccaagctaccggcggcgccaccatgcatgggacgccggtggagaagcctgcggacactcttgcgcagaccatgaaggccatccagacggacttcttcccgcgctcgttgctcaagtccttatccaaggccttccactacctggtgatcgacccggtgatcctctacttgatactgtgcatcataccg

SEQ ID NO: 364924 - DNA, 402 bp, Zea mays
tttttaaaatcccccttttgctggccctaattcaagggcttatggtttgagggctccgccaggggttaaagggccagattagaagcttaccgatctggcatttttcctggtggtgctattaaaccaaagaaacaaggtggcttctagattggctcagctttcttttgttcgaaagcatgacaccgggctgttcctgggtgctggaagtgatagaggagacttttccaatgacattttcagagagcaataacttggagtgtgaggatttgtgggtgtactacatcaaaatgcttcaaaaaaattttaaccaattgaatttatcaagggtctggccaagcatattacgcggagtgcacaaattttcctacaatccaaaatcatattcagcgatgttaaccctga

SEQ ID NO: 364925 - DNA, 546 bp, Zea mays
gcctgcgggctaccggctccggtaattcgccgggtacgccaccacctcctttttttacatggtgccggccggcgctgtgtatgtacgacaacagcggaagctcagtgaggttaggccatgtggtgaatgtcagaacagcgctagccattggagtaaaggccaaagatagcgttgtcaacaagactatggatgagatactgaaagacagtaaactggatgccaatgaaccatcaagtaacccaagtctaatgacacgtttgtactaaacagcctgtacttatgggcatgcaacatcccaggatcatctcataaatgggtttaagtgtgagaaggggatcaagtatcttgagcagattgtggcaatatcaattcggtgggacttctatagagaacggccatgggaacataggacagactatatgtttggtccgtgcaatattgtttgactggtgaactagttatccattgtgatctagactatgatcaaactccaatgtaacgagatgttagaatccttgtttattgggtacagtattttctttttat

SEQ ID NO: 364926 - DNA, 444 bp, Zea mays
tcttagcggtctgctcccgcgtctcggcgtggagcggggtttgcgcaggataaactgggacgccgttcctcggcgtgcggaccgagatggcggcgttggctgatgcaatccatggcttcgtccggcgactcacctgggtgaaccaccagcaagtccctccatatcgcctgcagcacctacggctagggtgtcaccgccaccatgagcgtcgacagggacactgatatggccggcaggtcccattcggacaccatctccacagacgaggccacctgcaaccctgatccggggatcgacttgaaggcatcgcacggtccaaggatcaccagcacaaaaggtactaggtcaagtgcgcccagatgcgcagactgctggtaccctggctggccatgccgctgcggctacgaccgtggtgttcgtcctgaggtactcggcatctactgt

SEQ ID NO: 364927 - DNA, 418 bp, Zea mays
ttttggtactgctagcttgaaagatcgatagagatccatcaggttccttacttgggtgccactctttctatgtggtaggtaccctatgttctaagttgttgagtgagcagaatgaaggctagaagtagaagctacactggccggtttcaggtcgcgttgtctttttgtatcattcttgaccaaaagctatataaaagaagcatgggcaaccagtgacatccatctccatgatctatccacaaaacaaacaatggctaagcacactgagagctacgagctgcacaaactgctgccacaggtggatgacctgttcaaggagttcgacgccctggtcgacagacctatggatgagagggaggacctggctgcaatcttcaaggtactcgaagagatcagggacaagatcaagatcaaacac

SEQ ID NO: 364928 - DNA, 137 bp, Zea mays
tgtaggagccgtgtccagccgccgggagcgcccgcgcgctagggccacgcccagggcaagtcttcttttccagacttcaaccgttcgagtttacttgcccacggtgctctaaaacaggaattgggactgccgttgcc

SEQ ID NO: 364929 - DNA, 472 bp, Zea mays
tctctcgcagccgtgtccagccgccgggagcgcccgcgcgccagggccacgcccagggcaagtcttcttctccagactccaaccgtccgagttcccttgcccacgtcgccccaaaacaggaattggcactcccgttgcctcgtccctcgcgtccagctccgctagaaccacccacaaccgcgcctcgcccagctccggccacccgcgctgcgcatcaccatgcagggagccgtgccgcgctgctcctcgtcgtgccgcgctgcatcctcgtggctgccttggctgggcaagcatgcccctgcagccccatccccgcgctcctcctcagcgcgcagcgcggcagccccggccgtgtcctggcctcccttgccgagttgtgttgtcgttgtagccttttcatcttctctccctgcaagcctgagcgcgccactgcgctggccgacgattcgcccagcaccggcgagcaccccag

SEQ ID NO: 364930 - DNA, 349 bp, Zea mays
tcggacgcgtgggcggacgcgtgggcagccgaggatctccattctcctccccacgcagaatccaccgcgaggtctccgccgccctaaccgcgcccttccatccatggttctgcagccgcgccgaaatcctcctgtcccaaaatctcgtcggcctggccacgatgagtgcgccttctctgaccctgggcttttgacccctcgccaggttgcagtggtgtcgtgctccccagatctaccacgggcgcgtgcccggatctggcccgacgaacagcggtggagctcgcgcggtgttccattcatggattgtgatctcaagatgtcggtctcctaggacctccgtgactttccc

SEQ ID NO: 364931 - DNA, 490 bp, Zea mays
gtaaactacatgacaatttgttagaggaggtatttccatatggagtgctactggtatctcatactgaagggtttgaaagaggattacaattgtacgatttacaatggacaatttaggctttatttttctaccaggattcctatcaacttggtcgggttcaaggcaatacctacacacgttctttgtgaaaacgtttaaaaggggtaaaaggccctgtgatttctaagctcaaatttattaagtcattcaccaatcctgggcttcattattttttaattctgaacctttaactctcttttttttctaaatgacattttgttacagttccgagctttggctgatcagatatatcacaatcctgactattataggcatgtgagaaaagctgtcatgaaacaggttaggtttacttttgccatccactgcatttttttggtaaataaacatccaatacattacagcaatgcgtaactgtactggaatgccttgt

SEQ ID NO: 364932 - DNA, 386 bp, Zea mays
tcgtccacgcgtccggcccacgagcgcctccgctgcgacgaagagaatcatcaggcagagcgggggtggggcggggcgcagatggatctagagaggtcaccgccagcgtcgtcggcggaggcgcccggggacggcggcgggggcggggccgcggcctgctcaatctgcctggatgcggtgctcgcccgcagcgctggtcgctccgtcgccaagctacaatgcggacacgagttccacctaggatttcatagcgtcgtcgacgtggttcagacttaataacggagatgctctgacacatgttcggatggtgagcctgatgatgctgatgctgatgggagtgaaaactgcacgtgtaagagcaagtagtgctgttcctgcataattgg

SEQ ID NO: 364933 - DNA, 452 bp, Zea mays
tcttacgcgtccgcccacgcgtccgcccacgcgtccgcccacgcgtccgcccacgcgtccgcccacgcgtgcgcccacgcgtccgtcaagaacgattttatccagtagcggggcatcgaggttcacctccagccatgtgtggcgcaatctcactaatgcgcttgtgtcaaagctgcattatcacgtccatcaatctgtcttgatcaggtgccggtgcatgtctggtactgaacctcgcggaacgcatcatcggcagcgcgtgctcaatgcagtgcattgacaccaacttgctgcaccttgacgacccgcgtggcatgctctgtgggcttggactttggacgccagtcgaatcgccaagatcatgtggggtacggtcgccagccacaacatggatggattgtaatcttctggggacattatcgacatcctcaggtgaccagcatttttggact

SEQ ID NO: 364934 - DNA, 319 bp, Zea mays
gaccacgggcaacattgcagaaggagacgctggaaaaggtgtttgccgggaagcagatcggctgaaggctggcgctgagaatattgggacacgaggctgaggccttattcaaaggagcctggctcttttagacttcaaagtattgtatgtatctggtacattaagatatgtaggctctggaattagacattatgtctgcggtcgtctgacttagatatgtgtgcacacagctttgtaagtgacaaaaattgaataagacgctgacctgatactgcagctagcttcattttttggactgatgcatgtaggcgatatgcct

SEQ ID NO: 364935 - DNA, 442 bp, Zea mays
  unsure (1)..(442): unsure at all n locations
tctcggacgcgtgggtgaatttagtggtaggttggtattacgacctgcaaaacttaggtttggttatatgtttctttactggcctgtaggtacgacgttcttacatactttaagtaccttgacacattgagagtattagaaggtgtctgatcaatttggatacttgctgatccaagccataggtatttgagcttgcaaagaggtgcgtttaccaggcagtgagaacaaatggtgttaatgttaacacaaatattaagggcacactgacaaagaagaggaaagtggcacataatgctacgaagaaaggaaaagaaatcggtagtggctcttggccccttcattttgcaggtggtatatgtttttcgaaagaattttagtgtaacagacaccttctgatactatgcagatngtatatggttttttaagattttttgaaagaatt

SEQ ID NO: 364936 - DNA, 128 bp, Zea mays
tccgcggccgcctttccttccggggaattttaccgcggcctagccttatcccccactcacacgtccatgtgttgaagaggcggatctgtgtgaagaccctatcggcaagactatcacccttgacgtgg

SEQ ID NO: 364937 - DNA, 323 bp, Zea mays
tgtaatgcttgcattgttcgcgctttatgtcgtctttagctgtgtggaggataggtcgggctcgatgttgatggttcgacatggataggactgtaaccggtacctgtttttgtgaggttggtcatgatttcagaaaatggagcgacaaaaatgcactaggtggctatgttattggtttctagtttctggcgagattcatgattcatctacttgggagaaatgtggagatcccgattgtatatcactatgcttactggtgtgtcatacaagaacgctttgggtgacttatgtttaacgccttattagccctacatagtgtgata

SEQ ID NO: 364938 - DNA, 262 bp, Zea mays
cacgcgtacgaccacgcgtacgtggacgcgacccgttagcacgtgggaccggatactgctggaggagtcatgacagagctcaaccgcaggaacagggggatcctaactgctcggcgcgactacgtgaacccaatcccaatcccaagcccagctactgacccaggcgccgccgacacgcaggacgaggacacgctactgcgcgccggcgcgacaggtcgagagatcacggccgcgtacaggcgcctggcgcgggagcggaacc

SEQ ID NO: 364939 - DNA, 378 bp, Zea mays
tcttccacgcgtccgcccacgcgtatcggccacgcggtgctgtgacgcgtccgggactgacatcatgggggtgtattcaacaaccttcaaagttgcagaggttgatggagttttccagctgaagacggggtgccaatgactgggatatcctggtctgtgcatgaaaacgcagattcaaggacgtacttgcagacataatgagtatgagggactcataacatccacggacctgtactacagagtctcatgtacaacagtgggtgctttgttgcgattgtcggttgtgtacctgtaccacaaattaaggactcatgggagtgcacaagtttctggaggctgacgtgaccaagaactgtgggcactgaatgttgtgctata

SEQ ID NO: 364940 - DNA, 420 bp, Zea mays
ttcatcccgcccagcctagtcggtccctgtctcccatggcgacgcgccccaagttctggggccgttcagtctccaggcccgcgcgcgcagttgagctctggcctatgctcggtcggatctccctgatgtcgcgcacccatcttgctcttctgtgcggcgcccctctacgtggctcgtgtgcgcagcttcagctcggattggtccatgccacgcgtgcgtgtctccctctgcgcggatctcgcccagcgctcgccatggtcgccatgacgacttccctggcgcgcccgcctgtacgcgttctgcgtccagtttcctgcgcgacggctgtcgggcatctccagctgtttcatggcgcgcccaaagcttatttattggctgcgcgccgctacctgtttttctggtagccgtgcgcgcgaaact

SEQ ID NO: 364941 - DNA, 281 bp, Zea mays
ttcttcccgtccagccgagtcggtccctgtgtggcatggcgacgcgccccaagttctgggggcgttcagtctacaggcccgcgcgcgcaggggagctctggaccatgcttggtcggagataaatgacctcgcgcacccatattactcttatgtgcaggacgactataactggttggggttcgtagattcagctcgcaatgaggcacaccacgctagcgtgactgcctctgtacgggtatcgcccagcgatcgtcatggacataatgacgactttgctgacg

SEQ ID NO: 364942 - DNA, 296 bp, Zea mays
tctgttcttccagggttgctgtgtctacttgcataatgcgcccttagtgaatgcggactacaatgtaatatctgatctgtgcactgaagagggtgaagcaggatctaacaacgcatggtggtcaagtgtgcaggagtattgctccagctactcattgggtagtgattccggctttacaggtatataacttagataacctgtacaagagcttccctcccgcatgaagacgttgtctacatgacaaaagattacatgttgtcagtaacaagcggctggaagattcagtggagaaacaa

SEQ ID NO: 364943 - DNA, 439 bp, Zea mays
  unsure (1)..(439): unsure at all n locations
tcggacgcgtgggggatccgccaccgccggatccctcgttgcccgtggtgccccgggactcgcgtgatcctacccacaaccgtcaagttggcgccccagcgaaggtcgcagcgcctctccggcggcggcgcgggctccgacgtcgagcagacgcccggagccttcggcgcacaggcagcgatgggtgactcaagcgacgccgtcatggggcgctggctgcagtccggggggctgcagcacctagagacctcctccgacgatggtgctggcggtgccgactaccggcgggggatgcccgggcttgggggcgcttgcgcggggagcatgctgacgagcctgctcatgcanggctatgggccagaaatcggtgaagaaaagcatagactttatactctactaagaggttaaattttaaccgagagtctgcacccacatcaat

SEQ ID NO: 364944 - DNA, 164 bp, Zea mays
cgccccggacagtaaccggggggacccacgcgtccttctacgcgtccgcccactcctacggaggcagattaagtattctcgaggtgcccacagtaccatacctcgaacacaacgaactgagacaacaagatggtcagatacatcagccgatgaactgccgaagg

SEQ ID NO: 364945 - DNA, 445 bp, Zea mays
ctcactcgtccgattaccaagcctaagtggcattgtggaatgggaaggcaatacggcagttgatgctggcactggcattcctgtcatcccaacagtggcagcaccagcatcagcatcatcgccagcgccgacagcggcaacaccagtggagtacttacatgtgaaggttggggcaaagaagcgagggcggcccaaaggcagcaagaacaaaaaagctgtggttgaggtaaattagggctatggaatgacacatgtgaaggatggggcaaagaagctaggaagccctgactgcctgaaggcagtaagaacaagaaagtggtgattgaaatcgattagggatattgaatgctgttcgctgcatcattcaacatctgcattggatgtaaactacattgtgcatgtgtatgagcatggatcttttcttgcttgagatgacttgcgcact

SEQ ID NO: 364946 - DNA, 338 bp, Zea mays
tgtaacactgtgccacggacgggggggcgctaccggtgacgggggatacggtggatccgtccctgcgcatgccaggcggagggccagcagccggcctgcaggtagtggaatggctgcaagtgcacgggacatgatgaataatgcctctcaaaacattaactgtaagcgcgccactgacatctggtgtgatcagacagagataccagattaaacagcatgcaccagtgagcggcacatacaaaggaaaggctaaacatagagcaggaaaggcttcgaagcgttccaccacaggagcaaagaaaggggcaccttccgctgctgtagacagctgtggtcct

SEQ ID NO: 364947 - DNA, 375 bp, Zea mays
ttgctgtgaggaccgcagctactagatgacgacctgaacctttggatcccactagctgcgcctgctatgactcagagccggtgacactgattaaagagccactggacagtaagtgaggccaggggcagtcctaaagaacaactacctatctcaacaccctgaaatcgagaagggatgttcacaaggagagctaagaactgggattggcacaactggcatattgtgaagccaattctgcaaggaggtcgactggactgatcacaaagacgaaggtctggagattataaagaaaaaaatagagctgcaaccctgacccgtgaaggcacatgcaggtgggacagccgagaaactagagtggggaaactcagatcctat

SEQ ID NO: 364948 - DNA, 444 bp, Zea mays
tatttgctacaccaccacacccacaccccatcccagcacacaacaagcagcctggtttacggtagctgctagcaaaacaatggagaaccctgctccgagcatcgtagtggccatcgccgcacccgtggcggcggagttcgtgaaactcaccttccgtgccctgtatatgcgccgggctggtcctggcagcagggagatgactgtgccgggaaggccatccgaccagctgggcaggagagtcgtcactgacagccccgtgtacgacggccgtggcgccgacgcccgcctcgtggctcgcatacagggagtcacggtcctggtcggtaacgcagacgccttgttcaccatggtgttcgaaaccgacaggtgtgtgttcatcttcaattcacgtgcaagctgtaatactgattcattcaattcaccatcgtctgttggtcatcaatc

SEQ ID NO: 364949 - DNA, 487 bp, Zea mays
ttccacgcgtccgtggtagacaaggttctccagagacatgatgatgattctaacacaattttggaatctcttctgtcctattctgaccttcagcagtctggatcagagtcatcagattctttcggaagtttttttgataatgataatgaagagaacaattctccttcagagtctaggaaaggaatctaccaagacatcaagccagagcttgattctttctcagagaagtggtcatttttactcagaacaatgaacttttcacaacaagaagttgatttagccttcaagcaactaggtgatgaagcgccattagaacagctcgttgacttcattgtcagtgctcaatcaggagtaccctctggaggactgcaaactggtgacgctacaaatgagggaaagactgaattactttatggtgtgatggagaaaacacttagcttgcttcagatgggctttaccgaggaagaggtatcatcagctattgaca

SEQ ID NO: 364950 - DNA, 149 bp, Zea mays
tactggccacgcttctgtgcaggtctgtgcactggagatttttcgttcgtccttaccgtttttggcttatgtgttgccttaggatggatcacttttgggagtctacggtttcttgaccgatgagcatgacacatagtaatgagtctcct

SEQ ID NO: 364951 - DNA, 278 bp, Zea mays
tgccacgcgtccggggacgacagcgcactcgagggccattgagacgaatctaacgcacgcacgcaatgtatcctggaccatcttgacccggagctcctggggctagagttatcataacgtggctgacgactactacagacatctgatggaaataacaatcatcacacctacctgtctgacgtgaatgtacgaaggcatgaatccagagatggacattgtcagagtgcagggtgtggtcgtactgaatgcaatgagcgtgttagatctcgaagtgcatt

SEQ ID NO: 364952 - DNA, 298 bp, Zea mays
tcctcgcgacgccaacgcgtacgcgagggggttagttcgtttagggaggccggcagcgaccacgacagcaccggcgtgggagaggaagaaacagacaagtggtgattatgacatcttgcccctgttgcgacctggagaccgtagcggtcatcatcaggcacgttggtggacatccatgcgcacccatactggatctggccgacctatgcacaaggggctaaacggctggtacaaatgactgtcgacactcagggacggcttccgggccaagaggaccggataccaacacataaggcca

SEQ ID NO: 364953 - DNA, 323 bp, Zea mays
ttgctttgacgcgcaaataagtactcgcctacatgcgactccgataagtggattcatattcttctaggcaagcaaatctcagcacgcaacagcaacacaccgacccgacagcaccacgagggagagcggctggatacagacaccgcccgcacctatctgagcaggcaactgtgtgcttccagactgccgaggctcgatgctgctaaataggatagggtccaggtcgacctcgacaggaccaatggaagcagtcgatagttcttcctacacgctgggttacagagcccctcactgggaaacacgtccctcgctcttctgcgggg

SEQ ID NO: 364954 - DNA, 231 bp, Zea mays
tctcggacgcgtgcgctcagaaatccgagcacgcgtgcgaacggacggacattgacataatagggagaggaaacctggaatatagacgaacgagggtgggctgccttctataagagcatgacaaaagactgaaaggagcatccggctgctaagggccggccggtggaggggaaccaagagtacaaggccgtgctttctacgtcaaagagggcccatggtgagccctaagac

SEQ ID NO: 364955 - DNA, 388 bp, Zea mays
atgaagcaggatattcaattttgcatatactgaaattttgaagtatcacagaatgtatctctactaatccttaagacaatagtgtagacatatacaaacacaatgaagatgcactatcttcttatcgtgataactccatgatcttcttctccttaataaagagagatgaatatcttagctccatatggtaacagccaatcctggcaactgcatatgatgtacatttcatttgtactagttttctggaattggaacataaccctgtggttcttcaaggcgaactggagctatagcagccaccacaacagaggcaccaaacaacacgacaaccaacgctgtgaagttcaccaagaatgcctctgtgccgtatttgtcgagacccgagctc

SEQ ID NO: 364956 - DNA, 377 bp, Zea mays
tggtctagggggacacagtggagctgccgcagatccctggctcggcgccgccgtccgttctgcttccacggaggaaaccatccgatgatgctccgttcgacgaccagatcgtggaccgcgacaggcgtctgcaggagacctggactcctcctcgctcaggctttccatcatcagcacagggtagtaggacacctgacactggcagcttgttcgtgaggccgtcttcttctccgtgacatggcagtggcgtggtagaagtagaagcagaggagcctggattgtccggtgccaaagatgccgctgacgaccactcggagtcggagagcggctccgaggaggaaccgtcgcttccgcttggcagcaatggcaggctattc

SEQ ID NO: 364957 - DNA, 60 bp, Zea mays
atcgtaatacctaatgcccaccactaaacattactggaaatctacttgctactgttttgc

SEQ ID NO: 364958 - DNA, 262 bp, Zea mays
cccattccataatccataattccatactttcagagtttcagttctagaaccaaaatacacgcagtgatgcagccaacaattatagatcaggacttcaggttcaggagttcaggacaaagttgtagggagccaacaaaatatgccaggttagcaacagttgcaaccaacaataacaggcttacagttccaaccaacaaattttattgcccatgtgcctctcatgtcctctctggggtcctatctttccctctcctccatttcc

SEQ ID NO: 364959 - DNA, 305 bp, Zea mays
aggaaaaaaatacaccttacataagctcagttcatttgtatattacgattcactattgttaaagggctggcccagtgcccatgtttcccacatgagtagggggggtcttgttatgtttacccttgagcaaacacaatgcacataatcaggtgtaatgggacggggctactaaacttttagccccaggcttagaaaacctaactacagtttctcctcaatgcagccggaacaagttctcaatggaagggccaatggatatgacttcatcagccaggccattgttgggtgatcttgacgcaaccatt

SEQ ID NO: 364960 - DNA, 337 bp, Zea mays
gtaggaagaaaaaactgatccaaaccattacagatatttggaccctaaccattacgcatatttggtgtgcatcgggcccaggtcaagcacgggcctcaggaaatgcgtagcgccagtcctacaggcccacgaacaacaaagatatctccatggcaggcacaggcaagcgggctctctctcgcgctgtctccgtccggcagagatgataaactaatggagttgacaaaaaaaaagaggctggggagggaccgtgcaagcggacagggcacgtgatgaaaggtgacgcgcgtcgcggcgtgtgtgtgcgtgtcgtctgctcgtcgcctggtagctggct

SEQ ID NO: 364961 - DNA, 370 bp, Zea mays
ggcaaaaaaatggcgatcttcataatactttcacatctccacacccgtgaataaacatcatcctctatgtagtgtcaaagcaagggagtaatccaacgtcatgttataagaccatcaaaattgcacagggcattcttcactgatccatgtaaggcccagccaacatatatagcctaacagctaaaaaaggaacgagctaaatattgatgctcgctgcttaactggacaaaccattcagaaatctgtttcatttccacatcgaaggaacctgataattgtctacttccagtggcaacaattttatcaaatggcagtggaaggacgctgaccaatgcaccaatggcagtaaactgaacacttaaactccatg

SEQ ID NO: 364962 - DNA, 275 bp, Zea mays
accattacgggaagaacactcgtgtaatttactcctcattctaacagaaggcaaaacacgttctttcaaaagaaatacataacagagtttcatcacagcgcagcattgggggcatataacatagtttggctagcagctccagcaaaatctagcagaaggaaaatttccctcccctgttgggtttatgacaaggatgccttctttcaccgcctttccttggggggagttttggtttttgatttttttttcactgaaaactggggccaaaagaacct

SEQ ID NO: 364963 - DNA, 80 bp, Zea mays
gggacaacaacaaatttactggggcgaatcacttcgttcaaaggcactcttggatgggactcgccagcccacgcgtccgg

SEQ ID NO: 364964 - DNA, 355 bp, Zea mays
tctccacgcgtccggcccgactcactcccgccgcgagcacttcccacccaagcggcgatggcgacgcaggacgagctccaggcggccgtcgccgcggtcacggagaagaagcgccgtctccgggaggcattcgaccgcctcgtctcctgcgccccggtccctgtccccttccgctgggaggacgtcgacgcgcacctcgccgccatcttccgccacctcggctccacccacgccgacgtcatagccatcgctgggggtccagccaccgctgctcaccacttccagttccagcacacggtcaaggaggagcaggaccaggaacgccccgtcgggcgcggcgcgtctgaggagggac

SEQ ID NO: 364965 - DNA, 237 bp, Zea mays
ggaggccgaacggatccatatttttagcgcaggggaaatttttactttgagccattgaagggttatttaattaatccagggttctcctgaccacttaccacagtttgcaacaggttttggggtaccatatctcccatgatgaaaagatggcctagcccacacacaatcggttaacttgttcggcatgataaatagattggctacatgtaaagcccatccggaacaccttcctttttt

SEQ ID NO: 364966 - DNA, 248 bp, Zea mays
ctattcatgtagccaaaaatcccaaccagaacacggcgcacattgagcagcgcaaccaggcctgtgagaggatacaatcttcacaacctgtgccacggccgccctgtgtatccgaccactcaagatacactgccctctggatttccaacaatccccaatggacccagcctttacaagcatcggatgcgcttcctggacagagctccctgggggctcgccacatggttagacacaagcttagtttcact

SEQ ID NO: 364967 - DNA, 259 bp, Zea mays
cccatcccgccgctgccggcttagtcccaggctcgccccctctccgcagagcgcatccatctccctacctcgagcccaaatcgatgcccagacgccaacccgttcccgccgtcgctgcgcagctggaggaaggggagcatgagctgagcatcgtcgacgcgctcctcgaggtgttgtcgggccgctgcgagctgcgacagacctccttcggctctaggcgcctgtaccggcgctttagcttcacctacatgggggcgcc

SEQ ID NO: 364968 - DNA, 336 bp, Zea mays
tgtctatcgcgtccggcaagaaccgggacgttcccacgctccgtgtcgccgtacgtgcagcgccggcgctccgacgcctgcgcctactacgcgacctcctcctcgtcgtcgtcgtcgtccgcgtaccagcaccagccgagcctcctcttcttccgcacgccgcaggtcgggcccgcgttccgcggcgacgagcccggggacggggaggacaccggcggcggcagcaggaggaagcaggccgcgccgcggcggtcctttctgtcagcgatcttcggcggcaggctgcggcggcggcacgggcgggaacgggaagaggccggcaggaacagggaggag

SEQ ID NO: 364969 - DNA, 344 bp, Zea mays
  unsure (1)..(344): unsure at all n locations
tttttctatctgaccggtgcatatgcacaaaaaaatgcagaagagaagagaacaattctggaatgattcccaacgtcctgcagaaatctgagtggctccagaccccgtcccagcggagcagagcactcgatcgcgttgcgttggtgaccccgtcgacgtactcgctcttctcgccgtgcattggcttcatcacctccttattcgcgccacgccacgcagatgccatgccagtgcccagacacaccgacgtgtcaacctaccgctctctggctcccaagttacatcaccacggacatggaaaccctctcgccgggcgccacgctcttcgnggtgatcgccgagga

SEQ ID NO: 364970 - DNA, 398 bp, Zea mays
tgttattgtttcccctcttccgcctccgctcccatccgcatcgccgcctccgtccctgtacccgtcacgtccgccgcgcgagagccactcgaagccgccgcggtcatccgcccacgcaaagcctccacctcctccccttcctagagctcgtcgtgggaggctacctcaagctcgccgtgctgtgcgttgcgcggcagcggctgctgtcgctgtcggtgtcgctgtgctacgctcaccccgccgattcctccgccacccgcgcacgccgaacaatttttggtggcctcggaccttaagctttttccgctagggtcggctccaaggtcgaccgtgtatgccctagccgaacgggaacagacatgaaagaggcgatggctgtggctgcgctagatgagata

SEQ ID NO: 364971 - DNA, 404 bp, Zea mays
cccatcgcgtccgcatagcaatgaggagggctagccagccgtattagtgacggacagaagagttctccagtcggactataggttgatgttggccgataccacaccacacagcatccggtcacagggagtgaatactgattgtttgtttccggaggtttgccagcaaggttatcctgtactgtgtttgtgctgcacactgtcagatgtaagctactactagcacgggtctcttgctcgttgctgctgctctgctctggcctctgggtgcccctgtcttgtagatataaatcagcacccacctcgggcggtcggccagcgttcggttttcttctagttgacgaggaggaagatgatgtccgctcctcgccatgttatggaaccatggctgtcctcctacatacatg

SEQ ID NO: 364972 - DNA, 391 bp, Zea mays
cgtctcgttttattgttctgctttctttatgctaagtgaattgagatatgggaatgcaagcttagttaatcaagcagtgtttgcggaatgattttctgttctgctttcttatgctaagtgatttgagatgtgggaatgcaagcttagttaatcaagcagaatttggaaaacagttaccaattgggaagaccagcagtataaattggtgagaaatatatggcaggaaaacagttcctgaaaagtgtatctttctgtctcatgctgtttttcttgtatattttggggggccaaaacatgtattcatgacgacattttttatatggcagaagctagatgtgatgatgagaaatcacttcgtatgtctcaaatgagcttggcgaagagatttggc

SEQ ID NO: 364973 - DNA, 391 bp, Zea mays
gaaaacaagtaaagaagattaagaagagtaaaaacgtacatcgattctgtacaaatctggctgtggtgctgcatctctacagagtcagttgcttatcggacaggaaggcgctaggttcacaaaacagaaaccttggcgtgactcgcgaggtgcctgtatgcaggcatgcagtgcagctaagctactgtcggtgcgtgcagctaagctaccgtcgattttggtggtgtgatcccgtgctccaagtaatatgctttctcagcatcagtcaaccttgtttggaacatcccccattctttacgacagcgtgctctaaccccttcccatggtgcttttccattctctgccttgccctggctaccaagcgaagggatgacttgatgaacaatccact

SEQ ID NO: 364974 - DNA, 332 bp, Zea mays
  unsure (1)..(332): unsure at all n locations
gctgtcccgccgcccgcatggcaccgaagcgcccggccgccgcagcggcggcggcctcggggtcggcgtccgaggcatccgacgcggaggcggacgtgggccaccagccgtcctccccatccccgtccaagacgccgccgaccaaccctaaccctaagtccgctgccgctggccccgccgaggactccaccgcggccggatccgactccgaggccgcgtacgactctgacgcggaccaccgccccgcgcaccggaaggcggcggtagcggcgtccccatcgcgcaagcccaggagccccaggccgngctcccgctcccgctccccggacgca

SEQ ID NO: 364975 - DNA, 356 bp, Zea mays
  unsure (1)..(356): unsure at all n locations
tttntttttttttttttttttttttttttttttttttttttttttttttttttttgggcctttgaaatctgacctcaattagcaacaattttaatagggggttcaaattttcacaggcaaatatacaactcccgggacaactttttaccaagtttttcattagagggaaaacaatacttattggcctaaggcataatataagtcattttgcttgcccgggaaatgtaaacatcatcactggatttaatatgcgggctgggataactccagctacatgacaaaccctactgactcgggtttccctgccacaaccatgagggagaccagaagctatccttagcttgggtaaaggggca

SEQ ID NO: 364976 - DNA, 322 bp, Zea mays
gccgtgcttgctcccgtcgttcctggagatggtgccacattggaatcagttccagaccttgtgaaggcaatgtacctaaacgttgaaagcttcccttgtgtgaggctgttgaatctttctggtgaaattggctgttctaatcctggaagtgagaaggtcattgcaccaattgtaagacttagaaaaggcagtgatcaattggttcaaccatctactattctcctttccttagatcagatgtcagatttctttctgaggtacatggaagcacaactgcaattattcacatatttttgagtctatatgtgcgtgtgaaatgtga

SEQ ID NO: 364977 - DNA, 394 bp, Zea mays
gggatgtgtacaaaactcacgcactaaactaaactaaggatgataatgatgatagaagcggtgacctactagtgccagagctctctcacatgtgtggagtttatgaaagagataaacctcgtcttcctccgtaaattccgtaaatacagagatgctgctttgaacgcgtggtagtactaccaccagacctacgacagctgctttgtccgttggtggatcaatcctcctcgttctccttgtccaagctccggcctttcaggttcagggacatgctgttcagtctcttcgaggtgactgaaatctccgagcccgcgttgctctgggtgtcgatcgaagacagtgtcaccctcgacatgtccccggaccgtggtcgctggaacgacctgtgatgact

SEQ ID NO: 364978 - DNA, 423 bp, Zea mays
gtggaactgaataatcgattgcaaaagaaatgctgcctcacagcctgttgacttcccagttgagccttggtggggggtttgtcttgttaactttacactggaagagttcaagaaactttcagaagaagagacaacaacaatagacaaaatatgtaaagaggaagccaattcatatgttctttttgatccgaaggttatagatggactttataaaagagggctagtgtacttcgatgtgcctgtttacccagatgaccgcttcaaagtttctaggcttgaaaattttgcttccaataaggatcaatcatatgaagacccaattgaagagctgctgcatgctgcatttgctgcttcaagtgctaatgctactgttgctgaactggctgcaactttacatgctgacctttatcaactccaggcagc

SEQ ID NO: 364979 - DNA, 130 bp, Zea mays
cggcgatcgttcgaatcgtggcgcctcgtgggagccggtcatgtcgcagaagaggctgccggtggagggcgacttccctcggcgcgccctcttcgccgtcgtttgccttcaggagacgagcccggtggga

SEQ ID NO: 364980 - DNA, 406 bp, Zea mays
  unsure (1)..(406): unsure at all n locations
cgatcgaaacgaggcgtcgcgtggcatgccggtgatgtcgcagaagaggcagccggaggagggcgacgtcccgcggcgcgccgccgatgccggcggcggcggcggaggagacgagcccggtgggagctcgtcgcgctcctctctgccccagcgccacggcgagccgaagcggcagaggatcgcccttcgcgatgtgatcacggaggtgatgcggaacaccagcatcgagaagtttctaatcgcgctcgagcccctcatcaggagagtggtaaaagaagaaattgagtcggcttttgcaaaccatgcctctatgatggcaaggagtgtcacagacagtgttccatctgtgtcaaagaatttgcagctgcagttcatgaccagactntctctttcatatttactggat

SEQ ID NO: 364981 - DNA, 430 bp, Zea mays
tgtttatttttctctagatcaaacagctaaatgtgttcaccgttgcaggaaaagagtagttgtagttttctggtgtacagccaataggattggtccaccttggaaattatctcgacaaacatctgtaggaattacaaaatagttttctgttggaaattgagtttgctttaagttctcaactaaaataagtgaagagaaactaaacttgtcttcatcttctgaagttgagtaaatgaaagagtgatacatgtttaatcaacagagatccaatctgttgaatgtatgtcttcctttatgtttgagcaactactaatgttttttatatcaaacatgacatctattatctgtgagattcagtgacctattatcaccaaatcttctcttggatgtttcaactgtttgaacttattttgatatagctttctaatgc

SEQ ID NO: 364982 - DNA, 187 bp, Zea mays
cttaaaaccggttaagccaggattcataccagctgacccagcgcaacctgaaatttggctctattctgacattttatccagttttaattacacaggctaggtgctacacactttgtgagtaaaaatattagcggacaaaatgccctgaactagggggatatatataaccgtaagcccatgggagctt

SEQ ID NO: 364983 - DNA, 294 bp, Zea mays
gggggcgaaagggatctgtgtcaggtgggcagcaacagttgcaattgcaaagtccagatctacgacactaacacagcatgcgcatacatgcttcatttaggattaataactaacctatggcatcattgcataaattacgctagtcacatacacagagcaattcatttccacccgtgcaataagatggaagtcagaaccatgtagttgttttcgtttgaaattttctttttatagggtaagatttgacaaggctgttagtttgcacctaggatctgcttatatccacagggcaat

SEQ ID NO: 364984 - DNA, 388 bp, Zea mays
acgtcatccgagcctgtccaatctggttatcatgtgtggctaagtcatatgaaaaaatatagctcaaaagataaccccagtttcttgcaatattaccttcctgtgtatgttccaggtataatacctgactttggtaatacatagttattctgttttaactgaaatagtttgtcgatttttgcgtgggaacaacaaatacatgatggtaccccttccatccaaaaaatgcaaggcctctatttgacaaacagtcgaactcttagtagaggcggtccagaagtcgttagtggatagtcaagaagagattcacagttgatgtcgaacaaataaaggaatccaataaacttactgcaacattgagaagggataatcctacatcagctacatg

SEQ ID NO: 364985 - DNA, 233 bp, Zea mays
cgccccttttttttttttttttttttttttgtttttttttttttttttgggggttttttttttgagaaagataattaactagctgcccccaacaaatgggttccgcctttaagctagctggctggtgggatgcatgcttgcatgcttttggttatttgggggcccaggaacaaaggggccttccaacaaaacagattttgggtgggggggaatcttatttgggacggggggcc

SEQ ID NO: 364986 - DNA, 320 bp, Zea mays
ggggcaaaaagaatttcacatcaagcaagcctcagattggacacatcctcctcctctactggttctactctctctttttttccccttacttgtgacgaacacaacaccactcctccagtccagtcctccctcgatcaacaagatgttgctgctgctgccgccaatctacaatgcgaggcgagcatgtcgcacacggtctccctcctgatgtcgtcgaagatgaggacctttatcctggcgccgacctccctgacctggggctccggctcccgccactgccgcgtggaacgcgacaggtccagctccatcatcgcggggat

SEQ ID NO: 364987 - DNA, 216 bp, Zea mays
gtgcggcatcgtcccgttcccgtccgtggctggtgcctttttgttgttgaccacccgctgagctgctgcgtgcccgcgcgcatggccgccgcgaggaggctctcggagctgctgcaggagcagcaggaaccgttccttgtcgagaccgccagggcaaggcggccccggcgcgggcgtggcgcggtgggagcaggagtagcaagaggaggactgggc

SEQ ID NO: 364988 - DNA, 428 bp, Zea mays
caaaacaaaatatgcttgtttgagaatgagttcacagcattacatcacatatatgaaaaggaccaagccacctatttactcacaccaaacttaattatatcatagaataattaatccagggataatctaatatctaaacatgtaaacatatagttgaacccacagctcagaagggatagagctagagaagaagcaaggataaaaagagaggtggaagactgttaagattgagttgaaggaaagaaagacggtagagttgggtcttacaaggtcaagaaaaggtcttgcaaggtcaagaagatccgacgatatagagatacgaagaagaatagaaaccttaaattaaaaaaaagctcaatcaaaaaaaagctcaatcaggataacaccatgctaatactagacatgaaccacgtgaaccgatgctcccg

SEQ ID NO: 364989 - DNA, 339 bp, Zea mays
caaatatgtaagtttctctattataacaggctcgaatcaaaaagataatgcaagcagatgaggatgttggaaagattgcattagcagtgcctgttttagtctgcaagctctgctagaatcattgtgcctttatatgtattatgtacatatctgcgtttgtccacaataacctagtattttaagttaaataaaacaagcaaaagggatgatctttatcacattgtttggcatccattcatctggctgactagctaatggctctctctgcagactggtttactgttttcaagtccacactaatgatacaaaagagagattcacgttataaatttttacaaa

SEQ ID NO: 364990 - DNA, 302 bp, Zea mays
gggcatgctcaaatgcggtccattccctcgcctacctcttgttacaatttcagattctagcaaccttttgcgagatgttcctgtttgtcagccattccatctagagctgaatttcttcaacaaggaaacccgtgttgttcagtatccagttagagctttctatttggatggatttaacctgatggcccataacttatcatctggggctgacaatctctataagaagctttactcaacgattccttcgaatgtggaatgccatcccacgaatatgtcatacagcccaaaacagcatttatttc

SEQ ID NO: 364991 - DNA, 171 bp, Zea mays
gcgactctgaggaccccaggcccagctcctcgaacggccttagagccggagggaggcggggaagaagagagggacggcccttttctcactcgcaccctgagaaacgcggtccgtgaacgacagcagctcgctcgctgtcatctctctagatctgaacgcagccgccgggtg

SEQ ID NO: 364992 - DNA, 480 bp, Zea mays
cccacgcgtccgtccacgcgtccggcgaccgggagccagaagtgcgtatccgagactccgagccgactcccgactgcaatggagtgatccacgagtgagctgtagaactactctccttctcagtctcttgacttctcaaattctcgttcaatttattagggatagcaatctgtgaatcgcttagcctgagtttgtccctaaattacttggtcccttggttatatttaccccaaatctgtgaatatatgggtttaggttgtataaaacaaaacactgacactcttttatattttgaatataaggcaaaaattctgggccggccactgcccagatcccgccgacattttccaaaccaaccgtggcggcgatgaggaaggcgggggtgacctccgcctccagcggtggaggagaaggatggccgtgcggtggtggcctcaacctcggtgtgaagctgaacgtgctgctactgctgttggtggt

SEQ ID NO: 364993 - DNA, 256 bp, Zea mays
gcctcgcgtgcgataaaaaaaaaaatactctaacacgctaatacacaaggatcctgtggcggtggacccgccggctgccccgcggcacgagcgcatacaccgcgagggggatcatgctggcgccgatcctgagcaagttcaactcgttcaagacgagcaggaaggggctcgaggcgatgatcgagtacccatcgctggttgcggcgacggcggagttcagtgagagcaacatgctcggcgttggcggcttcggttg

SEQ ID NO: 364994 - DNA, 149 bp, Zea mays
catcaaaggatattagcagagcgcagatggcgagagattggtttgcttataatgtgtaagctgtgtaccccgactgcaaccgaactctttatcatatggggggttttgctgtttatttattctatttaacaaataaaaaaatgggaaac

SEQ ID NO: 364995 - DNA, 225 bp, Zea mays
gttattatgtagcgataaaacagaaggagcttgttccttttagcctgttgcccgttgccccttggttttgtcgtcgcttcccggatatctccgtgacagctgacccggtgccgtcgccgtagatttttgctagaagacaggtattgttgccgcctcctgaataactggacctgtaaaacgagggcctgcgctacctgtggctgcgtgagttccgatgcgctgttc

SEQ ID NO: 364996 - DNA, 574 bp, Zea mays
  unsure (1)..(574): unsure at all n locations
gcatgacctggtcctttctttcagttctcactggattttctccatttatgcaattcttacttattgtgagaatattcaattgatttaattgtgggtggttagttgagtattacagaacgccttaggccttgtttgggaatgttccactccctaattcttcagctccgctcctttattcttcgatggagtgattccattggattcctaggagggaacagggtggggagctgatgagaattgattctctgctgatccccaccagaatataacacatagcagggcgagacattttttaactcccacctcctagtacatatggagaagttattctctcctgatccccacccgaatcagttggcattctgagcgtttgactggttgggagcgattctctttgaagaagctgaagctgaagctccccaaatggccccttacttgcttgaggcgatgagtatgcagtaacatcccagtgtctcccttttaaaaaattgttgtattagtacagaatatcacctaatatgtggatgcagngaatgtgagataattattaacatacttgaattcattacatgat

SEQ ID NO: 364997 - DNA, 516 bp, Zea mays
tgcttaagtagtgtaccagtagataatttagctggtatattggtgtatttgtgggtttagtttctgcaagtcattaatcaatcttttgcagaaaacacaaaaaaaacagtttttcttcaagctacttttataattacatgtatttatgatacctctgctaattgtttgtgcactgtgctggatgatagcacttctttctgaattatagtttctgtggcaagttcttgtttagtagtatcacagaagattagactgacatgcttcacatggattggatcacatcaaacatcctcaaagaacattctgtatcaaactatagtgcgattcagacattctatcgttttgtttattctcttggtcatagccttagcccatgactttgtactgacccttgtctgctgtattggcatggagatgctgttggaacaccaccaggcaccagtgaactaattcgctttgctttcttgtaccctccagtgctttgtctagttaccaactgatatattcttaaatttg

SEQ ID NO: 364998 - DNA, 453 bp, Zea mays
cggacgcgtgggcttccttgaagcacccacacacggtttgcgcagttccactattcctgcccttagcatctaaaattggatagtcgtcttgccacatgaagtaggttacactcctacaattcactgaagagttgtgcaaacagcatccggctgaattaaaatgtattcctaacatgactgattcaacactatttcacacttcatagatgaaagatggtttatcctttctcaaattcaaatatctctccctcttctgtgaccttcttgcttcctgtttcctagtctgtatcaggagattttttgaatgtaaatatttctaattctcatagatgaaatatatttttttatgtgtgggcagcatctattcttttgattgcttatctgtctgctgatattgttcttttgaattctgtgcttctaagcaagggttttgatatattctattggttgcca

SEQ ID NO: 364999 - DNA, 530 bp, Zea mays
ggctggcaaaaccgctgtaattgctgacacaactgtagtcaggtcaaatgaagtctgatgatggtctgcttgactcctgttatcttaggcagtgtttggttccggagacggctgggatagaatggctccatgccagagagcgtccgtccgggaaattttggggagctggatcattcagcatttgagcataattttccttttttagagccactctgtcctatatggaaccgatccaaacaacaacttactttctgccacagtgactactggctagctataggctatagttgtattcagtattcatattgtcagtccgtttcagcatttctatcatggcagattatgctatatggatccttatcttgcaaagtaatagggtttatctgtattattcttagtatatatttcagcatttctgctggcggatcatgccatgtcaacccctaccttgaaaagtaacttctattatgcacactacctggcttgagttaatttcaaccatgtttccgatcaacatgacgtggatacat

SEQ ID NO: 365000 - DNA, 482 bp, Zea mays
cccatgcgttttgcagcacaagcacagcagcagcagcagcagctgcaggcaagaagaatccaatgcggaagggtctctccccccatctctgttccaccaggtgcggcgggcggcgatgggggcgcggaggcggctgcaggcagacgcgccgccggggcatcgccacaggcagggcgcgccggcgccggactggagcgccgggtacctcaacgggtggctgtcgcagccgacgcccgtcttcggcctccgcctctgggtgctcatcggcatcgccgtcggcgccgccatcgtgctcgtgctcctcctcatctttgtctgcctctcccgccgccgccgccgccgccgcctcgccgtcaacccctactaccccgccgacaccaagctgctcaagaagcacctgcagcagcaggccacgcccacgcccacgcccaccaaggacatccaggagattcgtcgccgccagcaggagcccgcggtgcagc

SEQ ID NO: 365001 - DNA, 289 bp, Zea mays
actaatcacttaatcagattattgaatgttccggttggaaactctacaacatctaggtatcgagtataacaatgaacagctagaagtttaattgttcgagtgataaaaaagtgagatacagatatccagtgagatcttgtgtgcactgtaagactgagaacaaaactatgaataattctctattaatataactttgcagcaattttttctctggttgactaaaccaggccttgatgaaggactttgacgattcaaacggaggtccaagctacttactcgctggtggacc

SEQ ID NO: 365002 - DNA, 280 bp, Zea mays
ttttttttttttttttttttttttttttttttttttttttttttggttttttttttttttaaacagttcaatctgcacaggggatgcaactgagccatcctttttactggtcaactttcatattcagcaaagccaacggaatcatttacatcctttacctgggggactttttaacaaaggaattatttctgggatgactgcctcccacttaacaaatggggcaaacagccccccctgttttagcaccaattttgctgcccatgctaagggggtgcctttt

SEQ ID NO: 365003 - DNA, 299 bp, Zea mays
actactaacagattattaatacaacaactatatatacgcagctcctactagttacatataaatgtaacatacagacgtatgatagtctctctatatatatgcggtatatattagtattatataaagactatactagctatggccgtcatgagctgtagcacccccaaaaccaggacagcgtcctggcatggccgccgggcaaagacgccgccgatcgggcgtcgtcccaacctgctcctgctgcacccagcagtgccctcatgtgcctcttcttcttcttcttggtatgcaccaccttc

SEQ ID NO: 365004 - DNA, 557 bp, Zea mays
  unsure (1)..(557): unsure at all n locations
gatattcgttcgttcatccatccattcctgtcccagagccagcatgtgaccatttgattcagtccagtccacccagcatttcacaatcagttagcttaattaggctctgagctctgactgaaacattgtatatgtatttgcagcattcctgacgcgcgccttccatgctcatccttctctgaaagattattcttatcttagagagacattaattgcatgctacgtactacacattactgtgcatgcatgccagccaccaccatgcggcatgtcgtcccgggagaggatgaggtgccacatgcaatggtatctgaaaaggaagtcttattggcctgatcactagaccaagagaagaagatggatcacaacggtaggcatgcgagacgactagcccaggccactggcacacgtgatgatacttgtcatactactatagtataatgcaagtggcttgcacatatatatagccgatagatnagcatatatatatatatatatatatactgtatgtcagtgatattggtatgatgtgccatggaggtacagagccaatgaga

SEQ ID NO: 365005 - DNA, 98 bp, Zea mays
aaacccagggatgaaaacaaatatgctgttcagaaaaacaataggggggctagttttcgacaaagcaaaatcctaaacccaaacagacagttttgttt

SEQ ID NO: 365006 - DNA, 99 bp, Zea mays
gcgtacattgctgcctgtttgggtttaggatttggctgggtcgaaaactagcacacttattgtactactgagcagcatattcgttttcatccctgggtt

SEQ ID NO: 365007 - DNA, 268 bp, Zea mays
gggggaacatgccactccgatttttttcaagcacattttgagagccttgactaccgaattcctcaaggacgtcccgtcgttcctggaccttacatcatgtacctccatctatcggaaagggaagaaacatgaactctaaaaatacacgctggatccatacatcaacaagatcacaagttaggaacagcatggacgccaagaaccacaatggacatgccgaaatttaaaaccggggcatgtaagcattcaaaatcgggcaagtccttgg

SEQ ID NO: 365008 - DNA, 403 bp, Zea mays
cggacgcgcggggaagtggctgttgtggaggacccgcgcctgcgctgggccttggtgcggaaggtgtacggcggccccccggtggcgcctggcccacgtacatggccatcctgctatgcctgtgcccggtgggactgtggctcgataccgccaagtctgcggatctggccaagtaggccgagaggaagcgcgctgggaggagacaggccaggcgggcgaccagcgacggtaggttacgacgtaccacgtcgctagtgtatgggcaaacaagcgcgagggccctacatgggtattaacggcttcgtctccgactaggtcgacatagtagccgggacaccctactaaccctgagggcgagcgctacgtcagcagggagatgctgcaccaggacacagaccatggg

SEQ ID NO: 365009 - DNA, 305 bp, Zea mays
gacattctttcaaccacgcctagctctttgtctgtgactatgagcagcaactagggacagcccatggctacatagctcgggagcctacctattctttggcggccataagcacacccagcactcaccaatggctggccatctccatggatgtgaacgtgcagagcgaggaagcttcggatctgaatcactgatcaagccagcaacgagggccggcccgtagttgcccataacggggcgagatggtgcgtgacgttcctggacatgaactacaagtttgtggagctagcgcacacccaccccgaggg

SEQ ID NO: 365010 - DNA, 401 bp, Zea mays
gagtgtgttcacagggaggggagttgttttgaaggcaacagcgagccctgctgtccctctgcttcgccacctcctccctccctctctttccttcctcttggaggagagagaagagggggagagccagtcagccagccagcccaagaacagcgtacgtacgttgtcaagtcccgtcgccgccgcagcagcttcgctcctcccgccccgcccaccgtcgcgcgcggcggcggggagcgagcaatggaggccggcggcgccagcggcggcgacgacggggacggccagctgcacggcctcaagttcggcaagaagatctacttcgaggacgccggcggctccagtagcagcggcggcagtggcagtgccagcgcgaccgcgcctccagcgacgcagcagccgtc

SEQ ID NO: 365011 - DNA, 131 bp, Zea mays
gggttcggaattccagtttcgagtttaggccccacgcgtccgttttttgaacgagcgaggaccaccaccggacggcataaatctttagagcgctgggcttgttttcactctccagggccccactcccacct

SEQ ID NO: 365012 - DNA, 514 bp, Zea mays
aaagtttgctctgcttagagagaggagaggagattgagaggctccaaatccacaaacttgtgatagtgatttggggatctggagcctcccctcatttgttggctcccacctcgtgtattcttcatcttcatagtggagttttgctcgccgccgtccgtgggttttctctctgcaaggagtttcccacgtaaatctccgtgtcttcacttgcttggaaggacccattgccaattggactgcactgcagagtctcatgcattgctcacctcaaagaatgacactgcaaacaaaggtggaaacgatgttactcctatctgttacggatgcactacctgtgtctgataaaggaaagtacaattctagcatatgatacctcaaacttgattaattatagataaaagaagttcagcttgtgtttcagaaacgtcatgctgagtacaattctagcatatgataacttactgcagcttggtaattacgatttactagctgcacatttccaaatctgcagcat

SEQ ID NO: 365013 - DNA, 242 bp, Zea mays
acttcctccacacccccttgcaacattagcgagtgcaaaagagaaacctttttttagtttcaaggaccatagctacatatattatcaaaactatacatcgatttttttttgttataaaatctataacctccatgcctatgtgcttcatatagtaacctccccccagattctcccccaatatttacataactaccatacaaaagaatgtactcccccccactcccaattccttctctacatgc

SEQ ID NO: 365014 - DNA, 266 bp, Zea mays
aactatggaaaacaccagggttcttatatgctaatgtctttgcaacatgtaccttacttgcagtaaaattgatacatgtcactacaacaaaatatacacatacagggtacacatatataggagtactatacatgcatggatctagcttgcaaacatgatatgatgatgttgtacaaaatctttcccttatatcacaaagaccaagctttagactagctctaccaccaggagctagctttcaaacgaacatgctttatccatgcatg

SEQ ID NO: 365015 - DNA, 330 bp, Zea mays
aattacaggagattgtctttattcttgtcaagctttagcacaatctcaacgttgtaacatccaattggcttcaaaacttagaatggagtttgttgtgctcatgacaaatgaatgaatttcccttttgtcaaaaaaagagaggagatgctaccaaatattcctaccttcataaagtacttttttacctcctgttgccctcgaagggccacaacagcgcttgtgattgtgctgtgacgctaaagatacaagtgggttgttccatggttcgtagacaaacccaagcactgaagcactctgctcgtccccaacaaatacttaacttgaggatca

SEQ ID NO: 365016 - DNA, 482 bp, Zea mays
tttatttcaaacctgtcctggcaccaccatcagagagtaaaccagggcaattgtcaccggaacctccccttctgctacctcatgtagcacagcatacaacgtgttcgccagggatgacacttttagggtctgagaatatcgagtcctcgcagctgctgccacgagctctggttcttcctcttgatcagacttcagacatcttggctgatgcagggaccaagaagacagtcacaatggaagaagtgtgtcatccgctgcctgtagcaggagtggcggaagaagccaataggtctgttcttctaccagtaacggaaaatggctgtgagggccaatcaccacacctagagctacagacttcttcccctgcagtgaatgctgcagctacatcactggagatagctcccggaagttctgagaattcagagtcctctcagttgatctctccttgtctagctcagacaatagaccccactactcatgca

SEQ ID NO: 365017 - DNA, 251 bp, Zea mays
gggctcattcaggtttccattatctaaaatcagaacttcacagttctctcgatctcagtcactggaaaatacgtacaaacttggggctgcaaaatacgtgcaaactaccagcattaacaacgggggggggcaaccacaaacaagctaagcccggcctacactagagtcgcctttgctggaggaggggtaggcccccccatttgctgcttgctggcatgcacctgctcagacctcttggcccagagcacact

SEQ ID NO: 365018 - DNA, 412 bp, Zea mays
tcctttcgtacgagcctcagccgaagggatcgagagaggtgagcggaagatgaggggcgtttggggccgtacgacctgccagggggactaggtgtacttcaaagaggccgtgcagctccacatgaactacattgggtcaaaactgtggggggactatgactcaggccacaagggtgtgccacgctgtagtgggcatcccagcaattgcaggagcggctgatgtatacgaggaacagtatgtgtgcacgcgtatgctgggcaatggtgtcttatctaaaggcgtgaacacagtggggtatgaccattactggattcagacaggtgtacaatttttggaccccatggatatcgagcatgtgaagaaaaatggcacatcactgggaggcagagtggctcaaatattggctgtaca

SEQ ID NO: 365019 - DNA, 331 bp, Zea mays
cgcattattttcatgctacagccctaatcctgtctgggctggtgttttctccctctgccctctttcgcaagatctctccttcggattctcttttcgcttttaactccacggcaggccctcttctgtcacgagccatgccgagcgcagccagcaaaagagagcgacgccgcctgcaccaaagctcggattcccgtctattttacccccggccccgccgactcaccgtcgcaagatccatccgcaggtgtcggcggcccgcggcccgtgcgaaagatggtgcctttcctaggctccccagtgttctgtcatcggttcttggcccctatctaaa

SEQ ID NO: 365020 - DNA, 460 bp, Zea mays
ggccggattcccggtcgcctacgcgtcggcgctggttcctcccggccaccgctccggggcggttcgttgagctgcgctttgtggaactagagagacggcgacacgtggcttcactgcgggacggggctgcgggcagctggacggaggtgagctccccacgtcgccgcagggcgccgactcttccgcgccgggccggctggacgcctgctaccagttgaggtgagagaccggagggttgcggcgccggcgccgcaaggtcgtcgtggtagccagcttggccaaccggacggggttcgtgctcacccgagaggctttcgctgcgatgatggccaggccgggcgtttagggcgatgaccaactgctgcccggcttgggtggaatatggttgaggtccacttcacgagaataccttgcgagtacaagaacaagaacctgtctgtacgcatcgacgaggaaggga

SEQ ID NO: 365021 - DNA, 137 bp, Zea mays
aacacttcaaacaatattcgaagacacaagaacacaggatgaaacggcttgtcacaaggtacaaagacatatccgacaggacactaatggggcatgggtttcgggtgaaggccataattaaacagcctatggcatcc

SEQ ID NO: 365022 - DNA, 235 bp, Zea mays
ccaggtacaaacctcaatcaaggatgcttgtttttttttggcatccgggcgcgcatcatatggatacacgaataattatccccaccaaaggggctggaacaccaaagaaaaaacgaagggactgaaccgcggggggccaagatcaatggcattggcagtaggagtggaaatggccatttttccgcgcggtgcccgcgctagggcagggggtccgggcctggaggggcggggccgc

SEQ ID NO: 365023 - DNA, 294 bp, Zea mays
acagagcaccaccagtgatcagagcctttcaaagttgacaagttcatgatttttattacaatgtccaaactgaaaagataattaagactgtaatatccaaactagaacctgaaaactgggatacagggcaccaccagtgatcttattcgaaacaaacttgggggcaggaaacatttaacaagttcagaacgaaagggaaaatgataacaacatgttatgccacgatagcataacatttcttactagggactttttttttcggggggtcgttgttctcccggccgccgatcactg

SEQ ID NO: 365024 - DNA, 337 bp, Zea mays
cggatgcgttttcggacgcgcgggcggacgcgtgggcggaggtttgggctttgccgagtgtctatgaaactcggtggaagctattgtacactcgggacagggagtttttgctgaatacttttcgggttgtcgagggtgaaaaaacacgcggaaaatgatgcagcgagatgcaaaaaaccggcagccgaacagtgctgaaaaaggtaggaacaactctccaacactgtctattagacaactgctatggagctgtactagggagaggatcacagagtatatgggttagctatgacgagatgaggactctaaccctatgtatgtggcgcatactcggggg

SEQ ID NO: 365025 - DNA, 372 bp, Zea mays
gcggtttgtacgtcgtgacgacgcgacacccgccgctcctcccggcctgcaccgccatggccccgccgccgccgcaatgcgcctcaaaacgtccctccgcgcctgcccccgccctccaggtcccccgctcgccgccgactaccctgatccggccgccgctcgtttcctgatccggcctcccggcacccccgttgcaggtaggggacatggcgaggaaggcgtctaccatcgacgaactggcccatgttgctctacattgccatcgccgacggtggggtccgccgggcgaaccgggacacgcgccccgtgctgcagagcaccctgcatgtaatgggatgcaagcctcgccatgccttcaagatgagcaagaga

SEQ ID NO: 365026 - DNA, 412 bp, Zea mays
cgcgcattattgtcgccaacgcctcccagaaacgccagggatccgaggcactatgcaatgctctatgagtgctcccccttccgagcttccccagacgaacaaatcctgtgcttctgcgctgacggtgttaccagcaacaacaactgacctgagcaagagagggccataaacctgggctggacgagcagaaaccagaccaccggctcaaggaacctgtcgacgccgcgtgggccaagatccccgctgaaccgagcacgaaagcggtcgcggagcatgggagcacgaacggggggaccacttcgtttcagacgtgtggagggactagtcaggcccatgcaaaggtcagtgcgagcgctaaagccgctgttccacccgagatcggcgacaggggcaacagtggaagatgcctgcc

SEQ ID NO: 365027 - DNA, 199 bp, Zea mays
cttgtcttgtcgctggcagcaagcacctgcacactggacacagttctgtgtgtccaacggtacttgcacggacagctgcaggtgttgcggacctaggcagctcgctgagggtagcacgggggcaccagcgggaccctgcactgcacatgcaggagaacgaaacgggagatcctatcatgggcgacgacgtgcggggcct

SEQ ID NO: 365028 - DNA, 446 bp, Zea mays
cgcctccctttttctatcctatccggctatccccatgtcggccactctccagtccgcggtagggtggcggacggcgaggaaagggtgcgaggtgagcgggaagaccgcagcccggtcgattcgaggcgcggaagtgccactcggcgaggcacgaccgctggcagggctgacgcggttttcacagccgcccgcccgccttcatcagagtccataatccaagctctaaacaggttcgtccatgagcagataaggcgcgcgccacgccgtggccaccacacgtacgtaaggcgccaaccccatcttcgggaaagtatgggggcgctacccgtcgcccacagtctcgctctcaccgccgtgttcctcccgtgccgctcgcccgcggaccacggacagtgccggcgccagcggtacatagcggtggtggcgtacatggagccgaaccccac

SEQ ID NO: 365029 - DNA, 420 bp, Zea mays
agagtgccatctgccacggcgggccccctgcaccggcaccagctgatgaccgcgcacacagcgccacaggccgggcacaacgaagcacaggccgggcgagagctgccagaggatgcagccagccatggacagcgacccgcatgaacgggaggcccaggagcgctgtagacacaccaagggcaggcaccggcacgagaacaagaacaagggggcgcacgcgccctacaccggggacaagaccgacgagagcacccgccgcatgggccccaccggcgacttcaacggcgacgacaccctgaccggcgccgaccccaggctcgagacggaggagcgcgcccgcggccagagcagcagagggaccatccgcgactgtggcatggacaccggcggcacatacgctggcaccagcggaggcacagg

SEQ ID NO: 365030 - DNA, 288 bp, Zea mays
ttcccatgcgtacgggcgtcgagtgggcgaccgccgccacccccgtgccgtgcgctctctctctctctctcgagtcgacgggtgggggggcgaccgaaggccgccgccggcgcctaggccaggtgcccaggtcgaccttcaacagcgacgagcatgcaccagatgactacatgagcgagatcttcctatcgtgaatatcagacgcaatcaagtatggcttcaatggcaatcatcaggagaaggaagggttcgcgggaccacgtgaacacaccaaccacttcaggggcc

SEQ ID NO: 365031 - DNA, 329 bp, Zea mays
ggcccggacggaacggccggaccgacccacgcgaccgtgggtgagcacactccacccggcgcccacgggggcggggtggtaagcaagccacggccacaaaaccagcagcagaaccagggcaacagggcggggtggcgcccgcaggtgcaccgcgagatggaggacgacatgcacagacaacggtgcctcgggggacacgaaacgggaaggacgcgagggaggtcaaatgcacccgcggcgcgcggcggatcgaccccaccaccccggtcgaccacaacggcggcgaagacgacgaagcaacaacttcaactgaacggaccggacaagac

SEQ ID NO: 365032 - DNA, 180 bp, Zea mays
gggggccaggcttgcttttattttgcccaactgttttcacagggtatgaccctcctgagggaactgcccaaatgaagtctacggattgactgacagcatgggaaatgcccccttgggtccataccaggagactggaaaggaaccaaagggaatccggccccgtaaataaccatgggggcc

SEQ ID NO: 365033 - DNA, 408 bp, Zea mays
cccatgcgttctgctcactcttgcagctccaccctgcactcagtcttaggctcttagctctaggctctagctagccgcgccactccttcgtgtagccatcagccttctcatcgccaccaatggccactgccgaggtccagaccccgaccgtcgtggcggccgaggaagcgcccgtggtggagaccccgccgccggccgtcgtgcccgaggagtctgcccccgccgaggccgaggccgaggccgaggctgaggctgctgctcctgctgatcccgaggagcttcccgcggccgagcagcaggcagccgccgagcccgaggccgctgctcctgctggtgccgaggagccgcgggcggtccgatccggccgccgaggctgaggctgctgctcctgctggtcccgaggagact

SEQ ID NO: 365034 - DNA, 444 bp, Zea mays
  unsure (1)..(444): unsure at all n locations
cgtgtgtgtaattcacactcacacctngaatgggaccgaattacatatacaagagattttgggtgtgtatgacatatgggcacataagagattagactaatcgtctcatgatatcgctggtactccgacgactgaaggactgctggcggtgggtgctgcatcgaactagccaggagggggagcatgacggccaaaagcatgccctttgacacgcgccgcgtcgccggatgccacacggcagaggcagacactgagaaaagcaccagagcagaggagctccatatggctccactagcatgtattcgtactaaccagagtcgagatttcagctgacagaggcgagcgcgaaattgacagaacaggaaaaaacacaactgttgtggttgctggtagtgagctgcagacggcgctggtactgctagagctagagggctgaagggacgc

SEQ ID NO: 365035 - DNA, 284 bp, Zea mays
  unsure (1)..(284): unsure at all n locations
gccaagcgcggccacggggaccaaggttaagagccagggggggcgcagaggcagaggcgngccagccaaccaaggtcgacggggcccaagggagagcccagcggccaccgggggctgggcagctccaaggttcgacggtgcagagcgaggaggcaagagatcggtacactgaacaagcgagcaacgagggccggaccgctgatgcccataccggggcgaaatggcgcgtgacgcccctgtccatgaactacaagaatgaggagctagcgcagacccaccccgag

SEQ ID NO: 365036 - DNA, 484 bp, Zea mays
tcgcgatctagaactatttttactcctggttgtgtgttgccctcaagaactgctaaagcaaatgcagcggttgcaaatcccaccgatacagatagttttttatgagtaaataatccaatagtattccgaccatttgagcagtccaaatctactctcatagagacatgctctcctgcaataccatcaacggctcgaaccaaaggatcaacagactgaaccaacttctgaactttatttctatccctcaagaactcctgaagagggccaagttggggatcaggtaattaatgcgaactgaaaactgaacattatcatctcttcatgtatatgttctggattccagcccacagcaaaccatttggtttaactgtaacacaggaactacacattaaatgttataaatgcagaatgagaatcgctaattgctgtttgcaactgtaaatttaattaattactacagtatcaataatagcaaccataacta

SEQ ID NO: 365037 - DNA, 215 bp, Zea mays
ggggggaacttttgaatttcatttaccacacaagggagttgccatttgacatggagatacatcatcgctagaaggtcaaaggtcccatcacatttatacccacatgaaacctgccccaaaaactttgttcaaaaatgaagttgtcaggatcagttacatgtcttgggggaacaaattgtatgcggagatgagggagcaaatggggaaaacaacaa

SEQ ID NO: 365038 - DNA, 218 bp, Zea mays
atggtcttcgacgcgcgacagggcgggcagcggcgagcggctggccgacacggagaagctccccggtgcccgcgagagaccggaggacgtcgcctgtgcctccacgcacagaggcgccgccgccgccagggacgcgccgacgcgcgccacgtagcacaccggcgaaccgaaccctggccgcggaggcggacgcggaaggaacacgaggaacgggcgcc

SEQ ID NO: 365039 - DNA, 277 bp, Zea mays
aaacagccctggcaggttatgcgttgataagagaaacagttttccatgggggtacaaagatgcctttggggcccagaggggaaaaaaagccccccccggtctgggtgctcaccagttcaaacctttgaaacacttggggggggggggctggctccaggaccaaacggtggccaaaagggggggacaaaccgccctcaaaaaaaaaaccccggggcgggcagaaactttaaaaaaatccccaggggtttttttaggtccgaggcaaaaaaaacttggg

SEQ ID NO: 365040 - DNA, 324 bp, Zea mays
cctttcggatgcggggcggcgctacaaacgccggccgccgaggcagactcacacccgcacaccccagagcccatggacaacgacccctacgacggacccgagcgagccctgcttggccaccgccaccgcggcaggacagaccaggacgccgccgggaggctgccggactcaacgccgcgacgaggggcgggccaccgacgggcacaggcggagagcctgctgggaggcgccgcgcaccccgacgaccggaccggagacgcggaccacggcggtgacggggagggctgcgtaggcggcgacaaggaagaggaggaagactaccac

SEQ ID NO: 365041 - DNA, 492 bp, Zea mays
  unsure (1)..(492): unsure at all n locations
actcccatgcgtacgcggacgcgtgggaaaatgtatgcattgacaatggtgtatcttctgatgagctggtcatggttaatacaattgcagagcacatttctatgagaaatccagtttcgaccagcacagatctgattcaagatgacaatgaaatgataattgatgtccaggagaattcaaagaactgcaaccatgatcacatggatgatgaccctggtgccaataatactgcagaacctcctgcaaagatttccccagcatataagtcattcatgattaatggtgatgtgcaatcccacctagtcgatcaatcttcgtcaaaagatcgaccatctggatcaaattgcactgcaagtgtttcctccatgtgtaatgttgacatggaaacccatcttttggatcaactacctggntaggataacacatatgctgcccagtcgtcaagtgaagctactgccaatttgctgatggatgctgagcagctgcggcaga

SEQ ID NO: 365042 - DNA, 440 bp, Zea mays
ctcctgcattagctgacagctatgaatacccctggggacggctgctttatggtcgactgtctcctcgcacaccggtcgtcggtgcctggagctgctgacgcccgcccgatcttcgatggcaagccatccccctacgaggccaccgccactgcgaggtggctcgccggccacaacacgtggggtgtcctcagcacaatatcaagagacttaagtggagctccattagggtagtccttcttgtctcacttctgcaaacaggtggcatatactcttttctgactggtgaactagattcatggcttgttttaggtatagcaacagcctttcatatagtgatggagtaccatgcgagggccgtggaataccctactttgatctgacaactatggatcccagagcaagagatgcactggaagatgaaaggacctctattaccctta

SEQ ID NO: 365043 - DNA, 447 bp, Zea mays
aaggccatggcggttcggtcgagcgagtaaccagccctggcatgtgggtagcagcctcagtgcgcggaccccagaaggcgcggcccctcggcggcgcggaccctgggtgcgcgcgggatcggcccggcggcgcggcagcccccagccccggcggcgtgcattttgccgcccggcgcgcgcgggcggctccctgtagcgcgacgactacggccccggctccggtggctccctgtagcgcgaaagccaacgcttcggccccagcggctcctgtcccggcgcacctccccgtggcgcggcagcccctggcggcgcgcgtcaacggtgacacaggcacggttgccctgcgcgggcgcaggcggcccaagcacgcgagccacggctgccccggcgcgcgaccccacggcgttctggccaggcacgggcgcaaccacagcggcgggcgagcgc

SEQ ID NO: 365044 - DNA, 318 bp, Zea mays
actcggccccccggccctacgggcaggttacattttagctagctgttatgcctcggcaacaccctgcactatgacccaacccgcaggaaaaaacccgcaacagagaagaggagtcgccgagaccgagagctacagagcacgcccccgacacagactacgacgatggagccaaagaagacagaggtgacccagatgttcgcccgctagaaggagggctacgcccgaaacgacctcaacacctgcgtgaccctcctctcgcagatcaaggtgcatctcacccaattgcccaggcttgcgcccttgggtcagcacacaccg

SEQ ID NO: 365045 - DNA, 344 bp, Zea mays
tttcttctttttcgtgcagcagctgaccattgccgctgggttggctttgatcgcattgggatttggaggagaggtcaaggctgagactcggagactaaacgggtcataggatgttcagtcccttgggcttgtctcttcttgccatcgtcgtgctctacgggggaacataacagaggcgagcggaggcagcagaaggagcgagcccgcacaggatgctggccaccatctcggtgtccaagccgtcttaccccatggtcaccacgcccatgtcggcctacggcgacccggtctgcacgccaggcaccccgtactcaacgttcccgtcgctggcgaccgggaacggc

SEQ ID NO: 365046 - DNA, 480 bp, Zea mays
cccattcgtttcgctgacgccgagggccgcccccatgggggccggttttcttttgacagagccgtgtcattaacacgacccgggcgccctccagcatggctgggggctgggggcgaaggcaggcgggaggccctggctctcggcgcctcgtgctacccgcttcagcggggggccaacttcggacgggcagacaacagctctgcgggggctcgcgccggagacctcaagggacccctcggacgggcgtgtctgcacgagcgtgggacccccacgcatcgtcaactccctgcaccatgggtccacgtcacactgcgaaccgcgacaacccgcgtcaccacgcctagagtcttggtaattatgaacttattctggtcatcctggtgcctgagccttgggaaaactggagcatcttcagtattctggaaactttataagaataaacattcaagggaacaattcccttcctgagccttggcaatt

SEQ ID NO: 365047 - DNA, 501 bp, Zea mays
ggctgtctctctccagtttccggtcttcactaactccccgttttccgtactgctgcggcgcctcggcagtcggcaccacagccggcaagatgccccccttccgaatgccttcccacttcctcgcgcttccgctcctactcttgctgctcctccaggcgccgtccccggaggcggccgagtctacgccggggacccggacgcgcaagatcggcagctcgggggcgtcctcggtgttctcgctctttaacctcaaggacaagagcaagttctggactgagtcgatcatccgtaaagagttcgatgacttggaaggttctgcgtcgcgggactctagcaaaaacggcctgctcaacttcacaagagctggtaatattgcaaactatttgagcctggcagaggttgattccatatatcttccgatccctgtgaacttcatctttattggatttgatggaaatggacggcatgagcttaagttggggcctgaagaactgagcgctg

SEQ ID NO: 365048 - DNA, 160 bp, Zea mays
  unsure (1)..(160): unsure at all n locations
cccttttgaccgccagcaagcaagggaggcgaggacgagtttttggcggacgtcgaggaggaccgcaccgncaccagccacacagacagcagcccggtgttcgcggaggacggtttgtccaccgtcgtcgtcgccacggagttcctggtggagtggaagg

SEQ ID NO: 365049 - DNA, 452 bp, Zea mays
ctcctacaccgtcaatgtcatcacgagggatgtcaccaagaagacggctggcctctgatggtatcaatgctgtattggacacagaatttgctgacaaaaattgtagaccatcttcctcatcagctgctttacgaggggtttctcccagaagcaggtctgcctctaatgccatatcaacaggcatgactaatgctgaaaatgacagcagaccatccacaacatcaagtccgtcatgtcagactctgcagagcagcaggcttgaatctaatggtgttaacatcctatcaaaagatatggaaatctcatcaactgtatctggttgcacttcagacagtagacttgatggcgctggtgctctagtaaaaagcatagatgtcactgagaaacttactgtgtcaactgaagatggtggtggtgaagacgatcctggaagaatagattctagtgacgta

SEQ ID NO: 365050 - DNA, 437 bp, Zea mays
  unsure (1)..(437): unsure at all n locations
ggcactaataatgaaacttacctagagctgttgctgagtcgaaacatcagacagaattatcgccacggaaagggtaagcagatgcaggatgccgtagacgtcttggcttttatagttgggagaggaaatgctcctcagattagggtatgttctagatatatgtgtagttttctttgttttgaaacaatgtaggcaagaagaatgaaacttacctagagctgttgctgagtcgaaacatcagacagatggttaggcaaaacctgaacttcagacagagtaggcagatctgaagataaagtattttgattgagagtattttgtaattctgtattgaactgccgctggggtttgcttgagacccatgcggcactatatgagtctctctcagttcagaaaatactgaagcagatctaagaggtcctactgattattnctna

SEQ ID NO: 365051 - DNA, 520 bp, Zea mays
cggcgctcgggtctccccgcagcttcgggcccctgccatgccgtcctcgtcgtcgctgatccatggcatctccatctccgtctccgacgacgacgaggccaccggctaggtgcgcgtccgcgtccgccgcaagcgctcccgcggccccgcatccgcttcggcgcgccgccgccgcatcctcttccgcgccgcgcggctgggcgtgccgctcctcctcgccgccctcgccgtgtgcctcctcctctacgagtcctaccgcctcacgccttcccgctcctccacactggctccgccgtccttcgtggacatcagccgcctctcccgcaacgcccgcgcctgcgatggcgccaggaagtcatgcctgaagtttcttgatcctgagaagcttcaaaatttggaacttgcagaaattcctgaaacaaatttgtcgatgaaggaagttctgtacagatcaagtctgccccatatcgtgaatgatacaccaccacatacagagaattcccggttcaacttgttcaca

SEQ ID NO: 365052 - DNA, 230 bp, Zea mays
ggacaaaactttgtttgaaaaaaagttccatgagaaggacacaagggcgaaaatggggaaaaaaaaaatgttgcaccccgaaactacctttttactaaccttcttaggcttttatttttgtgtaaaaatcaattgtgaagggctacccttaaaagccctattttggaacctccggggattaacttctttggggggcttgttttagggctctttttttgggtttgcttttt

SEQ ID NO: 365053 - DNA, 422 bp, Zea mays
cctcgctggctcccacgagtccggccacgcgtccggactcatgggagagatattggtcacggcagaggagctggatgaaatgaagaccgtgagagcatccctgcacgcactgaggatccactgcgaggcgttgcacatgcaagacctatgaactggacagtccacatgtgcagcgcacacacaccatgcactgacatacgaggaacaggactgacaacgatcaccgtagccctagagcaatcggcgacgggcgtagctgcctgcacatacgatgctactatgcttggggaggagaggatcataaacctcatgaccatgtgtgaagacagggcacgaacagcagcattgtatcctgtgaagctatacacacgatctaagaggctgatggcagcaaacatgaccggcgctatgaccaatgcatg

SEQ ID NO: 365054 - DNA, 516 bp, Zea mays
aataatgaagcatagagccaaacgatgcgagagaagtatggtctacacatgagccagttcacataaacccttcagacccaagcagctcaagttgtgcggtttggtgtcatggtgttgttcaaacttcgcagtggtgtgtgaaatagaagaatcccaattcccaagcatattatttgtcacgcttggtacaggggaaatacgacagcatcatcgtggaggtgaagagctactacatgtcgatgagcaggtacagggatgataaaaaaagaaaggtatatcttcacgtcgatgagcgggtacagggatgacaaaaaaaagaaagggtgagattatgaaggtttatgccaatgatcaaataaaaacatgtgttgagtttccagagtgttttgtataggattgctggtcaaacatgagctgttagtgagagaagaattgtgccctcttccctctggttctccctgattctcacaggatgactcatgtggtcggaagagggctgatgagcacgatcaccat

SEQ ID NO: 365055 - DNA, 398 bp, Zea mays
gggggagtggcaaaacagcaaatttctcgattattgagattagtcttccgatgctatgcacccaactggataagatagttcagaactcaatttgatacaccaagctactcccaaaccattaccaccataggattcaattttcatggtttaagactcagacggcttcccagtcactgcagctgcaggagcaggactcatcttgggggccgtccacgcccacgcttgacatgtacagcactggcatcaacaacaacgtctcgagctgcagcaggttcacctctgggatcttccacggcgaccttggccttcttgggcgggcgcccacggccacgtgggctgagcatgccgctggtggcctggtcagtggccacattgatggggtccttgagctttggggg

SEQ ID NO: 365056 - DNA, 486 bp, Zea mays
ataaggaagactttattaatttcaaaaacagttacatcgagaaaatacaagtctttgcaacctctcccagcctctgttaatgaaagcacacaacttttagaagaacgatcacacacacttacgtacactctagtgactatcaatccgaagactagaccgtcacccatgatcctgagcaaaaaagaccttaaccacttgcatcaaacgttacgtagcctccaccataaaaagacgagaatctgacttttacagtacagtccacgtgcgaagctaatggaagatagtatggataacctaattgtttctgacacctgacaaaagcaacatgttcaagctcaccgccaccaaggagaaacgctagctgcttttcctcgagaagtacgaagaagccaagatgtggtgggtttgcttgacgaatctgacattctgactgaagtttggacatagcattggggtgggtgcctgactgcctggtcagggttcgca

SEQ ID NO: 365057 - DNA, 544 bp, Zea mays
cgtcgtcccatgaagagtggagataactcacggggtacttgccttgttattacatagacatgcatccttctttcacaccacactgtgttactcttctgcaagttggattctgaatttctgatgggactcttgaaaacgatttgtaactgcctattggtagaagacatgtactgcttctgctttctgctcctggtgacaatagttgaatcagagagaaacatgaaacccttttgggcagatatgcgtcaagtgagcgcaaacaagacaccgccgttccctggcaatagccatcttcagaacagaagcttcgtagtttccagattttgacaggtttgggtatacacctaataaaaatctggagacgtggccattgttgcaacattgttttgaagattttgacagattccgtggccaaactttggtggtttcagactacggaaggtccaaacggctactagggactgctgatgccaaattcttgcgagcttgtcctggtttcaccacgggtttgatttgttttgcatccaatgaatggaatgaatgg

SEQ ID NO: 365058 - DNA, 331 bp, Zea mays
ttcatgcgtccggagctggcaggattgccggcttcaagccagccaccatgcgtgacacctccgacctcccaccgagcgcaccttaaaaaaaaccaggcagtgagaaaccgaaccacgcgtccagctccctctcggcctcgcaccagctcatcccagctccgccctcacccttcccttgccctcctcccaccgtctctcccccaatccctcccaccaccaccagattcgcctcgcctcctcgacgcccctccctcacccttgatggccacgcccccctcccatggcgccacgcccgcgccccttcccacccgcccgagccgcgacgctgacc

SEQ ID NO: 365059 - DNA, 244 bp, Zea mays
gaattccttaacgggccaaataaatgatccgcaaaggaaaacaaacaaacaaaaaacttgtttcatgttgaaccattttttaagttataaagtacgttttagggagggcatcacgcccgtttagctggcttgcctaaagatcaccttacacgaaaaaggtgtacctgtccttttttttacctgccggaactaaattatgctagtccacctttttgttggctttggaaccatcaccattttgctt

SEQ ID NO: 365060 - DNA, 298 bp, Zea mays
gccagctgccctgtttgtgggggttcatcagcaccgtcccgttcaccagctcgcccgacaccgccgcgcctctgctcacaacgttccccctgtcgccgggccacgacgcgcggcccgttggcgcgtgggtgcagcgcgcttgttgttgttgccactggacagccgtcgtcggcgagcactcctgctgctgcatctgcctctcgatgtcgtcgtctttaggctccgggtcacaccgcccgacgtgcggcgatggcgtgaggttgaaggcggtggcgatgggaaggttccgacgcttggc

SEQ ID NO: 365061 - DNA, 542 bp, Zea mays
ataaagggcaggggaatggaggtggaggaagacggccgagccgcccgagtgctgctgagctcccagtgtctctgtctctgatgagatgactggacttatttgatgctcttgccgttctcgacttggggcgcgagccgatggatctcctccggatgaaacttctcctgccctccttcatcagctgccttcttctgatgcaggcagcactatgtgatggcgccgccgccaccaccaccaccaccggcgaaaacggaacggcaaactggacatgtgtgtgcgcagctcatcctctcggtgaaccagactccaacagcagcttgctgtccaattgctcttcctcctgccattgccaccgagatgagaacggcggcggcggcggcggcggcgcatgctcgtggaactgcacgtgtgcctctggtgatgagggccttcagaaggaagagcatgctgagctacgtgacgggagctgtttcactttctgcaactgcacgttgtgtactggaacttcagaagaagggagaaagcgtgtttaagcaaaacag

SEQ ID NO: 365062 - DNA, 395 bp, Zea mays
cggtcgcgtgggcggacgcgtgggatcgcgagggccgccctttttttttttttttcccttttactccccaatataattttatttcttttttttttaactaattattataattttaaaggggaaaacaaaaaaaaacgttttgccaaaggccacaaaaaggaacaggtcaaaaacaaaacaaaaaacgcgcaaaggcccccacacaacgacaaaatggaactcaaaaatcccataaagggcccccccggtgggttccaacaagactgactcgggtacccccttacaaaaccctaaaaaaatatacaggacgggaacaggccagggctctgggagccaggttcttacaagggcaaggcaaaaataacacggggccctcttttggggggtgggggggg

SEQ ID NO: 365063 - DNA, 506 bp, Zea mays
atgttttttagcagaattttggccttgcggttggcctgtgtatccagcgttagttgtaaaggagttcaagaagaggctgttgcttaaatggattggatttacctgcctgttctgtagaatttgttgctgactcgacttattctgttgaatctacaggcaccaaatgggtatggtgtaattaatgagccagattttaggtctggtggatcctacaatgctaggagatctgtggatgaaggctttcctagagattcatatggaaggggtgcattctatcatgatacacatgatagaaatatgtatgcatcaccaccctctgccggtggaatgtggtctcagcctcgaaggaatcatgatgaggactatgcaactgcaagagaccatagaaggcatgacactgattatcgcaatgatggaaagcatcatgagtttgattcatacagaggagttgatagactccatgataattatcgtgctactgacaactattatgaatctggcagtca

SEQ ID NO: 365064 - DNA, 355 bp, Zea mays
acttcgtcggcatggatggtatgggcggcatgggtggcatgggtgatatggctggcatgggtggtcttggcggcatgggtggcatgggtggtcttggtggcatgggcggtatggcaatggaagatatctaagacgagagtgatgatgaacaaaaagagccgaaaccctaagctgcctacaaaacagatgaggctgatgagactgagtcagcggaaaccaatattgaggcggctcagaacaattgaagactcttataaaccaagctagattgtatactcacgtaaattatgctgaatcggaggacaaaccttacatatatggtgctggcaagtcccagaggcgtgccatgaaaatt

SEQ ID NO: 365065 - DNA, 449 bp, Zea mays
ctagttctagatcgcgagcggcgcccttttttttttttttttttttttatctacaacctggtcctatttacaattcatcctgttctgctttactccagacccaagggcactacatatgaggccacttgtcttacaatacagaacacagctaaaaaccgttacactactaacaaagaaacaaataaatccaagaaaaggaaataaaggaacaatatggacaatcaaaagccttcgacgctagaccttcgcataataggtggtgttttctttatagaacttacactcggatcgtccagggtagaagagcatgcccttggatgaaacaaggcagatgtcgacgaccttggtgaaatcaagtgctggttatgtgaaggcggcgatggagagaaggttatgacaggatggtgaggcacaatcccattgagggatgtagatttcaacatcacttt

SEQ ID NO: 365066 - DNA, 470 bp, Zea mays
  unsure (1)..(470): unsure at all n locations
tccctcgtccgaccggttcggccgctccccaccaccagtcctccccgcccccgcccgccggacgatctactaggcctctcgccccgcgcgtgccgatttcccccacctcgagcgccgccctcctcccgcgcccatggcgagcacctgaggatacggtcagtgggctgtttctctgcgagagtcccacgagtccccacagaaacagcccgggggcatcagcgatcgattcggaacgccttggttcggtctgattgccggattggtggtttcgtctcggcctcggcttcctcaactatctagcttggaagccaagtctgggcttgcttcgtgtggattgcatctggggaggcggtagcgtgcacgggtgtgattctcggaccggcttcatgcgggacggcgcgccggctcctcgcgccggcggnggcttcttctcggcgcggtcgctctccaactgcatgaggatcgtgtcg

SEQ ID NO: 365067 - DNA, 518 bp, Zea mays
tttttctctgtctccctctctcgctcacccctgtatccccgtctaaccgaagagcccaatcaatcgaatcggatcgaaacagaccgtgtattcaatctgctactagggaagggggaagcgcgagcgtgcttgcgtgcgtgcgttccttcgttcgtgacaaggcggcccggccggccggccgatcgatcggcgatggcgccgccgtcgagggactactggctgggcttcttccgcggcgcaggggacaacgtgttcgacgccatcgacgcggccatcacggtcgccgcgtccgaccacccggccgccctccgggagcgccgcgacggcatcgccgagcgcctcttcaccgcgctcctggtgaccggcgccgcgggggcgggggcggcggcgggccagggagggtccgcggggagaacccccgtgcccagcctctgcagctccgaccgcgccgaggccgtcaccgacgacggcgcgccgtgcggagacgatcccgtcctcgccgagacggagcgcatcaa

SEQ ID NO: 365068 - DNA, 349 bp, Zea mays
cctgtttttccgactgttattctgaataacgagaagaaacaggtgtggactcattctatgtcatatcaatattaacatgaggaatataaggcggatcacacttgtgagctgaccatgggagcggccattcaaacgcagttgaacctgcagttgaagctccagatcatgttctaggacatacatcatataatacgtaccaggaccagatccaaccagagcagccatcaatgcctgcagggttattatcaaagatcttctggaagggagattgaagcgcggatagaagccaagtgtgacacattagctgacccatttgctatggatgaaagaatggtttgagcacagtttt

SEQ ID NO: 365069 - DNA, 441 bp, Zea mays
gtctttctgtgaactgcagcatcgagaatagctagccgggcgccagcttttttttgcggcccactgctgtagttgtacatatgcaaatgttgggttgcatgcttgcaacgcacgtctgggacagctcatctcgatacgacaagcgtcatctacgaatatcgtccacgacacatgtcaatcgatcacagtactgcgtgaacgtgaggcatattcggtatagctgcttacttcgtggctgtggatgtctaaagctataaggacttctaatgctgaacagactgacatgactgatatgattaggacagcgcactcgggaaatgttggccagacataatgttaaatctgtgcaagacttggggacagcgcactacgtcgagggactgctgcgacagcgtggtctgcacaagggactacatccccaactgcatgtgcctggacaag

SEQ ID NO: 365070 - DNA, 216 bp, Zea mays
aagcaggcaacgcatcgttttattttttacattagccacaacgacaagaaagtaagcattacttctgaaccagctgacaacgagacgggccgggattatgcataaacatgcatgggggggcgacccaaaaacgaagggcacgatgaaaacataccgctgggcgggctggaccttgcccacccatatacgtgtgggattatataacgaacattgggg

SEQ ID NO: 365071 - DNA, 248 bp, Zea mays
gggccaacacattcagttacatttttcacatgatgaatgttcaagtgttacaaaagctcctgaaatacatcattgtatcctatctctcaccacccacaattcaggaatttcacacatgcccaaaaaaaacaattgattgcttctggtctgcctcacccagatatttttaaaaaaaccaacccgaacccatgaacttttcagctatttcacagaaatagtactatgtcggaaaaatactatggaatccc

SEQ ID NO: 365072 - DNA, 313 bp, Zea mays
aagcacactttgaaatatttgacatgcgatcatctattatacacggacacacacttttataagggagaaggcacacacaaaaggcgccccaaaccgtcccccttttaaaaaagggggcagacaggccaacacaaaagaaggggggcaaaaaaaaacacaaaaagggggccccaaaaaaaaaaaaattagaggggggcccccccacccaagccaagagggcccaaaagttttttcaaaaaaaaaggggggcccccaagcaaaaaaaggcccttcccccggggggggccccccccccccccagaggagagggggg

SEQ ID NO: 365073 - DNA, 207 bp, Zea mays
gtaagaaaaccgccccactggggtctcaggaaaaaataataatctggcctgaaattacactggatgggtccccttttcaacccgacgggggataatcctcccgagttcataaaggcccccgtaggacaatttgcttctttgtccaacacctaattcaatttttttgccaaaatccagattgtgggccggttctttccagaaactttt

SEQ ID NO: 365074 - DNA, 452 bp, Zea mays
ggatccaaatgagttgggatgatcttctccacaatgtagacaaaaatgttactatgggagttgcacttcaatctacctgggaaaaatgtttctttctttgaagaaaaaggtagcgaaaatgtgaccaggatctagcgaaaatgttagtattagaggaaaatagacgccccccaagttttgagttggagaagacttcggggactggatatatgattacaccttccaccaaaccagttgagcttggctcggttagcaaaaatgtaggcgtgcaccgtgcagaatctgccatgaggttcttctgagctcgttatcccgcaccacctcatcatctgcaggagttgggactgcatgctatccatgctataaacagctgaaggtccggctacgggggaaagtccatcttaacatcagtgacatcgagttgcaatatctcagctctgcaccctattatg

SEQ ID NO: 365075 - DNA, 442 bp, Zea mays
cccttgtttccgatttagaatccgcttaacatatactcatggtgatgcttcacaaaagcttcatagtttattgccaaatgagcacagccgtaaaaggaaaccagattcaagaaaaggaggtgatgcttcgaatgaggcccataaaaggaattcagcagatggcaaccctatacaaacaagtgaatcagattcattcatctacaagagtcttgagggcatccaagatcaagaattctgtaatgcatttcagttgcctcctgaaaaggtgtttaaaccctgccatcttttaatatcgtgcttgagatcacctacatatcttggtggaagatatttgaagctttcaaggaacgtcagtcagtcatgttggataatagatgatgagagaatgggtgaagcttcagttgaggagataattggggagaatgttcgtgccatctgcaga

SEQ ID NO: 365076 - DNA, 383 bp, Zea mays
ccaataatatgtttagcaatattgtcaaagcaaaatattgcggctgttgttgtgtcatctgagatgaaactgtttatatctgtagtgtacaaagtaattttatggtaacatacaaaatgttaggaaaaaaacatgtttgtaggatgatatgtaggtgtaaaatgtacctgaatttgtgttcctgtgtagctacaacctcgggctgcaacatgagcaacggtacctaaaaaggagctgaacatttgtatcaacatctgtgtaatggacaaccacatgtccatgggaatccttgatgtaaagagaaataataaatatgtgagtacgcatatgtttaactaagtttttaatctgctaacagcaattgtactactaacattaaagtg

SEQ ID NO: 365077 - DNA, 499 bp, Zea mays
  unsure (1)..(499): unsure at all n locations
cgcttgcttcctcggatcccgtccaccgccctccccgcatctcggccgaacgttgctctcccgccgcaggctcccgtccggtggcgcacgacatctctacatccgtgtggcacgacgctcatctccgcgacgtgctgctccgatgcggcatcatgggtgctgcggacggcgccaccaacgtgtgcttggtaggcggcgatggcgacaactgcaagtacggcaccagcctgcagcgcatctcagatctcggatttttttgccatcaatcagcaagcgcggcaggagggagcagagccggagatggggcggtgctggtgctgctgccggtacctaaagctgctatgcttggttctcctcccaccgctcaacttatgcctgcaccacagctgctgctccaatctgtccccattctcaccgccgaagattcgctccattntctatggcacctagagttggcctttcagggaagaccgctccacaggccaagaagtcgtggggt

SEQ ID NO: 365078 - DNA, 243 bp, Zea mays
gagggaaaaaataaaaacccccccttaatggcattttttttcaaacaaaaacttactttttaccgggtgggcataatcccctgataaaaaccgcccttgtggcttttaacccatttttcaggggaccttcaggggcccccccccatttttgggtgaaaaccttaatttccacagattccctttggccaaacatcctaaacattattattgtttccaaaagcgctgttttttttttttttaaaa

SEQ ID NO: 365079 - DNA, 444 bp, Zea mays
gacgaaatactgattcctaggccaacaaatcttgggataagattacatggcatctacctgaatacagcagacccaaatgggtcactagtcactacagtatctaatgacaagatccacgataaattgcgggcatctcatccaaaatgtgacatggttacaatgttttacatcactacaaatagaatgggcagcaacaatgtggctactaggtgagtcaaccagcaggttttggattttgaagcaaaactgtctgggcttacaggcccagaggccgttccgccgttggcgccagtgctacagataggagcaaattacatcgtcattacaatgcacaaaataagtttagagcctataacacgaaatggtgcagtggaattaccttccagcgaaaacgcatgaaccatggcctgcaagaaatccagggaaatttaaatcgggctcaca

SEQ ID NO: 365080 - DNA, 484 bp, Zea mays
ttattgcggcagcagtccagtctccattcccccagttcgtgctccctcccatagtcgtcggccgccgccgccgcttttcgtcctctcgctcctgctccgcggcgacctagcgaggagcagttcgtgcgcgtgtttggtaagggaggaggaagaaatggctcttctataaggacaaaaatcagcttttcttgagagcttctgagaagtgttcctggcttacagcttagtcagatccttgggcacaaggatatgtggtccaagaaactacatggcgtgtttacccttcttatgctcatggttttcaatgtttcaggtaatctagtccatatattttgtagtgcatggatatgattcaaactaccttagcgcttaccatattttcagaacctcactctgattttctagtttggtagaaaccacttcaacagggaggttaaaaaatgatattttgaactgggtttttaaagttttaaaatgtatcctc

SEQ ID NO: 365081 - DNA, 270 bp, Zea mays
aacgggcgggggcttaaacattttccaattttaggggacagggtacaaacaagggtgccaggccccttatttggtttttggcaacccaagccgattccggaaaagtaattttttagggccattcaaattccgaaaaaaacctatcccctatggggccctacagttcaaagggcaacccctacaaaaaaaaaaaagacccccttttggggcagggggaaaaaacaaaagccttggggcctgaaccccccccttcccggtcaggggggaaaa

SEQ ID NO: 365082 - DNA, 514 bp, Zea mays
ttcttcctgcgtcctggtccagcgcttcctctccagctccagcgccgcagcgcgctcgcccgtgcctcatctccagctctccagcgccgcagcgcgctcacggcccaccagcgccagccgccaggccgccaccgcggcaccgccaggcgcccaggcgcgctcgcccgccgaccgccgttgtccttgtccagccgccggagtccggagcaccgagcacgggagcagccgaggcgagcaaccgagcaccgccattgagcaacagtgaccgtgagccaagccggggtttgtgaattgtgatttaaagttttggtttcattatttatttggtagtaatcccatgtttaattataggaataagatagacaaatttctcatcaagaatcggaagaaagatgcttctaattctaaaacaattaggacaaatgagagccgtgtagaataaaataggccatatattgagctagatatgaatgatatagtcctgtgcatcacgccttccggcgatgggagattc

SEQ ID NO: 365083 - DNA, 340 bp, Zea mays
caaacagaaaatatcacatatatatcacatatatccatcacagatttcatcccagacataaatggccaacccaaacataaaaccgggcccacaaacataaatatccatcacaaacataagggttcaacacaaacataagtctaaaacgtcgcaggctctcacataggttttaaacagaaccataggttttatccataagtggggaagtctaaaacaacgactcatggaggggggcggtttggccggggttgcgttgggctgaacccttccggagggttgtgggatgcccccccaaattggccaggagtgtggaaaaaagtagggccaactggggggaaca

SEQ ID NO: 365084 - DNA, 436 bp, Zea mays
ttttgtcaatgatatgttgaggcgagtcgaggagttggggggcgaggtccaccgggcaatcctgagggctgtcagctgtgatccagcaagctgcaagccagaagtggtccacagtgttccaatggtcatttcagcaaaaactttagagaatgtcttatccatcgacgtggacctcgatatgtgttggatcctggctagtcatcgcgcaggttatgtttccatttggaactacaacacacagggaagggtgactgcattgaaggtcaccaaggaagcaggcatgctacactcgctcacacgtactcgtagtgccaccacatcgtgtgtttattcggccaaatttatcactagaaagaaattgttcgcaacaggggacggctatgggtatatctgcatctatgcatacacaatggacaaagtgaaaaaatttggagct

SEQ ID NO: 365085 - DNA, 192 bp, Zea mays
cctcgcgtccgaaaaaaaaaaaaaaaaaaaagggggtaaattttataaaaaaggggagaaaatttgtcggccgggtttgtggtgccgtgcctgcgttcgcgcgccggctatggcgctggcttttcttttgtgtcctggtagcgcacttcacgtgtcggcccgtggctctcgcagtgtgggggagggccatgt

SEQ ID NO: 365086 - DNA, 377 bp, Zea mays
gctccctgcttgcagctgaggtgcgagagacctttttggtgtgcggcgccggcgccgtcaaggccgtcgtggtagccggcttggccaaccggacggggttcgtgctcacccgagaggctttcgctgcgatgatggccaggccgcgcgtttcgtccgatgaccaactgctgcccggcttgggtggcaatatggttgaggtcgacttcaggaggtgatgctgtttctgcagtacctatacacatttgattttgaaacccacgaccgatgctgtggccgatgccgccggccattgttgatgctgttccgagctaaagatccaaccttgaccgatgcaaaataccttgcgaggacaagaacaggaacctgtctgtacccat

SEQ ID NO: 365087 - DNA, 221 bp, Zea mays
gggccccacatgaaatttattccattccaaaatttggaatcaggttttatatccggaccttttggcccaccttttacattagggggcaacaacgactttgagcgccggtagacagtcccttatgacatccgggggatgctccagcttctttttcgaaacgatgagcggggggaccagccttaccaaattggccttaccgggagttaaaacaacaaccccgg

SEQ ID NO: 365088 - DNA, 370 bp, Zea mays
  unsure (1)..(370): unsure at all n locations
agccgctaggcgccgccgngcccggggggtgttttttcacgcccgcccgccttggcggcggcgacgaggacgacctactccagaagcagcaggagggaagcaaggcccagccgcgcaacaagccctccgccgccgttacggacgacggccaccgtcgagcgctgcacgacggctcccctacgttgagcggttcaagcagagctgatggctacatcagagccagtacaagagagtttgggggtgcactactcacaacctagtaggccccgggtcctccttgctgcttcaggaaggggagccgctataaaatttgagagcctctgccggagctttctctgagtgggcggatgtccctgctggggcaccacgc

SEQ ID NO: 365089 - DNA, 316 bp, Zea mays
gggcttcgttggttcccggtgaaaaaccgaaacggcgtgacatatgacggcccactgcctgtgcttcgttccggcgtaaacgaagacatcctatgttggaccacgggactgaacgagccacacaaagacctaaatgcgcagggacattgaggcctacgacgctatgcctgcaagaatggcaagggcttcgggaggaaagccgccgctaggacaaccagcgacagcaagcgccatgagggctgaaaagaacttagtccaagccaatgccacatcaggcggaccaggaccaggaggaggaggaaactgggaccatgga

SEQ ID NO: 365090 - DNA, 396 bp, Zea mays
ttcgtccgcgccttcgtccgcctctgccgaagaccagccgccgctgtggactgtttactcccgcggcgagtcgaccgccgtctcagaccctaaggcctaagccctagttccagcccacccagttccttaaccatggaggatgccctcgcgccgccgtttgtggccccgactccctcccccctcgccgccgctgtcgtcctcacccgtcgtcggtcacacctcgacagtgcctccttccgcacgctcttccgcctcttctctcactgtctccacattaacccgtcgccctgtggcatcttgccgtccgtgcccgagcccgtcgccgcggacttcgtcggtggggaccccgacgattccccagaaaggcctaatggcgctgatttcgatcggctaaag

SEQ ID NO: 365091 - DNA, 131 bp, Zea mays
gacctcattatgaggacggggaactcagagaatctggtgattgttattgggtggacgatggttatcaagatgccaaacatgccaactggccttatcaggtatcagatctcaagaatgaataagcttctcct

SEQ ID NO: 365092 - DNA, 302 bp, Zea mays
ttaatttctggaaacaatcctttaatgcggcaaaaccaattttctgcaaatgtcatggcaacaaaaacgtacgaggaaaggttaaaggtaccttccgaagagagactctttggaagaggcatcattgaagcacaggtacggagagaatgctgggcaactacttgattcaaatgaagcatcattgttgaaagcagcttcaagcgcgcaatccttagggcaaattttgcatggaacctgtggaggcttggcaggccctcttgcacaagttcaggccaggagcccctaacttcctggtcctgctt

SEQ ID NO: 365093 - DNA, 352 bp, Zea mays
acgttctgcttgtccagttttttggaatagagcgcgtaccacccctgatgggggatggccatggggtccctcagaaccgggtgatcgatcgggtactgctcgctcgcgtcgtgtagagcagctgcaccaggtactacagggagtggacctacatactaggcgacggctcctggaacgtgttccgagccagccactggagccgtccgtacggcaccacctgcaccaccacggtgccggcagggaggaacaccatgttggtgagcccggcgccgaggacgcccaccatacgtcgacgagttcaccaggcgagcgaacttggacgtgttggtgctggtgtatggctccccgatcc

SEQ ID NO: 365094 - DNA, 389 bp, Zea mays
ctttttcgtccgcccacgcgtccgaatggttataacggtgtgactgaatggacatcaccatctggaagagaagactctagctcaataattccagatcgaacctctggccgaacatctgcttctagacaattctgcgggaccttcacagaggcctgccagccaggaaggccgcccaggaagtaaatcatactctgaggacgaaccgagagaaaaaaccgggaaggccatacgggaatataacagggcaaaagatgaaaaggaggctgccctgcagactgaggagctgaaagctccgagatcctatacctctggtgaaacacttggggaaaaagaatcccacgagagaaaagacatggaaagagaggagttggcaaaacttcaagtaaggc

SEQ ID NO: 365095 - DNA, 242 bp, Zea mays
gatttgtttgttaaattattggggtcaaaactgcggaggggatgagttgaaggtttgagatccttacaccaatgtagcctttatgataacgaccagaagatccttgctttctctaatttgcagggtcttttgaaacctattaggctccccatccctggggaaccaccaaaaccaggtgcataagtttctgacgctccatcaattggggaagtagatgaaactataatcctgggcttgggccc

SEQ ID NO: 365096 - DNA, 468 bp, Zea mays
gccctcctttcaccaagcctaactaccacttcccggggggggtttgaggcaatttcgcccgggattccaccccgacacgaccgaccgcgaccgggattccctccgccaagcgccggatctgaacgcttgcgcctcctggtccgccgctcgaatcctgccacgaaaggggggtcaacacccacggggcgccggacaaaggcccgatgccaaagtcggcggcgaagagcaagggggcaggagaaaccccgccaagggcaaggtcatgggacaggcccggcattgggccccccaacaaagcacccaagtaggggtctcctccaagcggcttttcctttagtggcccaatgggaaggaaattcttcgtaagggggttacaaagggtgaacgaaaccccttaaagaaccaaagtcactgcctgattggcggtgggggaaaaggccgcctgggccgacaaggagggaaaaaccc

SEQ ID NO: 365097 - DNA, 268 bp, Zea mays
ggaactaaaacatagttcatcccacagaattttaccggttataatccccagccattcgacatagggttaattggtcgaaccaagttccaaagggttaagacataaactaaaacgggccaaaaaaaataaaaggcctatgcatgggcttaggggccacatagaacccccaactccccttgagggggacgcctgaaaacttttaataacttttttcccccttggggataaatggccacaaagggggggccttactgatcacttggggggg

SEQ ID NO: 365098 - DNA, 312 bp, Zea mays
ttctttctgtgaatcagtatgctctgccatcagatgccaacattcagtttttccacacgcagctgcagtttgatgttttctggggcaccctggtggatactaattttcataagcatcaggtgattgattggtcattcctgctcagtcaatcagtcatggagggtttgatccctaagtttgaggcatgcggactatatcagtttatggggcagcgcacagattttaatgaaatggctgttaagcaattcttgggtacctcagagattgatattgcagaagaatccatcacctggatgactggctttaagcgct

SEQ ID NO: 365099 - DNA, 129 bp, Zea mays
attggcagaagctgtgtgtatattaaaggtcgggggacttgagcgaaacacagcaggctggctgcgtccgaacaatgaacattcaaaccatttttaagtctgaacaccctgaatgggatccgggatgaa

SEQ ID NO: 365100 - DNA, 491 bp, Zea mays
aaaaggaaaaagggttcgtaggtagggttttttttacaacagtttgcagataggtgaggttggactcgtatagtaaaagttcgcttgtcggtcgtagaagattgattccccctccctaattatgggggtgggcagcaaaagattgcgcccgagagagagacaagtaaaaggaaaaagggttcgtagttagggttttttttacaacagtttgcagataggtgaggttggactcgtatagtaaaagttcgctcgtcggtcgtagaagattgattccccctccctaattatggggggcagcaaaagaggacgaagggccaacatatcagtcggcgaatactgcagcagctcatatagtttcgccaagatatacgcagtgaagcagacaaacaaaaacgacgactcggttccaaaaaaaatattcatcatagaatcagttgaacctgttgtctacactctaaaccaagcgacaggagtttgcacacacgtacggt

SEQ ID NO: 365101 - DNA, 329 bp, Zea mays
gaccgttttgcccgataccgtcgccataccgccgaagggacaggggcgaccgggcgagcgacaggcactcgcctagcatatttccctcctccgataagaaccccctcctcccggtcccggagagggagagggagagggagagaggcggcaaccagggccgggggagagagccatgtgcaagctcagacgcaccaaggagcgggtgggacgctacctgctggtgatcccggacatcgacctcctcgccggcgtactctacggcctcggcgccttcaggcacggctacgacagggacacggagatcggccgcaaccacacctggttcgact

SEQ ID NO: 365102 - DNA, 404 bp, Zea mays
ttcttggcacggcctaagaaaaccaaagccccgggggcgccgcagaacgaagacatggactccacgccggcgcccgaggcggctcccggagcctccactaccggcaccgccgatgccgaggaaccggcggggggcgcggcggcgatgaccctggacgaagcggacgcactgctgcgggggaccggggaggagcgcaaccaggaggacgaggacaggcgccagctcgagaacaagcccgggcccaaccgctacgacgggctcgagcccaccggacgcaagcacaacgcccagggcaagggggagaccaacaacggcaacaagaggggcagggccgggcgcaaggaggaaaaacggagcgccgaacaggaacgagcagctcaaaaacaagaagggaaggggacccc

SEQ ID NO: 365103 - DNA, 363 bp, Zea mays
atgctaactgcaatttaaattcagtaactggtggtacttcttaaagggacaaccatgtgagcagttatgtcccgctcaacccatgaagctaaaaccgcaatccatcagcaatacacagaaaaagagggcaaaatgacttccaataaaaaaaacgcagcacagaagttcgaaatttaattaaatactgattcagttgctagcctgcactcttgaaacccagtatctggggaagtccggaattagaatgtcaagcttctcagatgaattcacagatgggaaacacagcaatatagcatgatggcaacatcgaggaataatgccttcagagttcaaaccttggaaaatacgcccccaaaccaatac

SEQ ID NO: 365104 - DNA, 345 bp, Zea mays
tctattcgtccggtaaaggtagagaatatgaaaatatgttctttttgtgtgctcatcggcttatgcaaatctgcatataatacagaaaaaattggtgtactagctaagtctgcattgacctattctgagcaccgtgcatctgcaggcaaccaaacatgtgcaagtcgcactgcataagactatctccaaccatatactcgatatccctcctttacaaactcctctaaaagtctccctcctccatatttcattcctctccagcagggttctctatacgttaaatacccatattagaggcaaattccgctccagactcctgcacgaacacatttggcataccctcaa

SEQ ID NO: 365105 - DNA, 315 bp, Zea mays
tggatgaggaggcagacccagcacgccgaggccggggggccaggcggcagcttccggcgcacgcctgcgagacccgctcgacccgctacaagaacagcgccaaaccccccgggcaccctactaaaacagaagacgcacccgaaaaggacagaggcatcgggggcatgtacgacgcccacgaacaagaacaagacacacagagaaagccagggccaggacacaagaaggagccaagaggatgagccggaagaaagcacaaaacaaccgggcgcacgagggaccagaaaaggggggaacaaccaggaagggaacaga

SEQ ID NO: 365106 - DNA, 388 bp, Zea mays
aaaaaaactgaaggcataagatgttcacaaaaacaccctcgggcggtcccgtaattacagttgcctggctacaccccgacgatccaacggtacagggcgacgaaccccggctcctcctcgtccggcgcgcggagcatcgccgcgcccgccgccgactccgggttccaccacaacgagtcttcctgccggttgctatggctgcggctgtggtgtccctggctccaccgcgcgctgtggtgtccctggctgcaccgcgcgctccaccgtccggagagggaggaggccgtggacgcgaggcggaccacgtactcgcgcagccagccgcgggacccggctgcctccgctagcgcctctccgggcgccgcctgtgtatccgacttggccgccg

SEQ ID NO: 365107 - DNA, 486 bp, Zea mays
ttgtgttgcggctgccgctgctctcctgatggacgcgcttccgtcgcccgccgccgtccacccgttcgcggctacgctcccgccctcattgtcgccgccgtcctcgtcgtcgtccctcaacctttccccctcgctgctcatcatcgccgcgctgctcgcgttcgtcttcttcgcctccgtgtcgatccacttcctcctccgctgcctcgcccgcttcgtggcgtcgtcgtcgtcgcatcggggcccaagcccgctgccaaccagggcccgccgcgcgtcggaggaggaggcggaggcggaggaggtggtagggtccacgaggaggagcgccgcggctgtggggccggaagaggcgcatgctgcggaggtggacgacgagaaggagcgcctgatcgcatttcttggcgtggtcacgatggcgtcggggcttgcggggcttccaaaggcttccccgactgggccgttgttttttgcctttttccccga

SEQ ID NO: 365108 - DNA, 171 bp, Zea mays
gtgcatgcttgaggaggcagaaaatactaaacatacagcatggttttattattctccgaaatatttgatcatttctgtttgttagtccaggccttctgaatcaggcctgcgtgcctggctggaaactactgtttgttagtccagttggttgcgcaacatgttcaactgcat

SEQ ID NO: 365109 - DNA, 211 bp, Zea mays
aataaggcctgaatggctgaatccataaatggggggatgttcttcagcagtcaggactgatgcatatgaagctactggtacatacttgggctacatcacagtataggaattatatctcactaatccccttctccttcctagctcaagactcctgcagctctacctatactgctactccctgatgctactaattctgctggggggggggggg

SEQ ID NO: 365110 - DNA, 424 bp, Zea mays
  unsure (1)..(424): unsure at all n locations
anacgttagaaaaagaaaccagaacaagacaaacagaggaaacagagagggcacgaacgaggacaacaacaagaagcccagaggcaacaccaccagaagccccaaaaggggaggggacagcacaagaagactggggaccaaaaaaacagaagcgcgaaacaagaagagagaaaagcccgcctagaacagcagccaggaaacaaaccaacgggacgaacacgcccgacaaaaacgaacggacgagcgaaaaaaacaagccccaagaggaagaaggggaaggacagaaagaagcaaaccccaacagaaggagggaggaacccagaaggaaaagaaccccaagccccaagaagggaaaacaggaaagagccggaacaaaaaaacaaggaaggccacaccccaaagagaaagagaaaagggcccaaaa

SEQ ID NO: 365111 - DNA, 157 bp, Zea mays
ttttttttttttttttttttaaagaatcgtttccttgggatttctgacaggggacctgaatggatgatcaaggcccaagccaactatcaaaggggacaccaagcatatgggggatcgggccattacgcagcaataataacagtgaggcaggctgtgt

SEQ ID NO: 365112 - DNA, 252 bp, Zea mays
acggaactcctttccaagaccggagagcgcggacgatgcagagattttatggagtgacagcgagcgtgagcgagagagacattagagatagtccgcgcgtaagctgacctactggtgaagacgtcggggaagggtgatgcaacctatcctggcgacgaataccagggccgttgggcggcgactcggctgttgcgcaacaggctctgatcgacgcggacctgcgggagcttcggctttccactagcggaaagc

SEQ ID NO: 365113 - DNA, 336 bp, Zea mays
cgacctcacgcgtcctcgtgcctgcaaacttctagaacgtactattatgtaccctgagattgttcctagctcgttggtctatcagatgttacagtccaactaacttttcttcctcttttaggcgctgatagcaagctcttatgcaatattggactacaaaaaagttcaaaagacagcaatgtttgcgttgcaggtgaaatgtatttcgcttcattctatttaaagttcaatctatgcatacggatgcacgttttcactattttttttgtatgctcttctctcttccagataggagcgtttagtgggttagctttggccattggattgtatgcctca

SEQ ID NO: 365114 - DNA, 338 bp, Zea mays
ggggccaccagttcgttgtaagaaaaaaaagggtcatctagatttacaagacagaatacaacttcgccaaggatctgaagaatcggtatacacctcataagaccatgaggagccgccagcattcaatagtatcctttccctctgcttacccggggtacaacattatattatcactatttcaatggtacaaactaggactgaacgaattaaacactccagcatcaaatgttacatttgtcgtatccgtaaaaccacgagttgaggtctgtgctcttggagacctcaaatgatcctccttgttgcaaggtattgaactccttccaattctgcctactggg

SEQ ID NO: 365115 - DNA, 231 bp, Zea mays
caaccaggcagctccgggctccgggcggggttttaccaccaaggaatgggggtaccaggactaccagctaccaggagatcccagagatactggtgggccccgacggccggccggtgcctgccgtggggctcggcacggcatagttcccgttcgaggaggaaaaacgaaggaccgccgtcctcgctgctctggagcttggataccgtcaccttgataccggttcgctctacc

SEQ ID NO: 365116 - DNA, 240 bp, Zea mays
tttgttcgtaaccagtgttacaggctttctggaggggtaacttatctatacctggaagcctggttttaccccgccggaggaagattcagctcgatgaaactgagatgatccacaacaattcgagcatataacagctcccggaagcgtggggccgctgcgccatctccttccgctcccgtcgtccggaaagatcggcgcccaacaatggcggatacccccccacgggccccaagagggagc

SEQ ID NO: 365117 - DNA, 387 bp, Zea mays
gggaagtaatcttctatttcttaattggggggggttctaatacaagagagggataggcattatgccttctaacaaacatagatggaaaaactcctcaaattgagaccgtggttttctggccgcggtgactcagtctccaccgatgatttgttgcaacccaatgatcaacacctgattaaattgactttcgctaacatcgtccctggagatgatgacttggtcagcctttctcttcctagaacggatcagaccaccttcagcttccccccgaattaaacaatgagtcaaacatttccattttaggcgattaggtgcgaacagaagctttgtatttcgagacaacaggacattcacgagaactaacaaccacattagttgcattgaact

SEQ ID NO: 365118 - DNA, 207 bp, Zea mays
ccctctcttccgaattccccatcgatctcggtctggggtctcctccctctcttggggcatggatcgcgccgccgcatcgccgcccgccgtggaggaacccgtcagggccaccttcgttctctacagcctctgcgcggaggtgctggcggtcatgttcccggtcttcatctgcatggccctcgtcgtgctccttattttccttctctc

SEQ ID NO: 365119 - DNA, 294 bp, Zea mays
  unsure (1)..(294): unsure at all n locations
cccaagtgaccgcggacgcgcgggcccagaacccgaggaaacgtttgaaggcgcaggcgcccggagagcgcggccaccggcccaagccgcaaagaagaaggcaccacgccacgcccccacggacgaaaaagacgccgcgggaccaaccaggaaacagggggaagggcacacaaagaagacancgcagcaaccccnnggagagaaggacgggcccgcacaaaacgagggaacaaccgcgaaggcggcaacaaacangccagacaaacaagaccccgcacccacaagacccgggag

SEQ ID NO: 365120 - DNA, 357 bp, Zea mays
tcttaaatttccgggacccgcggccagacccgcgggccgaactttgaagcgccttcagggtggctccacacgaggagatgcacttcgacctcgacaccgacccgacggctccgctcggcgaaacctccatcatcaacggagagcgttgcctgtaccgatacagcccggagccccagcctgagagagtactgatgctaaaagcccacaaggagccatgcaaagatgcactattagtggactgaagaaaagagatccagcaacggccagctcatagcatagatcaggcccaagatgtagaatcgggcaaggacatcggcctctaggaagacgcacatgagaatgccataaaccgccttg

SEQ ID NO: 365121 - DNA, 372 bp, Zea mays
gggctgatgagggttaccagctgagatttaagagtcttgagagtacacctaattatgttcccaacaagtaacaccctacattattaagaaaaaaaatgtcacacggtcgaggcgggcgttaaaaaaagaaataacacactgatacaacaaaccatgtgaaatggagtattttttagggggggaaaggggtgaatttattccggtctctgggcatgtgacctctgatcaaaggtcccccggacaaaaagcttggaaacggcaaccattccactagcaacaggcaacagccatccgcccggcgccatctccagcgcgtttacttgttgcgaaacttgcccttggtcttctcgaacacctcctcggcgatccggg

SEQ ID NO: 365122 - DNA, 262 bp, Zea mays
gggccacaacacttactggttttacttttgaaaaatgccatcagcaatatacttataaaaaaaacaacatttgggatgccttgcaccgggggtaaaagttgcccactggcacacgcacttgggtacaggaacccaaaaaaaaccagaggggagaggccacggtttttaacttaggaaacttgacgactattgatttgcaaaaaaatccgatgccggccgactggaactttggcctttacctgcctttttactccttgaacct

SEQ ID NO: 365123 - DNA, 378 bp, Zea mays
gatagaaaaacgaacatcattaattttctgatttcttgtcaatagatccatggagatgtcaaatacaagtgtaatggggaaacaatgtcatctacatcgcagcacctctgtgcgtacgtcagccagaatgacctccatcatcccgaaatgacagtgagggagactattaatttcgcttcaaacatgcttggggccaacaatgaattcggtatgagtgcctgttggttttggtcaaaatcaaaatattaaattgatatcctcaagcgatagcaacatgcattcatactgatatatacatatacacacacgcgcgctaattatctcctgctggtgataactgctttagagacgctgagagatgcattacaaagaaaaatg

SEQ ID NO: 365124 - DNA, 482 bp, Zea mays
gcgcataagcctaggccccggtggtgttcacttggccgccactgccggccacggcggcggcggcccatccctccctttcccctcttctcccctctctctcttccccgccccctctgtctcgacatcggtgccgtcatcttctcggcctcccgccggttggatccatcgggcgctggtcggatctgcctttcggtcgccgatgcccctccgccacgcctcgcgccagccggtcctgctgagcgccggcctgatccgcctccctctagtcggatctgcttggcgtcggcctctcgccgctactgctccgcatcctgggcttcctcaccgatgcacgatcctggcaccacgccacgccggtgtgctaccggctccttgcggcggagcggaccacatggtctgtgctcacgctgagcagggacccacgatcgctcgcgttcctcatcattaggccgactttctacttctcgacgcttgagcagctt

SEQ ID NO: 365125 - DNA, 375 bp, Zea mays
  unsure (1)..(375): unsure at all n locations
aattcccggtgttcgacctcacgcgtcccggcaaataaatgcgnctcctcggcaggctgagatacacgcgccagtggcgttcattgacctgctggctcctgaattatgatcaaagatgtccaaatagtggacgctgaacgaggggatacacactcatgtcttgcgggcttagtagacatgagtaaactcaaaaccgtaatggcgcaaagtcttgtcatgaatgccatctcgggatcaagatggaagaccggaactacaacgcgtaaggcatgattaccaggtactagtggatacgtcccggagattccgctgaagtagctagttgcggtacttcgggcacatgcagtaggcgagcacggccatccggggagtttg

SEQ ID NO: 365126 - DNA, 580 bp, Zea mays
aattgtctatgcacatgtctccaagaatattgtggggaaattacaacagatttgtgccatgttttactctgattttggagttttctgcttaactgaggcgaagcgcaaccaccaggttggctgttttagatctgtctcctagactgccctttgctcaagggaaatccctccttttcatttaacgcaaaagaaacttattctatttatttgtatctacgaaatctggcgtcaaatgttcagttgaactcagatgtgtgagactcaactgaagatcccaaatcatcacattatttccccgtcgaaatcatttgtgtttcttagagagaaaaaatgttttatgcttctgtctcctagactgacctttgctcaagggcaatccctccttttcatttaacgcaaaagaaatttattctgttgaacagtattttcatctttatacttatttggtactgcaacagcaatgagaggagcaatatccttgacaccttaattttgtattgccttacaaaggattttttagctgccgcttgccaagtataggtcgtattgtgggtagtcacacaaaactaaaactaatggc

SEQ ID NO: 365127 - DNA, 116 bp, Zea mays
gagaaattgggatttattcctggcggcttggtggcaggggcaatcctggatggattttcggcaataccaggagggtaccttaatggggaaaattaccatcaaaccattaattcggg

SEQ ID NO: 365128 - DNA, 494 bp, Zea mays
aatcgcgtccggtcgacaagcttctgaatcagatttacttatagtggcagagggaaatttggagttccagaaagttgctcacgatgtgattcggaaaagagtttctgataagatggaaaaattcatcaatgaatctatggggtttcaagccaatatgctcaaaagttcaaatgaggatttagttctcttactgaatgaaaaaagttcactggaggatgaaagtgcgaaattgaaagtgaagataaacagtatacatagttcatccaaggaatacattgcagagattcttgaggaagtgaatacagaaaattcagttctggagtctgagctacggtacatgatttcggaatataaggatgtccaaaaggatataaacaacctgaagattctgtttagttcaagcaattcataggacaggttcctcgcgtcactgcaggtatatataatctggcttggcaactgtacttagagcagagcccgaatttattgtttga

SEQ ID NO: 365129 - DNA, 285 bp, Zea mays
  unsure (1)..(285): unsure at all n locations
ttnnnttntttttttttttttttttttttttttttttttgggggccaggcttacgggctgcggccctgcatgtccatataattcaaaaaaaaacattttcacgtttatgtgggggagatagggccaaacacgaccaccttattattctgtactgtacacagctgacagctgccgacggcgctctgctgctcaaacggggatgctgttgggtatgccacggagcaccagtccgggctgtgccgtcggcttgagcagcgtatagggcacctccacctgccccgtccg

SEQ ID NO: 365130 - DNA, 505 bp, Zea mays
agtacgcgtgggttttaaatgcagatgatattggaaaaattgaacctatcttgtgagattcagattcctgttgcatgttctgctgtcgatgccctcaaattactggatcacattattgaagctgctagagtagtgtacatggacgaggtattccagccgtgtcactcattttgtttggctctggattttattcacctctactttctaacgagacgagctgtgcaatttttttcagctagaactttattttgcaggagatgatgtcggtccattctctgcgaggaatgaacttgaatctctaaatcttttgttgaaaacaatgaaaaaattgcttctaacttccaacacggctgccaaggaagtactgcagatactacatgatgagatagttgttaagctcacatctgttggaaagtctgacaatgcttggatggttgttcacacacagaaccatgatgctgaggattctcttctgcaatggcgggagcatcttggtattaaatct

SEQ ID NO: 365131 - DNA, 161 bp, Zea mays
ggggggaatgacagttgtcaactttattgcaaaaaggatcttttatttccaagggatgcagggtttcccaaggggggggtcctttgggaaaaaaccgtaaaatgggggttgatcatttttaacccaattttttgtaacaaaaaccaaccatggtttgcatg

SEQ ID NO: 365132 - DNA, 499 bp, Zea mays
catcgcgtccggcaacctgtagttttgcctcagttcatcgtttgctgtctctgttaaatgaccaagaataaagtttagtacttcacacattaggcatccagtaaaacggtatcataattccaaaggtcagtaacgcaaacaaacaccttctaaatcttttccgtttgctgcagcagccatgagattctccttgatctgtttgcgacatttattcctctcttgaacaatatcttgactattccctccagtgaacagcgagacatatttctcattcttagggaagaactacaaatgagttgagatatagaagctttagctcaggattcaagcaggtacagataaaaaatggttgattagaacctccaatctaatgcaaagagaatgatacatcacagaaaacaaagttgtaatgatacttatatgtcatatcatcatgggcagggcaggaatgtaggaagctcactctaacatattcaagatcttctcgcaattttgacag

SEQ ID NO: 365133 - DNA, 495 bp, Zea mays
aactgcagcaacctttctggcgagcataatgatgcgcgggaagataatctggtggacggtcggggtccattccattccatcccgcgcccggggcggatgcggatggggatcccacctcccagcacccggagcaggagggaaggtgtgagtgcgcgacgccgaggccggccgccgctgccgtgcacggaagagggggggcgcggcgcggcacggcacggcacggcacggcagtgggtcgtggacgaagaaagcggggctggctgcgtggccgtggctaggaatctagtagcaaggcttgttatccacgtcgcccggggtggtccgcggagcttgccttgaggtcgtgttcgtatccttttgccgtccttagtttagcatttctcccgagattcggctacggtctgctttccgtgaccgctctaaggaggatggagcagcttatcgagggtccggaatggcaggcaggcatgcagctgctgtgctgaaggaaaggta

SEQ ID NO: 365134 - DNA, 342 bp, Zea mays
  unsure (1)..(342): unsure at all n locations
gaccggcccggaagacccggtgggacccacgcggccgccgaataagaccacgcccacacgaccgcacgggncggggggcgctaaggcggccaccgcactgacccggcaagagcccgaaggcggcggacgcagccaaccgcgcggcccagggacaggcccccagaccgcacagggcccagccgccggcggcccgacgagggacggacacaggacgcgcggcggcgggccacaccagaccgcgcagggcaggggacacgaccaagagcgacgagaaggccgcccagccaaagccgctgcaagaaggcgacaaaaccccaactaatggcaaggcacggaactcca

SEQ ID NO: 365135 - DNA, 399 bp, Zea mays
  unsure (1)..(399): unsure at all n locations
acaaatagcatggcatgnactacccgactcccctggagaagtttgaattgcatcctcgttttgatggggcatggcgagttcgctcagaaaacagtattgatcctggctctccattgtttatgattcatggcacttgagcactcctgctcatgtgagatactaatgcttctattttgatacagtgcaagcaccttagcgcagaggaggtcagtaggtgatgcttttcaaaataccaaggtacgactatgtcaaatgttgaccttaatgcagagtaaataagatcatctggctgaaaaagtaacttttttcctggggagttgtctctgtaagatgcagatgacaaatctttggtctaccaatctaatgatttatcttggaaaaccattgctactgcaattt

SEQ ID NO: 365136 - DNA, 420 bp, Zea mays
  unsure (1)..(420): unsure at all n locations
ttttataccaggacgacacctgnatggggcctgggttaaaattaattcgctaggggtgtatattaacggggagatacctagaggtggatcagagaacttgaagagataggctataacttttgcttagcatttggagaaacacgttaggccatgtgttggctatagtatttccttaaccaaacatatggaaatggtgttaaacgttagatgttgtgaaacacttcataggctctaatctgagtgctcctgttgattccttttcggttctttcattgctcccttaagtactagcggattaccaagtgtgcatccggcaaattttgcaattgcctggactttgatatgtttttaggagtacacctactgcagggtgccgtattgctgcatacccctaaatttgcaagcgaagctctacctcac

SEQ ID NO: 365137 - DNA, 264 bp, Zea mays
ttttcttttctagggcgaagggaggggtaggggggctggggtcgctacatacgagcatgttgtggttcaaggtggctgatattctgccacagtgagctgaactagttgtggggtcccagggggtctattccacctgtgggggatgctacactaacttcctacacggcgggaagtctgctatgccaggctgggtaccacgggccctcggggactaggatgcagcctacaactaggcttgattggctccacaacgttcatactgtc

SEQ ID NO: 365138 - DNA, 338 bp, Zea mays
aggattggaccaagattcatttcagcttatcaaaacttacataaattagagaaacaatccagtcagaaaccgtgtcggacctccaatctgtaaaaaacgaacagggcctaaagggtttcaaagtttttgcaatggcgagcctacttatttatgtagctgtactttgtgtacatgttcttcaaccaggttaccaggccaagtcctctgtgcaaacgtgattcggtgagcagatgtatctatctcgcagatgacactttcttctcgtacagtagaagtagagcattcggccgcatcacggacgtctatgacgtaccagtctgtcgttcttggtcatcaca

SEQ ID NO: 365139 - DNA, 415 bp, Zea mays
accgcgtttatgtttttgtcgctcagagggttacgccccagcggctgtctttgtggtttcatctccataagatttggctgcttttttacgttggtttgccggacctaacacaaccctcctcctttaccgggcttgggaccggctatgttgaaacgactcaaggaagtcttccaatcaacataggcggagttgatgttctccttaaccaccagtcaaaagttgtgtttcaatgtgaatctgtacctatccgtacattctttctagactggatttatgaggtccaatctaaggccttggattagattaacatcattggttcctgtgggcagacgtatttatgttttccacatagacaagacgggagtactcaaataccatagtactgatacttcattatctagaatctgttgatcac

SEQ ID NO: 365140 - DNA, 361 bp, Zea mays
acccaccgttttatggtatcggcgctcacaggcatactccccagcgggtgtttaggtggcagaacttgcatcgcttgcaccaaaaagtggcatcaaaccatccagcagtgactggtccatgagctgtgtcatgaaacaggaactcgaccttgaggcccctcagttaatggtctctctatgatgagcctacagctcaagacctcctaacgtctaatatataaatatgtttggatggcatataaattgtttatactggttcttcgtggataaacgagattggctaaggttcttagttacaaacgctgaagtagtgtcaaactaggtatcatcctgtgacgatgatgacctgcttaaatggaaa

SEQ ID NO: 365141 - DNA, 343 bp, Zea mays
ttggtttgatcgccatccccgctggggcgttcctccgcaccgctcccgcaatggaagggcgtctgtaccattcgcttccccggcagcccttccttcctagacaggctgcccccgccagctgcgcgcaccccgccagccgtcacagtgatgccgcccttccttccctggtagcccgccacctccgcgcccccaccaaaccggaaggcgagatccgctgccagctccgcgctccgcgcgccccgccagccgtcacaatgatgtcgcgcaagtcggggaaggaaggccgcgcgagtcgcctccgggaaacctgccaggcatcactgtgcccgccgccgagataccc

SEQ ID NO: 365142 - DNA, 314 bp, Zea mays
gccagcccacccagggggggtggtttccaagctaggccgcgccaggggccgccggcctgcgcctttgctagcctgcaccgaggctgggccgcccgcccgcgaggctgcggggtgctcgcgcgaggctggggctgccggggccggcacgcccactaggctgtggcttgcctgcgcgcccgcgaggctgtgtgggtggcctgcctgcgcgcccgtgtggccgaggttacccatcgccgaggcgcgcattcggctctcacctgcgctggagcgtgcctgcacgcgtcggggctcccgtgccgaaacgctgtcatggc

SEQ ID NO: 365143 - DNA, 145 bp, Zea mays
ggaaaaaacgttttggcaagcatactgtatacaggggggccaagcatactcagttttttcatacaactaagtttgaacatgcgacacaaaactcggggtttacaactacagaggcccagtcgaaagatgatacatttgcaaacgt

SEQ ID NO: 365144 - DNA, 286 bp, Zea mays
  unsure (1)..(286): unsure at all n locations
tttntttttttttttttttttttttttttttttttttttttttttttgggagggaattttgctcgcgttgaacatggatcaaatgttgccttactagtaggtaacaagaacgaatggtacaatacacatacatgacgaagcatcaatacagctgaactaaaatggcacgagaaacaccatccacaaataggcggggcccatggatggatggatgttttgaaaccttaacctacattacaacaacttcgaacttgagctcgagcggacccgtgggcggacccttggg

SEQ ID NO: 365145 - DNA, 474 bp, Zea mays
tcgattactaaatccgggagggtgtgtggggggtccaggtttcgtttccaggggggagcgtgttgtgctggtgtgagatctgggcggggcctttgttatccggtttgaaaccacgttttcgggcttcgaattttacggtcccttatccagatgttttgttttgttttgttcccgttctcaggcgaggtcgagcagcagaggacgccggcgacaactaactcgctccccggagcggagggcgaggaggtcgaaaggaggaaggagaccatggagctgttcccgcagagcgtcgggttcagcatcaaggatgctgctgcccctaggtgcgtaccactgctgcttcacatcatctaaatccatttcgattttggtttgcgcaacagttgttacgtagtagcacagcagaactcaagcctagctgtcgtaggtctcctggacaaaaggccaagcaaattgactctgtaacatagagat

SEQ ID NO: 365146 - DNA, 140 bp, Zea mays
gaacattgttcagaaaaaacataaacaacttaagcaagctggaattttgatacaatgacagtagctcgttaggtactgtgaaataacagtgcataacagttcttaaggaacatctccccctgtagcaagaacacctttat

SEQ ID NO: 365147 - DNA, 231 bp, Zea mays
aagccatggaatatattttggtgcaagcattttaaaatttttgtttgagggggacatctagctttttacacatattttggacaaccccgcatacataaaaacttggaaaactaaaactggtttgccaaagctatcggattttttccctatacaattatgtttccaggccattggatcttcggggacccgtttcaaaagttttttttggggaaaaggaacccgggtgggggt

SEQ ID NO: 365148 - DNA, 442 bp, Zea mays
cccaaggtagggctgtcattatttgattacagttgacataggtgatatatagtttacagtttcaggataataatgtacatgactcgctgacgacgacacagtgacactgaaatacctatgctctaatgagacatgggaacatgcactggaggtactgagaaggtgcgaagaagagaattaatatacacaaccagatgttttgaaagaatgttctacgatttggacctactgcatgacctatattattatacacaggttggaggccggactccatttccggccatccactttggtccatgcacagaccaccagctatcagaatttctggcaggagatggggaatgtacacacacactgacagaagctgagcaagaggggcttcatcttcagacactcacattataagaagttcgggtaaccatggataacgacaacctttaga

SEQ ID NO: 365149 - DNA, 421 bp, Zea mays
  unsure (1)..(421): unsure at all n locations
tcgcttacgcgtccgaaagcagtccttaccaactgcccttccccaccccgctcccgcgtaatccaaccgctaataataaccgctgctctgattagcgcaatctccaccgctataattacgctcccgcctgcgcgcgcgggcctatcagccctagctagctacccagccgcctccgctgctcgcctcctcacttgcgcgtgtcgtgtcgtgtcgtgttgcgctaagtcagctgcttgctactagggttagggtttgcggctgcgcgctcgcgtgcgtgcatgcgcgtgggttggccgcggcagggatgacgccgcagcggtcgccgatgggtaccggaggaggaggcatgtagcggcggaggcggcgggggaccgccngcgctacactacctgagcggcccgtacggagacaccacctttac

SEQ ID NO: 365150 - DNA, 251 bp, Zea mays
gctttattttttccgccgtaggggcccctcgctccgggggaaaaccctttcctctcccctatcctctcgtctccccccaccccgccgcgatcaaccgagacccaccgccatgacgagcgacgacgaggaggcgtgcgactacttctacgacgacgacaacgacgccgaggaagacgccgccgccggactggaggaggactttttcgctttcaacgccggagggccgcgcggactactgggctatcacacaa

SEQ ID NO: 365151 - DNA, 470 bp, Zea mays
cggtcgcgtgggccgagccggcgtgtccccagccgttcccctcctgggcatggcaaacgcagggctcccgtgccccagttctccctgccaccactgcagcatcatcaggattctctaccgccgctgccaccggcgtggacgcggtcacagccggccacagcgtgccgccgccgtctggtagcctccggcagttctcgggctaccaccagctccgcttccccccaaccgcctgacggagacagaccacctcctgttgagttggcggcggcggcggcgtctcatagctggccggtggttggctggctgcccatgcaacgccacgccggtgggtgcgggtcggtattcggtaacagtcgccactgttgggtatggtctttgtgggactacagaggatgcagtgatctctcgctgctgctgtgtgctgtctctcttgttcctctacccacccacacctgtttggaatatgaatt

SEQ ID NO: 365152 - DNA, 296 bp, Zea mays
gggggactgccggactggggagtgggacgagacgaccagacaaatccagaatcgcagtcgcgttctgctcctggaggcccccgcctggccgcctgcgccttcgccatggaatcgcgcggcaagcggatcctcccctttctgttggtcattatcgccgttgcggcggcttcgtccgtcatgccccgtgacgagagagaggtggtggtagtcttcggtgcgcctgacggggatgtgtgggcggtccacctctcggatcttcactttagcgtgcaccacccggagcgcgcctaccactt

SEQ ID NO: 365153 - DNA, 365 bp, Zea mays
actcaaacagcaactagattccatcagcacatccaaatcaagtttaatggtaacccgtccacagcaaaagagatcacagtccaatttcaggctcaatttatggccttaccctgcctgaaccacaccacaatacatgataacaggcttcagcaacagcaacatggcaactagcaaggccaataacactgcagcaaccaacatggcaactagggaaggggaacttgcttacacctgagctgcctcccgctcgcggttccactgctcaatctttgccctccgctcctgcggctgccactgccactacggtagtagtggtagtagtagtcgtggtaatcgtcgcggtccctggacctggacgagctacc

SEQ ID NO: 365154 - DNA, 206 bp, Zea mays
gaaacaaacaaccaaacacttcggaactcaaccggggggggcagcgtttgtttgctgggtccaagtccctagatgtaaaaggcccagtttcaaataaatctgaagccggctggctacgttgccaagcaaataaccttttgcccccatgaagggagaacaaccggaatttttcaggggcgaccccatcctaaagttaaacgctttgc

SEQ ID NO: 365155 - DNA, 377 bp, Zea mays
gaaaggagatactagtaaggttactgctgtgattgctacacagttggagtggagtgacacagtacacgaaagcagatcagacctcgagttacacttgcacctggtaattagtagtaagtagtagttcattaaccataaccccagcatcatctagctagctaattaggagcagagacccagcccccagttgggttttttttcccacccccagttgatagcacagtacagtgacggtagtttcatggctcaccgccacgtctgatctgcccttcagttccatctgactagcagatcactaacctgaaacaccagcagcaaaaaaaaaagatgtttttttccctcctctcgatgctttgtgctgccatggcgacttcggt

SEQ ID NO: 365156 - DNA, 346 bp, Zea mays
tttggatgtttcctaaaactttaccttgcatgcacttgggtactactgctgctgctagcgaagacctttattagttattagtagtgttaagttattaccaacaagaagcagaaagaaagaaagaaataagggatcaagaagcatagagctgttctgttcttttttccccctctcttgcaagaaagggcggttcttgcgcggacggaacgcaggaacaatggcttcctccatcgggagcgggagcgggagctcgggcttactctcggcggcgctggacttggcggcggtgggaacggaggaggagctgcgcgcgctcatggcgcaacgccgcgccaagcggatgctg

SEQ ID NO: 365157 - DNA, 166 bp, Zea mays
ttttgcatggtccacgacaaaccatgatacaagtttcgtgaccatgtggacaacgtgttacttgccaattcctttgagagctcgatatgaatatgggcatacagatatccttgatcgactctcccacctctcacgtggaggtgaaagccaagctgctaagactatc

SEQ ID NO: 365158 - DNA, 233 bp, Zea mays
ctctcagctggtcggtcagtcttgcttttacaccctgtacttattcttaggctcttagctctaggctctagctagccgcgccactcctttgtgtagccatcagtcttctcatcgtcaccaatggccactgtcgaggttcagaccccgaccgttgtggtggtcgaggaagcgcccgtggtggagaccccgtcgccggtcgtcgtgcccgaggagtctgtccccgccgaggccga

SEQ ID NO: 365159 - DNA, 417 bp, Zea mays
ccatcccggtgttctccgatggtggggggtgtccctttgcccgctccggtctgctcctccagagtccggtccagcggagcgcactacgacacagatcggcagccgtccatccctttccagctcttccagagcctccgccggcgcatccggcgactgatttgcagggagtgcttgaagatggctttgttgccgtcaagaagttatactcgtatattgcaattgaagacgaaccatttcatcgtgaggttgattgtctaatgaatattaggcaccacaacatagtcttgtttgttggttactgtgctgaaacacaggaagtggttgtgcgtcaagaagggaaacatatttttgcggaaaacgagaaagattactttgctttcagttttggcataatggaagccttacaagcatttgcag

SEQ ID NO: 365160 - DNA, 482 bp, Zea mays
caacctcgtcgacaagtccgaccgcatcgttgcgacctcctggctcgacgactcttcaaagtccgagaactggttcgtcgacgccctcaacagcgccatctccggctccctcgacggtatcccgaggggaatctccaccgattcagcctccgtcaactgccttctcggcctcgaggacgactcctccgtgcactcccgtagcggagtaaccaactcggctcccacggaggaccagcgcgccagccagccgaagctccaggcgggcgccgccgctgccgtcgtcggtaccgggaggcacccgcacgacgtccagtccgtgccagactcgccgatgctggataagaactcctcgttcgggtctaccttctcggccccgtcgctatcgaatctttccgctatacccgtgcggcccgaggaccgtccgtcggacgcccgcatcatgcaaccctaccgcgtcgaggaccactttgcgcagatgggaa

SEQ ID NO: 365161 - DNA, 421 bp, Zea mays
gggcagcagctatgtttcaatgcttttgcaattgcagattgatgttcttcatatacagaaaccaattgttttttcctataccagcaaggcaccaacacaatggctggattctccagaccatctgagagaacaaaaccaaacatctgagcagccagcaatgacgtaccggcggtggacgatctctcccggatcggtctctaccgccggcagtatatgtatcctcaagacttcaactctccctcctctccaaatggcaaattaaagaacaacaaaaaagaatccgatgtcagctttgtcggggtcaggcggtcagctcatggcccgaccctgacccgcactttcttggcgtgcatctcggcgaactccgcctccgagatctccgagttggtcgacgacgtcaggtggcgcacggacaggcggt

SEQ ID NO: 365162 - DNA, 170 bp, Zea mays
cggccggacgccgacgaacgcggaaccagacggaaccagagccgacgacgaccaagccgacgccctggggggcccggccaaataccccacgccccagaagggaaaaagaagcccgccgccaagaccaaaagggaagaagaggaagcaccaaccaagagagcaaacggaac

SEQ ID NO: 365163 - DNA, 378 bp, Zea mays
cgtggacgcgtgggctagatcgcgagcggccgccctttattttgcctttttttttttgccactgcaccataccgttatatatatccacccaagtacatagcaatgcaagaagaagcgttggatgatccttctggcttccaaaagccatgcagctatcatgacgcaatccgttcacgagtcaatgcaggttacagcagcatgtctaaaggaccaagacggataagatctacaacaacaacaacaaaaaatctctcctagcgaaagacgaccacgagcacgagcagccagcctacagttagaaaatcctgccaagaggcttcagctctgtaggcagatggtcgtagttgcccgaatcgatttgtgtctggaacatgggcc

SEQ ID NO: 365164 - DNA, 419 bp, Zea mays
tccgtggacatagtctaagatatgcggagttactacgtactggttttgtatacaactcttttatgtttatggctgtcaacatgatatggcatgaaactggtgtttcctttgtttggtgccactgacgttttcttgatgcttgtatctaggggtgccaatgggctctaaattttacactataaaatttaaggatcagatcgaattaggatcagactctatttctattcatttttgaactaaaatttatttagtgccctaagaaattaagaagcatttggatcacgatctattaccacccctacttgtatatgttttctaaatgccatactgatttggattatgctgttcttgaatgatcatgaactcaaccaatcttttctctcttgtagccttttttatctggtctaaacttgatacat

SEQ ID NO: 365165 - DNA, 361 bp, Zea mays
tcttttttttttttttttgttttacccgttcaacgtcactcttatcaagacccattctgaatgccattgttgcaacaacctttagtcacagggaggaagacaacaatggtgagacatcaacacatgtgtaatacatttgataaaataggttctgacaaagagcttccattaccactcttattttgttagagcaaaaaagcttatgtacacggttcctattcttcttaagaagtccattgtggtacctctgcagaacagaatcagatgtaaagaaacaataaatgcaacaaatttctctacatatgtatagatagaacatgaagaggaaatgaatatgtaagcttttcgcagggtatatata

SEQ ID NO: 365166 - DNA, 435 bp, Zea mays
catccggccaccagcgcaggggccgagccactttggtaggagccggccatcgttcagatcccaggctgccagccaccggcgtccagcactccggctgctagctaccggccacccgcagtgcaggccacaccaacgggcagcaaccgcatggtgccatagctgtcgacgaacaccagcaaccagacggccagatcccagtaattcgatttattatatcttcgccgaggatagcgacacgtcacgtcagtgtccggccattgcttgagaggcacgaatgtcttcgctgcgccgtcacgatccagactcgtatccccttgtgacgcgcacccatcgcgggcagacgtttgggctttgtgtggatggatcatggacgtccatacccacatttgtgttttaactaaatcttcacttctttggattgcagagcccaaccca

SEQ ID NO: 365167 - DNA, 415 bp, Zea mays
cggccccaatcccttctccttcgggcagctgttcttccagatcgacttcaccgtcgctgctcgtcctgcctagctgacggtccggacagcatcgcctcctgctcgcggccttgctcagctccctccacccttcggtgagacgcagatctcctgctcgcggtctcgcccagctccctccaccctccggtgagacgcagatcttggtgcgacggggcactacggaggcagggtagtgcggttgtgcgtgtgttggtggcctggctctagcaaccgagatggatagaagttgggtgcatgctagactattttctcatgaatatattaaatggtgtcaaagaatttatgagcttcatttcatgggaactctggagaggatgaagaaattcttatgtgcatgttgtagatgcccttatca

SEQ ID NO: 365168 - DNA, 482 bp, Zea mays
gttcttgcccgccaacagcacggaaaaagccggcggccaacagaaggccaagaacgaaaagaaaaccacagtatgagcggagggagccaaagcggccaccactaaaaggcaaggcccgcaaacggacaaaatgccaggaggaagagcctgcaaccacagaaagcctaagatacgatggagaatacatgaacaagacccccgggacggacaggggcagcaaaccagaagaaccggacgcacgtgagaacaccacaagcctgccatgcggacgcactgaagatgactcaaaaaacggaacccaggaacaacctcagagaaaaatggaggagatccggacaactgcaaccagaagcccgagcaacaacctaacagaagaggccaacagccccacccaaagcagcggcaccagagacaccgacagctgggccatggacgaaacagagcgccaccaaccagatgagatgctgaaaccgcacaaagac

SEQ ID NO: 365169 - DNA, 456 bp, Zea mays
  unsure (1)..(456): unsure at all n locations
aggaaggcccacactggcagangncaccctcaaatcggataatcaggtctacttctggaaatgataatgttaattctaggagtccgtttgataatattcagcagaagaaattagcagcacatggagccaatgcagcgcgaaggtctttcaaagatttcctcagtacattgacaagaaccaaagaaagtatatcgcgcgcgacacgtcttgctatggaatgtgctaaatttggcattgctggtgaggcaattgacattatcgttgaacatctggaaaaggaatcaaatttgtataagagggtggatctcttctttcttgtagattcaataacacaatgctcccgcaatcagaaaggcggagctggagatgtatatccctctctcattcaggcagttctacctcgaatactctatgctgctgcacctcctggaaactcagcttgggagaatcgaaagc

SEQ ID NO: 365170 - DNA, 434 bp, Zea mays
ggacctggcagagctggcagggggtcttgaggccaccagggtcccggtgcctctcagttccaatggaggtttcaaaaccaaggcccaccccagggtttacctccgaatccagcctttggatggcgataactcaagcgtttcttcaagagatgcattatcacaagaggcatcagttgataaagattcaaaggaatttgtctcagcaacggtgagtgaggagtatactgaagatacagagtttgcttcctttactgatgaagaagaagcaactccatacctgtaccgctcgggtgtaactgctctcacaggtagcaatagatctcatgaatccctcaagggcaaggatatcaggttaactaataatgaaggtaccagctcatcgttggattctcaacatgaagcaacagtatcctgtatgaaagtgaggaatgaag

SEQ ID NO: 365171 - DNA, 407 bp, Zea mays
  unsure (1)..(407): unsure at all n locations
tctnttttttttttttttttttttttggggcatttaaatggcacttattacattgatagttcaaaagcaaatcattcatgagcagagaaataaaataaaaaatagacacacatctggtctggtttactctcctatctgctacaattctttgtaaagtacactttcatattccaactttgcctttcttggaaccactgggtgaattgataatttcactatcattttggaacgtgggtgatggaggaaaaaaaggtgtttgtcaatgagatgttatatttactgcagacccatgcaggaaaatagattcgaggaagcaatgcagatgaacattcttgtggttaaacatacctcttttttaaagaggtcaaaggatgcttcagcttctagacatttcacattaaacacga

SEQ ID NO: 365172 - DNA, 459 bp, Zea mays
cggcccggaagaccctggccgacccacgcgcccgctttcgtgtccgcccacgcgaccgcagagacccgaggcaggagagtcataagctcctaaaagaacatcagcggcttggggctaatgatgatccacagcccgcggaagaaggggacttaatacgacctgcactcgaatccagacatcccaagagggtcatcagcgtcattacaacagatgaaaaaatcgccacgcattgcgcagacgatgaagaggccgcgcctaatgtgaaatgcctagaagctgaagcatccttcgacctctctaaaaaagaggaatgaccaaccacaagaatgtgcaactgcattgccccctcgaatctatcccccagcatggggccgcagtaaatataacatctcaatgacaaaacaccatatctccaccaacacccacggtccaaaaagatagggaaaacatcaaagcacc

SEQ ID NO: 365173 - DNA, 433 bp, Zea mays
cacgcgtccgaccacggggcgttttttacgtgtccccattttcccaccgtaccgcaccggttaccacctggcgctgagacgcgggcggtggccttcggttccggccagtgccggggtggtctacagtcgaccatgggaaggctgagagttgctgaaccggcgggagctgcggttgccgtgcgggttcgcgggtccaagcccgtcgtaccgctccgtgcgaagaaatcattcggaggtcatgaaaacttgcataacttcgttgacgaagctcttctgttgaagagaaaatcagaagaagctctgttctacttaaacgggaggtgtatttacttagtgggaatgatgggttctggaataagtactgtggggaagatcatgtctggagactcgggttatccgactttgatagagcaaacttgtggagcagctgtat

SEQ ID NO: 365174 - DNA, 390 bp, Zea mays
gttctcgcgggcggccagcccccgagcctcggggacgcgtaccaccgcgtgcgcgccaaccccgcccacatcgccaggaacaatgccaccggcgcccacgccgacggctaccactcccatctcaggcaccccggcgccctcaacggataccccgccagcatgcatgcctggctcgacctctacttcctccgcgacgagcccctcgacccctacggccgcgacgacgccgacggctacgacctcgccgtgctcgccgacgacacgctcgagctgctcctactcaccgacgccaccgccaacagcctctcctcgctgctcatcggcctcgagctcgacctcgaacacgccgcgctgcacaaggcggaggacaacgccgccgacgaggctgac

SEQ ID NO: 365175 - DNA, 372 bp, Zea mays
aaatatatcaaaaaccctaaactgcatgacacgtttgcatacttaaaaaggctggattacttttccacagaatgcaatgtctggatcttttttttgttcagttcttttcattttatcccgcattgaaggagaccacttttattccaatatcagaaaatgctaggatgtcacttgaatcaaaatataggtctcaaacatcactgtcagctctaccatttataggttatactgtgttctcttccactaagaccgtaaacttaagtgcacttctgcttaacttcattccttcaaacgcatctatttaccaaatgcataccgtggtattgctcgtgaattattaaagatttagaaagaatgaggcctagagctata

SEQ ID NO: 365176 - DNA, 324 bp, Zea mays
cacgcgttcggttcctgggctgcttttttgacccgtacgcgcggtctccgccggttgccgcgccgtccaagcagaagccgtgtggcgtgggggccggcgctccggggctcgtgttggtgcccgtcaacatcccggactggtccaagatcctgggcgccgagtacgccgggagcgggtgggcggtgcacgacgaccgtgcggacgacgacgcggtggccttcggcggtgccgggggccggcgctgggtgctcgcccacgaggtgctgcatgggcgggagcgcgcggcggcgtccttctccgtgcgcgagggcgccgggcgcacgc

SEQ ID NO: 365177 - DNA, 266 bp, Zea mays
gatgaaaagtaatttatgtcaggggttacattccaccccaacagtggagcactgccagtatggcaactattattggcctttgcatacgcgtgaaacttgtacggagtctccctcctcgttacaaggggcgaagccaactttaaatttatgctgatggctgatgcactgctaagggtacagaaaagttgtctagttagtggtggacataagggttgcccctggatcacatgcaactgaagcttgctgtgaataagcaactgaacgac

SEQ ID NO: 365178 - DNA, 330 bp, Zea mays
gacccacccacgccgaatgattaacaccccacaacccggaagcgaaaagggggggggataaaccagaggcgacggccgggaacccaggccgaggcggcccccggaagcaaggcagcacccggccccggggccccggcggcacggccggggcaccggcgccgccggccaggggggcccggccgccgcggcgcggggaagagggcgaaccacgagcgggtggtggaccactacaacaacccgcggacgacggttcccccgacaaggaggaccccaacgccggaactgggctggacggcgcgccggcctgcggagaccacaagaaggtgcaga

SEQ ID NO: 365179 - DNA, 423 bp, Zea mays
attgatagaataaatatgagctgatcgagtgatccacgatgatctatacagttgtattttgggcatccttttacacgcttgagatataaagattacacagtgaggtgggcatactgagtcgccaaataacgaaatttcacctcaacctgaagcatcaaacttgaccacggatatccctcatccgtacttgcttaaaataaaatcagatgtgtaactaaaagggaactacataaatctcctttcacccttggtcatattttcctttgacataatcttcattagcataacgcccgactgaatttgcccggagcagcacatcagctgttaaaaatcagtgttacccgctcacattttccccaacactacagctctaaaacctcaaggctcaacactaactacagaacattgggatccaacgcatac

SEQ ID NO: 365180 - DNA, 267 bp, Zea mays
cccgggagccagcgcacacgaaccggcaccgcccgcccccagaggcaggcagcaaacgaaggcagcgcggcgccgggtggcccggcaaggagagccccacgcgcggcgcgcgcccgaatcacgactacccgaccgagcgccgcccgccgcgcgaccagtccgcccacaagagctcctggcccacaccaccagcgcccacgccaggaggacggcacaagggccagccaaccagcggagaggagagcgccaaagggaccacccgcccgg

SEQ ID NO: 365181 - DNA, 311 bp, Zea mays
acccgggggacccaatgatgggcatttgggcaaaaaaaatgtgaacataaggacacaaaataatttgacctgcaaccctgggaacagataaacccacgcgcaagtttcaacagaactactactcatacttatacaggaccgaactcaggcaagggaaaggttcacattgatcccgttatcgatcagcgactgaacaaccggcctgatcttcccctcgaacttgacccggtcccttggggtgtacgtgcaggtgtacacgtggggcttctttgccctttgggccaggaaccgcccgacggccaggcaggccg

SEQ ID NO: 365182 - DNA, 196 bp, Zea mays
  unsure (1)..(196): unsure at all n locations
gtcgngtgacagcttctacagaacaagaatcgggacaggatattcttgatactgtagacagcttctactacctccgttctcgaatatttgtcgtcttctagttactaaatttttgttgtcgcaattacatgcgttaacaaagcttagtttgtgaatcaactacgcaggcaaataatacggggctctgtcttttcaa

SEQ ID NO: 365183 - DNA, 552 bp, Zea mays
  unsure (1)..(552): unsure at all n locations
tttactcatcggatcggacttgttgccattttaattacaactccatatgggcatcggtatgcgttgttgcatataggcacgatgcaagaaacgcggcagcaaaaggatgtcgagaaggaaacgaatgaaatcgctcggttgggtttcataaaaacatcatcatcccagaaagtaggaagaggcgagcaaaaaaccgtgttgggtcagagaagcaaaattacagcgacgatgtggcagcaatcatcgggaagcatggcgggcaccaacgatcttcagcgcatggagatgatcagattggcgcgcggcgcagcttctcggatgacaacaccgaggagcaaggaagctagtcagctcccagaagtttctctgctacaattgcggtcgggagagagactgcttattccggcctgggaagaagtcctgaaagaattcggtcactccttggaccccgatgaacggngacgtcttagctggctgtatggcagggttggacacattatcaagctagggcgggagggagacgactcacattgcacaaggcatctgggatgg

SEQ ID NO: 365184 - DNA, 120 bp, Zea mays
aaaaaacaaaacactgtactagggggggacttttttaacaatactatgggctcgctcacatgagctagctctgtacaattaaacgcgtgtaattgctacagccacattttgctgggaaga

SEQ ID NO: 365185 - DNA, 185 bp, Zea mays
ggaaccgagctggtgaattaaaggggggaggttaaccatagtttggaggcttgaggctgctgttacagcaaaaaagaaatcaacacattttacacacatgtacacaccataagtttcctttgtatgctccccttatctacacgctaacaatcttgtttggttcactggaactattttaggcccca

SEQ ID NO: 365186 - DNA, 405 bp, Zea mays
  unsure (1)..(405): unsure at all n locations
ggtgaaatcaaagaggaagaaagcgtttgattggggggcactaatactgatgtatgagggtgcgtaatccagagtggagttgctgcacgcctgtggactatacttaccttgatgaaagaaaaaaaaacgagacatcgcactcgcaccgcacttgaagggacttgttcccccacagcgacgcgtggcccgcaggccgcatgtacatgnctgtagaatttattgatgagtaatgcgtttatatatgttaataaagcttgaacgcaccttattaattgtctctccataatctctactctactacgcggtgttacggtgtttgcaagagaggatggtcagatggaaggcacctctgctgtgctaattaatgcaacaaagctacgttgtggtggtgggctgggcgctagg

SEQ ID NO: 365187 - DNA, 463 bp, Zea mays
tttgttttcgcgtccgcccacgcgtccgcccacgcgtccggcggaaggtggcggtggcggaggtggcgctgcgggcggtgctgtgcgggctaggcgcgctggcggcggcgctggtggcgacggacacgcagacgcgcaccttcttctccctgcagaagaaggcgacctacacggacatgaaggccatggtgctcctggtggccgccgcggccacggccgccggctacagcctgctgcaggcggcgcgctgctgctgctgcgtcgccctgctgcgcacgtccatccgcccccgcgcccgcctgctgctggcctggtgcgtcttcgcgtgcgaccaggcgctggcgtacgcgctgctggccgccgtcgccgccgcgctgcaggcctccgtcgtcgccaagcaaggcctgccccagctgcagtggatggccatctgcgccctctacggcgccttctgcaggcaggc

SEQ ID NO: 365188 - DNA, 517 bp, Zea mays
gtctcctatcaaggaggagttcgtcggcaaccccgggcgggtgaagaccagcgtggcgggcttccgcgcgctggtgcaggagctcaccggccgccacgccgacccgtacaagcacagcgttggcgacgccgacgccgacgacagcagcagcggtggcagtggcagcccggtggagctgcaggtgggcggcgcgctgtcatcggactccgcctctgctgccggcgtggcccaagtcatctcagtgccggcttacgacgacgacgacgacgacggcttcgcgccacagctgatcgacaacagctactccgtgttctcgccgcccacgttcctctacggcccgcacggcggcgagctgtgattccaacagtacatgtatgtatgtgtagttgtgtatcgcattctagctagctccaacgagcatcatgtgtatcgtatgtgcatgcgctgcaggctcggtagcacgcaagtgtaatacgtaattaggattgatttctgcacgctagctagctagcaacgc

SEQ ID NO: 365189 - DNA, 350 bp, Zea mays
  unsure (1)..(350): unsure at all n locations
tttntttttttttttttttttttttaatcggccaaggaccgtcccatttagataaggttatcattaagatagcaaatggggctagctacagaactgtcgcagttgtcagaactacgaaggcagcgttcgtttacacacttgacagccttggcacagtcatcaacctatctgcactcatcatccacacttgagggcagcgtgtcgcaaacacatcgccaattcgtcatcctcccttttatccttttgctaggtggcaatagctccttgtgcttcctcccaagccaagcttgtgttaatacaggacaggagcagaaccgatgtttaccaccacgctaatgaaagtcaacgat

SEQ ID NO: 365190 - DNA, 552 bp, Zea mays
  unsure (1)..(552): unsure at all n locations
ttgcttcgcgtccgcggacgcgtgggcggagatcggatcgaactgcctgtgcagtctccctccctccctccctccctcatgtccatatataccaaaaaatctccgccgcgccgccattagctagctctcgtcgtcttcgttcctccgcaaataatttgttactcaagccgaaggaggacgagggcgacgggattggctaatcaaatcgaccgatctagtggctggtgcccaggagaagggacgcgggcagtgcggctcgtcgtggtcagcagcttgtggcgaccggtcgccagggaatcaatcaattcaatcagaaagttgcaattttgattgagctcgattcgtcatccacaagacattagggaatcggaccaccacaaagcaagaaggcagtgcagtgcagagagagagagagaccaagaagagaaagagaaagggaaagagaagcaaagcaatggatgtaagtcttccttcctgcccacttggttgctnccttttctctctctatcaattctattctatctcaccactggtacctcctttctttctttt

SEQ ID NO: 365191 - DNA, 343 bp, Zea mays
  unsure (1)..(343): unsure at all n locations
ggaaggtccggggcaggccaccggctttgcgttcgcccaggcgcacggagcaaaagaggaacagggacagacgacggcccgaccaacaaggaagaaccccagccagcaccacccaagaagcagaggaaagaaaacccccgcgctaaacggagatgggacccccccgangccaagaaaaggggcgccaccgacccgggcgacggggcccgagcccnaaaggggngacagccaaacaacccaagggaggaaaaaacggaccccccgcccaagccatacgacacggacagcacagggcacaccgaacggaaggaggccaagcagacgccaaccgcccncccaggag

SEQ ID NO: 365192 - DNA, 103 bp, Zea mays
ggcgcacgggcacgttctggacttgtttttgcgcacatcatcacggccgtcatcggctcgggagtcctgtccctggcctgggccatcgcgcagctggggtggg

SEQ ID NO: 365193 - DNA, 492 bp, Zea mays
  unsure (1)..(492): unsure at all n locations
tttgttcctgttatggaaatccagcataaagacatcaggggtggtcagcttcttaatcttttgcacaaacggngccattgtggggttccagaactgcaaagctgcattcagaggctactttggcatggacaccaggtcatgttcaaccagctgacatcttggatggtttatgggattcttcaagatcagtacagcgagtttttcattagaaggtcaacgtgcctacagggctcctcatgctattttgttcctgtttttgatgtctcatttttgtcagctgtaatctggtagacctaattgctccaaattgagctccccaagttcacattagttgcaataatgatagattcccgcacattgcaagtatctgtagtgtttttaatacatatcatttgcagtctaatgttgttgatgagggatacgacaaaatgggttgtaaatataaaatctacaattggagtggaatctgatacctatcggatgacaagtagt

SEQ ID NO: 365194 - DNA, 583 bp, Zea mays
  unsure (1)..(583): unsure at all n locations
gatcttttcatctctgccattagcttaagcttttggggttgaactggtctcaaagtcagaggtcttgagttcgaatcttggttagctcttttgagggggcatttggcatggatctgctccaccctagacttttagagaagctatgctccagagtctaggtgttttctcataaccagtggtattgacaggtaaataccttcaaactccatgtcgaggttgctgtttaaggacttaagggcagaaaggaggtactccaaaaatttatactgcagggctcttctccatggagtttgcaactctggagttggggtgtttggctcggtctggccagctcctgagttttgttctagagcaatgccaaacactccttgaataaaataaaataatttctgctcgctcctattgcacgcctagggcttgtggggagccttcacgtgagggagtgctggaatacaatcggattgctcatgtctattcatcaacctaatcttttgtattgaaccggtcggtgcatgcaactcaatgcatataaataatcttttaaagtgttcatcanggcgaagaaagcatgtctgtagcatat

SEQ ID NO: 365195 - DNA, 315 bp, Zea mays
gaaacggcttataattggcgggtgaggattattacatatacaatcttataagaaacaaaaaggaatgacttcttccctgactttctgagattcagaacagtgcgtcgtagtaacactagagctggactaattaggctataagcaacggcaaacgggaacatcttagcagtcgtgagcaaccccgttcgcctttttggtgtcactgttgaacttggtcgtcaacaggggttccgtatccttgtaaggcatctgcagcatccacgaacatgagattcagaccggccccatgaatggctgaactcggctctaacaaac

SEQ ID NO: 365196 - DNA, 450 bp, Zea mays
tcccctttaatttacctttaccagcagaagctaactattttcatttccatacattaattcctcttcccagttctattagaacatcctccaaaatcacttggtaaatcaacgattatgccgtagccacagtagacagtggatcggggacacgcgagcatgatgaacttgctatgcaagttgaacttgagtgtttgtattctttcgggatggttctctcccgttcacctgggttcttacataccagcaaaactgtcaagacccgtcagggtccaagggggctgcggcaaggagcgtaggtcaaaggataaaaagattagttaagattatctagaaagattatcagttagtaagtttgttgagagtttttaagaacaattttaaggagataaggacttctagctagatagaggcggccagacggcctatttatgtaatcaatagatgagaaat

SEQ ID NO: 365197 - DNA, 443 bp, Zea mays
ccggggccgtgtacccgtgccacccgctcgacgcgggcgcgggggtcattgtgcccgtgtcccgctgcaggaacagctcgggcgggcaccgcgtccgggtggcctgcggggcgatggactgctggatgttggtggcgtagcgcatgagcccgcactcggacacgcacgcgccgccgcgctcgcccaggaggatgttggacggattcacgttcgcgtgcaccagcgccgggcgcgccgggaacgtgtggatgtagttcaggccctgcgccgcgccgaacaagatgctcttactcgccgtccaggccagattcctcgcgcctgctcctgcaacgagccagcagcagcagcaacagtccgtcaagaacagacactcactctcttgcagcaactgcatgcagattggataatattttcatagcgcaccgttggcttgcagaagggac

SEQ ID NO: 365198 - DNA, 396 bp, Zea mays
caacccgaccgccacggccctggggtcctgggccggccccagcccgggcaccgccacgtggttcggggtcaggtgctacaggggcagggtggcgggggtcttcctggacagcgcctcgctggccggcaccgtggcgccgctgctcgggctcggccgaatcagggtgctcgccgtcaggaacaactccctgtccggcaccctccccccgctggacaactccacggcgagcccgtggctgaggcacctgctcgtctcccacaacaagctcagcggaagcctcagcatctcgctggccgctctacgcaccctgagagcagagcacaacggcttccgtggaggcctggaagcgctgcgcgtcccgatgctcaagagctttcacgtgtcggggaacaggct

SEQ ID NO: 365199 - DNA, 332 bp, Zea mays
cgggggggaccggaaccggaaggacccgggccaggcccaccgcgttcgcgtcccacgcgggccaaaaccacgcaaccagggacagggaaaaagaaaagaagggggcgcggcaaccacccacagaagaagaaggggcccccgcaacccggccgcgccgcgcctccccccccggccgcccgcgggcaaaccgacgcagaggcgcgggcgccaccaaaccacgaccacaaccacgcggggacgagacgcacacggccagaagcaacgcacggagggggggcgccccccaacagaagggagacacccgccgagcgacaaacgaaaaaagcagccca

SEQ ID NO: 365200 - DNA, 367 bp, Zea mays
tcgctggcgcgcgcagagaaagacacaaggggaagggggaaaaaaaaggcggcgcggggccaccctcaggcgcgcgagggggcaaacccgcacagcgagcggcacaagagcaaaccgcgcgcagctaatccgctgaaacgaggaggggcagacgcagagcgggctcgaaccgggcgccggcctccagggagcgcacggcgggcatcccaagcgcgagacctcggcttctgtggaccccacaaagcgcggcagagccatggctaggcccctaggcgccccagccacgcgccctggaccagggggtgcgccgagaccatacgtcaaaacagcaaagaacgtggctggagaagtaccggaaaaaacagag

SEQ ID NO: 365201 - DNA, 350 bp, Zea mays
gggggctggcacgaactgctccgcgggggggttgattgttcggcccgggttcgtgcttcgttcagtaaagcaggcagccaagcaggaaggtaccctcctacccacgccacgaggtgctctgccttcgagtaccatatctgtgtgtaatccacggaaacaatctgtataataattctgagtgcgtttacgatttgccaaagacgaaataaaaccgaaccgtgcaaacctccttcgagctcgggcagtactgaatttgtttcttggcggcggggtgcgtcgctgtcggggaccggacgccattttttcctcagtttggccttgacctgaaccccgctggttcaagctgcgca

SEQ ID NO: 365202 - DNA, 428 bp, Zea mays
ccttccttcctcgtcgcctcacactcgacgcgccaccaaacacgcagcggcagcttgctcaccccgctggttcggccgccctccaccacttctcaagcttgctggaagcgtccgtcctgcctgcgtattggctaggctaggatctgcatacgcctttttcagtgaagaaccaagactgaaagaccgctgtcccgaccacccagcaatttgccagattctttcttgccccaaaacccccagagagaaaacagaaaagacccaatgttctgctaagctggagatgttcctagagccaggcagccatcttctcgcgtagcaaagctgctgtgaattagagtagagggccttttgagacaccaacaaccagatggcacacccagcctcgtcaggcatcctcggatgcgtcacactgctctgcatcttctcat

SEQ ID NO: 365203 - DNA, 458 bp, Zea mays
cttcgattccgcccacgcgtccgctcctatcacgggacgttcacatacacacagcacaggcacgcgcaagcaaaaattcattcatatatgcacgctcgttcgttgtcgatctcccccatcactgcacggcgcggcgcaacaagagcgagggattggagctcagctagtcgtctaatcagctagtaggtacgtgtagctaggctgcgctgcaccagctgccgtgcatgcagtgcatggcgcaggagggctctgaggcctccgtcgccagctccccgccgccccagacgccgccgtcggcctcctcctggtggcgcgacatgcagcacccggctgcctacggcgcgtggccgccgtcccccgcggcgaggtggccgcccccggtatcgatggcgccggcagcgacgacgcagcagcagcagcagcatggcggacgggcgacgacgtcctccgacggtctc

SEQ ID NO: 365204 - DNA, 417 bp, Zea mays
gccaccgggctgcccaatggctccagagctgtttcgacggcagatggtgctctgatcaggagggccgaaatgtatcagcaatacatgaagcgcattccggttcctgcttaccgtgattctgtaatcccattcacatcgtggctgggactcgccggatcgctgaagcagctgtatgagcaacccttgcattacctcaccaatgtcctcttaaaaaagtgggaccagcaaaggattgggagcgatgatgagcaccggcgtctggacgctatcatccaccctgccagagctgagaccctggtttgggccactgaagaagtccataggctgaccacctctggccagcacttggctagcctctgggcctcagatcccatgtatcatgctcacgtagatcccgtgtttgctttcgtaaagctg

SEQ ID NO: 365205 - DNA, 389 bp, Zea mays
tcgcatactccaatcatgggagtacaaatctgaaagaaatataggtttgacttttttgctttgttgtaggtggagatcaagaaggcagaaccaaagaaaccctctaaccaaccacctcgttcacttgatagtgagcctaggggccgtccatatgcagacagttatgatggatttggcagctcttacaattatggtggtagttttggtccctatagatcacctcgaagttttggcgctaggcctagcagctacagtagtgcttatggtcctggtgattatggtagtggctatgctacttatggtggagcattagtaggataccgtgaaccttccctttattctagtcgctatggtagcacttatggaggcagccttggtggtgggtatgg

SEQ ID NO: 365206 - DNA, 387 bp, Zea mays
tttgttaccccgtcaccggcgcgttatccagagaaggggtgtagttttcctatctgttggctatgcgtctgttcttcacagcgatttatgcacatgagaccaattgtgactccaaaccattagaagccttttttcttctgcctggtttattcaacgagaacatcgaatttagctttctaggtctgttgggctggccaatatcctagtgatgactgatgggatcagggctcgaaactaggtagcataacagggcatgttcattcagattatatgatcctattatgaccctcaggggttctcggtacaatatgcataccagagtatatggcgttggtaccgcaacttaaatatgggtctcacaattgaagtggtgctgttatgctgact

SEQ ID NO: 365207 - DNA, 468 bp, Zea mays
  unsure (1)..(468): unsure at all n locations
agtctctgtatgtctactccccccgaagcgctctcccctcttcctcttgtagctggtgtggaggctgagctgcatccggtctctgttggccataagagcatggatgcagaaatgaaacagccacttgagggatccatgtccctgaacatcgacagcgaaggtgaaccccacattggaaatggatcgatcgtcgtcgagaaccctgcatctgacctggtgaagtcagaatctgaccgaataaaaaccttttaccagacggtcctgtcggctatcatggtgttcgtcacggcagcgctatcaagctacaaggacatgaagcctctttactcgaccacaagccacggcaaagctcacctcagcaacctcctagtcgacgagggcctattcatattcatgaccttcttgtgtgctatggtcctaatgatgtctgagttcgtcgtgcaccagcatggcccgcggngccatgtc

SEQ ID NO: 365208 - DNA, 447 bp, Zea mays
  unsure (1)..(447): unsure at all n locations
catacttctnggccgctgccacttgacaagacgggcgggattccttcactcttcgacatgatggccaacgagcaggactaccacccccgcaccgccgccggcatccactccatccccgccccgccccagccgcaccagctcccgcccgcgcgctccatggacaggcagatgctgctccaggaccgcatcgccgacctcatcggcagctgtagccccgggaaccagttcaacgacgccgactcctccgacgtccgcctcaccctcagctccaaggacggcctctccgtcacgctctgcgttcaccgccacatactcgtcgcgcacagcaggttcttcgccgccaaactgtccgaccgctggtccaagcagcagcgaacgctgccgcacatcgtcgagatctccgactgcgacgacgtcgaggtgtacgccgagacgctgcggctcatg

SEQ ID NO: 365209 - DNA, 249 bp, Zea mays
ccggttcgattgccagcactgccgcggccgcgccgccaccgggccccgtttggctcaccagcgactccgacggcggctggccttcccgcgccgcgccgggcccggatcgctcgccctttccgactgtcctgcttaacgccgccaccagaacgtcctttcccgcgccggaggtcccgttcgcctgccacagcggtgcggcgcaggctcccccaagcgtttttcaggtgacaagaagaagaaagaggggga

SEQ ID NO: 365210 - DNA, 254 bp, Zea mays
ttacgaagttgaggaggagtaggccatgaaggaggtggccgtggaatggtgccttgacccgcatttgtggcaacgcgtgcgctggcggaatgatgcacatgacacccgggcgctaccgtgtatactgcttctcatagggtcactcggagcacgcgcatggatgatgtgccgcggacctcggcagggcgcgagcgctcccgtcgctcgtgctctgcagcgtcaccggggtgcgcgttctggccgatccggagacc

SEQ ID NO: 365211 - DNA, 225 bp, Zea mays
acggtccccgcgtgccgcccaagcaaaagagcacagcctgccatggtatctgcagacacggaattggccctcgtggtggtggcacacgatctcatcctgacccagctgagcgcgtccgagtgctcagcggcagaccgcgacgcgctgatttcgatccgcgcggctctgtaagaggaggagcggcaactgggcacgttctcgacgagggcggcgggcacacactgc

SEQ ID NO: 365212 - DNA, 163 bp, Zea mays
gagggaaacaaggggggggaaagaggaggggtcacggcgggacacgcccgggcccaacgggaaaccaccagacgaggaggaggaccaggagcgaagcgggccccaaggaccacaaagagcccgggacagggacggtgaccgagccaggggagcacaaaggcaa

SEQ ID NO: 365213 - DNA, 304 bp, Zea mays
acggtcgtcgcgtgaagcgtatacaacgggacactgtctgacatgctatcgcccaactggaaatctgccgtcgtggaggaggaacaggtactatgcgtgatccaggtgagctgaaccgagaggtacaagcaaagcctggacgcgagaaaggactctgggaccctctgtacatgcgtggaaccaacatggactactagctgtacgaacgggtggggtgaacactcttgtcatatgacataatgaaaaaaggtgtgaacagatattgtaatgtacatgatcataaaactagataaattgataattc

SEQ ID NO: 365214 - DNA, 494 bp, Zea mays
ttatttaactctcagcttgatttttttcctcgcagatgcaaaatcacgtgtggaggatgtttggaagaagatgaatggtggctttcctaataagatgcccaaacctgcaatgacgaagctcagttcaacagcaacagaaaagaaaaataagccaacaaatgtcagtaaaatttgttttgaacttagcagcattgaggttgctttgtgaaatatctactggttggatttttgacaggttaacttcaccttttggaatattcattcatatctgtagaattggatgactgttctaggcctctcaccaagtaaggcatgtaattccagtcaaggatcaaaaaatggtctaaaatggacacaacatgaaacgagagaagatgccaaaaaacttgcagcaaaggcccttgcagctgccaaaaatgccgctgctgtggcatctggacgagggaaagtggaggtaaatcctgactgtcagtatcacaaaacttttatttttt

SEQ ID NO: 365215 - DNA, 476 bp, Zea mays
tggaaaattttttgccccagtggaataattgcattctgattattaagatttaacatacatctggttccaggaggaaaggaacccatcagtggagattgaagctgatcaagtctacactcgaacagcagaatcagcaagtattgcaagtgctgaatgttgtgactgctcaagtccatctgctttatcgcaacaaagttctggtgaagagacttattctggaatctttaaaagcatcaacgtcggtattcaaggttagtacaacaaaggaaatcaatcttccttcacttaatatggtcagtattactaaatgctatttccgtatcttctaaaaaaaatgtagaactcatagagcaactgaagatgctgaagatggaagaccaaaatgacatttgtggagactattctgatacattgtcaagcgacgagttcgattatatgaacatctcaatatatcgaaccatggaagagcagttgtc

SEQ ID NO: 365216 - DNA, 480 bp, Zea mays
tggtggaacggagggagtaactgatagcatctattcttgtccaggttgcggagcgggcgttatttttgtggaataatgaccatatcgagagtctgatcaaacagaatagtagggttatacatctaagtggcttttccttgccatctgggatggcctatggtggtgcaacaacagtcaaaatcttctatcaacggcgtcgaaaaaccactgctggaaataatattgctacaattaatgatgatgatattgcggaggctcatgcttgggattgggcttggatgttgatgtgacagcggttactccgtctgaccccccctcggacgtggaaggcgctgctgatactccgtctgagaccatctcatgatttcaggggccattattattagagtacaatggaacagcgaggagggctgacgcagactcaactgttccactcaggcatgaggtggtagcctttggtgacagttccaggcagaattt

SEQ ID NO: 365217 - DNA, 213 bp, Zea mays
tgatgggcagcagccacgcaacaacccaaggggcggctttcccagcttaccagccctttccgtttgccctagtgctcgacgctgcagagggttgctctggactatgaactctacttgcaatatgtcggcgtctaagcgagcgatcgacttgcgcaatagagacgatcgaatcatcatcaatccataattggagcaatttttttttaaaaacga

SEQ ID NO: 365218 - DNA, 314 bp, Zea mays
tttgcgtctgctgagcagcatccacgcgttcacccgcggtgacgcgttgggtgcggaccagcagccaagccccgtgtccgtgctcgacgcggcggccttcctcgcggacgaggactcgccgtcggcgttgtcggcgtcgaagcgagcgatcgacttccgcagcagcagcgtcggacacccaaagccggcgtccgcggtgtccgacccagagcatgacgagtacgtggacccggaggcgagcggctgcccggacccggactacgcgtacgtggccgagctggtccggcacctcggcggcgctcgtgcccgtgccc

SEQ ID NO: 365219 - DNA, 445 bp, Zea mays
tttgaattttgaagaactttgcaaattgtgatatgcttgtttagttgttgtgaaattctaacgtctatctatgatccaaccatccagatccaaacaagtctggtatcaactagcctcttggattttgtaggaaataatgagtggccttaaatatgaactggtctgaggcccaagcaaaaatcctgcattcagctgctatctcactatggctgttttcttctaaagtccttcgacatgtaagtatttgcttgttaatggtccctgcaactgctgccccccttttgattaatgcaacttatgtgattaagattgtctgcttcttgcgcataaaattgaatcatcctttgacttaactgcctctgaaatttgggatagcatgagcacgagagtgaaaaaaaaatggctctatgtctggtttgtgaatcatatcaccgatacaatcact

SEQ ID NO: 365220 - DNA, 317 bp, Zea mays
ttcgcgcctggccacgcgcgcgccgacgcgggggcacaaggaacgaggacaggcaggagccgccgaacaccacgaacaccgggagcgagcacagcgggcacccaggaaagggagcagacggcgaggaggccgagcggaagggcgagacgccggccaggagaaagggccgaggacacgaggaggaggacaaggcgcagaaagagcacacacagaagcgcggacggaacgaccgcgggcgagacagcgagcccaaggacgcacagcagaaacgcgggcgcaggagacaagggcgacgggggagcgaccaccaaccgccc

SEQ ID NO: 365221 - DNA, 254 bp, Zea mays
ttaagcaattgcgaaagcgagcgcgaggcgagtcggccggtgaagggggcggatggcgcgcgggctgcgcggcgtccgcgacgacctatccgagctggggcgccacctgctcgacatcgcctgcttgctgcacccggtcctcaacccggcccacaccgacttcgggaaacccacgcccacgggccgccgaacgccgtgccagtacacgtccctgtacccagccgggccaacaacaaagaagctcctagcgggca

SEQ ID NO: 365222 - DNA, 534 bp, Zea mays
ttcccacgcgtccggaattttcccgtgttccaaacagatctttaaggacacgttccactgcacttgtatgctcctcaatacacgtgttgagtggattggagtataattttccatcccacttcatcctagcccacatggattgaggtggatacaagtgtaaattcacatggattacgagtgtatccaaaaatgcctaacttggcgattcagattggatcacatggatgagaacatgagattgagtttgtgcacatgtgcaccatatgtaccccctctagttcaaaatagttacagttaaagtcaaatttactctgtattaatgcagttttttttgtacatctcaaattgtggaatctaaagaacaagttagcagactagatttttgtatatatctgataggttacattttctcacattatagctttattgtttgtcataattctgtgcatcattatttcacaaataatgtcttctttgccattgtaggttgctgcatagaagcaaacccttaagaatgtcacaaactacattact

SEQ ID NO: 365223 - DNA, 285 bp, Zea mays
  unsure (1)..(285): unsure at all n locations
accggacgggccaaatcatgcccccgggcattatttaaagcagcgaggcggccagccccggncatatcaacaagaaaaagagcgggatatgatgggccattaaggaaaacaagttttggacaaaattacagccacctcgctatcagtacactaattaccaggcggagtcaagacggcagctttgcaaacagcaacagcacagcaggtgtacgagcaacagctacacttgattgctgcttctctcatcatctctagcagatctgcactgggcccttcttttcaaga

SEQ ID NO: 365224 - DNA, 397 bp, Zea mays
gctgctgtacggcgagaatgactcctactgggtctcctacctcgcatgctgggggccttcttagacctcctcggcgccgaataaccatgtcaaggttgctgttgttgctgacccacagcttatggatagcaccttcccttggtcttccatcaagctcagttgctctccaagctgctgagttttacacggatttgaacatgagaaggtccttccagtccaccatactgccattcaaacctgatgtggtcttatttcttggtgatcactttgatggaggcccttacatgcccgatgaagagtggcaggaatcattgtttcgatttaaacatatattcggcctgaatgatcaaagaacaaagcaacagatccctatttactaccttccaggaaatcatga

SEQ ID NO: 365225 - DNA, 181 bp, Zea mays
tctcacgcttctcgcggacgcgtgggcaccaacggggggcagtagaccgcctcgctggcgaggcaccgacagcaaccggctaccccagtacggctatacttgatggcagacagggcgcagatataggccatctaaacctttattctgatgcatgtgcagtcggtggtaggtggtccagcga

SEQ ID NO: 365226 - DNA, 235 bp, Zea mays
tctcacgcgttcgtccacgcttccgctcgacctgtggggctcagatgggaccggaagcttggatcagtctcatcggcttcgcggctggcgatccgaggggctctgacgccgtctgggcacttgtcgtgctctgctatgttgacgtccttaccagcgacgttttctcccacgagaacttccaagacggctggcaatgtctgggggtcacgtccgagtggaagaaggatcagatcat

SEQ ID NO: 365227 - DNA, 208 bp, Zea mays
gggggaaaaatctaatgcttgggccaaaatttttggggccagtcaagtttcccaaagccaccttcccagctgtgttttgttccggagcccccgattgatggaccgggtgtttaaaaaaaaactccccaaaaattcctttacagtttccccgattaaacccatgcggaaacatggttccccttggctggaagagaaggaaccttttcca

SEQ ID NO: 365228 - DNA, 374 bp, Zea mays
  unsure (1)..(374): unsure at all n locations
tctcacgcttccgggcatgccagctgttggctgccaagggaggctgtagcgaggacgaaagatccttgtatgacctgaaaatggtggtcggcaatgcgggttatcttacaagcgcaagcngggcgcctgactcatcatgcctgtcctggacggaagacaatggacctggtgcttcgaagctcctgactcaaacataagatgctagcctgtcactgcacgagtgcgccgatgtcgacaagaaccatacgaactcatctaatgttgctcgatcggatagacagatcgagtatgctaagctatctctatctacacgtcaaaatagaggggacataccctggggtcacgcaaagacgggggccagtatgtaacactac

SEQ ID NO: 365229 - DNA, 150 bp, Zea mays
tctcacgctttcggcaagagtccggaccccggaggagccaagccagggcgttcacctcctggtgcctgctgcaccagtcaaccgccggactgggggcgtggcctctcctggccgtcagccctccgcgcagcgcccaggtgctcgtctgca

SEQ ID NO: 365230 - DNA, 385 bp, Zea mays
tttaatatttggtggataaggtgctgcttacaataaaaaaaatcccaacatattactctaacaagcaaaatggtacattagtagcctttttcctgacggttccttttctaccgcttgaatttttcaggtgactggaatttctggcacaaatgctctatttattctaggtacaagagcacaatggttgttgtagcatatgaaccctgccgaggttattcatactaaacgtgaataacagaattcttgctttgtttgtggcctgtgatctgcatgagggtgtagcactgctaatctcctctatccaggctctgctagaactggtggtagcagtttgtacgggctaaccaagaagatgtggctgaggataacgctatgctttctccta

SEQ ID NO: 365231 - DNA, 401 bp, Zea mays
  unsure (1)..(401): unsure at all n locations
gacaggtcgatcccgttctccagcacgcccgtgatgatctgcatcgacggccgcttcgacgggtccgggtcgatgcaccggctcaccacgctgcacagcaccgccaggtcctcgctccgcacgcttgccagcttncgggtccaccagcttcccgatctcctctgcctgctggaggtacttgctcgcctgcatgcacaaagaagcttcagcgacagacattttatagctgcttcaggtccaagatgacgatcggctcacccagtcgaccaaatagcctttatccttgcagtatggaagccgcccgctgatgatctccagtaaaatcactccgaagcgaagggtgttggcctggatatcatcggcttgtctatccgctgcagaatccccgtggccgggaaaag

SEQ ID NO: 365232 - DNA, 206 bp, Zea mays
aagttggaacgcctgcacgcaccgatgctccagttcccgaattgacccgacgcaccctttccgctttcgcggactctaagcctaacacctgacacagatcatctgctagatgccttactagtgcacatggtactgtaacagagatctattgcatgcaacctgttgcatggcaagtctaggttgacatgacctgcaatgatagacga

SEQ ID NO: 365233 - DNA, 446 bp, Zea mays
tttccgtcttcgactgctccccgttacacatggtcattgtcccttggctcgcgttcggccacttgatccccggcctggagttcgccgagcgcctcgcagagcacggccagcgcgtgtctttcgtctccacccagggcatcctccgcaggctccgcccggtcgcgcccgcgttggcctagctcatcgacttgtaggccctaccgttgccgcgcattgacagactgcccgatggcgccaaggccactagcgacctacctgccggcactgccgagcttcacgtgcatgccatggacctgctttccccagacttctccgactttctcggtgccgactgctccgacaggagcgaccgcaaggtggactgggtgctcctcgacaactgtcacgcgttcatgtgggacgtcgacagcgagcacatggttccctgcatactgtacatgccctac

SEQ ID NO: 365234 - DNA, 476 bp, Zea mays
ttccgtgtttgtgccgtgctccttgtctaccgggatcgcgggaggcccaagggacgatggatcgtgccgttacccgtcacggggttccggcgagcagtgcccgaccgagccgttgacctttctgctgcatctcaataccgtcgttggcccgaggagattggcggacggtctcactcgctgcatgccgtactagatcgatcctgcattcctgcgtggcgcctgctggcattgccgcatgatctgccgctagttttcccctgtcacttgatcgaatatacatattgatttgtttttgcaaaaccggtccgtgttccaaacaataggtatatcaccttaggtgaaggtgtcacattgatccacaatgcaacatagcaattttgaagataggtaacacgagaggaaactaagtgcgtaggccgtgtccagctttgtgtgccatgctcagatgctataaacaccatctggacgaagattca

SEQ ID NO: 365235 - DNA, 397 bp, Zea mays
  unsure (1)..(397): unsure at all n locations
ttaaagctttgtctgctcaacctggacgcctgggcctcggcgatccaccggcacggtaccgaaacacctcggctcgatttcgaaccaaaccctccagtgtgcagccccgtctggttcgccgcggcaggagcgaccgagcgagcagccatggcgccggtcgatccccactcctacaccgacggcgcgcacccggtgatctcgcgcgcggcgctcgccttctacctcgacttcggcgnctacaccatacacgcctacgcggtgctcaccctgtgcgagccgcactccggcgacctactgctcgacacccgcgctctcgccgtccactgcgcctncaccgacgccgacccgtcggagcccatccccttgtcccttagcggggtgcccgacccggtcctcg

SEQ ID NO: 365236 - DNA, 396 bp, Zea mays
gttctgaccagagagttattattaatcatgcatgatcggttgcacattggatatgcatgtgtacatttcttgaacaaaaaaaaagaataataatcatgaatcgcccagtgtacgtacagactcatcacaggctaaaatcgtggcacaaagaaacgaaagagaaaagaaagaataacgcggccaaataaaataaaaaagaatgaaaatcagcaatggtctcatatgcgggttgatcgatgtgtgacggcacgctggccccccccccccagctctcccctctcccctgaaatgagtactagtcctgacagcggcgctccacccaccaaatcgcccggaatcatcatcgcctccggcgttcccttccaacgcactccacactttccacgcaaaaagcca

SEQ ID NO: 365237 - DNA, 514 bp, Zea mays
  unsure (1)..(514): unsure at all n locations
ttttgcattaaattattccccagcttatttatttgagaagattgagagcattgtcagaaaaatggggttccaggtacataagagcaacggcaaggtaagtgatctcctatcatgtattcatgtcatggacttccagctctgtgtgttcggaatcagggatgctgaggatcatattatcatgtcctgcagctaaaagtgatccaagactgcaagggactagcaaactcaagagggcaagagtcattattaatttctgctgaggtgtttgagatcaatgaatctctttatgttgtcgaactaaagaagtcatctggagactgctccctgtacagaaaggtatcgcctattcccttgataattctgtatttgaatggcttaaataagaaaaaaagaacagactcagtgctggggctcccacatgagtggggtctggaaaaaaataaccgaggcaagccttatccctgcatttnttgctgaaggttgcatcgaacccagaacctttgggctagtggaa

SEQ ID NO: 365238 - DNA, 449 bp, Zea mays
ggaacaaagaaagttataatgtattagaactgctaaattagatgctaataatgaagataaaatgttgacatcaagtcttcaatcattatatcaagtctatgatgtcttccgaggaattttaaaccattccgagtctagcaccaagctcctcaaacttgaccctcccaagtgacttagagagcagttggttctaagtgttgaggtagttgttgaagcagctcgtagtgaagtaacatttgacctagacctgttctcatggaatatgtggttcttcccaagaccaagacatacttattatccaccccgagctttactgctccaacatttctgtcaaagagaccaattagagagacttgccaatggttagattttttttgatgggtatgtatatcgaataatacaatccgatgggtattatatctgttgccatctctagtagcatctgcatc

SEQ ID NO: 365239 - DNA, 469 bp, Zea mays
tttggaggttagttgcagttgcagcgacgactccaactccaacgaggggatccacgcctggactgttctgttccaacgaggggatccaactccaactcagcggcaggcagctagctgtcctgttcgaaattcaaaacccggccagatccgtgcttgcgctgctcgccggggctgctttgtccactcaggccatcgatctccagttccatgtatgctccaattttgttcttgttttttttaaaacaaactcagttccagtacctgagcatgagtcacagcttggtttaggcgtgtggtggcgtttgctgggcagatcagttattactcctccactccacaccactgcaccggccggcaccgctggtaacgcacgcaggtaggcggccaaggccatgccaatgtcatgcagcgggattgatccatgcgtcgtccattggcgccctgcccctcgctagctgcggctgtgctg

SEQ ID NO: 365240 - DNA, 205 bp, Zea mays
agaggacccccatccttttttttctatcaggttttatataacattcaaggcccgcggggtttgccattcccggacttaacaaaggctttctttttccatcccaattttacaacacccccccaatacttttttttttggggcacatagaaaatgacaatgtcgcccggttaaaaagggggtaagggcacagggtcacggcctaaac

SEQ ID NO: 365241 - DNA, 267 bp, Zea mays
agcaacaacaaacaatgttacttacaaacaagcaggttcacgaatggcatgtaatacttttcaccagccaattatcacccggggcgaatttttgttctcagcaccgatgccatttggcaattgttatcatgtacatgcatctatattcattagaccaaagtttgtatttatacttacaaccatccagattggacaatatatacaccaaatgataaggatcaagcaccatgatcttaacatatgccattggaatatatatgaatctac

SEQ ID NO: 365242 - DNA, 481 bp, Zea mays
ttctagcgctcgcctccttcaccctgctgctggccgcctggccggcgagctcctcagcgtggtgagtcccctttcccctctgctctcctcttcctccatcatgctgattgctgaccggcgagctactcagagccaggtgctttccctctgctctcttctgcgcggtgcccagagttcctttcccctctgctttccctctaatcccatatgctctcttccgcgcggtgagcccggcgcggcgagatcttccccgtcgtcgccgcgggctgctgcttcggcacagatttaataaaaaaatataattctggatcaccgcgcgggagctccggtggcgccatgatgcgcgtggcctctctcgcgtcgttggacgcccgccgatttcagcctctctctctctctctcctgtatagaaggagggtacatttcttttttgttacacgatcataggattcccagcgcagtgcactaagtttgagctatc

SEQ ID NO: 365243 - DNA, 292 bp, Zea mays
  unsure (1)..(292): unsure at all n locations
gaactgatctttgagaaaaatgtgatagtttttgttagcaacttttatgtatattgatagtcacttgtgttccaaaagaagctgcttccttcagctgagtattccatgtggaagatgaggtccatagatgacgtcttcagaatgtgggagatgaggtccataaacaacgttcccattcataagtgtcatttggttcacctgcggtgttgcttgataagcatttggagcattaacttgattgggnggcgttaacatgtgggatgaatatttgcattggtatccttctggttag

SEQ ID NO: 365244 - DNA, 403 bp, Zea mays
tccatccttaatttttactccacaccagtgaaacacgacccgctggccgctggccgctgccacgctcccacgcccgagcccgagcccgggaccacgaggcagccagaagacgcgcgcgcccctctcgggtctcggccgcgccgtcgcgctcaccaggtctccaccatcaccagagtggcggcgctctctcctatcgcggcgagcgacggcggcgatgggaggaggggagatggcggggtgggctgaaggcactggcgtacagcgccgggggcgtagcggtggccggcctagcggcgttggttgcgctgcaggagcgcctcgtctacgtgcccgtgctcccgggtctggcgcgctcgtaccccatcacgcccgcccgcctcgggctcatctacgaggatgtctg

SEQ ID NO: 365245 - DNA, 153 bp, Zea mays
cgtggccgccggcttcgtggccttcaggcttcacaccgtggcgtgtggacgtcgagttcgtggtatttccgatcataccgtatcgtatcgcacgtacgttctgtgggctaaaataacgtgtagcctgcgccttcctacggtgtctgtcgtgtc

SEQ ID NO: 365246 - DNA, 286 bp, Zea mays
ttttctgggctatggccgtcgctcgatgaacgcaactgccagcttgctagtcgccgggacggatccctatgtacatgctatgtacccatgttctgtaacgtgaaaagttgtcatgttggcgcgcatgtaatctatagtcccaagtgatccttagagggtagatcgtgtgacatgcacagtgacgggggaactacacctcctttcgcctgtaaaggcatttgacgctaactacctgcagggttctggttcagccggtacctgagacctatcaacgagtcgggcggcc

SEQ ID NO: 365247 - DNA, 221 bp, Zea mays
tttctttttttttttgttttttttttcacataaaacatctcacacacaatcaggtgacaatatttaaatcaataagctgatgaattacatcacaaaagtctcatccatagtcataataaattagccaagttcccgggttgtctatagatcaattggtatccatagggccaactaagctaagcagcaaaacaatttcactggcctatcacccttacaaacta

SEQ ID NO: 365248 - DNA, 126 bp, Zea mays
cgtccttttccattgtctaccgaacgagcacggtcgatcccgtccggcgattgcgtcgcaaccggtcctctctctccccatccgttcgatcacttgtgtgctgtgaaaatgtgccgatcaactaca

SEQ ID NO: 365249 - DNA, 437 bp, Zea mays
tttagaacttgaatggaatatcaagtggactgagatactgagcacttttccttctagccttatgtccaaagaaacccagaaaatagctaggctctacaagacagtgataattcgcaggaaacgcatcagaggaacaaacgttgaatatctgcttgactctggaaagagggagaacattcctgctgttatttctaaacatggaacacaacttgaggaatcctctagcgagaggaacaggtactggtcgagtagaagttcatgtccctgtgaatgctgcgaaggcttatgaagccaaaacatttgctcgcttactgaaaaagaaagaaactgacgaactatgtaataagactaagagattgtgtggctcaaaaccagaaatgccaagaaagacaggctatgattacctcttttgaaaagcagaaaacagatccaccatg

SEQ ID NO: 365250 - DNA, 371 bp, Zea mays
ttttcagccctatgctctaccgtcgaaggtcatatactccagcgaacttctcgcgtggccagatctaccgtgacacgctatgcacccatctcaaacaacgaaattagatctcgacctggggaagagggagggtgcatacctaagagatggtgagagcgaggcccggttcccatccacgctggcgggggcgctgcccctcctctcgccgtaaagaagagaggtggctaccttcctacagggctctggttccgccgctaccatggacgaatcgacgagtctgtcctcaaagtctcccgttgcagagcaaaacccggagtccaagaccaaaaatgatgtgaccaagaatgacgtaatctaaacactgtatatga

SEQ ID NO: 365251 - DNA, 190 bp, Zea mays
atcctaaacgggtcaggataagtgtcttatctggttggtttaataactcggacaaataaaactcaagacctactattaaaaatgtatactatggacgactaacagaataatgttaaaaatatatactatgggtattcagatcaagcttttcattatagatgggtccatgggcttaatggagaacccaagg

SEQ ID NO: 365252 - DNA, 265 bp, Zea mays
aaaaaaaacccctcccttaaaaatatttgggggtgggttggcttctaacttatttaaaaacccaggggagggtaaacaaaccggggggaaatgttttttttcatcaaaaaattgcccggaagaaaaaggcccctgtttaagcctaaataaccgagaaatttttggggcccttggccccaaccggaagcaagcccttttgtttaaaaagggggtcaggggaaggctcccccccttggaatgaaaccaacccctcaaggggggactt

SEQ ID NO: 365253 - DNA, 347 bp, Zea mays
ccagaaagaggaaggtttataccgaataaatggtgtgaaatcacttggctaccgatagcagatgtcagcgagatgatgtggctggagaagagaagaaccactaaaaatatagttggtgccagagggtttacaaatatctgattcattagctctacaacatcttggaaggtaatgagaagagtattagtagattccgctgctgcagagttcattagaacatagttcaccataaagattccagtaaaaatgaacaatattgaaaaaaggtggtcgtgaaataaggctccaagaccaactgcagatgactttttctgaccctggacaactgatgaatgaatgtagaagtt

SEQ ID NO: 365254 - DNA, 281 bp, Zea mays
aaaaagcaaagggggtttttcccccctggggttggaaagccccctaaaaccccaaagtccccccgcccaaacaaaaacaatttggggttctcaaccggggaatgggctagcaaacaaacccataagggtccccctctttccctaagccggggggaggcttttgccccggataagaacccaaagcccgccggggtgggggcaaacccaaaacttcccccgtggggggggcctggacctggaccccctgggggggccccatagggggcccccccggggggggg

SEQ ID NO: 365255 - DNA, 451 bp, Zea mays
cgataacagcgtctcgttccatgcagttcgctacaagtgtttattactgcaccattacaaacatctgagatctaagtgactggggaaagcggaaagataacacaactgccatccagtatatctccatttgtatctacagctcaccacctaaaattggcatctactccgtatattttactaccacgtggtgggaggtttctgaagagataaatgagccgctacaaacttgtgacaggaatggactacttggcagttgaatgtcgatgagatggtaggagcttggccccttgttttccgggaccaaatgcatgttcgacggatgagtagcaaaggaaaagcctgcagatggctactgaactatgccatcaagcttctgtctgtactgagccaaattctgcaccaaaaaaaaagttggggatataaactttcaagacatttaataagtttgcac

SEQ ID NO: 365256 - DNA, 310 bp, Zea mays
acgggcgggggcttaaacattctccaattttagggtacagggtacagacaaggctgccaggccccctattcggtttttgacaccacaggctgatccagtaaaagtaattttttagggccattcacattccgatcagaacctatcccttatggggctttacagttcaaatggcaacttctacaaaaaaaaaaatgccccccttttgggtcaggcagaaaaagcaaaagcattgatgcatgaccaccacccttccgggtcaggcggaaaaagcaaaagcgttgatgtatgatacaagttttgcaatttcggt

SEQ ID NO: 365257 - DNA, 484 bp, Zea mays
cgtcaccaggtatcacatctgagcatgtatttcatacaaaacagctctttaatctttatgacgcatgacagtgtttggttcctatatacacaaggcagagactgcacgagcagctgcagcgtaaagccacgcgacgctcatccaattagccaatcaggcgctccatgtacaaacacgggtgcacctgagtgtgcctctgaaatagtcaaccatgtgtacaagactctctgcttggatgtccagaccagaccttttctcgaaaaggagcttggatcttcagcatgctacgtcgctacgatcacaaaataaggtcgctatatatatgcacaaggcattctgctagagaaatcatgccagactgaaccgatcttcattttgttgggaggaggtcggtaaatgaaaatcatgaaacggtggacctgcaatacaaactttggcattttctatataagataatattatgaactaccaatagatacaaaac

SEQ ID NO: 365258 - DNA, 249 bp, Zea mays
caaaaaaaagggggatttcctgggtatcaataacttttacttaagttgccacaggtgttgtgatgccaggaggcctctttttctgcagacaggtttgccttttgaacctgcccagaaatttcagaagataaattttttgactttggatctagggggggttcatgcaaatttttagcttcatgagaagccctccccatgattattggggatccagaattcaactctttttaagacattttattttttttc

SEQ ID NO: 365259 - DNA, 384 bp, Zea mays
aaggcaggcgggggggtgaatttaattataaaccacacggaagaatcattgttaaactgtttgacaacaaattgaatgtccaactaaaaattcacaattcagtccaataaataacagttcatggggtaaaaaaaacagaagaagacacatcatttgggttggctttttttttcttttcaggttgggaaagagattgattcagataagggtacagattgataggttacttctatacagttgaggcttacctcgtccaaaatctgcccatcttgttctactgataagcatcttccatccaacacaacccaaatgttgtgattatttcgaatgggaatccttttttcagatagctggagtccacagaaaattgctcaggctgtcatc

SEQ ID NO: 365260 - DNA, 363 bp, Zea mays
ataaaaaaacaggtttattggtcccgacatcccgtccaccttttacgctaacagaaccaagaggatgcgacagggttaaatccaataatcgacgtcggaacgtcacggtctgagccgagaaccagcccgttttcttacaaactttatcaaagaaaaacgaaaaaaatccatttgacctttattaagcacccaaatcttctacatgtacaagcagagggccttatacctgtgctatgatacatcttactaccagggcaagatcaggaaggaactttacaaagaagcaaacgaagtcgggattctaggagaaaggctaccggagcccaagagcaaaatatttctgacggtttcctcgctaagcca

SEQ ID NO: 365261 - DNA, 99 bp, Zea mays
gggagaaatgggcagccgagaggtaccttcagtgacaacgtttacagactagagggcggggcccatggcaatgtcaacactcagcacatgagacatgcc

SEQ ID NO: 365262 - DNA, 352 bp, Zea mays
ggttaaggcgcctcaaacagggttcatacagggacattaatttaacttcccggggggggggaaaagggaagctttcagattcgatgggaaagcaaatgggctgggcttttgaaagggataaggggtattgcccagttgtttattcaaatgaaacgagcttcgggcgggattgtactacacttattttattccaggggagggttgacttcatgggggcctttgccgccccacttttgcacacggcctgaagcttgggcgggctttggtttccaatttggcctccaaaccacacctaacaagatgagcgtttgaagggggataccacaaaggatggcggaccaaatccccccaa

SEQ ID NO: 365263 - DNA, 367 bp, Zea mays
atccaaacgcaaagggtaattatagaggggggtttttaaaatgtaataaggcatgagctatccaaaatctgattcaaagcttaaaatacatgaccctacaaaaaaaaaactcgacctgattcatcaaatggagatacggaccaacctgatgctgacttagcacaagcatgccaaataactcatgatccaacctggacgatctgaacccgacgtttgggcaaatctacttcggggagcttgtttacctattcccaaaaattgagtgacctttggcagcttgtacgtgtttcaattcagacaagggagatgtgtactggctcaaactaaatatagggggtgtttgaaagcaaagaatcttatttcaatg

SEQ ID NO: 365264 - DNA, 134 bp, Zea mays
agattcaatgtcggttgtttattttaaaataataaatgcaataaaaatacaggttgctggctttgttccaaattacatgtgaggacaaaaacttttcatttcctcaaggtagtacaaaaagacggacgcgtggg

SEQ ID NO: 365265 - DNA, 387 bp, Zea mays
gcggcgctacgcgcgtcggtttatactcccttcttccaattaagcagtaggttggtgtggatcggctgttcttctccggctgagcttgagcattcctctgaatttgttcttctccggctgttcttccaatgagccttgagacctgatgcctcatatcattgcacgcaccaataatcatctcttcagaaaaaagatgaatcattgttttatttgttttattatatattcacccagttcttgatcgatccgatccatctttgctgccaacagcctgcatgcgtggtttgtgctcaagagcaccctttttttcgcctttccgacagaaataatcaaaccacccgaatccagatcagcaaggtcgaaattccaaccactggaatgaaaccc

SEQ ID NO: 365266 - DNA, 353 bp, Zea mays
acttgattcaaggactgccagtggccaaggggcactgccaccttctttgggttttacgattattattacttgggacatggctagaatacaatggttcagcttaatccatgaaatgtacggggatggattgttctcagctattgatcgattaatcctgcagcacgtcctttgctgactattgtgtttcaatggacaaggatggtggagatccagtgagcatgaaagtcattattatttttagccttggcactatatgtttgctagcagtggttacatgattcttctttcagaatagacagcaaaatcagagcctttactgttgtttatattcttcaggtaaccaaaccttgctt

SEQ ID NO: 365267 - DNA, 217 bp, Zea mays
ggggtggttactgagtttgaagagaatccaaaacatcgggtaatttttgcagcgagttaagggaacatccacccaactgctgtgcacccagaaatggcattagactcgacatggcaaagtttctctttggacatggataaagaatccccactacaggcgatttttgggctcttcttggccgcatactcaatacacactgaacgcctgccaaagaata

SEQ ID NO: 365268 - DNA, 144 bp, Zea mays
ccctttcttccgcgctgatcgacggatgcaaaccatacgacctcgtcgtccggcgtccgctctgccttgcgccgcggtccgttcccccttgtccgaatccgcctcggcgtgtacgccctccctctaccctcccctccccataat

SEQ ID NO: 365269 - DNA, 393 bp, Zea mays
tgcatccaacatacagcctgcgtggctgctttcttgcctgccttgctctatgctctaccgccgttacaaaagagcacaccgtctgcgacctactgctgacctgctagtcagagttaacgcacacaacgacgagacgaccacagcaggcagatggtatctctcttgacctagacagacgtgcacgaccatcaggggccggggcctatgaatctgagtgttagatgacccacccgatgggcgtctgagactgacctgtctgattggccgggctctgcccgtcaaacgcattgctgcgaaggcccggacgcccctcacacgggctgcgtcacgcccacggtcgtgagcttccttctgccgcgcctgggcctgggcggggggctactggacatcgac

SEQ ID NO: 365270 - DNA, 276 bp, Zea mays
caaagacggactcatcgcgccactgccactgagcaatctaacacagcgctagattgagctacagattcttcaagaagcgtgaagctgcacgcatcgcgcagatgcagcaatgaatagactgcatgtactggctatgtgaatcgcgagaactgtggctatttactaccaagttggccatagatagactgttctgggtcctttggatccggcagataccttatacacatgtttaaagagaacctgtaacaaaaaaaaaacgcccccaacaaaaataag

SEQ ID NO: 365271 - DNA, 343 bp, Zea mays
cccatgcgtccggcggcgtttgcggcaggaagaggcttgtggcaccttggccccacccaacagataccaaggaggtgcaggcgcgatgtggtaaggagctggcgatgccggtcttgcctgccggtaactgagagatgctagcgtgggacaggtgagactgacccccatgtctcgcccgccagcccttattaccggcttatgcgagcggatgagcgcggcacactcacggggtgtgggctgctgacacggctggcccacctgtcaaagcaagatggctgagctgggtagaaagccgggtcaaaaatggtagacttgggccaagattacgacagttgccgtattt

SEQ ID NO: 365272 - DNA, 525 bp, Zea mays
cttgtttaaacggtgttggggtcaacgctaataagtcatcaaaatggtgaagtcttcatagattccagtctcatttacctggctagattcatttcaatctttcctactgtcaatgaattgtgcttttcctgtttggagcgtatatatggtcaaagcagatccacagaagataatctgtattatatgctataggttgcgccttcgtaatctgaaactctgagtaaatacactacctgaaatgcaaaaaacctcagttctggccatgttacaggtactgagtactaactgctgatattttgactgaccagtaccttttaacatgaaaggacccatttgtggcttgtaaagtagaatcggaagcagggcgaaggtaggtagtaattagggggtgcacacgcacccatattttttttgcaaaactagtaatttagactaacatttcaccatatatgcaccacctattagttattaccatgcacttctaggcccttagtcatgtgcacccccctctgctttactctagct

SEQ ID NO: 365273 - DNA, 483 bp, Zea mays
gtcttccaagaagtttaagcctgccccgaggcctggcgcagggaacgaccccaccaaagccggcgtcaagcgcgggccatcggaccgccagggggagctggccatcaagaagaaagccaagctcgataagatcaaggtactgtccagtgagaagaaggccgccggtctggagcagaaagacacggcggcggcggcggcgcagcagcaggcacgggctgcaggcgccaaggacaaggccgagatgggcgcagccaagaagaaggagccggcgtcggctcgcacagtcaggaccccgtcgccgacagcgctgatgatgaagttcccgctgaacagcacgctgccgtcggtggcgtcgctcaaggcgcggttcgcgcgcttcggcccgctggacgtggacggcatccgcgtgtactggaagtcccacatgtgccgggtcgtgtacaggttcaagttcgacgcggaggccgcgctcaggtacgccaa

SEQ ID NO: 365274 - DNA, 520 bp, Zea mays
  unsure (1)..(520): unsure at all n locations
gtttttgcttgtttttcgtcgacaagcaaatcttcctttgagctagaatttgcaggaacaaacgatgatacatatcaaaagctcaaagaagaaaatgagaggctaaaaatgagcttgactcaactaaaagggaaatgcattgctcaaccttctcaagataaccgtgatcacatggtgaagaagcttgagacgggaacaaccgaggcatgcactaaatcccttgaagaaaatgtcaaggacttgaggattgccaagaggaggaatcaaaagaagaaaatcaatacctcttctaaaagcctcaaccatgcctccataaaaggtaacatccaagttccttgcttgctatcaggccctcatcaagtaaagatggttatacggttaaccagaaggttgacccagaaacgccacatataaaggaggccaccatgtcagatgtatcaccaactaaagtaaccaaacacaacaatggngatctgctatatatgaaggctgcatatggcgaggcgatgtctagtcagca

SEQ ID NO: 365275 - DNA, 574 bp, Zea mays
cggttcgtgggtgtttgccgaaccaagcactgcaactgtgcattaccttcaaggcaccgtctttggttgcatgcagcagtttaactacaagaagctcaacgcagttctccatcgccttctgctggacgggaagggcaaggcaaagggtcgttatcatggggaaacggtatccaatggtggcgcgtgtaaacagacgagtagtcactgctaacgactctcagaaaaaaaaaagcttacgtgcttttcaaggatttcagccagcagagaaagtgcaagctctcttgtggccatatctgggtcatcaagcatctcgagaagggaagaagacatctggtgtaaattctgaaaacgagtgcaagatgaggtggtgtctagctttgtaaaatctgttgccaagatttgtaaaaacaagctcataggacacttatagcatgtaactgttgcagaaagagaacacactaaatagtactgtagttatcaaacaaaacaccatcaggttagtcaaaatttttagagatctgatgtatgtgccgaagtgctattttagagagagagtaagatgagtgggaaatga

SEQ ID NO: 365276 - DNA, 223 bp, Zea mays
ctgttttagatcaggtctttggtaaatgggactttgaaaactgttcgtggggcttttgcgttgagcagcactttcatttcgccactccctttatgtaattatgacaaacgaatgtgaacgcttatggtactacttttatttcagtatggtcagttccctattaaaaaaacctaatcccatcataaaaccaacaaaagagggacatttatacacattgtccatg

SEQ ID NO: 365277 - DNA, 402 bp, Zea mays
tgttcgcccatgcgtccgcccacgcgtccaaatggaagagcgttagcagatgtatccctgattcgcctacagaatcccctcttgactggaatgcttgcattgattgcgctatatgtcgcctttagctgggttgaagataggacgcgctagacgttagatggaccaacatggataggactgtaaccggaacctgtttttgtgaggttggacatgatttcacaaaatggagcgacaaaaatgcagtacgcggctatgaaattggaaactaattgctggcgagattcatgatacatctacttgggagaaatgtggagatccgaattgcttatcacgaagtgaactgacccgtcatacaagaacgctatgggagacctatgtctaacgcctcattaaacccacata

SEQ ID NO: 365278 - DNA, 405 bp, Zea mays
ccctttcgtccgcccacgcgtccgactagttctagatcgcgagcggcccttactttttttcttttttttataccgctagaagttatattgcatttccctgcaagctgttagtcatctgctgatgaacaaaaggaacccaatctttctagttagggtccgaccgaattcgccactaaaagcaacaaatgatgctcatctatacacatggcacaaaccgtatgttctgcattggtgagcatacatcaaatgagcagcccgaactaggggggccatatccaccaaaaccactggaactagtctagcctagatagcatcttcggatgagtaatgattgctgtgtgggcaccatccaagccaccagaatttgcatttgcacctaccattcttggttattggggggttata

SEQ ID NO: 365279 - DNA, 139 bp, Zea mays
gaaccgagagcagcctgccgggacaaagaagaactgggctccggtggagagctgaagaggagcagatgacacaggctaagctaggactggccgacgacaacaacagcgcgacagggaaaacccaggcgaaacccaacat

SEQ ID NO: 365280 - DNA, 375 bp, Zea mays
ttagtatgtcgcctcgcctgggaggctggggggggaacaaacccgacacctcgccgtgtccggctccgaagaccaaaagccagtcgttgcctccttgggtccgcttccgcccgctcgactcttgcttctgcttccgctatgtgttgccctgccgaggcgatttatgtttggaaattggaatgtagtggcctaattagtggggttttgctgtggttttgcgctcaggtcgcaggcgggggccatcgaccgataagggttccgggatggacttgcaagcggcgaggctcgacgccgcgcgccagcgggtgtatacgggggcgccgacctcctacgcgctggggcagccccagccccagcatctcggcgccggcgacc

SEQ ID NO: 365281 - DNA, 241 bp, Zea mays
  unsure (1)..(241): unsure at all n locations
tgcatgaccgaccgcgaaaccccggcgacagggnaggagtcttcaaaagaagccgggggggcacaccacgcgaaaggggcgaccaaaagaaaaaagggggcccaaccatggccccccccgggcacagggcctcccgggggagccccatgcgaaaaaagaacggatcagcccccacaggccccccggggacccaccagaactcgaggaaccaaccaaccgggagagcaaacacaacggagcc

SEQ ID NO: 365282 - DNA, 423 bp, Zea mays
ataatagtaataacaatagagtaacgaaagaaaggaaacgctccaatagtttcaacaacgcgctctaaggagacataataacaatagagttcaccaatacatgcaggtgggtaatgtacgatgatgccatatatggtgtacctatcggaaacttctaaggttgggggaaggaagaatgggtgagctaacagatctccggtgacagctgccaagtttcttatctgctgttcttgcaggtgcgggagattcgtcgaaatccaggactcgcgcctcggccatgatcttaatctgtgattttcttgtcactagttccttgccatccgtattatccttgttttccttatcagaagtcgtgttgccacttgctagcatctcacaggcctccactgcagcagcagcactgtgcttgcttaaacgattcac

SEQ ID NO: 365283 - DNA, 306 bp, Zea mays
gcgtccggctactgaatcagaggggggtgctaagcaaccttttggggaacatctagacaagaagcttgagttctctgacatttacatggaaaactttgctggagcatctgaacaggccaaagatgcacaaaacacacaactcgtggatgagcaacattcctcaccaaatgttgtgaatcctaacactgatctacaagacaatatagtaagtacatttaaataaattatttggcgatactcagccagttggtagtaaccatgctcctataaacgaaaatagtgtggacatattttctgagtgttaca

SEQ ID NO: 365284 - DNA, 468 bp, Zea mays
tacctgaatgatgctgagcttacattagttagggcgggaggcttgggcaagttcagtgataatagttcatcctcgggtttgcagactacaaataatcttggaccccggcaggttaccgacctgaatgaatcaaatactggcttccatatgggtagagcaaatggatcagtttccagaggccttccgcgtacccttgagaactcatggaaccaaccaatattgagagcaaacacaactaatttcagtttcagtaaaaaacactccaaagaaaagcacacagatgaaggtacaagctcaaatttctttgacacaagtgtgaaaacaatacatgacgacaaaccatcaatcaataaaggtaaacaagtcagcagtgtaacttttttagcacccagatataatgatgctgaccccccaaaatacttcaaagctgttgatgggaggcctgccactgccagttataaccacttt

SEQ ID NO: 365285 - DNA, 414 bp, Zea mays
aaacgaaaccagtcaaggcacgttgatcagctagctcagcatgttgaagatccatctcaacggaagtcaacaaaatagctgtcttggccacactatcttcttgggtcatcacccctaagtctatctcagcagcttactcatccacatacctatatttaaactccactctgggaacagtgcagtctatagtacaaaaacaatgttttggatgactatatgggtaaactgctggacaccgtctaagagctcaccatgttgaactggaacctagaaagctgctgagggatggtggagatgacaggcccatatcgctgcattcatgtatatgaaacaagtttcagaaacaaaatttaacaaattcctgaaagcaaacactaacaaaattagcaacagggatcccaagcaaaagaagca

SEQ ID NO: 365286 - DNA, 573 bp, Zea mays
tgttttcgtgggctgctccaaatataggttattttagctctgtccttagtcaaactactctaactttaaccttgtttaaaaaaatgtgcaaacatctaaaattatgaggtacttttcactaaattctccatgaaatgtcttgacagtagatttatcagggacttatgtatgttaataaatatatttttctaaagatttggtcaaagctagcggaatttgacttgggacaaaactaagggcccgtttggcacagctacagctcctgattctaagcgaggatctggaggagtcgcgccaaacgggtattttttaaactgattctcgtgtggagccgaaagatcgggagtcgtttttgtgaagaaaggtgggatctaaaaaaacctgctccaccctcccttaaaacagctcctcaaccaaccaaatatggacctccccttaagtttgatcgaaatacccgcattgccattggacaaaacataacgagctaatctatggattatacatctgagaccattttatgcactactatgatgggaatatttatatgttatcgttcataattttttcgatatg

SEQ ID NO: 365287 - DNA, 434 bp, Zea mays
gacccacaaaaacagtgaaaatcagagggcatgtatgtatacatcatcttcacccacactggagaggaaacacacacataccaaaaaaaaggaacaaaaatttttttatagagagtagaaaaaaaagaaaatgagcagagacacatctcttgccaaattgattctacctacctacgtgtatgtaacaagaacgtactttgtttcccccgttttaactttgccctagtaagtagtaacctattgtctgtctatcaccatatttgctccctctttcaggcttcagccttttcctagaacagagcacactagggagccccttttcacacggagcgccctgcaatttctcaaaaatcataacaaacccaagagagccagccaactgccaagcccagtggagtggaaggttacttttttgcacaaaggcccaacaggta

SEQ ID NO: 365288 - DNA, 286 bp, Zea mays
tgcctactacatcgccccgcagccaagaagctgggctcatctcagctcagttggttcctccattccgagcggaggactgactgtctcgcgatgctgatggggctccccgtggggtactcggagacgcccaagctgctgctgcacctactcttcctcctcgaccacctgcgccgcctctcctcctggctgatccgcctcgcgggcgccgtcgacgccgacgccgacaccgacgccggccaccctcgccacccctgcgccgccgcccagcgcctggaggagcactccc

SEQ ID NO: 365289 - DNA, 379 bp, Zea mays
tcttttcgaccgcccacgcttactcccacgggggcgacttcacgactgtttggactcactacaccagtggccacttatagggcgtattggatacagactgaaatgaccttccagaggcccaatgatggaaggtatgatctcccctttcgccggcgggcagctcctgcaggtcctggctccagctcgccggaggccagcacccgagaggaccaactcgacgccagggacgccggcacctactcggagaactacaccaggagcgacgccacctggtactggcggccctgggagaggggcctggacaacagcgacggtcagtccaactgtacctgcaccaaccacaacactagcatgtgcatattcaagtacagcaaccagt

SEQ ID NO: 365290 - DNA, 279 bp, Zea mays
aaaaacctcggaaaataaaagattgggtggccaagctttaaaacacatgtattcatacattaaaaatcctgtttccatcctcataatatacagaaatgcactttgtagcctctacctggcattagagggaaatttgggttcacgtgctttggaggggcgttatccacaccacatgatgtcttgtttccaacagcgaagcccgcaaaagggggggggcctttgggacaatgaggataactgggctggacccacataacgcaccctatcaccttttttgaa

SEQ ID NO: 365291 - DNA, 429 bp, Zea mays
ttttctgatggcctcttcgtgcgggcgtctgggtctgggttcaacagccagttcagaagtactagaacttgcagatcctgatagcaatgtcattaatcctgacccttgtgaccaagtgccagaaggaatcctttgggagaggcttgggagggtttccatgatggatattgagtcaagtgacttcagttggacctctctcacctcactgcaccatacaaaacatacggctacaagtactgatccatctgaggatgacattagcagaagttttgaggtgacagtaaattctgggggcattgtttttattgcattattcaaagctattgaaaatgttgatcttccgtccaaggaaacagctgcagtaattaaaatagcaccttcaaggatggccacacagtctgaacgctttgggtacgaactcgctaaatg

SEQ ID NO: 365292 - DNA, 380 bp, Zea mays
cacgcgtccgcccacgcgtgcgggacgtactcgtcactggtgtgggccgcgggtgtacgccgcagagcgaagcgagacgagactacgatgcgcaagtgggcactgtcctccgggctcctacttgtcaccgtgcgacgagccgtgctgacccagctgataggctacacgtgaatgtggaccaaagccagggttacttagctgaccacacccaaaggagaggagaagctgggggctgcgcctgatggtctggaccaccgactctgaggcggctgccagggaagctgagtctatatataggaagactcttacgagctcggtcacgacacgtgaggtccatgctgaggtgttcacactgatggacatgatcatcaactcactgt

SEQ ID NO: 365293 - DNA, 272 bp, Zea mays
gctacggggggatttttgcatgtttgatgcgattaaacacgcgccatggatatcaggcagtctgagcttacccggggcagggcacgtgtaggacctagacccttacatgcctacagcggatggcaggagcacaccctcggctaacactgcagcctgaaacaatgctgagtctgccaatgctagcccgcagggtggggaagctccccacacaacgacaaatactattaacaaggaatgcatccaacagggacaccaaaagtcaggtagtcctc

SEQ ID NO: 365294 - DNA, 95 bp, Zea mays
aggtgaagctgtagctgtgcctcacattcatcgaatctggttaactgagtaccagttcaaaaaagtttatgcgaaacacagacttcaactggtgc

SEQ ID NO: 365295 - DNA, 286 bp, Zea mays
ggggcaaggacccttttattgggataatcacaaacagacgagaggcagttcgtccagttgtccggcaatcatattgcaacaagacaatgtactcacaacacctaacctagatttttcagacataagtaagatgcaatctgatctcacactagggggcatacaaagaataatccgttgctgatatacatcaacatgcaggctcattaaaattaccggtttccagcttggctgcaaaccaccctgggcctggggggaagggtgcggtgcatacatgggagcaatggaa

SEQ ID NO: 365296 - DNA, 305 bp, Zea mays
aagccaatgtaaattgtaatgttcctctttaacagaatgattcgtgcagtgatttacactttcacgattcgttatacttaagacaacaaagtcgctacttctggaactggaaccctacaactaatccctgcctgttcttgatcgagtaagacgccaaagaaagctcgaagcactaatgaatgaaaggccacattacatcaaacttcctgcggctaattgctaccctaaattgactccgttcctatacctctactgtgacttgaattgaaaacactacgcctggcttgggtggccactggtgaaag

SEQ ID NO: 365297 - DNA, 509 bp, Zea mays
gcctaccacgcgtccgaggagaaccgcgctggcagggccccccgcacggcccctgcggtgcgatgcgctatccatccatggccacgatccgtccgtgccatgccgatcccgcctgcggctcagcagcgactccacgggccacggccgcgggggggattcaccgcatcgcgatctccgatccgatccgatcccgcccgatcctcgcgccatcttttctttttttttcttcttctatagtgtgtagatagtgtgcatataaatatacccacactgatcctccggtgattgcatcgttggcagcgccattcatccatttgtctttttgatttgatttgacctgagggcaaggcagggcagaacagatagcattccgctcgatcaaccagatctcgatcaatggaggtggcggaggcttgctgcactcctgctaggagaggaaggtggctgtgcctatctggcacgatgcggaggtggagccatgcgtcatcggcgtggacgacaggttcgtc

SEQ ID NO: 365298 - DNA, 509 bp, Zea mays
gcaccccaactgcgcctgatcaaatgtggggggttattcactatggtaagtgcttcccccgatgggagtgcgcggtggtcgacgatgctcagcgcggtgctgattgatatgtccttgggggtgctctccgcgcacaggatggtggggcgactggtgcacgttcggcgacgaaggtgatgtctgcttcccgtagcgggaagcgggggcggaacgtgcggcaggtgactgggcggcacaacgacaccgacctccacgtggacgctcggggcggagacgccgaggcgctgcggcacgcgctggtggacgccgcgacggacgtggctgacacgggggaggcgccagaggacctccaggcggaccggcatgcggaggccgccgagcccaaccaggccggtgagaccccgatcgtcgccgctgcggataggggccacctcggtgtggatggagagcttgttctgcaccttaacgcggagggactggccgtcaagaacaggttgggctacgacgca

SEQ ID NO: 365299 - DNA, 241 bp, Zea mays
ccggaggaagagaatgacattatcactagaattgggcggatgctcgtacaatgctatagttttcatatatcatataagtagactttgtttaaataaaacataacattatatgcattttattggttaggggtgaatgtgaagctaaccactaatggtctgaccttgacttgggcataatttttactttccttttgtataaatcgggaagagaaaggtaacatggaaccgggggagcgggttt

SEQ ID NO: 365300 - DNA, 555 bp, Zea mays
tttctttgttctggaggatcgccacgctgcgggacgtcgtcgcgcggttcgctctgccgagcagggccctgggcaacctgcacagcctccagacgctacatggcgtgcagccccgcgggtggggcggcgactacaacccgctggggaaggccgccaacctccggtcgctggagctgggcgagctgacctccgagcacgccgatgcgctcgaggccgcgttggagaacctcgacctcctggagcacctggcgctgcggggcgacccgctgccgtcgagcgtgttcagcgtcccgagcctccgccggctgcagagcctgaggctgatgggcgccatggatgagccggaggggcccagctgcgcggaggacgtccggtacatccggccgaacctgaccaggctatcgatgtggaataccgaggtggggcagaagttcgtggacatgctggccgagctgccgagcctggccgagctgacgatgatgtacgactcatacgacggcgatcggcttgcgttcgtggagactgggttcccgagcctgcagaagctaaagctcg

SEQ ID NO: 365301 - DNA, 401 bp, Zea mays
ggcctaattcctggcgaccacgctttatccctgcatccgccccggccggcctcgctgggagtctgttgaggcgggggagcccttccccacagcgctatccccgtcgcggatggcgaccagccgcagcggctgcgagagctcaaggctgaggcggaggcggaagctggatcgatctatgctcctacccggagcaacccccgcgaggtgagggaggagatggaccgaggctccgacctcggacgccgctctgaaggggagcaccgtctacctagggtcctccagggaccaccccacggacgctcagttgatgcagaccaccgagctctccagagagatagctcagctgctctgatgctccacaaggactggagccacacctgaactcatggctgctgccattc

SEQ ID NO: 365302 - DNA, 221 bp, Zea mays
  unsure (1)..(221): unsure at all n locations
cgttgttccgaccgncgaccttactcagaacaagggaaggcggttctaataaattgccaggggctgtacctcagtacctgtacacagtacatttcatcttatatcctcactacactgacttggcctctgttacaacatatcaaatgttctaataaacgtctaccactaagctacagccttttctatcctttggttgccatttccccttgctgcgataggat

SEQ ID NO: 365303 - DNA, 265 bp, Zea mays
gaaccggccggaccacccagcgcgtcgtggaacaagagaacagcacgcggaggaggagggagcgaagcagcagaagggggaccaaacccccaaagcccgaacgagaacgcaaccggcagacgcaaccagaaagaggcctggcggagacccacgacgacgcacatgcccaagcaaagacgggggggctagaacggcaggaggaactccatagcctcaggcaaccaaccggaaagccacagaacggagcgatgaacacaaaccaccc

SEQ ID NO: 365304 - DNA, 249 bp, Zea mays
catcgcctaacgacaaggaccctggggggggttttttgaaggggggggccctttatacccctccactactagctggttaggctctgcccacctcaaaaggcgctcaggcttagtgcacgaaatgagcactgcgctgcccgtggtatatcggtcgatagggaaaaggaggagggagagatgttgctgctatgattagccacgggctgctgggtacttgtcttcgccctgtgtagcctaaaagcaggaact

SEQ ID NO: 365305 - DNA, 134 bp, Zea mays
ttgagctacgtgctggtctccaagctcggggcgcgcctgatggaggtccgaacggacggcggatgggcatggctctggccctacggcaagacctacgtgacggtggacgacgcgaacgatggcagcaccatggt

SEQ ID NO: 365306 - DNA, 389 bp, Zea mays
cgtccgggcttctgcccctttgggtgcgctacttacgccgccccccgccccagcctcacacccgcattccccagatctccacggactcgacccctaccacggacccggcggcctgctgcttggcctccgcctctgcggcggaggcatcgggggacgtcgccgcgatgctgccggactcgccgccgcggcgtggggcgggccaccgccgcgcacagtcggagatcctcctcggcggcgccgcgctccccgacgacctcaccttcgacgcggaccttggcgttgtcggggaggcctgcgtggccggcgacgaggatgaggaggatgaccaccacgacgaggaaggggtcggcggcgctggcggcagccggatgttcgagatgttcctcgag

SEQ ID NO: 365307 - DNA, 297 bp, Zea mays
ggtgtgggcggtggtgcggggatttttttgatagggctcaccttctctcgctcagcggaaccatcaacgtgggccgcgaggggctcgataagggtaacgcgcgcgtttgcgtcggtcgttgcgaggaggctgctctggactgaacggacgccatcgtgcttgccccagacaaacacggccgttactccaaccgttcggtggtgctagcctcgatgaaccgattgctgcgaggttgtggccgccgcacacagtaccggacagcttacggcacagtgacccaagggctactcacggctc

SEQ ID NO: 365308 - DNA, 239 bp, Zea mays
  unsure (1)..(239): unsure at all n locations
tgggatccaagcttcaaggattgcgggggggttttttgaaggtacacatggtggtgaaccactgntcctagacataaggggcgcgcctctgggggtacgaagtcctattcgactaaaaatggattgccggcatgagatttagaactacgcttcacttatgtgatcgtcggttgagaggcaacacctgaagaagctaaagtgttccaggaaacattaaaacgcttgaatggcctttccgt

SEQ ID NO: 365309 - DNA, 198 bp, Zea mays
cgctctgggccggcgacgcccacggacgcctttttttgaggctgccgttggtctccacgccggagacgagcacccaccggttgtgtataaacgggtgatggtgaggacatccagcctattgactgcgactatggtactgcaatggacaccgctcttattggtggcgaagatgcaccaagggcggatttccctaacatt

SEQ ID NO: 365310 - DNA, 385 bp, Zea mays
cgaacgcacatcactcaatggaggggtttatatatggacctgcctttttttaccttgaaaacatgtgtgggttatcaaattttgttcctatcctttttggaagcatacaggtgtgttctgaactagagaggatacatgatgctctttgtggttcttacagtgaaaataatgtacttggtgagttactcagtgcttcttatgatcctcatgagcaccggaaactttgtagttctgtgatgtctggattcctgatcgacattggatgtgtttattagaaagcctacttctgacgaattaaaagtgtgctgtgattaacaaatatacagagatggatatgcatgttgaatgttttgatacagaatgatttcatcactgttctggagat

SEQ ID NO: 365311 - DNA, 505 bp, Zea mays
actatggtggggtgacactagtcgggggggttttattaggagtgccccttacttggccggaagctagcgctcggtcagagcatgagaacacatggtgagtgcatgacttacccgggagctgtgggacatttaaactgcataactggaggatgaagtacgacataaacgatgcattctttcatgtattataaacacacggcgagacgaagcggaacttgcaaatccacccagaagtacgggaaatttgggcgatctaccacaaatggtcacctgggtgggatcctagctaagagacctgcgactatgccattggcgagataactgacctcagtgaagctagcacgaaaggcttatgtctgactcacgtagatggttacaaaactcgtttcaagccaaacaatgagaggagtttgctggaggtgccaacaaaggatgacttgattgttcttcaccggatacctttttccagctgacatcagatattggtgccagctctgtggctttt

SEQ ID NO: 365312 - DNA, 377 bp, Zea mays
tctctcctcgcgcccgtcctccggggggcgtctttggcgtcctccccaccgacccatccacagctcaagccaacattcacccgtatcccgcgcgcgcttgattcgccgcatctgagcgtcacggccgcgactgcgcgccctgcgtcgcctcccgccgccgccgcacggccgcgacggatgctcggccaccgcttccccgccgcgctcggcctcccgcgcggtctgctgctggggaggagcgtcacccgccgcagtctgtccgccatggccggtggcgaggcggagggcccgctcgggggtttcttcgattacatggagcggctgcgcaactacgagcgctcgggcgtgccgcgcggcgccggcaccgacttcgacga

SEQ ID NO: 365313 - DNA, 235 bp, Zea mays
ctgccggctcctccttcaccggggggttttctgcgagggcgcgtttgttttggccgccctgtgcccgggctaccccttcacgccgcgcggatactatgcttcttcccaccaaccgtagttgcggtctcgtcgtccgtggcgggcggtggggtcatcgcgaaggtgctggtggcgaaccggggcgagatcgcgtgctgggacattcgcaccgggcgccgactatgggtcgccaccg

SEQ ID NO: 365314 - DNA, 295 bp, Zea mays
cgaaacactaagggaacaatatctcgtgttgtagctgctaaaagacgttgaggtggttacttcccatgatgtctaggttgtctatgaagcttccgacatggagtccctaccgacgtccaatctgccaccagagtatctcctccgcttggctgatgcagatgacaaggttaaagttattgatgctgctattcctatagagcttccggaattcgatcaacaggcaaaccgcgatcccgatgtcgctgatactgatggtgccgatgagccccagtgtgccgaaccggacgtcgatgtt

SEQ ID NO: 365315 - DNA, 138 bp, Zea mays
tgggaccgccaccaccctcagtagggggggcttttttacaaaccagggcgtgtggcccccccaccagacagacctgcgcatacgaaactgatcgagtcccctattatcgggtcccatcaccatggtgcggcagctgag

SEQ ID NO: 365316 - DNA, 309 bp, Zea mays
ttcccccaccctactagaaagggggattttttagcggcgccgtccattttcctcgatcctcctagcgagtcggctccttctgatcggtggatccggggcaccagccaccattgtgggcctgaatcctgctctggcgttcatgcttgagcggcgtgcgcgtgcgaggcgtgccggacggccgcctgagcatcggccgccgttccgcccggatcgtcgcgcccttcctacagtcgagcccatggatgaaccacttccacaagacccccgtcctgtgaggtggttagcgaccgacgcggtgctcacggtcag

SEQ ID NO: 365317 - DNA, 306 bp, Zea mays
agcagcagacagccagcaacagcggcgcgtttgtttaagctcaactccgcatgcaaagatgctgtggtcttgcacctgcaccctccggctccaccaaccaatccgaccccaccggagccacccgccggccccggacttgggggtcgccacccacctggcctacccgaggaggtggagcggacacgccccgggggcgggggcgcccctgcgcgcgcgggcccagcgcattcgcacggtggacgccgcccagccgttcgactacgagttccgagcggaggggctgctggaggagcggcagcggctgaa

SEQ ID NO: 365318 - DNA, 356 bp, Zea mays
tgttcttgcgctgggattgaattcggttggtgttttagatatgactgctgctcttgctatgcagctgctcaagagtgggggacttggaatgactgcgaagatgcatttaacaagcatgcatgtcgagggaaagatattagttggtgtgaaatctggtccgagttggccatttcttggccgtgtaagactatgttttgtggttccaccttattttcagatggctgagaaaccactcattaatcacgggctccatgtcactgagtttccaggaatttgaggatggctggataagttgatggatactgcattagggcagacattagatgagcccaacgcgatagtaataaatgcggaaa

SEQ ID NO: 365319 - DNA, 195 bp, Zea mays
gccatctgggatgcgacagggaaattggttttttttgaagtgaatcttgtttccagcctgcggctcatgtcacttttgatgtgaatttttgctacgagcattctagaaatgagatggtgtggggcggcgattgttgactgggggaggaatgagcgagtttgggtcattggaggcctttcctcacaccgtctttgc

SEQ ID NO: 365320 - DNA, 405 bp, Zea mays
gcctccctcccttgccctaatcggccgtgtttttttagcttacccctgggttttctccctccacaagaaggccagtagcccgcttgcagctgcggcgtctgtcgggaagaggccttgcttcagtcccgtatatcgggggaggcgctcccccccgcccccgccttgatagctggggcgttttcccgtcgtcggtacctcccggaggcgccagcgtcgccgatgagctggttcgtctgctttgggtcggcggcgcacgacggtgagtccaggaaggcccctgtcgtgggcgccggcaaagacgtcccgtcggatctcgcggtggtccgtgttcgatcagacaaatcacgatcacagggtggaccagaatctaagaaggacctgagtatacacagggatgggaatagt

SEQ ID NO: 365321 - DNA, 515 bp, Zea mays
cgcccgaaacaagtttagatatggggggtttttttgaccgcgctctggagtgtctggatcctactgaacctccaagcagcaagcgatgaaaggagggacgcaagcaattagcctgatggtgcaccttgctgtgccatggctctgccttgcttcttgggcagctctgctaccagcgctagcatctggaaatgtgggtgcagcagctccgatactgagagcagattacataaaattgaacttcagcaccgcttcggcgacccccgacaagtacaagagcttcatcgcttctgttcgtgctggcttggtgagcaaagcggggggcaacagcagcgggatccccgtgctggtcgacgaagacgacccgctcgcgctcgaatcgtttctaaacatcactctggtgaacaaggcagggcgctccgtaagcttgaagatggatgtctccagagcctacttcgtggcttacgtagcagggcagcgctcgtgcctcctcaagagatcaggcccgacgttctcgt

SEQ ID NO: 365322 - DNA, 386 bp, Zea mays
  unsure (1)..(386): unsure at all n locations
gtttcgctcgctaccctctcgcagtctgggggtttttttgacgccctgttcgcttgtttctcanggncggaacgcggttactctctgtgggtttcgtcgtctgctgtgtttcttttagcgggagaccggcggcattttagtggcggaacctgaggctgttctcacgaatcgtttgcagcgcggcgcaattgctcttgagatggaagttgaattgcatctgttgataatttctatcccttcctcccctttttgggagagattgggggtgcattctgaccatttccttagtcttttgcagtatgctattttgcgttagccctatgattggttcaattgcataccctattgctgatacactgatttcatctggatcttttgtgctaatt

SEQ ID NO: 365323 - DNA, 539 bp, Zea mays
gcgtgcgccgggccttccgttcaggggggcttttttagggacggggtggttttctccggctcataagcaacattactccaccgccgctgacgactgctggcgcagagttggcacaaacaggaacatgtgggatactgaggacgccggacaccattttgggatggacgtaacaacataacctggcatggacgtgacacaagccaggagggacaagattcgccaaaccgcgttctatggcaccatgtcgcggggcgatgtgaactaccagggatggctacaacgtcttatacgatagcctccggctggccaacggacatgatgatgacctgcaagcgcaagcagaccttcaagtcggcggagtgccacagtatgccaccatctggtgttccgaggccaccggaaatcacgatgaggctcaccagctattgcggtggtacttaaactcaagagatccacctaagttcggacgttgggtgataatacttgtacatgacgcgcgaggacagttcgtgtttagaggatgctctactttgattatc

SEQ ID NO: 365324 - DNA, 140 bp, Zea mays
acgaccgccgagacggaggttaaaatgcgctccctgccaaacagcctcaacatgtggtcccttccggaggcgtgcgaagacaacggtgccacacatttcgtgatggagctgtgtgagggccattatgctcttaagcccca

SEQ ID NO: 365325 - DNA, 367 bp, Zea mays
  unsure (1)..(367): unsure at all n locations
ccgcccacgcgnccgcgcacagcggcgggcttttttgggtgttgccgggcggcacagcagctagcgccatgtccctgtccgtcggcggcgcgcggacctctctcctcccttcttcgttcaccgcctgttcagcccgtccgcgcttcctcgcgctccctcttcaccgtggctcgcacggtttcctcacctcgctgccggccgtgtgcaggcggcggctccgggtgcgcatggcccggacggagttcaccggcgtcaccatcggcttccgggcgccggatttcgagctacctgagccactgactggaaagctctggacgttggatgactttcagggcaactctgcactgcttgtgatgttcatatgcca

SEQ ID NO: 365326 - DNA, 530 bp, Zea mays
acatcactgcagctatgaactccgacaaggaggggttttttacactgggtttggcttcagtctcaaaagaaacgtttgtttcagtaagctgatggtcggtcacccaaaggacccattatctatttgtagtaatgttaatatattaaaaactggctagagtaaacatacatattatgctatcatgtacatatatgcctctatgagacataaatatatgtgtcatgtttcaactttcatgaatttttttcctcaacgagttacatactattgataataacaaaattatttaaaataataaccattatatataacttataaattatcatgatagatttggttatatattttaacttaaatatttgacatatggtataactataagtgcataagcgcatatatcaattctttgacatgaaaaacaagaaatattgatacatggcgggcaattggtgtcgattgtagatggctacatctttctagattcatatgtctctgtagcaaatagtcattataatatcaagtattaatat

SEQ ID NO: 365327 - DNA, 213 bp, Zea mays
aggaaaccccttaatttcaggacggacacaaaaaggggttgtcatttaaacgtttcatcaaccatttattttaaattcttaatagcaaaccaggtacagaagggtgcttttttaaacgttttttccttttgccccccttttgtttacccttccccttgggcttggccttcctcattttcggttccaacatgcccttgcctgagggtttcgggg

SEQ ID NO: 365328 - DNA, 509 bp, Zea mays
cgtgggtatttttccaaaaaaaaatgaactaaattcccttgtgaaaatgaaatttacttgagaaaatgtggttcccaaactagttctaaatgtcatatgtaggggagtcattagcaattttgtcattatcatttgtggatttcgctaatatgatatcgggttcgtaaattatagatatacatggttttatttgtcatagacatgagatgacataataataggaagcgaacactgagagtggcaaaattataaatttctccagggtgtcacgccggaacttctgaaactgtaaaaagtggtttctacaagacactgatgcttcagcatcacaggatcaaatcgcatcagcaatatggcgcatgcagcatgctcaaggcatgaaggagacggcatgtaaaattgcctcgaagcgacacttattttttacaacgttgtatcaacaacgccttcagtttcccgaaacagcttgtgttctctaatgtatccaattacttcatcactggtgccca

SEQ ID NO: 365329 - DNA, 448 bp, Zea mays
  unsure (1)..(448): unsure at all n locations
cggtttctttggcggacgcgtgggcggacgcgtggggtcgtgtgtacccacattaccctgcagtttctgcctttttattctgcattcaccattgctgtcctacccccaccccacccccagcggaacttttgtgttcctactttatgccgttcttgtaaattgtaaacatttctaaagcctttctatattgatacaggctgggcagaaatcctggcggcagtgtggggagaaaagatgtgcaagtggagtggagaggtccaacaaggtagaatggactaagggaggaattcttctcttggagtgggggttaaagtggcttatcttaacatgcatccgatcctctctctctggggtttgtgataacaagattcaaaggatgatgcctcgtcaataggggtcctggttttctccttatcatccatgaaaaacgngccccacccacccaccc

SEQ ID NO: 365330 - DNA, 177 bp, Zea mays
aaatataatagtattttccctaaaaattgattattacaatgcatagctcccacgcatgttcttatattaataacaggcaggaacaatcgcaggagcgactgacagcaagaacacagatcgatcggcgacagagattgggcttgctaatagcgtcgcagaaaaggacctacgacgagg

SEQ ID NO: 365331 - DNA, 360 bp, Zea mays
atcttatgtttttcgattcaaattcccaccccggcgaccgccggccttgttcgcacccttacaacgccgtcgtcagccttccaatctaccacccacgcgccgtctctcagcggtgtcattaacagcgctgcagcccgcagctgccgcaagcgccgctacgccgatgcccacgagggcgcctcctcaccttgccgccggcgccgccgattcctcctcgtccccaactcgttcctggccggccggtccttcgctctccgtactctcgctagcgccccccacaagcgccgacacgacgccgtcacctcctcggatcgcccctccagtcgccgacttcgtcttctaagccccgtccttttcccc

SEQ ID NO: 365332 - DNA, 418 bp, Zea mays
cccattcgttcgcacaaatccgacatgggcgcctctgctccgacgaccgctctctcctctgcgcctccactgcccctctccctgttaggcggcgacagcaaggaggaggaggaggaagggttggctgggccaccgtcggcaccacgcgaggcacgagcgcaaccgcgcctatgagttccatagctcgagatcccaggtactatgatacacagctaccttctcgcaacgtgatgtgggatgaattttgacctgtaggttgaataagtgaagtggatgagtcagatggtggaggagacagtgtgtaggagcagcctgtttatgtggccgcagtggatctcgcatgttccgaagagttcctggaactcatcaagagtgcacttcttacagccctagaagcctgtttgtgagcttggtattt

SEQ ID NO: 365333 - DNA, 488 bp, Zea mays
tcctttcgtccgcgctctctctctctctatggcacgagccgcgccggcgccgtcaccacgcgcgcgggagacagagaccacagacggcggcggtggaacttgacactgtacggaagaaggtggtggagattagtggaagggatgaacaagaggttatggttgctgattgcccgtacagaataagcgctatgggggctcatatagaacatcagggtggcgtagacacagatatgaccataaataatggagtacttgcgtgctcgaaaatggcattctagatccatctgccatttggctttcacggtatggatatctcaccttgatggactgcaagactgcttcacctatctacgtctgctgatcggagctgaatagaagccaacaggctcagggacagctaccatttaagattatgatggcattacaggactccaacataatctgccaaagaagcgtggatataatacacgagtttctgagtgcaaaga

SEQ ID NO: 365334 - DNA, 292 bp, Zea mays
tccatacgtccgcacacgcgtgcgccgaccccggggcggattctgtgtaaaaggtctgttgtttttcagccccctcattcaggtcagacgattctccgggcgacgagcacccgccagactggttggagcttggagcttagagggaaagatagcctcatgagcacccccacctggcgccgaaggatcgcaggatgcgtaactgaacgcacctcataccgtgatgcaccatatcggagggagcaaccgtcatgtccaagcagggtccgtcatgatttgtgcaacaattgtaagc

SEQ ID NO: 365335 - DNA, 301 bp, Zea mays
cgtccgcgcgcactgtctattaatcatacgaggcgtgtacgcgccgcgacctcgcgcgccggggacacacaccacggacgggggcagcagagcttgacactgcacggaagacggtggaggagataagtggaagggatgcacaagacgttgtggtagctgcctgtcgttccagaattagacgtatggaggctcatattgaacgcgccggcataccttgcacagacatggccatttaaaagtgcatgctgaaggatctagaatgcaagaagaggggatgccctatctgccgtgccacgattaa

SEQ ID NO: 365336 - DNA, 268 bp, Zea mays
  unsure (1)..(268): unsure at all n locations
tgttttttttcctcgactgtatcgcccacggcggacacgtggacagggatagcaccggcttcggctgtacctaggaccgccgcaccaaggactgggcccatctccacggtcctcatgctcaggtatggtncacgcgggaatctttggttccgggagggacagacaaacgctggcggccgaggtcacccgggcctgaacaactggggcgcatgaacaccctacggcagggctagctcggcctccgctccgagagcctcgaggccatcac

SEQ ID NO: 365337 - DNA, 249 bp, Zea mays
ggaaaaaaaccccttcatgaacaggggaggtttcttttagagggcgaggaaggaggcctcacccggggaataagaagccggggggtgggcatttgaaccaccatccagataagtcggatcgcatgaaagcagtgattgaattttatgttaacgggaaacagaatgcccttgaacgcctccctgatggatcaaaatgatcggcaccagttttttgagaacagaaaaatgataacctagtatctagacgag

SEQ ID NO: 365338 - DNA, 328 bp, Zea mays
tttttaccttggaacggcgttcttaggtttggaccaccgggcccgggagagactctctcggcgaaggcggtggccaccggatgaggaccaacattctatagtggatcctctgcaacactgggctctaagaggcttgtcgagagagagcccatgggacgaagcttattacgatctggcaagggcctacactgcaagaccaatatagattgttaaaagggactcctgatgcacaacccacgggacctacagcaaacataggtcctcaagaagggtgaagtctgaacttctagcgcaaatggagagggtgaacaatagcttcaccactgat

SEQ ID NO: 365339 - DNA, 355 bp, Zea mays
ttatttcacacgctcacaactctctcacaggagagtccgcacggtgatactagcgggccagctcctgtgtctacagacaaagctgaatggacagatagctcgcgaggactctggccaaattagattgtgccagaagaacttatattagtactgaggatatctacctcacgcgtctggattggccttgttggatcatggtaacgactgcgcgtatggcgtttctacttggaggcattggtgttggagagcctcattggcacccaagtgttgctaggagccttggatagcggatggactcaaaaatcaacatgtgcggcgtctgtcactgcgacatgatcgctttcgggatgtttag

SEQ ID NO: 365340 - DNA, 252 bp, Zea mays
ttctttatatgtgcgcaggcagcgcagcctccagccgaaggcatggcgagcaagcacctcgtcctcatcgcctgccttctcctcctgctgcccaccgactcggtctccaccggcactgatctactgcagcaagaacgactacccgttgacggtgagcggggtgcacatcctgtccaagccggacgaaccccaacagtgcggctctgtcaagatcttcggttctacagatacaaccatccaacaggggtagct

SEQ ID NO: 365341 - DNA, 239 bp, Zea mays
aattttagatggcaatggcacgaacacacaaatgggggctattaaacctgagggaaatgcactcataccctcagttgacaatcgacatgtacgaacaaagaacctcaggtcactgatatgcaacaaactacataaatattatgttatagaaacgtgacatattaatacttgatccaccattgttgacaaatgcatgaacacacaatcagttcttatacttgaaaactgtctaacattga

SEQ ID NO: 365342 - DNA, 297 bp, Zea mays
gttgaaatctgtggcgacacctatgcagactcctgggggagggatgccaaagacatccatgaattaaatgacccccgaaaaagtgctaatgccgctatacatggcataccaaaaaaggaaagtgcagacccaacaccaaacccgcagtccataattgctgccacagacggggcaatgggggcgcgcggagaccgtggcgctgaacatacgagttaggatgggccttagctacaggcagagaacgaccacacaaggcgaaggatggagaaaccagccataggccctacaaatattgcg

SEQ ID NO: 365343 - DNA, 243 bp, Zea mays
aaaactaaccatttccatcatatcagatttacttgaaccggtctaggtacaaatccatccatccgttcttcacaatggggaatgtattgctggattttgctatgtactaacttttttcccccctttgcctttgattgattcggccattcattttatgtacaaacaatcatccctaaaatcgcttttaataattccctttagtaatgcttgtcgttgggcccaccccggggctttgcaccgatg

SEQ ID NO: 365344 - DNA, 476 bp, Zea mays
ctactcgtccggagattttcataaaaaaaacagagattgccttattctgttggcacctgatttcctgaatttcatttcgaaaaaagagaagaaacagatatggtctcattctattttatttcaatattatcatgtggtatataagtcttatcacacttgtgtgctgcccatgggagcggtagttcagaagcagttgaacctggagttggtgttccagatcattttctctgaattacatcatattatctgtaccaggtccagatgcaaccagggcagccatcgatgtctgcggtaagaacagttcaaatttttttctaagtcggccttgtttgatctgataaacgtaattccaatatgtaccttgcaaaatatggattaacatatttgctgaagagaaaatttaaataaaataaaataaaatggtcatcttaaccttgagcatctgcttggtatggattgcagaacagggtttatta

SEQ ID NO: 365345 - DNA, 229 bp, Zea mays
gtttgattttacgcagcggatatcggacagagcacacaaacgcaatttaggaggttcacttgacgaatggcacaccggcaacaccggtgccagctttgcggcggtcgtggaacggcatttgggcttgctgacaacagcggctgacctacaacagatattggcatgaggacgatcataggcgatgaaaatgatgactacatcacgaaaccatgcatcggaagcctatgct

SEQ ID NO: 365346 - DNA, 406 bp, Zea mays
gtttcgttccaggcctcctgggcctcgtgcgcttgaacgcgacctcgtgaggcgacgcttcgcaaccccaagcccccaccgctgctgtgcgggccattaccattcaccacaccatcaggaatggggcgccacaccacccagagatctctactccaccctcggcgagcgttgctcagtcgcatcgagcgaggcggccccacaggccacagcacgagccgggcagcccggagcggggcggcgctgctcagcaggcagggccagggatctctactctcgtccgtgcgggggcgtgggcgtcacatgcggcggcgcgccagggcacatgcagctacgccaccgtcgcgggagcgcatacgcggctgctgctgccacgagcgatgctggtcgccgagcaacagcagcagca

SEQ ID NO: 365347 - DNA, 480 bp, Zea mays
tctccttcgcgtccgcccacgcgtccgagctagctgcagtgcacctatggccgccgtttaggtccaggtcccgactgccgctcccgtcgaggaggctgcccagctggccgccgcctccgccgtcgagaccccgaacgaggagaccgctgctccggcggtggagaccgaggtcgtcgtcgctaaggagccggagccggtggaggccgagactgagactgagaccaaggaggccgaggccgctgctgagccgaccgaggcagagcccaaggaagcagagccggaggccgccgcgccggcagcagagacggaggtcaaggaagcagagacggaggccgccgcgccggcagcagagacggaggctgctgctgccccggtcgaggctgctgagccggagatagccgccgagaccaaagaggtggcggctgtggaggctaacgaggaggaggaggaggcagcgcctgctgttgctgccactcctga

SEQ ID NO: 365348 - DNA, 378 bp, Zea mays
acccgtttcgtttcaaccgacgcgaggaaggccggcgccagcggacaaagcgcaagaggaaggacgagatgagcgcacgccaccatgacggggaaggcgaacccgaagaacaacaccgggaacgacagcggcaagcagaacgacccgaggacgacgaaccggggcgagcgcagggcccagccagccaacaccaaggggcaaaacaaggacacgcagacgaaggtgccgggcccgggaggccacacccaagggccggacatcaagcccaagccgagccaccacgaagggcgacacgaaaagctcccccgcgagaccgagaagcctcgacaagggcacaacgccgcacacaatgaggccgcgaggacacaaaccgccgcg

SEQ ID NO: 365349 - DNA, 187 bp, Zea mays
cggtccggaacggccgggcctgacccactgccgacccgttttggtttatgacgccccgcccaccagcgccgcggcccagcggcgcggggaggacattgacagggggtcgtgtccggtgggaccagcggaacaagacaggagagacagagggggagtaccgggggacccaaggagggcagaccaggag

SEQ ID NO: 365350 - DNA, 549 bp, Zea mays
atcgcttactcgtgggcttgcccagtttgctcagctaggatttcgtttgacttggtggatcatataacccttcagcatggctacctatttaaaatatccttcttagatgattatatctttttagacatgttttactaaacaggttttgtaaaagtgtttgttgaacagtaattgtcatatatttccttaatgatgtgcacttgcagaaacatcaaagagtacgcagagttactggtaatggcaaccacaatctctcctatgcagggagagatcttcaactgcaagagacctacttaaaggtgcttcttggaaatagcagtcgaagcagcagtaccaatgcatcaagtacagtcaccgattcactgctaccctcactagttttaaatttatcatcaccagaagtagaagacgcatcaaagttttcagctcctgctgtggtggaaaataattggtttaaacgatcactgccttcaaaaacttgaaaataagaactgttgattcacccttagcataagagagggagcgtatgaggagggagcttctggagat

SEQ ID NO: 365351 - DNA, 218 bp, Zea mays
ttttgttccggcccagaggacgcatcaaaacaaaggggattcatttaaagaacctatcgcggcctagcacacggagaagacaacaacaacacacatggtccataaataacgggggaaccggaggacacaacactagaatgggcccaaggccacggactcgcaactcagggaccaggcagagcaaaagagtcacaggagccccaacgagtaaaacaaca

SEQ ID NO: 365352 - DNA, 291 bp, Zea mays
gatgtatttttccaccaggaaccggacgactggaaggagaagttacattgggcaacagcatcgcatgcttagccgaggaggaggaggaggtgcagccaaggcgcaactgcagctgcaccggaccaaggacgcgaccatccggcatgccggaccaaatcaccaaccccaagggggacaccgcaagggacctcagcaccttccccaagacgggccacaggtgcaggactccatcaaggtcatccacagggccccgcatgttgagcctacagggggacctggagcagctgcgcc

SEQ ID NO: 365353 - DNA, 383 bp, Zea mays
ggggattaaacattgtccatttaatcgacaggagtattaacatgacaaaaataagatgcgaacagcttgactgtaacgtggttggtgctacatgagaagggtggccaacactcgtgtaccaagggcatggacaaccaaacagaggaggagctagcagaattccaattcttgcaacactcgagaccacagaagctacaacgagcaaccacacaagacacaaacacaaaactagctgacacacaagacagaactgaggcaactctacgctgaaagcgtaaactcgacgtcccaaagcccaagggaggcaccactgggtgggttgggtagacaagcggatcttttgacagcttggggttaagttagcgagcacctcttgcaatgac

SEQ ID NO: 365354 - DNA, 294 bp, Zea mays
  unsure (1)..(294): unsure at all n locations
gggntaggccgcggacacaacacgcccaaggactaaagaaaggccgaacaaaactcgcataatctaattgaggaagaaggcctggggctcgcatgtggcctcttgtttaggaccttaggtgacaatcatctcggcaaccaggacatacctgtacggtccacatgctccagaaaatataatctaccgggggattatatatggccattatgtacagcacgaatgtaatttgaaagtccatggggtgcatcaaggattgtgcttgggaagccaatcatgtcatcaggctcaaagaac

SEQ ID NO: 365355 - DNA, 318 bp, Zea mays
atcagttgatgtctcctccatcgatcccgtctcggcattgaaactgtcgcagcccacgatgcactccacccccggccgatgcttccccgcccagccgcctgcgcccgcggctacatcatccagcctgccgcgttcgctaccgacgatgcactccacccacctccgccgcccgccatggcctccacccaactcacgtgcagcaggttccaactcccaagatctaggtcggacaccggcgcacaccacgtcagcgacgccaagcaccactcgttcgacctcggcaagcacctgcctctccgtcatcggcccccccccccc

SEQ ID NO: 365356 - DNA, 450 bp, Zea mays
tcgattcgcgtccgacgagagccagctctcccagcacacgagcacatggcgtccaccaccctcctcgctgtcttgctgctcgtggctgcgtccgcagcgccggcgcggtcttgctcacctcgcgacctgcaggcgctgttgagcgtgaagcaggcgctagggaacccgtcaacgctgtcgacgtggaccccagcgtcgcccgactgctgctcgtgggaccacctccggtgtaacgacgccggccgcgtgaccaccgggtccatggccgggccggccacctgggccggccaattccctccggggtgggccggcttaccgagctcatgtcgctgaccctgttccggctggcggggctgacgggccccatcccggcctgcctggccgcgctgtccaacctgcagttcctgaccgtctcccacaccaacgtgttcggcgccatcccggagtccc

SEQ ID NO: 365357 - DNA, 228 bp, Zea mays
gcgcaagggatatgctgattcttagcataaattttttaccgaatacaaggattccttggcacctgatacatccgactccaatccttatccaacttccacttgatcatttccataagagtaaacttaatgaacagtctcgaggggggggggggagcgaaccctgtaacgtatccaatccaatgacaaaaaaaaaaaaatgggtttgtgactacttgaccaaaggggggc

SEQ ID NO: 365358 - DNA, 206 bp, Zea mays
agcagggacaattggccacaagccataaaccaggcagcactgggccttcttatttgggcctgaaccactagatagttttgggggtggaaaaaaaaaagaaaaagattgaactcccgggctgttccagcatgatgccaggattaacctggtggcaatgctgtttcactgcctacatacatttttcaaaaagagttcgggggcaaaaa

SEQ ID NO: 365359 - DNA, 314 bp, Zea mays
ttcgccccattttcgtatcggccaaccgcccggggcgcggcacggacggggcaacataagacggggttggctgcactcaccccaaacagctatgggagcacagcagagccaaatcagcaccaccgaggaggaccggaggaggacaccgcagacaggcgctctcaccagagaacctgaagcactcgagaagagccgggtccaagccccgcgagaaagcgcgacggagaccggacccaacacaaacaacgagccaggaagacaccaccagcaaagaaacagacgaagcgcacccggagaaacctaaacaggccaag

SEQ ID NO: 365360 - DNA, 391 bp, Zea mays
cccttgcatatcgcggacgcgtgggaaacatactcgggcggggttaatatgacacgctgtttttgttgttgcccacattcaagcagacattttgttttcttcaaaaaaaaaaaaaaaaaaaaaaaaaaaaaaaataaacaaataaaaaaaaaaaaaaaaaaaagaacacaaaaaaaaaaaaaaaaaaaaaaacaaaaaaaaaaaaataaaataaacaaaaaaaaaaaaaaatatggggggccccctttaaaaaacccaagcttacccccccgttattgccactgaaaaactttttctaatgggccaccaaaaataaattcaagggcggtggtttaaaaaaccctaaacgggaaaaacccgggcgaaccaaaaaaaaatacctttacaaaaa

SEQ ID NO: 365361 - DNA, 238 bp, Zea mays
ttattttttttttttttttttttttttttttaaacttttttggggcttcattttatttccagcatatatagagagagactgatgatgcacacaacgtacattattccaactgaattacgtatatagtactcaggtagtgacatgtcgcagctgcatgccaatagacataaatagtgtttatcatatggcggcatagacgcctgcggtcatagcagtatttatatcatcatcatcattt

SEQ ID NO: 365362 - DNA, 195 bp, Zea mays
gggaaaggggatttttttttttttgaaccgggaaaaaggggaaggttttttttcccatggggcccaaaaccggcccctcccaagatttccccccccccaaggaatttttttccaggcccctacccgggcggtccccaaaaattctcccagggttttcatatataagggttgtcccccccccttcaaaattttttc

SEQ ID NO: 365363 - DNA, 274 bp, Zea mays
aagccaaggaccagggggtatatattatacagttcggcactagcaccggatcggccagggtattttcgaggggaaaaaaaaagacagactcccacatgagtcgggcccgagagaaataatccctttaagaacacattcctgttatttttgagaatggctgagtcgaactacctttggctcggtggtaaccggtaaggattctcaccactgcaccaagcttgtcctttatattttcgaaactaaaaccctccaaaagaagctttgcagtcatact

SEQ ID NO: 365364 - DNA, 278 bp, Zea mays
ggcacccccaaaaaataattatatggattccactaggctgtagccggggatgatcagtatatagaccacccaatttacatacaggatccaaaataaaacaaatgggcacagttccagaaagggagagaaattgtaacaggggaaaaaatgaattatacctatatggcacattggcggcgattatgtacaccgaagcagcatctttttatgggatatggtttcactactaaagaaatttttatggcttcatctttatatcctggcaataaaaccttggc

SEQ ID NO: 365365 - DNA, 344 bp, Zea mays
aaggcaacaggaatgtttcattagaaaagggaaagctgtaaaaacagttcattaatttcaatcacaaatcacggtggcggaggattgccaaacctacaccggagtgctgacacgacgctcctcatcctggtaattgtatgagtcgatgattgtgcgccagcagcattgactggaaggtccatgcctgccatttgatcagtcagcgcagtaatttgtgcttgtccgttctcctgggcaccattttcactagcactcctagcatgatgctccaacacaatatccaagctgatggaaaatgatccccccctagtaaccttgaggttctcaatgcactcgtatgacac

SEQ ID NO: 365366 - DNA, 310 bp, Zea mays
ggcacgaaaagaacagctcacggttcttgcttatacggttatacctttgactgtgtacagttgctgccatcgatcagtaatatgtagaactggaagtcgaacagaaacaattactcactctgtcactcatgacatatgcactacatatgattcataacataggtgactctgcagaccagacgcattttattccgtcccgtcttttgtccgagcaacgcagtgcattcttgaaaacaagttccttttcttctcccgaattaatcacggcggaattacaccgttggaaaattggagcttttacttacaccca

SEQ ID NO: 365367 - DNA, 367 bp, Zea mays
tgttttttcaaggatttggatacgcccgcttgcatgcgtcgccccctgatttcctctctgttgtctccttagtctatgcgagccacagccagtcgtagccgcccctcaccgttcgcactcaacccccatccgcacgcagtggagcctggcgtcacagaggcgggcaagggacccagggcaagggaagcggaggtggtccccgctgggatctcgttcccgatgtcagcgtctttgtcctgactctccctcctatgctgccctaggatcagcgcaagggatgaggtcgggctggtccgtggagggggcgacggatgtgtgggtggacagcttgaagaagaagcacaagcgtaaggtgttggcggggtag

SEQ ID NO: 365368 - DNA, 380 bp, Zea mays
  unsure (1)..(380): unsure at all n locations
gaccggnccgaattccttggtttcttacgcgnccttcatctgtcataaagcatgagaatgtgcaatgcttattgattctcaaggcactggttctgctcatngagaggaaactagacaaaaaggatttcgctccattgatgttctactcccaacctgatggtcctatagttggaagcggcaccttcaaatccactgctctagttccaggccaacctgaagcattctatgtgggtcctccgtctagtgaaaaactcccaaagaatgctccacctcgcgctgttttgctcgggtcccataacctatggtcctgcagcccatctaacacgaaagatgaacaaaaccaccgcgctccagtatctactagccctcatataccattt

SEQ ID NO: 365369 - DNA, 400 bp, Zea mays
tgaacataagtaataaactatctgatctacctatgaaaatagtaacatgtcagtgctttcttgtcagaaatatgattcaaaatccttctaccttatatgtggtgcacagaagttccaaattatccgagcttatcgtcaatctaaaagatagacagcagaactaccatcgatttgagctagtgacaccttgggcagtttagtcatgtcatcaggattcaggcataacccagacatgccctagcaccgtcatgcatccaatcattcagtataatgggagggaggggttcggaataacctgtactgaaatttgcatcagaaattcaccaaaaatgccgtcttcctactggattgctttacacataaacaagacgcttatattatttgagttaggatagaatgc

SEQ ID NO: 365370 - DNA, 300 bp, Zea mays
tgaggagcatggggacttttctgaacttgatcacatgggccgagcagatgctaaatcgcatttacacttaaattctgaagtgcctgagaaaattgatgaaatagagtgtcaagaagtcgctggcactatgagactaactgggagatattctgatcagaagcttggagatgtgcctgaagttgggtacacagaagatgaaaacattagggggctggtagtgaacacaagtgataggaaacctttaaaagtctctcaagtcgagcctgaaaaactggaacattcttaggatctggtgaaaga

SEQ ID NO: 365371 - DNA, 383 bp, Zea mays
cgcgggtcttttttcaaggcagccacgggtcgccctcctcgcttaactgagtctttcacaaacactaatcgaaatttgatttattaacacacatggcgtcattttccaagttcccaagcagcccacagattctattgattgagggtgtctctcagcatctgagggtggctaccagtccaggttacacacaagcttcaaattatcgcaaaattcctcttacatatccacatttcataccggaccaggtcttatacccgtcccgaaaaatggaatacactttattacctgacttatcaccgcataagatacatgcaaagattcaagtacatgtatctagaaagtggcttttccgaggtgctcctgatagtggaccactccaacat

SEQ ID NO: 365372 - DNA, 263 bp, Zea mays
caaacacattcttacgcattactctccttgctgaagctagccttcgccatctcccacagctgcccaagccaccaccgctcgttgttggagctcccgcccctgcccccgtcggccgccgtcgacgctgacacgctctccccggttcctccaccgccgtggggaggtggtggatcccggtggtcgccgagcgcatacgacggcagcaccagcacgagcaggcccaggcccgctgtcttggcgccgtccaggaaggagctccggtc

SEQ ID NO: 365373 - DNA, 438 bp, Zea mays
  unsure (1)..(438): unsure at all n locations
tttcttctctactgccgngagagttgagacagcagacagacagtttggtgtggaagagctggggcgctgcgccatcgctgctgctgctgcgcattgctctgctcctcctcggcgctgcggcgccactctgctccggcgccggcgacgtcgccctcagtttcgcagccaccccgcgccgcgtctccaggtccacgtccgccgccttcgccttgcgggtcctgcgcgccaccggagggccttgcgccgactgcgtcgttacctgccagttggacggcgaggcagcgtcgctctgcggtgggacggcggcggcgagctatgcggggctcagggacggcaaccacagtttcacggcgtgcgcgagcacgacgtcagcttcgaactcgcgtccagccccagccccacccccacctgcgccacctacgcttgggatgttgacac

SEQ ID NO: 365374 - DNA, 319 bp, Zea mays
cggccggatccctgtttacccacgcttcctgtgacgcgtgggggagtgcaattcatgcaataagcctttgttcaggtttgatgaaagaagcaagtcgggaaaagctctccttgatgctctttgtacatattacccaagcatcgccggtatatcgcaagccaggggcaacgtggtcctatttatccagtccatccatggttctgtaataagtactttttttttgcaaatttgttttgttgccggagatagcaaaatatctgctcatgtctcgccgtctctgttccttggagcgtaccaatggagctatcagatgcatatg

SEQ ID NO: 365375 - DNA, 281 bp, Zea mays
  unsure (1)..(281): unsure at all n locations
accttgcctaccagccnaggaagcagcacaacaggcggggacatcgtcacccaaccccccaaagcaccagcaccaagagccaagccaccacgagcgagagaacccccacaggaagcacggaagcccaaccacaccgcgagaaaccagcccccaagagcccggaagaggcgaaaaccaagggaagcgccaggcgcagaccggcgggagacaccaaaacgcgccccgcagccacaagcaaggcaccacaacnaaggggacaggaggagagcaaccagacaaga

SEQ ID NO: 365376 - DNA, 292 bp, Zea mays
  unsure (1)..(292): unsure at all n locations
gcccagccgcggggccacccgcggggttttctccgggggccgccacgaccccggcgaaagcggcgccaaacgcggcggcgcccgcaaaagccacgccgccgccagcgccagccagggacgcagaggagaccagcgacgccgnacacgcccttgccgccggagctatctccctgctcatcactgccactgtctggagcaggcatcgggggcagggccgaagcgccgagcccgccgtcgctaccgcggctgggccacctacacctgcgcggcaacggaaagccgctgcaccact

SEQ ID NO: 365377 - DNA, 184 bp, Zea mays
tctgggcaagggtaccaaccatgcaatgctggaaaagtaaagagtgatcaaatatcctctctactcgggaacatgttagtctcaacaatcgatgctgaacacatggaaaggccataatttgttacagcagctgaaaaaggcctataaggagaaccaaatgtccaacactacgccgaaagaatca

SEQ ID NO: 365378 - DNA, 169 bp, Zea mays
ttgttttgacccacgcttcctcctcgcgtccgctaatgaatcgcctgatgggcatttttggacaccctgctcagttcatgacactgaaaagaaacatgaaagaaatggtacaatcccggcatatccgttgacctgcagatggctgacaggcctcatcgcttaaaatcgg

SEQ ID NO: 365379 - DNA, 212 bp, Zea mays
  unsure (1)..(212): unsure at all n locations
agcaaggggacagtgattaagaggacccccccgaccaaacacgggnagaggcacgcagacaccacgaagcccccaaccgcaacaccgggcaccggaggcgggcacccgcaaaaccgganccaacacggacaccaacgcggccccccgagaaggggaggccaaccgcaccccccccaccgccaccggcaggacagganccggccccgcaaaac

SEQ ID NO: 365380 - DNA, 394 bp, Zea mays
ttacttttatagccctgccgggatgaggaactacgcggatggtgtcaaaccactgcgctctcaagtccttaggacggacagaacctatcgtgtgctattagaaacgcggtcagcttacctatgattcaaggcggcaagattcttaaacgcctagacacccccgctggttgtgttcggaattcagctgaaacgtataggctacagttaacgccattgtagattacctattcttcgcgtggtgaaaatgctcaactccacgggcgatttaaaaaaaatctggtccgaaagagaaagaccgacctcctgacttatatttaaaaattcacccaaacatgattaccgccgagaaaattctccaaccgtgggcccattcactctgcaaccgaccaaccga

SEQ ID NO: 365381 - DNA, 208 bp, Zea mays
ggaccctaatcagcccgagaacgagctggtgagcttgctgcagaacctggcagacatggatgttacctacaacgcactccaggagactgacatcgggcggcaggttaatggtctgcgcaagcatccttcggccgaggtcaggcggctggtgaagcagctcatcaggaagtggaaggagatagtggacgactgggtgcgcctggacaat

SEQ ID NO: 365382 - DNA, 253 bp, Zea mays
cacccgaccaagggtttcttcacaccgcgcggaacgagccacagaacaggatggcggcggcgcggcacctaatccggcctcccctcctcggcccacctcgcatcctccaatccgcggcgtcgtcaggttcgaggggctctgcgtccaggccgcaagccaccgcaaggagatcaaggtcaaaggctctgtttggcgcacaggcactatccagtgcactgtccttacacacctaatctatgcattggcaaaggtg

SEQ ID NO: 365383 - DNA, 382 bp, Zea mays
ttcttcctggccatcgagtcttccttgccggcgctcagtcctaccgcgcgatttgttgcttgctcgtcgtggatgcgggccgctgcccagccgagctgctccttccgcttggtccctgctgcggctcgccggcgtttctccctgctcctgctccctggctcgcctccgcgctcgccgtggccgtcgaactcgcccagctcgatcccaagcggcagcatgcgtccatggttgcgttcgccgagatctggtgcttagcgtcgaagtcactacactgctgtcgctttggcttcttttgtcctcgcgtggggtctggcaatcgtgtccacattcacgacatcgccatccggggtccttccattctttgggaggctctctgaggatc

SEQ ID NO: 365384 - DNA, 435 bp, Zea mays
ttcagtaccacgtatgagagttctataggtttggcattctatatacagttagcacattatgttgaccaacagagctctatagtctccagaataagaaacaaagatacatgtagagccactgcacatggacttggaacatatcagtggttaagggaagatgtatcagaacaaaagttaaagatccatgcatccccacttggtgacggaatccgagccacagtagaagatgcccatggttatcttcaccatttaaacataaacaatgagaagataaaaagtacgtatggtgaagaaaaacataggtcatattctatccaagttgatgtggacgattggtcttatctagtcaaacttcgagaggctggtgatcatacaaaagaaaaggttggccttttacttcatggatttcttggtacaagtgaagactgggttccc

SEQ ID NO: 365385 - DNA, 328 bp, Zea mays
  unsure (1)..(328): unsure at all n locations
taactttgccctgccttctctcgacgactcccctgttctcgccgtcgccgccgccgcaaatccccttncgcgtttgtctggcctctggggcttctaggctagcgcgtgcgaccaccatggtcgaggaggtccaggctccactttccgccaccatggcgaaggaggcccaagcgccgccgttcgcaaccatagcggaggcgacggcgccgccgcagctcttattatttaactcctttacgaagagggaggagccattccagccccgggtagaggggaaggtagggattgtcgtcttgggcgttactccctacgactttaggcacaatgg

SEQ ID NO: 365386 - DNA, 181 bp, Zea mays
  unsure (1)..(181): unsure at all n locations
ggccgaccacagccgcgcggtcgttgggggntgatcacgcgcttctccgccgaggccacctttnctcggcggggtaagaagagacgggggagcgacagacccacatcgtcatcgcgagcgaggacaagtgacaagcccaagaagtgccctcaggagtgcaagaagagctgagccggaccca

SEQ ID NO: 365387 - DNA, 254 bp, Zea mays
cactctactttccacacaaggagaaaagagaagggagtaagagaaagaattatgtaaaaccggattaaaaaaacctcctgttttcctgggagcgaaaaccacctaggtaaaatggtagccacgttagcaacccagcttgactgactagagagccttcacgtaggtagggtacatggcctcagctccacttgtaatcaggtatgtttctccaggtcagtctagtgtcagttagctgcaatgtcattgtcggcact

SEQ ID NO: 365388 - DNA, 358 bp, Zea mays
ttcgtattaaaaagcgctccaagaggccaaaaacgtgaccctaatcaccgcaattacccaatcatcggccccgcgcaaaaccctagcccagagcctcctacccgtccatctagccgtcgctgacatggcaggctcatccggcggctcatcctgctgtgcctcctcccgtggcgtgcccgagaacaggccctataatactgcccacgtacgacgccaacagcaacagcaagggcaacggccgttgcggcccgcattaacgtcgccatcaccgtggtcggtgcggcagaagccccctccgaaggccgctgccgctgccggggccgctgatgtggacatccgggtggatttcgacgacgtt

SEQ ID NO: 365389 - DNA, 411 bp, Zea mays
tcctctcgtccgcccacgcgtccgccttctcctcctccctagttattatcgtcgtgccaccataagcgcggcctcgcgccaacaagaacctcggcctcgggaggcagcagtagcaccgccgggggaggcgcagcgcagcgcaacggccggcgccgggacgagagatcctcgaatgtacatgacaaggaaacttttccgtccagctgacccctctctgatctcgccaccgaagcgcacgctggacacccgtggttggtggcaccatgctgcagtacctggacttctcgcacgccagcacctcaaggaagtgggcgcacaggagacagggcgacggacttgaagctccaaggaacagcatggagttcgctttggaggcttcccacagctatggcgtgtttcaggaagatgttc

SEQ ID NO: 365390 - DNA, 422 bp, Zea mays
accagaggacgagccagaacggggaaagcagaagcagccagacactatgacacacagaagagcgcaaaaggccgaccgagacaaacgccaaaaggctgcagaaacgaagcaccacgagaccagagcgagaaaagaaaggcgaggacgctcaaagagagcagctgcaccgtctgccccaatagaagctggagaggaagaagacccggaccaagacggggaggaagaaagagaggcttggacagataccatcacaagggacactatgcagggcacgtgacacctaccgacatgccaaagaaggaagaagaaatgcccaaagccgaaaaggaaaggaacgcaaaggaagggaacgcatacgcaagtgaaatgcccgaagaacgaacgagaaagacaaaacatggcaccataacgcaggcacccga

SEQ ID NO: 365391 - DNA, 367 bp, Zea mays
ggaccggtctcgattccgggtcgctcacgcgccgagctcttttccccagctgcggagccaccctcgggggggccgtttcggcggccacaaccctggtttaacccgctccatacatggcggcgcctgcaaaagccacgctgctgtcagagccagccatggatgcagcgacgaccagcgactccgcacacctacctgcctgctgatctatctcccagctcatcactgccactaactggagcaggcactgtcggcagggcgaagcgcacagcccgtccgcgtaaccgctgctggaccacctccacctgctcggcaacagcaagccgctgcaccactcgctgacggcgcgtgccaactcgcgcggcaccag

SEQ ID NO: 365392 - DNA, 543 bp, Zea mays
gaatttgtttttagttgtcactgccagagtatcagagcctcaagtagagaagctcatcaatggagttccccatgccaaggaaacagctggagttactgtggcagagcagacactatatagtgtgaatgaagcacctaatgtggtgaatgaagttcgtcattctctgaaagcaagctttccgtctttaagtggaactcctgctactttcaatgaaaactacttatctgtaaacgaatgccctactatcctgcaagaatttctagtcccatccaaacaagcttcatttgcattgtcagaatctgcttgcaatttgcaagaatcctctgttgcctctatagaaactctgttttcttcaacagaagcaagtgtagacctgaaagaatctacaccgctggaatatactcctgctgcaagtgaagctccatcattaagtgataaagaatctaccaatgctgataatgtttatatacctcaagtaaccaaagattttcaaaattcacagatgaaacttaacaatcttgaaagtaaacttgatgaggctaa

SEQ ID NO: 365393 - DNA, 247 bp, Zea mays
ggttttcgtgtgtccctcgttggatcgcggaccctcactgggcggcgtttccatctgatcggaggcggccgcgcggccggcggacgaagcccttaggcaaaggcgacctccactgtggtggctgacatgcagctggaccggccaaacctggaagactacctgccccccgactcggtcctggaggaagcgccccggaaactccatacgcccgatctgcaggacatctcgccgctgcttaccgaggcag

SEQ ID NO: 365394 - DNA, 114 bp, Zea mays
tggccatgacagcaacactattacaatggaagtgctttggaacgggcctggcgcttcacactacggctattatatatggagagatcgctgtcataccattggctacgattgagg

SEQ ID NO: 365395 - DNA, 296 bp, Zea mays
tttgcgtctatgacagacttaaccgccctgactacggggacatgctcatgatgcaaacactcgtctcacggacacgagatgagatctcccattgctgttgtggagaaccgcttgcaggcatctgctgctgttgattatagtctgacttgcataactgatgtccccatgggaactcacgacatcagtgctcacaactggtaaaagacttgatatggaagcaacttgacataactatccaaacatgcccaatgcaaaggtgcacagtggactctccttctcgcataacaatacaattt

SEQ ID NO: 365396 - DNA, 245 bp, Zea mays
agcccgacgcggaggagggcggggggggaggttcaggatgaggatgcccatctgtgacgaaaaaccactgggaagagagctactgatgtgaatatggtaagaaaccacctgcagtggagagacacccagccgtcacataccgctctatctacggggcacatacccaggcggaggagagccatcgcccaggaggaactgcatcatgcgcagcaattgctaggacatacagctctccctacgtccgg

SEQ ID NO: 365397 - DNA, 451 bp, Zea mays
ccctctcgttcgcggacgcgtgggttgcgcaattcgacgagaaaacccctgcctgccccagttaatcccgcccggtcgcaatccagcattagaggcgccgatctcctgccccgtcctgccctgtggattatcgacagcggcgccggataccacggaagagaaggaagacaaggaatgggccgaaactaacttgcttgtgccggggcaaggacgagatcgagggcagccgagccggtacccgaaactctaggcgaggttcccacaatagaagtatacccaatggatcgtggaggttctcaaaagaaaagacataaatctgttacaaatgttgacatcatcagtaatctacccgatgttattaaagacaaaattctgtgctggttgccaataaaagaaagctgaagaacatgtctcttgtcaaggaaatggaggtacacatgggcctcaatga

SEQ ID NO: 365398 - DNA, 342 bp, Zea mays
ccctcgtgttcgcccacgcgtccgcccacgcgtccgaaccccactcccccctcgtgcccccaattcccacctcccagatcccaccgtcagatcaccgcaatgcagccgccacgagaccccatcaccgtgcgagccatccccggcgtcgacgccttctccacggctgtagtcgccaccgcgcccaccgaggtcccgctagcatggcccccgacctcgtcgctcagtgttggtgcgagatcgaggccatcagccccaccacgccgtgatccgtcaacactgctgacccgggctccttcgccctctgtcttcgactttgacaccggctcgtcgctcggacacatc

SEQ ID NO: 365399 - DNA, 312 bp, Zea mays
ttcgtcgtcagcccgtcaccgcaggccgcaggaggctcgcttcgtttgcgcctgcccccttctccgtcgtggccgccgacgccggagccatgtccggctcggcgttgcaggcggtggagctcccgctcagcggcagccgagacgactgccgcggtttctccggccgccacggctcatcccgcggcggtggcagcggctaggggagcgagagggtgtggcggaccaacgcgtgcattggggccagaggcaacgatggagcacgtgctgctggcgctgcgggagacggaggcggaacgggaagcgcggatccgc

SEQ ID NO: 365400 - DNA, 293 bp, Zea mays
aatcgggaatctcacttcttttttatgaagggaattttactattgtcaatttgctgaaacatacaaactggctaaccagtatatttcaaaaaggaaaaataaaaaatgaaatgaaactatatccttactgtcggttacaccaatggaactaactaaagctacaaatttaaacattgctcactattgcgggaagcatcaatatcctcactggttgggtttttttttcccaatgaataaaaaataagcaatggttgaagaggtcaggctattttaccagactgggcaaaggcaag

SEQ ID NO: 365401 - DNA, 318 bp, Zea mays
ccgtagttttgtctgcctgcctggctcgtgctcctcggtgtcgttctcacccccatctcgaggccgtcaccccgccggcatcctggctcaccccacgacgcaaatctgtgtgccgcccctccccctctatatcgccattttttctatccttcccggtcaccacccatacctcagccacctcggcggttgtgctaggggccatggtggtggaggctgaggtcgcagctgtgttaggggaggagatgtggtggctgtagctagacagtctcgtgagcgcggtgttctctgggcttatgtccatgttccttgccattgtca

SEQ ID NO: 365402 - DNA, 189 bp, Zea mays
gccaccaaaccaagggaacagggaccttgtctcccctttttttatttgcacatcgaattattacatccacaaaaccacgacaaagtaccaacctattaacaagcgtaaaccattattaattcgggagctaacaaattattgtggttgggctttgattgaaacctttgcagccatgcctaggcggtagaa

SEQ ID NO: 365403 - DNA, 319 bp, Zea mays
  unsure (1)..(319): unsure at all n locations
aaaccaagnccccagaagaggtcttgaagattttcaccgaggtacagctggtagcacccgtacatgcatgatcatcaaacctgaacgacgactcacacacaccaccaattacatatggcaattgcagcttggtgttgttgtgtgccatgcgtcactgatgatacgtacgtccacaatcttgttgggtacgtaccctgtctgcttgcagcagggttcagaggccaaagccgacctggcgagggagaaggtccacaccccgacgacgccttcaaaaggtgctgatgcaaaggctactactactagcggcacggtgcggacc

SEQ ID NO: 365404 - DNA, 260 bp, Zea mays
acaaagcgaatgtaatatactggttttgacagctcgccgtgtccacaaagtgtgacgcacaaatactcccaccacaaagatatacaatacaagcatacaagcagcaatctgcatgcctcactcaacaccaacagcacacaacccaggtagcacagcctgtggcttccccctgcccatggtgaaacccctggtgccatcaggcatgcgggggcctggtggaagcttgttggccccaataggcagctgcggatgcggctcaa

SEQ ID NO: 365405 - DNA, 385 bp, Zea mays
acccacgcgtgctcgtttctcgtccgcccacgcgtccgcccacgcgtccgcggtcatttcctggcaaaaaaaataattgacctataaaattggttgccaaaaaagaaacaaccgtgcaaagccaccagtagaccgttctcagaaaccgccaacaattttttaatacttaccgccgccgctgctgttagggagcttccatccgcgcgcgcctacaacgagagctagcagcggctgtggtcgttatcttgtcgttccggctccgttcgtgtacccaagtcccagcctagatgccgtagatggaggggtccactgatcagatctccgccggctggttcgctaaggagccggtttccgagcggtccgtgggcttgccgaggaccggttc

SEQ ID NO: 365406 - DNA, 407 bp, Zea mays
ctgtcgtgtgggcggacgcgtgggtctagatcgcgagcgccgccctttacaaattttcttgcctagtatatcaaatcttgatattctgtgtgtaggaaaacgccgcgaccctttaacgcccaggggctgatgaacattaagcggctgaagagagccagatatatccgagggccaagacctcagttcctgtgctggttggaaaacgggggaggctaagaccccattcagggggaccccccttgataggggttacacaacataggccagatgcaaataatgtttaaaaccggccacctgcagaggctggaattctgcaggggggctacaaaagggtgcaccgggcgctgcaatggccaacaacaagattgggccacccaacatggaaaaaaaaggcgctgggggcaagg

SEQ ID NO: 365407 - DNA, 430 bp, Zea mays
tatgttctgccgcaggcgactcaacgaccacaacgcgcgcaggcggaagccccagcccgaagcgctccctttcggctcatcgaggctgtcggcgatgttctatgacacgaggcgccaggcgagcctcctgtttggtgaaggtccctacggttagatgagaagctgtgcgagttcttggtgggatagcccaggagcaggaggaggaggcttcaaattcgtggagacgagaggagctccttggttgaagccggcgagagctgctgctgatgggctgctgcctttgtcaggtcagcagcagcagcaggtgtggaatgactcgattccgcatgttgcccatcaggaggatttcgatgggttcacggtcacggcgttcaaaggaatcagttcaaagacccttgatcatcaaggcgcaggcgttgaaacctgtgcg

SEQ ID NO: 365408 - DNA, 267 bp, Zea mays
acaagaaacagcttttgatttgaaaaaagaaaaacaaggtcaacgaacagttaaaagtcagatgcccagttccgaaaaacacacacacagtccagtactccagaatccagtctgggtaaaccacagttttgatacaggtcaatttagatcccagacttaaacgaagggggtttcacatgacatgggtaaaaataataaatggggacaaatgggccatgtccagggggtcacacccaaaggggatcggggatttcaacagccccaaaa

SEQ ID NO: 365409 - DNA, 397 bp, Zea mays
gaggagctgctagctagctagggggtttggatccctgctggtgctggctgctccgctgctgcgtgctagtcctactccagccccccagccccagcgaagcaggcaagcatagatagaggctggggtgggcagggaggtgcgcggacggagatccatcagatcagaatcagatcacatcatcggccctcggatgccatgcatcaccggcgcaagcccgcttccgccgcggcgccgtcggacgacaagcagtcggtcgcgcgcaggcccacggcgcggctgtcgctcgcgggcctcgtcgtctccatcttcctcgtcgtcaccttcctgtacaacgaggacctggtgaaggcggtctccggcttcttcagcttagcaacaacagccgacgccgttgagg

SEQ ID NO: 365410 - DNA, 293 bp, Zea mays
gaaaaaaagcgagacctaccaacgtaatcaaacgggcttgagtagcagcacaaacaggcggtgcagagagggaacaagttaattcccgaaccaagaccctttttccctgatagcctgggatcagatggtcacaactggtttggttcgcttttgactcctcctctcgcaccttttcttttgctctcctaaacaatcaagtcctcagttttttttaatacagagttacacggttttacgcccgaccattacgcgcgaactactagggaaatctcccggcttattattattacaaa

SEQ ID NO: 365411 - DNA, 525 bp, Zea mays
taattttcagttatgggatatgatttcaggatggcagctgcagtctgaggttgaggatagacatgttttcagtattgctccaagcggcacctattcagctaagtctgcttatgaagggttgtttctggggtctgtggcttttcctcattacaagagaatttggaaaacttgggccttgccaaaatgtcgttttttcatttggttggctgctcaaaagagtctggacagtagataggcttgctaaaagagggctgaaccatcctgagaagtgccccctttgtgatcaagaggatgaaactttagaccatcttcttgttacctgttctttctcgagggaattctggtatctgctactaaggaaatttggtctgcattctcttgctccacaaccgaatgttggctcatatctggtttggtgggaagaggtgggggctgttgcttatggactcatcaaaaaaggacttgcttccttataatcctgggagcctggattttgggaaccatagaaaaaaatgcgtctttgat

SEQ ID NO: 365412 - DNA, 351 bp, Zea mays
aatacgcaggaaaactacgccccattatatattaagcagaaaaaggggtggtcttaagaagaccaatacaagaggcctccctacggaggccagtagcaagcatacataagaaaatccatcaaaataggacagctaccaaaggaaaccaaaaaggcctccttaattctcagctaatggtgctgccaaatgggaaaggcccttggcaccagcaatctcccattttttttctttcctcatcagcagctctaagactcatgataacattagggcctgtagccatcaaagacgcatttatttctatggttccacaaaatccaggctcccaggatgataagggagcaagtccttttt

SEQ ID NO: 365413 - DNA, 475 bp, Zea mays
catttttctaagtatttgtggttctctgtatatattttgtttctaaatctacaagtatatctgcagctgcaacttgcttttctagaatactaatgccaaccctatattttttcaggttaaacaaaatcaaatccccctggtcatgtgttatggcagggcattatcataatatcacacatgccttctggatggatcatgtgaacaggttccagtgtgaagcacagtcttttggcccaaagttatttatgcattctataactgatgcagcaaatggagctctaccatcaggttatgtgggcgcaccaataagaccaaatggcatttcattttcatgtcacaccgggcaatctcattattatcacagtgatgcttctggaaccatgcatgcatcctattctggctatacctctagctggaagctccagctgcacctatgcaccacataatactcattatttgtctgctttgagctatc

SEQ ID NO: 365414 - DNA, 273 bp, Zea mays
ctcaagcaagaaccacacctcctcccttcgcgggtgatcatgacgaattgctgcgggggcaagcgcgggagcggctccagctgatccagcggcagcggaagcaacggctgccacatggaaccctgaagaggagacacgcgccaccagcaacgttaagaccacggttcttgacgtgccgaccaccaaggccagaaccgggggcttctaggcagacaccagagggcagaggctgcaactgccacacccgcaaatgcggcaccagcagcggacgcc

SEQ ID NO: 365415 - DNA, 298 bp, Zea mays
acacaaaagagttcattcttatatacgtagggcgtacacatccacacacacatgcaaacgacgtctagcatttccgtgtatgttacatcatacagacacgagtacacgacagtagtggcatccacaactcatgggcggctagcatgcatgcatgcatggccaaacggcgatgcgtggtgcagctgggcgtgcagagcacacgtacgagcgatgtcgtactgccacgctacctgacacgcgcacactgtagccatgcatgcgcgcgttcgaacgcccgtccgatcagaacgcgaggttt

SEQ ID NO: 365416 - DNA, 446 bp, Zea mays
tcatcattttataactaatgcctcatttggtttcgatgctcacatctggttcagtgttggaatctgggaccttccccgatcctcattgcccctgaaatctgattagcatgacttattttttgctacaattttctttggatctttttctttacatcctactagaacttgatgcacctttaattgaggtgtcagcaaatcctggggatcatttgcttgcagtgccaagttagcggtatttgtataggtaaaccctctgtgaatgaatgcagaattcaggttataggctggatgcgatttgagcttttaaagagattgctttttaacaaactgaacacctgcactcacaggtgctacataaataatatgatttcatttagtcgagtcctgtatgttctaaaatatccttaagccctgtgctagcatcttgtgtctgttctatttcaaag

SEQ ID NO: 365417 - DNA, 328 bp, Zea mays
gagattaaagcgatgggaattgtttcaaaatttaaaggcatttgtgcagggagcaattctttcccttctgaattctggcaaggcgataaataacacaattacacaaagataactaataatttatcacctacttaaacactaattaaatttcatcagctaaataatagtagaacttactgctaagtctatacactttgctacagaaacacgcctcgagtacctttgttgtcgcaaccggaagtcttctacgcacccagggaagaaattaatggatttagaatattacaaaattcactgatcaggagtctcctaattattaggtcaccaa

SEQ ID NO: 365418 - DNA, 385 bp, Zea mays
gattccttaccgtgctgctcctgaagagagcagcggcctgtgttgtgcaactaacacgctaaagcttcatccagaccatgtggaactgaatcatctgatagattctccacaaggcgacagactgctagtccaggatgccgaacagctcattttgttgatagagcatatgtgatgagagttttgatacatgaagctgaagaaaggactggttcggtgacctaataattaggagactcctgatcagtgaatcctgtcatatcctaaagccattaatttcttccctgggtgcgtaggagactctcggctgcgacaacagaggcactcgaggcgtgtgactgatgcatagtgtgtagacttagcacaaagttctactattatttagctg

SEQ ID NO: 365419 - DNA, 181 bp, Zea mays
gtctaccctcgtcctgcaggagtaaagcctgttccaggcgagggtaccagaagggaagggttcttggggggagagggaagaagacggcgctcaccgcaatgcacacgccgccaatccccgttacccagctagggcctacagtcccgcagcacctctctgacaacctcaagaccatcccgca

SEQ ID NO: 365420 - DNA, 359 bp, Zea mays
ggtcgtttttgcagatctaccaggcggtgctccagggggaaactcagtaacctggcagctgtttacactgcgaccgtcgctctgtccgcggatccaagcagaggcgcactccagggctaggagcaccaagcacaggagagagccaagaagagaggcggtcggagggaggcgccgtcgaccgaggagatggcgtcggggtcggactcgcggacggcggtggacccgtcgtacccgccgttccctctcctggagcaggacgacaagggcggaggccacgttcacgagcaggagcaggaggcccggtgcgggggcgcgctggagctgtcgactgtggacctggaggcgccgggggaggcgct

SEQ ID NO: 365421 - DNA, 405 bp, Zea mays
ccttctgctgtgagccaccccacttcgcactgttgatccacaggtctccacacctttgctcaagctcacgtatgaatctgctttgaacaaagctcacagactgtcttgctggaatgtatcaccaaacgggatcctataaggccgagaggccagcaacataggtgaagctttacggaccacgaattctattgcttcctgatggctctcacatttatggaagtatctacaaagccttactgatatcactgactgccctttatgggctctgtgtctgaagccaccactctctatgccagatgataatcttgtccatccttggaaacgcggttcccctctttaattctttatggcgcgacccccccgcttcttctggattgctcctcttggagcacatgaactttgcag

SEQ ID NO: 365422 - DNA, 436 bp, Zea mays
tcccctttcgttccacgcgtttttctcttttccgcccacgcgtccgcacacttgtttggatctattgtacttcttgcaaaaagtgggaatctttctccaattgaatcaatgatagaatggagcccaacaagtttttgttcttatgcgacttcaagagttgacaaaggtttaattcctgagctccagaatcagaactggagagttctttctgtagctaatgaatgtcgcatataggttcctggcgttttaaatgttcaaaggcttcaggagttgcttctcaccttggctactcttatgaaaaaggaactttgtggctcatcctgtcctggtgattggatatataatgaaaaaatcccgtagggaagacttcccacatagaggagcatttcccatatatcccagtacgggccgtcttcttcttgcaccccctctttcc

SEQ ID NO: 365423 - DNA, 118 bp, Zea mays
tttgtttcgcgaccggacaaaaggacggcccagagatgaaaaagaatggaacgagccttccaccaaattacgggacagagaatacaagaccccgaaggaaaacggagaccgtgccgcc

SEQ ID NO: 365424 - DNA, 438 bp, Zea mays
gcgtccgcccacgcgtccgattgccactgattcacttttagtcaagtgaaaagtagctccttggtttatgcatgtcgttgtagttctgtttatcatatggatttattcatatattttcttttttagccaccgtgaggaggctttttttcttttgtatcggtctatgttagaccccttttttttcttctttttaatataatgatgcgaagctcttctgcactgtcgggaaaaaaagtaaagtagcatccaatatgaagatgccatgttaatgacacaatggatgctactcctcccctgaaatatataatgcattctttgtgacctaatttgagcagaaactccttaattgagtttaatccattgatgcatgtgtcatttgagtattcgttgaagttgtcttgaaaattttaatgcattttattaaagcatgaagggagt

SEQ ID NO: 365425 - DNA, 357 bp, Zea mays
tgcttttgcgtccgcatacactcacatagcgagcgagagagaggggaacacacaggaggggcgacgatgacagggagccgaccgcaagaggtgaggcttctccgagaaaccccagacccttgcggctcgcccttcaccctgcgggcgtgtcagagctcgcacgctctcctgtccaagatgtatacgctggccagaggaaacctctacaaggttcagcacctcatgaccaccaccctcgcccgtgagaaggttgccgttcatgcactgaaagctagtgatcggcacttggaaagagctcatgacttcttcgatggagcacctcaagttgccgtggtcaacactcggcatcttgaagat

SEQ ID NO: 365426 - DNA, 266 bp, Zea mays
gtatatctttgtgaaacagaagtgctgccgggggcaatgcagcgtcttgaccacacaccgtcagttacaaaaccctactgggacagggatgtggagatgcaggaccccggacgaaatagcaggcttggcagaaggcgacgggggggacaaccagggagtctaactgtgccgaggggataacaaactgacctgctgaccaagcgacagccagaagagccagggactggcacagtggctggttagttgatccatggagtaacggaccc

SEQ ID NO: 365427 - DNA, 312 bp, Zea mays
tttccttcgcgtgcgtggaaagaggatatgaaaggccacattgcactagacattgctgggtctactaatgggacgacaggtgagtttgtttgggtcttacgaaaggacatgtaactgagttggataggcagtctgaatagcactacttaggccatgagttgaactctccgtgagagggaattttacgctgaggctaaaaaattctatcatatgccccacatcaaaggataggtctaaagtccggctctggttgtggtcgctatcatatggactatgatgatgctatatatgggtgggatagggttcaggggt

SEQ ID NO: 365428 - DNA, 430 bp, Zea mays
  unsure (1)..(430): unsure at all n locations
ggggccgtgtccttaattcccgggnctgcctacgcgcccttttggtgtaaaacatcgcngnagacatcncacgggaggggatagttggacccaattttgtttatttacccgagaaggttcgacaaaacttggggaaaaataactagatgaggagaagcataatgcttatcaaacataggtgttattatgaaagctgcattcatggtgctcaacgaggattggcctccacataagctccggagacattagcgctgtacattcaccatgatcttacacaaagtctctggacaggaccaaatggctagttctctataggtatctcagactacctatagcaaattcgattgtgataacaaggggatcagcttgcttggccctatttcactatctacacacaccgagctaagtcagtaagtgaaagtgactgaac

SEQ ID NO: 365429 - DNA, 222 bp, Zea mays
  unsure (1)..(222): unsure at all n locations
ctgcggttccgtttcggaattcctgttttctacccacgcgttcgttcacgcgtccggntcgagagtctcactgggaagagtttgttcgattttttgtctgtgcctttcatccaccttgtcccagacaaggccacgaacacgctcttcaataattacagtgggatcggcatgaccaagttcgaccttgtaacaacctcggtaccatcgccaggttcgggacca

SEQ ID NO: 365430 - DNA, 461 bp, Zea mays
atcgttttcgacgcgttcccctcctgcacgcaggtgggtttttcaccagattctatttttccgccccccttgagaccttgcctccccgagtgctctcggcgagctactttgatttgatttatcaggaaattcgtttgctttatgttgtgcaggctcatttctgattgctggattcggcaaacccgcgttggatcctgtatcggttagtccttgcctgcaaggttcttgttgatttgttttggtggtcgagcatcgtatgttctgcttctggatccagatctggagaaatcgcgaagtcgatgtcgtttggttcggagcggatctgaagcgactatagatggaggctgttggatctcttggacttgagtcctgttccaccttgatggatgatgtttttgcgctgatattattggatcaatttcgatattattagtagatctatgagacatgccgtctggaag

SEQ ID NO: 365431 - DNA, 427 bp, Zea mays
cccacgcgtccgtgcaagcccaacgctactaaaacacggcaggtgtattaaaaagagttttttctaatcagcgttgaagaagattccgaccgggctctatctacgatgaaatctcatacaatgcaccgcaaatcaaccgcttatcaggactggggtcaaagaaaaccccactggatcgcagccccgcagaagagacaaaccgccgagacagaaaagcagctacaaatcggtcccacccggaacagccaggaatctgacttaggcattacgcagcttgctgaactggcgacgagcatacagaaggctcataacacagagaaactgccaaatgcggtgacctcaacacaagcgcctgagcctgccgccaacaaaaagccgacagggagtagactccggggaagcgacaatcctccgcaagagctgacag

SEQ ID NO: 365432 - DNA, 393 bp, Zea mays
  unsure (1)..(393): unsure at all n locations
ctgcaggtacctttccgttattccttggtttacccacgcgttcgttcctccccgncccgcgncgcgtcccacgccggggcacttttcaggcagttttacttctttccgcgacgtcggggaggcctcgctcgggggagggctgcctgcctgcctggctgggtgtcagtcggccgtagaggaggaggggggcggaggagcttgatctggggcacctgcccccccttccctgcgccgtcgggatgtacatgccgccgccgccgtccaccggcggagccggagagcagcctaggctttaccaggactggcggagaagcaacgaattcttcttgcagggaagatttatatttgggcctgatgtgagatctgngtttctcactatgatccccatcatcg

SEQ ID NO: 365433 - DNA, 351 bp, Zea mays
cagaggcgtgctcttggtacctggcgaccatcagagctgcaatgcaagtgggtactggagagaatctgaaacctcgccaagaatccaaaagagcagcagagagagagtgacacatcctactgatctcgcaatggtagctggtgagcggaaacgcactgacctgctgagtcacatgacctccccaatgggcctgacataaatcccggatcagagcccagctatcctctctgtggatttcagtacggcaacaggaacgcacacggacggttcagtgttgtcgtggagagagtacgacccagctcattgctgctatagctatagctataggggcccgctctggacctggtacgg

SEQ ID NO: 365434 - DNA, 190 bp, Zea mays
  unsure (1)..(190): unsure at all n locations
tgtangttactgctcgcttcaggagggcatccgcgcggagcgtgatcacagacggtgttgagactatatagatcggaaggggatctaggcataaagagcgaggagggtgacccggcgtgtttcaagcccccgaaggggcaacaaggcggcgggcgccacgctgcggctgcaccactaccttgtgatggcc

SEQ ID NO: 365435 - DNA, 505 bp, Zea mays
  unsure (1)..(505): unsure at all n locations
ctgcaggtacctttccggttttccttggttttcccacgctttcgtaagaaagggagaacgctcagctcccccgggggcatatttctaggtcattttagccacattccctgnnnctaatgctcgagtgaaggctacagaaaggtctgaagcagtctaccctaatatcaaggagttggctcttgccggtcctcctggctcaaaaactgtgaaacaagcatcacaacagcttttacctttgtgtgcaaaagcaatgcaagaaaacaacgcagagctcaccagggaggctgttgatgttttcatttggtgcttaactcaaaatgcagagtcttacaagcagcgggaaagaatttatcttgaaaatattgaagccagcgttgctgtcctgagcaaagttgtgattgattggagggatgtgtttcctaagctcagttctgaagctatcaaggcaacagtgaacgactttaaggctaagaatgaggcttcgcttgagtccacaccagatgct

SEQ ID NO: 365436 - DNA, 268 bp, Zea mays
tttcgtatgaccccggcgggaaggggcacagcgaccgggcgatttttaaggagcctttccctttttcccccgaggggatgattcgagggaggaggcatgggggcggagcagaaaaaagtgggggagaggcgacacacgaggatgaacacgaacagggagcccgccaccaggtccaaagcgcgcaaacaggctcatactaaggaagcagaagccgaagatcagaaacccaagagagcacaatcaggaactggagaggaaacaggcagag

SEQ ID NO: 365437 - DNA, 285 bp, Zea mays
  unsure (1)..(285): unsure at all n locations
tcgttagaacccaacccacccancaaaaacagcgggggagagtttaaacgcgaagaccgtgattgaccccaaaaagaagcgaggaaacccacgagagaccacaaataaaaggcaacaagaaccaaccagacaactaggaccaagacagataagaaaaaacaggcagcaggaccaaagggcaaccaaaggagacaggaaccggcaaggggcaacacagaaccagcaaaaggaagcggtacaagcacacaagggcccaacaacacacaaaaccaacagggacagaaa

SEQ ID NO: 365438 - DNA, 235 bp, Zea mays
  unsure (1)..(235): unsure at all n locations
agtacttgcctccctcaatactttttatgccctgacctggtaagtccctcagtgacacactgacacctatctataatcctgaggttggtaagaaaatacctttctgttactgatcccatgtggtttccgtgtgttgttgatatcgatatcaggagtgatatctttatatcacaatacaaatntggctgtagtaggtgtaaccagaagggaaaaacagcgcacatgaagagcactt

SEQ ID NO: 365439 - DNA, 334 bp, Zea mays
aacaaataggacttctcagtcccaaccatattatggtatgtcgataaactcatatccggggaaaatgatatcaccatcctcactgtatggtacatcggctctggacacgggcgaaccgtcctccaacggcccgtccggcaccttacgccgaacagtccggaatcgcactaagcctgccacaagtctcgtaggcaaagccctgcacgaccgaacggtccgtgcagatattcaaccgaatcatagttttgttggaatcatttctctataaactactggatgctatacacaataaaatcagggaaaaccaaacatcctatacatcatacgtggaaac

SEQ ID NO: 365440 - DNA, 419 bp, Zea mays
aacgggcggacgacgaggaagaggaggggaattcttttagcaacattttggctttttcgccaagacgtggcaccaggaaaggtgctcctgtcctgagctcaaaattcccaccccgtggccaagctggtacttgcgctgcggccttagcatgaggtggccgctggcgatctcgactcgccgccgccccctcctccttttcatccttctcgtcgtcctctacacgattcctgggacattttcatcgaggcaagtcacactcgatactgatgagatattttctactcatgaatggtttggcaaaccaacagtcggtttcgtgtgcaatggagagaataaaacagatttgccagatgtgagggaggtgcacacgccataaacctttaagggtgaagaatcatggtcagccttaacagagcttt

SEQ ID NO: 365441 - DNA, 408 bp, Zea mays
cggcctcggcgtggcgcagctcgagaagctccggatcgaggagcagaagatggagggatccatgccggtgtcggggcccacgcacctcggcgtcggcgtcggcgggttcggccacctactcccgatgcaccctccgccacacgcgccgctcccgcttctgccgaggcccggcgcggacggcggcgtgcactgcggctacccttcggtgctctgggacccagcgtcggcgtcggcggtggcggaccccatgaagcacccgttctacaagaggagcctgtgcccgctccctccgcttccaacggtgagcgtgggcctgtcgctgacggcggcgtcgtcgagccacccaacggagcccccttcaaaccaaatgtacagcagcggcggcggcggcgcggagactgcggcggc

SEQ ID NO: 365442 - DNA, 346 bp, Zea mays
ccgccctttttttttttttgtttttttggggttttggcggtgaaaaaaaacccgtgcaaattttcttctcgcatcgggaaagcactgtccactgtgtcagtaatcagcataagagatcgttacatgaacactcccagcctcccacaaagtccctggaagcattgtaaaaacctgacctgatcggggtcagcagcaaacggtcgagttctttcacaatacgcgagaactcacaaacccaaccaaataataacacctaaattttgtacaaaataaacacctaaatctccacaggcttctttaacaatagaggtgccgcgatgttctggccagaagttgctccaccccc

SEQ ID NO: 365443 - DNA, 316 bp, Zea mays
gctgtttggttacacttgaatcacctgcacatacaattcatacatatcacataatcagggaaaacaagtcgctactaaacacaccttggacaatgctgcgcaggtaatcaacattttgttccccccaaaaaaatgcagtatatatatcatgtaaacttactacactggtagttaacaactactacgtttaataacaagtagtaacaaccagcaggccgatggagtggcagttcccgcccagccgagcccaccccacgacgctactggtacttggagcgctgcccatctggcttgccggacggcacgctgcgcacgt

SEQ ID NO: 365444 - DNA, 211 bp, Zea mays
ccaacaaaaaactgacccaattttttatctaaggggggtccaaatttttgggatctactttttcatcagttgataatactggggtttactcccaaaccaaaccaaaaccttttttagccgggcacataagtcttccccctcctaaggggcatacatgcttaagcttaactaactttcctaattggcttcgaccaggatttttttacaggcc

SEQ ID NO: 365445 - DNA, 189 bp, Zea mays
ccttgaccatggatgctgaacacatggaaatgccatacttttgtccagaaattgaaaagagcctataaggataaccaaatgtccaacattttgccgaaatgatcagttaggttgctggctatgaccaagcaccgatggttgggtaggccaagcccagtttgaggtgccaacctggagggtaggcttcca

SEQ ID NO: 365446 - DNA, 381 bp, Zea mays
gacttcatatataacaaatcatatgattacataacttggtatctagataaatgatagctagagaagggttttattttagctaagatgggctctattagatggttatagttgtattgatgcgggtatattttacccatgggtagacggtatgggtagttccaacccgtacccgtacccgtttacccaacgggtagaggtttttacccattaacataaccacgggtagagaaatcatcccgtacccgccttcatatggggtaaaacccgtcgggtattcgggtttcgggtacccattgccatctttactcctagccactgaatggcacaaagcggacattctttcgctctaggatctcaaggagtcctgcccttccatgcttc

SEQ ID NO: 365447 - DNA, 350 bp, Zea mays
ccataattttttgaattttcatgccctcaacagaagcttcatttgcccaatttctttgtaaataaaacatcttttgattttgcaaaagaaaatgttcatccccagatcaacaccagcaacgggctaacagttgggtccaacttttactaccttgcgcaacattgggtctggaatctacatcggggggctttttaccttgcaaaacataggggggggaagctccttctgaagggactgccatactggtttatctgcctatctgcacagggacctaaactgggatttgtatttttgccgcctcaactggggttagctactcctgtcaccccatctaactgaacttgaaggtt

SEQ ID NO: 365448 - DNA, 322 bp, Zea mays
attaatcccgggtcaccttcaccttcacctttatcagggtaatttaaggtgattaaaaccccggggcgccggccaggggaccaccccaacccataccctttttttttcgtgacaacaagaaaacacccaacgggacgccactggagccacagccacagggcgcgcacgggacgcgtataccacgcacgcacacaccaaaccaaaaaacactttccagccgttttacaccattgtttgggcggtccgtccgggcgttgggcacgtggaagcagggcttacaggagctgcatgggggggagcgcgggcttttttttgcgcaggc

SEQ ID NO: 365449 - DNA, 162 bp, Zea mays
ctcgcagagaagttgaggtggaaataattacaagtaaagctggctacatacaccaagaaaaaataaactcaacacttcttacaggttcagaaagacatccatatgcattataactttaggaaagaagaaaacggtggatgaatctaatgagaacaggcaagt

SEQ ID NO: 365450 - DNA, 406 bp, Zea mays
cgaaagagcgcaggaggactgcgcacccatatattaaagtagagggaaaataaagggccataatggcggacgccttgcccctaaacctcgccttaccgcttaagcgacgccttaacaactatgattgctagagccaggagtggacccagctttgtctcagttattcttaggaatatccaacattttcatcactagagtaggtatatagcatttatgatacatatgtataacttaagtcatgtaaaaattaattttcttaatctagcaaattaatgagctatataaaattataaatgagctcattagaactagtagggccagcttggtggctcgtttcaaaaatgttgtgattgaacccatttttctttaaaaccaaattagggtgatcttgaatgacttcaacttt

SEQ ID NO: 365451 - DNA, 383 bp, Zea mays
  unsure (1)..(383): unsure at all n locations
aacataattngagactctgcttaaaagtccaacacaccacaaccttttctaccaacctactgagcacaccaccaacttacacaacttatccagcgttcgtacatcatattagtaagaacataagatctttcctaggccacaacttagtaaatagctcacccaattttcctgaccaacacgacaaaagcctttcttgtggaaccatctgatatttacaagaaagcaaaatggttggccaggaagacataaacataattaacaagtccgattgaagtcttcctgcaataggcaaatagtgcgacaaaaatgatctagacagatgatgttcaaatcaagcttgcttctacaaataagagaagntaggttgtgccatatttacttag

SEQ ID NO: 365452 - DNA, 314 bp, Zea mays
agctaaaacaaggatatgatccccggcccaactcgccacttcattcgatcagaagattgatgataagaacacagcacattcatgaactaagcaatgaaacaaaaagagaggtcatgattcaaaaggaggaaatggaaatagaggaaaggagtcgctaactaattaattaacaagcctaataacctaactaagctagccctagctacacgcaaagaagtgaagcaaacaagcttaattagctaggcgcgctgccactggctgcgtagtgctcctggccttccacgtacacacacatgcagagtggacttaatctg

SEQ ID NO: 365453 - DNA, 375 bp, Zea mays
aaccacagcaataaaaatattatttctgctctttataaatagttaaagtactagttgagcatccaacacatcacacgtttttatgaaccacccttcttttgtagatccattcattgcagcaaaactgaaaaagcaaaatctaagctatttttctgtctgtctccaccttcttttgtagatacacttctagtcaatggggggattcgtcgtgttcggtagtctttgtccgagtacaatggatcgaaacagcccgagagcccggtctggctgtgcaaagggcaccatgtgagacgcacctcgcactgtggcgaaggtcagggaagttgccatactccgtcacccaccctccaacctggcctttgtggaaccaggtgc

SEQ ID NO: 365454 - DNA, 457 bp, Zea mays
agataaatgttgtggtatatattgtaatgcaaatttagagtggttagacaggtcatacatgcagtttgtttgtgaggtaaacaaacaacataatattcattaaaaaaggagttggaggtggcctcgaattagttgccaggaaatggaaagatatgtgtttgctcctacgggacgcaccaacacacataaaacaagacagcttgtaggaggttggtcgtatgcacaaaaaatagataagtaaatggcaataatattaaagaacaaagataacagaaagagaattttcaatttttagcaaatgacaacaaacagaggaccacaaatactcggtacacaattgaaaagaggcatacaagaagacagaggcagacatgagatgtgaggaatatggcaccttgatagctgataagtgtctctgaactctgtgcaatgtatacacaaataatcattacataca

SEQ ID NO: 365455 - DNA, 257 bp, Zea mays
ggattccatcaacttaaattagcttaatagcatgatatttactattacattactggccgctaaccaactctcgtggaataccaatgcccagttcgatttaaacccaacaacttttcccacacacgtggaaatgaactccacaaagcttacatctgagtctcacaacacaacacaacacatccacacattgtttttgtcagatatcaacagcacgaaatgctgagtcgcagctgataaacacacagcaaggttcgagc

SEQ ID NO: 365456 - DNA, 63 bp, Zea mays
gcaaccaattcttcttgtggtatttggataaacattactgtacatctgcacaaaagggtaatt

SEQ ID NO: 365457 - DNA, 283 bp, Zea mays
ggacggaacaacaaacgagcccgaacggaaaggagccgacgccggacacgaacagaacgaacgaacaaggagagggcatcagcggaagcaccaaaggaagacaaaggcggcaagaagaccagaacgagaagcagaaaacacacgaacgaagctcccctcggccacaagaccgaggacgaaaagcccagccggaggaaacaagaagaaccagaccgctgcaaaaaccaaccgcgaacgacagccaaactgaaaacgacaaacatgcaacacgcggaagagaagg

SEQ ID NO: 365458 - DNA, 322 bp, Zea mays
ctcgcaaagggttttattttccttgggcattaataatttaacacaagagaactcaaacattatttaagcaatcatccagtgaccaaatggaggcttggaccggctacctcgaatgcattgggcatgcaagtagcggtcgccaaccaatatgacagggaaaacatggccaaacacaatcattatcagggcttgttcaccagcgggagatgcttcttgcattggggcttccgactcctggccctgcataatcaaggtatcgcctggggccgcctccacatttgtagaatccccattagatctcaatgctatgaaagcgctcacc

SEQ ID NO: 365459 - DNA, 402 bp, Zea mays
  unsure (1)..(402): unsure at all n locations
ttggttagatccacgcctatnaagcgcgcggaggcgaggcactatttatgctagtggtccaatgatccgccaaattaactatataaatacatgggttctcctatcagcagcatatgcaattgtgatctgtcgtagataatagctataatgtctcgcctatgcggtgcgggcgtgggcataaatatgaaataggcgtaaaataattaggtggaaaagcaaactagagcaacactaactgagtgtataatgcatcgccttagctacttgaaatgctatagtcgcatctcgcaataactaagcatatatattgacaggcgagatatcgtgaccgaattgcaggctcgggatgaaaagtgcatcgataggctagcgggaattgctaaaacgccccatatcatgcat

SEQ ID NO: 365460 - DNA, 506 bp, Zea mays
  unsure (1)..(506): unsure at all n locations
gctggncccccgccggtaccgttccgccattcctggttcgtttccacgcgtccgtctacttttccgtaaggacctcctccagcatgccgacggcatttgtgtctccagcaagcaccgacgtcacggccgcgaacgcgcgaaccaccgcgcctttgcacgctttgtccgcaccgatccgttctttgcggaagacacttgtcggtataactggcattcaaggtgccattacaactacccctgctaatgagaactacagtgccaatggcaacgggaaggccaaggctaatgtagatactgctggttccagttctgtggcggcaaaagtgggtccgccacaggaggttgagagggttgcttggccgtgggcttgtgttcttgcagctggggcaggctttaatgctgaggactttgttggtagagtagcattgatcagctcgggtgaggttgcgcctttgtttggcgatgagatggaagtcacagaaattttcgcatttgtgaggtttccc

SEQ ID NO: 365461 - DNA, 518 bp, Zea mays
  unsure (1)..(518): unsure at all n locations
ttcttttatttacttctacagtttaggagtacgtgggctctcatgccggatctcgcctctctctccccagccatccatggcgatgccaccgagccgttcgtgggcggagctgcagcacgacctcctggtgtcgatcatgacccgcgtgggcgcgccggacctcctctggggcggcgcttcccgcgcctgctcttcgtggcgggccgcggcgcgggacccactcgcgtggcgacgcgtcgacctccgcgactgggtcgccctcacctccggccggcgcgccgcgagacctggacactccagctctcgcgtatccgtccacgccgcgctcgtcggcatcctggaggtcgccgccaagttggccgaagggcggatcgaggccgtgttgctccccgagtntgctgatgaggaccatcttttgttcctcgctgagaggtgaaatcttctctctgtccctttgaacttggctggttgttcaggtgccaaacctgactatttagccttctagcacctgttgacta

SEQ ID NO: 365462 - DNA, 360 bp, Zea mays
tctcttcatgtctacaaagaattaatcagtaataactgacaaaaaccctgttactcagggaatgggcgctaggaacctaacagacggcaccaagaacgacagggagggcaggtcaatactaaacaaacagcacctcagccctaccaagggactcacagaattacatcactggccctgtacccgtaactctgtgttaagcctctaagtatcaatttcacaatttacatgaagcagaaaaaaaaaactaggggaatctcctaggccaaatgaacaaaaaaaatgttgaatcaagccgatgtgtaactggaaaatagcttcagcaagttgttcagagattctgggtagaactttctagcaaaa

SEQ ID NO: 365463 - DNA, 301 bp, Zea mays
tttccttcatggccaccacctccacctcgtcgtctcccaccaccgccgcgcgcgagccctagcccgatctagccggcggcaggcactagatcccgccgcttgcggcatcccgggacgcgcctcgccgaattcgccgctcctcgcactgcaacacgcccggaccactgtaagtttgccgcgctggttgagctcgaccaggccctcctgctaccttcctcgcattgggctgggggtgctccggggacggtttcgtcctgcaataggcttcatgcttgctccttcgtgtcctggtcgggggggg

SEQ ID NO: 365464 - DNA, 361 bp, Zea mays
cccgaaccccaaaaccccagcggccagcagaagcagcggaggcgcggacagggaccgacgtacccgccgcgagaagcaccggatggcaccccaacggcatggatgctagcagcgacagaccgcgcgatccagacagggagaaagcgcaccaaaacgcgcagcggcgacccacgcagccccggcaagcagacaacgaagactagggcgaacacataccggacaagaagcgcgacggcaccagagcgagcgacagggacaagaaagggaaaggcggaaacgcaaacagggacgacggagaagacgaccgcggtccgaaggaccaaatggagagcggcgctcaggacagcctgaacaagaccga

SEQ ID NO: 365465 - DNA, 294 bp, Zea mays
ttaaaaaaacgtgtgcggccataatcggggcgcggaccagcgcgacgacaaaaggcaaggcgcatggtcacgagaggcgatcagacttggacacgctaccggctgaacgagaaactcctacagatcggttccacaatgcgggcgaccgtgcgccatcccagaaacgaaacaaagaccaaaccagagatggacatataccgagcaacggagagcatgtacagataggaagccgaccagccggaggccggcagcttccactacacgcacgagaagcgccgcccggacctacacacc

SEQ ID NO: 365466 - DNA, 451 bp, Zea mays
gtttatttccctatgtatggaccgtctttaccgctggttacatcgagcaagtcctcccaggggccattggcagttctcttggtcttctcttttgtggaaaggacattgaaccagcatggggccgcaaggaattcttgaagttcattattttgatcaactccatctgtggcattcttgcattttgctttgctattggactctactacgtcactggaaaggagagcttccttgtcacaccactttctggtttccacggttgccttgctggctttcttgtggccctgaagcaactcttaccaaaccttgagcttcctatgtgctttttctggaaaataaaggcaaagtggatgccattctttgttgtatgtttctcaagtatcatggcagctgggaataaactggggaaggaaaagtcatcactgggatcacccttaagtccagtcagtgggtt

SEQ ID NO: 365467 - DNA, 507 bp, Zea mays
cccccggaactacccgaccgacccacgcgctttgtttatcgtccctcgccacgccacgccaaagaccaggaaaaaaaaggacgatttttccctagctgcaacttccctcacgccatggaggaggagacgccgctgcagctgctccccgcatactccgccgacgtcgctgtctgagctcccccttcgctcgatctctccatcgggccgggcctacctctcctagcagtgaatcaaaccatggcagctttcgccgcgctgttcgaccccctgtactgcccggaggagcacctcgatctgtaccgcgacgaacccggcgagggtgcggacgagcagcggccgggccagcacggacagcaggagccggctgtcctagacgacgagctgccggcgctgttcgaggcacaccgggccaaggagggggtggcgctgggggaggaaggcgggcactgcggcgcaactgggcgtgaggcccgcggccggtgggttcacgcgccgcggcgcggctag

SEQ ID NO: 365468 - DNA, 335 bp, Zea mays
  unsure (1)..(335): unsure at all n locations
acagccccggcaggaggcaaaagaaaaacagagggaacgagccaaagagggggcgaaaccaaccctaccacagacaaacaccnacaaagcaacaacggggggcaagcaagacttaggtgtgcgagtcctctggaactttggatcgggatccgaccataggtgcaaatttaacacttaataggcgttccccatctacaaagcaccaattattcacttcccttttttatcccggacatcactatccccaggactccttttcccaacccccttcaaagcagctacaagatccaggcccgactgctgctcgcgaagccttgaatatgatggagcagttg

SEQ ID NO: 365469 - DNA, 325 bp, Zea mays
ttggtacgtatctggctcggtctctgccatctccaacctcgagagcccaccaaacccaaagcccaggcctctccgtccccaatcccccatccggcttgccccccatgtcgtcgcagtgcccctactgccgcgcgtcggggccggcgcggtgcgcgacgacgcagccgccgctctcgcgcgccgtctccgagtgctccgcctgcgcccgaatcgtcctcgagcgccacctccacacgcaccccttcttccccctccttccctcactccatccgctcccccttgttacccccgacctcgccacagccatcgattccgtctcgtcttc

SEQ ID NO: 365470 - DNA, 517 bp, Zea mays
tcctttttgtggctccgctactctggcttcacccacccgggtgcccttggcgacaactgagccaccgtcgccgccgccctacccccaggtgcccaggtcgtttcggtccctttgccaggtcttcgccggcgacgagcaccagccaccagccagggaatataactttgacctgtaaaatgaggccagttttttgcgggaaccttgactatgatgttcgcatctgtgaggacgagcgccttttccggaagtatggaagggtggaacgagtggatctgaagacaggttagttcgttactatgttctcaaactgtatgatctattttagcagaacgacaattgctgctacatctatatgttgtttttagtcacaggcagtgctttatttcatcaagtgaattacaaccagtcatcaactgcagctttggaccattttgtttctttgattcagatagctgagcattactgaagtttttcataagacattggcatctgaaaacataacatgggccttgtttaa

SEQ ID NO: 365471 - DNA, 385 bp, Zea mays
cccaacttggattcaacagtttaatgttgttcagggacaaagcccacccttaaaacaggaccggcagtatctaccactagattagcaagtaatgaagacatctaaacaattttccaaatctacggctctgcagtccatactgactcaagtcaaataaaagaaggctgcacttagtcatgaaaaacatctgattaataatgattaaagcagccttgggttcaaaaaagaaaagaactcgaacggtgagaaaagactgtcccccgttattatattaagaagctcaatcggagtacgaccaagtcacgaaaactgcctcccatgcaggaagagaatccgctccctatagaccagatctagatctttacctagaagtcaaacccaggac

SEQ ID NO: 365472 - DNA, 557 bp, Zea mays
ttgatttgattctgatattttgcacaacggtgacaagcttccaaaaaggaattctagaaagagaggaaaacagtgcaagcgaacaatccgcaaaaggctgaatttggcatcagaaaccatttttgaagagagtacttatggtgcttctcctgcggaggtagttccgaccaatttactggttgataagttgtcagagaccacatcctctgctagctcattggttaaaactgatggtcggtacaaggaggaccatgtggaatgtggtattatgttgaatttagctacattgggaactgatgagatggatggttctggatgtgctggttcatcttataatgatgcaggagggagattaagctccagttgtgtttcttacttgaatgacaaatccaatacgacagattcttcagaatttgacggatccaccttcactgaacatggcttgggagaagaaagcaatagctaccagaagttaacatgcccctatgtttataatcccagtatgccaccatggattccatctttaagtaggtgaacaacgacacagtgggaactac

SEQ ID NO: 365473 - DNA, 406 bp, Zea mays
ttgtttacgcgtccgctcttctccgcggccaccgtgagcctgtccgtgaccaccatccccggcatgtccagcggctcgagcatcgcggcggcgcccgctccggcgcctacctgcgggacgagcctgaacgtcgcgtgcacggcggcctcggtgccgccgacgtctttgggccgctgcagcatcgtcaaggacccgttcagggcggagaggacgaaggcctcgccgccggactcctgcgccagcgtcaccagctgggagttggactccacagggacgggggtgatccagtcggaggctgcggcgtcggcggcgccggtcttggcgtcccagtctccggtggtgaggccggcgaggaggaacggccccaacaggactgcttgtatagacgcgtactccggccggtcat

SEQ ID NO: 365474 - DNA, 257 bp, Zea mays
  unsure (1)..(257): unsure at all n locations
gcgtccgccggntcctcaaaccctaaaaccttcaaaccccagcaatggcggattcctcttcgttccgtcggtacccgctcgcctactacgtcgacctcgaccgatggctcccttccttcctcatattccctatcggtcgccttctagccggcgccgttcacgatcccaccttcggcttcttcgcctacagcatcctgcttttccccctctccgaccctggtttccgggttggcttcctaccggttccggtccgggcc

SEQ ID NO: 365475 - DNA, 482 bp, Zea mays
ttgctcacgcgtccgcccacgcgtccgctctctttctcgcccgtcccacctcttttcgctgataagcacgccgccttctgcagcccgtccacccccgccgctgcaggtcccgggcgctgctccccaccaccggcggaaaaatgtcgacagagtgttcggacctcggggacgagttctggctgccggaggagttcctggacgacgacttcttctccgaggaggagaaggcggccgtggcggccaggagcgagagcgacgaggaggacagcctggcggggctctcgcgcaggctcgcgggcctcctcggcgacgacggggagcggaagccgcctaccgccgccgccgccgcagatcgctccgccctccgccaaggtccctgccggcgccggcggtcactaccacccgctcgcgcacttggtttcgcagcggcagatgcaggctgctcagttccatctcctggagcagcatcagctgctgaagct

SEQ ID NO: 365476 - DNA, 451 bp, Zea mays
atctttttagcactttgagtactccacaccacaccaggccagctgtccgcccccgccacttttagttcggttggaggcttggaggcttgggcaaaacccttctcgtcgtcgcgcgctccgcctgcaccacccgtcgccgaagagctctctttcaaaaactagcaaagatggtacaatgtactcaacctcctccccagttaaagctcccagagagtaagatcacagaaccgacagatgatgagaaccaagatttgccaccaaaacctgagaaaaggactaggatgcaccacattgagaggcacagatcttgtgttgtgaccttatctgacatagaacttaatggtctgcaacctcgtcatctgcaccaacccattgagaatagtccaagaggatcacagtgttcgcttcatgaatgaaacacctacagatactaatgcatcacacaggcatg

SEQ ID NO: 365477 - DNA, 538 bp, Zea mays
ctttgttttgtcgcctctgctgcttcgtcgcgtcggcgcctctctgctgctccacggatccctgaagtgctgctgctccggcgccacgggcggcgccctctggcagccggctgccaggggcgcgtggaggatgtagattggtcctggtggcggcgacagcggagggccagcaactgcgagcggtaccgtgctcctgcggtggcttcgtatgcagggaccggaggtctacagtagcgcgcatctagccggctcagcatcgtggatctaaccagaggaggccacggctgttgctcctccctcggcaatggcgagggttcgagacaggacgaagcacttcaaaggggtcgcaatgctctcacatggatacatcgagaaaatgggaaccactcgaaaacgtcgctcactctggctgaggtaatggaaaatcactacgcatccaaaatcagcactttcaatctttagaaaatagcactggttattggagtcattttttgaccgatggagttatcctttgattcagtaagtatttttcctaaaa

SEQ ID NO: 365478 - DNA, 332 bp, Zea mays
acgcagaacaaggagaccgggggggacaagaaaggcctgcagaagagcaacagcgcggcggacaagagcaaggagcagcaggagaaggggcagaccgcggacgccgaggacaagaggaaggagcaggaaggagaagcccacgacagcaacaacaccgacaacaactacaacattaacaaggacgaggcgaagggggacgccaccggcactgccacagagggggggacgacacaggcggacaacaagagccggggcggaaacacaggcaaccaaagcgcaaggaggcgacagcgacggagaaaaaaagcagaaacgacgggcagacgaacacg

SEQ ID NO: 365479 - DNA, 386 bp, Zea mays
ccacgcgaccgcccacgcggacgcgcacgttttcgggccacagtcgtccttctcctccactcccaccgtttagtgcgcctctcctcccgactcctcgcctgctcccctgcgcccgatcaagcgcgccaggctgagctctaccgcgagatccgcctactcaatgaggagaagaacctctccgggattaatgccgatgacgaggagatgcgcaaggaggatgccgctgcgcaaagctgcgctcagaggccagcgctgtgatcgatggcggtgtctacgagaccaaccagaacgacttgtggtgcgggctgcaggtgtactacaatctcggggaactgaagacagcaatggaggggcctgtgggaaagcacaaggcaactgggtgcaaa

SEQ ID NO: 365480 - DNA, 506 bp, Zea mays
aggaggaacaggaacggaaaacccgggacgaaccacgcgaccggataggacacccacgaccaccacgggccagggcggggaacaagaaaagcgccacggggacaaccaccccgcaaagacaagcacccagggccagccgacacgaacacccgcgcagaccccggacgaagaccgagaggaggacaacccaaacgggcacggccgagcaccggaccacgcagacaggggcgggcacgaacacgacaccggcggaggaaagccaccggcgagcgaaccaaaggacaaccgccgggcgcgaaagcgagaaaccggaggcggacagagcgcacggcggcggaccgaccgacacgcacgcgatgcggagaaaggaccggacgagggaagagagcagacagacgaacaccacccacaacgcagcaacgcaggccaaacggaacacgtccccgccgagccggcagcccaggaacaaggagaggcagcggaagaagagcacggcacgcaggggc

SEQ ID NO: 365481 - DNA, 336 bp, Zea mays
acccagtccacccactggtgattcacgaacaaaaaaaaacttacagatccaatactagtactggcactaatagtctaatacacagattcagtgttcaaaacacaataacatatatattggtcatgacaactctgacacctgttcatctcaattctcactaccagattcccagcaggccaacattattttctcacccagtcttgatcagcttctttacaatgctctgaagagccggcgcactggcaccgcatttctgatcactgaagcatgacctcccttcctcagccgccttgcacagttgcggatccatgggcaccttgccaaggaaaggaaccc

SEQ ID NO: 365482 - DNA, 445 bp, Zea mays
gaccggttttgaatttccgggttgttctacgcgaccgggaataactcctccggactctggccagcagcagcgacggagtctttagtcgattactccacgctgttggaggcggcggtggcccatcctttcccgttttctgatccagtcctactgataccgcgcacagcacgcctgctctattaaaggtacggcgtgaagatgagggttctcttggtctcgtgaaggcgacgctcttgtctgctaactacatattatagaatgttttgcttgaggggctactggtcgccttcactagctccagtgagggaagggcctgttcgacatcatataaagttcaattctgtaggggattgtggtgctaggggaccgagaccgagatatccccgtgtgtggaaaactcgtcagaaaattgggactttttccacgtcgcagacgcttgtccaat

SEQ ID NO: 365483 - DNA, 190 bp, Zea mays
agcttattgcccttaactaatgtttatcttacacaaacacaagcaaagcaaaccgggctattaacgaacgagaaacacccaacgccggggggggggggaggcgcctagttttatactaatagcgggtgtggtttttggcctgggcctgggcctggatcttgggtcccctcaccgggttaagacccaggcc

SEQ ID NO: 365484 - DNA, 243 bp, Zea mays
gtacggccaccaggtaagaccgtggacgctgccattattgacagtgcttatgtgcgtaatcccacgcgaggagcggctcgggtggcggcggcggctaagacaaaggcaacacgttcgcacgcgcgccttagaagagctgacagcaccgagtactaacagagcctcggcgtgcctaactacgtgtgccaggacgccctacaggaggccctccatgagggggatgtaatgaaccacccatacaag

SEQ ID NO: 365485 - DNA, 323 bp, Zea mays
gtccggcccacctaccgcgccacacgcgccttattttaccggttttttaaccactaccaagtacatcggggtcactcgtaccgccgctttccgagctcagatggcggcgtgcgcgatctacctccgtggcgccctcgcatactcatcctgtggggccatgaacccccagctccctggtggagctccggccgctgcctccgtcgcttcggcgacgcgtcactcctgctaccgcctccgcgcttacacttcgaggcgccatcggagtcgctgcgtagacaacgcgcgaccgaccatgcagtctccggaggagtgcagggtctaca

SEQ ID NO: 365486 - DNA, 294 bp, Zea mays
ggctaattacttaccacccaggttcagctgagaagggggcgaaaacaggctacaacacatatgaacacctacactacaaaatttacagacgaggaaaacaaaaggttaggcccgcattactcaatcacccagcacatggcagcacaggaatactttagcatatggcttacatacatatacagtggtcttgagctgctaaggctcgggaaacagaagcatgatttagttagaaaaactatgcaccgaacctgttcgcctatctacggcgacgcttgggtacagggacaaaccggt

SEQ ID NO: 365487 - DNA, 518 bp, Zea mays
gaccggtgacagctccactattcagcaagtgcaaaataaccgaattgcaattgaatctggtttgagttattttgaaaaagaaagcacagagcagatttgtacaaataatgatcaagatcttcagcaatctaaggatggaagcactcaacggaccagtgtaaataatgctcaaaaccttgaaacacacagagttgaaccaacaactgatgttacctgcagagatatcccattgcatcccaaacggcgaagaacgcctacaaaattgatactgtcaacttctgcagcagctgcaaatcatgaaataccatcagaagtggcaagaccatacaagaaaaggcggatttttgtaagaagtgtttctgacctgctaaagtatgcaaagagggaaccttcccatgggagatcagcttctatgctgtccagcatattagagaagtcattagctgcttctcctgtacttaatttttctgtatgtggtgacagcaaaacttcttctgatgtcattagctctgcacaga

SEQ ID NO: 365488 - DNA, 355 bp, Zea mays
ctaagaatgtttttatttaaacaaaacactaattaagcaaatgtttcagcctttagactttggttgaacatgaaacaatgatgaaaatcaaccaagaaccaaggtaacagatagtcaatacttcaaaagaacagaatcttagggagtaaaattgaccaatatctggcctcagtaaaacatcagatttaagtcatctaaagagtttcagaaacaaacagtgaacagaataacataagtcatatagtcaatataactcactgtagttatacctccatccccattaataaaacaaagtaactcatccaaagatctctcatctttttcctccttttggacttgtacatccttcagcttc

SEQ ID NO: 365489 - DNA, 515 bp, Zea mays
  unsure (1)..(515): unsure at all n locations
cttacgcgtccgcctccccgccggggctctccactctcgctccaacgccgacggagaagccgcagctctgctccctcgctctctcttccgggagcgcgtggctctattccattcgcgcccgctcggctgacaacggagctgtaggttaacctggtaaaccaattaccttgaagctgaactgtgccgttgaagccaaaatttattacgataaaattttgatcctttcatttgttggacattggatcaactggtgctgttatacatagaaaggagttcattgtaatttctcatctatatttagtggtgccataatcatttttccactggtgttcggcaataatgtcggagagcgagttagcagtaataaaaccagaggtacaatcccctgcagcccccctctccggcgttaaagacttatatctggcttcagtgctntgatggttccattcagcangtggaggaggaggttgcaatgttctgccccatgatatgtcgtgaaatttgaaaaatggcac

SEQ ID NO: 365490 - DNA, 361 bp, Zea mays
gacatccttatcagctctataaaaataaaaaataaactacaataaaactgtacaatagatgtttaatttaattttatttattttatatgacgcatagcagtttttaaaaacaatgccctaaaattcttgactgacaatgactaatgcgctatagtgatggcctaatacggcacgtgcggacgtgccaagctgacacaacaagtgacaaccagcgaggcagcgaaccgcaagaacaactcccagttcgctacgcgctcaccgaacctgacgttcaggacccacaagctggtgacacattaacccaccaaatagcgtcacccaccactgttcgtcgtccgcaaaccaataatttggggagaaa

SEQ ID NO: 365491 - DNA, 408 bp, Zea mays
ttttaaaaagaaaaaaaatgtgggtaatgacaaacatttttgaggagccgcagtctcaagttaccgtattatccacactgaccacaagctatacaaatataataaagattcaaaaaacttacagtatatgaataactagtagccctacctgcattcttttaatatttatataggatgtaacgactggctagcgatgttggtgctccccccttctcctttagcatgtggtgcaacttgttccggtgatgccacaaaatcaaagcaggttctttgaaatgcggggttaggatgccatgccaaagcatctgtttacagggtgaagcagccggtgcacgaacgttggctctggcgcagttggtgtcgtctcggaatcccttttctgtggaagatgttttaaaaaggatttta

SEQ ID NO: 365492 - DNA, 492 bp, Zea mays
tttattcgtccgcccacgcgtccggtccacatgaaactggacgaaattccttctgtgacactctctactgctgcaaaacctctagcatttgttgcaccagatactgttgaagaggctctcctggaagatattagaaagggtaaagtcattagcagtgaaggaatcaatgggattggaaacaaaaaggagagggcaaaagagctcgaagaacctgcttctggcattgatgatgacatgggcaaagccagttttgcaattgctgggttgggtcaagaagggtcgtcaggtttaatctcagtgaatgatgcctcctatgttgaagggacacttcctagtggtgtcagtacatctctgctgaagataagtctggaggaaaatgccatcagcaatcaacatgggattactgacacccaggaaggtttgaaaactgctgaaatcaaggaaaatgctgatcatgctcttggcactaagttacctgatgattcgaacacc

SEQ ID NO: 365493 - DNA, 354 bp, Zea mays
gtgatatgaaatgcatccacacatgccaatggagaggcgactctttatgcggccttatgaccatcaaacgctagagataagcagggggcatgagaaacatcagacaacgcatgctaagaatacccgcaatgcgtgacgggaaatggccaaaccaagaaacttctgtcaaggaaggagtttccactgctagggtccaacgtctaaagaaactggtgaaagagacgctgcataaatggatcatctgcaaagtgaacgatgatggaaagggacccaatgttctgcgcaaggaaggacagggggagcatcatatagccgcagcactgggatgtgaacgtgctatacgaccgaaaatga

SEQ ID NO: 365494 - DNA, 317 bp, Zea mays
ctcgatgactcctgcgactcgggagcatcaaaggaaggtgcttgtattgggttttgtttcaacatcatatgcagggcctccgtggttatgagccgggtcggatcctgcgcactaggaggagcagtagcctcaattgcatgatgcagtggaaagcagtttccgatgttaatggcatgcaaacaatactgtgatgagctactggctgcaataacccgggtttcgtatcgcatgggtaaaagctcaatccggggaacaagcagacatgctctggaaatacgggccttgcattactaacctaaactatagggataaatgaa

SEQ ID NO: 365495 - DNA, 284 bp, Zea mays
gaatagcagaagccttcacactcaatctgttgtagcggcttattttgaaccatgtgaaccgagcacgttttaaccacacacaaccccactgaaaattcataggacgaacaccgatttataggagcattgtacgctcgggacttagggaggttgaaaggcgagacgggcgactaaagttgggtgccgaataccaagggcgctctgtgctcaataaaagtcggaaggatacataaaacctctcggcagcttttgcagctacacttctactctgctaagatatatca

SEQ ID NO: 365496 - DNA, 201 bp, Zea mays
caataatgaagtcaactccccatcgcagctagagctcaaaataacctgagatatagctccgacaaacatgccagcttaactggtggattcaagaaaaaaaaagatggcctgaattcatcatggtctcccattgctatctttgacaagtagtagagaaacccaacttctttcattgcataccctagtaccaactaaatacat

SEQ ID NO: 365497 - DNA, 354 bp, Zea mays
  unsure (1)..(354): unsure at all n locations
ccggaccggaanacccgggacgacctacgcgaccgataatgacagaccagcagcacacnccaccgcccgcgggcaggatcaacaaagatcggcgacgcgtacgcaaccggagaaagccaagggagcgcgaaacccggacaacaaaggccggcaagaagggcagcacaaagcgcaggccgaaccagctgctgcagctggcaacgacgacgaaactggcccatgagaaagccgcgcaacagacttgccccgccgacctccacagcaaacgcaaaggaggcgcagctgaagaagaaagggagggggagaacaaccccgggcgcccgaaaatcaagaaagagggaacaacaagcaaga

SEQ ID NO: 365498 - DNA, 527 bp, Zea mays
  unsure (1)..(527): unsure at all n locations
tctttacgcgtccggtaacacccctagatcaatataaggaaacataagatctccatttgctctgttttcctaaaagagaatgtacaagactacaaggtatgctgcatgtgaaattgtggaccgaagtatcatagcaaacaatataggtcacaaatgcacatgtcatgcagttgtacaaacaatagaatgttaaaaacaggctcgacagtgagacgctcgggtggagcgctacccgcccacattcgattcttgtcaagaatgaacgccagtgctgcatcgagatttatttctcagggagaatggagcatgtgtgttgcgcgtgttccaagattacttgaatagcctcatctatgtctgagtgtgtggtcagcgtaggtgtccacaggattcttaaaaatgaaaaccactgctcctggtaaagttaaaaaaacattatcccaagttcttgtgttgcatatatanttttagcctaagaagttactatggttggagtcaagtgatgagaatntggtaccaagaaaatactg

SEQ ID NO: 365499 - DNA, 185 bp, Zea mays
cccggcagagcagacgcagcacgaaggagaccaacgaggaggaccaacggacggaacacggacaccaagccgagcgacgccaagcgcagcgacaaggacagggacgacgagacgacgacggacagggcgaagaccccaccgagcgccgcaaagaggcggagaaggacccgcaccagggcaaggag

SEQ ID NO: 365500 - DNA, 414 bp, Zea mays
gcaccgcagcagcacgggggcttttttaagccacttcacgattcttcccggccaggcctcagagcagagctttggcttggctagacgacgaccgcggatagtcacacgagcaccgagtgcgagcaaccaaggaaaggaaaacagccagccgcggcgacgaccgatcgtcaacaagctcgaacgccttggccggcggccgggcgggccaccgcaagccccgagcgatggaggagcagctgggcaccggcggcagcgacacacctgctgcagcacacgctgcggaaccaatgcaccggcgacgccccgcagagggtctacgccgacatctggcgcattctgaccccgaaccaccctgcccccaaatgggaactacctggcgccgccgtcaacaagaacccgagggaacaggaggaa

SEQ ID NO: 365501 - DNA, 143 bp, Zea mays
aaccggccgagcacaaggaagagaaacggtaaagcaagacacagcccggggtcagatgcgacaggaggcggtgaaggggagaaagtccgcgagatcatgatccggatcaggcgtgcgagcgcgggaaacaggggagacacaca

SEQ ID NO: 365502 - DNA, 400 bp, Zea mays
  unsure (1)..(400): unsure at all n locations
ggtcgggggaaggaggcgccgggggctactttgaggacaatctcgccgcctcgggcgccggagacttcctcagctcctgcttcgcgtgcaagaagaagcttgaaggcaacgacatttacatctaccgcggggagaaggcgttctgcagcgccaattgccgggaccaggagatccagctggaggaggaagccgagaacaacacgagcagcggctcccctgggtcctcctcctcctcctcgtcgtcctccaacgacgacatcttcatggccggcatggtggtcgcgacgtgacctncacccaccggcccaccaccgtgccgttttgccgccgcaggcgtttttttccatccctcctccaagtacgacagtgggacaggcgatcctagccgatctcggtcacg

SEQ ID NO: 365503 - DNA, 237 bp, Zea mays
ggataatagcccccggaggcgccacggacgaaacgggcgcgtttttgcacctcagtgcgcatggtctccgccgtcttggacacggaggcggcaagaggggcaagggcccctggatgaatgataacggcctcaggacgtacgacagcaagtgccatgaggccaatgtgagcctgcgtgcggacgagtatctgatcagaccggacgaggaccagcacaaggcggccacggggaccatgg

SEQ ID NO: 365504 - DNA, 540 bp, Zea mays
gaatgatcttccccagcccatccgggacggagccaagtctttggcggaactaaaaagcgcggatattcccagggagaagcagtgttgcagacgcccggattcggggcgcgtagttactacatagaccgtgagtcggctcctgcacctgcgggattaggcgactgtgccagatccaagaaacgcataacgggcgtggcgccaggtgggccagggaagatttaaccagtcgggcccggaaggagcctaagggttggatctgatgctaccaggtcgctgagcattgctactgaagggggaagcttttgattacggcagatggctcctgaaatgatggaggaggggcaaacagcttgctatactcgaggatgacgctctcttgtgatcaggtttggagcggttccagatattgatgtttctagttgctgggactggattaattgccgaagcgatggatatgatgctggtatcatttgttggccatgacacagattgatggaagttacttctcataagaaagctgatacacggttgttttgttga

SEQ ID NO: 365505 - DNA, 372 bp, Zea mays
ggatagtatcccccagccgaaccgaggcagagacgaggcacttttgaagcgaatttgcgcggttacccccagggcgaggcagtgcagctgacgctgggaataggcgcccggcaggacgacatagggcgtgagccggccccagcgcctgcgcgatgaggccgttgtcccacagccaacagacgaataccgggcctggcgccatgggggccagcgaagatttaacgagcgacgaccggacggagcctaagggatggatctgatgctaccaggtcgcagagcatagctactgaagggggcagcttatgattacgggagaaggcttctgaaatgatggaggaggggcaagcagttttctataccgtggatgacgct

SEQ ID NO: 365506 - DNA, 358 bp, Zea mays
tttgttgcgcccgggacgacgcagccgagaccgagcgcaggctttgacgaacctgagccggccgcagaccgaaacgaagaggcaggggagcggacgccggcgctgggggcacggtaggaagacagagggcgagggccggcccgagcgccggcgcgcaaagacgaacgccccacagccggcagacgagaaacgcacctgacgacaggggggcacaccgaagaccaaaagcagaagcgcccagacggacgctaacggagggcaacgagagcgaccacccgacgcccgcaagagcggaaggggacggactgccggtgccggagcaagcccacgcacacaggcaggaggggcaagcagagac

SEQ ID NO: 365507 - DNA, 302 bp, Zea mays
tcgtaagccaccggggatccgcagcaggagtcgaccgcgatttattcagcacctgtgctgctgctggctcaccatgatgaggcagggtcccggcagctggcgtaagcatcgccctgctaagacatagagagtgtgcggacgagtccatcaccgacgatgaactgatggcccagagccgctaactaggtagaacaactgaacccagatgtgagactgacggtgacaaaagaagaactgcgacctgcgtgtagcagagcgtaaagagagtcctgatgacacgaggactaagattggcactggcc

SEQ ID NO: 365508 - DNA, 150 bp, Zea mays
ccatcctctaggtgctctagctgtagccttagctagtagctagccattggggccggtcgcaatgaaccttttgattcgtaacacatggtcactgccgaggttcagaccccgaccgttgtggcgaccgaggaagagccggcggtggagacc

SEQ ID NO: 365509 - DNA, 229 bp, Zea mays
tcctcgcctggtggggatttgtataagcacttttttccttgttttctccggcctctaccagcacgagggcaacttcctggcgcagctagcggctcggcgtcgtctactcgcttgccggcgaccagacgctgtttaacgaggaccgcaccgtcgtggtggtggccaatggagagatctacaactacaagaacgtccggaagtagttcaccggcacacacaactttagcac

SEQ ID NO: 365510 - DNA, 465 bp, Zea mays
actgtccagggggtttttttccaacctttttcgtttataccgcttcctgatacgcactacacctcatgctggggatgtgttcacgttcaattttgaaggcttgtactgtactgtaccctagttactaaaccttgggggtccctcgtctcttgtttcatgtaggatacgtacgacgcttaagtaattcagatcggttaacctatccggaggaatgagaactgtcttgcgaatctacatcatgcctttgtgaatttttctttaactttagtagcattattaaattatacccgttttgagcccatctctttaaagaggggaaacagtaattttattagctctaacgatcacactgattggggtgtttagatggatcatattttctctgtttctgttattttgtacccatccggatgccgttttagcttattggagtatacttttttcggtgactggatcaggacatgg

SEQ ID NO: 365511 - DNA, 325 bp, Zea mays
gattcatgatagcagccattatatgtttagctacaacaaaataggattcatgatagcagctgttacatgtttagctaaccaaaatcaggactcaatctacaaaatgattcatctctgagtctcaaacaaaaaatcctacatatagcaatgccatgtcatgacatgtttagctacaaatcaggactcattgtctacaaaatgctctgtcagtctcttgtttgtccaactgcagcttgcctttagggccatccacctccaataccttggggggatcctgatgccttgctaatcttcatcctcttataaagccaagcaactgacattt

SEQ ID NO: 365512 - DNA, 376 bp, Zea mays
ggacagtgtgatatttttaaagccgttctttctgttcagtcccaccaaagcattctcgacggtgcatcactacgagtttaggccatccagtgccactagggaatgagcccccctctcgtattcaacatgatgaacttgttggaaaggatgtaatattatatgccattattggacctgagcaacctgtggctaagggaacaattgatttaactaatcctaacactttgctgggaggtgtgcctgttgggaaagaatattgcgaagctattgtgaacactgtattgaaaagggatgccattaagccttggccttatggatatgtagagacgatggccgatgctcattaaatgccagttgcttggctttataagaggat

SEQ ID NO: 365513 - DNA, 218 bp, Zea mays
actgtccctctgtcagttgtacattataattcttctattcgcatataagccgatctcttctagtactgcttggaataggattaggttcctgctttattttcccttggtttcttctggaaggcatatgatcgaccatggaccctagtacgtacattttggaaggcaatgaatgattgtgcaaaattttcaccttttttaccgtctaaaaaaatataaaa

SEQ ID NO: 365514 - DNA, 359 bp, Zea mays
  unsure (1)..(359): unsure at all n locations
ataagctgntagttacaacagaaatagagtgctacaaggacagagaataagaagaaactatacagggcctacgagggcaggtggcccatggaatacatataccaatatatatcatttgtcgcagggatacaaactgcgcggacatttcagacagcacgaattaagcgaagatctctctgacaagccaatccaagctggggtaggcaaagtagaggatcaaaaatgagggcagtgcaaacaaaaacgtgacaagggcgtagagaaccagaacagcagcacttgcagggacagcataaaggactatcagcagaaagattatcacgagtgggaacttggccgtcagctgcatgaagcacacc

SEQ ID NO: 365515 - DNA, 373 bp, Zea mays
ttccgtgcttgattgtctgtttgtgatttctttttccattaatcggtgacctttgttgcgttttatgcttgcatctgctgtggttagctggttatagtaactgtagagtgttgtcttgtttatgttagtgttgcttctcatcagctcgtgttaaagcttaaaactttaaactaaaaactggttatgttctataccctgtatttgtcaactatggtgaggaattattgacatattaattcaggtgatgcttaaataacagtataacactatgtggtgttaaattctattaaatagggttgtaggcaaaatgcctgagtagacactactaactaccctgaaacattaaagcttctttatgcatgtttaaagttta

SEQ ID NO: 365516 - DNA, 279 bp, Zea mays
gaccgggacctgggataaagggggggggaaggggggaccttaaaacaggcattgacaacacccaccaccctttaacacagaaacacgcgcttagtactccagtagcagtagtccgggggcaggagggagtagtaataattccgtttaaaaagaaagaaagaaagaaagaaaagagtttgggttttttttcccaagtcccatcccatggaatcccatcccatgcataaaaccctgaagtttttgccctcgaaggtctggccaaactgccaggggctcggg

SEQ ID NO: 365517 - DNA, 472 bp, Zea mays
agcagcagcagcaggctgtaacgggagccgcggcggtgtcgacgtcgtcgtcgtcgtccagaaacgcgagctacgcgctcgccgccgcgtccacgtactcgctgctcagcctggtgaacgccgcctccatgggcgggtccgggtccgccgcggccatcgacgagctcagtacgctggtcgggcacgtccacggcgcgccgccgtacttcaaccaccaggccgccgccgcaggcggccacggccacggccacggcttcgtcctccccctgccgacgacgccgtcgtcgcagcagccaatggcggcgctcgggacgctacccctgtccctggccgccatatctgacaagatctgggactggaacccggtcggccccgacgcgacggctagagactacggcagcgccaccggcggattcaagtgacggctaatgagagcggcgcccggccgcatgcacgccgcagcttcgcgcgc

SEQ ID NO: 365518 - DNA, 314 bp, Zea mays
agatatgtacagaagcttaattatgcagacatggaggaagctgtacaactagaaacaagtagagcaccatagggggctaacacagctctcaagtattatttcatcttttcgatggaagacaggagctaagatatcatacaagcattgagaagctagagctagcctagtagagctgttcttttctaccacgccaccatcgccaccagtagtagtcccagcgcgggtcaatcttggacatttggtttaccccgtacgggtactcggagagggagcggcgggcgttcctgaaggcgcagcagccgcaggagcagatg

SEQ ID NO: 365519 - DNA, 411 bp, Zea mays
  unsure (1)..(411): unsure at all n locations
taaggaaagctgacaacctaccttatgagcctgtatgagtacaaatctgtataacaggaatagaaatggtttctcatagatgacaatcacagtaacaacaattgttttgttttcagtatggtcgtgaacgtgaaccaccaccctggtttctattgggtccatgccccccgccatctctgtaattatccctgcgtccaccaccaccgnggccaccaccacgaccaccgccatgcccatatgagggtgccgctctgggtgctgatttctcagccatcacaacactgattttataacctctcatgtcataattattgtaaaatccaccagctgaatgagcagcagaaggatcttcataagcaaggcaagcatctcctttggcttttccagagtcatcagcatagatttttatgt

SEQ ID NO: 365520 - DNA, 311 bp, Zea mays
tcggttgccccgaggctttttttactgccttttttttcttttttcccccacctcgcgttccaacggagggtggatgtcgactaatgtggactgtggcggtgagcgcgcgggctctggacgtggcgctcgccgtctcgcttctcgcctgctctggcgccgtcgctgtctccagggatgcatgatatctcgagtcggatccgaatggaatgtgctggtgatgtgcttctgaagacgattccgatgggaggctcatggtgtatgtctactagttgcctaccaagttctatcaagaagacggtggttaaagactc

SEQ ID NO: 365521 - DNA, 157 bp, Zea mays
atggcgcacactgtcgagcacgtctgggagggattggcgggacctacgccttacttgaaggctagcagtgacaatacctgcggatatccgaactacaccaaaggtgggaccagttgtagtagccatatgaggttcctggggtgggagggacatgacc

SEQ ID NO: 365522 - DNA, 312 bp, Zea mays
ccatcccagcggcgagagctatttcattgagtcagcaagtcgtgggtccaaagcagtttttctgcatttgcggggaaatgattgtctcggtttatccttttcccagaccccactcatgtgggagccttcaacatcgggatttgcccctgctgcaatttttttgttggaagtccatgtttagtcaatttattttatgatggatttatgctctgtgcagttcttgcttgagctttattgagattagttttttaccgcaagagaacttgttctatatcttgaagtcactgggctgttaggaagccaggatcagtt

SEQ ID NO: 365523 - DNA, 451 bp, Zea mays
ctggcaattgagtatgcgtgcagcaagttttagccctctatgcaccttggtagttttccggcaaggcgcgccgctggctggttcaccgtcgttaggggcctgtttgcgtgcgtagaagaagagctgctggccatcggatgtgtgttctgtggccgggatttggatttgccgctcgtatggatggcctccactcttaatcgttggatcgaggatgggtgatccatatcaaatccagacctgcgctattaaggatcgttggatcgatatctgatcgtaggcgggggataccggttcaacatataatccgagccctagatcctcggatgaatggcctgggcgcaccgtgattgcacagccttgacacttttcaaaaagagcccttgcacattaaagaaaataacgcacctatcccgggagcctaggtttcaattcaataaacccttgtttttta

SEQ ID NO: 365524 - DNA, 420 bp, Zea mays
cccgacggctctggcagttctttttttacagtttcttggttttttccagaaaggatctttactggtatactcgggataagaaatccgacacggaagatgctcttaaggaagaaatcaggagagcgaaggaagaggaggaacaggctatgcgtgaggctcttggcttagctcctaagcgcagcaattgaactcagggtaatcgcttggataagcatgaatatgctgtgctgattaagagaggatcaactgcggaggacttgggagcagggcacgctgaagcagcacaagtgcagggtttaggattgtacaaggcccctcgcgatgagggtggatcaagttctttgagccttgacccttaaatggagcctgagcaggctgtacccctactagcaccctaccaggggaagatttggaagataa

SEQ ID NO: 365525 - DNA, 230 bp, Zea mays
accccacaccatgtggccaaattgggaacaaagtttgtgcagataaaattgtgggaggccaagagctaccgtaaagacttggaggatgtggatacacaacactggaacagcttgggaaagcagatggcatgagctgagataaagggcatgctctgattcttatagtcccactatgatgagtatgtatacacgatgcggcgtgcttatatctgttcatcaacggtactaac

SEQ ID NO: 365526 - DNA, 225 bp, Zea mays
ggggggggggggaaaatgaaacgatgcaaatgtcccactgggtttttacgatccaggtccacgggcaccttcttcggaaaccaccaaacagagggtagtaaaacaggtcccgggggggggcgagatcaaaaaaactgctaacctaaccacagacggagtccaacagaacgggggacacagccttgtttatgggaaacaaatgggcatggacaacgcccttttggg

SEQ ID NO: 365527 - DNA, 315 bp, Zea mays
aaaagggcaagttgcaccacattgcatagctaaaaaaaataaattgaaattacaggccaccaggattgatgtgggaggatccacaccatacattttggccttactggggaggatctaaggcaaacacattaacaccccgggaggggaccaaactactggaggcgttccataataacttccttaccattagaagactagcttgacacttcggcgacggcacactggatagagtagaactcgcttgcttaacctttcattggccggtcagttaccaagcaaagaaggatctcaaaagtgaaaccaacaaacagtccg

SEQ ID NO: 365528 - DNA, 331 bp, Zea mays
atgagaggaaaggcgcgggctgtttttacaaagaatttggacgtttttcccgcctcgccacgtgccgccgtcatggctgctttgggacgaggactgcccctgcttctcctgatttttcttctcgacgtatcggtggccgccaacgccgcggcggcacccggtggcatgttcattattacctactacgaggagcacggcgcgcgggggctggtgcggacagagcctgaggtgcgggccatgtactacctctggttcgcggagcacggacgcgcctacaacgcgctgggcgagggcgagggcgagcgcgaccgccgattccttgtctttatgg

SEQ ID NO: 365529 - DNA, 197 bp, Zea mays
ccaaacgggccaaaaaactagtcaacgtgatcaaactaaaaaaatgttgcactcaatcactatgagaaactttccagtcgatactttccagtcgcccttcttaagactctcttcgatttcttaatgtagagatttttggctccctcaaacctctccgaaatactagtgctctcctgcctatcgcgccctgtttattc

SEQ ID NO: 365530 - DNA, 447 bp, Zea mays
gggggatagttagaatccccccggactgtaaagctatgtacactcaatgaagaaaataactatatgtaccagtgcttctaggtcagaatagtttggaacattaatctcagtgtcagatccttctgattgacccgtagttgaaatggttgcaacagggccatgaaattctgtatctggcaatgcagaagccaactcacagttttgaatagcagtttcacagcctactctgggcttatgagcaagaaacttgtactttgtttcattagacacttgaattgacttatccatagtcaaattctgtaaatcataactcctctcatgtttaatgaaaccacaagttatttcttcaccttcatcaatagaatgcagtgctgaagtacacgtgtttgctttgttaccaccaaaattaccctgcagaccaggtggcagctcacttcccacagaaca

SEQ ID NO: 365531 - DNA, 406 bp, Zea mays
aggaggaggggcttttttctcacgattttttgtcttttccgcgctgctcgtgcgcgttacccattgctgttgaaatccatcccaccccaatgtttccaagtagagtaacagatatccgatctcggtatgaggatagtgactgggccatgggaatttgatcgagaaagaaagggaaaggtagagatagtggggacaattcgatttaattgtagctggaacatttctaaaggtattagtaggtgacttgctgcagcaatcgtgaacacacatgcttctaacatatgcttaaagttcttgatgctaccaacagatgatttaccacaaatgtttttgaccttacatagagggcattgaaagttgtattttgttgctcctttaaagtctcactttaatgtagccatcaatc

SEQ ID NO: 365532 - DNA, 233 bp, Zea mays
gggggacaaagggcgcacaaaaaacccatgttggtttggggggatgataaatgatcctagagagctgccaggagtaagtaccgccggtccgggattggacggggtgttacactgggcccgaccccttgacaacatgggggagcctttgcattttggccttggggaggttgcgctcgtccaacaagacgtagccttcgcatgcccgcttgagattaatcttatagggggagggg

SEQ ID NO: 365533 - DNA, 276 bp, Zea mays
tgcagaacgttacagggagttacagacctgtcaatatacctatgaatgaagttttacaggtttatttaaccacttggcatgctgatatgaacatcaaccgcagtagaactggcgaaatatctgcgcttgctgaggacgaaatgaagactaaaccgcctgtggaagggcgactgattctgatggactgttcgtcaggggagaagaactggagaagaaacatcaaccaactgactattcaccatgatgatatatccacatgtcattattcttccttag

SEQ ID NO: 365534 - DNA, 238 bp, Zea mays
ggggcctggcgactgggggcgttttctgccgcaccctgtgtattcttggatgcgcaactgcgggggcggttacctgctctactacatctctggtttctctttggtgatggagacattttactacgtggaagcgtcacgcctacatactcaaagatgccatctccacaaatgaagctatgaagaagcagataggtgtagcatccaaggctatgcctgtatactcgtggttttccaactc

SEQ ID NO: 365535 - DNA, 235 bp, Zea mays
tttccatatctacttactgaaaattttgtcattccttttcattcattgctcttgatcagtcatccccgttcatacgtttttaggaaaaaatatgctgatactatcacacgtttggccgttctctgtttaggtgcttggctggttaaggccgggccgacggttgcggttgcaggtgtgaggaaggtccactggggcctgggccttgggctgctacaccgtggggaggtggttgctt

SEQ ID NO: 365536 - DNA, 402 bp, Zea mays
cagatcagccagaaatggattttttaagggtattctggtaatgtcagatacaaaggcggaatagatgttgctcgcaaggtcataaaggctgatggcattagggggctctacagaggatttggactctctgttatgacctatgcaccatcgagtgcctgtgtggtgggcgagttatggttctagccagcgcataatttggagtgcccttggccatttgcataacaaagaagaggcttctagccaattgaaaatagttggtgttcaagcattcaggggggatttttgctggtgctgtgaccttttttgttacgactcccatagatacaatcaagaccaggctgcaggttatggataatgaaaataagccaaaaggctggggaagttgttaaaagattgatttgc

SEQ ID NO: 365537 - DNA, 282 bp, Zea mays
aaacaaactttagttgccttttccagcctcaaataagcaactgaataaaagtttgcttgccgccagtccagttaaaggttcatcaaaaaggcacaacctacctagctaagctacaacaatagccctgcaacccccttgcaatgggcaaggaaaatgccccataaaacaaaaaccccactgcaacagcagcaggccttaccaacgacaaacgtgcgtatttgctgccaataggacaggtcgtccttcccatcaaaaaaagaaaagaaaacaaaagaaaaagaa

SEQ ID NO: 365538 - DNA, 215 bp, Zea mays
cgaggagttcgcgtgggggattttaccactcattgtgtttgtttttcacgcataagggcaactacacatttaccggtgggaaggcagttgggtacaggaatcctctttggaatcccgtggcaggcgttcatggccgatgacagcctcttcttcattgacgggatgctgcatatgagagctgagcttacgataaagcaacctacgtcgatgtgctg

SEQ ID NO: 365539 - DNA, 334 bp, Zea mays
gcgagcccgtggcgagtccgggtctttctcgcggcggattaggactctgtccgccttcccctccgccatcatcttcttcgctctcgttggcgctaccgccaccaccgtcgtcgtttgacaactgcgccggacggtcagctggttctacactcaacttagtaggtcggaaccatatgttttctgggaagacatacctagtcgaccaaatcgttatcggtgcggtgaagcctgggaacgatatcaccagaggatgcgtgacaggaccgaggatcaaagggaaagagtggtagcaattgcgttggagtccagccagtcgacaccgaccactgtattg

SEQ ID NO: 365540 - DNA, 233 bp, Zea mays
ggggggcacaattaccatttattgaatgcgcggaaagaccaagaatacctttcgtttgggcaaaatatgggcaattaatcacgttttttctgctgggggggttttttgcgaaacaaggtacaagacaaaacaaggttttaccaccaccaccaccacgaagaaaagacatgcataaaaagctagcttttgcaaaggggggcccctgaaagagaccagagctttgaacaaattaa

SEQ ID NO: 365541 - DNA, 341 bp, Zea mays
gatcatttatacttgtacagtttagtcttcagaaaaaatagaaactgtcacatttactagttgttataagcttccatggaaatgactgctacgacgcatattcagtttatactactgaaagaaagctgcctctgcagtttcctttgcccaaattgcattttctctatagtctcaccgccgataacctcgtcgataagacccttgaagatggatcgttcaatctcccaaactatgccatgtagcatagtgtcgaagctcatccagtctttcgttccattgactgtatcctcatctaatatcatgtttccatttctcctcctccccggggcattttatttgcc

SEQ ID NO: 365542 - DNA, 151 bp, Zea mays
cacacggacctctatatataacattgagcatttattcctttttcaatgcaccactgctcaataacatttcaatagaacaagttttcgtctatgcatattacgaggctattttaactgaccattatcctaaacttcaccaaatgtcccaact

SEQ ID NO: 365543 - DNA, 238 bp, Zea mays
tagggacaaaataaacaaacatttatatggagaattgatctccataatatcttgtttccaacaattaaaactaatgactgcatgtactacaactccgatcacatgctaatacgtctgaactttgatggttcacaacaaaactgacacttgcatttaaataccttagcttgaccttgcttatccatatatattgtagaatacagttctttacgtgagttccaaaccattatatattgga

SEQ ID NO: 365544 - DNA, 157 bp, Zea mays
tgttcctaaaacatttgcaaaccgtactcgttggctccatataaacgttgtttgcccttatgttgcgagacagactataatcaaagactcactttgaagcccgatacattgtaaaaatggtcttgcggattcctatgccggccataggcaaaactga

SEQ ID NO: 365545 - DNA, 340 bp, Zea mays
gcccggttctgtgctgctctcttggggaggttttcgagcgcctgagcgtgggctttcccataggacttggagcaagcccacggtgacaacgctggaagcgaactggcctattttctagaaggccatcatggatatccacctcagggaggcttctgagtcaagcttgatcttctgacctgatcgcccaccaagcgagacctgttggcctacaactggtgtcaatagcttgccaagacattccttgagcgcgctgatagatattctatgccacttgctgctgtgaaagtctcccgagggacgtgtataagcctggggcacagccagcccaccacaggagctt

SEQ ID NO: 365546 - DNA, 512 bp, Zea mays
gactcctccgcgctcgccgcactgctccgaccatcgccgtcgccctcggccgccgcgttctcgctccacggctcctacttcggcctgcaagagctgacgtcgtcggcgccgccgcctccgcagcagcagcagcaggcgggtacctggtcattaggggcgttcgctggcgcctcggggctgccctcctcctcgtccccgcgcgtcgcgcaagccgactcgggcacgggcgggcggcagcaggctgctgacaccacgacactgggcggcgcgcccgcgccggcgcagccaccgagggggacgcggaagcgagcgcgcgcgtcgcggcgggcgcccacgacggtgctgacgaccgacacttccaacttccgcgccatggtgcaggagttcacgggcattccgtcgccgcccttcgccgcgggcgtcggggtcgggggccccgacgagtcgctccgcacccgcttcgaccatatcttccccccgtcgtcctccttcctgcccgcgtaccttcctgc

SEQ ID NO: 365547 - DNA, 179 bp, Zea mays
aaaaggggcaaagaaatatatatatcacgtttttatttggctccccctccgggtttatttttcaccaagggtaaaaattaaatccccttagcccaggagcgtccatccaattttaacccacatccctccacccttaacccaataaaacacctttggttaacaccgccaaaaccaacatg

SEQ ID NO: 365548 - DNA, 376 bp, Zea mays
ggcccggtgcggtactgctgccttgcggaggattccgagcgccggagaggggttcttctattggacttggagcaagcccacggtgacaacgccggaagcaaaatggcctctgctttagaaggacatgagttcgatccaccacagggaggcgcgcccgccaggctccatcttcggatctgatcgcccaccaagtgggttgagttcggcgagagctggtgtcaatagttggcatatgctgctggtgtgccacgattgctacttctgcacgatgacgagagtttggctgcaaccgatctaaaggttacagcgagccgcatgtgatgcggaaaaatgaaattagctaggaattcttttttaaaaactgtaagggaaattt

SEQ ID NO: 365549 - DNA, 175 bp, Zea mays
atgagagatagatcattaaatctatttttaataaacttatttgaagatgctaatatttctacaaacctagtcaaaactttaaaaaaaacttgactgacacgacacttattctgaggcgagtgatcgagtaacttctatcgaccttcaagcatgatggttgtcgcactgtcaaaca

SEQ ID NO: 365550 - DNA, 507 bp, Zea mays
cgaactcctctcaggtcgagcctagggttagggtttcgtccctccggccccgattcgaaccaatccgcctcggcctccgccgcgccatggccgccggctccatcgtggtggacttcccttccatgggcgccgccctctgcttccccagcctcgattcactcctccgcgactccgcctcgggcttcctcgctgccgtctccaacgccccagcccccggcgcagccgacctcaccaactttcaccgcgtcttctcgcgcgtcctcagcgcctacccggacccaccgctcgaggctgtctggttcttctccgcgctctccttccacgaccgtcccgacgacctccgctccctgctccagctcctctccgccttcaccgtctcctcgcccggcaccgccaagccgcttgcccttctcgcccctgtcgtttccgagctcttccacgccgacaagccgcgcagggagaccgagactcctcgtgaggccgtcctcagctacatcagcatctgca

SEQ ID NO: 365551 - DNA, 216 bp, Zea mays
ggccaaaacttcaccgctttgaaaaaaagaagccggtttcaccagccgtaatacaaaaaataaaggcactttttttatataccgagagggaaacgtaaactaaccattttttattccccaaagctcccgctcttgcaaaggacataattttccatggaataagtggctctgcgcccctttgacttttataaggagcaaccaactgacggcactggc

SEQ ID NO: 365552 - DNA, 473 bp, Zea mays
gtgctccacgtgcactgttccacggctgcttgcctgctttgctttgctccgcctgcttcggatgtgcagcccgtgctccactgctccgcctgctttcttttgctgctttcaaattcggctgcttggaaagcctgctgcccttaattttgggtcgtgctccgccactgctgatgagtgatgactgtaacaccacgcctgttgtttgaatagtcactgatgcccgcattattaacgagaaatcgagcgcgtcacctagatacgccgaaatagcgaacaagatgcacctaatgctaagctagggtcacatggagcccacgcggccatgcatctgtgttattgggctaatatcaggcgatttcgagggaatcgctggatgcttgctcaaagaaacaccaaaaccgaggaatccagataacccgacattcgtgctcccgagctagactacagctccgcacagctcgagcgcgatgcgc

SEQ ID NO: 365553 - DNA, 254 bp, Zea mays
tgatttttcgggatggatgccggaaggtttctgcatctggtccgtggagaagaaaagaagggcccttgagaagaaagaagccccactaaagcgggagcagaagctagaaacagcttttaaggccaaggttgatgcataagcaaaggcgatgaagctcaattcaagaaagcacatgaggagaggagatttgctctcagactctgatagtgactatggtagcgatgttgttcgaaatcacctgaattaggaagaac

SEQ ID NO: 365554 - DNA, 289 bp, Zea mays
ggacggccccaaaaagggttaacctgcagaggggggactttacaacgctggattagcagactagtacattttcggggggacattttggggccttttgagcacataccctagttgccccttacaaaacattacaaagccaacaaaaagaaacccaccgaaagggggggggaaaaaaaaaacctgttggaagggaccaagacgacctttgggcaaccaccggtccctaggaacgtcgggcaacaaaaaaatccagggtttaggggggccggcgccaggggcaacccccctg

SEQ ID NO: 365555 - DNA, 254 bp, Zea mays
aacaggaccggggatgaatttagctcccaattttgatggccctgtaaatgcatttaggggccagtcctcaccagattgggatcccaaacaacgggtaaaaaacttggggtcctgcaataaagggcgaagtaaattggccatgcagggaacaatttgtcaaacaggttttttttttgccagccggtagcaagccaaggaacctgcccggaatgcaaaaatttattttgccgggcacggaacacctgcacctttgg

SEQ ID NO: 365556 - DNA, 237 bp, Zea mays
ggaccccaaaagaagggttttttaccattccgcatttttgcaaaaaaaaaaaaaaaggctcaatggtgaccactgaatttttcagtagtctccttgatcctggcatttcctgggagatgaaaaggaattttgttgccttgcccatgctgtaaaaccccaaatgcaaagttgttaatgcagtactaaagatgccctccatttccatgcagttagggtttgaaatctgtgactgggggg

SEQ ID NO: 365557 - DNA, 274 bp, Zea mays
tgaacccatggtgctctccgtcgctcgccgtttttccaccaccccgtgctactcctccgacgccgacgcgccgccaaagctctcgttcgctgtttcagaacccgaagccttgaccgctgcctgtccgcggagtcgaggagctcgtcgtggggggccaggcccaggccgaggcagacctgggaggaggaggctggggcgctgttgatgcggctccacaaggggaggttcctaccgggccctgacctcttattggcgcctcacgctgtctcaccct

SEQ ID NO: 365558 - DNA, 236 bp, Zea mays
aaaattgccgggtcggaaggggccgagccatatccattatcattttaattgggggggggcttttattaaaccgctcggacatcccctttttgttgttatagagaagccggccaagaaaactacccacaatgtttctagccaacttaagggctccaaaattagaacgaaaataccttggatttgtacaccatagcttttggattggtttcatctgacagggaaaggagccccaggga

SEQ ID NO: 365559 - DNA, 448 bp, Zea mays
cttgactcggatactgttggtacaatttttgagctttcagtgaatcttcattcacaaatactctatgatcaaaccactatgcctgttgttttatcaaacattaagaaaaattaaaaggaattcttgttatattaaccatttcctttaggcggacataggttgaaattagttttatatgtatttacttaagttttttcatgtgctctggacaccagaatattgtgcttttgtatccctaatagtaaagaaaataccgcgttccatcaaaataaaatgcatatctaggactattgtattttttacgttttttaattactattattcgtctcatgggtctagaatctttccaggtctttctattggaggcttaatttttgtacaaggaagtcctgatggcattctctttcgtgctattaattgccccagattactttccgggcatggtttg

SEQ ID NO: 365560 - DNA, 301 bp, Zea mays
aacattcatcacagatttgaaaaggggggtccgtatagctgaaacacaaagatgtgatggggcttccggaccaaacaacaatgtccttgctggtagtgcatgctaggatagttcttctagtccaaacaacaatgtccttgctgctagtgcatgctagttgcagagtaggaaccactgggccaattgatagcttcagaaagcgccagaaatgtattcatatttgccatctctgattgaagatcgccaaatctacagtcacgtttatcagaatagtagaaattgggcccaactaccagaacca

SEQ ID NO: 365561 - DNA, 347 bp, Zea mays
tgcgaagaaatgatactatgttggagtgctaaatgaccgagctttgtgactggaacctgtgggagcaaatgtgaattgcctgtgagatgtttgacgatctgaggcatgcgagcctgtggatgaagatgcagggttacgtacttgaacaacaatgtgacctgtgtagctgagaagcttatgtcgctgggacatgaaacggtaccgaacgttgtactaactgatgcttactcgagattggcatagctagaaatagaagccggtctagagcatgatgaatgtgtttattggagcttgaatctatgtatggagagcactatgagtgttcgactacagtggcacaaaggaat

SEQ ID NO: 365562 - DNA, 317 bp, Zea mays
acgcttaatactttaaataaacagatgcgggcatacactgaactgtgaactggaaagtggaaacaacactaaactcaatcaaagctgagaccgacgaattacggccaggaccatccaactatagcctatcccagtgtaagctggtcgatgcatgagtacgagatatgttctccttatccttatcctcaactagatcttagaaaattttgttacattgctgatgttaatttcaaggaccgcgccaccatgtacccaaaatagataccattgaacgctcagcgccagaaattttactgtacaggatctccagcaacttt

SEQ ID NO: 365563 - DNA, 301 bp, Zea mays
tcatcccacctatcgaaagggagaagacgagtcagataggcccgcctgtgaagctccattggttcttgcccagtgttcatctaggtgcatgctttgctccggaattcccctcttcattgaatctgatgccaatcgtttttacgatacaaaacgggccatttccgctacagaaaataattcatcaggaatgggaaaacgaggccacaggctgttttgaatacaagacgaccactatgtcggctgtgtgtggggcctcatgcgcatgctttactttcgcccagaccccaaacttttgctggat

SEQ ID NO: 365564 - DNA, 265 bp, Zea mays
ttaatattaaataataaggctacaaaggatagacccaagaggaatataagggatatagttggagacaactaggcttactatctgaccttttactataatctacagggggaaacaatacaaaacacacggtcggctagctaatgcctaaaaaaagagcctgcagctatggaacaacaggagctcaagagaagcgtttaaccggggggcagcgctaccgttcacaaaactccaagcggggtcatcctggcaaacataatgtacatgg

SEQ ID NO: 365565 - DNA, 195 bp, Zea mays
cttgcaccaagcgtgcctcttaacagcaaacattcttaatgagcaaaaacagaaaatgaaatgacagtctagcgacaactgcaaaaaaaaaaaacaatcctggggaggtgcataaaaatggcaaaaaggatttcactagataatggctggtcaacaaattgggatggctgattagatcaccaaatttggcaattg

SEQ ID NO: 365566 - DNA, 280 bp, Zea mays
acaagcaacacagtgaggttaggtaataccacacactagaattggaaccaaccagacatgtgactgaccaaacgctcgcactccagagtatggaactacacctacaactggaactgcaacgagtatcgtcaacgaagagtcgaagactagctaaaagaactcgaagtctaggaacttccctccggactcagcaccggaagaagccccagaaatcctcttgctgccaccgccggcgctgttgatctccactctctccgctggcgccggcgccggcgccggc

SEQ ID NO: 365567 - DNA, 245 bp, Zea mays
accaaaaatgttttcaggagggggggaaaagaagggggtaattccagatcattattggggagattttacggccccaagccttaattgaatttaaacatgcttgaagataaaaatttaaatttttgtcccgggggaagtttaacaaaaggagtttcacaccgggcccatatgaacaccctttgaaaacctggtcctttggccactggtttaacaataaaatcagttggtgaagaacattgggtttg

SEQ ID NO: 365568 - DNA, 302 bp, Zea mays
ccgcaggcgcaagggtggacgcgtggcccttttgcacgcagcctcatgtttttctccagaacccggatgtccgtgctccatccgacctagcctgctggagggctctgggtgagctactttggtgcgagtgatcaaaacccgattgctcaatgtagagcaagctcatatgtgattgatggattcgcccaccccgtgttggatcctgtctcggttagaccctgcctgcaaggctctagaggcattgttttggcggtccagcatcgcatgtgctgaatattggtccacagctggagatatcccaa

SEQ ID NO: 365569 - DNA, 357 bp, Zea mays
gggggacatcaagagtcccccccaatcaaccaaaaccaccactattctatctaccgatcaatctactctatacctgaagcactcactcgctcgcaaacaaccaagggatcatggatccttgagtagctccattgtccagtccctgaccttgacgaagcatttcatggacagcctctcgtacgccatctcgtacatccggaggttcatgtaggcgaagctcaagtaggtggcgatgcactcttggtgcctgtggtacagcgccgggatggtcagagcggccaccacacttgcgtagcaggcggtcgggaaatctgtaacgctgccgacgatggacacgctccacaggcagaggaaggc

SEQ ID NO: 365570 - DNA, 300 bp, Zea mays
cctcctgctaccgggccacgcaggatatggttcaattgagtttatacaaatacaactccatattactattgctgaacaccactaagttttaaacaacctgatcgatcgaatgaaaacagcagccaaaatttctcggtttgtggttgattttctttgcatgagttgtctttggaggggggggtaatctccaggggaatctgctttgttatttcgagtagaatggaatacttttgtgctctggcagatctgtgttaaatcagcttaatcttgctcggatctgacattgtcttttgttcgttg

SEQ ID NO: 365571 - DNA, 281 bp, Zea mays
gtccgaaagaacaaagcttttgtggttcagatgacacagatagatagatgattttgttcaagatgcatgcatccgtgcaagatccaagagaagaggttgcgagattgagtttcttctttgcttgtggtggtgttgaatcctgtatcgatcatgtgataatgattctggttgcaactaaatcgaagacgcacgtgataataaataatatctcattaagagacaaattggaaaaccatgaggaaacagctaaagaacgagcttgataacacaagacctaagct

SEQ ID NO: 365572 - DNA, 168 bp, Zea mays
aatacaaagccatgtgttcaagatgctaacaacagcttggcaacccctgtggttgctggtttttgtgtcccacacttaacacggtggattggatactaggggaccaggctagcttacatttccgctacaagcttggactgagccagggggagatccaacgagctgaag

SEQ ID NO: 365573 - DNA, 145 bp, Zea mays
agcatacaccacaaattctgaatggaatagtgttgagcaccaagcctaagaatttttgttatgagcataaagtatcactgtgagcaaagaaatgttgaggatttcctctacttttttttggaggggagaaaaagggggggggggg

SEQ ID NO: 365574 - DNA, 253 bp, Zea mays
ggggggatagttaacaatttaaaagatttacatacaattcttctcccatgcaacaaaaagaagaaaaaagagacatacatacagctctatttttttttactcctacctatcaaccatgacaaggttaaaaatgaccatacatggcattttataacaatgcagagcctgaacagcatggcagaaacaatagctgttgttaggctttcacacacaatcatcatgtcatcaaatagcagacatgaaatcaatccca

SEQ ID NO: 365575 - DNA, 228 bp, Zea mays
tccatgatccacagacacagcacggggggattttggtgccattcacattcttcttccgctccaaagggtgacgctcgggttcaaacaacagatggcacgcagtactcaccaagtcaagtccaagcatatgagctgaccacgatcaaccgaacagatgaatctcaccttggcctgcgtaatccataggcagccaaaactggtccaccatgactaaatgatgcacaccga

SEQ ID NO: 365576 - DNA, 177 bp, Zea mays
ccagaggcattttcagctaaaataaaacctgtgaagaccatggaaataagataacaactcctacatggtgcatttggtacaagtttgaaactttgccaatcaccagtagtccttgcatgagcaccgtccttcactgaaatggtggaaacggttacggtctctaataatcaacttgcg

SEQ ID NO: 365577 - DNA, 363 bp, Zea mays
tcaagagcaagctgcaacggggggattttatagtggacctgcccacttttcccaccaagcaaacgctaatttgtcagacatgacgttctaacctgcggcgctgtccttgaactgccaccagtgcgaccgcaccgtctccctagcagctcaggcatgctcggacgccgacgcctgttgcacccgctagcggcggcggattcgaaggggagctggctttcaaccttagcctggagcatccagacagcgtcttgtttgcccatccctactacgacatccgggagccaagtgacctccacgtttgcttcggccccgcctacccggagctgttcgccccaggtctgttgatgtcttcaacttttttaa

SEQ ID NO: 365578 - DNA, 434 bp, Zea mays
cgcccgctccttgccaggcttcgccgggtcctttctatggcgcggtgcataggggtcatctgggtgcagattcacataggcgagcttctccctatcttatctctcactcgtggtctcgtgggggcccggggatccgatccccgacactcgggatatggatcgccgacgtggggaaaggaggcgctggggtggcagctacacccgcgggaggctagggaggcgtaggccgagcgccgatggccgggtgtagggggatgccgccgaccgcaaccgagaaggggaggtctgtcaccggaggaggaggtgcggcagcggccgtaatcgcaatcgtccgcgcgatggctgcagcggtggttggtgcagtggacgttcgtgccccttgcgtggggagggaggcgagcacatgaaaaggagaaagggagggaggcagtcgt

SEQ ID NO: 365579 - DNA, 178 bp, Zea mays
cattgaattagatcaaaaaccggagcccatccctgtatggcaggtttgccacagcccgaccggaattacaaacaggacaggggcatactaagaaaaggagcgctccaaatcaatggcctctaagtaaaaaggctatcttactttcctttgtgcttctatgtaccctaaacgactttaa

SEQ ID NO: 365580 - DNA, 324 bp, Zea mays
atttttactccaaattgcttcgaaggatttgtcagccaacatcaagagcaaaacaagggattccaagggagacctttgtttcgtaaatctagagctggtgtatagctaaacattttactagtgaatcctagattcgttagcggagctgctccatattcacgtgtttagagctgaaactatctcaaagcctcctatacaagagaaacaagaaattttagaacaaaaaatgaaaacttatttccagaaacattgacgagttcattgtttctgaatctgattggtaactgctacatgaaactagaaagtctccagggccaaggatgc

SEQ ID NO: 365581 - DNA, 341 bp, Zea mays
ctgctggcgtcctcgggtgcctttttcagcctagctgcacccgatgaacgggagcacatccctgcgataggcgtgcatcactaccgaggcagtggcatatgcccagatcagcacatggaacggacgcacatgaccgctacaagagggccatgccgggaccgatctatacctctacacatccaaagagcatgcagatcggatggaggggcacgacaaggaccgcgtggtccatggtcctaccggcgaccgtgccggtgatcactttagctgagaggggcaggaggacctgcaggttccgtgccgctttaaacattggcgactgcaactccggcagcgggggc

SEQ ID NO: 365582 - DNA, 376 bp, Zea mays
gcgttcgcccacgcgtgcggccacgggtgcgtttttgagtagacacctcttttttttcgacgggcacagtcgacttttaccaccacatacgtagaaaggcagaggcctttgccgtgatgcgaactgttggccgctaaagcggatccgtatgtgaagctcttctttaaggctacatttaagcgttttggtccacgggacaaactacgcgtcttaggcttcctgacttgatcaccggagcacgtaaatgatgtggggggaatgacctttatcgaccactgttgaagggcggaataaaaacatatcttcatgtatcggcggcattagctcagacgtgtcgagacatggcatggagctggtggaaggcaatctgggatca

SEQ ID NO: 365583 - DNA, 353 bp, Zea mays
atgaaaagaaacacaccattactgcattgcttttaaaggcggttgcgcttaatggcagcattcgtcagatagaaactcaagtgacgtatctaaggcgccaaaatacacagcttttcactgcattgaaccatgcacagaaatctgcttggtctaatggcactggattcgctcatcgtaagagcgttccagcttcccaccattttggttatagctaggacaccttcaatcgggtggatgatctggacattccagacagtccgcactcagatccgtcagacaatatgagtgatggatccgaatcacactgagtacatgcgaccatgaaagctcgacaacaccatagaagagagtct

SEQ ID NO: 365584 - DNA, 437 bp, Zea mays
gatcacatggacgggggggctttttgactcacctccctttttttcccggcggactcccttgcaaggcgatgccagtcagacggatccagcaactaagccggcctctgaacggcccatgaacatacatcaacggtgcgagatggccgatccgggtcagacttcacctgcttgaaagtccaggtcatgagcgccgtgttgatagggaggacacagtaccccagctccattgtccgtccgtctaacctgagggtgtcgtctttagctgaaaggaggagagcgacccgcaacttccatgggtctttcatagctggctactgtggcttaggctgcgtgcgcaggggtgtcatctagacgttagactatgtgaactaaagaattaagatcgttggaagcagttcgatcgataatgacttcagcgaaattgttattcctatttt

SEQ ID NO: 365585 - DNA, 309 bp, Zea mays
cgtgccacatctagattatgttttgctaaggggatgcactatgtgagggtgggcgggatgttcaggtcaagtgggttcacggatagcgagctttatggagagactattgatcgtccttgtgttcttgctataaggttagatcaagcatcgtcaggcaaagagcacgtatgccgaggatgggaccgctgtgtaccttgcgatgctagaactgctgatcatgaaacccaacatgactaatgcatcacactgccatttaagtgttcaccagattatatgtatgtacgctgcttactattcaaaatggcaact

SEQ ID NO: 365586 - DNA, 225 bp, Zea mays
cgtccggacacggctcgagggactagcaggaattatgattgcaccgactctgctcgttaaccccaacatggtgaacgtatgaaagtacaacttggcgaatcctggggctatcggcctacaggatctacggtttagagatcttgaccaataatgggctgatcgccacttcacggccgacagggggctctgcacctgcgacctccgactggcaggaaccacagaaga

SEQ ID NO: 365587 - DNA, 404 bp, Zea mays
ggggaggataccccggtcaacctgggagttagtgcaaactagtgggaggttgtgagcacggagcgaacgcggaagacgagacatgctactagtgatgctgctgacgtgcctaccagctttagtgcacgcagagtcactactaactagcaaatatgacgccgttccaccgacagcaccgaccgctcgtggtgcggggcacggtgcagatcccgtgcgtatagagcccggggcatctgcaggagacatatcttcaagagctttgcggggttgcttaagaaggccctggagctatccgtcctatgcagactccagcgactgcatcatggtgttctctagcctcggcatgttgtacaactctggcaccaccgtgaccatggaggagctgatcagagaggtacaaagtt

SEQ ID NO: 365588 - DNA, 480 bp, Zea mays
ttcctcgcgagaacgagaggctagaccgcatccagtggtggggctcggtatgggcggaagcgaatgcgccctgggcgacgccgctataggcgaggaaaccctaaattacgacggcgatgacgttgagatggccgacgccgactcggatacggaggaagcccgagcagctgaggtctccgctgcaactggaggatccgccggaggtgttaggcaggcggagaaggacggaccggatggaaagaagaagaggaagaagaggaggaacaaagggaagaagaacaaagggaggcaagatggggcgcccaccaacatcgcggacattaatcgaatctgccttccgctaccaactgatttggcccagtaaaatttgttcttaacacttgcaagcgcttgaaggagaagaagacgtaccttgtctggaatgcttgtggctgccttggggtcactgctgtcaatgatcttgttagagaggtggaggct

SEQ ID NO: 365589 - DNA, 329 bp, Zea mays
cctcccgaaccgaatcctttcaccggcccaaactttagcgcgcaccttttttcgtccgccctcttccatggccgcgccgggctcggtgtaatgataatgtggtgagcttgttctctgaacggtgggatggcactggcggtgtcgtcggaggccaacgagtcgacgggtggtgctgcggtgttcctagggccgttatcgagggcgtcggattgccacggggttcatgtacaacctgtccttgatgctgccatcgctggcctatgtggggttcctggcgtggtaaggcgcggcggagcttccgcaggctcagctaccgccgctctcacgta

SEQ ID NO: 365590 - DNA, 342 bp, Zea mays
cgtccggctggagtcattgggatggccgtgtatctcgggaaatcaaccaagtcctctattgcgtttgggtggattgctagcaaaagaacatgtaacgccggcccttgagggtatggcgtggatcacggatattacgtggaccatatctagggcagtagttctggatctcctgactccgagcgaagctggcacagacgtttttctacgggctgggaccaccggccaggacttacggagatctttcacttgaggccgctaatttcgaatggggtcttgtgacctgtccttcattggattcactgccatcgggcccttgaaaggattcggaaaactcgggttcct

SEQ ID NO: 365591 - DNA, 155 bp, Zea mays
tcgacaatcagctgaatctgagccttccatgtttaacttgcaggtttctaggaaacaacgggtgacagtattgcctttccattgtcacgaggatgaattgatttctgtttctggcccatactgatggtacaaaatttttgtaaatggcttaaaag

SEQ ID NO: 365592 - DNA, 367 bp, Zea mays
cctgccccggccgcgctgctgcacttgtcgggggatctgccgaactctgtcgccggggagctgccgcggttccagcacgggtcccagctcctgtgggcctagctccggcgggggccaggcggaggctcgatagctctggctcctgccgaaggccgtcctcctgaagctacaggtggaccagtgccgagcgctcgaagtccgacagcggacatacgaggccgtgcggcatgttcaccggcgacgtgttgtgccgagtctccgtatccggacggaggctcctgtgccgccgtcttgccggaccggcacgacgcgttaatgcctagaacgaatttgctgggcctcagtagcacattgatcttaacctgga

SEQ ID NO: 365593 - DNA, 256 bp, Zea mays
gccgtttagggtttcacagtcgagccccgatccattcgagcgccccgcaccgccgtcatggagtttgacgaatacgagtacttggagaaggcggtagagcccgctcccccacaggccaatggttccggcttcggctccggtgagaaggaccgcggttcgcgccgcctcgagggcggttaggactcgatatcgaactgctcttgctttgggggaggaccgcgaccggtacaaggcacccgcagcgggcgggatgcac

SEQ ID NO: 365594 - DNA, 245 bp, Zea mays
ccacgcgtccgtggacgcgtggggttttgtactgccatctgcttgcttgattcccagaggtggatttcttacctggaaggtaagggtggctctgtttgagtttcttgactgaacggatcaagatgaaggggccatgcttgtcgatgtggtccctctgaaggagctggccaggaactgatttcccggactgactgatcagaatgcgggaggcaggaccgatgccccgggaatcaaccgtcctttcc

SEQ ID NO: 365595 - DNA, 332 bp, Zea mays
ttttttttttttttttttttttttttttttttttttttttttttggttttttttttttttttttttttttttttttttttttttttttgggcccaacattagcaaagcccgcttccgcattgtttaaaaacccaaaaagtaaattcccctgccatccctggagggggggacaggtattgacgatccatcgctttcccacacgtttattgccataacacccgaaccaccttggatcacttcacattatattcatccctacgggggcgagcgtcccaaaaacccttttttttatttcttcccttacaaaccacagggtttcctcccccaccccc

SEQ ID NO: 365596 - DNA, 367 bp, Zea mays
agtatgctgagtattcaacttatactgagaaagagtgagtaatacaatgatcgatagatacataagctcacaatctcagtcatggtagatgcaacctgatgacaacactcaactattgtctgcttattcacctgtcatccagtgtagtgaggttctaggtagcatcagcatgcccataattgtaggtcacagaagccaattgcgtcatcatcatctgatttcatcacaaggcttgaccacggtggaatccagctcacttacaagaagcttctcaagacacttattgttcaggtaagcagaacatagtttgcattcttctctgcgaatatgaagcgtgaacttggtgcagcttctctattccattctt

SEQ ID NO: 365597 - DNA, 271 bp, Zea mays
ccttccatcctagacctgctcccccgtcgtcatgacgaccttgcgtcggtcgttccacacccgccgaccctaccatcgcagaccccctccccattgctcgatcgatcctccatcgccccccgaagacaactgcttctcggatgttagggctcctgccacctacccatctcccttctatcctatattcttcgtgccatggccaacgccttctattcagtggcttacgttagcgcatccgcccaccttcttccctattatctcgatagacatg

SEQ ID NO: 365598 - DNA, 243 bp, Zea mays
gaggaggccaagcgcgcatcggtgaagccatatttaagctcaccccctccagttcctgccgatcccagcgagccacagccagtcccgtgctagcttcagctaatcccacattcacgagctcgcctcccagatccagcttcatctggttgaatactctacttcggaagcgctggtgggcggcgtggttcggcgctttgggggcctgcgcgcttagttcatgcgtttccccggactctctgcctg

SEQ ID NO: 365599 - DNA, 370 bp, Zea mays
gtccgcccacgcgtccggtctccaggggctatttatgtcggcggtcccggcccgctgcggaggtcgaggaagaggaggacgaggactagaagctcaagatctgggaggagagggagcaggagaaggagaggctggtcttcgcgttcaagggcgccgagcgcgcctgtgacgcggacgcgctgatggcggaggtgttcgacgccgtttcctgggtgcgtcgagcttacgccgagcttcaggacgcgcactgtccctgggaccccgtcaagatgcggactgtggacgcggccgtggtcgccgagctctgccacctcgtgtgcttccgtgaccgctttcgtccgttccgtagtcgtgggccacatacctcgcc

SEQ ID NO: 365600 - DNA, 104 bp, Zea mays
ctggaacaacatttggagaatgtcaaaaaaccgtttgtcaatcctgtgatggatctgggatcctctacacgtaactttgtcaagctcaaaagtatttggcagaa

SEQ ID NO: 365601 - DNA, 179 bp, Zea mays
gaggttgtggacaaacatcgcattagatttatttgtagcgccggacacaatggaccggctttgaacactgtgggtgctccaggtgggactagtacacgcatttattggtgttggtgcttatgtttcaccagccatggctgctggagctcactgtgttgtaccaccacctgcaaagggaa

SEQ ID NO: 365602 - DNA, 232 bp, Zea mays
cccaaatccaaacgacacagggctattttttgcggtttgatcgaggtcgccgccccccgaaccgtcgtcttgtctacccctattgtcgacgtcatggatgaggtgcgacaccacttccaggaccgcgatgcgtatccttcggtctgtgcctgtggcggtcgtccttgaagcggaagctggtcgcgtaggcgggggacgaggtgggccccgtggcgcgggtctaggcggagga

SEQ ID NO: 365603 - DNA, 297 bp, Zea mays
tcgtttcaacttcatgatgctggcacaggttgagggtggttatatggatcaccagggtcctgatcatacaactgaagtgtctggcatacataaggatttgactgcatgaagacacactatcgagctggacaataggtgctgcagttgcaagaaattggagctcaccgggttgccttgcactcatgcattgagcaatataggttgcttcaggaacctggaatgggaagattatggcgactcctactactctgtgtgaaagagcaagtatgattatgtcgggaagatacctactttgca

SEQ ID NO: 365604 - DNA, 437 bp, Zea mays
  unsure (1)..(437): unsure at all n locations
tcgtttacgcgtgcggctgctcacacacacacacacacacacacacacactctacacgcgagcgagaccacgcgccggaccgacgtaagccgggcgccggcgtcgtgacctggagcttgcgagctagctgtggcctcgctgactgcgccgactgagatggacccgcgctttccgctgccgtgccgcggtggcgccatacacgggcggcggcggcagcgccagagggcaccaccggcgggcccactcggagacggtcctgagcttccacgacgcggacctgctgctcgacccggacggcgacttcttatccgacctggacttcctctgcctgtccgacgactcttcgggcgactccgaccgcagcccgccgncgtatacgcagtagtaggcggcgcaggcttactcggccccacgtccgaccggagggacccacacgc

SEQ ID NO: 365605 - DNA, 428 bp, Zea mays
tttttgtttttcacgctcgatcccgacctcagcggggttgactctgacatgtcgtcccctggtgcggggtcggaaactaccaacagtggcggcgggggcaacaaggcgtcctctggcttcggcctcttatccccggagtctgcttgctttcagccgccgccgattgcggtgctgttccatgaaggcattgacacaaagccccctattgatacacagtcgaccggtcttctccaccagtaccagcaccagacgacccccgacacaaccttgctcatgtacatcccctcctgccccaggtacaattagcagtaggcactcgtgcatccaccggtcaaacgtcatgaatccataggaggcgacctctatctcgcccgaactaggcttctgccgccgacgccgacggggcaaggtcatgcctttacaccact

SEQ ID NO: 365606 - DNA, 225 bp, Zea mays
  unsure (1)..(225): unsure at all n locations
ttttcgttttcgcgtccgnccacgcgtccggaaaccttgtatgacaccatgaagcgccatcatccatcgatcactatagtggatggggctagaacagattatgcagcatctgcacagcatatacgagtaccagcactagacatgtctaatggacttgatgaagaatacgctggttaccactgggagcatgaagaatatggttgggaggagagatgtggagaccct

SEQ ID NO: 365607 - DNA, 123 bp, Zea mays
atatgtcaatcaaaaccaaggcaaacaaatttacagaaaagtgaagatttaaaaacaattgaaactatttgatatgtaggctcctggatattactcagcactccaaatagacagttcaaattt

SEQ ID NO: 365608 - DNA, 440 bp, Zea mays
atcgtttcaccaccacccgcctgtcccccacgctagcccacgccgcctcctctccctccccgtctcccctacgagggtgctactaccaccttaccggcgttcgagaccgaggtggcggctttgccggacaaggacgatcctccgcgggcgccgccgccacagagtagatggacgcggagaggatgaatgccctggaatatatgttcacgcgactgtccctcgccgacgacacgtgcctgaagccggtgctcgcccacacccctagctgccatgcgtcgtcacttcgcttccgtgttctgaacatctgtatgacggcacagcaagtaggccccttccgtttcatctccccatccgcctcttcacttccgtgatgaagcatagaggccagcacgcatgcggcgagctccaacctccaaaagggttgcatcagttgaagcatc

SEQ ID NO: 365609 - DNA, 219 bp, Zea mays
  unsure (1)..(219): unsure at all n locations
tttctttcacgcgtccgcccacgcgnccgcagacgcgggttcattcccggaggctccatcatccccggagggcgcgagccgccgcagcttgcacaagctatgcagatcccgcgcaccctattcggatccaatcacgccctctgccaggcgggctgtttgtagaagaatgtaattgccaccacaagcctgtccttcaaggcaaaaaggtgaccaaggggg

SEQ ID NO: 365610 - DNA, 400 bp, Zea mays
atcgttaaaggcgagtcgtcgtccgtccacgggagcttgcctccctctcctctccggccgcgcttacctagcccggccccatcctacgcgggaagcctacgaccgtcagacgatgagcgcctgttctgccagatgggccggcgagtcaactggacaggatattggctgcgccgccgagggctatcgggcgacggagacttctggggccgactagagggccccctcacacctatacccgttgatcgtggaggcgctcgacaaccgtggccaccgtctcatggttcgacggatggaaccggatatacgaaactttatgcataaccctaacctgcacgagttcgaattacataacttgccgactccttacctacgcttaagctgctcatcgcgttgaacaaca

SEQ ID NO: 365611 - DNA, 179 bp, Zea mays
tttaattaggcgagagcaccaagaaaacgcataacaaactgactgcaagaggcacgagggaaaccggaacgaggaaggaaacaagagacacaccaaccgggaacccaacccgaggaaccagacgaagcagccgacagacgcaccagaaaacgccagcagagaaggccaaccacgagcag

SEQ ID NO: 365612 - DNA, 294 bp, Zea mays
  unsure (1)..(294): unsure at all n locations
ctcacacgcaggcggacgcgagcgcggacacgcgcgcgacccaaagaggcaggcaaccgcgacccgcgccgcggcagagggacccaaaaccgaggacagcaccagcaagggcaagggggngaacacagaccaagccggccccgaagcgcgaaacacagaccacaaccccaaccggaagcggcgcggccccaacgccacgagcaagaagcacggagccaggacccacggggggggggaacaagangccaacaccgaagaaacagagaccggggcgagggagcccgccaaaaacaa

SEQ ID NO: 365613 - DNA, 383 bp, Zea mays
tcggtaacgacccacaatcggaaagcctgcgggtccgactggattgagcatttcacctctcgagaaaacgcctgatcaccaaactgcttggagctcttgccatctatgactctgaggtacgatcctgatagagtcctcacttgccgatggtaacgagggagggcgggactagaaaggaaacggtaggtggtgctacgccggtcaaggcgaccatgctccctgccgctcatctatgaactgttagagcagtgacgatcactgggactacctgatcattttgagtgaaggggaaatatgcatcttcttgctgtttggtactaaaaccagtatcatttggaacagaagaagtactaaaaatgaacataagcatcactatacagtat

SEQ ID NO: 365614 - DNA, 117 bp, Zea mays
tttacgtgtacgccagcgcggagggcttgcggtggccaaagaattccatcgcgtaggcgacaaaaccgccgcttggaaccctgggaggagccaggaccgacgaactggacaagtact

SEQ ID NO: 365615 - DNA, 278 bp, Zea mays
ttcgtatcttcctactctcgactagcaggtcatggcaagagatggagcacccgggaaaatagaacgtgggagataaacaggaagagctagggggaatactaactacaagccggagtagaaggaagagagtcagtctgtccgtgactgcgagagaatttgttgggtgtggtgtttgttgagatcacgatgatgggaggcggactgttcgtggatcagagagtggtgtttccaagcgatgacaacgtcgaggatgtgctgcttcagaactgagaccagaa

SEQ ID NO: 365616 - DNA, 326 bp, Zea mays
cggccggaccggaacggaatggccgggtcagacccacgctttcgttcacggcaggcgcattctggttatgcggaccaaggattttacgcgggaccgccccgcttgcatggcgacggccttcactacgctggtcctctgccttgtcttcctcagtctctgcctgggcggcgtcgccaggaacgacatctgatgcggaggatatctctccggtccaggagtacctgcgtatcgacaccgaccagccggcgtgagactacgacggggtcgcggccttcctccggaaacaggccgccgatgctggactagaggcgcgcacgcttgagctc

SEQ ID NO: 365617 - DNA, 349 bp, Zea mays
tgtcgtttatcctctcccacacgacagcaacaggggtgttttgtaggacaaaacggcggatgtggacggcaccaaggagcccgaggcggtgacgaaagaggacttatccactgacaaggccggcattcactggaccgacccgccgccgccgccgacgtcagccgacgactccaagggcctggccatcgtcgagaaagttgcagatagaacctgttccagagaagcctgccacatgaaagcaagggggctgcaatgacagggatctagctcttgcaagggtggaaacacaaaataggaactgtttgatcaaagcttgcgaagagaatgagaagacaaaagctgcgaacaa

SEQ ID NO: 365618 - DNA, 360 bp, Zea mays
gtccggcgccctcgccgttgcttgctgggtcgcatctatataaggtgacgccttctgcccagtgcgagcacgcctacacttgcactgcgggctgcgggcctgccgaatttggaaggtgtcgagatgaaatatatccttgcacttcatgccggtatgaacagcgctggccgcaccaagcggtgggggcgggcaccggcgttcctgcccacgaccacgaccgctggttcccgccggaccgagcactccatctgctgctgttattgtgactgcaagatatattccttaaacgacgccctcttcaatatggggtggaagtatgctagatatatgagagcatggctttctgtaggtgttcatcta

SEQ ID NO: 365619 - DNA, 183 bp, Zea mays
tttcttgtttgggtaggtttgtaaaagcgtgactacattctgacggttcgtgtacgtctatactagaaaaacaatgtgatatgcgctgcataccaaacaacgtgtggtgaaaatttttagaattgttctacttaggggttgacaaggttctatacggacaaaatgattagaaggttcatatgg

SEQ ID NO: 365620 - DNA, 468 bp, Zea mays
gcttcgccttcgccgtaataaccgcgccaaaaaaggtacgccgtgtcgttcgatttcgtatccttttccttttttcctctttctctctctcttgcaacagggaccgggaaagggggataccccgaaaaggatccttccccgtgaaggaaccgggctccgagcctccctactgatcagaggttcgaaggctggccccccgaagggttcgacagccgcctaagatcgtgtgggccctacacccactactggtcagaggttcgaaggccgcccccccgaagggttccacggccgcctcaggctactcgggctccgcgcccattactgatcaggggttcgaaggctggcccccgaagggttcacagccgtctcagacgccgagcgagggatgaccatgggtacgtttgatacataaccaaggcttgggctgcgctttcgaggtaccctaggacatttccgagaccagcggga

SEQ ID NO: 365621 - DNA, 334 bp, Zea mays
ctggtgccggtgcgcccaccagtacgtatactgtcgggggcctctacggcgcgatgtgtgacgctgctgacgttgcaggggcgcggcagacaacgaaaaccatgcgcgggaagggggtcatgggctccttcagcaacggacgggccatgcggtagaagaagattgagcgcatcaaggaccgcatgcaggtgccccgctacacaccctgggccggtgccttcaagcgtatgtgaggtgcagactacgttcctattcggctcgctagggcacatagggctttctgcctcgagcggtgctgattctgcgggtccaattagttgcatccttggacggg

SEQ ID NO: 365622 - DNA, 511 bp, Zea mays
cgcgtgggcttcgccccggccgccatggactgcaccttccaggaccgccaccaccaggcgcccaccgtcagcgtcctccccaccttcaccgcctcctacgcccagccgcagccgcagccggcggcggcgcccggcttcgactgcctcagcgaggtctacggcgccgccgcgttcggcgggcccaatgctggtgactacggcggcgagatggggttccttgacgtcgtcgagcccaaggcggcgtcggcggcactggtggacggcgccgcgggcctcggggcctgcaaggtggagcccggcctggcggagagcggcggcgcgttcggcgctggcgctggcgctgcgccgccgccggccctggcgtccaagaagaagagggtcgaggggatgccgtccaagaacctgatggccgagcgccgccgccgcaagcgcctcaacgaccgccttttcatgctacgctccgtcgtgcccaagatcagcaagatggaccggacgtcgatcctgtgcgaca

SEQ ID NO: 365623 - DNA, 518 bp, Zea mays
ctttatccagtcccaccggcggcaagggcttgtggtccgaggtggagtcgacgagcgttgtacggcttctgatcgcgcgcgtactctggtttgcgcgtgagcgggctttctttgcgcgccaaattcaccgcgatcgacggtgcccaaaccgtcgtcgtgaaattcagcgccgtcgcctcgccgccgctgctgcttgagatgccaagccagacgatccggccggatgtggcatcgctggtgccggcggacatctacatcccgtcgagccactccctatcgccgacatcgcggaggagctcgggctccggccagagcactgtcaccactactgcaaatacaaggccaagatatgtttctccatttttcttgaatggcgtttcattcctgaaaatagagacgcctaaagattgttcagaacatcagctgtctccttgtgagccatagtttcatatagctgcatgaaaaccctgttttgagcttcctgggcaagacaatgatatgtgtatgtttcctcttgc

SEQ ID NO: 365624 - DNA, 366 bp, Zea mays
gctgcgcgggcgcacgcgcacgtggggtcgccggcgacggcggcgacggcggccgcgcttgccaagtctggtgcggtatacatgggctgcaactttggattcacttgggaacagagcgcgccgttcacggagcatcagaaggccgtgatcgccgcgctctcccacgccgtggtagaacgcgcattctcattcggcccggaaagaagttcaagggaggatgaaggcttggctgcctccgacaaagaatatgatttcgtggaggccggtggaatagatgtaatctaggtgaatacacatcagttctacacgtggttttcagaactggagccagctgtgacagctgagactgaggaaaaatatcgactt

SEQ ID NO: 365625 - DNA, 277 bp, Zea mays
tggccgtctggggtaaggtctccgccgtgctcttcgatatggatggcgctctctgcaacagcgaggagcccttgtgacaggccggcgtatacgtattcgttgagatgggagtccaggtcgccgcggatgactttgtcctcttcatgggcactggtgaggccattttccttggaggtgttacacgagctaaaggagtgaaagattgtaattctgaaagcgccaagaagagatttcttgagatatatcttggcaagttcccaaagtcaaattttggctt

SEQ ID NO: 365626 - DNA, 105 bp, Zea mays
ccgcccacgcgttcgttacgattcggtctgtgtatctttctgagcggatcctgcatgaatgggatgatgctgaagtgcatctaaggaatattggaaaccggttgc

SEQ ID NO: 365627 - DNA, 310 bp, Zea mays
cgtccgttgattccaaatgaaaagcatgctaaatttgcaggcgttttacggagtatcaacaacggcaaaaaaaactgttctatatcaacactggtgggcaccataggactaccacataaggaagtattaaagtgtaagggcatttatactgtcataattcaaggggatgtaaacactatgtcatttgcttggagcctaatgacaacctggagctaaagatgtactaggaatgaataacacttggcgttatctaataagagtacatatatatccatgttaagtactttaatccacctgacgtctggataca

SEQ ID NO: 365628 - DNA, 331 bp, Zea mays
cgtgcgttgatcccaaatgaaaatcatgctaaatttgctgtcgttgttgtgagttttaacagggacaaaaaaaacgtttctatatcagcaggttcggcacataaactaccaacatagggacggattaaatgtacaggcattactactgaaatagggcaaggggatctaaaccctagctcgtttgtttggagattaaaggcgatcttgaactaatttagtgcttggatcgaaactcactttgcattatctatttaatttccatattcatacatgctaagaactctaatttactgactcttgaatttttatgttcagaaacccatgtggttat

SEQ ID NO: 365629 - DNA, 117 bp, Zea mays
gggtggactcacaatcttgaacaaggtatgttttcatccactgctctgaactaaaaaaggcgcagagggtgtgttggaaggaatgggtgaaatgtcgattgagcaaaacatggggat

SEQ ID NO: 365630 - DNA, 358 bp, Zea mays
gggcttcaccggcttctgaagctcaggatttttgactcgcgccacactcaagatttatacatcaaagggcctggggcagcttgctgcgatttacaactatgttggatgccaatgacccttaccggcaaccctgcacagaacaatgtatgcaatgagcacctgaagaagaacgctgcttgggctcctgccaaacctcaggtgtgtacaacaagccagcctattagggcgattggatcaaaagacggcttggaccgtcatacctgtaagatcttcttcatcgcaccattctggaccgtggtggcagacccgatcgatgatcttccaaattggtgggtgctccgcttgcttacaagccaca

SEQ ID NO: 365631 - DNA, 236 bp, Zea mays
gagcagccgaagccccaccgaccccgccgccggttttcctccatatgctcgccgttgcctctacatctttgtacagcctatgttttcacataagtcgagaagagccgtggcggcagtaaccgtggtggtgaaagatctctgggttatatcgttgcaagcggtgagcaccccaaagcagcagagggcccagctgcaagtgcttcacctggtgagaaaccatgtgttgcaaaggctga

SEQ ID NO: 365632 - DNA, 284 bp, Zea mays
gatcctgcacagcataataactcgggcggctcgttctggcagaagatgagtacgggcactacacgacacagtttgtgctggggctcggggatgcgtgtgcatcgaatgacgtactggacaatcttgagggcaactatggggccctgtctacgcaaaagtgcatcaagcacatgctcgaggagggtctgacagaagcgctggcgcgcgaacccgcgaggatcatccatgagctgatccatgatcgcgagctggttaatgtctcgggtgatgagcatgggaactat

SEQ ID NO: 365633 - DNA, 147 bp, Zea mays
tgttgagcagccagcaaaacttggacaagggggaacttttaccatgcatcacacaatgtaaacagcgcagatgccaagggacaaattaaatgtgggtgcccatgccgcgtcattgacacatgaatgcgaggttcattcaaacattgg

SEQ ID NO: 365634 - DNA, 173 bp, Zea mays
tgtaagcctcgtcccgtcgaggatgcgagtatgcgacgagtacattgtcaaattaggcggtcaaagctcttgcttgttgaccagagattctttgaagtttgaattgctcatcagtcatcagcgcgtcatgtaaaaatcagatgatggtaatagtatattctagttctaggagc

SEQ ID NO: 365635 - DNA, 579 bp, Zea mays
gttatgtccggatatttggtagttttgtagcttattcaatgctcatgaaacttatgaaacctccactaagactggcccgagaaacacaaactttgaccaagataggtggtgacctctgctatcattaagagaaaggtttcccttgtatccaagtggctttgaataaagagaaaatttgaacaagtaatcccatgcaagtgttacatcataaaaaaatacattatctttactttagctggggaaatgagcagcaaggatgttcgtttccaggtagaaagctgtgtgtgagcctgtgacatgttatgagatttaaacaatatgagtttttgttactgtttattggccgcatctcatttgggagttttataaggcatgattggttgtccgctcgcgttcatccacgctctccgcatgcgttgaccaagtgacggacaatgtttggtttcctgtatacatgaggtcagagactgcacccgtaactgcagcgtaaactagaaataactcttctaactgtatgcacagatacgcacagaaaatcccgttttccggcgggccaagcgcacatgagccacactacgc

SEQ ID NO: 365636 - DNA, 446 bp, Zea mays
tcatcgcgtccgcccagtcagccgcgagcctggtaccggtgcagacatggcggaggagcctgccatcgtcggcgccggctacttcagctgcgaggtccacctggggaacctcatggcgtacgacccgtgttaccacgtctcaatcgccggctccgtctacagggaggagctgaggcaggagtgcctgctgaaggggacggtgctggctcacgcggtggtcgacagccctcttcgcgctgccgcccaccgaggaccttgacggccccatcgtgcacatcccgccacacaccggtcgactgccgctcgagaagcatctacccaagcccaagccaccgaccatgtgtgagctgtatgtaaaggccaaaggtattaccaagcgcaagaagaacaagcgtgagtgggacgagcgtactcagtcttgaagcgggcttatggctatgaccgtg

SEQ ID NO: 365637 - DNA, 364 bp, Zea mays
tctcgccggtctagagccggcagcgctgcggcggagcaccaaccgagctccgatcccaccccgctcccaaccgcgcggccctgtccatggcgcgcgcggtgcggcggcgagcccccatgcattcccgccgccggagcgcggcctgctaagcgacgacaattcctctccctctcctaaatccactcccccacgtgtcttcatgggccctccggcctacaccgcctccccctgcacggggtctgccctcttctccaacacccgagcgccgccgccgccaccgcggcttcttatccgatggggcccggggccgccgtcggccgtggggaggcacggaggccgcgtaacttcgtcgcaagagaggcgc

SEQ ID NO: 365638 - DNA, 127 bp, Zea mays
ttcacgcgtgggcaaacagaggatcatagggggagggttttcaaggcatatcagaacatcgacccctggccatgtactagcgatcgtgtgtctcagaaaggtcgactcaccggcggctacatgacca

SEQ ID NO: 365639 - DNA, 249 bp, Zea mays
cgtactcgtgggcggacgcgtgggcggacgcgtgggcttttgtttgctatgctcgttctgcattaatgttaccttgttcacttttgattctgttggattgctcattctgcagcctggttttattgcaaagcctcttgtagttcttgtgctaacatggggaattgattatcagactaagacttggggaatgtgctgttactcagctgaaagtttatataatgtggagaaactgaggagtttgacctacct

SEQ ID NO: 365640 - DNA, 252 bp, Zea mays
taaccacgaccagaaaccactcctttccatacttcgctagcagctagagaggttttaattcatgccctgcacgtaggtcggtctactctacactgatgatgatatgatagatgcctgctacgtacagaaccactcgtctactggtagggcgcgaaccactacttgcgatccaccccgtccgttcctggagcacgcatccgaactggccttgcgcctgtataaatatagtatgtaccagggagagggagggta

SEQ ID NO: 365641 - DNA, 109 bp, Zea mays
tagagaagtaaatgctgcggtctagcaaacaaaatcccctggggccccaatgacctaatttgttaacttaaaccccattgggatggcagcaaccatgaaaaggggaaac

SEQ ID NO: 365642 - DNA, 277 bp, Zea mays
aggggttacatgattattacatcgcaccagggtttaagaaccaatttacagggccagggttttccattcaccaagggcccggaacacgtttttacttttgcaatgccaagtatatgtattgttatgaaccgcactgcactttttaattttttttaggccacaggggagcacacagaggaaacctttgtcggcagttaaacccagtcacgaccatatttggagattcaaatttactggatcatgagataaagttggagtgctcaaaaaacatccaaat

SEQ ID NO: 365643 - DNA, 309 bp, Zea mays
ttgtttgagcagggagccaaaaaaatggctacgggcctacggctacgcgagttgcaatggctgcaacggcaagctcgaactagtagagacagtagcgctaataaataagcttgtgatgaagcaagccgccatgggtttcgaagaacacacgacagacgcgagacggagaacctggctggctggctggtctccagtagtgagtcttttccgccgaccggagtccggagcggagtgcatgcgcgcaccggggttggcacggcgccgaagcaaaagcagcagcgcgtcaggggtcgtacaggcggccgtcgc

SEQ ID NO: 365644 - DNA, 212 bp, Zea mays
aacaagactatagaactctggaacacgaattaaatgcaatacaaagaccatgagtgatgacacttactgcattgtctaacatatcataacagtaaactacagacttaacaaaggatatgtcatgggcattaccactctatcctcttccagtgctcaccaaaagttgagcaaaaattcttctgatatgatagcatcatgcctgcacaaatctt

SEQ ID NO: 365645 - DNA, 268 bp, Zea mays
gccaaaaaaaattggggggagccttggaataaccggaccctggaacaaacaatttgacagtcagaggcaatgcaactcctatctcacatttacaagccaaatccaactcctatcagttaactgtcccgaccggcaatacaaaatctaccaaaagagaaacagaaactaggatctggggtagctttccaccgacacatactagtttccatgctagcaaaatctaccaagaaggctgttctcaacactttaacgctcaagtctgagcagc

SEQ ID NO: 365646 - DNA, 321 bp, Zea mays
aaataatagcccgaggctttctagaccggaaaggtaagagcaaaactgacgaagacgtaacaaagccagcctaacttcaatacatgtagtaacatatgggcaacgggtggcagcagcacatcaccaaaaagccaacaaaatatctgcttcattgcacagcccctgcatcaacctcaacctccggctttaagaaatcaagtcccgtccatcctccggcttaagacgtcaagttcatccatcctctgcactctccacgggttggcaagctcgctttcctcaacacctccatccacatgggcaccattgatatcctggtaacct

SEQ ID NO: 365647 - DNA, 74 bp, Zea mays
gttacggcgtaaaaattattcggtggatgttattacacaataggggcatggaaacgaacaaccccacgcgtccg

SEQ ID NO: 365648 - DNA, 471 bp, Zea mays
  unsure (1)..(471): unsure at all n locations
aacatcacgactctgctagttggcttaactggcttcaaagtcgaatccagtgaaaagagagaaaaaatgacgggtttttgcatgggctacagaaggcacaaacataacttgctaatgacatccatcataaacatctattcctatattagcaaaaagaaagcagtggcatttctctccatatttgctaccaggttcagtcaagctgtactttatccagtccaccgatcatttcctcgaacttcaaaatttgtctcaaaaagtaatcgccatgacgcttagtaggtttggactccacgacatgaataacatcctcaacaatgtaaaagtcaaagtctgcactcgataccatctttccgtcactgtcaaccgcatgcattttgtgcttgtatgtcatcaagattgactntagcgttgcttcatccacttccatatattgggcaagtttgctaatggttattgttgaatatagct

SEQ ID NO: 365649 - DNA, 283 bp, Zea mays
ccggaatgggctgactcacaactaacttacacttcagctgaaccttcttacataccatcagtaatcagcacatccattttcctttctccgctaacctatactcaatctaacctaaaaagtaaaacaaaaaggataatcctacattctccaatcattggggaggaagaggtgtggactgggacggagggggactaaaattagaacgccatggtgattttgaaagaatcctcgtgtagagtatttggttccacacgtccggcacgccgggaaggcaccaatggat

SEQ ID NO: 365650 - DNA, 438 bp, Zea mays
gggtagcagcgaacagacgtggcactagcaaaaaaacacaacgatttacaccaaatgcagcatcaaaacatgggaataaaggaaccatctttacctaaagatgacaccttccctctccctttttctgtaatcctttacacaaggacacacattttatacttaccactagctgatcacaagagcgagcgaaaaaagatagctacctagcaccgccacattgggaaatctaaaggcaagatgatgatgatcatgttgattgagctcaatcggcattgggcatcggtgaatcgagaccctccattcggctgcgcacgatgcggtggaagacctcgcggacctgtctcttcagcgggtccagcccgtccttcatggcggagcaggcggcggcgagttgggctgcaacctcccgcaccttggcctcccgctcgccggtgagtg

SEQ ID NO: 365651 - DNA, 488 bp, Zea mays
gacaggaagattgactttgcttttttttcccttttttttgtacacatctgtgggcttctacaatctcaactcctagctgtaagttcacaatatgtaggaaacaatgtaatcttctatggaatgtgctttcaatttagacagtattttgtacactctcattacatgagatgacagggtaaactgttggcctgtgttccgtacgtcatttccattgcaggaagctctttatctccgctgaaggtgattgatttggatttagcttgaaccacgacatttgcatgaggctggttagttcggaagggattccataaagtcctgtccggtttcataagattgccattaattcctgcacattatggaattaaattacattcaaatcacttgtatgcgctacatcctgttagaatctacgccttgggaattatgacagggagagttcataatctcagaaccagaagtatccagtccatctgctgaaaaatctagct

SEQ ID NO: 365652 - DNA, 436 bp, Zea mays
ggagaggaaaaaagttgcaagttataacgagccaacgagggcacaactttccgtagcatgtacaccagattcacatgtttttcaaacccatactcccttaatggttgggattccaatttcctaactaccctgcaaatcagtttcagttatgtactactttcggcgccattaatggttggcatcctgcccgttgtttattccatgttacatcgtcagggactatccctccaagaaaatctaaaacgatctataaagacagttccatgtgtttatccatcactgatattcaacttccaagataaactcacagcgtgtgtttatctatcactgatactcgacatccaagataaactcactgcgtgctttaaaaagttgaacccaatactgtacagtcgtaactgaagttgtttatcttcaggtgcaaataactttttga

SEQ ID NO: 365653 - DNA, 318 bp, Zea mays
tttcttttttttattttttttttctttttttcttatttggttgtttttttagacagaaagggatcctcattcatggcaaaaataagggagatctaaattaatcattccaaagcaaaaactggggagctaacataaacatttgagatgggttcctcatttattataataccgaaaaatctcgaagatgtctggtcactaatctaaaagcaggctttgctggaggggccacaatccaatttagtccatcttccctgccatagcgatttctgtttgggggcgccttggccatctggactaaatttaaggagcaatggccca

SEQ ID NO: 365654 - DNA, 358 bp, Zea mays
caagggggccccaaaagtctgctactcgatcaatcaacaagacaaaaatgatggtaagaatgtacaaattaggctgtaacaaaggggaaagaatgccttttacacaccccaaccaaccaaccagttacacaacatcatcccctgcaaaaccatcagctccccctggatggatccttgcccaggaacccacaacacacactgatccccagtcctttggctccgaaacaactctgggctggtccctcgaacctcaaaccgttgggcttttgtcttggccaaaaccccaggttgggtgggggaaatgcggcccccccccatgggcccgccatacttggggcgaccaaccaaccaaccaaaa

SEQ ID NO: 365655 - DNA, 260 bp, Zea mays
gcggccttcctttttttttttttttttgggaccagctaggggcatgggattactaaacccctgttaccggccaaccaacataatccaacactttttgcacatgagataaacacggatgcaccatggtcaaggtcaacacattgactacagctccacccctttcatatctgtatacagcacatataccacccactccaaaaccggtgctgtaaacaccacaggcctctattcctgagttgtattatccgagcactctttat

SEQ ID NO: 365656 - DNA, 300 bp, Zea mays
gataatctctattgttgcctgccttttcaatcagttccagaaaacatgtctgccaatctctattattgtctccgtttgcatcactccactccgactcgtccgtcaactgccgtggcggatcgtggtccaagaagtactttacgctggccgggaacccaacggctgccgtgtcggcggcagccctggcgagcagcaggtgcgccagcctcgagggctccctgcctcccccacgggggtaatggcggatccaggcgtccagcctccccttctccctgtcgcacttggggccgaccacgccca

SEQ ID NO: 365657 - DNA, 525 bp, Zea mays
ggtggcttcttttaccgcttcttcttcgtcttctcccctcgtgagctgtccataagcttctgctccccctcagacttcctgtcatctccacttctagcaacagcatccgaagcaggaggggagcaatccatgtgctgattcctgtcgtccctcggacacccgttggcacacacacaaccattccacgcaccattaggcgctgttcttgcttgccccactgtgaaactagcatccccacaattggtgtagttgcttactgtagtgccattgccactctccaggtcgatcaaagcatcctgatcactcacacgcttagactccattggaaccacaaaagcttgagtacttgactctaacacatcgataggaaaaccgtgtccctctctggtactagggatcacgaaccagatttgctctctgtcaatgaggagaaatcacctctggaatactaggtacctgcagaggaaagttgggcaccaattaggttactcagcctatcaaaagtctaaaccaggggacaggtgc

SEQ ID NO: 365658 - DNA, 235 bp, Zea mays
gttaaaaaaaaggcgttgtggagaccgactttaaaaaagcgtttggcagacatacccccaggcctatgtaaaccaaatggtcccatcatagtcctactagcaattcgacggaggccttgggctttttgcagactgggagacgagttctatggttccatcggattttaagatggttcagtcctacttttactacgaattgggtggttttccagtggcccccaccgaaaagcaatga

SEQ ID NO: 365659 - DNA, 170 bp, Zea mays
gcggccgccctttcttttttttttttttttttttaacagaaactctgcgggggcattttgatacaacctttggggttccttctgttttcaaacaggacagtagattatgttaactgcctcaactaggttacaagaccaaaactgcaaccatgatgaattggggtttctac

SEQ ID NO: 365660 - DNA, 275 bp, Zea mays
aacaatggaaaaactacaacgggcccctgtattttttttggaaaaaaaaaggccaatttaaaagggggatatacaaaaaacccttccaaaatttacaagggcccccctaaaatggtgggaaaacaaaccggcatgaaaaggcccaaaaggggggggggccccattaaagaatttaaaggggccaaaattaacggggtgggaaaaaaaaaaattggcccgttgtcctggggaaaaaatatgggggaggtttgaccccccctaaggggaaaacgaaa

SEQ ID NO: 365661 - DNA, 218 bp, Zea mays
caagctcactttattatgggatatatacagactcatggaataaaagcaaactccatacttatgactggtataagatagtctagcactagtctaaaacctaacctgaccacaataatctaagatgccagtttaggagctggcagacaaaactcatactactatgggcttgacatagataagctatacactaaagatgaaagcgatgcactttttggatc

SEQ ID NO: 365662 - DNA, 331 bp, Zea mays
aatccgagggggttgtacataaccttggttgatgtcacgcccacgaatttaacgatgtgagcaaacggcaacagcaactccgtccacaccttaacttacagcaagcattataactcgaagcgagcatacaagcacaccaatcgtcaaccaccccgccccatccatttacacccatggcaagcaatgataagcttctccattatatagccacttctgcgattagattacactgagttggagtgtagagaccaatatcatcatttcaccgggtataaataaacaaccctgcgttagggacctcggtactggcggaagcacgagaggcagccct

SEQ ID NO: 365663 - DNA, 397 bp, Zea mays
gatcaagagcatctttagttcttggaggaccatcgggggttctgaaatttgacatatctgtccagaatttctgttgaccactccaattcgtatcctaataccatgttcgacaagttgaaatgatttttccagcagatacaatggccctcgcaatatccttcaaaaatgtcgggcataatatatacacacaaccttgattgttcactttcaagcaagctcctgcagttgtaggttccaggttgcttgtttcctttttcttgtagatttgctctcagttaaagttgttgaactatcaactcttgaacctcttactctgaccatatagcttatttcccagaatgttggctgatctagtgtaaccgcgttatttgcataaaagaatatctagagaagagaa

SEQ ID NO: 365664 - DNA, 405 bp, Zea mays
  unsure (1)..(405): unsure at all n locations
tgccgccngtatccattaattactgcgcgcgcgcgggtaaccatccaatcccagcgtgcgtaatctatcgcccacatgccgacgccgtcgcacctcaacaagaacccgcgctacctggacttccgggcggcgcggcgggtgccggagtcgcacgcctggccgggcctgcacgaccaccccgtcgtggacggcggcgcgccgggccccgacgccgtgccggtggtggacctgggcgccgcggacccggcgccggcgccggcggcggctggtggcccgcgccgccgagcaatggggcgcgttcctgctcacgggccacggcgtccccgcggacctgctcgcgcgcggggaggaccggatcgccaccatgttcgcgctgccggccgacgacaagatgcgcgccgtgcg

SEQ ID NO: 365665 - DNA, 334 bp, Zea mays
aataactgggatgatgatttgcctatactgtcgaataggggaatgtatgtacacatacagctagtatgccctgattactcacattaccgttacaacaactcgatgatatacaacaccctggggagtaatataagagcaagatgcgttggaattttagtcgacaacattgttgctgaagagcttaaacttgtcggcgtccagcacgagcttgcggatggtggcaaaggcgccgatggcccctacgccggggaacacgaccatgacggccgggttggcgataaaaaccggggagcggcgcggcggcccgagcgccatgttgtacatgaggacgggg

SEQ ID NO: 365666 - DNA, 161 bp, Zea mays
gcaacattttatgactcatttgtagagaaggtattggtttttgtacttatcaatgtgtacgtaccggtgctcttgacaattgctgctgtaagtttttaacattgggtacaggcgttgcatcattgaatactggcggaatgcccacaatatttgaaatgatt

SEQ ID NO: 365667 - DNA, 93 bp, Zea mays
agcaatgataatattttggtttggacaatgtaaacggatggtaaaacagcatggtgaactccccaccaaacacccatctgtctgcaatcactg

SEQ ID NO: 365668 - DNA, 317 bp, Zea mays
agggcctaaataggtcttaatttccatgaacccgatacaaagtcatgaactattctgtcaggtctaagagctaataactatacattaataacccggcagggcaacatgtgtttcggaagactactaccccccccccccccccaaaaaaaaaaagatatagcatttcacggtaacctggacagctgatctttctgggggtcactgggaacgaacaccgggagctggtgcgaccgaggcccggcagacctttggctcgagccaccaggatctctgaagcttcttgctgcgggatctgcaatcagaggtccaccaaagaa

SEQ ID NO: 365669 - DNA, 246 bp, Zea mays
tttcttttttttttttttttttttttttttttttttttgtggttttttttatacagtttttgctttaggagggctaaatgcttcttccgaattaagttaaagacccactttccacatatttttttggcctgaacaatacaataaataccccacccctggaaaaagggtttaatttatgggtttggtctcgggcaaagacaactggccggcaacccttttttaataaattctcctgtaccttatttt

SEQ ID NO: 365670 - DNA, 422 bp, Zea mays
gaaacgttatttgaacaagaaagcagtcaagtgaagtatctcacttatacaaatctgccatgttttcctctgtacagtcaatggcaatcataatagccaagtaaataaaaaattgcaatatattcaggtactttacattctgttgtatggttcctccttcacagatgagcatatcacaagcacacaaatggcacggccagcagagctcattaataatcggatgaaagtgtaaaactcagagccaaatctcctgtttccatccatgaaatctgctgcattcaaacttaatagttctctacttgcatgttcatgctgtgttatccttcacaagtagacagtacaatccaatgtaccagttaccataaactttcaaagctgcagaaatacactatacacaatagttgcaagttatttatttgcag

SEQ ID NO: 365671 - DNA, 369 bp, Zea mays
gggattaaaatacggttcgttggtgccgagtgattttttcgacacttggcaaagaaaatctttaccgagtgccaaacagagtgttttttagaaatagacaaaaaaaaaaattgaattttttgcgactctgagtttgatgagtgtttttagaaaaagcagagacaaattctggtagtggtcgagtctagtcgctttctatccatccatgatggtccgcacgctcatcttcatcttcttcgtaccacgtggagtagcccaataatctgccttgcatacaaccttttatttgctattttttttttcttcttctcccatttgtatataccaccacctccttgaggtctcccttgcgagcagcaacatggagcg

SEQ ID NO: 365672 - DNA, 224 bp, Zea mays
ccaacgtggaagggcaatatcatgccttcaaatcacacaaaacatagctttgtttctacaaaactggggacaaaatcatgccttcaaatttaattgttcaatacacaatccttaatttttgaatatataagacttttaagctgtgggagcttaagggccccctttttttccaattccagttttgttgctcaaagaaaaagcttttgaatcccttcctacatttt

SEQ ID NO: 365673 - DNA, 341 bp, Zea mays
ggttgcgaactgcaccagttaattcgattaacgattagactcttcacatgatttttcccagagtaacggacacgtttaacggattgaaccggtatcacagccacagctgaatcagcactttacagcgagcagccggcatatatgtatctgctaagacttgaaaagaaaaaaaaaagggaaaaaaggttggtgaatggctcacttgctttctcctgtgccttctaatctggatttttcttgttgagagttccccccctctgtacaatggccttccaaacccataagaaaacgagaactaaattgttgtcggcacgacgagagtaaaagagtatacaggttca

SEQ ID NO: 365674 - DNA, 314 bp, Zea mays
aggcagttagctttccgagcccagtcgttatttggagactagttcatacattttctgggtgcaacaagtttgtgaaaaacgacggcgctccatcctatgctctagtaaaatctcattggggggggtcccgtcggtccccggagcagagcagtgcaggacgttccgattccgacgtcagaggtcagatcaaacgtggagctttctgcgtcgtgacatcagctcctccttttcttttattttctctctcccattcgtgctgaacgacgacggctgctgctggaagcaacacaagatagaatttggatagaaaaagc

SEQ ID NO: 365675 - DNA, 412 bp, Zea mays
  unsure (1)..(412): unsure at all n locations
aaaacagtcaaggataacatcctgcaatttagcaagtgcatccgccgcattattcaagcagatagccaatgtaatcgtgcatcggcatatgggatcaaaccgttttggggggtgttaagcacttaagcctggggcttatcggcggccggctccggctgggcctggggctgggcctgagccggggtgagcgccttcttgatggagacggcgtnggatctccgccatgtgagacgccagcggcggtgttcaccatccggggcctttccagcagccgcttcccctcgaacttttccgacaccaccttgatctcgtagctcgcgccacacctttgcaccgacgaatcaatcaacggcgcaacaaaggacccgctctttgttgggttagtcgacaactgaagatgctaattgaaaaa

SEQ ID NO: 365676 - DNA, 287 bp, Zea mays
cgcgccctcctactttttgtttcatgtcgctcgcccaaaagggagggggatggcatatgacaaaagtgcataccgatcgccataattatagattccataaaagaagacatggcagccatttgtttaaccatgaaagcaagcaaactcttgagaaataataactaccaggctaacaaaatgatgagagggtgcacatactactttctggtaaaaattagaatgggcggtctgatttttttttggcaaagattaccttccacactactggtgagaatgggcctttcttg

SEQ ID NO: 365677 - DNA, 277 bp, Zea mays
aaaaacttatgggtccccaggaattccataatatcaacgggttaatctcccccaacaagatccccaacattgggacataaaaaccgggacaaaaagagcgggtgaattttattgaaggctcaaagatacaaaaatggggtttcaacaatagaaccccaactggaataaaactacttaggggcctttagataagatcataactttttaaggggccttacaaaggtaagctctcaggaacctcaataatttttgcaaaagtttggaaaaatggtgccaa

SEQ ID NO: 365678 - DNA, 295 bp, Zea mays
aaccccaaaacctttaacggggggggggttccccttaaaaaagcaagaagggcttttttttaaaaaaaaaggggtaaaaaagctggaattggagctgcccccggggggggcttttttggggggcccaaaaataaaaggtccaacttggggtccacccttaggggggagaagctggggcccccaaaaaacttggccacccccaggggtggggggggtttgggttttggaaaggggaaaaatttccctttcacctttttttggccgaccttaaaggggccccctttacgtttttttt

SEQ ID NO: 365679 - DNA, 301 bp, Zea mays
aaaaaacgggaataaagggggggtttagtttttcatattagcaaaccacatcatctactaatgattggctctttatatacaagctaggttatccatactaacaagccaaataccatccagtttacagacaaaccataaccatactttaacattatatgtaatccccccacccaaatagggcccctgtccagtttcaaataatggaagtagcctcacatttatcaacccacaatgtaggaaccggatacaagcaaagaacaaggatcccccttttctctacgtctgatttattaaattaatt

SEQ ID NO: 365680 - DNA, 221 bp, Zea mays
gggggccacacattacaccgtttttatttttttttgaacccaattattgacccctgcaaaaaaaacaaagcgagttccggattacaggaaccccccttttttgaagtagccccacccccaccaccttttttcccttaatttaacacttttacttaccaaaagcaagcacttaccaagggccggagagggactcattattgggaaccattaaattacccccc

SEQ ID NO: 365681 - DNA, 284 bp, Zea mays
atccttaagagattttttttcagaactgaagcatgactcactaaatcagaccgttctgtttttatcaacaggttaacataatctctaatttgtatgcatcaagtgctttcactgtcagcatcctcttcctcaggaagtatcaagcggagatcctcgttatctctgtagacctgaaccaaagctgcagccttgtatgcgaggaaacccatcatccctggaagaacctcaaaactgaaaaaactatttttgaagtggtctgataaagctgacaatccaaaaatcac

SEQ ID NO: 365682 - DNA, 275 bp, Zea mays
gggaagcaaaaaaaaaattccccaaccccgtttttgactaaaaaccaagggaacggggaaaggggaaaaaaacgggggggcttttcttcccatgggccgggggttcggggggcccccccgccccctttttttggcaggcccaaaatcggggctttaaacctcccggaaaccacccccctggggaaaacaaaatgggcgcccccccttaaaaagggggaccaagtggggccttccccctaaaaggaccccacctttaaatttttcccggggccccc

SEQ ID NO: 365683 - DNA, 240 bp, Zea mays
cgaaagcaacttttggcatccatcaccaaaaagccgttgggtttttttttaataagatgctaatgggacctccagaggccccaagacaaaaaaaaacctttttgtttttaataaaaggctaaacaccttcccaaaccaaaggcccaaaaagaacccctgttcattgcccaaaaaacctttgtttgggggtaaaaaaaccggcctggaacataaccctcccggggacccatggaactgggc

SEQ ID NO: 365684 - DNA, 233 bp, Zea mays
  unsure (1)..(233): unsure at all n locations
tgnccatttttttttttttttttttttttttttttttttttttttttttttggtggttttttttgggcgcccccaaaattgaaaccttattggttttttttttaaccaagcccaaaaaaactacaacttcaggaattcctttcagggcgggggccgataagttaaacacaaaaagacaaccggttcgaaaccagattgggaccatcgtccaggggccccgttcacattttttt

SEQ ID NO: 365685 - DNA, 162 bp, Zea mays
aaccaaatcacaggaacttgcacaaacaatggcaaaacatgaaccaaactaccaattttaataaatgcggtccaacacgcacaacatatccttaagccctcaaaacaaaatcactctgttgcttgcgggaacaattccgataaatcacgctttccttaaggc

SEQ ID NO: 365686 - DNA, 425 bp, Zea mays
actaaaacactgttatttatacgactgctatcatcatatacttagggcctagagctaaaacaacctagacttgtctgtctctctctctcttttttggttgctgttgttgctgtccctctctctgaacatacacctagtatttgttaatcaaagcttcctaactcttgcctccacttgacggggtcaccgatagtcctcacagattagaggaaagcagaccccctccccttgttctgtattcacagcccaatggcttcatgcccaggagaaaacctgggcgcctggaagaagcaagagctgtacgggggcagctccatggtggatgcacgcggggggaagagggatgaagccgcattgctgatgatgctcccattttgagtggaggccttgctgggggacgcaaggggctgtcagcaagatgtgct

SEQ ID NO: 365687 - DNA, 196 bp, Zea mays
gggagcatgcttggaaaaactctttcactaaaagcagctgaacaggtaagggatcataatgtaaatttaaagggtagcctcaactcaagaaattctttggggccacggggacaaatgagcaattggctaaaactcctaaggaatccaaaggcgaggctacactccattccactctaaataaacctaagggccaatc

SEQ ID NO: 365688 - DNA, 339 bp, Zea mays
gtgataaggttttttattgcatacagaaaagcaagcttaaagctccatcaatcaaaattgggacaaaaagatacgccacgaacgagataggatattcatagatagtctctcaaaacccaggtaattactgatcagataactgacctaagtgccgttgttgtctctgcccagaggcaaatcaacacattttccacagcaggcactgagcaagaaagtaatggtgaatacaaagtgcagtactcgtcctcgaccttgaatcgcattactggacctggagccattgcagatagctcttgagccttaccttgatttaattacctgggttttgagagactattt

SEQ ID NO: 365689 - DNA, 259 bp, Zea mays
gttaacggggccccccagggaaggggttggttcaacccgggggggaacatattttaaaaaccccccaggcccaggggggggttttctaaataaagggatttccattaaaaaaggggcggttttggaattctttttttcccccttttaaaaaaaagggaccccccccgggggggtggcccctccccgggcttaaaaaggggggggtttattaaaccaaaaaccccttcccgataatgggaggggggggaaaaaggggggt

SEQ ID NO: 365690 - DNA, 362 bp, Zea mays
ggggagtaacttgcctggcaatggtttgacattctagtaaacaagtaaacagtactaagcagatccatccagcaactgcagcatgccaagggtcagacattctaagttgctaaccgatctgcatgtctgacaatctgagtaactagcttggcaactaaaaacaggttttgagtgctctgtacaaagaaaaatgcatgtactacatgtgcatacttaaagcatatacacgaatgctattcactacctaaaaactgccaataatctaaaatgccaagtcttgaagatggtaacattgatcaatcatttaatagacttgaaatgataatcatcaatagtggaacagaggcatgccaaattgacaa

SEQ ID NO: 365691 - DNA, 310 bp, Zea mays
cttgcaacgcccttgcatttgattgcatattggattggttccatcatcgatatgatgatatgatcatcatcgtctacctagtctttgatctaacattaataatgatgaaatacatcataaagatggtctcatgcccattagacgaacataaaaaaagggttaacaacaacatgcatgctgcgtgggtgtgttacaaatctatcatcatcctgctcctcgtagggtttcgcctgctgccgggaaggtgaatgcgggcatggcaccggtgccacggttgtagctgagtgacaacccgacaacggcagccatg

SEQ ID NO: 365692 - DNA, 339 bp, Zea mays
gaaaaccttctaaaaaattacgttgtagtcgagattacagaaagaaaatatggccttacgaatagcttgcaggtccatttcacacttaaaaaactgtctgcatgtaaacatgttcatctttatggtttccaaaggcaccaatgcaatacaatgctacgtgtatcaacctgttccaagattggatcatcaacacgtacaggcaacttcgcaagcaagcgcaaatatgaaactgtccctcaaaatctcagtaaaaatgtttggtcaacacacactccaatcgatcagacgtcagaccatcagaaacttcggaagcaggcgccaatctgaacaaaagaaaac

SEQ ID NO: 365693 - DNA, 369 bp, Zea mays
gaacaccaatgtctaccaggtataatacgccccattttgtcggacggtgtttaagtcagtttaaattacatgtacggcctcgcggggctcttgagaaacgccctctcctccagaggatacttgtagggcgacgaggccagacacaggatctccatggcctcgctccgccgccggcgctcccgcgagtgcacgacccagagcagcactgccagcagcacggcgacggcggcggcgagcaagccccggaacacctggccgctgtaccggctgaggcccgggcagtggtcgtcgccgatggaccggaacgtctccctgacgaaggtgcagtccgccagcgccaccagggcggggccgtagtggtacagcccg

SEQ ID NO: 365694 - DNA, 108 bp, Zea mays
gggaaaaagcaacagtgcgcattcatagacatgctataacacaaacagtgctttgattctcaagattacacaatataaattattatccgaattatgcggacgcgtggg

SEQ ID NO: 365695 - DNA, 397 bp, Zea mays
caggtcgcacagattatgaaataatgttacatattgtaattatcagtgtctttcccgcccggtataccccccctacccccggtaccatatggccttataaacaaaaacatcatctccacactacacataaagaatctagaaaaaaaatatgttcgctacagataaaaaagtgcgccaaaacataagagaaccatgctgttatgtggtaactagcagaaccaactacgtgcttggaagttcaacttatttccctcaacgacgattcttctgccgcgtcttcagcattgcgtgacctgtttcttccaagtgagaaaacaacttgttcctcgactcaaaagttcctccacaagtatcgcaatcattactaggtgccttcgagacctccttttgtttcttc

SEQ ID NO: 365696 - DNA, 147 bp, Zea mays
tcccctttttttatttggacatcgaattattacatccacaaaaccacgacaaagcaccaactcatcaacaagcgtagaccatcattcattcggtagctaacaaattattgcggctgggctctgattgaaacctttgcagccatgcct

SEQ ID NO: 365697 - DNA, 100 bp, Zea mays
gactattagagcagggtggggtttatacatctgactgctgatacatagctaaagcttagggccgcaatgacctgacaccatcaattagtcctaataatcc

SEQ ID NO: 365698 - DNA, 149 bp, Zea mays
ggggaaaccatacgggtttgcctttaaaaaaccatttttttcacaaggaacatttccagttaatttaaaaggaaaaatttttttggtggcccccccagggaaaccaataccgtccgggaaaaggggtcaacactaattagcccttgggg

SEQ ID NO: 365699 - DNA, 344 bp, Zea mays
gtcacaccatagtttctaatgtgaaactgaccgtcacgaaacaaagaaattcagtacttatacttacataatactactctgttctcgaatatttgaatatttgtcaccagttagtttattttaaaactaaaacgcgataaataaaaaagaatagagggagtacaaattttctagtgacattacactttggtttccatatgctcgttagtgttcaaactattagcttgcggctgtaggaacatttgcttggagcacgaactcgaccaaacgctcgaggtcccgccgtcttctgctgccgccacggcattctccttccgcactgttgctttcgccttcatgccttg

SEQ ID NO: 365700 - DNA, 233 bp, Zea mays
ggggggagggcacccggggaatctaaccggggcaagctgatggggattgcttcatggaaacaccagggactacattttaaattgcaccactagcagggcgcttcacaaatggcatatttgcgagggaaaggaaaatccagggatgtcgcaggcacagtacttcagcagcacaacaaggttccaaaggttggggacaacacacaaagggttacccacccacccaagcaacccaa

SEQ ID NO: 365701 - DNA, 254 bp, Zea mays
aaaaggaaacgaataaaaagctctgtcgtgcatggagagaggtttgacctctatactaagtggaagaggccagcaacaggctactctacttacaaccacagagagagagagggttctctattgcggtagctagcggcgccgcctccccccaactacctgctgctgctgctgctgctggccacggcggcccgggccgcgccgatccgctctcctctcacatgacgctgcaggagttggggttccggacgcgtggg

SEQ ID NO: 365702 - DNA, 442 bp, Zea mays
ggagaaatgtaaggcagtggggaaagactcatgtcagcgaagtccagactggataacacgacaaaattcgtgtgatgctatggtcctacacttcaggacggtctgaaaaatatgtatctgggcttcaaaattttggaagttcctaatcacgactatctaaagtaatttctactgctgctagtgctctttttagtactaaatttgcctaactagctgctgtctctgtactttatcgtgcactggaggacgggcagatggtttaggacttgcagagtaggcagaatatgatcgttgagggctcttaagatgatcaatccctcgtcttctaagagcatgtggattgacacctgctttgtgagcagcgatgactccaattgcttcccagtagtttcggacattcagcacttctatgccgaacttgtctggagtatcatcaagcact

SEQ ID NO: 365703 - DNA, 404 bp, Zea mays
gcctaaatgtgtccctcttggattacatattgaacatgtgaacaaattgttagtaatatccacaaattctaaaacatatagctcttaagtttgaacagagcaaaacaaacaaagtaatacaagaacaaaaattgatacacctctaaatcctgtaatggtttacaaaggattattaagcaaaaacagcaaaatcagtgtgaaaaaaatggtatttatagggggtgagtaaaggctgtgttccaaatttccccaaaaaagcgtttttggtggagtggcttcgtactactgtagtctgtaggggtgacatagaccattaatgatgttcatgatcaccatagctatttgatcttctcctatgtgcaaactgcaaagtacatgcatcagagcatcttccagagagcatg

SEQ ID NO: 365704 - DNA, 382 bp, Zea mays
  unsure (1)..(382): unsure at all n locations
tttttntatattttttttttttttttttttggagaagccaaaatgctgtcaattttctgcatttacaccatcacttggacccaaatccctgatgttttgtcatcatcttagttttgagaaaccgtggtactctatggaatgccaaaattacacgccatcgtgatttggagaagccacggtatccttaactccaaaataccacgtacccaatcaggtcttccctcacaacaaactactaaagcctttcaacacaataccagctaaatgtagggacaagtacggtgcagtagttcttcatagagctgcagctgctggtctggtggagtcagcaaaataccagcttgagcgacaaactaaagcccactatccccttctacctttg

SEQ ID NO: 365705 - DNA, 356 bp, Zea mays
  unsure (1)..(356): unsure at all n locations
tcttttttaatantttttttttttttttttgttttttttgggtttttttttttttttttttgttttttttaaaaaaaacggctcattctattgtcaaaacccacaactgggatggccatatttccgaaacatggatgcattctaaccaaccttgccattaatccaaacacacaacacaccatatttttggggaaaacacaacattgcccaatcaattttggagacaccggggtctggtcaaatagataagatggcggtttcatattgccccttaactctgggcctccattggtattcttgagcatcatgattggttccaattccatcaagggagaacaaatgtgtgcatccatcca

SEQ ID NO: 365706 - DNA, 425 bp, Zea mays
gactgtgagagcgagctttgcgttacatccagcgattcttaccgataactccagctactacttttttattccaaagaattaggattctaattaaccagctacaaattaaaaaaaaagtctaattaaaccagctacacttgccgcagcacacaggggcgcgggcccaaggcacagttacattacattagccgcagcatctctcgcagcaggccatgagaagacacatccctgcgccctgcctgaaaaaccttgagctagcttcgctatgacctctcctcgtctgactgagacccgttgatggcgtcagcaaaatattcgactatgtcatcttggtccggggagtcgagcagaatgtccgagtccgaaggcaggaaaggggtgccggtgtagttctccagcacgtccaaatctgctgcgaatgggag

SEQ ID NO: 365707 - DNA, 428 bp, Zea mays
caagaaaattggaatggctaaagggaatatagtacgtaccaaacaaaagcatccaaaaatgctaaacgtttcaactcgtcattatcattttacaatgaagcaaatcccagttacactaatccaccacagtaataacctaatacatacaacagcgaaataacattatgaaccacggatgcaataagaggccagtaaaactgaggctgatatccacttccctagtcaggaagttttcatgatgagctcctagtgatgctgttaaatgatacagactaggatgaaacatctatctgctgttcacccaagaacttctgatcctcactgtacattgcacagccttgtgttaccagaagttcctttgacaaagccaatcgaccttaactagaagcgttcggaaggaaaatacgatgaacactattcattttcag

SEQ ID NO: 365708 - DNA, 233 bp, Zea mays
tacactgatcatcattgtacgaatgatcacataaatagttacaaatgagaccttgacctaccctatctacagaacaaatgttagtcaaaagtctcgacagcagctcttgacagttccaaaagttcctgaaaatttactcctgcttggcaattcgaaacttcaatggctagtttccgactaattaatgcaggtgcaaaccctccaaatccagccctcatgtccattacatttgg

SEQ ID NO: 365709 - DNA, 257 bp, Zea mays
acaaacaaggctatagtcgcagccattatttgatactctagcaatagccactcaagtttgagaacctgttggtgctcaaactaacaaggttgccaccttcccgacctgaggtccacatatgtttatacgcatttattctccaactcgatgaatgagagtttatttactaatggatagtatatagcatgtttatctaccaatgaactaggactgaatcatgtattaagtattaagtttactgcatattgtatcatccg

SEQ ID NO: 365710 - DNA, 269 bp, Zea mays
tcaaacaagagcactggcgctaacttgctaatcgctaccttccttaatgggtcgcaggatctgaacaacacctctctttgtcctactatatacagggatgaactctctgccactacttatacagctgcaaactaacagcaagccgccacatatggcgccgccgcgtggtctgcagagtggcacgacatcgccatggtgctgaggaacgccttctccaggtccgcagaggcgcccctccgcagcaagcacagggcgtactccatgaccat

SEQ ID NO: 365711 - DNA, 478 bp, Zea mays
  unsure (1)..(478): unsure at all n locations
tttttnngttattttttttttttttgcaacagaaagggggaatttagttgaaatgcaggtgaatatgaaaaatattacatccatcaaaagaaagtgttgtacactaaactacaaccttctagtcacaaaaactaagaagcacaaaaacatgtttttgtgattcatactggcaacacaagcgctggttcaggcacataaacgtgtgatgagcccatgtaatatcatcacaaatcgctgcatgtttctttgggtgcagaatgagaataataaatgcaaattaaaaggtcagacgtgtactaacctgagaagaacaatgaagatttttgggaacctaccattctacagggtggaaagagatggaccagattaaattctgagaagaacaatgaagatttttaggaaccaaccattctacagggtggaaagagatggaccaaattaaattctgagacctgactaataattttgtatcatgaca

SEQ ID NO: 365712 - DNA, 409 bp, Zea mays
aaggctgaaaagtgataatgagtgccgataattcgtgttaccaagttacagacataaaagtgatacacaactgcagctcataagtcataattagtgccgattcttagctttgagcttttgacaagtcacactaagcgggctagggtcatcagcttttctatctttaactttcattttaaactccattttggtagtctacattgcaaaacagtggtataaccggtctagtgaccttagactaaagccaacaaaggactgaatcaacgcggcaataaactacaccagcacacacactgtaaatacttactgcagagatacaatctacatgtattcctgttctttatgtacaatttattcacaagccagcttgctgtcgaagctggtcaaacagatggcgaaggcctggaat

SEQ ID NO: 365713 - DNA, 336 bp, Zea mays
ccgccaaaagcaagaacacctgtatgatccagctggctcaggatcaggaccaaagtgaggatggacatgttctttaaacccattttccgttgattccggccattaagcctccccggtgaaggcaaaggcaagggggtggaacttagccggcagattgtatcatgttaaagcttgaacagagacaaaaaaaaaaaaacttaagggacggcatggaattaactacgcgattttccctgctccttccgtccttaccacatatctaaagcaaaatctgggggcgaaatttgaattcacaactccggggtgctcctgacggatgaatgctggccatgggga

SEQ ID NO: 365714 - DNA, 234 bp, Zea mays
ggggaaaaaaaccttttaatgggtgggggggaaaaaattgggaaaccaacgggggcttttttttggaaggaaccaaaaagcctttttagaccacctttaagggggcccgggaaacccttttttgcccaaggcccccttttgggggccccgccccaagaaattttcccccaaaaagggatttcctgggcctgcaaaaggccaaaaaatgtaccccaaagcccaattgggggggcc

SEQ ID NO: 365715 - DNA, 394 bp, Zea mays
gtgcacctgacgcgatatcgtaggcgaaacagtaggattacacgctcaagacatcacaagaacatctacgtgttctcggatgatctagcgaagagcacaactgtgatgagttacaacatggcatgctacaacatctgtcttcggctattgggttccatatcttctccctaagctgtcggaatctacagtttttactccaccgtctagaccaggaactactggatcagtcgatcattaaactgacgcagccatttgctccgggtccgggctctcggaattccaaattccctctagcagccgacatgtacagggtttacactttctactctgggaccaagaccagaactagttcataaaattgactgttgcacgctgactggctgaatgtacaaca

SEQ ID NO: 365716 - DNA, 421 bp, Zea mays
  unsure (1)..(421): unsure at all n locations
tttttggtgntttttttttttttttttttttcatcagtgggtcactcaagagtggcttcgtcttcctattctttgcttaacagtttttttaccagttccatggcttgcatactcaacagatattgcgcacagcaaagaaactttggtctggaccaaagttttctataccccaaaataaccatagtatcgataataccacagtattatatacagagtttttaaaggctaccaaacaccttttggcttaaaatacaatggttcatccaaattccatggtattaacgggtcctcatgatcgactggccttcacgagcacatacatgcacctagtgaaggttctttgacttcttaagggcttggagcaattcttcttttcgtcaaggcttcacaggatgtgtaactttgcacccatagctttcgt

SEQ ID NO: 365717 - DNA, 342 bp, Zea mays
  unsure (1)..(342): unsure at all n locations
tttttnnataattttttttttttttttttttttgggggggttttttttttttttttttttttaaccaaatgaaaggaaaaaaaaaatatatgtatacgtacatacgtaaggatacaatcagcccaccagattccaagcgattcgagtagccaacgctcaattactgaaccaaaggaagcacctagcaaacctagggaaaccttcaggcaaagctggtcgagaaaatccacctgataaacagatgagcaataatccactgcggcagggctcgctactggataacgcatccggggacaccccccacttcgccgttcttacgttacgtgaaagggtaaaagttgg

SEQ ID NO: 365718 - DNA, 333 bp, Zea mays
caaagaaaaacaattggagacgtcagttcattcttttgccacagaaaatggtctacaatggcaacgctacgattgcatcttgctctattccctgtatttccatcaagcacatgtccttagctgcacggagcaaatgcacgtctgcaacggtgggcactactggaacacggaccgcgttgccagtgccacacagaagggcgcttccatgccgttgcgcgcacgggtgatcacggcatgcgtgcaggcgaggcgtgcgccggcgccggcgcgctaaccactcggggtgggagacgtgccgttcctcgggacgacggcgccggagcccaccatgtc

SEQ ID NO: 365719 - DNA, 365 bp, Zea mays
tttttttttttttttttttttttttttttttttttttttttttttttttttttttttttttttttttttttttttttttttttttttggggaaattagggccctgaattattaaaacaaggggggggggggccatattgaaaaaagcggcccaaaagccctggaaaaagctttggggaaaaaaaaaaagcccttccttttaaccctctctttttaaaaaaaaaaaaactttttccccccagagttcccagggttgcaaaaaactggttgggctggaaaggcccttttaaacccaaaacaaaaaaccttggttatgacaagcttggggcccccaaatttcttgggggggaaaacccccttgttttg

SEQ ID NO: 365720 - DNA, 160 bp, Zea mays
acgacagaacaaccaagcactgcatgtcataaggtaaaatggtactttagtgttacaagtagcacataacttgacacaacagacagctgctcaaaagaaaccagagatccttttagttacagcagctcataacttgcaccttgtagcttcataaatttga

SEQ ID NO: 365721 - DNA, 291 bp, Zea mays
ggggccacggcatggacatatttgtttgtcaaataggaaacggaaaggaccaaacacgcttcacttcacaagttcggatccactcttccaaggagctatcatttcctcccttcgggttcagcgtatttacaaggcgtcaacacatggcccacgtgtcagggcacaatggccaccgatacaaaccttgttagatactcgctcaaagcgacagcatccggggtatgtgtatgttcttcttggatgacgcctccggcgtcaagtaaggcacaatgtacttcttcatgtcgcttc

SEQ ID NO: 365722 - DNA, 242 bp, Zea mays
gagaagacctcaagcattttgagatcatgcctacaatcccatgactaaaaagaacaggcttacagaaacatctttcaaggctcaagccccacgcatctaaccaaactaagccaaatcatggctggagggggtacagaccaaaccgaatgcacatttagaaaattagaaactacagcagacgcaacacaataaatatggggaaaaaaatgatcgacccatcggtagctgatcgacccggccga

SEQ ID NO: 365723 - DNA, 420 bp, Zea mays
gggcaatacccgctgcaaaacaacaactttctaattcaagaaaatctcaattacacattctgttgagcagaaaaaacagcaactttccaacaacccgcaataatcaataagcttcggacatagtccgtttgtagcagtaaacccaaacccacaattcacttgcctaataacgaacgtccctaacaatgctacttcactttcgagcactgggcttcaccttgcaatgagtttccagactgacggacgagcagaaagtccacgaccaaaaaggacgcccatgtgtgagaaaaattctggtacttttcttagcatcatcactagcttcaccttgcaatgagcactggttataattcaccttgcaatgagcactgtgcttcgaccgcacgaggcgagaaaattacttgctgcacgacttgcagc

SEQ ID NO: 365724 - DNA, 323 bp, Zea mays
aaaaaggggcaatgctaatatttttggccagcccatgacaatttgcctcccctaaccaaagtccaaaaggggcccctggggggggggatacattccaaaaggggcaatgttttacacacaagggctgggggacacgtgcttcgtcgatgacaacgcgagaaacatcctgggctaccaaaatagtctggggggttttttaaaagccccagctagccggcggagggggaacatccaatgggggaggccttttgaaaatctggcccaatatttgaagtctggggataggggcgggggacaggaggcaacagcaaagccaaagactt

SEQ ID NO: 365725 - DNA, 400 bp, Zea mays
agaacccaaatatcttttttcattagcacatcaaattcaatatccacagcatccttctattttaacagccatcactcaaatactattctgaagaacatgggattatgttattgcctggtgattagcagcattcatccatccatgtaatctcttgcatcatcttcagcaacctgggccttttccacaatgaggcataaaagatgaagcctaataagttttatcttgatatccacaaactcatgccagttagtacggggtttcattttacgaagttctcctttcagtactgggggttgagcctcaccaattctaagaatctatatccatttggctttattcttctactaactagcatagtacaatctatgcccatctgtgttaacctatctaacagaacaga

SEQ ID NO: 365726 - DNA, 184 bp, Zea mays
cggggtatattcaacaatacctaaactttcggtgcacaatactaatttgtacatgaactaaagcttttacacatggacaagcattgcataggctatacctccatattattttaccagccctctagtttctattaactaatcagccattctgacggcctaataagcttcccccatgattgctaca

SEQ ID NO: 365727 - DNA, 178 bp, Zea mays
tcttttttttttttttttttttttttttttttttttttagccccaccagattaatgcaccgttatgtcaacattccaacaccttgggggataatgggactttgtgaccactcttcttaccgagccacacggctttagaaaattccttttgttcggccaaaggtctagggcattccaat

SEQ ID NO: 365728 - DNA, 178 bp, Zea mays
  unsure (1)..(178): unsure at all n locations
ccaaaagcatattagatcacaagcgaggcagcagggggctcgcctagattagggtcacccagcttgaaacctggtagggctgacaccagaaatggtcgtgaagcgcanaaccagaccctgtttagccgtcaggatgactcttgctggctactgtacaaaatggtacctaagatgccgt

SEQ ID NO: 365729 - DNA, 395 bp, Zea mays
ttcgttctttttttttttttttttttttacccggggaagttctgttcttatattatattcagatgtacatcatgacatcttcctagcaaaaatgagcattctgataggattatggactagtaactaaataattcacagaaacataagcatgtttttcaatggattagggcacatgctatagtacttgccgtggaggcgaaacgcaatcacaatatcgaaaccttacactttcaatggattagggcacgagcagttttaaacctagtaaaacaaataaaacatacacacacggtcgcacacaagttaaaacattgaccgctacgcctcaacaggactgggccctcttgggctaccggtgctgctctgttgctcgtactcctggcttggaaaaacat

SEQ ID NO: 365730 - DNA, 269 bp, Zea mays
ccacccacccgccctggcctctctatatctctcctatctgcctgcgcgccgccgtcgtgcctcgccttgtccacagactaaggcgccaggatagtctaaatttagtccacgtgactgtggactgctcgccttttggattcaacattttgtgcttctcagctctggaatacagaagtgccattgtgggctcaagaggctaatgtacagcaggcgtgcatcccagctgctgaaggagatcgacttctctgaggctggccagctcgtgccat

SEQ ID NO: 365731 - DNA, 255 bp, Zea mays
gttaggcgatcgttctgccaccgggcgaacgacacaccgcccctgttaccatggccgctaacactactggcatgagcgggtacagtagcagggcgatacatacacaaggaaatcctaacagaactgccttggacggtgctggacccatagtgatccgaactgggctaaaaacatatggtgaccggataaagaatgcaaggcctgaggttatggagaggcatatcacacaatgtttgtccgaggatgatgtctact

SEQ ID NO: 365732 - DNA, 188 bp, Zea mays
gccgccaccggggggggtcaataagtgacaggttgctctttttgtttaccgccgttcgagcagaaacggggagtatggcacgggtgacatactctagcacggacgcgcctggtatgagcccccaggagatgcaatggcgagtgcacggggctcatactacaacgctcaagcggttgagactcggacct

SEQ ID NO: 365733 - DNA, 232 bp, Zea mays
cgggctgggggggggggtccatcatactcttcatgtcttttttacccatcgacgctgtggcggtgcgcagccatatccttgggctgatgacccggggctgtgtgctcatgacttgcacaagcgcactagtccgtttgccgaacgagctgtgtggagtcaggtaaggctgatctgcagtgccatatgaggcatgggagctgcccgaatggcagatttcatgaaccacatgctg

SEQ ID NO: 365734 - DNA, 118 bp, Zea mays
ggcatgttcacctacaaacgattatgatcgaggaagggtgcatgcgtataccttttctttggcaggtcatacaagatcctttattggagcggcagtgtgccctcacatggcctgcccg

SEQ ID NO: 365735 - DNA, 268 bp, Zea mays
atccagcctatggccggggggttttttttagacttttcgctgtttattttcgacgccaccgggaagcagtcttgggtcaggcctgcccggggggccctagaccacattggggtgatacaccaaccattcaggttgggcgctgtatgagggctagcctgctatcatacctgtatgggggcaagacaacttactgcattgcgttcatattaactactgacacagagtggatcatccttaccgtacactgaagttgctacatggtgggagt

SEQ ID NO: 365736 - DNA, 303 bp, Zea mays
gtgggcctcttacgagaaggccaaatctagggcttggttcatacattagcgcgaacaaagcgtccatcgatggactctgtggggtcgggagcaggtccgaggccaactacctggctgaggagaggcctgctgagagcaccggcactaacggaagaacatatgactcgctgaatgatggattgataatgataggtaaccaccaaggagagccattcctcagcctgactcttgggacgagggctgacttggcaaactcctgctgaggacaggatgccaaggattgtgcaggttcagacgacactt

SEQ ID NO: 365737 - DNA, 332 bp, Zea mays
gttggaaaaggaaatactaatagaatactgaacgagtgagtgaagcatatcaacgtatcattactgcgtgcgaatgaagatacagtccatatcgaaagtctgacaccacaaactcatattactcgatacttggcactaaactcagccatatggtaaaatctcgatgaatttgctaatcttcgcagaagccggtgcatcaatcgaaaccaccactaagccagtagatctgtcgagcccaagaaccctaccagatcttgccctccgccgcctcaaaccccagatccgggtccgccaaggaatgacagcagcccttgggccgccggacgcgtggg

SEQ ID NO: 365738 - DNA, 338 bp, Zea mays
ggctccagggctgcggaggttcctagtcggacgctgttcttttttttcgaggcggcggcgggcaccacctggtccgaggctggcgctcacagaacactggctgagtggcggcacggactgatgcaccgtgttctgcgaagactacacaagccatagagactgtaccatatggttgagttctagtgccacgtctcgcatggtaggcgttcgaggagccagactttcgatagggactgcttctttattgggacgcacccatgatacgaagatgtggttgagtgactcacgcagacctctatctggattggcttcggctacaacgggtgcgaagaaaatag

SEQ ID NO: 365739 - DNA, 346 bp, Zea mays
cctgcgcccgagttgagcgtggttgatataggaacgctgttgctgttcgccggccccgatgagatacacgagctgcaacttgaggtgtcagggactctctacaggatcagacgctctggggcgcaaggcctcaccaatgaacaacacactgcggcggtcatggtttaacgatgacaactgactcatcgacaccgacttctccaactccatagagtaactggccctcggcctggttgctcatccagaggagctcgagcacacgacacctaaagttggtactggccatggctacacctctgcaagactcgggaggccatgggtgaacgcaacttgagggtcttctgtg

SEQ ID NO: 365740 - DNA, 341 bp, Zea mays
gccgaaattgagcgaggtgcaaggtgccctggggactagagcaggcacaataaatcttgggatgggagcaatgggtgcaatcactgaggccaacgacatcacagggatcataggggcctccactgatgctatacctttgacacctccgtggccttgatcaggacaagaacgttctggccacccaaggatgattaatgatcatccctgtccccatgccatggcttgcccagactacaggcacccctggtagcatgatgctgtagggctcgatgcaagatcggaaaatggcgattatgtgaacgagctatagggagggcacactcctatgcccaataatgagt

SEQ ID NO: 365741 - DNA, 168 bp, Zea mays
cccccagggagaagaggacgagaggaatacctgggttaggggggatcggaggagcggcaggctcgggggccgtgtcgagctgcaacgcgaggctctctagctcgaacgcgtcacgatcagtactggacccaggatcacatggtggcacatgtgaaagtgcgacaccgg

SEQ ID NO: 365742 - DNA, 206 bp, Zea mays
cccgagctagtagatggacactttctcgtgggggaataatccttgccatcacaacccgaggacactgtcgagggccataccaggaccgctctggtaacctgatacgctgcgtacttatgagaccccgactacgcctaagctgaagccataggaggctctccaggaggccgagcgcactgttgtggagctagatgttctggctgaga

SEQ ID NO: 365743 - DNA, 259 bp, Zea mays
gccagggccccatggggggggctttattaggaggcatctgccttttcttcccccgacgaagcgcgcctgctgggcctggtggaggaggcggagcacggcggcggttgtacctgggaatacgcttgcctcgcccggcggcttcgcgcacgacgatccgaatcacaagctccgcgtcggtgttgacctactcaacagcgcctccgcgtgctccggccatggctcacaacagtggacggtcctacaagcaggcggccacggt

SEQ ID NO: 365744 - DNA, 235 bp, Zea mays
cacattggaaagcgccggaaccaatatagatctcggtgcataccttggcagcgaacagacgaagaagaagcatgccaggcctaatagagagagaggccaggacatgtgcacaaccagagccgagaaggcagactacgacggacctggagatcgaggcagacagcgctccgcctgggcctgcccaaccggggaggtggaggctagccgacgctaggcaggaagaggaggagctctt

SEQ ID NO: 365745 - DNA, 197 bp, Zea mays
catgacataagacgggagctcatcctccctagaagcaagggagatggattaaagtgtgtccggagcatggtgacaagtgacgctggggggggatcaggatacaaccgtggtggctacatgcttcaagcgatatgcctggtgcaagatcacctgttaaacgacggtgcatacatgctgggatcaagatggggtgggtc

SEQ ID NO: 365746 - DNA, 227 bp, Zea mays
cgtccgaacgcgaggagggttattagcgagtttctggctgtctttttctcccgcgccacggcaccagcatgctaggcagttgcttgaccgaggaacactacgaggagttccgtccgtggcatgtatgaagacctgccatgctctcggactacctagctgatgatatactgatgactgaccatccagagcactggctgcagggagatgattaatggcgacgaaaacaa

SEQ ID NO: 365747 - DNA, 156 bp, Zea mays
gtggaggacttcaaaccgttgtggcgggaccttcataccaccactgcctggttcctcgaccgctggtgctgtgagcgctcccacctgcactagacgggcgagcatatcgacacctccggtcttctgccccacaactaggacctactgtacgacgac

SEQ ID NO: 365748 - DNA, 158 bp, Zea mays
tttttctcctccgcgcagttggtctcactgggctctgagccttgcgagaggcatccagccctgcagaggagctacggccggttgactccggcgggtccaagcaagaaggacccgaatccggtcatgctcaccaggcccaaaacttgcctggcgtgggg

SEQ ID NO: 365749 - DNA, 187 bp, Zea mays
ccccacactagcggagcgcgcacaggagcatagggggggatcctgtatcatgcgcgcgccatgggcaccagggcgggccctctgactgaatggacatggcagaggctaggaaacttgaagaacttggtgatggctcccgtggcggtacactgctcgcggcgggaggacgcgcgtggctggggcaaca

SEQ ID NO: 365750 - DNA, 336 bp, Zea mays
cggacgcgtgggtgacaacgcgtttataacgaagtctatttttttttttcaggagggcattattcatgaccagaattagtgagtcttgacaggtaagaatactgatgactgacccacgctggcagagcacaccagagaaatagcaataacccacaaaaagatgatgggcctaaggggacggatgaggttgtttcacaacccactaacagaggagacggacccgctggtacaagagaattgccaccccaaaggcacagacaagggacgattcccataggaggagaactggacatctaaccctcccagaactaatgtttcacttcaatcttcggcgga

SEQ ID NO: 365751 - DNA, 315 bp, Zea mays
tgcaccatttgacagcgggggatgtaattaaaccaattcggcggtttttataccaggcaagagacaactggcctggcacaggcaccatgtgcgactccaacgataagtacaagggcgtgagcgacatcgatgggcgactggagctgtatgctgccggcaaccacgtggtggacccatatactttgcgtgagttcattacaaaatttaagggtatgatactcacgctgaattgccttgacatagagcattcttgtacgtgggccccacatttgagggaaccaaaagcccattgattaaacgggattgtttgacttc

SEQ ID NO: 365752 - DNA, 523 bp, Zea mays
gggagtagaacatactgtcacagtgcacatttttttcataaggcataacagatgatttaactacaactaaaccttgatagagtactgtaaaactggaacaccagtcaagtagaacataaaaaaatcaggcacatgtcatagattgataacgtgcttaatcgaatattttatggcattggaggaagcctcattcttgttattttttttccaatattttgtcgagggatgccttaaaatcaagaagaaatgaaaccaattatataagtgcagctcaggcacctgttagcgcttgttttagcagctcagcagtaaccctccgaaaaaagattggacatcatatcctttagagatattttataccatttatacgatttgcatccataagcatagtgaacacctgaataacacccaaacacaaggaaccacatacaaaagcaggttagtaaagcattacttgcagtttatggatattatgcccaacaaggacacaactcaggtgcatattattagttagatgatgcat

SEQ ID NO: 365753 - DNA, 247 bp, Zea mays
acttgggatctgcctgctcgcccagctgtgtctccatgtgtgcttatagagctcgtgggtggggaaaacatcaccatcagcagagcccttggaaatactagacgccttcaaccgggcaaacctggtactaaagctcaagcagccgtttgcactgactcgtggccatatgaaagaagcagttcatgaagacatgaatcaactcgaagcagaaaaccaagcccatcttactctttatagctgaaataat

SEQ ID NO: 365754 - DNA, 305 bp, Zea mays
acgcgtccgcccacgcgggctactataggtccggccacgctttttcccgcctgctaccatttctttctcgcccggtctgtccggctttcccccggggccccgacccccatgccccttgcgtacgcgcccataccgtaccggttccggaacactagggcgcggcacgcaccctcctcgtgagcgcagtgcctggcgcatgcgggatggcgccgcatgccggggggtcgacccctgcggtggctgctctcgggatcctcctccctacctgccgggagaacgagggtacttgcgccgtcacgatgatc

SEQ ID NO: 365755 - DNA, 492 bp, Zea mays
gaccgtgttaacgacaggggctaatagtacaatgtgtccgttttttttcccacccgagcagaactggcacaagtttgcgatcttaacatcttgaacatgtgtataaacacccgtacgtggtctcaggaacttcctgagggcctgtggctgcacacacgaaattgtgcagtgccactgacacatagataagctgtgaaagaagaaatactgacgaccacgaccaataatcccgttttgggctcgggaggttatttctccgcaactcgatgagcttcaggcttcatcttcaggaaggaaggaaggagctatggggatttggcttgccgcttatgctgttccaatgcaattaaacgataaagattcggtcctgtgttgcgtgtgcttatgttttagttttgggtagcaccgcccatagtcgtggtcctgttgtggggtttccagtttctgtttgcttgctgttgtcagttgtctgcataattcggttttgtgctt

SEQ ID NO: 365756 - DNA, 255 bp, Zea mays
ccgcggcgtgaggccagcatgtttttatgagcacggttggtgctgctggcggaccctgcagagtaagggtgcggacaactcgagtattgatggcggtagggggacattggtcgtgtgcggaggagtgcatgactaaagactaactgactgggcggctccgctggttgtgtgatcaactgcacccggatgtgagcttgacagggacgaacagaagaactagggactgcgtgtggcatcagctcagataggagcttg

SEQ ID NO: 365757 - DNA, 195 bp, Zea mays
aggacttttatctcttttctccgcgccgagagcttgcctgggacagagaacaaggccgaggaatacctacgctacatgctgaggacggtcaataccgcgttcaccgggcgatgagcgctgagctagtcaggatgtcgtatctttctagagttgggggtagacgacgagcaacaaggctggaatgtgttagtgaaa

SEQ ID NO: 365758 - DNA, 235 bp, Zea mays
ggaattttgttttttctttcccctacatggacaggatattggctagaggtgggacgcactctgcagaggatgcgatatgccctatggtacaagatactgagctgctgtatcattatgccatcttcaaggtgttgctcaccgcgatctgaccccaaaggatttgctgttgtatgaacaggatgaacgctctaccttgagcgccataaatcatgggtcgcctgactagaagactcca

SEQ ID NO: 365759 - DNA, 315 bp, Zea mays
cgctggaccatgctcgggggttgataagaagactctcttgcgtgtttttccccaaaccagccgagctccaccattttttgccgctcgcagtcgctccccacgaccaccaacatgaagaaggcgaagctgctgaacgcggtcaacgccaagagctttaagcggatggactcgctcggcggcacgtttcgcgtcgtgccttccacgcccagaacccccgccaccgccgtccccgacgacatagcccctgctccaccaggcggcccaggggtcgacggcggtgaggacatactcgcagaggaggtcgtgtgccggatc

SEQ ID NO: 365760 - DNA, 380 bp, Zea mays
ggtgcccttacattcagggggtacataaatgggttttttcgttttcttccccggtcgaatccccgtgcgagaggactcctgcagcacctgcgtgccagagcagcggcttggtgggggaagaccggaggcttcagcagaactcgcgtccagaggtgcacggccggcctgttctcggcgtctgctgcgggaaggcgagtatccgtggtaaggacgagtgaataatcatgagctcgatctgcccttacgcgggagccaccactggtggtggtgtatgccctgtgaaatctgacaagagcaacactgttgtgcgccctgcacaatctgtcgagagcatcattggtgtgtgccctgtcactaggcaggatcatggtagcaagctc

SEQ ID NO: 365761 - DNA, 409 bp, Zea mays
ggacatgcagctcctccttggagttttgctctaaagccatgccaaacaggccttaagttacttgacatttaacatcacgccgtcgtaatatgatcagctaatgggtattaaactagttatttgcacatgaacaggttagcacaagtggtaaaaagagagtgttgagggagctctgaatcaagaagagaaaaaaaaacagaacctagacgtgtcttgaaaccaatcacaccgtggaaggatagtagtgctaggcttgcatcgtcgctgctttcttgaagtcgatcttgtccaccttcacctcgccgtcaatcagctcgtagacgtacaccaccacacggagtccttggatgtccatcagcacaaagcttgggttcacgtcgtaagtgatgctgctgtaggcccccgtggc

SEQ ID NO: 365762 - DNA, 243 bp, Zea mays
gtgcatttctaccagagagggggctgttcagaggtgttttcgttgttcttggctcccggggaggaggtacaagcgttcagctcaataggagatcaagagtaaagagtgtggggaggggaaggacgcgatatcgggggaggatggagcttgagcttgcgctgggggacctgcacaacccgcaccgggtgcccgacctggccgccaaatgcaagctacatgctcgtgcccggtaagatccaacac

SEQ ID NO: 365763 - DNA, 253 bp, Zea mays
cccaagcgacaaatggggtcctacgatgcaagctcttgcgcttcagtgcaccgttaagtcgacgctgatcttgctggccagggcgagcagacaagactggaacgcggcaaccactcagggcggccatgtcgccacacctcaactaggtgcacagttctcgccgaaggggatgtaccacataactaatggggcggaggcggtggttgcgtacacaatgggagcaaggatcccggtatatatggctctatgccag

SEQ ID NO: 365764 - DNA, 304 bp, Zea mays
  unsure (1)..(304): unsure at all n locations
ttnntttttttttttttnnnnnnnnnnnnntttttttttggttttttttttttttggggaactgaaaccaaacaggggaacttgattttagataaaagcattgggaaactatgccctcagtcgttgggtagggccaatgcaagtcgcaccatacaacgatctagagacatatcggttgtcaaatcttgttgagcaagaggatccaatgctatcgtctgggggggggggaccagcagacccaaaacacaggggagtttaattattaacctgctgaactgtaatgaaaggcttttgatgcccaaag

SEQ ID NO: 365765 - DNA, 292 bp, Zea mays
aaatacatgcgcacagatatataagattcgttttagtcaaagtaatgcaaggaagacccagctcttacaaccgtatagttgttatatactccagaccagcacatgttttcccatgggaaacaagatgttgatacagaggagagtaggatcaattagcgcatcaacaagtgatagccttgcatgatacaagtgcttgcagctaagtatcttaagaatatttaaggatgacaaaatactagcaacacccattggataccttcatattgcttattatcaactgaaaccatggctg

SEQ ID NO: 365766 - DNA, 189 bp, Zea mays
aaaacaaaacagaaccattcaataaagggatcaatttactgtgccccggtttagcaagcatttcgcactcatattatctctttattctctccttaccaagggcagaaccccaaaagcagcaaaatccacaagtcacccccccaaaacatgaaacgaaggcctacaattacaacacataattctagcttc

SEQ ID NO: 365767 - DNA, 234 bp, Zea mays
ggaccaccgggaaaagtttatattggagtcattgggccatggcacagtttataatacagacaattttaaaaaggggggagactacaaataaaatccttccaccacaggatcaagttgggttaaatatagccctacagggggggctttgggggaacataccaaggaacattatccctgctgacaaaagggcatggttaaaaaatagggccaaatgaggcatttatgcaaacaggc

SEQ ID NO: 365768 - DNA, 279 bp, Zea mays
  unsure (1)..(279): unsure at all n locations
ttnntttttttttttttttttttttttttttttttttttgttttttttttttttaaaaacacaaggaaaagggttgcatgcaccggggcttgcctggaataaacactacgttagtgtttgttagacgacgatcacttgacgatcatcctttgtcttggtactcgttcaaattatccattttcaggttcatcatccgcatcacctcgcgaatcaatccgcgcttggggtcgacttggcttgtcttccgcatcgcgcgattaattaacgttccgttctaaa

SEQ ID NO: 365769 - DNA, 261 bp, Zea mays
ggagaacacaaacccatgcaaataattttttttcatgggtgccatgtcacttgttacataacacttgcttcttggcaagaaaagggtgactggtgccaaaataatgggaggggccttatgaataaaagggccctggtccctttttgaacaaaaatacaactgtttttttaaataccatccgccatgcaaaaattattttttttggggggggcggggggggccttatggccatttgaaaaattttttgctttatttatgggg

SEQ ID NO: 365770 - DNA, 235 bp, Zea mays
aaaccaaatccgggggacggatcagggggactatttttaggtggggcatacattagtttattttacaggggggaaaacttttttacaaaaatgaaaaggttttaggaatgccctagcaaaaacatttttaaaaaaaaagcttttaacaaaaaaacaacggggggaacatttaccacgactcgccctcggggttttaagttaacccccaaaaaaaaacaaaagaaggggttttttc

SEQ ID NO: 365771 - DNA, 373 bp, Zea mays
caaactcaaaattcaagggcattttaaaaacagtagcacggaaaccatacaaagttgctgcaaaactgcatagcttacatgcttatatatatctgtgtatatgaatatgatgagtatacgccactaacaaaaaaaaaggcactctgcttcaaccattacgtacatgctgggattacagactacggtaccacaggcgtgcataaaaagaagacgacagatcagagcttagtacttcttgcgagagaagtggttgtcgtttggatttcttttcccgctgaacattgcgagcgccttcctcactggaggtttcaatggtgccttcttatcaccaccatgcgaaaatatgtcgaccacgcccaagaaatcatcatcc

SEQ ID NO: 365772 - DNA, 165 bp, Zea mays
ggggaccggcgctccctttaaccatttccctttgttttggtcgaccgccgggcaaagaaaaaaagctgggggctttgttttggcaatacgccacgccacccgacccgaaacaaggatgatgggtgggtgcgtggcccccaacctacccgatctccctgatctggg

SEQ ID NO: 365773 - DNA, 375 bp, Zea mays
ccagaatgaatttactggtgttgtttgtataacaaagctttcattacaccgggattggtagttggagttgaaagcaaaacctttcagatttacagtaaccgattcaagctacacaacctatatcctactgtgcagaactaaatcgggtagaacttcgtactaccaaacacttggacaaccagatccatgcggagatcatgcttcatgctttatagccatcaccagcgagacattaggtgatcatctgtcatgacatccatgaacaacagttgactaagaactcccgagagacaggtgcataacggcagccatgagaactccaaggatgcaaccggccacaacctgacatgttcaagaaaagaatatattacacct

SEQ ID NO: 365774 - DNA, 412 bp, Zea mays
acctcagaatgaatttactggtgttgtttgtataacaaagctttcattacaccgtgattggtagttggagttgaaagcaaaacctttcagatttacagtaaccgattcaagctacacaacctatatcctactgtccagaactaaatcggttagaacttcgtactaccaaacacttggacaaccagatccatgcggagatcatgcttcatgctttatagccatcaccagcgagacattaggtgatcatctgtcatgacatccatgaacaacagttgactaagaactcccgagagacaggtgcataacggcagccatgagaactccaaggatgcaaccggccacaacctgacatgtccaagaaaagaatatattacacctagaatgttgcatgtactatctgaatgtcaaacta

SEQ ID NO: 365775 - DNA, 299 bp, Zea mays
gtggtcatcgatcctctattgatggaaatcattgctcttggatctctgatttgcatgtcccttattacaaagtgaagccgtgcacctcgtcctcgagcatgcttgctccttcgatttacacttgcaaagttacacagccagaaacagctgcagctgcagctgcagcgtggccatcgcggcgagcgacacggagccgattcattgccctctgctatggcacgcctgccgtacccgcagcatgtcagcagagggtcgttgaatccgagcttattggcctggctgatgagcttgtacttggc

SEQ ID NO: 365776 - DNA, 390 bp, Zea mays
tttttcacacactcgatcgatcgccatggactgctccaacgactgggacctgcaggcgctcgtgcggagctgcggcggcggtaaccgcagcgtgcagcattcgagggccggggccgacgctcctccaagggaggaagctgctatggtccgcggcggcggccgtgcggcggcccagctggagttgctcgggcaaccggtgggtgcggtgtcgtcgtggcggagcggtctctaccactttgacgacctcgtggaccgtgaccgcgacccgcgccgcatgcccttatacgacttcgtcacgccttcatcatatagcgagacgacggacacgtgtgggcccatggccagggccgggcaacagctccgccacgacgacgtgctcttgtctttctc

SEQ ID NO: 365777 - DNA, 374 bp, Zea mays
ttctgcgccattggccatttgctgcgagtgcgatcgatggaggacaaattcttgggcttcctgacaagacagaggacacgacgaccaaaggcgggcgggcgggccggccggccagtacaatcgatcagatcagagtgtttctgcagtgattgcgctaccttctcaatctcagatcgatctcgagctgcctggatctgaataatcgaattgtaaataccacatcgtcgttggctgcgcatggttgtcgtcttcgcgtgtcgagggtgtataaaggccatagtcgttcctgtgtaaaaaaaaaaataataaaaacagacaacaattataagattatattgacaaacaaaatatgttgaataataaaaaaaaataag

SEQ ID NO: 365778 - DNA, 344 bp, Zea mays
gaactcttgtaaaatgtacacgttctgcattatcgggtagttgcggagctgcaccaaggggccattctgcttaatgccactgaattaaggagacattgatggagaatacaagcgcagtcaacgatgaatataatagcttaacgaggactatatatcggttggcccgccggctggccggcctgtcccagctaaagcgacagccggcggcgtccaagaacgccgccgccgtcgtcatcgaaaaaccgatccaagtcgtcgtcgaacggccagaagaaaccatcgaacgggcagttgccgtcgtcctccagcaggcacgcgtcgttctcgtccacggccacggccac

SEQ ID NO: 365779 - DNA, 333 bp, Zea mays
tctgtttgctgggcgcacggagagaccaggttccaagcgaaggcagtgcatgcaggacgagtggagctagcgtgaccttgcgttgccttcgccgctttgcttgtgtcgagaggagaagcagagcagcgggacacgagcagcgggttggaggttgacaatggctgatcaccagaggatccacccagcggacctggaggccggcaaccggccgctgatgccgggaggctcgttccggtcggacaagggcgacccggcgcagcgcgcgaagcagcagcaacaacaaggctacgttcccggtgccctgcctccgccgtcgtgccacgtctcgccacc

SEQ ID NO: 365780 - DNA, 147 bp, Zea mays
aaattgagttcctttttattccaaatatacttgcttatcgcacgatatatcgacaaacaacaatatgtttatgtgagcatttgttgatcaacaagtgccgcagctacagagctgggaccggcgagctccctagtgatgccgcgttga

SEQ ID NO: 365781 - DNA, 402 bp, Zea mays
gcttccaacctctataagaatgaacttcattgagaggcaaaaaaaatatatatataagcggaatacaactatacaacaacttgtgtatgtatatcgtatatggcacctgttgttagaatatatgatatgtatatgtgtatctatgttgtctttaatttggatggatgtgtaagatgtaaaattgctcgctcattgcatcttccaaatttcctccaaggcccaaaagttatctgtaatgctctcggagaagccttgcacccaaccactgagctccatgtcctgaaactggccagcgccggcaccagcagcctgcaccaccgactgatcaagatcagacggcggcggcggcggcggcggccacagcccttggtcggcctcctgctgcgccgcccaatctccgcc

SEQ ID NO: 365782 - DNA, 142 bp, Zea mays
actccaaactgccatgcatgagaatagatagacaggaggaacaggaaccaaccaacacaggacacaacaagctgcagcagcggcaggcatggggcaccgtgccactgacaccgggccccaccaccattaccacccgacgcac

SEQ ID NO: 365783 - DNA, 495 bp, Zea mays
  unsure (1)..(495): unsure at all n locations
ttattttcttggacttatctgctgccaactaactctccacaattctatcatctcaatcttattctctagccttatctttatttctaaatctatccactggttgtggcctcctcctgtgcgcgttcagcgcgctctgcagcgcggcgtgcgtcacggcggcgcctatatgtgcgcccgcacatgacaatagaatggtacgaaggctatgggtcagattggggggggggggtgctgggtgttgactctagggctaaccctcaaggcgagagcagcggggaggggccctcatgcagtacaactatacattttggcccaggccccaactgcccaagcccaattgcacataccccttcaattcacttttctctatcgtcagcatcataatggtgcggtctggagctgcttctccgcctccagtggtccagccacctgtatgcaggactacacnttggacaaggcctttggaaagaagggagatgggtgtttctggctgcc

SEQ ID NO: 365784 - DNA, 367 bp, Zea mays
ctgatgcatcaatcgagttccgcaaatcatatcaagtattgttttctgattcaacaagctagtagcatagctgagctgatccatggtgtgttctaaactctgatggtgttgtttgcctgccttgccttcatgctttgggtcttgggatgtcatgcagaagaagacgagatggtggtcgcgtctgaaggccaagctcaagtcgttccggccgcacggccacccccagcgcatcgccgacgcgtcgcggtcgccggagccgccgggcgcaccatgcgccgagcaggcgccgggcagctacaactatgcgcgccacgcgccccaacctacgctggccttcgtggcgccgccgccgtcgcccgccacgtcc

SEQ ID NO: 365785 - DNA, 238 bp, Zea mays
tttcttttttttttttttttttttttttttttttttttacacacataggaaggcaggggtttttttttcgcattccaaaagagaccaaatggttggtgttatccatgatccattgtccaccattttttagaatagaataggatgatgactgggcacacaaaccaggaggggcattgcttacaaaacaatttacaatacacagttgaatggcaaaggttttttttgcgccaaggttttg

SEQ ID NO: 365786 - DNA, 481 bp, Zea mays
tcggacgcgtggggtcaactatgagtatgagcaaggaaggaggaaaggccactgctcagtcgcgtctcccaacgccagggttccgccaccgtcgacctcaccacccgtaaaccgatcaacggccgccgcatccgcgttactgccgaacacaaactcgcccccgccagtggccgccccatcatcaattgattcgtccttgatggtgacgcgctcaccagcactgtgccttggcacccagtgctgctgctccatgttccatggtggcggcgacgaggaggtcgatcccggcgatttgaggacggggctgcccggctgcagctggtaggcgtggaggaaaccgccgctggccgtgccggtgccggtgccggtgccgccgccagagcagtgcgcctgctggtctgccgcagcggaagaccataggaactgggcgatggggacctccggcgacgacagcgtggtggccagcagttggaggctggac

SEQ ID NO: 365787 - DNA, 275 bp, Zea mays
tttctttttttttttttttttttttttttttttctttttttttgggattcagtgggtcaagaacaaacctccatggtttaattcatgaatgtacaaaagaaggccaaacaatccatgcccaccttgcgaatgaacaaaaggtttttgattacttcccaaaatccaaaacaatttatacatttttattccggtttactgcctaccacacgccaattttaacaaaaaaaacggcttgtaatttggaggacccctttgcaaaaacccacaaaaattac

SEQ ID NO: 365788 - DNA, 179 bp, Zea mays
tcgatccctgccagttctccccattcgcctgcccggatcggcctagggtctgcacctcgctgcctgcgcttcaaacagaacctggcaccggcatgaaggaaggcaatagagggccgcgccatgcgaggtcaggaagccatgctgtacacggaggccgggtgccagtcctccgagggacc

SEQ ID NO: 365789 - DNA, 487 bp, Zea mays
ttcctcgcgtccggccagatggtacaaaagggaggcatgacggaccatgacatcccattatcccttcgacatccgcaccatcccggccgtctcgctcgcgacgcaccaaggtgccctcgtatcccgcggcgccggattgggttccctcctgggatcacgcggtgagccttgccgctcgagccacaggataatatgttcaatctgtttccttgttcatttaaacgtatagtggccttgtaggatgataattgaagcaaaatgactctctatttcaccatattttggagatggatgatctgcccggagatgaaggaagatcccagacacaccctttagaccggaattggccctcccatttggagcagaagttccagtccctgcccctgactaaacaggaaaggaattttgattctgcatattcttcccttgattctaggtgagtcggtcattcattgcatgctggtcacacattatggtcttacggatc

SEQ ID NO: 365790 - DNA, 258 bp, Zea mays
accaccatccaggcccgtaaaaacttacattttcttggggggaaacaactttagtacttggactaacaacggcaccacttaataagcattggactaccagggatcaaaaacacccaagaacaacttggagagggttcacccacccaaacccaaacccaaattacattgacacactcctttagcttaaagcgactggcctaataattaacacaagcatttttattggcccgcctggcccgaccagaaaaaaaaaacaaa

SEQ ID NO: 365791 - DNA, 175 bp, Zea mays
ttccttctcagcctgactcccgcgcttccatagggggctttgtttcttgcaaggcccctcgcacctccaaccatgggtaaagagaagggccacgtgaacaccgagggtattggtcacgttgattctggcaatgccgccaccacaggtcacaccatcgacaagctggtaggcactg

SEQ ID NO: 365792 - DNA, 349 bp, Zea mays
aaaagggtatatgggtcgacttaccaaaacaaatcacatttcttccagataggaagaggaataagggcctaagaaataacgttatgatttttggagaccacaggggcgataaatatggggggggaattctcccccgggctataaagggggggttatactcaggggaaagaacaacgaaacataaccaatgaaccccacagggccgggggcagggccatagcaaaaaccaggtggggcgcttttggggattttaggttatatacaggacattggtttaaccttaggggccacttggacaaaacctgggaagggaacatgatgcaacagggggggatctaggggggggggg

SEQ ID NO: 365793 - DNA, 115 bp, Zea mays
gacgggaaacgagatctgattgcaaaccggtggggccaacatagcccagatctaaaaaaatttcaaaagggctggtgcgcaaatttaagattttaatcaacagaacacaaagggg

SEQ ID NO: 365794 - DNA, 391 bp, Zea mays
atccattcccggggaagcagggcacatacattcagattttttggcattggctttttatgatacaatacatataatacactgtcttcacataggaggccattattggctgtttatataagtctacaaaacagttgtagactgtagtagctagggggtcccgtccatgacattccatggttacacttaatatttagttttaaaagttggctggaaatcaaaacaaaaaaaacgggccgggaacaccaaataaaaactttgtaattcaagagatagatgccgccgatataaaacatgagcagcaaccatttgtaaaataaaggggttaagatccccaaagtttgtacaacgcatgcagctggcccagggtagaagatttgggcgacaaacgata

SEQ ID NO: 365795 - DNA, 528 bp, Zea mays
tgtttctgatgaggagcatagggagctattaaataaagtcaatgaagatgggagcatccgtcaaatgagggagttaagacaggcaggtggaatcccaagtggtctgcatcgtggcaacagggttttatatgatgcagaacctgggcccactaccaagaggcaaagggcatctcattcgattccttcgcaatctgcaggcctccagtcccctatgatgccctcccactcagtttcatctgcaaaatggggtcctttgtcagcaagaggcaagaaggcgaagatggtatgttcagaattttatgcataatattttttgcatcctgtgatatatttatataacagcctgagaacaattttgtaatgacttctggagttgtacagcccattcctttggtgctaccatctgtggatccaagttcgttaataaaccataacaaaatataatgctgtgacggttggtttcaattattgctactgttcgcttcttgatgcacatatgcatcagtgcccagtaatcttctttcatga

SEQ ID NO: 365796 - DNA, 380 bp, Zea mays
tctcacgcgtgcgcacgctcacacgcgctcttgcggtggctcgtgagggcgtcccccctctcctcaaggcactagtaaaggtacaggccgtcatattgtggttcatcctgtcctagctaatgacgttgtcactgaagctcgccatgcatcctgtgatctacacggatatctaccgtgattgcgacgctgacttagccactgagctgtctacggcgttgactatgctgtccactatgctgcctttgctgcggctactgctgcggtttctcgtgtccaccgtcgtcttgaccatctacaaggagtgcttgtacgaggttcgacacctcatctacctcgtgttgtacgtcctggttgacgagatccacaaggaggaccacatt

SEQ ID NO: 365797 - DNA, 406 bp, Zea mays
aaataagagcaatcacctgttcatggtaaaaggtatagaggctggacaaagcagtaacatcttgagacaaaaagagatagagaatggttcaaggcagattaaatgggaacaaccaacccttagttttggggacatgggaaggcctttcctaactaggtctcaaagtgcattagagtcacctcaatgtactcgaagagatgacaataaggatccaactacagatagcacaagtgagtcattttcagaagcatgtctgagcatgagcctaggtattgcaaacaatgtaaacaggatggaggctacttcaacagcggaaaggcctgtgctattgtcaacaacagccattgctgaaggatgagaacttgccactacactatcttcctttcacacgcacatagggcacgga

SEQ ID NO: 365798 - DNA, 469 bp, Zea mays
tcccacgcgtccgcccacgcgtccggtaaaacctagtcccgatcgctcccgaggcaaggtcgacctgcctccaccacgacgatagcttttgcacgccgcagcttgggagggaaggaggtggtggttgctgtgtcgtcgccgcctaaggaggcagctcggaccagtcgtgtcgcagagccagcaaaggaggtctggagggggtactcacaagctaagttgccagactggtggcccaatgttggagcgacggtgatggaacctgtgccagagatggagaagtgggcatgaatggcaaacagattggtccgaggtgaatgcctgtaaatctcaattctaggttgctggcgtaattctgaatgtgttgcccaaatgcaccagtctgtgcgggatgttactattgttctgcatatatgttaatatactcaatcggcgaaccaaaattatagcaataattgatagtagagtcatg

SEQ ID NO: 365799 - DNA, 283 bp, Zea mays
aatggccatctcaaatggctaggggctaaccttatctctctttcagcgagttttcccatcattattcatgcactttttttttccttttcgcaaggttcataaatgaggtgacacactgacggtaaaataaaataaaaaactggatgaggggggaatggaagtacaattggcttggctggcagctgttaccataggaaccagatctccagcgtgccccgcaggctagctagcttgaccggcgagatcaatccaccgcgaccggttccatggcttgtgcctcctt

SEQ ID NO: 365800 - DNA, 260 bp, Zea mays
ggggggttaagcaaaccaaaacttggctgaacatgcccaaaaagacagggtttgcgttccaagaaaccccaaaaaacattgggggggccccctttccaaaaaatggggaaccaaagtttttggcgaacttgcccacaagcctgcctagaaaatcccccccctttctaccctggacccccttggaattcccttaagccctcgattccaagggaggggtattttttttccggggccccattggaatgcccaaagcttttaaa

SEQ ID NO: 365801 - DNA, 153 bp, Zea mays
tcctttttttttttttttttttttttaaacacatttgttggacgagaatgggttaaaagccctaatcctgatgggctgcctttacataaaagtgtagggcctggagctccatacatcgaaggggtctgttagcaaacccatgtcacgccacaa

SEQ ID NO: 365802 - DNA, 201 bp, Zea mays
tccttttttttttttttttttttttttttttttttttttttttttttttttttttttttttttttttggaacaagccaagttagataaacacgtccgggatgccaaattttttacattacggggggcatttacatcacttttcaacaacacattttcaccaacttgtttggttgctggggcctcactcaattggacccccc

SEQ ID NO: 365803 - DNA, 198 bp, Zea mays
ggggggaaagggggaacccaacccaaggattaggccccggggggggcaaacccggttacccccccaactggccccaaaaactttttacccgcccggccaattaaaatgattgggcccgctcccccacgaaaaaaactttgccagggggcccccaaaaaaaagcaaaaaaggcccgggggggggcccccaaatttaaaa

SEQ ID NO: 365804 - DNA, 349 bp, Zea mays
ttgttttcgcgtgggcggacgcgtggggcttctttgagaacgctaataatactttttgtctgtgtcctatgagttaaataataatttgctagccctgcagcttggcaaaatagtatttagaattttaggtagctttacaggtgcacttctacacatggcgatatttcaatttgctgatccaatgcattaacattggtaacaagaatgttgtgcactgttacgattttactaacataacatgatttgggatcaaagactgaactgatgtgctttgtgaatgatgactttggttaaatgtgctaataaagcactctggatgtcatgtcaacttttaccattccattcaagc

SEQ ID NO: 365805 - DNA, 99 bp, Zea mays
ctaaacaatctcagctgcactgcattatgagacggcactaatatctgttggagatactctgcttgtctcggtcccaagaggccctgaaagcactgcacg

SEQ ID NO: 365806 - DNA, 371 bp, Zea mays
tcgataggtagcacggcgctcacggcgaggacctggggtaaccttaaatagaagatgcagtaatactcatggcaacggcaacagtacatgaacagactaggattgagaagacctatgagcggatcatattgaacaagatagtcagatgcgctagaacgacaccaaagcaaaaaatggcaaaaggcattttcttaacattccaaatgatggagacatttcataacaaccaaggcaaaaaatatttatatgaaggactatgaacacaagccggcaggctgatgcgaatcatgaacggggcggaggttgtttttttgagggccatgcccaaccggtgagaaatcttaggcccttccacccaagcttcagcgggg

SEQ ID NO: 365807 - DNA, 386 bp, Zea mays
  unsure (1)..(386): unsure at all n locations
agtgnatacccaaagagacaaggcaaggaagcagagagaaactccaagattgggggcgactggtaagcaaggggaggagtagaggcggcgtttgttctccttcgattccctagtcttcctggagggcgacgaagggagatttcgccgggcgcggacggacgccgcgatggccggtgtcgacgccgccaggtacgcgcacagcccagcacaccacgctgtggcggcccgggaccacgccgcgctgcgccgcgtgctggacgcgctcccgcgggcgcgccggcccgaggagatccggacggaagcggactccgtcgccgaggaggcccgcgccgaggccgtctcggcggtcatcgaccgccgcgacgtgcccgggcgggagacgccgc

SEQ ID NO: 365808 - DNA, 329 bp, Zea mays
tgagttctagatcgcgagcggctgcccttgtgtgttttttttttttttttttatttttttttttacgcgatcgacacctgaacaagaacgatctagcattgaactaattaaagcttagtacattagtaactatcactgtgaatggatggatctactccagagcaattagtacgtttccgcttttcttatctgccagctgatgaccaaaccgagcagttacagatgcaaaacaagtggagtggcggcctctcaacgcaagcaggagcaggcagaggtctaatcaacggcacggaggcacctggatggggcgccaggccgacccggtgagc

SEQ ID NO: 365809 - DNA, 284 bp, Zea mays
attcgattatatggggaaatcaatgggggtgtgcacgaggatctaaatgccataaaagaggcgcttggactaccccgaaaggtcctagttcatcaaggtgggctaaatatggtcgaaaggaacgaaatgcttatctgtggaggtgctgatgtctaatgactaaatatatggaccttcgtgctctctattgcaagaacatgctggactcgctacattcagcactaacccaggaagtaaactaaaaacacagggctatcgtgtaactataactttaagacaaggaa

SEQ ID NO: 365810 - DNA, 317 bp, Zea mays
gcctgccttgtgccttcccttcccttgccttgcttggcttattgccggcacatcacatcggcaggcgagggacggagcgagcagggaagcccatccaccagccagccaccgcgttcctgagaagcgaggagcgagaaaagcgaagagcggccatgttctggcacggggtcgccttccagctcgtcagcgccaccgcggccgaccccagcaacgggggccgtggcaaggtggggaaggcggctgcacctggaggaggcggttggtgtctctcaagtccacggcggactgggagaccgtgtaccgggtgagcttcgagt

SEQ ID NO: 365811 - DNA, 472 bp, Zea mays
gggggccagagagcaatcattcaccttccatttaccaattgtaacgtgtcaacaatcaatatcaacattggctatacaaagttcccacctttccagaactacacatgatttcccattttgatcgtaaaactgggatacaccattaggacatacatgcatctccaagtatatggcatgtctgaacaatagttctcttaagttcgccaaaaaccaatacaagggccaatttgatcaaaccagcgtatatctacaagaactctcaccactcagcagtgtgtacctcaaaaggtaagctagtcccggtggccagtgagctattgcccaaatataaaggcaaaccttacttcagtcttgcaatgtcctatcaaaaatagaagttgtccatatctttgctgactttcgtagaatgatactcattgtagttcagatacccccagaaacgggaaaggccaagctccgtatattttgaaga

SEQ ID NO: 365812 - DNA, 431 bp, Zea mays
acttaaaatgcagcttgttaccatacagagagtgacatgcaacagaaaagcaagaaccaatcacttgccagttttgattttgagtcagtcatggatccatgtgaagtatattgtgcaaggagcccatcccttcttgttgagtctgtaaatggagcagcaacagctggacagcccagtactcagccttatgaacagcctgattgttctaccaagcttcttcaagctcagacaagaagtcagtcatcccttacttcctcaggagaaatgtcaacaggagatagtcttcagaaaaatgcttctggtggggcattctgggagatatcattactatataatgataaatcaaaagaaaaaccagctatggactttagttcacaatttgatatgccccttgatatagttattgataagtgcattattcaagaaatttt

SEQ ID NO: 365813 - DNA, 282 bp, Zea mays
ttgatcacgcgggcgttaagtgctgcaaactaacccggtatactaaaaccaactcgcgcggactgcctagcctgacaacaatgggcaaaaggatgcgcagacaggggacggaaggtgggacagggcagcgggtctttcgacggcgtactcctgacggctagagatagatgtgcgacgcgacatgacaccagaactgatcgaaggctatgcctaatgacgggcggggaagggcgccttgatgcgctaggagctcgcggtctactccagatgacgatgcacacg

SEQ ID NO: 365814 - DNA, 342 bp, Zea mays
ctgttgcgtgggtcccggacttcccatgggccactgggcatttttcctgtggaattcgtggtctacggcccatcctgtcggccggcgcctggactgtagcatgcggtgctgatgtccgacgggctacggagccatgctggaggggatgaacgagaggctcagaggtgggagcccagatacctccacccttactaccttccggggcccggcgtacaagacgaagctgtccgctctatggagaggcaggggctggctgcccccgcgcgaacttgccggctcggccaccgctgaggcttgcctccggacgccgccatctagaccctgctgacagcctcgtgctcg

SEQ ID NO: 365815 - DNA, 319 bp, Zea mays
gtttatacttactggaagttttgtagtatatattgataaccttgcagttacatgttagtcacggatttaaacctaacattttaagactttgggtgtgggaaccatgagttcaacactagagtagcgttcactcgtttcattacaacaaactatctgttgttttaaccttttcaattgaggcacatcttaacttttcttttttgtccgtatgattctttacgggatccattcaataaaccaatgctgccagtggtaactagctggcaatgtagattccctgcttttgtttgctaatttggtttcactacacagttggtag

SEQ ID NO: 365816 - DNA, 208 bp, Zea mays
ctggcgaagaacagtacttttattgtgccggcaaagtaatctacgacgacgcatattttacaggcatattccagtgacccaagtaaacatcacgaatccctcgaacctttatgcacgccacgcatacatataattaacgaattaaagagtttgaagaacatggacactgacaactcatgatttaaagagtttggcggagaggattgtg

SEQ ID NO: 365817 - DNA, 261 bp, Zea mays
  unsure (1)..(261): unsure at all n locations
gcacgncaaaccttgattggcattttcatcgcagcaaatgtttgcagaatcacatctcatatatactacacaggcaaaatttcaataagagggtctacaaccttcatttctcttttggcagctgtgcactagtaatagtggtctaaacacagcacatcttgactcgtttacaactccatgaccatgactaccgcgggtgctccccatcccccattgctagcctccaaacactgccctggatggaaggaagactaccaacac

SEQ ID NO: 365818 - DNA, 422 bp, Zea mays
ataaataaacatgcacatcatattctggaacgaagagcagagcaggtagctgtttcagcagcagacattgctcaaaagcctggcccccctccccaagtcccaaccttgaaggccaccccgtgcctctgcaggaatgtactcttctccccctgcaccggctgttgctcaacggagcagtcgcgcgtaccggcgcacgtgtggagccacgtggcgccgccgacgggggcctggctctcggcctccgaagaggaggacgtcacgcagctgtcggcggagcggcggcgcgtcggggagcagcagcaggaggaggacagggacccggtgtccaccgcggaggccagctccgcctccgcgccggctgccgagcccaggccgtggtcgtcgaggacctcctgcgcccggcgcagcacggactgcaggta

SEQ ID NO: 365819 - DNA, 372 bp, Zea mays
gctgaatctgaactaattttttaagatcttgtaccacacaacagaaccaactccaagctaataaattagcaacactcacaagaacaatcaactcaccaattgccaccaactgtacataaacgtactactactactactaaaagagaccccgcagaccgcagcgctagtcgaaactggaggaccggctccagtagccgtcggccgaggtgtacacggtgctgctgcattgcgactgcgactgcgacagcgtgtcgtcgggctccaccttcaccccgaggagcgcgaggttaagatgcgactgcatgttcaggtcaggggccgccgccgcagcctcctcgtcggacccgtcgaagctggacgtgacctgcgccc

SEQ ID NO: 365820 - DNA, 318 bp, Zea mays
cctacgcgtccgcccacacgtccgccgagcgggggagaaggtggaagaccttatcatgtgctaccccctacctgcagatggcggatggagatacaccgaccgaagcgctggcgctggaggctactaaaccgagatctagtctgtatgaagccaatcggaccccgcccagagaaccatatacggctgaaagatgctgtcctgcaacatacacgaagggttcctggaggccatgctgcgatgcaaccggtcgaggcttctcacagatgcgggctacaacaacctctggcagagggagaccgtacacgacatgaagatgca

SEQ ID NO: 365821 - DNA, 241 bp, Zea mays
ccgctgcgtaattgcctggtcgaaccacgcctttgatcattcggctggcgagcagaggcagctgtggaagggcatgagcacgtggggtccgctaccctgcttgctgccgcgctggttgcggctgagacaccagcgccggcgcggtttttctcacatatgaactatcaggagctcccgcgcgagaagcagtgcctggccaacccagacacgctgccggcaccatctggagcaggtctatggt

SEQ ID NO: 365822 - DNA, 335 bp, Zea mays
tgatgacgcggccgccgggaagtcggcgaggaggggaagaagttggaggcctatccagctgcaacgacggaagcagcaccggggccgggagagacaccgcatgaagcacgggtggtagaggagaagaaggcagaagagaagaaggatgaggaggatgagcacggtgacggagagcgatgaaccgtatgaatcagatggtgctgttgcttaggagaaaggagcctgttaccatatctagcatgcaaagggctgactactcggttcattgctagatcactgttaacttagctaaggtggccagatactgaaacgtaactacacagagtgaaatgtta

SEQ ID NO: 365823 - DNA, 369 bp, Zea mays
tcacgcgtccgccgggaagacgccgcggaggagaagaaggaggaggccgagccagctgcaccgacggaggcggcaccggcgccggcagagacaccagcggaggcggcggtggtagaggagaagaaggaagaagagaagaaggaagaggaggataagccgggtgaccaagaggcggtgccgacagcagcagctgctgctgctgctgaggagaagtgagactgcctacggatcgagcatgcaaagcgctccctcatcgctcccttgctagctgctggaaaattaaatcaagtagccgcgatacttaagcgtagccgcacggagtgaaaagttatcaagacaaagcagacaaacacttggcatgcatggaca

SEQ ID NO: 365824 - DNA, 416 bp, Zea mays
ttgtaagctgagaaatacttcccaccatgatacacttaatggctatggattgacttaagcattaactcttgtagttctcttgatggtgtatagtatgttttaggtaatcttgacaattaattcctatatattaaaccgctgtggaacaacctgcagcgaagtcatccacgtcgtctaaattatttacattgttccgttacgaaacgtactctgcacactttccttgcacgtgggtctggaactttcccttcaaagacatccgtgccaggctaaggaggataaggcactaggaggataaggcgaggcgccacagggcagccatcgtgcgctctcgccgtcccgcgcagatccagctttcttgcgcggacgccccgtggttgctgctgtcatgctgccggatcccggctaaggttgca

SEQ ID NO: 365825 - DNA, 238 bp, Zea mays
cttttaatctactctgaacgaactggttatgaagctggtgatgcatttaaggagggttgccgactcaccctccaaataataagactgggaggttttgaatatcacgaaggacatgatctgaacaccgaacaacgtcaacgctgtctatatgcactgactgggcactgtaatgaacgtcattaccaacttcactgataccgttacttcacttaacatgttatacgagcctacaatgact

SEQ ID NO: 365826 - DNA, 332 bp, Zea mays
ccgcccacgcgaccacccacgggggggattatttaaaacgtggacggggtcttatacatcggggaaaggaattggacgaaccggtcgaagcaagcaagctatttaccactagcacaagtacgcacgacgtatcgactgacgatggggtcctcgacggcggcgccactcctacccgccgggggtacgacgcgcccgctgcagcatgcgccattggtggccgccggcgccggcaccggcgggtcgaacacgccggtgctcgtggtgctcggggagatcgcggcgctgctggtgatctcctgcctcgaggggcaagtctggaccaggaaacacct

SEQ ID NO: 365827 - DNA, 464 bp, Zea mays
tttgataccgaaagagaggcagagcttggcaatggggctcccttgaggaatgctgcggccgctgctgctggtcctctccgtctcgtccccgtcctcgtcgtcggctgctgccacgctcgccgtcaccgctccgcccccactgcctgttcctcctcctcgtcatgctcaagacgccgaaggtaacactgctggctgctgtgcttgcctctcattgatttcaccatcaccgcgctgttttttttctgtgccaatcttccatccactatcccattcctggtgctcggggtcatttcgtctggattctttctagatctgcatgctgttctgtcaagcgcagcgcagtgcgtttagagtagtagtccatgcttgatcgatctccgtggaggaaaacgaagaaacagcggcctcatttttattacccctacagatgtctgtcattcgggcaggacagtgaatctggtcta

SEQ ID NO: 365828 - DNA, 220 bp, Zea mays
  unsure (1)..(220): unsure at all n locations
tttttaatgattttatactaaattttgatttacgtgcaagatatatttatgtcatggcgcataccttatttttaggtcgtgctccgccactggggagggaggtggtggggaacgacngacacacccaccacggtgaccgctgccaacgctccggtacgttccgagaacagtacaaggctactcgaaggggatctacttcagtgtaaacgattacacggtt

SEQ ID NO: 365829 - DNA, 196 bp, Zea mays
tcttcgcgtccgaaaaatgtcactatatagtccgcctatttaaaaaaagcagggggttaaaaaacaacaagaaacatcaaatcacactgcggcaacaagagctcttgacaatgaatctgaacctatccaaaaaacaaaccgaagggccgttgggtttcacacttaaagaagcttacttcccttgagcggaagaaat

SEQ ID NO: 365830 - DNA, 374 bp, Zea mays
ccgcatggatgggagctcggaaaggggctcattggcagcggagtgggggctcgaatcgacgcggaccagtacgcagcagacgtgatcgctctgaaacacatcgtcgacagcgcctaccaaggggttgacgaccatctggttcagaaaatccttgacccttcttacctcgacggcgaggcgagcacgttcagcaaccttcaggggatactcaagtccgcaggcacgtccgctgtcgcctgggttggcgaggctggaggcgcgtacaacagtggccaccaccttgtcactgatgcgtttgtgttcagcttctggtatctggatcagcttgggatgtcgtcgaagtacgacacgaaaagctactgcagacagaccct

SEQ ID NO: 365831 - DNA, 260 bp, Zea mays
cctccagccctatagataggcccactccgcttcaacgtgtaggcaagacctgcccccgcgcctgcaatcctacgaaaacagggcccggcttctgctgcccgtgaagatcatggacgccgccgccgacgacaagtcaaaaatctccgacgacacggtcgaccagagtagtgcctgatccacggaatcaaaatggctccgaccccacaaccggggacaacagcatatacaccaaggaaactgtggaacaaacatggcccccc

SEQ ID NO: 365832 - DNA, 328 bp, Zea mays
tttgaaaactcgcagagctagagcatctcgctggcgaaacagaggagaggacggcgcgcgagaggaggaaaggaaaacaaccacgagtccacgagaccacgaccccccatccattccattccacttccacccgagcaccgatcacggcggcgatggggaaggtgccatcgtcgcgggcgggttcgcggcaccagcagttccgcgcccgcgccatgacccgcgtcgacgacctccaggaggtcttctcgggcctgcagtccgcgcgcaaggactcacgccccaccgacgccgccatcctcgaggcgcagctccaacagatgctgcgcga

SEQ ID NO: 365833 - DNA, 504 bp, Zea mays
catagggatttggtagagagtcagaaccaggagcgtctgttaaagatttcgagtgcagagcaagagcgtagcctatttgaaggagagattaagagcgtcaggatggaattgggggcagtagaggaggccaagcagatccttacgagggagttcgatgctgagaaggcagagatcctgaaggaactggatgaccttgagaagaagctagaggaattgcagaccaacaagggtttgctggaggctgaaaacgacaagcttcagctggaggttttgaccgcacagcacaaacaaagcatgtccgaagcagaggctgagagccttaagatggaactgggagcattggtggaggcaaaggaggcggctacaaaagcatttggtgcccagaaagcaaagaccacgaaggaactggaggatcttaagaggaaggtggaggaaattcaaaccaagaaggattctgtggagggcgaaaaggataagcttcgtttggagatttaatagcggagc

SEQ ID NO: 365834 - DNA, 476 bp, Zea mays
tcgtagcatgctcgaagatggaggcacttctgttagttttgtcaaaacatgtgaaggatgtcaactaaaatgtgtgatacgggttcacaacccccagttctattggaagattgcaaccgaaggagaccctggttttgcatattcctacatcaatggttatatctcgtttgttgataaaaaagaaggcatccagaatattgtcgagattattattgctaacagaggtgaacggaaaaggttgagcagtacccgtgccaggaataaaagtggttatgtaaaaaagggctggtggacacccttgtttaaaaaaaatggagctgcaatggcaaaatatgttttgcatgaagtcttaaggagaaacactatatcaaaagcttcgaaaaatatctctgcacactatgacctgagtaatgaattctttgctctttttctggatccgacgatgacttactcttgtggtattttcaaggtatgga

SEQ ID NO: 365835 - DNA, 259 bp, Zea mays
acccgttcatacatagggtcgttgcgagcacccttaggaagtgattttttaagagggactgggttcaccacaaacacaaactaacgtaagcaatggatctaaagctggtgtcaagaactcccataccgacttactacacccgcggagaacaaaaccaccgataccgatctcgtgttacaactcagaggcactcactaattaagggttacacctgaagaaccagccactggcttttcaaccaaatccgataaccaatcat

SEQ ID NO: 365836 - DNA, 423 bp, Zea mays
cctttagtgaggaacccgaccgagcgcagcagcgcaggtcttttttctcaaatccgtgctgcgagaaaagggagctcccacaagtggtatggctcgatagaggttatttggatctgtgatgcgatagaaattcatggtttaaagataggggtgacgagcagccgcgggtggctgagcacttgctgtcttgcatcaaggctgaaggcagctgcagggattacgtggctataaagatggatggctcgagtattctgcgacttctttagagtaaagtgctttcggcaaggagaactgcagtgggtttgctcatggaactggtctgcttaagaaggagagaaatggttgaattgctcctgcatggaacgagagcagactccatcgtggaggcaatggatgtgctgctggagtacctccggagcttgc

SEQ ID NO: 365837 - DNA, 159 bp, Zea mays
tgattctctgacagaaattctagagtccatctaggtttaattacaaaaggcggggggttcccacccggagcctgccacaaacgaaaccagccgccaaaggcaagcggcaccccccacccgagcaggccgcccagaccaccaacaccgaagacccccgct

SEQ ID NO: 365838 - DNA, 382 bp, Zea mays
tcccacgcgtccgcttgggacacagggaggggggctagtacaaaacatagggggatacattacttatttacttccgagaatcaaactaaaatgagacaatggttgttccatagtgagacattaaaagagacaaagagcagtttcatggtcatatctattgagcgacctcttgatgacacttccattcttgtgggcaacatctagtgctactataagttgagtctcatctgctggcatcccgggatggcatgctctctatctggtcaaggcacttgtctatgcaacactaaaagcacactacaatggacactaggaagggcgttaggaattgagaatcatctgaactacatgtgtttgacgccgcatctagcaccagaaagat

SEQ ID NO: 365839 - DNA, 154 bp, Zea mays
ataagggggcctgcacagctataatgggggggaccataacgaagtcttctttccaagtctcaaacgggatgagagtatagagctgtgtgcctgactataaaaggggcctcaccaacccaggcctagcaaaccaaaccaaaccaaagcttctcaa

SEQ ID NO: 365840 - DNA, 355 bp, Zea mays
gctgcagatgggtgaacacacctgagctgcaggaggtactccttatcttcatgcagctgtggagaagcagatgtttcttccaggtccatggccagcactgtgagacatggcatggtggatgatggtgcattggggcttcttccaccggcgcctggtgtcttttgttcactggtgcttgggccctgtgatgtgagcatctcgcgcagctgctcgagcttcttcgtcaggtcggccttctcttccctcagcctggcgctctcccggcgggcgtcatgtcacctcctgagctctcggttaacgtcagcccactaggatcgacatggcgccgcctaggtgcgagacctgcgcccacaac

SEQ ID NO: 365841 - DNA, 386 bp, Zea mays
gcattgtaggggggggtattcacaagtacactgacaaacaacaagcagaacaaagtagtaactaaaacctactcagctgatgttacaaagcacgcatatacaagcatctccccgactgtacccggacgtcctcctctccatggcaagaacagctccagcttcttccaccattcctggcatctatctggtcagtggcctttttgcaacgccggccggctactctggctgacgaggtggtgaagccagacgaccagctccagaatgcgatcctcggtccttgccttgtccgcatggtacagcgtctcgacccgatccgcttggcccagtcgtctgccaacgctctcggtccctgatttcgcccactcgctaaacctcaggaagaagcc

SEQ ID NO: 365842 - DNA, 514 bp, Zea mays
cgtacgcgtgggcggacgcgtgggtttttttgtgggttcgcatccttttttggtggggcggtttcctttgtacgggaaattttcggttggtgcggttggttggtcattttcccgcaccttctctttggttcttgctcgagagcgccatctttcctgctacccgttgactcgggcgggcattccgtcgagcaccttccgtgcggtgtggggagcgacggttcctggtttctcggggacgttccttgatgccgctgttgtgtcaggcgcaggattctagcggatggaatgccacagctggtacgcgctgaaatcaagaagatctgtagcgatcgctggtgcggggtttgaagatgctgcagaaggcgccagcgatcttggtgacacgatgagtcttgcacgcaagcagaaggttgtcaaggaaacagtggagatggaggaggagcaggagtttgtttggaaatctaacctgcttccctacaaggatgatgatgccttcgttctttctgagagtagc

SEQ ID NO: 365843 - DNA, 410 bp, Zea mays
ttgacccacccacccgtgcatgcacgcgcgggccctcaaacacatgggtggggttaattaaacaccggggggcttcaaccacaagaacattggaggaaactgtaacttcccatgacaaatataagactttaaaccgcacccccatcgagatcggatacccaaccaacattcttttaaacactacctggggatgccaggtgccacacacctcccaaacctgccggactcccttgtaccaagcttacacaagctgttgccattgggctcgtacaatgcatatttgctgatgcccaacctgctcaggcttcatttcctgaacaacatgctgaacaccacgtacatccgaagactgaaccactaggtgcacaacatacagccactaactgacgccttcccaatgcaaaagcaag

SEQ ID NO: 365844 - DNA, 203 bp, Zea mays
atatttgccaacacgccatacccatacggggaggggtacttaacacaggggcagccggcgacagacatacggagggagaggggcttagggctgcggcactggccagcgtgattgctgacgctatagcgagaaagccacagaatatggtgtgcctatgagtggggccaacctttcgtagagtagggagtgataaccggaaaggc

SEQ ID NO: 365845 - DNA, 372 bp, Zea mays
aggtgcaactgctccttgccaaacatgtattctactagtataatccagtgcaatatacaaccctccaggcattgccctgcaaggtattaagttcctacaaaaattcgcaattcccaattggaaaagggagccatccttttggcaactgccatgttttctactacctacatatgcagctcaagctgatggagtctgaataaaaattcacgtatctgagcacatacgtctcagctggtgtagctccttagaaaaccaagccctccaaaaagggttgaaccgccagatctcctggggcttggttctgctgagcttcggacaccactcggtaactcagaggatccttccttcattgaacttgttctgctgaaagca

SEQ ID NO: 365846 - DNA, 253 bp, Zea mays
agttgaccagccacctagctgaacccgaactggggcaccaaccatagctactagggactagacacccctgcccccttcccctccggaggagctggatacacccatactctccctcgcgggtcccggcgcggacgcaaggcaaaggcaaaaggcggcagaggtggcgctgcaatccaccaattagcggctatggtgcttggcaagatcgccatcgccaatcggttccgaagtaatcgaatcagacctcacaggg

SEQ ID NO: 365847 - DNA, 443 bp, Zea mays
aactcttgatttttatgtctatatttaaatgtaaaatgatgactatacaaaacaagtacatcagttatggcagctaaaatctttgaagaaaaagacgggagctggtgtagctgtccactaaacatccttttcagggactcgagaagctcaacacttgcactacttcacaaacaaacaaactagaagcgccatacatgcccggtgtcctgttatgattggatggttagatccaacacagctgacgtgtagtgtaggtaggctctcccaagcccacaccacctcccagaacctaccatcagactcttcaacaaacttgtttccctcttctgctgcatccagctgccatgtgatgaaaccagggctatgtccaagctgagccagaggtgtgctctacaacgacacagctgcatgcaggatttaggttcagctaaccaggctccatg

SEQ ID NO: 365848 - DNA, 503 bp, Zea mays
caacagcttgcggcgctgaagcggcgtgaaccttcaggaggaggggggatgaacattgcttgacttggtaaccagggaaacctgcagaatgctgatgatgattggaagagatcacttgctattcggaacaagagctacaaggaattgatggtccagtgtaatgttttgggaagatcagagtctcgcatgcagcagaagcttgaaaaggccaaagaaattttaaagaagttaaaggcaagggtacaggaacttgagaaggaattagaagataaagaaaatggtctgttaagggacttgaggccttcaaagaaatttaaagcagaccatataaaatctgggaatgtcacagctaatagtgctttcactagttcaagccctggatatgaaaatcaaacacacaagctcgatgaggtgatgcaagatccgtgcaacgacatgactcactgtgaccggttaaaatctgaacttggagtgttctgaatgcccaagacaacctggacaac

SEQ ID NO: 365849 - DNA, 561 bp, Zea mays
tttatttttgatgagaattcaggtatcaatcggggggaggtccaaatgcacgatggggagatcaagcatgaacagaaaaacgatgagaattcaggcagcaatcctgtcgaggttcacaaacacgatctggacaaagaacatgtcgaagaagttgaccagaagtcaagcagcaaccatgttgagatcagtgcgcatgatatgtgtgaggacaatgaacatgttgagaaaattgatcacgttgaaagaatcgatcagaattcgagcagggaccctgtcaaagccatcatgcaggaaatgatcaaagtttgtttggtcagtggaagcgtggagaaggtggaggaagaggactcaagcaagaaggacttggagaaagagatagccccaaaagataataaagatatggaggcctctgatggaagcaagctcggcgtcaacggtccaggtatcatcctcagcaagcataatgatgagtgtggtggtggtgcccaagaggctgaatcgatggagaacacgccgaccgcacagttgatgatgcatcaagaccaactcttagatgacatg

SEQ ID NO: 365850 - DNA, 471 bp, Zea mays
cattaacagcaataagcaacgatctgcttcattattattctatttgattaagagtgtgtccttactccacacacaaaggaagttatgttattcgttgattaattcaactgtacacttgatggctacaaaaaatggtactttattttaatgttctctcttacatgtgaaattggtttgtacattgtacaataacatttgcattctcagaaatgcataagctaatgttctatgcaattttccactgcaggcagttgttgggtcagcagctttctggcctgaacgtgggagatttgcagaatttagagaataagctggagacgagcctaagaaatattcgtctgaaaaaggtttcattgcagattcttcagactccatcacatatttaacaacatatatagataccagttgcttctttgtttaataactgccaatttgcaggaccaacttattttttatcagattcaagaatta

SEQ ID NO: 365851 - DNA, 357 bp, Zea mays
aactaactctaccgccgctgtgcctgtgctaggggcgctctctgcatctgcttggggctcactcaacctgctgcaagcttttgctttggtttaggtgcttcttttgcattcctttactgttccccccccactttcgctcgctttgccacgcacacgaaaagctcctgcctttaccttctcggaccttatctccgccccgcagcgggatctggtgggagctgggctgcagctgcttgccccctcgcgattctttgcctaaatagggggggtcacagcccccgtctgtcccgctccctcatgggccgaattcggtgatcttggtcgcgcggtcctcgtccccttccccttggcgcgact

SEQ ID NO: 365852 - DNA, 362 bp, Zea mays
  unsure (1)..(362): unsure at all n locations
ccggaattcccggtcttcctacgcccccataataatcaccagccaccagacggacatctgngggtttttttaaaccctgctgggtgttataaacaacaagaccatcacgttcatgtatgaagtggacatactgaaagaattgcttgcatgggcgattgcctccgaggaccctctgaggaggaggagcttcacagacccctaaataagacaatggtgctcgcacgagtctctcaggacggacatggacacccttcataggtgcctggcgaaagaggcgtcacaccgcccctcgttggaggacatgctgcggaacctccatttcgccgcccaggtgcatgacgactggcagacggatgcctgga

SEQ ID NO: 365853 - DNA, 312 bp, Zea mays
gaggcaaacaagggggaaaaaacaggacttggccacaaggacaaagaattggccaacaattaccaaacgggggttcatcctggaggggtgcacattattggctggccaatttacaaacatgggaccggggggccaaactatgggaattcattggacatcacaatctggggggggaaaagaataccccattccaaattataaggggggcgggttttttctaaaaatataacctttactatgcatcgggggggaacatcggaaaagctttgcctctagaaaaaactaaaacaacttacgatttaggggaaaagg

SEQ ID NO: 365854 - DNA, 255 bp, Zea mays
ggggggaacaggttaagcacatttttcacggggtagagcgacctttcccagggtcgaagggaggcacaatacgttttccatccacacacaaaccatacctttttttccatatgttttccatccacacacaaacgcacacgcacgcaggaattatatatttatatcctttaacgtactgacacgacgacacgggggaatatatagttttggaggctaaattaccggccatggaaatccatcagggggggggggggg

SEQ ID NO: 365855 - DNA, 263 bp, Zea mays
aatgaccacgccgtcccagacccgttcccagggggggttttataacaactcacggggtttactaaccagcgagaaacatgatcagactgcgcccgatacattgaagagcctacctgtcactccttttaccctagacactaagtagcactatctcctcaacgattcatacacctaccaatgggtcctccagaagcaaagtaaaacttatctatatcaaaaaaaacacagcaacttataacttagtgacctagtacacatttgat

SEQ ID NO: 365856 - DNA, 554 bp, Zea mays
  unsure (1)..(554): unsure at all n locations
tcgtccacgcgtccgggtttctcatcacctgcgagcancatagcaatacctctgtggtaatctcccagtctaaaaatatctttccactagaacgagtctctttcagaggagcaatgaggaatctgccatgagttatagcgagtattccagatagggaacttctaatcgatcataaaacttatgaagatgtttcattagcaaagcaatattctgtatttttaagggtaataaccccagaccacccttgtccttgggggtggtaaccttatcccaagaaatcattggcttactatttgcattaatatcattctctttccataaacaatctcttctggctctatcaatagagttgatgactaagctggaagcttgattgtgcacatggtgtatgtaggaagcgtagaaaatgtggaatttactatagtcagtctccaagccattgatagccacatgctggtcataattggtcttctttctattttactcaacagaggtaagaaatccttaattctgggctaataatccccatttgtagactgagatatgtaaaggga

SEQ ID NO: 365857 - DNA, 240 bp, Zea mays
ctcttagaccaaaccagggatttcacttcacggggggtcaattaacaacaggagatggcgcatccgccaaaagccgtacacatacaaaacataaatacacctcacagcactagttaaataaggtactgctccttttgccttattattatttcatacatatatatatgcactaggggttaattccagcactggaagacatatgacctgcttcttcaggtggaaaggactcgagctttccac

SEQ ID NO: 365858 - DNA, 277 bp, Zea mays
  unsure (1)..(277): unsure at all n locations
ccggtccggaacaccttggtcttcccacgcgcccatcataacgagggaagcttcacccactacaggnggggttttttaccatcaacggggggaccctaaacaagctgcaccaaccctatccccataaccctaggtcccattctccatgcccctttccaaagaggcgacgaaggaggctaaaggaaccaagacctcctccggctgctgcggtggagcacacatcaagggtatggccactcacgggggccgttacctgctgtacaacttgtccagaaac

SEQ ID NO: 365859 - DNA, 261 bp, Zea mays
gaggacggcactgccgtgtacattgccaccatgaagcaggcgccggtttcccacaggcgacttaacttggagaagttcgggagcagcaaggctgctactgccgtcggccgcggcggcagcggaggaggaggaggaggagacaccccgtccaccagggtcctcaggaagccgagacagagttcacccaaacctatgaatcatgggtcatatattgctcacctccaaaaatcactattgaagaggactctaaggggagagcat

SEQ ID NO: 365860 - DNA, 484 bp, Zea mays
gaggatgagcgactgcaggttgacaaggttgccaatggtgcttgggagcttctctaggtggccgcagcggagacccaggtacctcaaatggatcatggagccgatctcgtttgggagcctcttgagctcgagtccctggatgtcgatgacacggaggaacttggaagcatggaggaagctcaggtcgctggtgcggatgaagttgctggacctgactcggcgaccctccaccaggtcgcagatgatggagcgcagcttggggagcgcgttgctgagctggacgtacctgtccgtggtggagttgaggacggcgaggcgccgcacggtggccggcgcggcacgtctgtgctgtcgtggctctcgatgaagctggcctcctgtgcctcgtcctgcgcgaatgcgtgcagccgtgtcgtgcaccaccaccgtcagcacgggtcggaagtcgtccttgtccaccagctgcaccatgcaccgggagatg

SEQ ID NO: 365861 - DNA, 169 bp, Zea mays
gaggcctcttcttggattataaaaggatagatgagtcatctactagattataagataatatccagcagatcgtgtatatggttgtgtaaaataatattttgtagtacaatatgcattgttcatatattgaagtttggagaatggattgtgtggtgatggatgatgaatg

SEQ ID NO: 365862 - DNA, 261 bp, Zea mays
ccgatcattaccggcccagcgaccaacccacaagggggggatatcctaaacaaccggggggtcacacaccccccccacccaagcccaccccaccccgaccgctcaacacaacgcagcccgaacccccacagcgaagccacaggcggcacccgacgtcctccaaccatgcgcggagccgccaacccgacaaacaccacaccagcacccccacccccaaagacacacagctggacaccatctgcccccagagcaagaagccca

SEQ ID NO: 365863 - DNA, 379 bp, Zea mays
ctgcccgacggccatctcgtcgtgctcacggggggcgtcgttgacgcctgcgggctccgctcgatccaggcgctcctaccgacgctccgcctcgtccaatctcgcgagatcgacgcccaggacgacggcgactcctccactctgagtacgcggcaaagaagggtgtcacgttgcttccttacgcagcctgggtcaagaacgagacactcagattcgagatcaatggcgatcctggaaaggaggacgaggccaaggccaatggccgtggcatggggcgcatccgccctgctaccgggaagaagatgaacggcgaggtcaggagtgtccctgcgtttgactttgccgagtggttgaggcagaccgtgacggagcaggacta

SEQ ID NO: 365864 - DNA, 221 bp, Zea mays
  unsure (1)..(221): unsure at all n locations
tnnnnttttttttttttgcagacaaacggtctcaaatggaatttttgaacatacacgggtgcaaaaaacgctttaagtatacaggcaaccaaacaaagacttaaataaaatcaatgcatgcactgatacaggatgagacggtgcgactaaccaatcagatggttagtgattgacaaccggtgcatgtctactcgctcgcattctcccgcgaggattctctc

SEQ ID NO: 365865 - DNA, 393 bp, Zea mays
ccatcacaatgaatgatagggcaagaaatcaactaagcttgggtggcaaattacatgatttgaaagcaaatcaactgtctagctacaagaatggatgaacaagggatcattctgtatctcttataaatgatggtttagtgaaataaatacaatgcacttctgttttgataaaaagcatccgataggcgggttcattgacaactcccaaatgaggggtggcatcttttatgctgaacgaatgatttgacctaatgaattacaatatctggatatcttctgtaaaagaaaaaaaaaaggttcaaaaggtgtgccttgctgcaggtatcacacaagggagttcttcagttaatcattcaacctaaaaaggtaatcttcatgctcatcttcgccttc

SEQ ID NO: 365866 - DNA, 411 bp, Zea mays
ttctctcgtccgttttttttttttttttttttgttcacttcaaatctcggtccttcagagggattatttactttcaaggtcgcgtgtatacatcacaagtgcatttttctcatacatcaaaatcttacgaaacacacttactaaagcaccacctggccacaatgctgtacctggaggggtgctgaagctcaaggttgtttaagacgtggaaaaacatacgacacgaggcagtcttccatatccagcagcagaaaccttacgcatgatgtattcaggtcaattggctcttccctgaaaactaccaactatactcttcccctagtaagtcagaaccatagacaaatacttgtccatacgataccaaaaagtgcgtcgagaagcctatctcaaactggtcagattatatgttag

SEQ ID NO: 365867 - DNA, 408 bp, Zea mays
  unsure (1)..(408): unsure at all n locations
ttctctcgtccgcccacgcgtccggtgcgctgcccgtgcttatcttctccggttcccaatgtcctcctccctcctccgcgcctcgcccttgtccctcctctcccgtctaaagcccaggccatccgccttgcacctccgccgactcctcccgctctccaccacctccacctcggcctctgtccccgcgccccagttccgaaccctagtgtccgcgggcggccaccgatgcggctgcgaccccgccggaggaagtggcggcgcccgccccggctggtgcgaaggtagagaggttgcagccgctgcagtggccgcccagggatgcgctgtgcagcgagctggtgcgccgggacgccgggcgcagggtaaggctatgcggctgggttgcgctacgccgngcgcacgccgggc

SEQ ID NO: 365868 - DNA, 270 bp, Zea mays
  unsure (1)..(270): unsure at all n locations
atgnaacacagcacttggcatggcgctcggggggcggccggagcagagaattcaccaatcaaaaaacgggagcgccggaaggcagggaacaaatacaaccgtacggaggctacaaaaacgagtgggaatgaaaggaagggacatgggtgctacggtcttctcttccattttggtgtaggctggttcatcctcctcggagggctgacgaagtgggtggtcgcgacgaggtcaaaatggcggctccgctccggctgctggcagcttcgcacg

SEQ ID NO: 365869 - DNA, 324 bp, Zea mays
ttcatgtgtcctggaaaaatttaccccactggctggggcgtgtatgcaagaccattggtttcagcaactcgacccacccatcacttgaggatgacaatgaatacaatcctgcaggaagtacctcaagtttactgaagtatgcaatgatcaggctagagcactgcatgactggaggctgaagaatcttatagctgctatcaaacggcctgagttccgtgagatatttcaggtaaccattgcagagctaagattgagatcatggcgtgataatgtacagaaagtggacacaataagacgcacggccgcaaaatcagtgcataactt

SEQ ID NO: 365870 - DNA, 135 bp, Zea mays
ggtccatttacgccacctctgttggcggcggcatgttgaggtcgaaccccacgcggaccgtcggggaggcgtccaccacggatgacgacgacccggtgtcgctctgctcgtcttcacggcagcaggagtatgctg

SEQ ID NO: 365871 - DNA, 167 bp, Zea mays
tcgtactggaatgaaccgatcctcagaaccgagggctctaatcaatgaagctggtgggtacctacacctctgtagacgaaaataatgtacagaggcacacatcctaccttgtcaggtagccaaacctggtgaatacccggagtgatgcagagacataagatgaaagt

SEQ ID NO: 365872 - DNA, 355 bp, Zea mays
ggtccagctacgccacctcgttcggcggcggcatgttgaggtcgaaccccacgccgaccgccggggaggcgtccaccacggatgacgacgacccggtgtcgctctgctcgtcttcacggcagcaggagtatgctgcctgcttgctggcgcccgcgcccgcggcagcagcggtcggccggcgaggcacgggcgccgccacggccacggtcaccgcgagcctcgggtccaggaacaggaacggctgggcggccaccatgggcggcatgccgaggctcaggtcgagcgacggcgcgggggccggcgcggcgggcgagtcccgggacgacgactccacggtgctgccgatggggctcac

SEQ ID NO: 365873 - DNA, 241 bp, Zea mays
tgatctagttagtgtgttatgcctccagcaaggctcttgaaagattgtgatcgtccctgtgcagtggtgaaagtcgtctcactgaatcaccaggtcacgaattcaaggcatcctctccacatttgcggggagaaagcttgcctttgtttgcaccttgcccagaccccactaaagctggatccacctgtacattgactgggccgtttaatgcatactccacaaaccacttcaagaaccttgc

SEQ ID NO: 365874 - DNA, 399 bp, Zea mays
ttgtttcgtgggtcccgatcggccaacagcctcgatcacctgatgagtggctctcggtgccattcccctcccagggccaggagtctcctcgctcaatgagttgcaaagtgcgccaccactaactgcgcactaattaattaacagcacaagtctgtctagacgccgacgcaggaagcgacagtcgtgggctgtcaacttggcgccacgcactgtccatcacttagcttgttgtctgcatccgcgtgcttgtgattggatgagttgattattgcatgatttggttatcgtcattgattgattcgggcaggcaagacgttcgagacccgggaccctcgcaccggcgaggtgatcgccagcatcgcggagggaggcaaggccgacgtcgacctcgccgtcaag

SEQ ID NO: 365875 - DNA, 466 bp, Zea mays
cgtccgaacacagccgttttatccgacccgatccaacaagtgaatgcaatgcaccagatcagtgtggcacctggcgtgaattaaatcttgctcacactctggtgtgtgtactcttagcgcctttaaattgggtgtggagggagtgtatatgggtgcaaaaataacatagctttgtacaagtaaacaaacatggttggacatcacttttacctaagatttttattgaggactaactgtctctgcttcttacatcctagactgaaaattttccattagatgtccacattgccttggaatgtattgattgtgctatctctctcagcatcaacatgggaaataaggactttgtatacatcaggatcatcgagtccaaaatgtgttgttactcttatgctggagattgctccaaagttttggggcagatggaagagaaggcactcaaattttgacaaaagcattccttttg

SEQ ID NO: 365876 - DNA, 431 bp, Zea mays
ggaccggccggaattcgggcgacccacgcgtcttcacgcgtccgatccgccgtcgccgttcccgagcatcgcgaaacccgccctcgccgtctacatgcacgcactcggcggcgactgatgctcccatccccatctccctcatctgccccttggaggactcaaggagtggcatcggattgcagctaactgccctgggcagcccgatctagcgtctggtgcgcgccgttggcagccagcggtggcctgccgagcgccgcagggaagccacgagcacacgctgtcacgggaggaagcaggcggagcacacaggcctttctgtttagcccgccaggtagatcggatttagcgagatgcttgcggcggtgatccattgccaccagtaacagggaaaagcaggcagctagcggccgatccatctctgacgacaacgc

SEQ ID NO: 365877 - DNA, 427 bp, Zea mays
ttttctcgtccgaaaaaacagagagtagtagactacgacagcgtccgtcgaaccggagggtcggaggcggaggcgaagatgaggaagaagctcggcacccggttccccgcggtacgttgcctcccccatccagctcccctctctcctcctgttcgtatcttctcgctctgatccgccgcgcccgcgcgcgtgatctgatctcggtcgccgcgcgcggtgcagatcctcgctcttccgggcgggatccggtggacgcagcccgccgttaacgcgcggcttctctttttggttccgtgggcggggatttggctgggttcttggtggggggcgccgtgggtggaggcgggctcgggctcagatcggctcctgtgctcgcgcgtgcgcggggaaagaatttcgtttacgtttggtttggtttcattctttc

SEQ ID NO: 365878 - DNA, 335 bp, Zea mays
tcgtttgcacgtgcgggggaatctggatctatgagtgcttttatgaacactttcaaggaccaacctaaggagcaggtcgcgcgggtcgactcatgagactgtacatgcgcatggacagacaataagggggtgaaatgcgggctgatatgctgcgattttgagcaagggtacatgctggagaacaccaaacagatctccccacagagctttatgaagaggtggaagaaagacacgaatgagactgtgggtgaaaccgatgggacaaactctgacacaccatgtcgcattgcaggactctgtgcactgctctaccgaatggcctacaaagctgctga

SEQ ID NO: 365879 - DNA, 353 bp, Zea mays
ttctctcgtccgccaccgcaatcgggcgggcggagcgcgaccgccggatactccgctgcgcgctccgagctcaattccccgcgcgcccagccccgagctgaatcccccgcgcgcggccccgagacttaatattcgatcacccgtcgattccagctccgatcccctgcctccttacgttgcggagactcccgcttctgcggcggaggccaagcaggagtcggtgttggagacggaggaaactaagcaggcggtggcagcagcagcagcagcggcaggaggtgtgcaggccatggcggtcaccgtagtgcgggacgtctagacgggtctggacacgagtaccagggaccaggacg

SEQ ID NO: 365880 - DNA, 361 bp, Zea mays
tttatctgaagataaaggtttttgtgcggtacttactaaatggtgttatacacacaaaggataacttagtaagatgtaataggcagggtaataaaagatgtgtgttttgtgactgatgatgaaacaatacaacatttattcttccgctgccaatttgcttatcattcttgccgtctcatccattgctgtttgttcttagacctctacgttcagttcgtcatgtttttgggaattggataatagtgattgaccctataactaaacaacttactttcaattttgtgcggggcaatactaatgtttatacaggtgatcttcggggggaacataatggcttaggttttggaccaagctacagaaa

SEQ ID NO: 365881 - DNA, 349 bp, Zea mays
tttttcacacgtacggacaggtgttagtacggcaccgctggctgtgtctcacgaggcgaactgagacaactagccttgaagcaacctatacggttattggctgcgcgggaatcggatctagctatttgatgagcaatcacatgacctacacactgtcactgaaagctgacagatacactgattgcttatacttagtgcatgctctgtagaaggctatgtcacttgcgcaaatagtaccaaactggtcacattgtggttcacaccatttggctaatgatgtatcacaccatgggatcatgtatgaatgggtactatcaatgatgttatttggaccgattccgagctttct

SEQ ID NO: 365882 - DNA, 374 bp, Zea mays
taccactatcatacaacgtcacgatttccctgtattagttttaatgaagtgccactgactactactgaatccagatcattccactcaggagaggacgtgcccaaactattgtgttgctttcccgcgagatcgtaaaatcactgtcaacagttaattcagatcaaccctatccacgcacgaagcttcatcgttcctctgcaacacgagcgcaccaagtcatgccatattccactatatcatccttccaagaaggacctggagtttccaactgggggtatatatcggtagattctagaagacccctcatccttcgatttccagggcctgcgatacggttgattgatgaattgatttgaagggggcagctggcggag

SEQ ID NO: 365883 - DNA, 280 bp, Zea mays
aaatctgacatctattacctatgatgctcaactttgtacagcaatggcatatttcagtatagaatttagaaacatacatgttcaccctttagatgagcaagttcccctttcatctcctccggaacagctctaagccaggcagctttacctgttgatgctgcttcaatttcagctatttttgatctttctccattaataccacctgcaaaagtataattatatgcaaataatgaagataatataattgattactctaattcacaattttttcggcatactg

SEQ ID NO: 365884 - DNA, 200 bp, Zea mays
tgaaaacagagttcaaggagcttggtacatgggtagcgaaagttaacgatgcaacaaaagtgccaaatactatcagggcatgcttgagggaggttccacaggggcagaacatcaagttgtttgggctcaacggcagccgcggagggaaagggtctgggtcctcttccagggggccttcctcgacggcctatttttggggg

SEQ ID NO: 365885 - DNA, 217 bp, Zea mays
ttgcagacaagagagcaacttactgggggactatttttacaaataacagggcggaggagacagaaacaacagacacagaaaagaaaacaaccgcaagagcaaaaaccgcagccaccggggaaaacaggaacagaattactgagtagccaagacaggggaggggcaacaaactgaacaagagataaaatacacacacagtactactagcgaacacaag

SEQ ID NO: 365886 - DNA, 177 bp, Zea mays
gttctttctctgccttcacaactggcatctaacgtctttgggcagcttctgccttttgggcttgtacctccccatctgaaagcttctccttttgctttctggacaaacctgctggtaatccatcgggaaatccaaaaaagctttcaccattcccacccctgctaagaagggctcgct

SEQ ID NO: 365887 - DNA, 444 bp, Zea mays
  unsure (1)..(444): unsure at all n locations
gaaaagnattcaatcacgccttgtgggtctagaaagggaaatggtttgtcggctacaagcttaagactactgtatgagtatgaacatggcgaatttacaaggtagatattgagctcttttttacaaacacnncncgtagacatttactgcagttacattatctgcagaaaattcatgacttcagagagcttatttgccactagtacccatgcgaccttgagaatgcagtgccaattagagaagggaatatgcagtttattagcaaggcgatagagaatgtttataatccttcagtagcagggatgcggcctgcattagcgaacaaaattgctgctcttattgcttgtgcatgagacctaatcttcctttttatcggatacttataatctactatcaacgtgggcttgccaggattcatgtccagggatttctgaaattcatctt

SEQ ID NO: 365888 - DNA, 117 bp, Zea mays
gcgtccacgcgtacggggatatcttactggtacgcaccctggtaacctcacaacagagcatggtgatgtaatggcagacagcggggcgccgttcgcacactcatttgccaatgataa

SEQ ID NO: 365889 - DNA, 342 bp, Zea mays
aagaacacttgttttttgtctctgtttggcaagaaaaagttacgttgtctcttgatgctttacaaatagggctaacgtaggcatgtgttttgaccacagaaaagggtaaacaaagaaaagaaaagaaaagaaaagaaaaagaaaagaaaattaaaaatgtttgttgtatctgttcaacaatctctactgtgggtactgctgtggcaaatagaatccgtttcggccagtacttgatggcttgttttctccaagtcctttgctctgcagctaccttagcttcctcaacggtagtgcacggctgaagacttgctcaacttcagtcgcttccatgttgagctgatc

SEQ ID NO: 365890 - DNA, 477 bp, Zea mays
aacaagcacagcttcaaccattccattttattccttctggttggcatgttccagtaacagctatatacaatacaagatatggtgagactgaggagaggcaaagtgagctgcgaaaagaactgcatttaaggctaggacttcccttagatcggcctttgttgcgaatttctaatgcattgactttcggtggcatgggaaggaggaagaaaaagctggcaggaagtggtattcaccatgcatatgttgcgacatatgcttcattactctgttttccccctaaattacatgtgggatcttgtggtaactttgtgcaaaaaatgtttcaaagtataatatatataagaactgcaaaatatcatattatactatgtgagaagttaataacttcatctaacatgaagataagaacttatctttgtatatgtaattcctcaggaagtagaatttgttttcatccattgtggtatgttatcacat

SEQ ID NO: 365891 - DNA, 383 bp, Zea mays
agcaacccgaaaccaaagggtctttgctttcgtagtatttagcataaactattgaggacacaaagacttatttatgtacagaaacttctgcacgaagaaaacagtcatcactgtacagcacacaccaactagtgcagcagcaggaacatgttccgctcaatcgctcatctctgaactatcagtgtcgcatagccttatcctatataagactgtcaggatgttctccactgctcccaccaaaagacatctctggagggtttggcagatcatccaaactgaccaaaggctcgtttgaagtatgtagcggatcaaccacatcagccgaaggctgctcattcactgaagtagcatctgtccctgaagggtttgtcaggtcagccacg

SEQ ID NO: 365892 - DNA, 413 bp, Zea mays
gttccagttcaaggagttcatttctcttccactgcctgtacaaacattagatagcacacaagcgccttcagtgaaggatcggcgagaattaaacacaggtcatcccctcatgaatgaaaactttactccttataatcatattgagagaaagctggatactctgctgtcaaaggtagagaaggtggaattatattgctctagggttgaggacagcgatgataaagccccttggtagcattgaggcaaggcttcagcgactggaggaacagtttagttcgttctctctggatattcagtctttgagaggttcttctgcatttatgtcagcaccagatggtatgcctaatacaaagagctcgcaggaggaagcacctaatgatgctaatgatagaagtacttctacaactgacagg

SEQ ID NO: 365893 - DNA, 328 bp, Zea mays
agtccatggatctgtcggcggtggctgttccgctggagcacatggagccgttcgtgctggcatgcgcgcgggtgctgggcccgacaccgggccggacgcgtggcgtcaccgacggccgggtcgtcttctgggacggcaagcggtgggtcccattcgcgacggcctctccgcgctggacgcaggagctctgcggcgggcccaaggcctcgccgctggagtatctccccacgcccggcgatggcgccctgcacctcacgcccgtgctccgtccccacacccagcaggcaggcatggatctcgcagggcaggggatctcgcggatcacgcc

SEQ ID NO: 365894 - DNA, 202 bp, Zea mays
cccacgcgtccgcccacgcgttcgttcacgcgtccgccgcgtccgcaaaccaatccctagatcctctcgccctcgcaccaacccccaattcgatccaccccgtcccctatccgcctcgagtcccacccaattcggcgctagcctgatcggcattgcctgccggcctcgtcgtacagatctgagcgccgtctcgagcgccaga

SEQ ID NO: 365895 - DNA, 390 bp, Zea mays
gagtaataggggcatgaacaatttagctatcaaatatcagacaaactcgtcttcctcccagctattcccttctccaagtcttattctcctctgagctcttcctcttggatccccttcccagttgttgctaacagagccttcctcgagcatccgattctagctgtatctcagccaacgccaggtgtttccttcgtagtgcacggagcagagcaacaactgccgcgcagagcaagatggatatcgagctagtgattccaagagcaactttcagtcctgttctgggattcgatgaagccaaagcacctggatcggttgggctcccagtcccaggagctaccgagctgaaggaccaagagagcaactggtggagctcgatggacgcgccggtcg

SEQ ID NO: 365896 - DNA, 384 bp, Zea mays
gcaagtgccaagaggacagctcagctggctgttgacatttgagattcgattagatatatatacacaggtaagggcaattgataaacatggtgtgcagagcatttaactagtagctattatccacttgattaccctctctctatacatacagtactcttaatacttctcctttacagtatagctcagggcatgagccgtgagggcactggagccccactgtcaaacagcacatggcctagagctcatcttctgcgccctctcactctcatctaaggtcaggctatgaacaaagctcggcaggcaacagcgtccggtgtaccacgccttctccttccggctcttggcgttagcgactgcgatcggagtcgtcacagtgctgcaagc

SEQ ID NO: 365897 - DNA, 147 bp, Zea mays
gcgagtgttcagggagtgtcgtgacggaggcgacgacgacggacggtgccggcgtcggaggagaagaaagaacaagtagccagctctcgtatatgccttcttgccccatctgcgatctggtcgtggtagcgctcatcgcccccgtcg

SEQ ID NO: 365898 - DNA, 306 bp, Zea mays
ggacgtggtagtgttatattggcttaagaaaaaccacgagcagttgtacagattaatgtggatatgtggactgcgtgtagaacccgaaggccaggagagactgcaggcaacacctacttccctctcccggcggccccagttaaaatccgtgatcctgaagacctggacctggacctggaccaaatcactgtacgtctcctcccaactctgatgctctgctgttcccgtccgtaccccatctactgccattcgaccacaccgcatccctgtaagaaactgtccgacgcgttcaagtgggcgagccac

SEQ ID NO: 365899 - DNA, 193 bp, Zea mays
cggacgcgtgggtttcacgtagtcacgtgtgctgtacgtctgttacctaaacaaattaaactccgtggaatggccaggaatttatggaggaatggaggcgtcgcagcagggaagccaccctgctggaccctgtggtggtggaagcggcgccggactccatggacgcgctcttggcggagatggccaccatgct

SEQ ID NO: 365900 - DNA, 257 bp, Zea mays
gccaacatgctaacgaaattatatataaaaaaacaagtcaaagcagtccacatacgcaattagtcaattacatcgggcagagcaatcacgacggctaagagcagccgaggatcactcaaattatgtacagattagccacagtgaccgtcgcagatggctaggactaaccaagtctacatcccatcctgcttcggcttttggctcagctccgagtactggcctcccatcagctgcaaaacctcggtccacaagcagga

SEQ ID NO: 365901 - DNA, 157 bp, Zea mays
gaggaccgtcatccttcttctatagttcaggctcaagggatgcctacgatgggccgttcggtatcatcctgaaccgcccgctgtacactaagatgaggcatgtgaacccatccttgggcgatcaggcgaccccttttgttgactgttccctcctgtt

SEQ ID NO: 365902 - DNA, 369 bp, Zea mays
actggaatgcactgtcttgtatcactaaacgacctcaaaattttctcaggcctcaggaccagtttactgtaatgcactgtctagcatcacaagacgacctcaaaattttctcaggtgcacggtgcagaggcagctggtagtctccaggctctctgagctgcccgcaggcagccatctgatctgatcatcccctctgctgaccgaacaaagacagtgagcccaccttgaattaaaagtttgccgaactcaatcattttatcgtctgatgtgggcttggattgggaaccgtcgagggaactcaaagagatgaggtttatcttgcttgcatgggatcccttggagtagctctacaaaagacttttggcatca

SEQ ID NO: 365903 - DNA, 219 bp, Zea mays
accatctcttttttttttttttgttcttttgggttttttccatttgcccctaacatcaccacacctaaaagggttatattcgcccatcaggaaagtattacagtccagcccccatttcaaacaaggcaaagttgttcacagaaaacaacctggacatttcccatccatatacagacatggggggggtccacaggaactcaaaaaaagggggaggcccaa

SEQ ID NO: 365904 - DNA, 193 bp, Zea mays
gggggtctctgctctagattatacatctccggatctggatctgacgcgtggtttccgtagtttgatccgacgtagtctgggtgactacgttctggtggtttacctagaaaccaaacatgaccttaatttgcaactgcaatcatcttctgttctggtggtggtgtcagggaggcaggcggcttggatttgcctg

SEQ ID NO: 365905 - DNA, 174 bp, Zea mays
ccggtggtatatacgtaggctgtctgcctcggcaccacagtgcttgccagcgagcactgtgccagagctctgcactgccgtgtacaccgactccctcctcgcctgcgtcgcgagccgcgactgtgcaagctgctattgctggtgccgctgatccacgtctctgtctccgctttt

SEQ ID NO: 365906 - DNA, 431 bp, Zea mays
cccacgcgtccgtttatttgtgttgcctccaccacccccgccacctgggttgtcaccaaaatcatatgacatggaggctgctggcacttcaaaggacactcctggacttaaagaagatactgcagcgagagtcttaccaccaccgcctccacctagtttgccgcctttacctccaatgcaatctgatatgctatctcctggagtcatgagattaccaccacctccgccaccaccagattcaaggccatcgcttatggctcctggtgttagcaggccccctccacctcctccaggattcccccgtctcaaatgccaataccaccatatgcatcctgtttggttcagctttttttttgactagcttttccgagaatctagctgtggggagaatctggctgtgtagagaatctgagtattattaggattatgtg

SEQ ID NO: 365907 - DNA, 196 bp, Zea mays
ggggaacccttttgggatttaattgggggatcgctacaatgggggcagctccaggtaggttacccttccccgggggtttacaccccggggggggcttttgcccacaatacaacaggccattcttggagatttccgccattttttttgaatttaaaaagggggcgggcttgccattggcggcccccaaaggggattt

SEQ ID NO: 365908 - DNA, 57 bp, Zea mays
cagttacagcttgttttttttgtatgtaacaattgtcagcaatcagcatgtttaacc

SEQ ID NO: 365909 - DNA, 184 bp, Zea mays
ggccaaaaagcttcctggggatggcccttatctgcttttaaacggggaccagtcaaggggggtccctttcccgggggtttcccctttttcttcggattggagatctcttcagagggaatttgggccccttttgggagcttagtcggagggttcccaacgggggccgacctctcaacattttttt

SEQ ID NO: 365910 - DNA, 433 bp, Zea mays
aacagcaactttatggtccacaattatactgtcagaacaaatgcttacagaagaatttcaattacatggatgatcaggggcagagcactcctgcacttgaattgcaaattgaaactacgcacacatgtaatgtcagtcaaactacaactgaaacttgaattagatgtactggcacaatgccatgaagcaaggccatgaccgagcaggaccactgaaacctggcttaagcttaccacgacgacctgctaggcacattcagttcgagaaaaatgtgtatcataaccagcagcacgaggaagagaatggtagactgcaaaccatccaccgtgtctctcgtgattttgctaacaaaaggagttctgccacttcatgcacaccagacccagtaagttgtcttacgcggaaagatcttttgccggacatacacatcagt

SEQ ID NO: 365911 - DNA, 466 bp, Zea mays
cccctgcgcttttcacctccgtcattccatcacttcccggccggctccagctttgcttcctccgctcgcctgtcagaggattcctcgctttacgcttctcgacttctcgccgcgccgcgcagacgtgatctgagttgagtccgtgacgatcgacgctgaggccggtaaagatcgaacggagatggcagcgggcagtggtggtggtggtggtggctcgctgctgctgcgcggcttcctgtccctcttcttcctcctgttcctccacattggccacggcggcagctgctgcttctcgcccggcgctgccgcgcgggcgcagcaggaggaggacgaagcagcggaagccgacggcaaggtagtaggaggcggcggtgggagcaacatgaggaggaagatatcgccgttgatcttctccccggcagcgtcgtccactgccgttacagccagcgacgatagcgccggagcc

SEQ ID NO: 365912 - DNA, 325 bp, Zea mays
ggcgcagttcgccttcttccggtcgcagcaccggcaccccgtgaacgcggcggcgcacgtgctgctcacctggcccatcctcttcaccaacctcttgatcctccacttcctgccgctgccgctgcccgtctcccccgcgctggccctcgcgctcgcatacgccgccgcctacctcgctgtcgaccgcagagccggcgcagtcgcggggctgctcttcctcgccgcatgggccgccagccgcgccctcgcggcccgcctcggcttcgctctctcctggaagcttgtcctcgtcacgcagctcttctgctggacctggcagttcctc

SEQ ID NO: 365913 - DNA, 229 bp, Zea mays
agccaaagattgctccgaagctgtcgatcacgacgagaggttcaatcaattacacaaataactgggtacatacagaagtgtggattttcaaatgcactatctgcacagcaatgtaaatggcagccctgcacaatttttttaaaaaatgaaccatgagtccatgacagctaaaaaaccatattctgtctgactcattcaccggagcctgtacacttccatgacttcaagc

SEQ ID NO: 365914 - DNA, 250 bp, Zea mays
ttttttttttttttttttttttttttttttttttttttttttttttttttgggtttttttttttttttttttgggaaacaacagctgccttatatagggggcctaagagattacagggtcctgactggttgctcacaatccgaagaatgtataagcttttgggtataaaaaacagcattgccatatagttggggggaatgggtccctcaaacaaaggataatttactttaaaacaataaacaccccgttt

SEQ ID NO: 365915 - DNA, 416 bp, Zea mays
ccagggcgcatctctttcggcccttttgataggctaccaagcacaggtaatttttactcctaaattctgtaatatttgctgtaatacttgtgttctaaattatagaggtagcacaaagtacaacaaacagaccaccttttaccatgcaataaagctcttatttagggcaagttgctgagcaatcatccaccaattaagttcatggtctcaatatctgggagcaagttcagagacccaatcatctgtgatgtcgcttacaaagacccgatcaaggtgaaatcagtgcacttcattggagaaaaggactggctcaaggtaccttccgaggagctggcttctgcctttgatgagcctctcatcataaggcatcctcagggtcacactgtccctaggcttgacgacgtgtctgtgaaaca

SEQ ID NO: 365916 - DNA, 366 bp, Zea mays
tgaagatttgtttcagttttatcttgtttgagatatggactatgataattcagtgtgaagatttatgtgctcttaaatatgctcgatagagtaaaacagacatcgtccaaaatcttagcaaagtcttggcacatcctgattcatactcttatttactcctaaatgatgtgttttaatcaaatctgaaagaaacaggtggtacttcttcctctttgatggtttgggtgttttctgcacatatttagttttacagttgatggttgagcgatatcgcactgtattgttgaaattgattgaactgagttctatgcttgtgtgcagaataagagttagatcttttatactatttcgttagtggccatgtca

SEQ ID NO: 365917 - DNA, 294 bp, Zea mays
tatagggtaacagtgagtttccataaagccgctacacacgggtaatgaaatccagtgactatgcctgaggttagtcgctcctggcaactcaaacgaaaaagaagaagaagatgaaggtgcttctatgctctcccaaaaggaaaactatacatatcctaagggtaaaagagatgaaccttttaggggagtatagaagcacacccggaaaaatgggtaaaaaaacggaatgaacaacttgctactgattgattttaaccacctcctcctccagtatatgcaaactgtaagcctgat

SEQ ID NO: 365918 - DNA, 212 bp, Zea mays
aaaactatttttttcaactgtcttggttacctgcacctgaatttttaaaatttgagacaacaataacaacatccaactaaaatctcgaaactaacatcatccaatttattattatatcccgaaactaaaaatctgtccctgcgatggaacaaaaggcagctgaacaatttaaaacccaaaacctgaaccaccacccattgccattgggtttg

SEQ ID NO: 365919 - DNA, 245 bp, Zea mays
aaaaaatctaaatcttttacttgaagcgccctcccttgaagatacaaaataattaatgaagccttgcgcgcccacaaaaagggtcgtaatacttactcgcatagcatcaaaagcaatcagccttacaggtatacgacgcacgcagtttttcccctaccaaaaatgactgctcatgatggtatgtttcccacagcaaccagcagcatatatatgcatgcacgccacccttgcaatgattcttaatt

SEQ ID NO: 365920 - DNA, 270 bp, Zea mays
cgcagacagaaacatgaaatttggattgctcttatacaaggaaaaaaaacgccactggaatgtgatagtcatcgcaatacaacagctacggtcatcttcaaaatagttttattgcttattggatggctttccctttcctgggctgctctcggttctcttcttggcgaacccagatacagctttcttcgcctttgcccattgcttttgcgactccgtgtttctcatgaaagggcaaacttcactaatggtgatctttgggaccacccgcac

SEQ ID NO: 365921 - DNA, 169 bp, Zea mays
aaaatggggagaagtgtacagctcatcatcttagggcttgttcggtcacaaggggattaaaaggaggttagaggggattaaatctctacctagtcaaaattgaatagagagggatttaatcctcctcaatctcctttgacccctgggcaaccaaacaaagccttatgaa

SEQ ID NO: 365922 - DNA, 309 bp, Zea mays
aaagggttgtgatctgtgcggctattgggggtattgaaaaccgaacaaccaaaaaatggaatggaaccactcctcaaccaaacacaccctaaaacaaaattactaaaaaagatttattttcctagggcaaacaattatccatctatactatactatcacaaaagttctgaaaaagaaaagaaaaaacaaatgagtggaggaataggttgaaagaatatactaatgattattatacaatgacctgcctacaaagaataccgacttgcaaactaggagctgccatgggatttgaacgaagaaatggagtgc

SEQ ID NO: 365923 - DNA, 268 bp, Zea mays
  unsure (1)..(268): unsure at all n locations
attgggaatagggggggtcaaaacccaaagggcatngtcagacacggttttgaaaagtcaaagttaacggaagggcgctgaatcaccatgccccctacaagggtacaactaactgctgcgctagcatctaaacagactaaacccgattagctagcccaaggctttcgaaggggaatggcgcgagagatcacatcactgcaccagcgcagcgctacaggaagatgaaacattccaatgacacttgcgggttttccaacgactctttccc

SEQ ID NO: 365924 - DNA, 274 bp, Zea mays
  unsure (1)..(274): unsure at all n locations
gttcttgtgtggggtntgggggggcagtttccattngggaaatttgaaggaaaacatgggggttggaccggcacagaaaatatgggcctcaaaccagagccccctccagagcagcaaacaaaactggggcagccatgaggccccctcgaagaagcctggtctgctgcacttagccctcctgccgggaacgctttggatacactgaggaactcctactagataaaaatggaccacatttgatgaacttctactacatgatacccccggccgcccc

SEQ ID NO: 365925 - DNA, 301 bp, Zea mays
gggtgtaactttgggggacggggggggtacaaactaaaatgtcaaggtgatgattacaaacgatgttgctgcgagaattaaattcaaagtcctgttacacatggggggtattactttttttgagattaacacggtgaagtcaaatgaaaaaaaatctacggggccactgggccaggagctttgagcctttgactggtgtttaccaacgcagccagccggcagctactccgcagggccagttccaggctccagcagggggcgcattggcacccaccaacaactttgggaggggatccgtggg

SEQ ID NO: 365926 - DNA, 134 bp, Zea mays
gtacgggctggcgttgcttttgttttattattattaattattacacacagtgaaagtgaagtcatggctcggggcctggtcagtcaactcaagcactggcggcaatgccgctggtgtttgggcggaagcagtta

SEQ ID NO: 365927 - DNA, 130 bp, Zea mays
gcaatacaggcccaatctaagagttcaaaagcccaggcatattaagttcttacaaactagccattgcagtcacactggggatccatacaagcttatgaagactgtcgaagctctggacccacgaaatcag

SEQ ID NO: 365928 - DNA, 377 bp, Zea mays
  unsure (1)..(377): unsure at all n locations
ttnnnttttttttttttttttttttttttttttttttttgtggttttgaagacaaaatggggggagtacgagggcggacacgctcaatcttgtcgaaacaagttacatccatctgagtaacaaagggattaaaccccaaaaggaaatacataatcataaacacgccgtgagatatttgaacataaaagcctcgctccctgttcatgacaattattcgctggatccatcatcatttttgctaccgagggttcgtattatcgcttccaacaccttgatatcgctatctttcttcgcaatctcctcttgcttcagccgcaactcctccatgggcagctgaaacactctcgcaggggtctccagttccttggggacctcct

SEQ ID NO: 365929 - DNA, 459 bp, Zea mays
ttgttaacgactcacactattagtgtgtattgtttgaactcacaatcgggattacagagaattatagtctaggaaggaagaacatcgtgaggattaaggataggagaagaatgtcgaagccactctacaagggtctagaagaatctagagggggaggtagaggatacatagaagagagtaaactggagaaggaagataacagtagcactctgaatattcgatgtctatcctcctgaccccgccctgctcttttgtagtctctcttagcaacctgggctggcattctcttagcaacttgggctggtatagaccgtttgtgctcacattccctgacattctccccttcttaaaaatcggcttgcccccaagccgatacatggcatcaattccaccgagatcccattgcaagtgcaagcaatttatccaaataataccagtgtgctatcctttgatcggctg

SEQ ID NO: 365930 - DNA, 232 bp, Zea mays
ccacccgacctccttaccagcggcaggctggccgcgtgagcaccacgacgcggcccccgcccgggatgtccacgtccagcggcgcctccaggcagctgagcgccaccccctcgcggacccgcggcgacggcgccggcagcggggacgaggacgcccggacgatgcccgaggccggctggctcgacaccagcgccgccgcgtccgcctccggaaggacccacgcgcgcgacac

SEQ ID NO: 365931 - DNA, 271 bp, Zea mays
acaacaaacgtcctagaggcccccacatgactataaaggaggggaaaaaaggggaaaaatcgaagtctttcccccgcaaagacaaagaggggcatcgaaactgcgacatgataacgagtaaggcagctctcaccatggcactggcaccaagcatgcctctcaacagcaaacatcctaaaggagcaaaaacagaaaaggaaaggacagcctagcgacaacggcaaaaaaaaaaaacaacccggtagaggcgcaaaaaaagggcaaaaaggat

SEQ ID NO: 365932 - DNA, 336 bp, Zea mays
gcacgcagaaagccacaagcatgatgttaaagctggaaagccacagtttcaaaatgatccaccaaattctgttttcctggaatgcccacagaataaacgatgacaaaaggggacgggaaatcattctacagtgttttgcaaattaaatagccatcaaggtttatacatgctcactacactgtccagtaacagagtaactgctacccagaaatcagcacatccttgtgttggcgcatgatccttttcccatccttagcggttgcgctcaggcggcagaagggcggttgaatccgccgcggcggttcatgtactgtcgcggctggcgcttggtgacgg

SEQ ID NO: 365933 - DNA, 156 bp, Zea mays
ggtgccaacggggaactttaatttgatcagtgaagagggacatccaagaaagcattacagcagtctgaaacatgatacacgcgtgaacagacatttaaacccacaaagataaacacactacacaaagaacacagctttgaagaacccccggaagcc

SEQ ID NO: 365934 - DNA, 281 bp, Zea mays
ctcaaaaaaaaaaccatttttttcataacaagggtttttattccttaaaatcaaccatgggctggctccaaaccctggggaaaaaaaacacacaataaggcaaccggggccgggttaattatgggggaaaccttaccgggcggcccgggttgggggggacagcataaaaacgatgaggggcgaaaaatgaccacgcgatcgagaacatacgtacgtacgaacagggggcttggggggccctaggggcaactggctcctagttccgatttttgagggggggg

SEQ ID NO: 365935 - DNA, 324 bp, Zea mays
ggccaaacagctactatatggaaaaaacaatcgacaaacagcacaaacgtttatagaacaaaaacacccgaatcgatggtcaaacaacatgtctcaggattaatccacggacaaacagcagtacaaaccaggaataccaaatcctttttacgacaatagagtatcgaagaaacggatcaatggggatagtttttttccgggctcctcctagctactggtactgcaagatgccagtttgcatgcattgggaatggaatcagcgaacctgcagtcctgcactcacaatgacagcccggtgaaagactttgccggcctgaacgaccg

SEQ ID NO: 365936 - DNA, 310 bp, Zea mays
agatcctccttcacggggatgctgtaggggctccatctcgagctggtggcgccgacacggtccatgagatccattaccgttgagtctgccgggaattcttggacagacatctgaaacggcaccacagaccttatcagatatggctggaaccgaacataaacacgcgatgggcgagccatgtgtgcaaccagtcagagctggggctaaaccttgtcgtgctccaggaggatgacgaacagcggtccgtcgtggttgcactggcgggtatacgagtaagggcagtcctctgagtgcagggggaacgggcacg

SEQ ID NO: 365937 - DNA, 398 bp, Zea mays
acggcctttttttttttttttttttaacatgaaatatttatacacgcgggattataaataaaacagcatgtcatagcaacagtgcgagatccatccatgccacaaacgagcataggagagagctggagtgtgccttttcatcaccttcttgacactggcagcagctactaataaacgactactaattaactactactactattatttatgcctactactcactcacttactatcatatacttatcataggcctaagagctaaaaaacaaactggacttgtttcttctctgttgttgtcttcactgtcccctccttctcccactctgaagaagattacacctctccaaaggtatttcttttttctttatcaaagcttctctatgctcggttgatggggc

SEQ ID NO: 365938 - DNA, 447 bp, Zea mays
agggtattgtctggatgagcgttaaagaagtttgacttacaaaaccaaagtgaactagtatagtttaatttacatgatacaccgtttttccattgccgaatagaacccaatagaaactttttccaagttagaatgtttccttgtctgctcgttcatgtgatatatctgaacccaccgctgattgcaaagtgcttctttcacagaccttggtcgaaaccttctgggcaccacctggaagaggcaatggtgcacctatttctaaaaaacgcaagccacatgattggtgcaagtctgaaccatggattggtgatcacaattcacaatcccttgctaggaggggtcaagcctgttcaagttctatcactgtgcacaccccgcaggatggacaggcaaagccattaccatcccaagttcagaccactcacactctggtgaccggcacacaat

SEQ ID NO: 365939 - DNA, 330 bp, Zea mays
ggcacgcgcgtgagcggcacaaccgaagcaggctgcgttgagttggactgcggccggggatcgctcgcgtcgcgtcggaggaggatgtctcagacaggggaggcgcaggtgccgctgttgcagactcaggaggcggacgccgagtggagctccaagccgcgccgcattgctctcttcgtcgagccggcgccctttgcttacatttccggttacaagaaccggtttcagaacttcatcaagcatctacgagagatgggcgatgaggtactgtgtggtgactacacacaagggagcccctgaggagttccatggagcaaaggtcattggctc

SEQ ID NO: 365940 - DNA, 156 bp, Zea mays
aatccgggagggaccggtgaccatggaagtttgtcacccgctgatccacaaaagactattcgacaccaggtgcaaaagagtttcagatctaccacacgacctgaagagaggaaaagataagggagttgccctttaacaacacaagtcctaaaggaa

SEQ ID NO: 365941 - DNA, 143 bp, Zea mays
actacttcgaccacgactccgtccacacgtgggggatttattacgccctgcgttgggaaggaagcttccaggcggaccgcctcggcacgtcttccccgcgaggtaaaccaatgccacgggcccttggggcgcgaacgccctaa

SEQ ID NO: 365942 - DNA, 466 bp, Zea mays
gaaggcaacacagttataactctagcttgattgttgattcaaacagttcatttctggtctctacttgtcagtggaaatgatcttctatccaatcacacatggtcactgcagtgcctttgttgaacaatgacacaacgtgatactaatcagccctactatcagcgcttttgctttctccagacaccggtggaaacttatcggtttgttgcttacaactggtatgtacatcaatcagacatcggtgagaactgatcttatcagcgcttttgctttctccagttgctgcctcgaatcgtcatcatggacaagctcatcgcggacatacctatcaatctcgaggaaattctcacgaagaaagtcacgggtaagctgcagcttttccaatgctagggagttgttcccaagcaacttgtcacaaatgaaacgagtcatgcccaggacaatgtcatagtctgatcttcgcagc

SEQ ID NO: 365943 - DNA, 234 bp, Zea mays
  unsure (1)..(234): unsure at all n locations
gcggccttcctttttttttttttttttttttttagcagccgatcaaaggcaagcgtatgttttagattaaaaacaagaaccttggcatcacattaggtactgggggaacatagtgtggcgccatagctagatgcaataaaccttaaagttctctgaactcgaaaatcctaacccaaaagagcaaatagaggggagttttgttaannataaaacatgacaccattgaaaccaaag

SEQ ID NO: 365944 - DNA, 60 bp, Zea mays
ctactggtactacatcagggctgcatccattgcaaggaagatctacctaaggcaaggcat

SEQ ID NO: 365945 - DNA, 55 bp, Zea mays
cggcatgataaatgtggagcgagctgagcacagagctggtttcatgtggaagatg

SEQ ID NO: 365946 - DNA, 328 bp, Zea mays
atttacatgagttgggccataactatattacaaaagtttctctagaatttttgcaggaaaatacattggaagcaactatcaagcttcaggctaggcttcttcaaactatagcttcgtcattcttcagcttcgtcatccggtttaagatgactacgagcttcgtcacctgccattttttgctcgccacttacctagatctgggtcatgaatctattcccaatgcttcgggccaggcttgggatatctatcagatctgatgctgataagctaaagcttggtctattcacaatatttccatgcgtacaaccagccttcagaaaagcggtag

SEQ ID NO: 365947 - DNA, 109 bp, Zea mays
gccatgatagctgcgaggcgtgctgggacgaggggaggtatagtatatagttggaggatttccccacgataaacttgaagaaattagtatatatactgttataataata

SEQ ID NO: 365948 - DNA, 157 bp, Zea mays
aaaacaaagggggcatcccatctctcttttttggggggaaataaaccaacccaagaatttccattttgaataacagtaccaaaaaaatccgttaatatacgaccaaacagggcttactaacaaacaaactaagattatacaaacaaaaccctgccta

SEQ ID NO: 365949 - DNA, 89 bp, Zea mays
tgatttggctgattacaatattgatgcgtatttggcttcatcattgaagaccagtgcgtgctcactttctgggttgtgacccatgagat

SEQ ID NO: 365950 - DNA, 123 bp, Zea mays
tggtcgggggaggcgtatgtaatgctttatgtgtgggtgtctgatacatatctggtttgatcgaagcactgaagcattctcagaccgacgccaggcgcccaggccagtggttgacgcctgtgg

SEQ ID NO: 365951 - DNA, 62 bp, Zea mays
cccactcgtccggtcgtgaagagttgcacctgttgggctggggcgagccacgagcggcttca

SEQ ID NO: 365952 - DNA, 171 bp, Zea mays
aacgcattaaactagccagaatggcctcatttagacaggatactataatgttagtttcaaaaagaaagaaaaagatactaaaatgctaactcaattacaaaggggatcctaggaacaccacctccttttccaatgcataggggacacttagccaaccacttggaggtgcag

SEQ ID NO: 365953 - DNA, 104 bp, Zea mays
cggcgtgtatttaaagcgcccgaactagcaaatgggggggaccgtaaaaattaatcgccctaggtcgtgccacgtgctgacgaatcgtaataagtagagggaaa

SEQ ID NO: 365954 - DNA, 64 bp, Zea mays
tctatcgatgagaacggcgaaattgtcaagaggaagaagatgggccttatggagaaggtcaagg

SEQ ID NO: 365955 - DNA, 364 bp, Zea mays
gaagatgagatcacattactggtctgttatgatgaacaaccggtaagaactgtgttactgatccaatcaagaaaatatatggctatttaaaacaaggaacaccaaagaattgtctctacactctgaaaacatcttcagagctacgatctgaatgactgaatcaaagaagcccgctaccaagacagtaacctcacaatcagtctttgttcttggcggtccactcctggaaccggcggaggctcgccgggaagtcggtgaagaggccatcgatgccgacatcgttgatccagtagtcgtactcggcgtaggggtcctgccggaagtcgaagtgcaggaacttgtttctcgttgcggtacgtgtagg

SEQ ID NO: 365956 - DNA, 524 bp, Zea mays
cccactcgtccgtagcggtcgtcgtcgtagagcggcgggatgtagcggtcggataccgagccggcgaggagcgtggtcgacgaagacatctcgtcggaccccaggaacgcgagcactgtggcggtctgctcgtcgcggtactgtgcgttgacgacggaagaaggaggcgcgaatccgtcgaaggaggaattgcgctcgcatgcggactgctcgccgcagcgaccagccagcgcctcggtcaagcgtgcctctgtgcacgccagcgcgtcgagaataccctgcatcgccgcctccatggaatcctcctctgataccaaatgttagcgacacagaagcttctagagaggtagcaggtagagaggaaggtagcagtaacgtgcaagagggtccaggaaaggagaaggaaaggagaagacaagaggatatgtgatatagtgtctgtattctgataatggtaattgatatccctttaacccatcaactgtcctttatagatgtagaaatccacttgccccctgacatag

SEQ ID NO: 365957 - DNA, 83 bp, Zea mays
tctaccgtcattgatgccttgagtaatgtagataataaccaaccaccgcctcgccgagaaggagatcgtggtcggactattgt

SEQ ID NO: 365958 - DNA, 432 bp, Zea mays
gatcgtgcctttggagtccctatgcgtacaccgtgcgatagaaccaccgactggccaagtgggtgagaggcttttattatctatggagagcattgtgattaggagagtgattatgacagcgaatgcaaaatctcttgtccgtgatctgatctccagagataggttgatgattcgggtgctacttagataaggttattgaggatgttgtgctaccaatggatgttgagtgccacacgcttgaaacgagttatggagaccaagatccagacgcccatgaccacaggaaagaacgagggacatttggtgctggatgaagaaccatagaccctgatgggttcttcaggggggagtaaaagaccgaaggagttagcttatgttcaccaaatttgtgagggaattgagagaggaggccgtcttgatgattatggtgag

SEQ ID NO: 365959 - DNA, 132 bp, Zea mays
gaacacgaaagtacagccagattcttttttaaaaaaaatggatacacatgtcttacatcacaggccatagcatgttgcctaggtgacagtatattgttttggaggaagctgaactatgcacaaacgggggtc

SEQ ID NO: 365960 - DNA, 391 bp, Zea mays
cccacgcgtccggctccagcgagcaaaggctcctgaccgataagacgatggctctgatggcggtctagccctggaagatggcggtgtcctgcgagcgccgcgcctgggccaaccttgtcgtgcggatcaaggcgccatactacgtatatgacctgcacacctacgaatgatgtgccattgcagtgagagattacttaaactcaccatggacttccagactagcgcacactcaggctttcatgtcaatacagcgatctagagatctttgccagactctgtcaatcaagcccagaggcgttcgccgtagtctctgcccaactgaggtgcgcgtaccgtctgcatgctccacagataatgtgacatttgaactgatgcggcacattgtgcatga

SEQ ID NO: 365961 - DNA, 332 bp, Zea mays
ccgccgacctgacgtcgcttacaacagaggtcatcagacaccgtgaggtaatttctgtgcctagcagggagttatgattctgtgataggaataatgttttaggcaattgtagaaataatcgtataggattagtgagaactagaggacctctacccgcccggccggttacttcatagattcatggatcctgttgtggacccgacgccgtcgcggcggtccctgatgtgaaggccgccgtcgcggtcgccggagctgtcgtccaagtcgggtccgagggcaggagaggcggaggcggaggggctgatccggcgggtagaggagctggaggcggt

SEQ ID NO: 365962 - DNA, 387 bp, Zea mays
ccctctcgtccgcccacgcgtccgatccaattgtcacttgctctccctccaacaagctaattaaggccggtcatccctcttctagctcgtttcattatccatggcggaggagaagcaccaccaccaccacctgttccaccacaagaaggacgaggagcagctcgccgtcggcgggtacggcgagtccgccgagtacacggaggccacggtgacggaggtggtgtccacgggcgagaacgagtacgacgagtacaagaaggaggagaaggagcacaagcacaagcagcacctcgtcgaggccggcgccatcgccgccggcgccttcgcactctacgagaagcacgaggcgaagaaagacccggagcacgcgcaccgtcacaagatcga

SEQ ID NO: 365963 - DNA, 117 bp, Zea mays
gcgtactcggacactatccacagataatgcacgatctcgcgaaggagaggctacccaggttgatttcttgccaggataatgtgcttaaggactgacgaggctgacttgcgatccaag

SEQ ID NO: 365964 - DNA, 476 bp, Zea mays
ctccacgcgtccgagctcacgtcgcttccaacagacgccaccagccaccgcgccatcgtctcagtgtcacagcaggaagccgcgctcccgccagccgttagctgctcccaacagcggcgggatcagggcttgcgatttggcagacgcgagtccccccacccccccggccgcttacttcatgcctccatggatccggtcgcggacccgtcgccgtcgcggcggtccctgaagcggaggccgccggcgcggtcgccgtagctgtcgcccaagtcgggtccgggggcaggagaggcggcggcggaggggctgatccgtcgggtagaggagctggaggctgcggcggcgcggctgcgcggggagaaggtagccgtggaggacgcggcgcggggcctgcggcaggagctgaccgattcgcgggcttcgcggagacggcggtcagcgaggccatgctcatgatcgagcgcctggcagcggag

SEQ ID NO: 365965 - DNA, 342 bp, Zea mays
gcaactccggtctctccccagtttttccatagtgtaggtggctggtacaaagcgtcctcggacgctgcctatttctagtataaattaaaaggtacagaaaatgtctggctttacactacgatcagcctcgagtgactgaaatgaacttgagcaattacatattgtacaccaacaaatttacatataattagctactactatgtctgtaaggaaaataataccctagcatgtgacaccacctgttgcggttagcaaacctcgaccaggctttctacgagcagtgatttggcagatggactcaagagcatatgttagcatgtctgtgcaaaactggtcgtctgg

SEQ ID NO: 365966 - DNA, 349 bp, Zea mays
ccttcgtgtccgcccacgcgtccgcccacgcgtccgctcagctagcctcctcgccccctttcccccggcctccccttcgtcactttccactatccaaagcttgttcgctcctgcttcccttttcacaccaagcaggacctgccggtgccaaacgcacgccgcattacacagaagccaacaaggttgagaagagactgaggaggtcagccagccacttgcccacctgcgagctgttccccatgacaccaccgtcaccagcaacccaagtaccaaacgactgggccgcagtcccgcaatagcgtcaagatctcccgtatgacctgccccttcgcctttccgtcatggactg

SEQ ID NO: 365967 - DNA, 436 bp, Zea mays
agacgaatactatgtcgtgcttaggtcaattcctttgaattacgtggcagctatacgacaactttttacaccgctgtcgggcaaggcagggagtcaaagaactgtttcatacgaatatctgctctttgagctgccgacgcagaccctggtattacagaagggaaagtgcttcgcgtaggatgcacccgtacaaaagccccaatatgcatggcctggaacatacaagtgaaagagctgctgctggcgcacaagtatacgggtttccagtttataggcacgatcaggtgttttatttctgcctatgcaagtgtaactggtctatttatcagtcgaactccagaacagtttcagggatacgagcgcctcagaagaacttctcatagtcttgaggttgctggtcccaaacctccataaaacctatgtcaccaagagaact

SEQ ID NO: 365968 - DNA, 346 bp, Zea mays
ccatgcgtccgccccgccacaagatgaagtgttgattgatccacccgataaagggaagacagctgattcagagatatgacctcacatcagagcagccgatgctgttacaatcgaagaggacaagcttcggccggtccagctcacttaaactactacgaccagcggctgcaacagcaagtcacaggctgatgactacggacgtggctatggtggctacaacaagtcggtcggtgatgacgactactgccgcagcggtggctatgggtacggcaggttcggcggtgacgactacagctcaggcaccggtggtggtggctacaacaagtccggcggttgctgatgacta

SEQ ID NO: 365969 - DNA, 283 bp, Zea mays
ggatggaaggatccagttattatagagtaactatttaaagattaaactattcatgggcaattagcgacatagtacagaatggatggatgttaacaactgaacacaaccaaatttggaccatgatatgcccaccactcttctttgattagcccaaagcaaacaattttacctacagtagaagaaagataatatgagcccacaggggatcaaccggccactctacatttttgtcgagcagatgtgcacgatatgccatctcaatggatcgggacttcaggtttcc

SEQ ID NO: 365970 - DNA, 372 bp, Zea mays
tcgtaaatagccggctcagttgagaggggtgtgcaggcccttggaacttggtggtcttggcatgcataattgggaagcgctaggctggtctttgaacatgcgcaaggacgcgggcaccatggatagaattgcagcttaaggttcactcaactgtggcggctctctttgctgcatcggtggtgaccatagtaggagatggagtactgtgttttcgactggtaagtgggtgcatgggcagatcctctccattcttgctacagcactggttggtgcaattgctaaacgatcggttaaaatgagaacagtttaggacgccctgcgacattcactttggattgctgacatccaagggcatgtgtcagtctcggtcct

SEQ ID NO: 365971 - DNA, 327 bp, Zea mays
ctccgcgtccggtctagagaaaggagagacacaatcggccggaagagcgattgatttctcccgccgccgccgccccgtctcttcctcgtccgccgctgcgcccgccgcgcacaagaggagggtttcagtgttagggttctacccccgcctgcgctggtatcagcagccaaatgagaatgcttgctgtgtttgattgatcgtcagatccttacttacaacccaccaggtcttgtggtacctgccacctcaaagtcacgacagatggccgcatataacaacccctggagggtccctatgccaccgctgcccaatgttcgagctggattt

SEQ ID NO: 365972 - DNA, 261 bp, Zea mays
tggtgccgccgcggcataaccggcgggaccaaccacgccgccggatgattgcgaggacggtcggtccgttgatgggtcgatcgcctctggaggaccctcgccatcctgcccaagcgcaccaccaaacccccagcagcggcgctagggttcgcgcctcggcgcgtcggcaccgtcacctgcggcgatggcggtgcaggagcgtaggacaattgatctggaggagggatgggcgttcatgcacacgggcattaccaagctgaa

SEQ ID NO: 365973 - DNA, 352 bp, Zea mays
ctggatgaaggaggggccaatgattttcaaggtgggtacatcgatcaatacaaagaaataacacagcatcaagtacttcagtatctctattctctacatagatctttgtcaggattcggccattcgggataacatagctgggctagttacaagtcacaagaagcggtcaagcagaagcccatcaatccatactaataccctcttgacctttgcacgataggcacttccctcattgatgcaagagtttgcaagcagagggcagttgttaatgctcacgacctgaactgagctaggcaagcctccatttggcagggacttaatcgaaccacagtctgaaatctcgagtcttact

SEQ ID NO: 365974 - DNA, 242 bp, Zea mays
gggtgaacccaaccctactttatttttatttttttgagggcgggcgggggcagccccagcgccagttgggtttaggagttcttttgttcagtcctagtccaggacagggggggctcaaagaaatcatggcgctttgcattttcaaggaaaaactattggctgcataaccggagctcaaggcaccacccggtagttgagcgcattgccccatagcatttggaccggaaactccagcatttttt

SEQ ID NO: 365975 - DNA, 143 bp, Zea mays
cccacgcgttctcccacgcgtccgccactcccaagccagtacccacagtcctactagcagtcgcacgcaagtgtcaagagacgaaacggtcgacatggctcgcacgcaatctgccgtagcggtcgccgtggtggccgcggtgc

SEQ ID NO: 365976 - DNA, 402 bp, Zea mays
gatgtcactcacaaaagtttatgaagaatacactgtaagacaggtaaagtctgttgcccctaaagtttctggatgtggaaaacaaaaaatcctaaaagactccctaattattaaaagagaagtaatgataaatgtagcatcatttgaaagagcagcaccaaaaatatgatcattagctagctacccaagatatacaggagcgtcaaaagacgattcacagtggacatgagcagctctccaaaagcaagagagcattccaaattcagctgacttcaatcctacagagcaatgagattaacatctattacaccactgctgcaaaagtttaagccaatctagcaaccgcggaatttttcatctgctccatcatttacatgatacattctcaggcatgctgtatca

SEQ ID NO: 365977 - DNA, 126 bp, Zea mays
aaaaaaggttacacctcagatgaaatcaatattgcgagttggtaatggggcagaaattacataggaaacgcggctcccatgctacaataatgcagggcccggtatacaaatgggaagcgaagaaca

SEQ ID NO: 365978 - DNA, 132 bp, Zea mays
cccacgcgtccgtccgaattccctgcgattcctctcccctcgcctggtcgtctccccctaggggatcggcggagaggaatcgcaaagagggccgtctcatccgagttaaggaagccatggagcacaaggagg

SEQ ID NO: 365979 - DNA, 396 bp, Zea mays
  unsure (1)..(396): unsure at all n locations
gatccttaaatagcgagacctggccatttaagctttcggtaaaactaacgcgcgccatcaaacatacaattataaatatggtatgctaccaagaaaatttaagcatccgactacaaaataacctttatgttagcgaccgatgcacatgtaactgtgtctttgaccaccccatcggaggcgagctacagtaaacaggtggtcacacttgacagtctgaactactgcccccatctccagcttgaactaacagcagaggattgctctgtccctaatctgctgcaaactaccctgcttcccccttcgccttgcagtccggtccgatcttgcagaagcagcagctgaacagcttggancggcgtttctcccgcgtccggggcttctgacggggagcgcaag

SEQ ID NO: 365980 - DNA, 341 bp, Zea mays
cggacgcgtgttctgacgcgtggggtgccatacaggtgctcaccggcacagccggcaccgtccggaccaactgcagggtggctagctagctagctcatccatgagaatgtacctgtagactcatgtgcttaaaatcatacgacgaaactgtacgtacggcgtagagtggtgtggcggggtccaatgattcagattgtacgtacgtgtccatcgatccaactgtagttgtgtacgcagtacagtacgtgctagctacggatcagttgcttatatatagcttgtgcgtttttttaaaaaaaaaaaaaaaacaaaaaaaaaaataaaaaaaaaaaaaataaaag

SEQ ID NO: 365981 - DNA, 185 bp, Zea mays
  unsure (1)..(185): unsure at all n locations
tttnttttttttttttttttttttttttttttttttttgttggtttttttggggagccacacattacaccggtcttacttattattgaacacaattattgacgcatgcagagaaaacgaagcgagtaccggattacaggaacacgccttttttgacgtagccccacgcccaccaccttttttccc

SEQ ID NO: 365982 - DNA, 388 bp, Zea mays
aaatacgtgcaaatacttcacatttctttctttttccccacccagagctggggattatgcattatttatatttatctaaacacaacagggatagcaacctattctatgaatctgaccaatctaaaaaatacatacaagtttacaggtagaaatatacactatacaacacgtgcaatgtttcgattcttcttcgatcaatcggatcgctaccaccatctgcgggtcagcaaaaccaatctacatgtgttcatctgtgcctcatgtggatctgcaatccatgtgtcaaaatagaattagactacttccatgtacacgtcgtcattgtgctcccatcttagaaaatatcccagagaaattgggcagcttatctacatgcttcaatgctcgc

SEQ ID NO: 365983 - DNA, 306 bp, Zea mays
ccgtcaccaactctctcctcgcagcagcagcggacgagcccctctgccctcccctctcgtccctccaggcggcaggcgctagctcgacgttcggccccgcgggccggatccgtcgccacagatccgctgcctcctccccgagtcctgcctgatcgggttttttcagttttccccgttccccgtgggccactcgaccggccgacagggcggaaaggctgccccggccgacagggctggtggcagtgagtccgcgcaggcaaattgaattccggcggcgaatcccatcctgtggtcctctctcgagtc

SEQ ID NO: 365984 - DNA, 241 bp, Zea mays
ggtaaccataccacttcctaaaatcaaattaacaatgccaaaagggtaacatatagcttttacagcatttttgttttgcaaaaggggaaataacaacaagggccccaataaatagataaaagggcccaggctaacaaagctcaacagttcacacaataacaggaacgaccccaaacaaaacttggaatgatgaaaactaggttttggtaaagcaggcgcaggatcccattatttttttttg

SEQ ID NO: 365985 - DNA, 442 bp, Zea mays
  unsure (1)..(442): unsure at all n locations
cccacgcgtccgttctcgcgtccgggtgattgagcaaagtctggtgagccgatcagctgagtttgaagatgctattctgaatggcgacaaaagttcgctgcgtgctctgtgtgaaaaaaaatcacaagaatctttgtatgtacatctcctttagtagaactactgacatttgcatgaagactaactttatgcgatgcctgcttgatcagatctgatgaggagagagaaacatggggcttcttgatgattatgtttgaggacggngattttgtaaggacaaaattgcttgctcatcttggcttcgaaccacctcaggcaccacctgcaagttcacctgatgaattgagccaaacattggcagatacacttaatcttgatcacgccacaataaccgattatgcagatgcccaatttcttactgataacggggatgattttttca

SEQ ID NO: 365986 - DNA, 270 bp, Zea mays
aaccaagagcttcaaacatgctggagtgggggcacaagttcagtacacggcatccattccagacgacagacaataagcaaccacctcacaatcacaacgcacgatttacacctacagcaacagcaagagctacacagtcttgacaccacctacaagctaccgctgcttctcaccgagtgagcttcggcctcgacgagtgcctcacgcgcctttagtcctttctgccagttctaccacggtcagacggtgtccgggggtctcgtcatttcc

SEQ ID NO: 365987 - DNA, 409 bp, Zea mays
  unsure (1)..(409): unsure at all n locations
ttnntttttatatttttttttttttttttttttttttttgagggagtaaatccatgtttgggaatgcccacacctccgtttaactgaacaaaaggggcgcattcctgcaccaaagcggagaatctttagtcatgctcctgctctgaaggatatgtactactacgaactagtggtcccgccgacacagttcctccttttactgactacgacgagaccatatgctgctatacaaaaatgtgagggcgttccgcttcccacggtcacggcagtcatcggtgcaggtactggcatttcgagcccttccagcagtggccattctcgtagtatttacaaacccccctctggggctgccctcttgacgagggtcttgacgaaccaccactgccatggtcatgacgatggtcggacc

SEQ ID NO: 365988 - DNA, 407 bp, Zea mays
cccactcgtccgcccacgcgtacgcggacgcgtggggtcgtgagagctcaaagatcacatatggtgccagcgaaaaccgaaaatcattgtctagccaccaagcgacgacaccaacagggagacactctttggcaaggaggcagggaagcagcgacaagggtgctgctggttggtaagagagtctaggaaacactcgtgaagcatcaaatagacaacagagaaacagcgacaagaatgcaggctgcggagaggctctcggaagcaacaggacctggcacccatcgtctggtaaccccagtcggagcagccaggggaatcaccaacatgacaggcattctcacggagtgattcgcggcggggtagcttaaactaccctcggaggtcccaccattgtcatgaccatggca

SEQ ID NO: 365989 - DNA, 404 bp, Zea mays
cccacgcgtccgcgctgggccaccagctttgaccggcgcctcccttcccctccgctactgctcctccccaccccactcccccgcaggagcggcggcggcggcggcgaggtcgtaccccacatcggcgagcggcggcggcaccgccggaggcaaaggcaagatgttcgggcgcgcgccgaagaagagcgacaacaccaagtactacgagatcctcggggtgcccaagtcggcgtcccaggacgatctcaagaaggcctaccgcaaggctgctatcaagaaccaccccgacaagggcggtgaccccgagaagttcaaggagctcgcacaagcctatgagggtatgagtgatccagagaaacgtgagacttatgatcagtatggtgcaagatgcccttaaggaagga

SEQ ID NO: 365990 - DNA, 181 bp, Zea mays
cggatgcgtgggcgcgaaagcaagagagagagagacagagagagcaggcagcggcaatggctggcgctggggacgagtactactacggcgggccggggcaggggcaggggccgcgcggcgccccacacggcctgctgctggcggtggtggttggcctcgtggtggcggtcccggtgttttt

SEQ ID NO: 365991 - DNA, 102 bp, Zea mays
cgtaatcgtactcgcctacctccgcggctcaaacggggggcatcttataccaattgctgtgcgtcggtcgccgctccacccgcacgacgacaccatgaggga

SEQ ID NO: 365992 - DNA, 332 bp, Zea mays
gatcaaagcaaaagagaaatccacttcaatagctgatggagatctagtcaatagaaaaaaaaaagaatgccctcaaccagggaaaaaatatggatcctccttgtttcataaattatttttttttgtcgcttcagaaggcagtagaagttacaaaatcgcctcacaaattctcttgccacatgtccggagctcaaaatcatctgtaggctatagcaccctccaaattcgcattgcttgcagatatccatttagcttctcgaaacggattttcctctgtggcgtggctgcaaaagtgcaggctggatggatgaacgctctccactggaatgcct

SEQ ID NO: 365993 - DNA, 150 bp, Zea mays
ccagtgaccggacactcacactcccctgctgcgggtgccgtctgcgtttcgggcaccgcactacttccccaatccccttgatatcgcccacccgcgctcgccgccgccgctgtgcggtgatggaatcccctattggctgcccgcgtcctc

SEQ ID NO: 365994 - DNA, 428 bp, Zea mays
caatagggcatatacgtataaccattacgaaatctacaagggcacgctgataatgtttgcaaagcaaactgacatgaaaagtaccaaagagagcatggaaccaattaaagaatctaaagagtacaaaattaactggtttgctaagacaaaattcgtgccgatgtcctgcggagaaaatatgtggcagcttcgatccacctcaatggcagagcgaagagcgctcgaatgtgccacttatttacagacatacgtcaaatacgtggggcactgagtacctgtgtgtccaagcgaagagtgcaagtgaaggatctgccgtcgtgggttgtgacggtcacgtcctggcctggactgagctcggcggtgctggaaggaggtggatggtgtaacgctcacgtccggtgaggccgagtgaatcggcatcctctcct

SEQ ID NO: 365995 - DNA, 378 bp, Zea mays
agggcagattaacttaattcaaatgcatataagcgtattaaagcatgacacgtcgccaccacattgtgtttacacgatgaacaccagctaacacaacaatatgatacgcatagattacgtcagatcctatcccttagttataatgcaaagagctgatgcctttctccagttggacctaagccccctcttagaattcccgaacaacacttaggctagtttggcacctccatttccccaaggtattccctcccaggggaaaatgaactaatttttcttaggaaaatagaaatcccttaaaaaaataaggttgtcaatccttggaaaaatgaggtggccaaactagccctgaggcaacgcaatctagtaccctaaatttaa

SEQ ID NO: 365996 - DNA, 83 bp, Zea mays
gagatgtctgaactgcaggaagagaagaacaaaagagggattttagaccgagctgagtatgacagaaggcccagggaaaggag

SEQ ID NO: 365997 - DNA, 347 bp, Zea mays
  unsure (1)..(347): unsure at all n locations
ttnnttttttttttttcnnnnnnggcangcgaacatttagcatgatcccttatctccggccaattgatgatctgttgaatacatacttaatcagtgtagcatgggcctccattctctccacaataacattgcttgtactacatcatcatatttcttgctttcatacaacaactagcaaaaaaaatgctacatgttagatggccacatagctagacatactaggacatgactaggaaggctaacaggaacaaaatccggtgaagggagaacgctggaatgcggctcgaggcaacgcctctagatggtggcccttctaggcggatatagtcatacatgaccccggcgac

SEQ ID NO: 365998 - DNA, 410 bp, Zea mays
ggaagacaggatacaggagtttctcactaaacatcaggtttcagaaatgtccacactccacaatccagttgaacacgcctaggctgcacttcactctgcagtagctgaatcagttcagtttcaggccggcgcagtgacagtggcagacggccgcacggggggatacatgctagctgatgaggtgagcaatgagctagctagtcgatgaggattgggctggacgaggtgtacccgccggcccgctcccggatctccgcggggatgtcggcgcggagcacctgcaccctgaacaccacgcgctccgccctgccgtccaccagctcgaagacgcacccgtcgccgagcttcagtctcgttgtccagcgcgaagccccgccacccggcctccaggcgctggatctgccgccccc

SEQ ID NO: 365999 - DNA, 273 bp, Zea mays
gtaatccgtgagctaacctgtgtgactgtgcgtgggttcctttctcctaccctgccgtcctcacctcagactagctcggagtcctccgtcgccgagcaaaggttccaccaaaagaccaaaccccaagtcctcgcagcatttgattctctgaccgattcagggacaccttcctcagagcaatacttaccagcgcgggcgtggctaccaaccgcagagtttccatgagcagatgcaaaccagtcgttggcgagagccctgcagcagtatggacct

SEQ ID NO: 366000 - DNA, 152 bp, Zea mays
gcgatgcttggtccataccccaagttcctaactgcgtgggggatgagcctaaggaggaggctacagctcaggaccagtactactacggcggtccggggcaggggcaggggccgctcggttccccacacggcctgctgctggcggtggtggtt

SEQ ID NO: 366001 - DNA, 106 bp, Zea mays
  unsure (1)..(106): unsure at all n locations
cccattcgnccgtacagatgcaaagaatcttatggaagcaggtaaagtcaggatggctgcgggaacatcgcatgaggcatatgcaccgctccctgaagccttctca

SEQ ID NO: 366002 - DNA, 269 bp, Zea mays
ttcttttttttttttttttttttttttttttttttttaaaaaaaaacactactcatgataatgtttctgagttttagtttgtcaaatgtcaagacctaaacgctttgagtttgagactacactacaacagttgctcagctcatctccctcccttttgacaccttgggtctggccatgtcgacaaagcatatgtgctccataaatttctcaaaagacaagggggcttaaactaatcttactcgggtactccccctcccttttcccccctt

SEQ ID NO: 366003 - DNA, 348 bp, Zea mays
ctcttttcgtgaaacaacgaaggaagaccttgggcggagacccattgcgtgtatctagtgagcaagggccatggggacgccgccgcctttcaaggattccgcccactgataccgcggtcggtggaccttcaacactttctgtctccgtgataattgccgaacctgcggacggacgctctgtcacgagcattcttggtactacatggatatcccgcagtatgggatatatacagacgtcagagtctgctacggatgctataacaaatcctccagacaaggacacgctgataatcccgagtcagctggtagcatttctggagcagctgactctttttcaaggctgagttt

SEQ ID NO: 366004 - DNA, 151 bp, Zea mays
caccatcctccgccgccgaattcgctcatctccggcttcacggtcgtcctgaagctttcgctgtccgcagatttcagtgttgcgggctctgcctttctcgcctatgccgcttgctcgcgttcttcgagacctgtcgttgtcctatctgcct

SEQ ID NO: 366005 - DNA, 89 bp, Zea mays
tcctcgtttttttcaaaacccaaacgctcacatagggcccttttaaaaccgctgttgcttttcctccaacggcgcggaatccccaccct

SEQ ID NO: 366006 - DNA, 213 bp, Zea mays
ggctgatgtgttcatcttctagaggatatcttgcgccagagtacaccattcaagggcagctgaacaaaaagagcgacgtctacagctttggtgtgctgctgccattgagatttttgctgttgaaccttaaacatctttcggcgtcattatctctgacttatttgatgacggactctttgtcacgagtattctttgtactacatggttttcccg

SEQ ID NO: 366007 - DNA, 362 bp, Zea mays
aagaacattctaaatagggttggggcccagttggggtctcaacaatacagtacatggcaatcgatgagctcatcacacgcgatgagttcactcatcacacgagagccacagaacataaaattgtcaacggagcaaattgcggatggaatggaacagaagaatttgacacactttagtttttttagccttgaagaatctctagaaccaatgcacacaacactagtttgcatccacacaacctttgaactcgaggaggctacatcatggagacatcagtttacaagatagcacagtactggtgtttgtacacaatccaatcaggcccaatcatcttcttggctgaacatcagacacaagagacc

SEQ ID NO: 366008 - DNA, 133 bp, Zea mays
aaagtcggttcctcccccgaccccggcgccccaccgcagccgccggctcccaccgcccggtgcaccccgtcacctctccaccaaccggatacccggacggatccgctcccacctggatcctgatccggggaag

SEQ ID NO: 366009 - DNA, 244 bp, Zea mays
agagcaaatttgtgggattatgtcgcttttcacctgctcggcttctttcagggagatctcgctcaaaagcctcgcggaagaacatacaatggcccaaatgacaacaacgcgtacattgcactatcagatttacaggcgcgcaaatcttacagacgtgggaaggttcttttggccactgccattcggtgcagcttctgtacagtcccggccagagaagccgcgccgttagtccgctacaaacaca

SEQ ID NO: 366010 - DNA, 373 bp, Zea mays
accgtgtgagaaccaatgaccacacacctgccgtgcgacattttaccaacagacagaggagtgaggccatggcatgatcttgctccgatgcatcatctactgcagctgtttgacaggttccttgcttgccgcaccaccgttgacgcgaaccacacgaggatggagactacaggccgtcctgtcactggaccgtacagtgctcgttcgcgcctgtgtatacggcccgtataaaggtggtgggcgtcggcggatggctgtaacatcgccttcaatcttatgatctgcagcggcctccatggcatcgatatttatgctataaataccgatttccaagcccttattaattcacaagcgctatattctttgcaaattg

SEQ ID NO: 366011 - DNA, 191 bp, Zea mays
ttattatataatataaaaaaaaaaaaaaaaaaaggggaaatttttaaaaaaaatatgtgttaaaaaaaaaaaaaaatttagtgtttaaagtttttaaatcttttttattggggggggttttttttggttcctttttttctttttttgtcttccttttgttttcgtttttttttttttttttctcttctctt

SEQ ID NO: 366012 - DNA, 259 bp, Zea mays
ccaattcttaccaagctgtcccatgaccactccaggggccattttaaagggggggggggtcagttactcatgcttgaacccaagcgcgaccgacatgccgacgactgctctcagacgcggcaccaaagacttacacgggcatcatggcgcaaaccaagctcggatagtccgactcgtcatgcccgaaggacaactttgccttgcacactgcgggcaaccggagaaagactatcaggtagtccaaagagagagctatcaa

SEQ ID NO: 366013 - DNA, 345 bp, Zea mays
ttttctttttattttttttttttttttttttttttttttgttttttttttttttggaaagagataagccaattttacaaccccccattggtccaaattaaagaacctggggggaggaaagaggtttaattaaccggaaaaaaaaagggggaggggaccccggccttaagattttaattttaaattagctggaagggcatccgcccttaaaaacgacgcagggttttatttttacaacagacagccaaggacggggggaaggccgggaaatttccatccgacaaccttgggcccgggggggcccgggggcggggcccacgcgtccggggacccgggggtcgacccg

SEQ ID NO: 366014 - DNA, 392 bp, Zea mays
gctactcccatttgtttcaccacctcacctgaacgggcagtgccctgcgcggctgcgcccagtgccggggcactgtagtgcctccctccgtccctcgttcccgtctcctcgcgcaccgaaccaaccccgtgcgaggccgaggccgtgacgcggcgagatcgagccagctagctagctccacgtatcacgcggcgggcgggcgagagccccatgaggcggtggctggcgggcacgcgccgccgccgcgctgtcgtgcctcgccatcgccatcgcgctgctgctgctgctactgcagctcgccgtcgttaccgaggggagggcgccgtcgttgccgcagccgcaggagcgcgcgcacggtgaccgtgagggccacgcccacgttcacgcgcgcc

SEQ ID NO: 366015 - DNA, 489 bp, Zea mays
cccacgcgtccgggcatcccggcctgtggccacatccatctcggcgcctcgcccgccacacccaacacgctgcaccgccgccgccgcttctcctcccccaccgcaccatcgccctgagtaccatcgcacacgccgccggggccgcatctctccccgttagggcccagctgaacactgtcgtcgcctccacctccgcgtttgggccaccgcaagagttcagggctcctctagggttcgagatcaaatccggccagcagagcattgccaaggagctcctctccatccccgatggcaccctcgccccaccaccgacgacgaatgggcgcttcagattcctgatcagcaggagagtcgttgaggctgagacgacgacacgaatgcggcaaggagcttcagattcactgccattagaaacttgcaggtaagaaatactgtggtggtttggacctcagttattggccagatgaagggcggaggccattatcagat

SEQ ID NO: 366016 - DNA, 493 bp, Zea mays
  unsure (1)..(493): unsure at all n locations
cggacgcgtgggggctccaccacagcaaggcggctgtagcggccatggagaggctgaacacgaagctgtacctgcagaactgctacatcatgaaggagaacgagcggctgcgcaaggcggccctgctgctgaaccaggagaaccaggcgctgctctccgagctcaagcaccgcctcgccaagtccgccgccggtggcggtggcggtggcagcaacagcaacgcggcagcggcgagccgcgcctcgcccaagcccggcgccgacgccgacgccgctgcgccgccgtctcatcatcaggccggcggcatgcctgcccccaagcccaagcccaagtaggctgcggctgcggctgcagtccgtcgcacggctgctgctgctgctgtcggatagtggtggccttatggtgtttgttttagcgatcactttaattagctcgngatgttacttagtttcaggaatgtttgtctagttttagttgatgggcactcatgtgt

SEQ ID NO: 366017 - DNA, 479 bp, Zea mays
  unsure (1)..(479): unsure at all n locations
cggacgcgtggggccgtcgaggcttggaggtctcatggtacccgatcccccctccccgctgcagagaaacaagcagccggcaaagcagatgagcaagtcctcctcgcatcggccgagcaagtcatcgacaccatcccacgctccgggacggttaactctgagtctgaccagccccttcgcgtcgccgctgcttctcttacttacggccgccgccgccgccgctgtgttcccctactccctgaccgccgcccgctcgtacggggcccgcggggaggctcctccgctctcctccccgacggtggagaccatggagagagcgcgcgccatctgggagctacccgccgcggggccggccagggcggtcctcttcgtcgcccacggctgccgctgccgcccggagaacttctggccgccgtccccgcgctgcccggngtgcgtcggcctgccagaggacgtcgccatcacggaccgcgcgctgc

SEQ ID NO: 366018 - DNA, 534 bp, Zea mays
caagtgtgttccatgcttttgtatggtgtatgctatttcaaaaggtgggttgtccatggtttattctcttggatcagaaagtgacaacagttctaagatactccaggtcaacgagagttctaacagtgaactttattcagataagtcatcagtatcagatccaactcgctcgatgggaatctggatagtcccccatctacacatcataattggtcacagtctttacaagaacacctctctagaagcacttcatctaccattggtaaagatcaaaggatcagtccttgtactgatggatctagtaacttggggatcttagacaaaaccccaaccatgagcagggcactgcaggaattgatgttgttagaggacgaggcaagcgctccttgtgctactggtcaaatttctgcatctactaatttgcctctctccgacaaagctctaactgtaaagagtgcgctgcaggaattgatgctttcagaggacaaggcaagcactcattgtgctagtggtcaaatatctggatctagtaac

SEQ ID NO: 366019 - DNA, 407 bp, Zea mays
cccacgcgtccgccaaaacccaaacgctcacatatggcccgccacagcccgctgctgcttctccgccgacggcgcggcatccccaccccgtcgtccctcctcgtcctccgccaccggcccttcgcctgctctccctccccacccgcaccctcaaccccctcgtccgcctcctctaagccccccgccctttccgcccgcctctccttcgtcttcgatcagctcgatgccctcgaccgctcccgctcctccgagctctcggcccgcgatgccgccctccgccgcatccagtcctggcgccgccccgtgccgccgtctgaggcaccgccgctggatgccgatccaggcccggagccggagcaggatggtcagaaggaagctgctctggcgtcggcatctgccgatgaggt

SEQ ID NO: 366020 - DNA, 267 bp, Zea mays
gtccaaggtgatggtgttatccaaggtgaagctgttgtctaagatcatggtgttgtccaaattgaagctgttgttcaagttggtccaagtggaagtttctcttccagtgcaaagcccaattatacgaacaagggagtctattttacaggacaacttgataagtcagcttgctatgctactaggagatggttagattgaaatccagtcacctcctaataatacaactcctaagaagtttctagtgaagaagctcacagcaagctgaag

SEQ ID NO: 366021 - DNA, 219 bp, Zea mays
cacacgggtccacattcacggctgtacattgggtccaccgatcagtgagaagtagccaggacactcgcgtcagtgcgggtcggtgggtccccggcgtccgacagccgcacggtcagatggaccggtcgacggcctttgggtgtcgtctggtcgctgtagatcctcggggtgaaaaaaaagggagaaaagctgctcagtaaaggcggtcccggacgagcg

SEQ ID NO: 366022 - DNA, 371 bp, Zea mays
gctataatatacagaaaggtgtttggaaatgtaggtaaaatctctgtatttaaaactaaagtattatcaatactgcagctgtttcaaagtattgcaaactttgctctccaccaaagttttcttctgtaaacaagcttgtgagcgtgcggtaccggcgatggcgtgggaccgagctgggttctgcggacacaatgccgaaaaggctgtcactggtgtacctatcgctcgttccaaacttccaatgctgcacggggctgtatgagtatgacagcttgggtgtacgtacgtgtacccaatgggtcagctttcatatgattctagctttattagttgcaataaccaactaccgctagctttagattgtatgatat

SEQ ID NO: 366023 - DNA, 375 bp, Zea mays
ctgccagcggtggaacccccaaccgaccactcgggcatcgaggagtacatatcccgctacgtgcagctgtactcgccccacgtcaaggcggccgtcgccgggttgacgtgcccggtggccggcgtcgttgtcgacatcttctgcacggcgctgttcgacgcggcgcaccagctcggcgtgccggcctacgtgtacctgatcaccagcgccgcgatgtgcgcgctcttgctgcgctccccgacgctcgacgaggaggtagccgtcgaggtcgagttcgagcaaatggaaggcggagtggacgtgccagggctgccgccggtgccggcgtcctgcctgccgacggggctggagaacagaaagatcccgacctatcgc

SEQ ID NO: 366024 - DNA, 115 bp, Zea mays
gaaaaaacccgggggttcaaagaccctccggaggaattaactttaagaacaagcaaagccgggaattctttacacatgattccccaacatcaccacacctggtacaacaaaaact

SEQ ID NO: 366025 - DNA, 439 bp, Zea mays
ctgatggttgtgtaaaaagtcttgagtcattcgagattcagttatttgagctatggacaacaattgtggggaattctagattagcaaaggttattgggggaaacattaaggagctagcatactatactatagccttgcaacagataactgaagaacaggtgcaaaactggtcacgcgatgctaaccagtatgttgctgatgaggatgacctaacctatagctgtcgtgtgtctggatctcttttgctggaagagctagtaacagcttatgaagattatggaattgactcaattgtggaagcttcacaaatgcgttttcatgaatcacgagaattgaaggaagcgggttctgctgactggtggagactgcatgaagcatcactttttgctttaggttcactgtcagaacagttgtgtgaagcacaggattctggtttgac

SEQ ID NO: 366026 - DNA, 359 bp, Zea mays
gcgattgtcgttgtactcacccacctcgcgcgagatgctcgccgccattgccgtgaatcgtggacgaccgccttccagcccgagccgagcccacggaggataagtgggagcactcccctgctccctccttcgcccacccagctttctcctcttcctcgtgcaatccgcctggtggtcgaccgctcggtctccatctcccaagccgtcggaccggcctcctcccagccaccatgggccctgctcctcttcagcttcccctccgcgcaggctcacctttggtcgtcgtgaggacaccagcaggctccaaatccgaacgctcgtgctccaactttggccggtcaccatcctctacaccgaga

SEQ ID NO: 366027 - DNA, 232 bp, Zea mays
gggaaaaaacccaaacaactgccaaccattaacaggaaaacgggccggccaaatttttcgggggccagacatataggggacaatgcaagggccaacccgccaggaaatgcccggacgaaacaaactgggggggggaaaatggtttccccatttgggccttccccaagaagaaccacgaagctttttaggaccttgaagggagcacaacccaggcctttttcaaataaaagaa

SEQ ID NO: 366028 - DNA, 83 bp, Zea mays
caccctaagaagaagatcaagctccggcgaggcaagttgttagaggcgacgtgccagatggccgggctcttcggccagcgatc

SEQ ID NO: 366029 - DNA, 166 bp, Zea mays
  unsure (1)..(166): unsure at all n locations
ccngggacaaacaaaggccagggtattgatggatggcaagggagggacaaacaaatgccagccaattgatggatagacagccgactggacagacaaatgctaggagtatgcttgcttcctttaaagagagcacggaggccgccgggaccgataaggacccgaactt

SEQ ID NO: 366030 - DNA, 54 bp, Zea mays
cctaccgaattccctgcgattcctcttcactggtcttcttttttccccctaggg

SEQ ID NO: 366031 - DNA, 132 bp, Zea mays
ccctctcgtccgcccacgcgtccgcccacgcgtccgcagaggtgggctggcttctcctccccctcttaccaagtcctcctcgggttagggttccttagggttctgtggaggggcgatggcgccggctgatgc

SEQ ID NO: 366032 - DNA, 89 bp, Zea mays
atgcaaggcttaggtttgaaatctagtgctggaaacagaacaaaatgtcttgggtatgtaacttgttcgaaacaagcagcaaagctgaa

SEQ ID NO: 366033 - DNA, 52 bp, Zea mays
cctactcgtccgcggtcacgacgttgttcacccgggggttcttgaaacagac

SEQ ID NO: 366034 - DNA, 161 bp, Zea mays
cccacaaacatattgctgtggcgccctgtcaacaggcgcatgttgcaatgaaataaaagaccgatgaacaactcaaaaagatcaaaaacctgagaaccaaaaaacccaggcgtaatgtttttttcccacactccaggtgataatggataaggacttacata

SEQ ID NO: 366035 - DNA, 360 bp, Zea mays
caaaactctacgtgctcatcggcatgtcggcagcatattacatttctcatcgactcgaagatagtaacacgaacagcgtgggaaaggcgtacaagtacacagtgcacgtaggcacgagacacaacacactctcgacgacggaccaacggcgccgttcccggttccggcgttcaccgtccgcctgttttcagaaaatcgcgggaagccggtttagcgggaagaggtcgcgcaggtcctggaagtagtcgttctcctgcaccggcgacgcggcccagctgggcgcgtcgtcagacgaggcgggctcggcgacggcggcggcggcattccacgacgcctccggcgacgacggctcggcgtaga

SEQ ID NO: 366036 - DNA, 330 bp, Zea mays
aaaaaaaaaaaagctcggccgtttttaaatcccatagggtcaactgattcggcctggggggggtcccccgaatttttaccttttttttgatggcccattgcccgctttaatttgccaaaggggccccttcatgttcggggattttgccacaaacacggttccgttacagcacagggttttgggggaacaatccatacaggggtttttatgggggccccaacttcaggcaacaaaaccttggtttaccgccccagacttacttaagcaggtccaagctttttttttaaatacccataacgggatcctgggaatttaccacttttttttgac

SEQ ID NO: 366037 - DNA, 144 bp, Zea mays
actgttataatgctgatgttgattattacagacaattcttggctccattccaattttgtcacatttcttgcggttcagaaattctttcaacattggaatggagccaagaattgtctgttataatgctgatgttgattattacag

SEQ ID NO: 366038 - DNA, 455 bp, Zea mays
ggggtccggtgtcgccgttggcgagggcgcggtggactccaaggaccttcagcagcagagcaaggcgctcgacaagctcactgatcatgtcgaggaccggcagctcgattcatcccgtgtccaatccgaatattggagatgtgccttcaacaatctacgctcgattgtctccagatgagcaactcactgcagaaacaagatacacctcttgacatctgaaagaaacggttcgaacacatacggcaagaacaatgagtcgacgatccgcaaacagcagatgcagacgaatctgcaaatggagggtggacaaacgcacgtaccgtggaggcggacgccagcgcggttgagggtggttgacgcgatcgggacgccagcgagggggccctggccaccgtcgcgtcggtgggccaggagcgctcctgcaccacgagcgcgcagatctgagaagggaggac

SEQ ID NO: 366039 - DNA, 227 bp, Zea mays
agtctctcatctctccgcccaaaaccctacgccgccgccgccgccgccgccgcccgtacctagtcgccgtgggtcgccggcgcgtccatggacgcacgctaataagacgctcgctggtctgttccgaatcctgcgcctgtgtctcgcgctctcggcggcggcggcgggataaaaacgctgcatacaggtaatctcttattgctgctctgtgtttctgttgcgcgtta

SEQ ID NO: 366040 - DNA, 344 bp, Zea mays
gggaccaagaacctatcatcctgatttgagaccagcatatgtcaatgtacaacaagtctatcgaaatccacaagccagaagagatgtagtctgaatctatacaaatcaacagccctaacaaacaactgaccaaacaaaagattaagcaaaaataaactacgagctagacaaaagaataactcaaaaatctcaaattaacaacctctaaaaggaagtgggggtataaggttctggagtatggccacgtaggtttgcaggtagatcccagcagtccacagcagatgttatttccattccagcaatccaaagctcaggctccactctgctactctgaatgagatcct

SEQ ID NO: 366041 - DNA, 308 bp, Zea mays
ttcccttttttttgtcttattcttttatctttttttttttttttggtttttggaacccgaattccgggcttgtacacactgaagctcgccacaggtccatggggaagaaacaaactagacacctcatctgacgaaggtagggaggaagaacaggtatatattgttttatttacactcgggacggcatgctaaaaggctgaggaatcgcccggaagtgcgcccggagtcgcgatgcaaggggccggcatcagtaggagatgtcgacgagcgcgaccatggggtgcgcgacgacgggatccccgtgcgcc

SEQ ID NO: 366042 - DNA, 150 bp, Zea mays
ctcctcgcctacatccctcagagctcagatgcagccgccggcgaccgagatgcacccggccgccgacgccgccacctccgccgccaccgcgcaggccgacactactgctcgcgccgccgtccccgcatccgatccacccccgcccccgcc

SEQ ID NO: 366043 - DNA, 123 bp, Zea mays
ttctctcgtaagagtgaggcccagaaatcgaggggcaaaaaggagagggagagaccgaatacagccgcttctgttctgtgagggggaaaaaaagagaaagagagggacagagagagagagagg

SEQ ID NO: 366044 - DNA, 356 bp, Zea mays
ctattcgccaccattgaaaaggtgtaacacaatgatacaaagctcccaagtccgatgtacatcacaggtaaaacattctcagttcgacaagctactatatgcaccatgtaaaatatcactccgatcacctatatcatataccatctccgtgaaacgagtacctcatggtaggctataaaatgtcttcgacgcctaaggcctgatctacatgtagaaagggaagcacaaaatttcctttacaaactacaccgctgaagcgaagttgctgatccgttaatccactattgctcagtcagcaacttgctcaactacagcttttatgctgatggttcttcatttttcgtaccccactgttc

SEQ ID NO: 366045 - DNA, 448 bp, Zea mays
gcttcatgtaacgacctttctgtcagcccaacgactggcacaaccaatgaaacaactgctgtggtgccagctacatcaacatctgctgcggctcgcctaggatctattctacctgatcttttgaatactgtggatgctacggagagagaccaacagggagcccaacagctggacgccttgattgctaacgatggcgctgatgaggacattcaggctgatattatggaagttcctgatatcttgcgtaggagcgtgagccgggatgaggctgcattagcagctgcacaaacggttgcccagagtgtgtacgagagcacatccgataccacttatgtctcctgtcttgtagcaagcctagttgcaacactagatgcctgcagcttgtcgcaaagaggtaacaagaggggtaacatgttgagatgtagagacggatgttgacattgagatc

SEQ ID NO: 366046 - DNA, 201 bp, Zea mays
ccctctcgtccggcctctctctctctgtctctctctctcgcctccctctcgcctccctctcgacgacgatctcaggcgctcgcggggagtcgagtcgagaccagcttcgttccttcataaaaagctcacttagttgtcgtccccgcccctacagggagaccaacttgtgggaccacagcatgctaatgagcgcttgaatgt

SEQ ID NO: 366047 - DNA, 511 bp, Zea mays
  unsure (1)..(511): unsure at all n locations
gagataatctcaatccaaagagagccttctccaccgctcttgctcgtccaaccttctccatcgtctcaccttaggtttcgctccccgccgccgccgccatgatgccgcagcagcagcagcccggcatggcccctcctcctccacaggccgcccccggagcgccgccacactggggcggcatcccgccgcctatggcccctcagcatcagtacgcgccaccaccgaccatcagggccccgcccccgccgcagatgtggggccaggcgcccccgcccccgcccccgcctcaggccgcgtacggtcaggcgcccccgccgccccaggccgcgtatggccaggcgctcccaccaccccaggccgcgtacggccaggcgcctcccccgccacaggccgcctactacggggcggtacccgcgcccgcggcggtggccgcggcacctgtcgggcccagcgaggtcaggacgctctggatcggngatctgcagtactggatggacgataactacatcta

SEQ ID NO: 366048 - DNA, 331 bp, Zea mays
  unsure (1)..(331): unsure at all n locations
gcggtcttggtcgaagagcaggagaggcccgagaagaaaggaggcggaggcggcttcttctcgttcttcggcggcaggtgatgagtcaagtcagtctttaggctgtagatggtgtacaggctcggagtttatgaatgctttctaggctagtgcccgattcattctgtcgttattgtgttgatgagacttgatactactagtcgcttgcattggacctgaactacaagttgtactaggcggctgatccacatccgaatacactccttgattgagctgctagttggtggccgggnaaaaaaaaaaaacaaaacaaaaaaaaaaaaaaaataaa

SEQ ID NO: 366049 - DNA, 88 bp, Zea mays
ctctgctcgcggacgcgggcggctcgagtcgcaccccagatcccaatgcgccccgccgcgccgcactaggccgcggaacggaagctag

SEQ ID NO: 366050 - DNA, 433 bp, Zea mays
tgtccttagtctttacccttcatatcgcgtgaagtctaaaaaattcataaaaaactttaaaatcggcctctaaatataggagatttggattcattcacattccctcactctccaattcgctcgtcttccttcatatggtagtctctcactctctgttttcaactaagatggagcccaaacttccaccgacttgatcaacgatcaatatccacaactttttgacacaacctcccattgtggggtaggtcttcttcgatagcatttctaccgtacatcatcatcataaggacgtttttgcctgtctctgctgcctcatactataacctctctttccatacccataatctcatcctttgtatctcgaccgacccttcacgaatgctccggttctctaatgatgaaactactaccatcgacgctccttttaccaccg

SEQ ID NO: 366051 - DNA, 505 bp, Zea mays
tttctcatactatgttctgcctccgcaccctccgatcgcccgccgcgtccgattcccctgaccccgcctcgcccgcaatctccgccgccgcgcccgcgacatccatcacccccacccgcgacatcccgcctcgcacgccatcaactcgcagcggcccttctccgaacgtggtttgttttttcgtttgctcgagcagccagccgactcgtctccagcaatgcggccggggtcggctcgctggaggtgggcgtcgccgccgacacctccaacgcctccaggcagggattaggtgagccgtcggctaatcactcgtcattgggaggatctcctcctcccgttcagatttgggcaagaaaggcccgggcgcgatgtccatggccgaggaggggagtgaggccgaggaggggagtgaggccgaggcgctcgagaaagacggcagcaaggcttctttacctttggtgccaggtaaacaccacgggcaagggcgcaaagcatcgcgcgttgg

SEQ ID NO: 366052 - DNA, 279 bp, Zea mays
aatcactagtaaccattggttcggtctttcatatttcataagacactatggtgctgtttggttcaatagaatgtaaggtgatttgattacaacagtaactgattacgttggagcgtgtttgtttaagccacaacataatctcttacgctgaaccaaacaatccaagtaatagcttactttttaaaatttacagtgttatcggataacgtttacattaccttttcaaatttcacaaccaaacggttcctagggttagatccctcaggctcctcatcaagt

SEQ ID NO: 366053 - DNA, 108 bp, Zea mays
ccctcgcgtccgcaggagctccctcaaccctggcttcttttggttcatcgtcacatcgggtcgcctccgacgccggtacccttatcatagctcccgtacctcgtcacc

SEQ ID NO: 366054 - DNA, 150 bp, Zea mays
cacactagccaccctctgttctcctcttccgtggcggactagcggcgcactggtgtggtgctcctccaagctctggtctgctccgcgccccgcctccccgtcgaccgtcgactttggccccgccccccgctctaggaagcgtgctcacct

SEQ ID NO: 366055 - DNA, 81 bp, Zea mays
  unsure (1)..(81): unsure at all n locations
cccacgtgnctcggatcgtgctaattctactactacttcggaaccgttgccgntcccggcgccttggaccatcaactaccg

SEQ ID NO: 366056 - DNA, 75 bp, Zea mays
gtaggctccacctccccctccggttcgggttcgggttcgtgaggttctccggggttcgggctcgtggccgagcgg

SEQ ID NO: 366057 - DNA, 94 bp, Zea mays
cctcgcttccggcgccattggccagctagagccaaccatatgagcttgcagttactgagagtgcgcgagagagagaggatgatgcctcccccct

SEQ ID NO: 366058 - DNA, 73 bp, Zea mays
acctcctgcgtcagacgcacactgacggagagtgatcactgatttcaggtcatggcaaccgcaactgaggaag

SEQ ID NO: 366059 - DNA, 63 bp, Zea mays
cctcgcgtccgcccacgcgtccggcgagaatgacagctcccatgcagttcagcatggctttga

SEQ ID NO: 366060 - DNA, 82 bp, Zea mays
agattaataggaagttcactgagactgtggaacttcagattggtctgaagaattatgatccacagatggacaagcgtctcag

SEQ ID NO: 366061 - DNA, 312 bp, Zea mays
cttaaacagagggagtttttataccaggaggggttagatgaccaacaacagtacaattacacaagcattaaagacaatttccccactgccggctaatactgattactaattgatcaaaaagaccaggtacaaattgcaaactcctttagatcccaataactttcaaccttcaaagaggttttcaatctgaagatgccaaccacaagaccacagaatgagttccagggctatcccatttcatgtctatttacatgcatgtatgaagcaaaaccgcatcaattatagtaccaattcgtgcgcagcttctggctt

SEQ ID NO: 366062 - DNA, 126 bp, Zea mays
gaagggcctatagtcaacattagggtcttgttgaaatcaggggcatgaaacaaatgagggttgaactggaactattacgtttcctttgtgagaggattgttaagggtgaaaaagtgaagaaagatt

SEQ ID NO: 366063 - DNA, 125 bp, Zea mays
tgccctcgcgtccggcaactgcaaagcagcaagctctactcttcttctgtactgaacgtgtgactagataacaataagcgtgaaccatggcggacgagtacggacgcagcggatacggataggtc

SEQ ID NO: 366064 - DNA, 159 bp, Zea mays
gatggaactcgctggggatcttcgaagcattctaccgttcggtagagcgctgagagggaactcgctgctgattcagcgtgtgatatgtggtatgagtgagcgcgtgggggcttcggcaggtccggcgtcgttgacgactacgacagcgtattcattagc

SEQ ID NO: 366065 - DNA, 119 bp, Zea mays
ccctcgcgttcggcggaggcagcagtcaccgattctgaatatgggagcgaacctgggtaccgtggcgacgtggagctgggatatggagatgaaatcgacgaagaggaggaggatgggag

SEQ ID NO: 366066 - DNA, 78 bp, Zea mays
acgatgtctgcggcgggttcccgctgggcgtgctcaactgcactttcttggaggtgctttcgcttacatcctccggcg

SEQ ID NO: 366067 - DNA, 89 bp, Zea mays
ttttctttgtcccacccccagattcgcatgcgcgcttttttttttaccgccacaggcacagtgttagcgtctagcttagtcagctcgcc

SEQ ID NO: 366068 - DNA, 151 bp, Zea mays
ccttcgctttcgatcgaccagcgcgcggaggcgcgggagcagcctaggcgcggccatggcggtcggactagcgcctgcgcgggggacccggcccaacggcgcgaggcacgggtcgagggggctaatttgagattactgctcgaagaagaca

SEQ ID NO: 366069 - DNA, 59 bp, Zea mays
cctgtattgcctcaatcaccccacactacccaggcagcgttgctcgaaaagatcagaca

SEQ ID NO: 366070 - DNA, 107 bp, Zea mays
tgccctctcgtccgcccacgcgtccgcccacgcgtccggtaagcttgcagatgctgatatgacattgttggtaaagatattgaagtcttggcctccacaaatgatgt

SEQ ID NO: 366071 - DNA, 274 bp, Zea mays
ccctcgcgtccgcccacgcgtccggtgagcctgctgccgtcttcttccgccgccgccgccgtcgtcttcgtccgtagatcagagagcggggaggaagaaaaagcgatcgatggcgtccaactacgtggacacgacgggcgaggagggacggttccacggtcctcacagccacagcaccagcacgaccccgacgggcggcgcggcggcggcggcggcatcgccgcgcaacttccggcgcagcttctcctccgcgtcctccgcgggccacagccac

SEQ ID NO: 366072 - DNA, 114 bp, Zea mays
ggttaacctcccggctccccgcagtccccctggcctcgcagatccgcggcctgcttcgttgctgccttgccagcaagcagtcgcgctcatcctcgcggacgccagcggcggggc

SEQ ID NO: 366073 - DNA, 59 bp, Zea mays
tgtctttatctgcatcccctgcgacagcggcactggtacatccagagcacttgcgctac

SEQ ID NO: 366074 - DNA, 380 bp, Zea mays
gagaacatccattccatggtggtactttgatctagtcagggtgccaattatacaacagtgcagcacagtaaagctacaaagagaattctccaaacgcgaggataagaggatatcagcaccagtagtcttaggaattgcagaggataagatacatgtcatccaacgaggaaaaaaggcgagggacaacttcatttccgtaccacaaagcacaataggatctgacagatggtaaaaagtgcagagaggctctaattctttcagagtatcttcctcactcagataactggagcaagcagtaagtgacaggcacccaactcggacagtttcagtgacaaatcctgtaagtctggctctccattccgcaatatgtcaatgataac

SEQ ID NO: 366075 - DNA, 204 bp, Zea mays
tgccctcgcgtccgcccacgcgtccgcaacattagtcgattttaccgggagttgcaataccatcatgtgtcacattgtttgtccactctttacccccttcaatgctgtgaaaagaaaggctaagtagctgtagcatgttatagtaggtgtatgtggggtaattcctcattagcttttatatcttgtcttatctctgtcttttta

SEQ ID NO: 366076 - DNA, 113 bp, Zea mays
tccctcgcgttcgcccacgcgtccgcccacgcgtccgtgctctggtgctcacctgcacctcgacgcgctacatcgaggcggggatagggctggcggagtggatcaagagggac
